(19) United States
(12) Patent Application Publication
(10) Pub. No.: US 2023/0331825 A1
(43) Pub. Date: Oct. 19, 2023

(54) SARS-COV-2 ASSOCIATED ANTIBODY COMPOSITIONS AND METHODS OF USE

(71) Applicant: Target Discovery Merger Sub II, LLC, Vancouver, WA (US)

(72) Inventors: Goran Rakocevic, Belgrade (RS); Daniele Biasci, Poole, Dorest (GB)

(21) Appl. No.: 18/042,639

(22) PCT Filed: Aug. 25, 2021
(86) PCT No.: PCT/US21/47526

§ 371 Date: Feb. 23, 2023

Related U.S. Application Data
(60) Provisional application No. 63/069,971, filed on Aug. 25, 2020.

(51) Int. Cl. C07K 16/10; G01N 33/531; G01N 33/569; A61P 31/14; A61K 45/06; A61K 39/42

(52) U.S. Cl. CPC C07K 16/1003; G01N 33/531; G01N 33/56983; A61P 31/14; A61K 45/06; A61K 39/42; G01N 2333/165; G01N 2469/10; C07K 2317/565; C07K 2317/34; C07K 2317/76

(57) ABSTRACT

The disclosure herein relates to novel antibodies and antigen binding fragments that are used in the treatment, prevention and diagnosis of COVID-19, the disease caused by SARS-CoV-2. The complete polypeptide and nucleic acid consensus sequences of the antibodies and antigen binding fragments disclosed herein are reconstructed in silico.

### CROSS REFERENCE

[0001] This application claims the benefit of U.S. Provisional Patent Application Ser. No. 63/069,971, filed on Aug. 25, 2020, titled “SARS-CoV-2 Associated Antibody Compositions and Methods of Use”, the contents of which are incorporated by reference in their entirety.

### SEQUENCE LISTING

[0002] The present application includes a Sequence Listing which has been submitted electronically in ASCII format and is hereby incorporated by reference in its entirety. Said ASCII copy, created on Aug. 20, 2021, is named “61631730601_sequencelisting.txt” and is 10,856,000 bytes in size.

### BACKGROUND OF THE INVENTION

[0003] COVID-19 is a human disease caused by a recently emerged strain of coronavirus, SARS-CoV-2. Antibodies with suitable paratope to bind to a viral epitope, packaged into an appropriate pharmaceutical delivery mechanism, may be effective at neutralizing the virus thereby slowing the spread of disease or reducing its burden.

### SUMMARY OF THE INVENTION

[0004] In one aspect, provided herein is an antibody or antigen-binding fragment thereof comprising at least one of: (a) a variable heavy chain complementarity-determining region CDR-H1, CDR-H2 and CDR-H3, wherein: (i) CDR-H1 comprises a reconstructed polypeptide consensus sequence selected from any one of SEQ ID NOs: 10001-11250, (ii) CDR-H2 comprises a reconstructed polypeptide consensus sequence selected from any one of SEQ ID NOs: 12501-13750, and (iii) CDR-H3 comprises a reconstructed polypeptide consensus sequence selected from any one of SEQ ID NOs: 15001-16250; and (b) a variable light chain complementarity-determining region CDR-L1, CDR-L2 and CDR-L3, wherein: (i) CDR-L1 comprises a reconstructed polypeptide consensus sequence selected from any one of SEQ ID NOs: 11251-12500, (ii) CDR-L2 comprises a reconstructed polypeptide consensus sequence selected from any one of SEQ ID NOs: 13751-15000, and (iii) CDR-L3 comprises a reconstructed polypeptide consensus sequence selected from any one of SEQ ID NOs: 16251-17500.

[0005] In one aspect of the present disclosure, provided herein is an antibody or antigen-binding fragment thereof comprising at least one of: (a) a variable heavy chain, wherein the variable heavy chain comprises a reconstructed polypeptide consensus sequence having at least 90% sequence identity to an amino acid sequence selected from any one of SEQ ID NOs: 17501-18750; and (b) a variable light chain, wherein the variable light chain comprises a reconstructed polypeptide consensus sequence having at least 90% sequence identity to an amino acid sequence selected from any one of SEQ ID NOs: 18751-20000.

[0006] In one aspect, provided herein is an antibody or antigen-binding fragment thereof that comprises: (a) a variable heavy chain complementarity-determining region CDR-H1, CDR-H2, and CDR-H3, wherein CDR-H1 comprises a reconstructed polypeptide consensus sequence selected from any one of SEQ ID NOs: 10001-11250, CDR-H2 comprises a reconstructed polypeptide consensus sequence selected from any one of SEQ ID NOs: 12501-13750, and CDR-H3 comprises a reconstructed polypeptide sequence selected from any one of SEQ ID NOs: 15001-16250; and (b) a variable light chain complementarity-determining region CDR-L1, CDR-L2, and CDR-L3, wherein CDR-L1 comprises a reconstructed polypeptide consensus sequence selected from any one of SEQ ID NOs: 11251-12500, CDR-L2 comprises a reconstructed polypeptide consensus sequence selected from any one of SEQ ID NOs: 13751-15000, and CDR-L3 comprises a reconstructed polypeptide sequence selected from any one of SEQ ID NOs: 16251-17500.

[0007] In one aspect, provided herein is an antibody or antigen-binding fragment thereof that comprises a variable heavy chain, wherein the variable heavy chain comprises a reconstructed polypeptide consensus sequence selected from any one of SEQ ID NOs: 17501-18750; and a variable light chain, wherein the variable light chain comprises a reconstructed polypeptide consensus sequence selected from any one of SEQ ID NOs: 18751-20000.

[0008] In one aspect, provided herein is an antibody or antigen-binding fragment thereof that comprises a variable heavy chain complementarity-determining region CDR-H1, CDR-H2, and CDR-H3, wherein CDR-H1 comprises a reconstructed polypeptide consensus sequence selected from any one of SEQ ID NOs: 10001-11250, CDR-H2 comprises a reconstructed polypeptide consensus sequence selected from any one of SEQ ID NOs: 12501-13750, and CDR-H3 comprises a reconstructed polypeptide sequence selected from any one of SEQ ID NOs: 15001-16250.

[0009] In one aspect, provided herein is an antibody or antigen-binding fragment thereof that comprises a variable light chain complementarity-determining region CDR-L1, CDR-L2, and CDR-L3, wherein CDR-L1 comprises a reconstructed polypeptide consensus sequence selected from any one of SEQ ID NOs: 11251-12500, CDR-L2 comprises a reconstructed polypeptide consensus sequence selected from any one of SEQ ID NOs: 13751-15000, and CDR-L3 comprises a reconstructed polypeptide sequence selected from any one of SEQ ID NOs: 16251-17500.

[0010] In one aspect, provided herein is an antibody or antigen-binding fragment thereof that comprises: a variable heavy chain complementarity-determining region CDR-H1, CDR-H2, and CDR-H3, wherein CDR-H1 comprises a reconstructed polypeptide consensus sequence selected from any one of SEQ ID NOs: 10001-11250, CDR-H2 comprises a reconstructed polypeptide consensus sequence selected from any one of SEQ ID NOs: 12501-13750, and CDR-H3 comprises a reconstructed polypeptide sequence selected from any one of SEQ ID NOs: 15001-16250; and a variable light chain complementarity-determining region CDR-L1, CDR-L2, and CDR-L3, wherein CDR-L1 comprises a reconstructed polypeptide consensus sequence selected from any one of SEQ ID NOs: 11251-12500, CDR-L2 comprises a reconstructed polypeptide consensus sequence selected from any one of SEQ ID NOs: 13751-15000, and CDR-L3 comprises a reconstructed polypeptide sequence selected from any one of SEQ ID NOs: 16251-17500.

[0011] In one aspect, provided herein is an antibody or antigen-binding fragment thereof that comprises a variable heavy chain, wherein the variable heavy chain comprises a reconstructed polypeptide consensus sequence selected from any one of SEQ ID NOS: 17501-18750.

[0012] In one aspect, provided herein is an antibody or antigen-binding fragment thereof that comprises a variable light chain, wherein the variable light chain comprises a reconstructed polypeptide consensus sequence selected from any of SEQ ID NOS: 18751-20000.

[0013] In one aspect, provided herein is an antibody or antigen-binding fragment thereof that comprises: (a) a variable heavy chain, wherein the variable heavy chain comprises a reconstructed polypeptide consensus sequence selected from any one of SEQ ID NOS: 17501-18750; and (b) an antibody or antigen-binding fragment thereof that comprises a variable light chain, wherein the variable light chain comprises a reconstructed polypeptide consensus sequence selected from any of SEQ ID NOS: 18751-20000.

[0014] In one aspect, provided herein is an antibody or antigen-binding fragment thereof that comprises: (i) a variable heavy chain complementarity-determining region CDR-H1, CDR-H2 and CDR-H3, wherein (a) the CDR-H1 comprises the amino acid sequence of SEQ ID NO: 10369, (b) the CDR-H2 comprises the amino acid sequence of SEQ ID NO: 12869, and (c) the CDR-H3 comprises the amino acid sequence of SEQ ID NO: 15369; (ii) a variable light chain complementarity-determining region CDR-L1, CDR-L2 and CDR-L3, wherein: (a) CDR-L1 comprises the amino acid sequence of SEQ ID NO: 11619, (b) CDR-L2 comprises the amino acid sequence of SEQ ID NO: 14119, and (c) CDR-L3 comprises the amino acid sequence of SEQ ID NO: 16619; or (iii) the variable heavy chain complementarity-determining region CDR-H1, CDR-H2 and CDR-H3 of (i), and the variable light chain complementarity-determining region CDR-L1, CDR-L2 and CDR-L3 of (ii).

[0015] In one aspect, provided herein is an antibody or antigen binding fragment thereof that comprises: (a) a variable heavy chain that comprises a polypeptide sequence having at least 90% sequence identity to an amino acid sequence of SEQ ID NO: 17869; (b) a variable light chain that comprises a polypeptide sequence having at least 90% sequence identity to an amino acid sequence of SEQ ID NO: 19119; or (c) the variable heavy chain of (a), and the variable light chain of (b).

[0016] In one aspect, provided herein is an antibody or antigen-binding fragment thereof that comprises: (i) a variable heavy chain complementarity-determining region CDR-H1, CDR-H2 and CDR-H3, wherein (a) the CDR-H1 comprises the amino acid sequence of SEQ ID NO: 10260, (b) the CDR-H2 comprises the amino acid sequence of SEQ ID NO: 12760, and (c) the CDR-H3 comprises the amino acid sequence of SEQ ID NO: 15260; (ii) a variable light chain complementarity-determining region CDR-L1, CDR-L2 and CDR-L3, wherein: (a) the CDR-L1 comprises the amino acid sequence of SEQ ID NO: 11510, (b) the CDR-L2 comprises the amino acid sequence of SEQ ID NO: 14010, and (c) the CDR-L3 comprises the amino acid sequence of SEQ ID NO: 16510; or the variable heavy chain complementarity-determining region CDR-H1, CDR-H2 and CDR-H3 of (i), and the variable light chain complementarity-determining region CDR-L1, CDR-L2 and CDR-L3 of (ii).

[0017] In one aspect, provided herein is an antibody or antigen binding fragment thereof that comprises: (a) a variable heavy chain that comprises a polypeptide sequence having at least 90% sequence identity to an amino acid sequence of SEQ ID NO: 17760; (b) a variable light chain that comprises a polypeptide sequence having at least 90% sequence identity to an amino acid sequence of SEQ ID NO: 19010; or (c) the variable heavy chain of (a), and the variable light chain of (b).

[0018] In one aspect, provided herein is an antibody or antigen-binding fragment thereof that comprises: (i) a variable heavy chain complementarity-determining region CDR-H1, CDR-H2 and CDR-H3, wherein (a) the CDR-H1 comprises the amino acid sequence of SEQ ID NO: 10705, (b) the CDR-H2 comprises the amino acid sequence of SEQ ID NO: 13205, and (c) the CDR-H3 comprises the amino acid sequence of SEQ ID NO: 15705; (ii) a variable light chain complementarity-determining region CDR-L1, CDR-L2 and CDR-L3, wherein: (a) the CDR-L1 comprises the amino acid sequence of SEQ ID NO: 11955, (b) the CDR-L2 comprises the amino acid sequence of SEQ ID NO: 14455, and (c) the CDR-L3 comprises the amino acid sequence of SEQ ID NO: 16955; or (iii) the variable heavy chain complementarity-determining region CDR-H1, CDR-H2 and CDR-H3 of (i), and the variable light chain complementarity-determining region CDR-L1, CDR-L2 and CDR-L3 of (ii).

[0019] In one aspect, provided herein is an antibody or antigen binding fragment thereof that comprises: (a) a variable heavy chain that comprises a polypeptide sequence having at least 90% sequence identity to an amino acid sequence of SEQ ID NO: 18205; (b) a variable light chain that comprises a polypeptide sequence having at least 90% sequence identity to an amino acid sequence of SEQ ID NO: 19455; or (c) the variable heavy chain of (a), and the variable light chain of (b).

[0020] In one aspect, provided herein is an antibody or antigen-binding fragment thereof that comprises: (i) a variable heavy chain complementarity-determining region CDR-H1, CDR-H2 and CDR-H3, wherein (a) the CDR-H1 comprises the amino acid sequence of SEQ ID NO: 10484, (b) the CDR-H2 comprises the amino acid sequence of SEQ ID NO: 12984, and (c) the CDR-H3 comprises the amino acid sequence of SEQ ID NO: 15484; (ii) a variable light chain complementarity-determining region CDR-L1, CDR-L2 and CDR-L3, wherein: (a) the CDR-L1 comprises the amino acid sequence of SEQ ID NO: 11734, (b) the CDR-L2 comprises the amino acid sequence of SEQ ID NO: 14234, and (c) the CDR-L3 comprises the amino acid sequence of SEQ ID NO: 16734; or (iii) the variable heavy chain complementarity-determining region CDR-H1, CDR-H2 and CDR-H3 of (i), and the variable light chain complementarity-determining region CDR-L1, CDR-L2 and CDR-L3 of (ii).

[0021] In one aspect, provided herein is an antibody or antigen binding fragment thereof that comprises: (a) a variable heavy chain that comprises a polypeptide sequence having at least 90% sequence identity to an amino acid sequence of SEQ ID NO: 17984; (b) a variable light chain that comprises a polypeptide sequence having at least 90% sequence identity to an amino acid sequence of SEQ ID NO: 19234; or (c) the variable heavy chain of (a), and the variable light chain of (b).

[0022] In one aspect, provided herein is an antibody or antigen-binding fragment thereof that comprises: (i) a variable heavy chain complementarity-determining region CDR-H1, CDR-H2 and CDR-H3, wherein (a) the CDR-H1 comprises the amino acid sequence of SEQ ID NO: 10291, (b) the CDR-H2 comprises the amino acid sequence of SEQ ID NO: 12791, and (c) the CDR-H3 comprises the amino acid sequence of SEQ ID NO: 15291; (ii) a variable light chain complementarity-determining region CDR-L1, CDR-L2 and CDR-L3, wherein: (a) the CDR-L1 comprises the amino acid sequence of SEQ ID NO: 11541, (b) the CDR-L2 comprises the amino acid sequence of SEQ ID NO: 14041, and (c) the CDR-L3 comprises the amino acid sequence of SEQ ID NO: 16541; or (iii) the variable heavy chain complementarity-determining region CDR-H1, CDR-H2 and CDR-H3 of (i), and the variable light chain complementarity-determining region CDR-L1, CDR-L2 and CDR-L3 of (ii).

[0023] In one aspect, provided herein is an antibody or antigen binding fragment thereof that comprises: (a) a variable heavy chain that comprises a polypeptide sequence having at least 90% sequence identity to an amino acid sequence of SEQ ID NO: 17791; (b) a variable light chain that comprises a polypeptide sequence having at least 90% sequence identity to an amino acid sequence of SEQ ID NO: 19041; or (c) the variable heavy chain of (a), and the variable light chain of (b).

[0024] In one aspect, provided herein is an antibody or antigen-binding fragment thereof that comprises: (i) a variable heavy chain complementarity-determining region CDR-H1, CDR-H2 and CDR-H3, wherein (a) the CDR-H1 comprises the amino acid sequence of SEQ ID NO: 10114, (b) the CDR-H2 comprises the amino acid sequence of SEQ ID NO: 12614, and (c) the CDR-H3 comprises the amino acid sequence of SEQ ID NO: 15114; (ii) a variable light chain complementarity-determining region CDR-L1, CDR-L2 and CDR-L3, wherein: (a) the CDR-L1 comprises the amino acid sequence of SEQ ID NO: 11364, (b) the CDR-L2 comprises the amino acid sequence of SEQ ID NO: 13864, and (c) the CDR-L3 comprises the amino acid sequence of SEQ ID NO: 16364; or (iii) the variable heavy chain complementarity-determining region CDR-H1, CDR-H2 and CDR-H3 of (i), and the variable light chain complementarity-determining region CDR-L1, CDR-L2 and CDR-L3 of (ii).

[0025] In one aspect, provided herein is an antibody or antigen binding fragment thereof that comprises: (a) a variable heavy chain that comprises a polypeptide sequence having at least 90% sequence identity to an amino acid sequence of SEQ ID NO: 17614; (b) a variable light chain that comprises a polypeptide sequence having at least 90% sequence identity to an amino acid sequence of SEQ ID NO: 18864; or (c) the variable heavy chain of (a), and the variable light chain of (b).

[0026] In one aspect, provided herein is an antibody or antigen-binding fragment thereof that comprises: (i) a variable heavy chain complementarity-determining region CDR-H1, CDR-H2 and CDR-H3, wherein (a) the CDR-H1 comprises the amino acid sequence of SEQ ID NO: 10394, (b) the CDR-H2 comprises the amino acid sequence of SEQ ID NO: 12894, and (c) the CDR-H3 comprises the amino acid sequence of SEQ ID NO: 15394; (ii) a variable light chain complementarity-determining region CDR-L1, CDR-L2 and CDR-L3, wherein: (a) the CDR-L1 comprises the amino acid sequence of SEQ ID NO: 11644, (b) the CDR-L2 comprises the amino acid sequence of SEQ ID NO: 14144, and (c) the CDR-L3 comprises the amino acid sequence of SEQ ID NO: 16644; or (iii) the variable heavy chain complementarity-determining region CDR-H1, CDR-H2 and CDR-H3 of (i), and the variable light chain complementarity-determining region CDR-L1, CDR-L2 and CDR-L3 of (ii).

[0027] In one aspect, provided herein is an antibody or antigen binding fragment thereof that comprises: (a) a variable heavy chain that comprises a polypeptide sequence having at least 90% sequence identity to an amino acid sequence of SEQ ID NO: 17894; (b) a variable light chain that comprises a polypeptide sequence having at least 90% sequence identity to an amino acid sequence of SEQ ID NO: 19144; or (c) the variable heavy chain of (a), and the variable light chain of (b).

[0028] In some embodiments of the aspects described above, the antibody comprises an IgG, IgA, IgM, or IgE antibody. In some embodiments, the IgG comprises IgG1, IgG2, IgG3, IgG4, IgGA1, or IgGA2. In some embodiments, the antibody comprises a bispecific antibody, a multispecific antibody, a multivalent antibody, a chimeric antibody, a human antibody, humanized antibody, a monoclonal antibody, a deimmunized antibody, or a combination thereof. In some embodiments, the antigen-binding fragment comprises a Fab, Fab′, Fab′-SH, Fv, scFv, F(ab′)2, a diabody, a linear antibody, a single domain antibody (sdAb), a camelid V_{H}H domain, or a multi-specific antibody formed from antibody fragments.

[0029] In some embodiments, the antibody or antigen-binding fragment thereof is recombinant or synthetic. In some embodiments, the antibody or antigen-binding fragment thereof further comprise an enzyme, a substrate, cofactor, a fluorescent marker, a chemiluminescent marker, a peptide tag, a magnetic particle, a drug, a toxin, or a combination thereof. In some embodiments, the antibody or antigen-binding fragment thereof binds to a SARS-CoV-2. In some embodiments, the antibody or antigen binding fragment thereof binds a SARS-Cov-2 spike (S) protein, or a homolog thereof, or a variant thereof. In some embodiments, the antibody or antigen binding fragment thereof binds subunit 51, or a subunit S2 of the SARS-Cov-2 spike (S) protein. In some embodiments, the antibody or antigen binding fragment thereof binds a receptor binding domain of the subunit 51. In some embodiments, the antibody or antigen-binding fragment thereof inhibits infection from SARS-CoV-2. In some embodiments, the antibody or antigen-binding fragment thereof inhibits binding of a receptor binding domain of a subunit 51 of a SARS-CoV-2 with a receptor on a host cell. In some embodiments, the antibody or antigen-binding fragment thereof inhibits entry of a SARS-CoV-2 in a host cell. In some embodiments, the antibody or antigen-binding fragment is useful for treating COVID-19.

[0030] In one aspect, provided herein is a pharmaceutical composition or a medicament that comprises the antibody or antigen-binding fragment thereof of any one of aspects described above, and a pharmaceutically acceptable carrier, excipient or diluent.

[0031] In some embodiments, the pharmaceutical composition or medicament is formulated for administration via a subcutaneous, intravenous, intradermal, intraperitoneal, intramuscular, intracerebroventricular, intracranial, intracelial, or intracerebellar administration route. In some embodiments, the pharmaceutical composition or medicament is in an aqueous or in a lyophilized form. In some embodiments, the pharmaceutical composition or medicament is contained in a delivery device selected from the group consisting of a syringe, a blunt tip syringe, a catheter, and an implantable pump. In some embodiments, the pharmaceutical composition or medicament comprises an additional therapeutic agent. In some embodiments, the additional therapeutic agent is a nonsteroidal anti-inflammatory drug, a corticosteroid, a dietary supplement such as an antioxidant, a small molecule, a therapeutic vaccine, an immunomodulator, an angiotensin-converting enzyme [ACE] inhibitor, an angiotensin receptor blockers [ARBs], a HMG-CoA Reductase Inhibitors (Statins), an anti-viral agent, acetaminophen, or an additional anti-SARS-CoV-2 antibody.

[0032] In one aspect, provided herein is a method for preventing a SARS-CoV-2 infection or COVID-19 in a subject in need thereof, the method comprising administering to the subject a therapeutically effective amount of either the antibody or antigen binding fragment of any one of aspects described above, or the pharmaceutical composition of any one of aspects described above.

[0033] In one aspect, provided herein is a method for treating a SARS-CoV-2 infection or COVID-19 in a subject in need thereof, the method comprising administering to the subject, (a) the antibody or antigen-binding fragment thereof of any one of aspects described above; or (b) the pharmaceutical composition or medicament of any one of aspects described above.

[0034] In some embodiments, the antibody or antigen-binding fragment thereof binds to the SARS-CoV-2. In some embodiments, the antibody or antigen binding fragment thereof binds a SARS-Cov-2 spike (S) protein, or a homolog thereof, or a variant thereof. In some embodiments, the antibody or antigen binding fragment thereof binds subunit S1, or a subunit S2 of the SARS-Cov-2 spike (S) protein. In some embodiments, the antibody or antigen binding fragment thereof binds a receptor binding domain of the subunit S1. In some embodiments, the antibody or antigen-binding fragment thereof inhibits binding of a receptor binding domain of a subunit S1 of the SARS-CoV-2 with a receptor on a host cell. In some embodiments, the antibody or antigen-binding fragment thereof inhibits entry of the SARS-CoV-2 in a host cell. In some embodiments, the antibody or antigen-binding fragment thereof inhibits fusion of the SARS-CoV-2 membrane with a host cell membrane. In some embodiments, the antibody or antigen binding fragment thereof neutralizes the SARS-CoV-2.

[0035] In some embodiments, of the methods described herein the administering reduces one or more symptoms associated with a SARS-CoV-2 infection. In some embodiments, the administering reduces viral load in the subject. In some embodiments, the antibody or antigen binding fragment thereof is administered to the subject with an additional therapeutic agent. In some embodiments, the additional therapeutic agent is a nonsteroidal anti-inflammatory drug, a corticosteroid, a dietary supplement such as an antioxidant, a small molecule, a therapeutic vaccine, an immunomodulator, an angiotensin-converting enzyme [ACE] inhibitor, an angiotensin receptor blockers [ARBs], a HMG-CoA Reductase Inhibitors (Statins), an anti-viral agent, acetaminophen, or an additional anti-SARS-CoV-2 antibody.

[0036] Provided herein is a hybridoma that produces the antibody or antigen-binding fragment thereof of any one of aspects described above.

[0037] Provided herein is a fusion protein that comprises the antibody or antigen-binding fragment thereof of any one of aspects above.

[0038] Provided herein is an immunoconjugate comprising the antibody or the antigen binding fragment thereof of any one of aspects above, and a therapeutic agent.

[0039] In one aspect, provided herein is an isolated nucleic acid comprising at least one of: (a) a nucleic acid sequence encoding CDR-H1, wherein the nucleic acid sequence is selected from SEQ ID NOs: 1-1250; (b) a nucleic acid sequence encoding CDR-L1, wherein the nucleic acid sequence is selected from SEQ ID NOs: 1251-2500; (c) a nucleic acid sequence encoding CDR-H2, wherein the nucleic acid sequence is selected from SEQ ID NOs: 2501-3750; (d) a nucleic acid sequence encoding CDR-L2, wherein the nucleic acid sequence is selected from SEQ ID NOs: 3751-5000; (e) a nucleic acid sequence encoding CDR-H3, wherein the nucleic acid sequence is selected from SEQ ID NOs: 5001-6250; or (f) a nucleic acid sequence encoding CDR-L3, wherein the nucleic acid sequence is selected from SEQ ID NOs: 6251-7500.

[0040] In one aspect, provided herein is an isolated nucleic acid comprising at least one of: (a) a nucleic acid sequence encoding a heavy chain polypeptide of an antibody, wherein the nucleic acid sequence is selected from any one of SEQ ID NOs: 7501-8750, and (b) a nucleic acid sequence encoding a light chain polypeptide of an antibody, wherein the nucleic acid sequence is selected from any one of SEQ ID NOs: 8751-10000.

[0041] In one aspect, provided herein is an isolated nucleic acid that comprises a reconstructed nucleic acid consensus sequence encoding a heavy chain polypeptide of an antibody, wherein the nucleic acid consensus sequence is selected from any of SEQ ID NOS: 7501-8750.

[0042] In one aspect, provided herein is an isolated nucleic acid that comprises a reconstructed nucleic acid consensus sequence encoding a light chain polypeptide of an antibody, wherein the nucleic acid consensus sequence is selected from any of SEQ ID NOS: 8751-10000.

[0043] In one aspect, provided herein is an expression vector comprising the isolated nucleic acid molecule of any one of aspects above. In some embodiments, the isolated nucleic acid is operably linked to a regulatory control sequence.

[0044] Provided herein is a host cell comprising the expression vector of any one of aspects above, or the isolated nucleic acid of any one of aspects above. In some embodiments, said host cell is a mammalian cell, or a bacterial cell. In some embodiments, said bacterial cell is an Escherichia. coli cell. In some embodiments, the expression of the nucleic acid is under control of one or more inducible promoters.

[0045] In one aspect, provided herein is a method of diagnosing a subject as being infected with a SARS-Cov-2 virus or suspected of being infected with a SARS-Cov-2 virus, the method comprising contacting a sample obtained from the subject with the antibody or the antigen-binding fragment of any one of aspects above; detecting the presence or absence of the antibody or the antigen-binding fragment; and diagnosing the subject as being infected with a SARS-CoV-2 virus when the presence of the antibody or the antigen-binding fragment is detected. In some embodiments, the sample comprises a nasal swab, a tissue sample, saliva, or blood. In some embodiments, detecting the presence or absence of the antibody or the antigen-binding fragment comprises an enzyme linked immunosorbent assay (ELISA), an immunospot assay, a lateral flow assay, flow cytometry, immunohistochemistry, or a western blot.

[0046] In one aspect, provided herein is an immunohistochemical assay comprising; (a) contacting a sample obtained from a subject with the antibody or antigen binding fragment thereof of any one of aspects above under conditions permitting selective binding of the antibody or antigen binding fragment thereof with a SARS-CoV-2, to form an antibody-antigen complex; and (b) detecting the presence or absence of the antibody-antigen complex by an immunodetection method. In some embodiments, the sample is a nasal swab, a tissue sample, saliva, or blood. In some embodiments, the sample is obtained from a subject suspected to be suffering from a SARS-CoV-2 infection or COVID-19.

[0047] Provided herein is a method of inhibiting binding of a SARS-CoV-2 with a host cell, or inhibiting entry of a SARS-CoV2 in a host cell, the method comprising contacting the SARS-CoV-2 with the antibody or antigen binding fragment thereof of any one of aspects described above. In some embodiments, the antibody or antigen binding fragment thereof binds a SARS-Cov-2 spike (S) protein, or a homolog thereof, or a variant thereof. In some embodiments, the antibody or antigen binding fragment thereof binds subunit S1, or a subunit S2 of the SARS-Cov-2 spike (S) protein. In some embodiments, the antibody or antigen binding fragment thereof binds a receptor binding domain of the subunit S1. In some embodiments, the antibody or antigen-binding fragment thereof inhibits binding of a receptor binding domain of a subunit S1 of the SARS-CoV-2 with a receptor on the host cell. In some embodiments, the antibody or antigen-binding fragment thereof inhibits fusion of the SARS-CoV-2 membrane with the host cell membrane. In some embodiments, the antibody or antigen binding fragment thereof neutralizes the SARS-CoV-2.

[0048] Provided herein is a method of producing an antibody or an antigen binding fragment thereof, the method comprising: (a) culturing the host cell of any one of aspects above, in a medium under conditions permitting expression of a polypeptide encoded by the isolated nucleic acid, and assembling of the antibody or an antigen binding fragment thereof; and (b) purifying the antibody or antigen binding fragment thereof from the cultured cell or the cell culturing medium.

[0049] In one aspect, provided herein is an antibody or antigen-binding fragment thereof comprising at least one of: (a) a variable heavy chain complementarity-determining region CDR-H1, CDR-H2 and CDR-H3, wherein: (i) CDR-H1 comprises a polypeptide sequence selected from any one of SEQ ID NOs: 10001-11250, (ii) CDR-H2 comprises a polypeptide sequence selected from any one of SEQ ID NOs: 12501-13750, and (iii) CDR-H3 comprises a polypeptide sequence selected from any one of SEQ ID NOs: 15001-16250; and (b) a variable light chain complementarity-determining region CDR-L1, CDR-L2 and CDR-L3, wherein: (i) CDR-L1 comprises a polypeptide sequence selected from any one of SEQ ID NOs: 11251-12500, (ii) CDR-L2 comprises a polypeptide sequence selected from any one of SEQ ID NOs: 13751-15000, and (iii) CDR-L3 comprises a polypeptide sequence selected from any one of SEQ ID NOs: 16251-17500.

[0050] In one aspect, provided herein is an antibody or antigen-binding fragment thereof comprising at least one of: (a) a variable heavy chain, wherein the variable heavy chain comprises a polypeptide sequence having at least 90% sequence identity to an amino acid sequence selected from any one of SEQ ID NOs: 17501-18750; and (b) a variable light chain, wherein the variable light chain comprises a polypeptide sequence having at least 90% sequence identity to an amino acid sequence selected from any one of SEQ ID NOs: 18751-20000.

[0051] In some embodiments, the antibody comprises an IgG, IgA, IgM, or IgE antibody. In some embodiments, the IgG comprises IgG1, IgG2, IgG3, IgG4, IgGA1, or IgGA2. In some embodiments, the antibody comprises a bispecific antibody, a multispecific antibody, a multivalent antibody, a chimeric antibody, a human antibody, humanized antibody, a monoclonal antibody, a deimmunized antibody, or a combination thereof. In some embodiments, the antigen-binding fragment comprises a Fab, Fab′, Fab′-SH, Fv, scFv, F(ab′)2, a diabody, a linear antibody, a single domain antibody (sdAb), a camelid V_{H}H domain, or a multi-specific antibody formed from antibody fragments. In some embodiments, the antibody or antigen-binding fragment thereof is recombinant or synthetic. In some embodiments, the antibody or antigen-binding fragment binds SARS-CoV-2, the virus that causes COVID-19.

[0052] Provided herein is a hybridoma that produces the antibody or antigen-binding fragment thereof of any one of aspects described above.

[0053] Provided herein is a pharmaceutical composition or a medicament that comprises the antibody or antigen-binding fragment thereof of any one of aspects above, and a pharmaceutically acceptable carrier, excipient or diluent. In some embodiments, the pharmaceutical composition or medicament is formulated for administration via a subcutaneous, intravenous, intradermal, intraperitoneal, intramuscular, intracerebroventricular, intracranial, intracelial, or intracerebellar administration route. In some embodiments, the pharmaceutical composition or medicament is in an aqueous or in a lyophilized form. In some embodiments, the pharmaceutical composition or medicament is contained in a delivery device selected from the group consisting of a syringe, a blunt tip syringe, a catheter, and an implantable pump.

[0054] In one aspect, provided herein is a method for treating or preventing a SARS-CoV2 infection or a COVID-19 in a subject tin need thereof, the method comprising administering to the subject the antibody or antigen-binding fragment thereof of any one of aspects above, or the pharmaceutical composition or medicament of any one of aspects above.

[0055] Provided herein is use of the antibody or antigen binding fragment of any one of aspects above for treatment or prevention of a SARS-CoV-2 infection or COVID-19.

### INCORPORATION BY REFERENCE

[0056] All publications, patents, and patent applications mentioned in this specification are herein incorporated by reference to the same extent as if each individual publication, patent, or patent application was specifically and individually indicated to be incorporated by reference.

### BRIEF DESCRIPTION OF THE DRAWINGS

[0057] The novel features of the invention are set forth with particularity in the appended claims. A better understanding of the features and advantages of the present invention will be obtained by reference to the following detailed description that sets forth illustrative embodiments, in which the principles of the invention are utilized, and the accompanying drawings of which:

[0058] FIG. 1 depicts a dose response curve for antibody of the disclosure TOTCOVID00425 generated from a bioluminescence assay testing neutralization activity against SARS-CoV-2, including a calculated half maximal inhibitory concentration (IC₅₀) value.

[0059] FIG. 2 depicts a dose response curve for positive control REGN-10933, including a calculated IC₅₀ value.

[0060] FIGS. 3A-3B depict dose response curves for antibody of the disclosure TOTCOVID00425 across two independent assays, including calculated IC₅₀ values.

[0061] FIGS. 4A-4B depict dose response curves for antibody of the disclosure TOTCOVID00316 across two independent assays, including calculated IC₅₀ values.

[0062] FIGS. 5A-5C depict dose response curves for antibody of the disclosure TOTCOVID00761 across two independent assays and using an additional replicate sample, including calculated IC₅₀ values.

[0063] FIGS. 6A-6C depict does response curves for antibody of the disclosure TOTCOVID00540 across two independent assays and using an additional replicate sample, including calculated IC₅₀ values.

[0064] FIGS. 7A-7C depict dose response curves for antibody of the disclosure TOTCOVID00347 across two independent assays and using an additional replicate sample, including calculated IC₅₀ values.

[0065] FIG. 8 depicts a dose response curve for antibody of the disclosure TOTCOVID00124, including a calculated IC₅₀ value.

### DETAILED DESCRIPTION OF THE INVENTION

[0066] It is to be understood that this application is not limited to particular formulations or process parameters, as these may, of course, vary. It is also to be understood that the terminology used herein is for the purpose of describing particular embodiments only, and is not intended to be limiting. Further, it is understood that a number of methods and materials similar or equivalent to those described herein can be used in the practice of the present inventions.

[0067] In accordance with the present application, there may be employed conventional molecular biology, microbiology, and recombinant DNA techniques as explained fully in the art. The definitions contained herein supplement those in the art and are directed to the current application and are not to be imputed to any related or unrelated case, e.g., to any commonly owned patent or application. Accordingly, the terminology used herein is for the purpose of describing particular embodiments only, and is not intended to be limiting.

[0068] In this application, the use of the singular includes the plural unless specifically stated otherwise. It must be noted that, as used in the specification, the singular forms “a,” “an” and “the” include plural referents unless the context clearly dictates otherwise. Furthermore, use of the term “including” as well as other forms, such as “include”, “includes,” and “included,” is not limiting.

[0069] The terms “and/or” and “any combination thereof” and their grammatical equivalents as used herein, can be used interchangeably. These terms can convey that any combination is specifically contemplated. Solely for illustrative purposes, the following phrases “A, B, and/or C” or “A, B, C, or any combination thereof” can mean “A individually; B individually; C individually; A and B; B and C; A and C; and A, B, and C.”

[0070] The term “or” can be used conjunctively or disjunctively, unless the context specifically refers to a disjunctive use.

[0071] The term “about” or “approximately” means within an acceptable error range for the particular value as determined by one of ordinary skill in the art, which will depend in part on how the value is measured or determined, i.e., the limitations of the measurement system. For example, “about” can mean within 1 or more than 1 standard deviation, per the practice in the art. Alternatively, “about” can mean a range of up to 20%, up to 10%, up to 5%, or up to 1% of a given value. Alternatively, particularly with respect to biological systems or processes, the term can mean within an order of magnitude, preferably within 5-fold, and more preferably within 2-fold, of a value. Where particular values are described in the application and claims, unless otherwise stated the term “about” meaning within an acceptable error range for the particular value should be assumed.

[0072] As used in this specification and claim(s), the words “comprising” (and any form of comprising, such as “comprise” and “comprises”), “having” (and any form of having, such as “have” and “has”), “including” (and any form of including, such as “includes” and “include”) or “containing” (and any form of containing, such as “contains” and “contain”) are inclusive or open-ended and do not exclude additional, unrecited elements or method steps. It is contemplated that any embodiment discussed in this specification can be implemented with respect to any method or composition of the invention, and vice versa. Furthermore, compositions of the invention can be used to achieve methods of the invention.

[0073] As used herein the term “consisting essentially of” refers to those elements required for a given embodiment. The term permits the presence of elements that do not materially affect the basic and novel or functional characteristic(s) of that embodiment of the invention.

[0074] As used herein the term “consisting of” refers to compositions, methods, and respective components thereof as described herein, which are exclusive of any element not recited in that description of the embodiment.

[0075] Reference in the specification to “some embodiments,” “an embodiment,” “one embodiment” or “other embodiments” means that a particular feature, structure, or characteristic described in connection with the embodiments is included in at least some embodiments, but not necessarily all embodiments, of the inventions.

### SARS-CoV-2

[0076] Provided herein are antibodies and antigen binding fragment thereof that bind a SARS-CoV-2, and are useful in treatment, and prevention of a SARS-CoV-2 infection and COVID-19. The antibodies of the present disclosure can be useful for detection of SARS-CoV-2 virus, and diagnosis of a SARS-CoV-2 infection and COVID-19. As used herein, the term “severe acute respiratory syndrome coronavirus 2 (SARS-CoV-2)” (also referred to as a “Wuhan coronavirus,” a “2019 novel coronavirus,” or a “2019-nCoV”) refers to a newly emergent coronavirus that was initially identified from the Chinese city Wuhan in December 2019. SARS-Cov-2 belongs to the broad family of viruses known as coronaviruses. It is a positive-sense single stranded RNA virus, with a single linear RNA segment. The genomes of multiple strains of SARS-CoV-2 have been sequenced, and the homology between the nucleic acid sequences of these strains has been measured at typically greater than 99.99% (see, e.g., Wang, C. et al. J. Med. Virol. 92(6):667-674 (2020), hereby incorporated by reference). Thus, “SARS-CoV-2” means any virus with a high level of nucleic acid or amino acid sequence homology: e.g., having at least 90% sequence identity with a reference nucleic acid sequence of a viral genome identified as SARS-CoV-2 in a commonly used genomic research database, such as those maintained by the National Center for Biotechnology Information or GISAID. Non-limiting exemplary reference nucleic acid sequence of the SARS-Cov-2 genome is available at RefSeq reference number: NC 045512.2, which is incorporated herein in its entirety. The term “SARS-CoV-2” also includes any known variant thereof, for example, including but not limited to the Alpha (B.1.1.7) variant, Beta (B.1.351) variant, Gamma (P.1) variant, Delta (B.1.617.2) variant, Epsilon (B.1.429/B.1.427/CAL.20C) variant, Iota (B.1.526) variant, Eta (B.1.525) variant, Kappa (B.1.617.1) variant, or Lambda (C.37) variant, Zeta (P.2) variant, and Theta (P.3) variant. The term “SARS-CoV-2” also includes a variant comprising at least 1, 2, 3, 4, 5, 6, 7, 8, 9, 10 or more mutations relative to a reference nucleic acid sequence. In some embodiments, a mutation is in the nucleic acid sequence that encodes subunit S1 relative to that of the reference nucleic acid sequence.

[0077] As used herein, the term “coronavirus disease of 2019” or “COVID-19” refers to the disease caused by SARS-CoV-2. A patient suffering from COVID-19 would generally display clinical symptoms associated with this disease (see, e.g., Guan, W. et al. N Engl. J. Med. 382(18):1708-1720 (2020)) and would also test positive for presence of the SARS-CoV-2 viral genome using a real-time RT-PCR diagnostic assay (see, e.g., Pefiarrubia, L. et al. Int. J. Infect. Dis. 97:225-229 (2020)).

### Reconstructed Nucleic Acid Sequences

[0078] Provided herein are reconstructed nucleic acid and polypeptide consensus sequences for SARS-CoV-2 associated antibodies. The consensus sequences were reconstructed in silico from RNA-Seq data. Non-limiting examples of computational tools known in the art for reconstructing full-length antibody repertoires including MIGEC (Shugay, M. et al., Nat. Methods 11(6):653-655 (2014)), pRESTO (Vander Heiden, J. A. et al., Bioinformatics 30(13):1930-1932 (2014)), MiXCR (Bolotin, D. A. et al., Nat. Methods 12(5):380-381 (2015)), and IgRepertoireConstructor (Safonova, Y. et al., Bioinformatics 31(12):i53-i61 (2015)). Further examples are provided in the Examples section below.

[0079] The term, “nucleic acid consensus sequence” as used herein refers to a nucleic acid sequence, which comprises the most frequently occurring nucleotide residues at each location in all immunoglobulin nucleic acid sequence of any particular subclass or subunit structure. The nucleic acid consensus sequence may be based on immunoglobulins of a particular species or of many species. A nucleic acid “consensus” sequence, or “consensus” structure, is understood to encompass a human nucleic acid consensus sequence as described in certain embodiments of this invention, and to refer to a nucleic acid sequence which comprises the most frequently occurring nucleotide residues at each location in all human immunoglobulins nucleic acid of any particular subclass or subunit structure.

[0080] The term “polypeptide consensus sequence” as used herein refers to an amino acid sequence which comprises the most frequently occurring amino acid residues at each location in all immunoglobulins of any particular subclass or subunit structure. The polypeptide consensus sequence may be based on immunoglobulins of a particular species or of many species. A polypeptide “consensus” sequence, “consensus” structure, or “consensus” antibody is understood to encompass a human polypeptide consensus sequence as described in certain embodiments provided herein, and to refer to an amino acid sequence which comprises the most frequently occurring amino acid residues at each location in all human immunoglobulins of any particular subclass or subunit structure. The embodiments herein provide consensus human structures and consensus structures, which consider other species in addition to human.

[0081] As used herein, the terms “protein”, “peptide” and “polypeptide” are used interchangeably to designate a series of amino acid residues connected to each other by peptide bonds between the alpha-amino and carboxy groups of adjacent residues. The terms “protein”, “peptide” and “polypeptide” refer to a polymer of amino acids, including modified amino acids (e.g., phosphorylated, glycated, glycosylated, etc.) and amino acid analogs, regardless of its size or function. “Protein” and “polypeptide” are often used in reference to relatively large polypeptides, whereas the term “peptide” is often used in reference to small polypeptides, but usage of these terms in the art overlaps. The terms “protein”, “peptide” and “polypeptide” are used interchangeably herein when referring to a gene product and fragments thereof. The term “fusion protein” as used herein refers to a polypeptide that comprises an amino acid sequence of an antibody or fragment thereof and an amino acid sequence of a heterologous polypeptide (i.e., an unrelated polypeptide).

[0082] As used herein, an “isolated” nucleic acid molecule or “isolated” nucleic acid sequence is a nucleic acid molecule that is either: (1) identified and separated from at least one contaminant nucleic acid molecule with which it is ordinarily associated in the natural source of the nucleic acid or (2) cloned, amplified, tagged, or otherwise distinguished from background nucleic acids such that the sequence of the nucleic acid of interest can be determined, is considered isolated. An isolated nucleic acid molecule is other than in the form or setting in which it is found in nature. Isolated nucleic acid molecules therefore are distinguished from the nucleic acid molecule as it exists in natural cells. However, an isolated nucleic acid molecule includes a nucleic acid molecule contained in cells that ordinarily express the antibody where, for example, the nucleic acid molecule is in a chromosomal location different from that of natural cells.

[0083] The terms “synthetic polynucleotide,” “synthetic gene” or “synthetic polypeptide,” as used herein, mean that the corresponding polynucleotide sequence or portion thereof, or amino acid sequence or portion thereof, is derived, from a sequence that has been designed, or synthesized de novo, or modified, compared to an equivalent naturally-occurring sequence. Synthetic polynucleotides (antibodies or antigen-binding fragments) or synthetic genes can be prepared by methods known in the art, including but not limited to, the chemical synthesis of nucleic acid or amino acid sequences. Synthetic genes are typically different from naturally occurring genes, either at the amino acid, or polynucleotide level, (or both) and are typically located within the context of synthetic expression control sequences. Synthetic gene polynucleotide sequences, may not necessarily encode proteins with different amino acids, compared to the natural gene; for example, they can also encompass synthetic polynucleotide sequences that incorporate different codons but which encode the same amino acid (i.e., the nucleotide changes represent silent mutations at the amino acid level).

[0084] Percent (%) sequence identity with respect to a reference polypeptide sequence is the percentage of amino acid residues in a candidate sequence that are identical with the amino acid residues in the reference polypeptide sequence, after aligning the sequences and introducing gaps, if necessary, to achieve the maximum percent sequence identity, and not considering any conservative substitutions as part of the sequence identity. Alignment for purposes of determining percent amino acid sequence identity can be achieved in various ways that are within the skill in the art, for instance, using publicly available computer software such as BLAST, BLAST-2, ALIGN or Megalign (DNASTAR®) software. Those skilled in the art can determine appropriate parameters for aligning sequences, including any algorithms needed to achieve maximal alignment over the full length of the sequences being compared. For purposes herein, however, % amino acid sequence identity values are generated using the sequence comparison computer program ALIGN-2. The ALIGN-2 sequence comparison computer program was authored by Genentech, Inc., and the source code has been filed with user documentation in the U.S. Copyright Office, Washington D.C., 20559, where it is registered under U.S. Copyright Registration No. TXU510087. The ALIGN-2 program is publicly available from Genentech, Inc., South San Francisco, Calif., or may be compiled from the source code. The ALIGN-2 program should be compiled for use on a UNIX operating system, including digital UNIX V4.0D. All sequence comparison parameters are set by the ALIGN-2 program and do not vary.

[0085] In situations where ALIGN-2 is employed for amino acid sequence comparisons, the % amino acid sequence identity of a given amino acid sequence A to, with, or against a given amino acid sequence B (which can alternatively be phrased as a given amino acid sequence A that has or comprises a certain % amino acid sequence identity to, with, or against a given amino acid sequence B) is calculated as follows: 100 times the fraction X/Y, where X is the number of amino acid residues scored as identical matches by the sequence alignment program ALIGN-2 in that program's alignment of A and B, and where Y is the total number of amino acid residues in B. It will be appreciated that where the length of amino acid sequence A is not equal to the length of amino acid sequence B, the % amino acid sequence identity of A to B will not equal the % amino acid sequence identity of B to A. Unless specifically stated otherwise, all % amino acid sequence identity values used herein are obtained as described in the immediately preceding paragraph using the ALIGN-2 computer program.

### Nucleic Acid Sequences

[0086] One aspect of the present disclosure pertains to reconstructed nucleic acid consensus sequences that encode an antibody polypeptide, described herein or antigen-binding fragment thereof. In some embodiments, the nucleic acid sequence encoding a heavy chain polypeptide is selected from any one of SEQ ID NOs: 7501-8750. In some embodiments, the nucleic acid sequence encoding a light chain polypeptide is selected from any one of SEQ ID NOs: 8751-10000. In some embodiments, the reconstructed nucleic acid sequence encodes a CDR1, CDR2, or CDR3 polypeptide of a variable heavy chain, such that:
[0087] (a) the nucleic acid sequence encoding the CDR1 polypeptide of a variable heavy chain is selected from any one of SEQ ID NOS: 1-1250,
[0088] (b) the nucleic acid sequence encoding the CDR2 polypeptide of a variable heavy chain is selected from any one of SEQ ID NOS: 2501-3750, or
[0089] (c) the nucleic acid sequence encoding the CDR3 polypeptide of a variable heavy chain is selected from any one of SEQ ID NOS: 5001-6250.
   In some embodiments, the reconstructed nucleic acid sequence encodes a CDR1, CDR2, or CDR3 polypeptide of a variable light chain, such that:
[0090] (a) the nucleic acid sequence encoding the CDR1 region of a variable light chain polypeptide is selected from any one of SEQ ID NOS: 1251-2500,
[0091] (b) the nucleic acid sequence encoding the CDR2 region of a variable light chain polypeptide is selected from any one of SEQ ID NOS: 3751-5000, or
[0092] (c) the nucleic acid sequence encoding the CDR3 region of a variable light chain polypeptide is selected from any one of SEQ ID NOS: 6251-7500.

### Antibody Synthesis and Purification

[0093] Starting from in silico reconstructed nucleic acid consensus sequences, antibody polypeptides may be synthesized and purified using conventional procedures. In one embodiment, an artificial gene construct encoding an antibody or antibody fragment thereof is synthesized (see, e.g., Khorana, H. G. et al., J. Mol. Biol. 72(2):209-217 (1972); Itakura, K. et al., Science 198(4321):1056-1063 (1977); and Edge, M. D. et al. Nature 292(5825):756-762 (1981)). The DNA template for the synthetic gene construct may then be cloned into a suitable expression vector and operably linked to a regulatory control sequence, transformed into an appropriate host for amplification, and the resulting amplified quantities of expression vector purified and transfected into an appropriate host for transient expression of the final resulting polypeptide encoding an antibody or antibody fragment thereof (see, e.g., Vazquez-Lombardi, R. et al., Nat. Protoc. 13(1):99-117 (2018)).

[0094] Using the information provided herein, for example, the reconstructed nucleic acid and amino acid sequences of the antibodies; a nucleic acid encoding the antibodies or antigen-binding fragment thereof can be obtained. Such a nucleic acid can be obtained, for example, using conventional methods disclosed in the art. Nucleic acids of the present disclosure may be in the form of RNA, such as mRNA, hnRNA, tRNA or any other form, or in the form of DNA, including but not limited to, cDNA and genomic DNA obtained by cloning or produced synthetically, or any combinations thereof. The DNA may be triplex, duplex or single-stranded, or any combination thereof. Any portion of at least one strand of the DNA or RNA may be the coding strand, also known as the sense strand, or it can be the antisense strand, also known as the antisense strand.

[0095] “Polynucleotide,” or “nucleic acid as used interchangeably herein, refer to polymers of nucleotides of any length, and include DNA and RNA. The nucleotides can be deoxyribonucleotides, ribonucleotides, modified nucleotides or bases, and/or their analogs, or any substrate that can be incorporated into a polymer by DNA or RNA polymerase. A nucleic acid can comprise modified nucleotides, such as methylated nucleotides and their analogs. If present, modification to the nucleotide structure may be imparted before or after assembly of the polymer. The sequence of nucleotides may be interrupted by non-nucleotide components. A polynucleotide may be further modified after polymerization, such as by conjugation with a labeling component. Other types of modifications include, for example, “caps”, substitution of one or more of the naturally occurring nucleotides with an analog, internucleotide modifications such as, for example, those with uncharged linkages (e.g., methyl phosphonates, phosphotriesters, phosphoamidates, cabamates, etc.) and with charged linkages (e.g., phosphorothioates, phosphorodithioates, etc.), those containing pendant moieties, such as, for example, proteins (e.g., nucleases, toxins, antibodies, signal peptides, ply-L-lysine, etc.), those with intercalators (e.g., acridine, psoralen, etc.), those containing chelators (e.g., metals, radioactive metals, boron, oxidative metals, etc.), those containing alkylators, those with modified linkages (e.g., alpha anomeric nucleic acids, etc.), as well as unmodified forms of the polynucleotide(s). Further, any of the hydroxyl groups ordinarily present in the sugars may be replaced, for example, by phosphonate groups, phosphate groups, protected by standard protecting groups, or activated to prepare additional linkages to additional nucleotides, or may be conjugated to solid supports. The 5′ and 3′ terminal OH can be phosphorylated or substituted with amines or organic capping group moieties of from 1 to 20 carbon atoms. Other hydroxyls may also be derivatized to standard protecting groups. Polynucleotides can also contain analogous forms of ribose or deoxyribose sugars that are generally known in the art, including, for example, 2′-O-methyl-, 2′-O-allyl, 2′-fluoro- or 2′-azido-ribose, carbocyclic sugar analogs, α-anomeric sugars, epimeric sugars such as arabinose, xyloses or lyxoses, pyranose sugars, furanose sugars, sedoheptuloses, acyclic analogs and abasic nucleoside analogs such as methyl riboside. One or more phosphodiester linkages may be replaced by alternative linking groups. These alternative linking groups include, but are not limited to, embodiments wherein phosphate is replaced by P(O)S(“thioate”), P(S)S (“dithioate”), “(O)NR2 (“amidate”), P(O)R, P(O)OR′, CO or CH2 (“formacetal”), in which each R or R′ is independently H or substituted or unsubstituted alkyl (1-20 C) optionally containing an ether (—O—) linkage, aryl, alkenyl, cycloalkyl, cycloalkenyl or araldyl. Not all linkages in a polynucleotide need be identical. The preceding description applies to all polynucleotides referred to herein, including isolated nucleic acid, RNA and DNA.

[0096] In the context of the present invention, the following abbreviations for the commonly occurring nucleic acid bases are used. “A” refers to adenosine, “C” refers to cytosine, “G” refers to guanosine, “T” refers to thymidine, and “U” refers to uridine. In some embodiments, the nucleic acid molecule comprises an isolated nucleic acid.

[0097] The nucleic acids can be present in whole cells, in a cell lysate, or in a partially purified or substantially pure form. A nucleic acid is “isolated” or “rendered substantially pure” when purified away from other cellular components or other contaminants, e.g., other cellular nucleic acids or proteins, by standard techniques, including, but not limited to alkaline/SDS treatment, CsCl banding, column chromatography, agarose gel electrophoresis and others well known in the art. See, F. Ausubel, et al., ed. (1987) Current Protocols in Molecular Biology, Greene Publishing and Wiley Interscience, New York. A nucleic acid according to at least some embodiments of the disclosure can be, for example, DNA or RNA and may or may not contain intronic sequences. In a preferred embodiment, the nucleic acid is a cDNA molecule.

[0098] Another aspect of the present disclosure pertains to nucleic acid comprising reconstructed consensus nucleic acid sequences that encode the antibody polypeptide, described herein or antigen-binding fragment thereof. In some embodiments, the isolated nucleic acid comprises a nucleic acid sequence encoding a heavy chain polypeptide of an antibody. In some embodiments, the nucleic acid sequence encoding a heavy chain polypeptide is selected from SEQ ID NOs: 7501-8750. In some embodiments, the isolated nucleic acid comprises a nucleic acid sequence encoding a light chain polypeptide of an antibody. In some embodiments, the nucleic acid sequence encoding a light chain polypeptide is selected from SEQ ID NOs: 8751-10000.

[0099] In some embodiments, the isolated nucleic acid comprises a nucleic acid sequence encoding a CDR1 polypeptide of a variable heavy chain. In some embodiments, the isolated nucleic acid molecule comprises a nucleic acid sequence encoding a CDR2 polypeptide of a variable heavy chain. In some embodiments, the isolated nucleic molecule comprises a nucleic acid sequence encoding a CDR3 polypeptide of a variable heavy chain. In some embodiments, the nucleic acid sequence encoding the CDR1 polypeptide of a variable heavy chain (CDR-H1) comprises a sequence selected from SEQ ID NOS: 1-1250. In some embodiments, the nucleic acid sequence encoding the CDR2 polypeptide of a variable heavy chain (CDR-H2) comprises a sequence selected from SEQ ID NOS: 2501-3750. In some embodiments, the nucleic acid sequence encoding the CDR3 polypeptide of a variable heavy chain (CDR-H3) comprises a sequence selected from SEQ ID NOS: 5001-6250. In some embodiments, the isolated nucleic acid comprises a nucleic acid sequence encoding a CDR1 polypeptide of a variable light chain. In some embodiments, the isolated nucleic acid molecule comprises a nucleic acid sequence encoding a CDR2 polypeptide of a variable light chain. In some embodiments, the isolated nucleic acid comprises a nucleic acid sequence encoding a CDR3 polypeptide of a variable light chain. In some, embodiments, the nucleic acid sequence encoding the CDR1 region of a variable light chain polypeptide (CDR-L1) comprises a sequence selected from SEQ ID NOS: 1251-2500. In some embodiments, the nucleic acid sequence encoding the CDR2 region of a variable light chain polypeptide (CDR-L2) comprises a sequence selected from SEQ ID NOS: 3751-5000. In some, embodiments, the nucleic acid sequence encoding the CDR3 region of a variable light chain polypeptide (CDR-L3) comprises a sequence selected from SEQ ID NOS: 6251-7500. Nucleic acids according to at least some embodiments of the present disclosure can be obtained using standard molecular biology techniques. For antibodies expressed by hybridomas (e.g., hybridomas prepared from transgenic mice carrying human immunoglobulin genes as described further below), cDNAs encoding the light and heavy chains of the antibody made by the hybridoma can be obtained by standard PCR amplification or cDNA cloning techniques. For antibodies obtained from an immunoglobulin gene library (e.g., using phage display techniques), nucleic acid encoding the antibody can be recovered from the library. Once DNA fragments encoding VH and VL segments are obtained, these DNA fragments can be further manipulated by standard recombinant DNA techniques, for example to convert the variable region genes to full-length antibody chain genes, to Fab fragment genes or to a scFv gene. In these manipulations, a VL- or VH-encoding DNA fragment is operatively linked to another DNA fragment encoding another protein, such as an antibody constant region or a flexible linker. The term “operatively linked”, as used in this context, is intended to mean that the two DNA fragments are joined such that the amino acid sequences encoded by the two DNA fragments remain in-frame. The isolated DNA encoding the VH region can be converted to a full-length heavy chain gene by operatively linking the VH-encoding DNA to another DNA molecule encoding heavy chain constant regions (CH1, CH2 and CH3). The sequences of human heavy chain constant region genes are known in the art (see e.g., Kabat, E. A., et al. (1991) Sequences of Proteins of Immunological Interest, Fifth Edition, U.S. Department of Health and Human Services, NIH Publication No. 91-3242) and DNA fragments encompassing these regions can be obtained by standard PCR amplification. The heavy chain constant region can be an IgG1, IgG2, IgG3, IgG4, IgA, IgE, IgM or IgD constant region, but most preferably is an IgG1 or IgG4 constant region. For a Fab fragment heavy chain gene, the VH-encoding DNA can be operatively linked to another DNA molecule encoding only the heavy chain CH1 constant region.

[0100] The isolated DNA encoding the VL region can be converted to a full-length light chain gene (as well as a Fab light chain gene) by operatively linking the VL-encoding DNA to another DNA molecule encoding the light chain constant region, CL. The sequences of human light chain constant region genes are known in the art (see e.g., Kabat, E. A., et al. (1991) Sequences of Proteins of Immunological Interest, Fifth Edition, U.S. Department of Health and Human Services, NIH Publication No. 91-3242) and DNA fragments encompassing these regions can be obtained by standard PCR amplification. The light chain constant region can be a kappa or lambda constant region, but most preferably is a kappa constant region. To create a scFv gene, the VH- and VL-encoding DNA fragments are operatively linked to another fragment encoding a flexible linker, e.g., encoding the amino acid sequence (Gly-4-Ser)3, such that the VH and VL sequences can be expressed as a contiguous single-chain protein, with the VL and VH regions joined by the flexible linker (see e.g., Bird et al. (1988) Science 242:423-426; Huston et al. (1988) Proc. Natl. Acad. Sci. USA 85:5879-5883; McCafferty et al., (1990) Nature 348:552-554).

[0101] Nucleic acids comprising a nucleotide sequence substantially different from those described above but which, due to the degeneracy of the genetic code, still encode at least antibody or antigen binding fragment thereof as described herein and/or as it is known in the art are also contemplated. Of course, the genetic code is well known in the art. Therefore, it would be routine for one skilled in the art to generate such degenerate nucleic acid variants encoding specific antibodies of the present disclosure. See for example, Ausubel et al., Supra, and such nucleic acid variants are included in the present invention.

[0102] In some embodiments, the nucleic acid is one that encodes for any of the amino acid sequences for the antibodies in the Table 1 herein. In some embodiments, the nucleic acid sequence is one that is at least 80% identical to a nucleic acid encoding any of the amino acid sequences for the antibodies in the in the Table 1 herein, for example, at least 80, 85, 90, 91, 92, 93, 94, 95, 96, 97, 98, or 99% identical. In some embodiments, the nucleic acid is one that hybridizes to any one or more of the nucleic acid sequences provided herein. In some of the embodiments, the hybridization is under moderate conditions. In some embodiments, the hybridization is under highly stringent conditions, such as: at least about 6×SSC and 1% SDS at 65° C., with a first wash for 10 minutes at about 42° C. with about 20% (v/v) formamide in 0.1×SSC, and with a subsequent wash with 0.2×SSC and 0.1% SDS at 65° C.

[0103] Nucleic acids can be constructed using recombinant DNA techniques conventional in the art. In some embodiments, a nucleic acid disclosed herein is placed in an expression vector that is suitable for expression in a selected host cell. Vectors comprising nucleic acids that encode the antibodies or antigen binding fragment herein are provided. Vectors comprising nucleic acids that encode a heavy chains and/or a light chains are also provided. Such vectors include, but are not limited to, DNA vectors, phage vectors, viral vectors, retroviral vectors, etc. In one embodiment, the nucleic acid coding for the light chain and that coding for the heavy chain are isolated separately by the procedures outlined above. In one embodiment, the isolated nucleic acid encoding the light chain and that coding for the heavy chain may be inserted into separate expression plasmids, or together in the same plasmid, so long as each is under suitable promoter and translation control. In some embodiments, the suitable promoter is an inducible promoter. In some embodiments a suitable promoter is a constitutive promoter. In some embodiments, the heavy chain and light chain are expressed as part of a single polypeptide, such as, for example, when the antibody is an scFv.

[0104] In some embodiments, a first vector comprises a nucleic acid that encodes a heavy chain and a second vector comprises a nucleic acid that encodes a light chain. In some embodiments, the first vector and second vector are transfected into host cells in similar amounts (such as similar molar amounts or similar mass amounts). In some embodiments, a mole- or mass-ratio of between 5:1 and 1:5 of the first vector and the second vector is transfected into host cells. In some embodiments, a mass ratio of between 1:1 and 1:5 for the vector encoding the heavy chain and the vector encoding the light chain is used. In some embodiments, a mass ratio of 1:2 for the vector encoding the heavy chain and the vector encoding the light chain is used. In some embodiments, a vector is selected that is optimized for expression of polypeptides in CHO or CHO-derived cells, or in NSO cells. Exemplary such vectors are described, for example, in Running Deer et al., Biotechnol. Prog. 20:880-889 (2004).

[0105] In one aspect, the present disclosure provides methods for treatment or prevention of cancer comprising administering a nucleic acid, wherein the nucleic acid encode for a VH, VL, CDR3 region of VH or CDR 3 region of VL or antigen binding fragment thereof, wherein the nucleic acid comprises a sequence disclosed herein by way of gene therapy. Gene therapy refers to therapy performed by the administration to a subject of an expressed or expressible nucleic acid. In this embodiment of the disclosure, the nucleic acids produce their encoded protein that mediates a prophylactic or therapeutic effect. Any of the methods for gene therapy available in the art can be used according to the embodiments herein.

[0106] For general reviews of the methods of gene therapy, see Goldspiel et al., 1993, Clinical Pharmacy 12:488-505; Wu and Wu, 1991, Biotherapy 3:87-95; Tolstoshev, 1993, Ann. Rev. Pharmacol. Toxicol. 32:573-596; Mulligan, 1993, Science 260:926-932; and Morgan and Anderson, 1993, Ann. Rev. Biochem. 62:191-217; May, 1993, TIBTECH 11(5):155-215 Methods. commonly known in the art of recombinant DNA technology which can be used are described in Ausubel et al. (eds.), 1993, Current Protocols in Molecular Biology, John Wiley & Sons, NY; and Kriegler, 1990, Gene Transfer and Expression, A Laboratory Manual, Stockton Press, NY. Delivery of a therapeutic antibody to appropriate cells can be effected via gene therapy ex vivo, in situ, or in vivo by use of any suitable approach known in the art, including by use of physical DNA transfer methods (e.g., liposomes or chemical treatments) or by use of viral vectors (e.g., adenovirus, adeno-associated virus, or a retrovirus). For example, for in vivo therapy, a nucleic acid encoding the desired antibody, either alone or in conjunction with a vector, liposome, or precipitate may be injected directly into the subject, and in some embodiments, may be injected at the site where the expression of the antibody compound is desired. For ex vivo treatment, the subject's cells are removed, the nucleic acid is introduced into these cells, and the modified cells are returned to the subject either directly or, for example, encapsulated within porous membranes which are implanted into the patient. See, e.g. U.S. Pat. Nos. 4,892,538 and 5,283,187. There are a variety of techniques available for introducing nucleic acids into viable cells. The techniques vary depending upon whether the nucleic acid is transferred into cultured cells in vitro, or in vivo in the cells of the intended host. Techniques suitable for the transfer of nucleic acid into mammalian cells in vitro include the use of liposomes, electroporation, microinjection, cell fusion, DEAE-dextran, and calcium phosphate precipitation. A commonly used vector for ex vivo delivery of a nucleic acid is a retrovirus.

[0107] The term “host cell” as used herein refers to the particular subject cell, for example cell of a subject suffering from an infection of a SARS-CoV-2 or COVID-19, or at a risk of, or suspected of suffering from an infection of a SARS-CoV-2 or COVID-19. In some embodiments, the host cell can be transfected with a nucleic acid disclosed herein. In some embodiments, the host cell is in the subject. In some embodiments, the host cell is an ex vivo cell obtained from the subject.

[0108] Other in vivo nucleic acid transfer techniques include transfection with viral vectors (such as adenovirus, Herpes simplex I virus, or adeno-associated virus) and lipid-based systems. The nucleic acid and transfection agent are optionally associated with a microparticle. Exemplary transfection agents include calcium phosphate or calcium chloride co-precipitation, DEAE-dextran-mediated transfection, quaternary ammonium amphiphile DOTMA ((dioleoyloxypropyl) trimethylammonium bromide, commercialized as Lipofectin by GIBCO-BRL))(Felgner et al, (1987) Proc. Natl. Acad. Sci. USA 84, 7413-7417; Malone et al. (1989) Proc. Natl Acad. Sci. USA 86 6077-6081); lipophilic glutamate diesters with pendent trimethylammonium heads (Ito et al. (1990) Biochem. Biophys. Acta 1023, 124-132); the metabolizable parent lipids such as the cationic lipid dioctadecylamido glycylspermine (DOGS, Transfectam, Promega) and dipalmitoylphosphatidyl ethanolamylspermine (DPPES)(J. P. Behr (1986) Tetrahedron Lett. 27, 5861-5864; J. P. Behr et al. (1989) Proc. Natl. Acad. Sci. USA 86, 6982-6986); metabolizable quaternary ammonium salts (DOTB, N-(1-[2,3-dioleoyloxylpropyl)-N,N,N-trimethylammonium methylsulfate (DOTAP)(Boehringer Mannheim), polyethyleneimine (PEI), dioleoyl esters, ChoTB, ChoSC, DOSC)(Leventis et al. (1990) Biochim. Inter. 22, 235-241); 3be ta[N—(N′,N′-dimethylaminoethane)-carbamoyl]cholesterol (DC-Chol), dioleoylphosphatidyl ethanolamine (DOPE)/3beta[N—(N′,N′ dimethylaminoethane)-carbamoyl] cholesterolDC-Chol in one to one mixtures (Gao et al., (1991) Biochim. Biophys. Acta 1065, 8-14), spermine, spermidine, lipopolyamines (Behr et al., Bioconjugate Chem, 1994, 5: 382-389), lipophilic polylysines (LPLL) (Zhou et al., (1991) Biochim. Biophys. Acta 939, 8-18), [[(1,1,3,3 tetramethylbutyl)cresoxy]ethoxylethylldimethylbnzylammonium hydroxide (DEBDA hydroxide) with excess phosphatidylcholine/cholesterol (Ballas et al., (1988) Biochim. Biophys. Acta 939, 8-18), cetyltrimethylammonium bromide (CTAB)/DOPE mixtures (Pinnaduwage et al, (1989) Biochim. Biophys. Acta 985, 33-37), lipophilic diester of glutamic acid (TMAG) with DOPE, CTAB, DEBDA, didodecylammonium bromide (DDAB), and stearylamine in admixture with phosphatidylethanolamine (Rose et al., (1991) Biotechnique 10, 520-525), DDAB/DOPE (TransfectACE, GIBCO BRL), and oligogalactose bearing lipids. Exemplary transfection enhancer agents that increase the efficiency of transfer include, for example, DEAE-dextran, polybrene, lysosome-disruptive peptide (Ohmori N I et al, Biochem Biophys Res Commun Jun. 27, 1997; 235(3):726-9), chondroitan-based proteoglycans, sulfated proteoglycans, polyethylenimine, polylysine (Pollard H et al. J Biol Chem, 1998 273 (13):7507-11), integrin-binding peptide CYGGRGDTP, linear dextran nonasaccharide, glycerol, cholesteryl groups tethered at the 3′-terminal internucleoside link of an oligonucleotide (Letsinger, R. L. 1989 Proc Natl Acad Sci USA 86: (17):6553-6), lysophosphatide, lysophosphatidylcholine, lysophosphatidylethanolamine, and 1-oleoyl lysophosphatidylcholine.

[0109] In some situations, it may be desirable to deliver the nucleic acid with an agent that directs the nucleic acid containing vector to host cells. Such “targeting” molecules include antibodies specific for a cell-surface membrane protein on the target cell, or a ligand for a receptor on the target cell. Where liposomes are employed, proteins which bind to a cell-surface membrane protein associated with endocytosis may be used for targeting and/or to facilitate uptake. Examples of such proteins include capsid proteins and fragments thereof tropic for a particular cell type, antibodies for proteins which undergo internalization in cycling, and proteins that target intracellular localization and enhance intracellular half-life. In other embodiments, receptor-mediated endocytosis can be used. Such methods are described, for example, in Wu et al., 1987 or Wagner et al., 1990. For review of the currently known gene marking and gene therapy protocols, see Anderson 1992. See also WO 93/25673 and the references cited therein.

### Artificial Gene Synthesis

[0110] A variety of standard recombinant DNA techniques may be used for manipulating domains or functional segments within an antibody nucleic acid sequence. Once DNA fragments encoding V_{H} and V_{L} segments are obtained, these DNA fragments can be further manipulated, for example to convert the variable region genes to full-length antibody chain genes, to Fab fragment genes or to a scFv gene. In these manipulations, a V_{L}- or V_{H}-encoding DNA fragment is operatively linked to another DNA fragment encoding another protein, such as an antibody constant region or a flexible linker. The term “operatively linked”, as used in this context, is intended to mean that the two DNA fragments are joined such that the amino acid sequences encoded by the two DNA fragments remain in-frame. The isolated DNA encoding the V_{H} region can be converted to a full-length heavy chain gene by operatively linking the V_{H}-encoding DNA to another DNA molecule encoding heavy chain constant regions (C_{H}1, C_{H}2 and C_{H}3). The sequences of human heavy chain constant region genes are known in the art (see e.g., Kabat, E. A. et al. (1991) Sequences of Proteins of Immunological Interest, Fifth Edition, U.S. Department of Health and Human Services, NIH Publication No. 91-3242) and DNA fragments encompassing these regions can be obtained by standard PCR amplification. The heavy chain constant region can be an IgG1, IgG2, IgG3, IgG4, IgA, IgE, IgM or IgD constant region, but most preferably is an IgG1 or IgG4 constant region. For a Fab fragment heavy chain gene, the V_{H}-encoding DNA can be operatively linked to another DNA molecule encoding only the heavy chain C_{H}1 constant region.

[0111] The isolated DNA encoding the V_{L} region can be converted to a full-length light chain gene (as well as a Fab light chain gene) by operatively linking the V_{L}-encoding DNA to another DNA molecule encoding the light chain constant region, C_{L}. The sequences of human light chain constant region genes are known in the art (see e.g., Kabat, E. A. et al. (1991) Sequences of Proteins of Immunological Interest, Fifth Edition, U.S. Department of Health and Human Services, NIH Publication No. 91-3242) and DNA fragments encompassing these regions can be obtained by standard PCR amplification. The light chain constant region can be a kappa or lambda constant region, but most preferably is a kappa constant region.

[0112] To create a scFv gene, the V_{H}- and V_{L}-encoding DNA fragments are operatively linked to another fragment encoding a flexible linker, e.g., encoding the amino acid sequence (Gly-Gly-Gly-Gly-Ser)3, such that the V_{H} and V_{L} sequences can be expressed as a contiguous single-chain protein, with the V_{L} and V_{H} regions joined by the flexible linker (see, e.g., Bird et al. (1988) Science 242:423-426; Huston et al. (1988) Proc. Natl. Acad. Sci. USA 85:5879-5883; McCafferty et al., (1990) Nature 348:552-554).

### Selection and Transformation of Host Cells

[0113] In one aspect, provided herein is a host cell that comprises the isolated nucleic acids described above or a vector comprising said isolated nucleic acids described above. The vector can be a cloning vector or an expression vector. Suitable host cells for cloning or expressing the DNA in the vectors herein are the prokaryote, yeast, or higher eukaryote cells described above. Suitable prokaryotes for this purpose include eubacteria, such as Gram-negative or Gram-positive organisms, for example, Enterobacteriaceae such as Escherichia, e.g., E. coli, Enterobacter, Erwinia, Klebsiella, Proteus, Salmonella, e.g., Salmonella typhimurium, Serratia, e.g., Serratia marcescens, and Shigella, as well as Bacilli such as B. subtilis and B. licheniformis (e.g., B. licheniformis 41 P disclosed in DD 266,710 published Apr. 12, 1989), Pseudomonas such as P. aeruginosa, and Streptomyces. One preferred E. coli cloning host is E. coli 294 (ATCC 31,446), although other strains such as E. coli B, E. coli X1 776 (ATCC 31,537), and E. coli W3110 (ATCC 27,325) are suitable. These examples are illustrative rather than limiting.

[0114] In addition to prokaryotes, eukaryotic microbes such as filamentous fungi or yeast are suitable cloning or expression hosts for antibody-encoding vectors. Saccharomyces cerevisiae, or common baker's yeast, is the most commonly used among lower eukaryotic host microorganisms. However, a number of other genera, species, and strains are commonly available and useful herein, such as Schizosaccharomyces pombe; Kluyveromyces hosts such as, e.g., K. lactis, K. fragilis (ATCC 12,424), K. bulgaricus (ATCC 16,045), K. wickeramii (ATCC 24,178), K. waltii (ATCC 56,500), K. drosophilarum (ATCC 36,906), K. thermotolerans, and K. marxianus; yarrowia (EP 402,226); Pichia pastors (EP 183,070); Candida; Trichoderma reesia (EP 244,234); Neurospora crassa; Schwanniomyces such as Schwanniomyces occidentalis; and filamentous fungi such as, e.g., Neurospora, Penicillium, Tolypocladium, and Aspergillus hosts such as A. nidulans and A. niger.

[0115] Suitable host cells for the expression of glycosylated antibody are derived from multicellular organisms. Examples of invertebrate cells include plant and insect cells. Numerous baculoviral strains and variants and corresponding permissive insect host cells from hosts such as Spodoptera frugiperda (caterpillar), Aedes aegypti (mosquito), Aedes albopictus (mosquito), Drosophila melanogaster (fruitfly), and Bombyx mori have been identified. A variety of viral strains for transfection are publicly available, e.g., the L-1 variant of Autographa californica NPV and the Bm-5 strain of Bombyx mori NP\7, and such viruses may be used as the virus herein according to the present invention, particularly for transfection of Spodoptera frugiperda cells.

[0116] Plant cell cultures of cotton, corn, potato, soybean, petunia, tomato, tobacco, lemna, and other plant cells can also be utilized as hosts. However, interest has been greatest in vertebrate cells, and propagation of vertebrate cells in culture (tissue culture) has become routine procedure. Examples of useful mammalian host cell lines are Chinese hamster ovary cells, including CHOK1 cells (ATCC CCL61), DXB-11, DG-44, and Chinese hamster ovary cells/-DHFR (CHO, Urlaub et al., Proc. Natl. Acad. Sci. USA 77: 4216 (1980)); monkey kidney CV1 line transformed by SV40 (COS-7, ATCC CRL 1651); human embryonic kidney line (293 or 293 cells subcloned for growth in suspension culture, [Graham et al., J. Gen Viral. 36: 59 (1977)]; baby hamster kidney cells (BHK, ATCC CCL 10); mouse sertoli cells (TM4, Mather, Biol. Reprod. 23: 243-251 (1980)); monkey kidney cells (CV1 ATCC CCL 70); African green monkey kidney cells (VERO-76, ATCC CRL-1587); human cervical carcinoma cells (HELA, ATCC CCL 2); canine kidney cells (MDCK, ATCC CCL 34); buffalo rat liver cells (BRL 3A, ATCC CRL 1442); human lung cells (W138, ATCC CCL 75); human liver cells (Hep G2, HB 8065); mouse mammary tumor (MMT 060562, ATCC CCL51); TRI cells (Mather et al., Annals NY Acad. Sci. 383: 44-68 (1982)); MRC 5 cells; FS4 cells; and a human hepatoma line (Hep G2).

[0117] Host cells are transformed or transfected with the above-described expression or cloning vectors for antibody production and cultured in conventional nutrient media modified as appropriate for inducing promoters, selecting transformants, or amplifying the genes encoding the desired sequences. In addition, novel vectors and transfected cell lines with multiple copies of transcription units separated by a selective marker are particularly useful and preferred for the expression of antibodies, described herein.

[0118] For transfection of the expression vectors and production of the chimeric, humanized, or composite human antibodies described herein, the recipient cell line can be a myeloma cell. Myeloma cells can synthesize, assemble and secrete immunoglobulins encoded by transfected immunoglobulin nucleic acid sequences and possess the mechanism for glycosylation of the immunoglobulin. For example, in some embodiments, the recipient cell is the recombinant Ig-producing myeloma cell SP2/0 (ATCC #CRL 8287). SP2/0 cells produce only immunoglobulin encoded by the transfected genes. Myeloma cells can be grown in culture or in the peritoneal cavity of a mouse, where secreted immunoglobulin can be obtained from ascites fluid. Other suitable recipient cells include lymphoid cells such as B lymphocytes of human or non-human origin, hybridoma cells of human or non-human origin, or interspecies heterohybridoma cells. An expression vector carrying a chimeric, humanized, or composite human antibody construct or antibody polypeptide described herein can be introduced into an appropriate host cell by any of a variety of suitable means, including such biochemical means as transformation, transfection, conjugation, protoplast fusion, calcium phosphate-precipitation, and application with polycations such as diethylaminoethyl (DEAE) dextran, and such mechanical means as electroporation, direct microinjection, and microprojectile bombardment. Johnston et al., 240 Science 1538 (1988), as known to one of ordinary skill in the art.

[0119] Yeast provides certain advantages over bacteria for the production of immunoglobulin H and L chains. Yeasts carry out post-translational peptide modifications including glycosylation. A number of recombinant DNA strategies exist that utilize strong promoter sequences and high copy number plasmids which can be used for production of the desired proteins in yeast. Yeast recognizes leader sequences of cloned mammalian gene products and secretes peptides bearing leader sequences (i.e., pre-peptides). Hitzman et al., 11th Intl. Conf. Yeast, Genetics & Molec. Biol. (Montpelier, France, 1982). Yeast gene expression systems can be routinely evaluated for the levels of production, secretion and the stability of antibody polypeptide or antigen-binding fragment peptide thereof, and assembled chimeric, humanized, or composite human antibodies, fragments and regions thereof. Any of a series of yeast gene expression systems incorporating promoter and termination elements from the actively expressed genes coding for glycolytic enzymes produced in large quantities when yeasts are grown in media rich in glucose can be utilized. Known glycolytic genes can also provide very efficient transcription control signals. For example, the promoter and terminator signals of the phosphoglycerate kinase (PGK) gene can be utilized. A number of approaches can be taken for evaluating optimal expression plasmids for the expression of cloned immunoglobulin cDNAs in yeast.

[0120] Bacterial strains can also be utilized as hosts for the production of the antibody molecules or fragments thereof described herein, E. coli K12 strains such as E. coli W3110 (ATCC 27325), Bacillus species, enterobacteria such as Salmonella typhimurium or Serratia marcescens, and various Pseudomonas species can be used. Plasmid vectors containing replicon and control sequences which are derived from species compatible with a host cell are used in connection with these bacterial hosts. The vector carries a replication site, as well as specific genes which are capable of providing phenotypic selection in transformed cells. A number of approaches can be taken for evaluating the expression plasmids for the production of chimeric, humanized, or composite humanized antibodies and fragments thereof encoded by the cloned immunoglobulin cDNAs or CDRs in bacteria (see Glover, 1985; Ausubel, 1987, 1993; Sambrook, 1989; Colligan, 1992-1996).

[0121] Host mammalian cells can be grown in vitro or in vivo. Mammalian cells provide post-translational modifications to immunoglobulin protein molecules including leader peptide removal, folding and assembly of H and L chains, glycosylation of the antibody molecules, and secretion of functional antibody protein. Mammalian cells which can be useful as hosts for the production of antibody proteins, in addition to the cells of lymphoid origin described above, include cells of fibroblast origin, such as Vero (ATCC CRL 81) or CHO-K1 (ATCC CRL 61) cells. Exemplary eukaryotic cells that can be used to express polypeptides include, but are not limited to, COS cells, including COS 7 cells; 293 cells, including 293-6E cells; CHO cells, including CHO-S and DG44 cells; PER.C6® cells (Crucell); and NSO cells. In some embodiments, a particular eukaryotic host cell is selected based on its ability to make desired post-translational modifications to the variable heavy chains and/or variable light chains. For example, in some embodiments, CHO cells produce polypeptides that have a higher level of sialylation than the same polypeptide produced in 293 cells.

[0122] In some embodiments, polypeptides of the antibodies or antigen-binding fragment thereof, disclosed herein can be produced in vivo in an animal that has been engineered or transfected with one or more nucleic acid molecules encoding the polypeptides, according to any suitable method.

[0123] In some embodiments, an antibody or antigen-binding fragment thereof is produced in a cell-free system. Non-limiting exemplary cell-free systems are described, e.g., in Sitaraman et al., Methods Mol. Biol. 498: 229-44 (2009); Spirin, Trends Biotechnol. 22: 538-45 (2004); and Endo et al., Biotechnol. Adv. 21: 695-713 (2003).

[0124] Many vector systems are available for the expression of H and L chain nucleic acid sequence in mammalian cells (see Glover, 1985). Different approaches can be followed to obtain complete H2L2 antibodies. As discussed above, it is possible to co-express H and L chains in the same cells to achieve intracellular association and linkage of H and L chains into complete tetrameric H2L2 antibodies and/or antigen-binding fragment peptides. The co-expression can occur by using either the same or different plasmids in the same host. Genes for both H and L chains and/or CDR3 regions peptides can be placed into the same plasmid, which is then transfected into cells, thereby selecting directly for cells that express both chains. Alternatively, cells can be transfected first with a plasmid encoding one chain, for example the L chain, followed by transfection of the resulting cell line with an H chain plasmid containing a second selectable marker. Cell lines producing antigen-binding peptide fragments and/or H₂L₂ molecules via either route could be transfected with plasmids encoding additional copies of peptides, H, L, or H plus L chains in conjunction with additional selectable markers to generate cell lines with enhanced properties, such as higher production of assembled H2L2 antibody molecules or enhanced stability of the transfected cell lines.

[0125] Additionally, plants have emerged as a convenient, safe and economical alternative main-stream expression systems for recombinant antibody production, which are based on large scale culture of microbes or animal cells. Antibodies can be expressed in plant cell culture, or plants grown conventionally. The expression in plants may be systemic, limited to sub-cellular plastids, or limited to seeds (endosperms). Several plant-derived antibodies have reached advanced stages of development (see, e.g., Biolex, NC).

[0126] In some aspects, provided herein are methods and systems for the production of a humanized antibody, which is prepared by a process which comprises maintaining a host transformed with a first expression vector which encodes the light chain of the humanized antibody and with a second expression vector which encodes the heavy chain of the humanized antibody under such conditions that each chain is expressed and isolating the humanized antibody formed by assembly of the thus-expressed chains. The first and second expression vectors can be the same vector. Also provided herein are DNA sequences encoding the light chain or the heavy chain of the humanized antibody; an expression vector which incorporates a said DNA sequence; and a host transformed with a said expression vector. Generating a humanized antibody from the sequences and information provided herein can be practiced by those of ordinary skill in the art without undue experimentation. In one approach, there are four general steps employed to humanize a monoclonal antibody. These are: (1) determining the nucleotide and predicted amino acid sequence of the starting antibody light and heavy variable domains; (2) designing the humanized antibody, i.e., deciding which antibody framework region to use during the humanizing process; (3) the actual humanizing methodologies/techniques; and (4) the transfection and expression of the humanized antibody.

### Purification

[0127] In one aspect, disclosed herein is a purified antibody or antigen-binding fragment as provided herein. Once expressed, the whole antibodies, their dimers, individual light and heavy chains, or other immunoglobulin forms of the present invention can be recovered and purified by known techniques, e.g., immunoabsorption or immunoaffinity chromatography, chromatographic methods such as HPLC (high performance liquid chromatography), ammonium sulfate precipitation, gel electrophoresis, or any combination of these. See generally, Scopes, PROTEIN PURIF. (Springer-Verlag, NY, 1982).

[0128] Substantially pure immunoglobulins of at least about 90% to 95% homogeneity are advantageous, as are those with 98% to 99% or more homogeneity, particularly for pharmaceutical uses. When using recombinant techniques, the antibody can be produced intracellularly, in the periplasmic space, or directly secreted into the medium, including from microbial cultures. If the antibody is produced intracellularly, as a first step, the particulate debris, either host cells or lysed fragments, is removed, for example, by centrifugation or ultrafiltration. Better et al. Science 240: 1041-1043 (1988); ICSU Short Reports 10: 105 (1990); and Proc. Natl. Acad. Sci. USA 90: 457-461 (1993) describe a procedure for isolating antibodies which are secreted to the periplasmic space of E. coli. (See also, [Carter et al., Bio/Technology 10: 163-167 (1992)].

[0129] The antibody composition prepared from microbial or mammalian cells can be purified using, for example, hydroxylapatite chromatography cation or avian exchange chromatography, and affinity chromatography, with affinity chromatography being the preferred purification technique. The suitability of protein A as an affinity ligand depends on the species and isotype of any immunoglobulin Fe domain that is present in the antibody. Protein A can be used to purify antibodies that are based on human γ1, γ2, or γ4 heavy chains (Lindmark et al., J. Immunol. Meth. 62: 1-13 (1983)). Protein G is recommended for all mouse isotypes and for human y3 (Guss et al., EMBO J. 5: 15671575 (1986)). The matrix to which the affinity ligand is attached is most often agarose, but other matrices are available. Mechanically stable matrices such as controlled pore glass or poly(styrenedivinyl)benzene allow for faster flow rates and shorter processing times than can be achieved with agarose. Where the antibody comprises a C_{H}3 domain, the Bakerbond ABX™ resin (J. T. Baker, Phillipsburg, N.J.) is useful for purification. Other techniques for protein purification such as fractionation on an ion-exchange column, ethanol precipitation, Reverse Phase HPLC, chromatography on silica, chromatography on heparin SEPHAROSE™ chromatography on an anion or cation exchange resin (such as a polyaspartic acid column), chromatofocusing, SDS-PAGE, and ammonium sulfate precipitation are also available depending on the antibody to be recovered. Once purified, partially or to homogeneity as desired, a humanized or composite human antibody can then be used therapeutically or in developing and performing assay procedures, immunofluorescent staining, and the like. See generally, Vols. I & II Immunol. Meth. (Lefkovits & Pernis, eds., Acad. Press, N Y, 1979 and 1981).

### Antibodies

### Antibody Terminology

[0130] As used herein, the term “antibody” refers to an immunoglobulin (Ig) whether natural or partly or wholly synthetically produced. The term also covers any polypeptide or protein having a binding domain which is, or is homologous to, an antigen-binding domain. The term further includes “antigen-binding fragments” and other interchangeable terms for similar binding fragments such as described below.

[0131] An antibody includes, but is not be limited to, any specific binding member, immunoglobulin class and/or isotype (e.g., IgG1, IgG2, IgG3, IgG4, IgM, IgA, IgD, IgE and IgM); and biologically relevant fragment or specific binding member thereof. Thus, an antibody includes, for example, monoclonal antibodies, chimeric antibodies, humanized antibodies, human antibodies, recombinant antibodies, chemically engineered antibodies, deimmunized antibodies, affinity-matured antibodies, multispecific antibodies (for example, bispecific antibodies and polyreactive antibodies), heteroconjugate antibodies, antibody fragments, and combinations thereof (e.g., a monoclonal antibody that is also deimmunized, a humanized antibody that is also deimmunized, etc.).

[0132] The present disclosure provides antibodies that find use in treatment and/or prevention of infection with SARS-CoV-2. The term “SARS-CoV-2 associated antibody” as used herein refers to an antibody specific for a SARS-CoV-2 associated antigen. In some embodiments, the SARS-CoV-2 associated antibody comprises at least one antigen-binding region specific for a SARS-CoV-2 associated antigen. Disclosed herein are the complete reconstructed nucleic acid consensus sequences and complete reconstructed polypeptide consensus sequences of the variable heavy chain (V_{H}) and variable light chain (V_{L}) of the antibodies. The nucleic acid and polypeptide sequences of the three complementarity-determining regions (CDRs) of the V_{H} and the V_{L} are also provided.

[0133] Native antibodies and native immunoglobulins are usually heterotetrameric glycoproteins of about 150,000 Daltons, composed of two identical light (L) chains and two identical heavy (H) chains. Each light chain is typically linked to a heavy chain by one covalent disulfide bond, while the number of disulfide linkages varies among the heavy chains of different immunoglobulin isotypes. Each heavy and light chain also has regularly spaced intrachain disulfide bridges. Each heavy chain has at one end a variable domain (“V_{H}”) followed by a number of constant domains (“C_{H}”). Each light chain has a variable domain at one end (“V_{L}”) and a constant domain (“C_{L}”) at its other end; the constant domain of the light chain is aligned with the first constant domain of the heavy chain, and the light-chain variable domain is aligned with the variable domain of the heavy chain. Particular amino acid residues are believed to form an interface between the light- and heavy-chain variable domains.

[0134] The antibodies or antigen-binding fragment thereof of the present disclosure can comprise a deletion at an end of a light chain. The antibodies or antigen-binding fragment thereof of the invention can comprise a deletion of 3 or more amino acids at an end of the light chain. The antibodies or antigen-binding fragment thereof of the invention can comprise a deletion of 7 or less amino acids at an end of the light chain. The antibodies or antigen-binding fragment thereof of the invention can comprise a deletion of 3, 4, 5, 6, or 7 amino acids at an end of the light chain.

[0135] The antibodies or antigen-binding fragment thereof of the present disclosure can comprise an insertion in a light chain. The antibodies or antigen-binding fragment thereof of the invention can comprise an insertion of 1, 2, 3, 4, 5, 6, 7, 8, 9, or 10, or more amino acids in the light chain. The antibodies or antigen-binding fragment thereof of the invention can comprise an insertion of 3 amino acids in the light chain.

[0136] A “variable region” of an antibody refers to the variable region of the antibody light chain or the variable region of the antibody heavy chain, either alone or in combination. The variable regions of the heavy and light chain each consist of four framework regions (FR) connected by three complementarity-determining regions (CDRs) also known as hypervariable regions. The CDRs in each chain are held together in close proximity by the FRs and, with the CDRs from the other chain, contribute to the formation of the antigen-binding site of antibodies. There are at least two techniques for determining CDRs: (1) an approach based on cross-species sequence variability (e.g., Kabat et al. Sequences of Proteins of Immunological Interest, (5th ed., 1991, National Institutes of Health, Bethesda Md.)); and (2) an approach based on crystallographic studies of antigen-antibody complexes (Allazikani et al. (1997) J. Molec. Biol. 273:927-948)). A CDR may refer to CDRs defined by either approach or by a combination of both approaches.

[0137] A “constant region” of an antibody refers to the constant region of the antibody light chain or the constant region of the antibody heavy chain, either alone or in combination. The constant region does not vary with respect to antigen specificity.

[0138] As used herein, the term “heavy chain region” includes amino acid sequences derived from the constant domains of an immunoglobulin heavy chain. A polypeptide comprising a heavy chain region comprises at least one of: a C_{H}1 domain, a hinge (e.g., upper, middle, and/or lower hinge region) domain, a C_{H}2 domain, a C_{H}3 domain, or a variant or fragment thereof. In an embodiment, an antibody or an antigen-binding fragment thereof may comprise the Fc region of an immunoglobulin heavy chain (e.g., a hinge portion, a C_{H}2 domain, and a C_{H}3 domain). In another embodiment, an antibody or an antigen-binding fragment thereof lacks at least a region of a constant domain (e.g., all or part of a C_{H}2 domain). In certain embodiments, at least one, and preferably all, of the constant domains are derived from a human immunoglobulin heavy chain. For example, in one preferred embodiment, the heavy chain region comprises a fully human hinge domain. In other preferred embodiments, the heavy chain region comprising a fully human Fc region (e.g., hinge, C_{H}2 and C_{H}3 domain sequences from a human immunoglobulin). In certain embodiments, the constituent constant domains of the heavy chain region are from different immunoglobulin molecules. For example, a heavy chain region of a polypeptide may comprise a domain derived from an IgG1 molecule and a hinge region derived from an IgG3 or IgG4 molecule. In other embodiments, the constant domains are chimeric domains comprising regions of different immunoglobulin molecules. For example, a hinge may comprise a first region from an IgG1 molecule and a second region from an IgG3 or IgG4 molecule. As set forth above, it will be understood by one of ordinary skill in the art that the constant domains of the heavy chain region may be modified such that they vary in amino acid sequence from the naturally occurring (wild-type) immunoglobulin molecule. That is, the polypeptides of the invention disclosed herein may comprise alterations or modifications to one or more of the heavy chain constant domains (C_{H}1, hinge, C_{H}2 or C_{H}3) and/or to the light chain constant domain (C_{L}). Exemplary modifications include additions, deletions or substitutions of one or more amino acids in one or more domains.

[0139] The antibodies or antigen-binding fragment thereof of the present disclosure can comprise a CDR3 region that is a length of at least about 10, 11, 12, 13, 14, 15, 16, 17, 18, 19, 20, 21, 22, 23, 24, 25, 26, 27, 28, 29, or 30 amino acids in length. The antibodies or antigen-binding fragment thereof of the present disclosure can comprise a CDR3 region that is at least about 18 amino acids in length.

[0140] As used herein, the term “hinge region” includes the region of a heavy chain molecule that joins the C_{H}1 domain to the C_{H}2 domain. This hinge region comprises approximately 25 residues and is flexible, thus allowing the two N-terminal antigen-binding regions to move independently. Hinge regions can be subdivided into three distinct domains: upper, middle, and lower hinge domains (Roux et al. J. Immunol. 1998 161:4083).

[0141] As used herein, the term “Fv” is the minimum antibody fragment that contains a complete antigen-recognition and -binding site. This fragment consists of a dimer of one heavy- and one light-chain variable region domain in tight, non-covalent association.

[0142] “Heavy chain variable region” or “V_{H}” with regard to an antibody refers to the fragment of the heavy chain that contains three CDRs interposed between flanking stretches known as framework regions, these framework regions are generally more highly conserved than the CDRs and form a scaffold to support the CDRs.

[0143] Six hypervariable loops (three loops each from the H and L chain) contribute the amino acid residues for antigen-binding and confer antigen-binding specificity to the antibody. However, even a single variable domain (or half of an Fv comprising only three CDRs specific for an antigen) has the ability to recognize and bind antigen, although at a lower affinity than the entire binding site.

[0144] “Framework” or FR residues are those variable domain residues other than the hypervariable region residues.

[0145] It is understood in the art that an antibody is a glycoprotein having at least two heavy (H) chains and two light (L) chains interconnected by disulfide bonds, or an antigen-binding portion thereof. A heavy chain is comprised of a heavy chain variable region (V_{H}) and a heavy chain constant region (C_{H}1, C_{H}2 and C_{H}3). A light chain is comprised of a light chain variable region (VL) and a light chain constant region (C_{L}). The variable regions of both the heavy and light chains comprise framework regions (FRs or FWRs) and hypervariable regions (HVRs). The HVRs are the amino acid residues of an antibody that are responsible for antigen binding. The hypervariable region generally comprises amino acid residues from a complementarity determining region (CDR), which have the highest sequence variability and/or involved in antigen recognition. With the exception of CDR1 in V_{H}, CDRs generally comprise the amino acid residues that form the hypervariable loops. CDRs also comprise “specificity determining residues,” or “SDRs,” which are residues that contact antigen. SDRs are contained within regions of the CDRs called abbreviated-CDRs, or a-CDRs. Exemplary a-CDRs (a-CDR-L1, a-CDR-L2, a-CDR-L3, a-CDR-H1, a-CDR-H2, and a-CDR-H3) occur at amino acid residues 31-34 of L1, 50-55 of L2, 89-96 of L3, 31-35B of H1, 50-58 of H2, and 95-102 of H3. (See, e.g., Fransson, Front. Biosci. 13:1619-1633 (2008).)

[0146] Unless otherwise indicated, HVR residues and other residues in the variable domain (e.g., FR residues) are numbered herein according to Kabat et al., supra. A variable region is a domain of an antibody heavy or light chain that is involved in binding the antibody to antigen. (See, e.g., Kindt et al. Kuby Immunology, 6th ed., W.H. Freeman and Co., p. 91 (2007)). A single V_{H} or V_{L} domain may be sufficient to confer antigen-binding specificity. Furthermore, antibodies that bind a particular antigen may be isolated using a V_{H} or V_{L} domain from an antibody that binds the antigen to screen a library of complementary V_{L} or V_{H} domains, respectively. (See, e.g., Portolano et al., J. Immunol. 150:880-887 (1993); Clarkson et al., Nature 352:624-628 (1991)). The four FWR regions are typically more conserved while CDR regions (CDR1, CDR2 and CDR3) represent hypervariable regions and are arranged from NH2 terminus to the COOH terminus as follows: FWR1, CDR1, FWR2, CDR2, FWR3, CDR3, and FWR4. The variable regions of the heavy and light chains contain a binding domain that interacts with an antigen while, depending of the isotype, the constant region(s) may mediate the binding of the immunoglobulin to host tissues or factors. An antibody also includes chimeric antibodies, humanized antibodies, and recombinant antibodies, human antibodies generated from a transgenic non-human animal, as well as antibodies selected from libraries using enrichment technologies available to the artisan.

[0147] The term “antibody heavy chain,” refers to the larger of the two types of polypeptide chains present in antibody molecules in their naturally occurring conformations, and which normally determines the class to which the antibody belongs.

[0148] The term “antibody light chain,” refers to the smaller of the two types of polypeptide chains present in antibody molecules in their naturally occurring conformations. Kappa (“κ”) and lambda (“λ”) light chains refer to the two major antibody light chain isotypes.

[0149] An antibody or antigen-binding fragment thereof “specifically binds” or “preferentially binds” to a target antigen if it binds with greater affinity and/or avidity than it binds to epitopes on unrelated polypeptides. The specificity of an antibody or antigen-binding fragment or portion thereof can be determined based on affinity and/or avidity. Methods to determine such specific binding are also well known in the art. According to certain embodiments of the present disclosure, the antibodies or antigen-binding fragment thereof can bind to a SARS-CoV-2 antigen but not to antigens from other viruses. In some embodiments, an antibody or antigen binding fragment thereof disclosed herein specifically bind to a target antigen disclosed herein.

[0150] The affinity, represented by the equilibrium constant for the dissociation (K_{D}) of an antigen with an antigen-binding protein, is a measure for the binding strength between an antigenic determinant and an antigen-binding site on the antigen-binding protein: the lesser the value of the K_{D}, the stronger the binding strength between an antigenic determinant and the antigen-binding molecule. Alternatively, the affinity can also be expressed as the affinity constant (K_{A}), which is 1/K_{D}). As will be clear to the skilled person, affinity can be determined in a manner known per se, depending on the specific antigen of interest. Accordingly, an antibody or antigen-binding fragment thereof as defined herein is said to be “specific for” a first target or antigen compared to a second target or antigen when it binds to the first antigen with an affinity (as described above, and suitably expressed, for example as a K_{D} value) that is at least 50 times, such as at least 100 times, and preferably at least 1000 times, and up to 10,000 times or more better than the affinity with which said amino acid sequence or polypeptide binds to another target or polypeptide. Preferably, when an antibody or antigen-binding fragment thereof is “specific for” a target or antigen, compared to another target or antigen, it can bind the target or antigen, but does not bind the other target or antigen. However, as understood by one of ordinary skill in the art, in some embodiments, where a binding site on a target is shared or partially shared by multiple, different ligands, an antibody or antigen-binding fragment thereof can specifically bind to a target, such as a SARS-CoV-2 antigen, and have the functional effect of, for example, inhibiting/preventing the spread of SARS-CoV-2 infection.

[0151] In some embodiments, an antibody provided herein has a dissociation constant (K_{D}) of about 1 μM, 100 nM, 10 nM, 5 nM, 2 nM, 1 nM, 0.5 nM, 0.1 nM, 0.05 nM, 0.01 nM, or 0.001 nM or less (e.g., 10⁻⁸ M or less, e.g., from 10⁻⁸ M to 10⁻¹³ M, e.g., from 10⁻⁹ M to 10⁻¹³ M). Another aspect of the invention provides for an antibody or antigen-binding fragment thereof with an increased affinity for its target, for example, an affinity matured antibody. An affinity matured antibody is an antibody with one or more alterations in one or more hypervariable regions (HVRs), compared to a parent antibody which does not possess such alterations, such alterations resulting in an improvement in the affinity of the antibody for antigen. These antibodies can bind to antigen with a K_{D} of about 5×10⁻⁹ M, 2×10⁻⁹ M, 1×10⁻⁹ M, 5×10⁻¹⁰ M, 2×10⁻⁹ M, 1×10⁻¹⁰ M, 5×10⁻¹¹ M, 1×10⁻¹¹ M, 5×10⁻¹² M, 1×10⁻¹² M, or less. In some embodiments, the present disclosure provides an antibody or antigen-binding fragment thereof which has an increased affinity of at least 1.5 fold, 2 fold, 2.5 fold, 3 fold, 4 fold, 5 fold, 10 fold, 20 fold or greater as compared to a germline antibody containing the heavy chain sequence and light chain sequence, or both. In other embodiments, an antibody is provided that competes for binding to the same epitope as an antibody as described herein. In some embodiments, the antibody or antigen-binding fragment thereof that binds to the same epitope, and/or competes for binding to the same epitope as an antibody exhibits effector function activities, such as, for example, Fc-mediated cellular cytotoxicity, including ADCC activity.

[0152] K_{D} can be measured by any suitable assay. For example, K_{D} can be measured by a radiolabeled antigen-binding assay (RIA) (see, e.g., Chen et al., J. Mol. Biol. 293:865-881 (1999); Presta et al., Cancer Res. 57:4593-4599 (1997)). For example, K_{D} can be measured using a surface plasmon resonance assay (e.g., using a BIACORE®-2000 or a BIACORE®-3000). For example, K_{D} can be measured using a competitive ELISA.

[0153] Avidity is the measure of the strength of binding between an antigen-binding molecule and the pertinent antigen. Avidity is related to both the affinity between an antigenic determinant and its antigen-binding site on the antigen-binding molecule, and the number of pertinent binding sites present on the antigen-binding molecule. Typically, antigen-binding proteins will bind to their cognate or specific antigen with a dissociation constant (K_{D} of 10⁻⁵ to 10⁻¹² M or less, and preferably 10⁻⁷ to 10⁻¹² M or less and more preferably 10⁻⁸ to 10⁻¹² M (i.e. with an association constant (K_{A}) of 10⁵ to 10¹² M⁻¹ or more, and preferably 10⁷ to 10¹² M⁻¹ or more and more preferably 10⁸ to 10¹² M⁻¹). Any K_{D} value greater than 10⁻⁴ M (or any K_{A} value lower than 10⁴ M⁻¹) is generally considered to indicate non-specific binding. The K_{D} for biological interactions which are considered meaningful (e.g., specific) are typically in the range of 10⁻¹⁰ M (0.1 nM) to 10⁻⁵ M (10000 nM). The stronger an interaction is, the lower is its K_{D}. Preferably, a binding site on an anti-LAP antibody or antigen-binding fragment thereof described herein will bind with an affinity less than 500 nM, preferably less than 200 nM, more preferably less than 10 nM, such as less than 500 pM. Specific binding of an antigen-binding protein to an antigen or antigenic determinant can be determined in any suitable manner known per se, including, for example, Scatchard analysis and/or competitive binding assays, such as radioimmunoassays (RIA), enzyme immunoassays (EIA) and sandwich competition assays, and the different variants thereof known per se in the art; as well as other techniques as mentioned herein.

[0154] The term “kₒₙ”, as used herein, is intended to refer to the rate constant for association of an antibody or antigen-binding fragment thereof to an antigen.

[0155] The term “k_{off}”, as used herein, is intended to refer to the rate constant for dissociation of an antibody or antigen-binding fragment thereof from the antibody/antigen complex.

### Computationally Reconstructed Antibodies

[0156] Provided herein are reconstructed polypeptide and nucleic acid consensus sequences for SARS-CoV-2 associated antibodies. The consensus sequences are reconstructed in silico. The term “polypeptide consensus sequence” as used herein refers to an amino acid sequence which comprises the most frequently occurring amino acid residues at each location in all immunoglobulins of any particular subclass or subunit structure. The polypeptide consensus sequence may be based on immunoglobulins of a particular species or of many species. A polypeptide “consensus” sequence, “consensus” structure, or “consensus” antibody is understood to encompass a human polypeptide consensus sequence as described in certain embodiments provided herein, and to refer to an amino acid sequence which comprises the most frequently occurring amino acid residues at each location in all human immunoglobulins of any particular subclass or subunit structure. The embodiments herein provide consensus human structures and consensus structures, which consider other species in addition to human.

[0157] The term, “nucleic acid consensus sequence” as used herein refers to a nucleic acid sequence, which comprises the most frequently occurring nucleotide residues at each location in all immunoglobulin nucleic acid sequence of any particular subclass or subunit structure. The nucleic acid consensus sequence may be based on immunoglobulins of a particular species or of many species. A nucleic acid “consensus” sequence, or “consensus” structure, is understood to encompass a human nucleic acid consensus sequence as described in certain embodiments of this invention, and to refer to a nucleic acid sequence which comprises the most frequently occurring nucleotide residues at each location in all human immunoglobulins nucleic acid of any particular subclass or subunit structure.

[0158] Provided herein are consensus human structures. Methods to computationally reconstruct the consensus sequences from RNA seq data are described in the examples herein. Non limiting examples of computational tools known in the art for reconstructing full-length antibody repertoires including MIGEC (Shugay et al. 2014), PRESTO (Vander Heiden et al. 2014), MiXCR (Bolotin et al. 2015), and IGREPERTOIRECONSTRUCTOR (Safonova et al. 2015). In some embodiments, the TraCeR pipeline by Stubbington and Teichmann is implemented, which uses de novo assembly after a prefiltering step against a custom database containing in silico combinations for all known human V and J gene segments/alleles in the International Immunogenetics Information System (IMGT) repository. In some embodiments, another pipeline, VDJPuzzle, is implemented which filters in reads by mapping to TCR genes followed by a Trinity-based assembly; whereby the total reads are then mapped back to the assemblies in order to retrieve reads missed in the initial mapping step, followed by another round of assembly with Trinity. An exemplary method for computationally reconstructing consensus sequences can comprise somatic sequence identification, manual IGV investigation and (if necessary) correction of somatic vdj sequence and identification of germline sequence and CDR regions.

[0159] In some embodiments, RNA-seq FASTQ files retrieved for patients e.g., a COVID-19 patient are recorded and analyzed. Kallisto, BWA, MiXCR or other known tools can be used, in some embodiments, to perform a first alignment of RNA-seq samples to reference V, D and J genes of immunoglobulins in order to identify the repertoire present in the samples. In further embodiments, identical CDR3 sequences are identified and grouped in clonotypes (Bolotin D A et al., Nature Methods, 2015; Bolotin D A et al. Nature Biotechnology, 2017). VDJ tools are used, in some embodiments, (Shugay M. et al. PLoS Computational Biology, 2015) to filter out nonfunctional (non-coding) clonotypes and to compute basic diversity statistics. In further embodiments, non-functional clonotypes are identified as those containing a stop codon or frameshift in their receptor sequence. In some embodiments, the diversity of the Ig repertoire is obtained based on the effective number of species which is calculated as the exponent of the Shannon-Wiener Entropy index (MacArthur RH. Biological reviews. 1965).

[0160] In some embodiments, further alignments against the immunoglobulin segments present in the samples are performed for viewing the results to explore the frequency distribution of sequence mismatches along the V, D, J gene segments and, in particular in the CDR3 region length statistics. This alignment step can be useful, for example, for summarizing repertoires, as well as offering a detailed view of rearrangements and region alignments for individual query sequences. Exemplary methodology for alignment and assembly is described in the examples herein.

[0161] In some embodiments, the immunoglobulin segments present in the samples are identified using IMGT reference files or equivalent. In some instances, the heavy D segment and light V-J junction sequences can be assembled using an assembler. Non limiting examples of assembler known in the art include Trinity and V'DJer. A FASTA file with corrected heavy D and light V-J junction sequences can be generated for each sample in some embodiments. In addition to the assembled FASTA files, germline FASTA files can be generated, for example, by using IgBLAST v1.9.0 [Ye J, et al Nucleic Acids Research, 2013] and the IMGT database. In further embodiments, the somatic FASTA sequence can be input to IgBLAST to obtain the closest segment ids for the heavy and light chain. The germline FASTA can be generated by merging corresponding segment sequences from the IMGT database. The final assembled FASTA sequences can serve as ‘reference’ sequences for the alignment and visualization steps.

[0162] In further embodiments, using the reference files generated from the assembly step, the FASTQs can be aligned in BowTie2 default mode. Other alignment tools, known in the art, for example STAR or TopHat2 can also be used. The output BAM file can be used for IGV visualization and mutations in the patient can be observed.

[0163] In further embodiments, the identification of the CDR3 region and corresponding V, D, and J chains from the final assembled FASTA sequences can be done, for example with IgBLAST. The standardized output using version v.1.9.0 of IgBLAST can be delivered by wrapping IgBLASTn with default parameters in some instances. In other instances, the output from the IgBLAST service can be extracted using a purpose-built parser tool designed to extract the CDR1, CDR2, and CDR3 nucleotide and amino acid sequences.

### Exemplary SARS-CoV-2 Associated Antibodies or Antigen-Binding Fragments Thereof

[0164] The present disclosure provides SARS-CoV-2 associated antibodies or antigen-binding fragments comprising a consensus sequence. In some embodiments, the antibodies or antigen-binding fragment thereof neutralize SARS-CoV-2.

[0165] In one aspect, an antibody or antigen-binding fragment thereof is provided, wherein the antibody or antigen-binding fragment thereof comprises a heavy chain variable domain (V_{H}) having at least 90%, 91%, 92%, 93%, 94%, 95%, 96%, 97%, 98%, 99%, or 100% sequence identity to the amino acid sequence of any one of SEQ ID NOs: 17501-18750. In some embodiments, a V_{H} sequence having at least 90%, 91%, 92%, 93%, 94%, 95%, 96%, 97%, 98%, or 99% identity contains substitutions (e.g., conservative substitutions), insertions, or deletions relative to the reference sequence, but an antibody or antigen-binding fragment thereof comprising that sequence retains the ability to bind to same antigen as of the parent (e.g., SARS-CoV-2 associated antigen). In some embodiments, a total of 1 to 10 amino acids have been substituted, inserted and/or deleted in the amino acid sequence of any one of SEQ ID NOs: 17501-18750. In some embodiments, substitutions, insertions, or deletions occur in regions outside the CDRs (e.g., in the FRs). Optionally, the antibody or antigen-binding fragment thereof comprises the V_{H} sequence of any one of SEQ ID NOs: 17501-18750, including one or more post-translational modifications of that sequence.

[0166] In some embodiments, the VH comprises one, two or three CDRs selected from: (a) CDR-H1, comprising the amino acid sequence of any one of SEQ ID NOs: 10001-11250, (b) CDR-H2, comprising the amino acid sequence of any one of SEQ ID NOs: 12501-13750, and (c) CDR-H3, comprising the amino acid sequence of any one of SEQ ID NOs: 15001-16250.

[0167] In some embodiments, the VH comprises one, two or three CDRs selected from: (a) CDR-H1, comprising the amino acid sequence of any one of SEQ ID NOs: 10001-11250, (b) CDR-H2, comprising the amino acid sequence of any one of SEQ ID NOs: 12501-13750, and (c) CDR-H3, comprising the amino acid sequence of any one of SEQ ID NOs: 15001-16250, wherein the selected CDR-H1, CDR-H2, and CDR-H3 are paired according to Table 1.

[0168] In one aspect, an antibody or antigen-binding fragment thereof is provided, wherein the antibody or antigen-binding fragment thereof comprises a light chain variable domain (V_{L}) having at least 90%, 91%, 92%, 93%, 94%, 95%, 96%, 97%, 98%, 99%, or 100% sequence identity to the amino acid sequence of any one of SEQ ID NOs: 18751-20000. In some embodiments, a V_{L} sequence having at least 90%, 91%, 92%, 93%, 94%, 95%, 96%, 97%, 98%, or 99% identity contains substitutions (e.g., conservative substitutions), insertions, or deletions relative to the reference sequence, but an antibody or antigen-binding fragment thereof comprising that sequence retains the ability to bind to same antigen as the parent (e.g., SARS-CoV-2 associated antigen). In some embodiments, a total of 1 to 10 amino acids have been substituted, inserted and/or deleted in the amino acid sequence of any one of SEQ ID NOs: 18751-20000. In some embodiments, the substitutions, insertions, or deletions occur in regions outside the CDRs (e.g., in the FRs). Optionally, the antibody or antigen-binding fragment thereof comprises the V_{L} sequence of any one of SEQ ID NOs: 18751-20000, including one or more post-translational modifications of that sequence.

[0169] In some embodiments, the V_{L} comprises one, two or three CDRs selected from: (a) CDR-L1, comprising the amino acid sequence of any one of SEQ ID NOs: 11251-12500, (b) CDR-L2, comprising the amino acid sequence of any one of SEQ ID NOs: 13751-15000, and (c) CDR-L3, comprising the amino acid sequence of any one of SEQ ID NOs: 16251-17500.

[0170] In some embodiments, the VL comprises one, two or three CDRs selected from: (a) CDR-L1, comprising the amino acid sequence of any one of SEQ ID NOs: 11251-12500, (b) CDR-L2, comprising the amino acid sequence of any one of SEQ ID NOs: 13751-15000, and (c) CDR-L3, comprising the amino acid sequence of any one of SEQ ID NOs: 16251-17500, wherein the selected CDR-L1, CDR-L2, and CDR-L3 are paired according to Table 1.

[0171] In one aspect, an antibody or antigen-binding fragment thereof is provided, wherein the antibody or antigen-binding fragment thereof comprises: (a) a V_{H} comprising the amino acid sequence of any one of SEQ ID NOs: 17501-18750, and (b) a V_{L}, comprising the amino acid sequence of any one of SEQ ID Nos: 18751-20000, and optionally including post-translational modifications of those sequences.

[0172] In one aspect, an antibody or antigen-binding fragment thereof is provided, wherein the antibody or antigen-binding fragment thereof comprises: (a) a VH comprising the amino acid sequence of any one of SEQ ID NOs: 17501-18750, and (b) a V_{L}, comprising the amino acid sequence of any one of SEQ ID Nos: 18751-20000, wherein the selected V_{H} and V_{L} are paired according to Table 1.

[0173] In one aspect, an antibody or antigen-binding fragment thereof is provided, wherein the antibody or antigen-binding fragment thereof comprises: (a) a CDR-H1 selected from any one of SEQ ID NOs: 10001-11250, and (b) a CDR-L1 selected from any one of SEQ ID NOs: 11251-12500, wherein the selected CDR-H1 and CDR-L1 are paired according to Table 1.

[0174] In one aspect, an antibody or antigen-binding fragment thereof is provided, wherein the antibody or antigen-binding fragment thereof comprises: (a) a CDR-H2 selected from any one of SEQ ID NOs: 12501-13750, and (b) a CDR-L2 selected from any one of SEQ ID NOs: 13751-15000, wherein the selected CDR-H2 and CDR-L2 are paired according to Table 1.

[0175] In one aspect, an antibody or antigen-binding fragment thereof is provided, wherein the antibody or antigen-binding fragment thereof comprises: (a) a CDR-H3 selected from any one of SEQ ID NOs: 15001-16250, and (b) a CDR-L3 selected from any one of SEQ ID NOs: 16251-17500, wherein the selected CDR-H3 and CDR-L3 are paired according to Table 1.

[0176] In one aspect, an antibody or antigen-binding fragment thereof is provided, wherein the antibody or antigen-binding fragment thereof comprises: (a) a CDR-H1 selected from any one of SEQ ID NOs: 10001-11250, a CDR-H2 selected from any one of SEQ ID NOs: 12501-13750, and a CDR-H3 selected from any one of SEQ ID NOs: 15001-16250, and (b) a CDR-L1 selected from any one of SEQ ID NOs: 11251-12500, a CDR-L2 selected from any one of SEQ ID NOs: 13751-15000, and a CDR-L3 selected from any one of SEQ ID NOs: 16251-17500, wherein the selected CDR-H1, CDR-H2, CDR-H3, CDR-L1, CDR-L2, and CDR-L3 are paired according to Table 1.

### TOTCOVID00425

[0177] In one aspect, the present disclosure provides an antibody or antigen-binding fragment thereof comprises one or more variable regions selected from the group consisting of (a) VH comprising the amino acid sequence of SEQ ID NO: 17869, (b) VL comprising the amino acid sequence of SEQ ID NO: 19119, and (c) a combination thereof.

[0178] In one aspect, the present disclosure provides an antibody or antigen-binding fragment thereof comprising at least one, two, three, four, five, or six CDRs selected from (a) CDR-H1 comprising the amino acid sequence of SEQ ID NO: 10369; (b) CDR-H2 comprising the amino acid sequence of SEQ ID NO: 12869; (c) CDR-H3 comprising the amino acid sequence of SEQ ID NO: 15369; (d) CDR-L1 comprising the amino acid sequence of SEQ ID NO: 11619; (e) CDR-L2 comprising the amino acid sequence of SEQ ID NO: 14119; and (f) CDR-L3 comprising the amino acid sequence of SEQ ID NO: 16619.

[0179] In one aspect, the present disclosure provides an antibody or antigen-binding fragment thereof comprising at least one, at least two, or all three VH CDR sequences selected from (a) CDR-H1 comprising the amino acid sequence of SEQ ID NO: 10369; (b) CDR-H2 comprising the amino acid sequence of SEQ ID NO: 12869; and (c) CDR-H3 comprising the amino acid sequence of SEQ ID NO: 15369; and (d) a VL comprising the amino acid sequence of SEQ ID NO: 19119.

[0180] In one aspect, the present disclosure provides an antibody or antigen-binding fragment thereof comprising at least one, at least two, or all three VL CDR sequences selected from (a) CDR-L1 comprising the amino acid sequence of SEQ ID NO: 11619; (b) CDR-L2 comprising the amino acid sequence of SEQ ID NO: 14119; and (c) CDR-L3 comprising the amino acid sequence of SEQ ID NO: 16619; and a VH comprising the amino acid sequence of SEQ ID NO: 17869.

[0181] In one aspect, the present disclosure provides an antibody or antigen-binding fragment thereof comprising the CDRs: CDR-H3 comprising the amino acid sequence of SEQ ID NO: 15369; and CDR-L3 comprising the amino acid sequence of SEQ ID NO: 16619.

[0182] In one aspect, the disclosure herein provides an antibody or antigen-binding fragment thereof comprising at least one, at least two, or all three VL CDR sequences selected from (a) CDR-L1 comprising the amino acid sequence of SEQ ID NO: 11619; (b) CDR-L2 comprising the amino acid sequence of SEQ ID NO: 14119 and (c) CDR-L3 comprising the amino acid sequence of SEQ ID NO: 16619. In one aspect, the disclosure provides an antibody or antigen-binding fragment thereof comprising at least one, at least two, or all three VH CDR sequences selected from (a) CDR-H1 comprising the amino acid sequence of SEQ ID NO: 10369; (b) CDR-H2 comprising the amino acid sequence of SEQ ID NO: 12869 and (c) CDR-H3 comprising the amino acid sequence of SEQ ID NO: 15369.

[0183] In one aspect, the disclosure provides an antibody or antigen-binding fragment thereof comprising the CDRs: (a) CDR-H1 comprising the amino acid sequence of SEQ ID NO: 10369; (b) CDR-H2 comprising the amino acid sequence of SEQ ID NO: 12869; (c) CDR-H3 comprising the amino acid sequence of SEQ ID NO: 15369; (d) CDR-L1 comprising the amino acid sequence of SEQ ID NO: 11619; (e) CDR-L2 comprising the amino acid sequence of SEQ ID NO: 14119; and (f) CDR-L3 comprising the amino acid sequence of SEQ ID NO: 16619.

[0184] In one aspect, an antibody or antigen-binding fragment thereof comprises a VH sequence having at least 90%, 91%, 92%, 93%, 94%, 95%, 96%, 97%, 98%, 99%, or 100% sequence identity to the amino acid sequence of SEQ ID NO: 17869. In some embodiments, a VH sequence having at least 90%, 91%, 92%, 93%, 94%, 95%, 96%, 97%, 98%, or 99% identity contains substitutions (e.g., conservative substitutions), insertions, or deletions relative to the reference sequence, but an antibody or antigen-binding fragment thereof comprising that sequence retains the ability to bind to antigen. In some embodiments, a total of 1 to 10 amino acids have been substituted, inserted and/or deleted in the amino acid sequence of SEQ ID NO: 17869 In some embodiments, substitutions, insertions, or deletions occur in regions outside the CDRs (e.g., in the FRs). Optionally, the antibody or antigen-binding fragment thereof comprises the VH sequence of the amino acid sequence of SEQ ID NO: 17869, including post-translational modifications of that sequence. In a particular embodiment, the VH comprises one, two or three CDRs selected from: (a) CDR-H1 comprising the amino acid sequence of SEQ ID NO: 10369, (b) CDR-H2 comprising the amino acid sequence of SEQ ID NO: 12869, and (c) CDR-H3 comprising the amino acid sequence of SEQ ID NO: 15369.

[0185] In one aspect, an antibody or antigen-binding fragment thereof is provided, wherein the antibody or antigen-binding fragment thereof comprises a light chain variable domain (VL) having at least 90%, 91%, 92%, 93%, 94%, 95%, 96%, 97%, 98%, 99%, or 100% sequence identity to the amino acid sequence of SEQ ID NO: 19119. In some embodiments, a VL sequence having at least 90%, 91%, 92%, 93%, 94%, 95%, 96%, 97%, 98%, or 99% identity contains substitutions (e.g., conservative substitutions), insertions, or deletions relative to the reference sequence, but an antibody or antigen-binding fragment thereof comprising that sequence retains the ability to bind to antigen. In some embodiments, a total of 1 to 10 amino acids have been substituted, inserted and/or deleted in any one of the amino acid sequence of SEQ ID NO: 19119. In some embodiments, the substitutions, insertions, or deletions occur in regions outside the CDRs (e.g., in the FRs). Optionally, the antibody or antigen-binding fragment thereof comprises the VL sequence of SEQ ID NO: 19119, including post-translational modifications of that sequence. In a particular embodiment, the VL comprises one, two or three CDRs selected from (a) CDR-L1 comprising the amino acid sequence of SEQ ID NO: 11619; (b) CDR-L2 comprising the amino acid sequence of SEQ ID NO: 14119; and (c) CDR-L3 comprising the amino acid sequence of SEQ ID NO: 16619.

[0186] In one aspect, an antibody or antigen-binding fragment thereof is provided, wherein the antibody or antigen-binding fragment thereof comprises a VH as in any of the embodiments provided above, and a VL as in any of the embodiments provided above. In some embodiments, the antibody comprises a VH comprising the amino acid sequence of SEQ ID NO: 17869, and a VL sequence in SEQ ID NO: 19119, including post-translational modifications of those sequences.

### TOTCOVID00316

[0187] In one aspect, the present disclosure provides an antibody or antigen-binding fragment thereof comprises one or more variable regions selected from the group consisting of (a) VH comprising the amino acid sequence of SEQ ID NO: 17760, (b) VL comprising the amino acid sequence of SEQ ID NO: 19010, and (c) a combination thereof.

[0188] In one aspect, the present disclosure provides an antibody or antigen-binding fragment thereof comprising at least one, two, three, four, five, or six CDRs selected from (a) CDR-H1 comprising the amino acid sequence of SEQ ID NO: 10260; (b) CDR-H2 comprising the amino acid sequence of SEQ ID NO: 12760; (c) CDR-H3 comprising the amino acid sequence of SEQ ID NO: 15260; (d) CDR-L1 comprising the amino acid sequence of SEQ ID NO: 11510; (e) CDR-L2 comprising the amino acid sequence of SEQ ID NO: 14010; and (f) CDR-L3 comprising the amino acid sequence of SEQ ID NO: 16510.

[0189] In one aspect, the present disclosure provides an antibody or antigen-binding fragment thereof comprising at least one, at least two, or all three VH CDR sequences selected from (a) CDR-H1 comprising the amino acid sequence of SEQ ID NO: 10260; (b) CDR-H2 comprising the amino acid sequence of SEQ ID NO: 12760; and (c) CDR-H3 comprising the amino acid sequence of SEQ ID NO: 15260; and (d) a VL comprising the amino acid sequence of SEQ ID NO: 19010.

[0190] In one aspect, the present disclosure provides an antibody or antigen-binding fragment thereof comprising at least one, at least two, or all three VL CDR sequences selected from (a) CDR-L1 comprising the amino acid sequence of SEQ ID NO: 11510; (b) CDR-L2 comprising the amino acid sequence of SEQ ID NO: 14010; and (c) CDR-L3 comprising the amino acid sequence of SEQ ID NO: 16510; and a VH comprising the amino acid sequence of SEQ ID NO: 17760.

[0191] In one aspect, the present disclosure provides an antibody or antigen-binding fragment thereof comprising the CDRs: CDR-H3 comprising the amino acid sequence of SEQ ID NO: 15260; and CDR-L3 comprising the amino acid sequence of SEQ ID NO: 16510.

[0192] In one aspect, the disclosure herein provides an antibody or antigen-binding fragment thereof comprising at least one, at least two, or all three VL CDR sequences selected from (a) CDR-L1 comprising the amino acid sequence of SEQ ID NO: 11510; (b) CDR-L2 comprising the amino acid sequence of SEQ ID NO: 14010 and (c) CDR-L3 comprising the amino acid sequence of SEQ ID NO: 16510. In one aspect, the disclosure provides an antibody or antigen-binding fragment thereof comprising at least one, at least two, or all three VH CDR sequences selected from (a) CDR-H1 comprising the amino acid sequence of SEQ ID NO: 10260; (b) CDR-H2 comprising the amino acid sequence of SEQ ID NO: 12760 and (c) CDR-H3 comprising the amino acid sequence of SEQ ID NO: 15260.

[0193] In one aspect, the disclosure provides an antibody or antigen-binding fragment thereof comprising the CDRs: (a) CDR-H1 comprising the amino acid sequence of SEQ ID NO: 10260; (b) CDR-H2 comprising the amino acid sequence of SEQ ID NO: 12760; (c) CDR-H3 comprising the amino acid sequence of SEQ ID NO: 15260; (d) CDR-L1 comprising the amino acid sequence of SEQ ID NO: 11510; (e) CDR-L2 comprising the amino acid sequence of SEQ ID NO: 14010; and (f) CDR-L3 comprising the amino acid sequence of SEQ ID NO: 16510.

[0194] In one aspect, an antibody or antigen-binding fragment thereof comprises a VH sequence having at least 90%, 91%, 92%, 93%, 94%, 95%, 96%, 97%, 98%, 99%, or 100% sequence identity to the amino acid sequence of SEQ ID NO: 17760. In some embodiments, a VH sequence having at least 90%, 91%, 92%, 93%, 94%, 95%, 96%, 97%, 98%, or 99% identity contains substitutions (e.g., conservative substitutions), insertions, or deletions relative to the reference sequence, but an antibody or antigen-binding fragment thereof comprising that sequence retains the ability to bind to antigen. In some embodiments, a total of 1 to 10 amino acids have been substituted, inserted and/or deleted in the amino acid sequence of SEQ ID NO: 17760. In some embodiments, substitutions, insertions, or deletions occur in regions outside the CDRs (e.g., in the FRs). Optionally, the antibody or antigen-binding fragment thereof comprises the VH sequence of the amino acid sequence of SEQ ID NO: 17760, including post-translational modifications of that sequence. In a particular embodiment, the VH comprises one, two or three CDRs selected from: (a) CDR-H1 comprising the amino acid sequence of SEQ ID NO: 10260, (b) CDR-H2 comprising the amino acid sequence of SEQ ID NO: 12760, and (c) CDR-H3 comprising the amino acid sequence of SEQ ID NO: 15260.

[0195] In one aspect, an antibody or antigen-binding fragment thereof is provided, wherein the antibody or antigen-binding fragment thereof comprises a light chain variable domain (VL) having at least 90%, 91%, 92%, 93%, 94%, 95%, 96%, 97%, 98%, 99%, or 100% sequence identity to the amino acid sequence of SEQ ID NO: 19010. In some embodiments, a VL sequence having at least 90%, 91%, 92%, 93%, 94%, 95%, 96%, 97%, 98%, or 99% identity contains substitutions (e.g., conservative substitutions), insertions, or deletions relative to the reference sequence, but an antibody or antigen-binding fragment thereof comprising that sequence retains the ability to bind to antigen. In some embodiments, a total of 1 to 10 amino acids have been substituted, inserted and/or deleted in any one of the amino acid sequence of SEQ ID NO: 19010. In some embodiments, the substitutions, insertions, or deletions occur in regions outside the CDRs (e.g., in the FRs). Optionally, the antibody or antigen-binding fragment thereof comprises the VL sequence of SEQ ID NO: 19010, including post-translational modifications of that sequence. In a particular embodiment, the VL comprises one, two or three CDRs selected from (a) CDR-L1 comprising the amino acid sequence of SEQ ID NO: 11510; (b) CDR-L2 comprising the amino acid sequence of SEQ ID NO: 14010; and (c) CDR-L3 comprising the amino acid sequence of SEQ ID NO: 16510.

[0196] In one aspect, an antibody or antigen-binding fragment thereof is provided, wherein the antibody or antigen-binding fragment thereof comprises a VH as in any of the embodiments provided above, and a VL as in any of the embodiments provided above. In some embodiments, the antibody comprises a VH comprising the amino acid sequence of SEQ ID NO: 17760, and a VL sequence in SEQ ID NO: 19010, including post-translational modifications of those sequences.

### TOTCOVID00761

[0197] In one aspect, the present disclosure provides an antibody or antigen-binding fragment thereof comprises one or more variable regions selected from the group consisting of (a) VH comprising the amino acid sequence of SEQ ID NO: 18205, (b) VL comprising the amino acid sequence of SEQ ID NO: 19455, and (c) a combination thereof.

[0198] In one aspect, the present disclosure provides an antibody or antigen-binding fragment thereof comprising at least one, two, three, four, five, or six CDRs selected from (a) CDR-H1 comprising the amino acid sequence of SEQ ID NO: 10705; (b) CDR-H2 comprising the amino acid sequence of SEQ ID NO: 13205; (c) CDR-H3 comprising the amino acid sequence of SEQ ID NO: 15705; (d) CDR-L1 comprising the amino acid sequence of SEQ ID NO: 11955; (e) CDR-L2 comprising the amino acid sequence of SEQ ID NO: 14455; and (f) CDR-L3 comprising the amino acid sequence of SEQ ID NO: 16955.

[0199] In one aspect, the present disclosure provides an antibody or antigen-binding fragment thereof comprising at least one, at least two, or all three VH CDR sequences selected from (a) CDR-H1 comprising the amino acid sequence of SEQ ID NO: 10705; (b) CDR-H2 comprising the amino acid sequence of SEQ ID NO: 13205; and (c) CDR-H3 comprising the amino acid sequence of SEQ ID NO: 15705; and (d) a VL comprising the amino acid sequence of SEQ ID NO: 19455.

[0200] In one aspect, the present disclosure provides an antibody or antigen-binding fragment thereof comprising at least one, at least two, or all three VL CDR sequences selected from (a) CDR-L1 comprising the amino acid sequence of SEQ ID NO: 11955; (b) CDR-L2 comprising the amino acid sequence of SEQ ID NO: 14455; and (c) CDR-L3 comprising the amino acid sequence of SEQ ID NO: 16955; and a VH comprising the amino acid sequence of SEQ ID NO: 18205.

[0201] In one aspect, the present disclosure provides an antibody or antigen-binding fragment thereof comprising the CDRs: CDR-H3 comprising the amino acid sequence of SEQ ID NO: 15705; and CDR-L3 comprising the amino acid sequence of SEQ ID NO: 16955.

[0202] In one aspect, the disclosure herein provides an antibody or antigen-binding fragment thereof comprising at least one, at least two, or all three VL CDR sequences selected from (a) CDR-L1 comprising the amino acid sequence of SEQ ID NO: 11955; (b) CDR-L2 comprising the amino acid sequence of SEQ ID NO: 14455 and (c) CDR-L3 comprising the amino acid sequence of SEQ ID NO: 16955. In one aspect, the disclosure provides an antibody or antigen-binding fragment thereof comprising at least one, at least two, or all three VH CDR sequences selected from (a) CDR-H1 comprising the amino acid sequence of SEQ ID NO: 10705; (b) CDR-H2 comprising the amino acid sequence of SEQ ID NO: 13205 and (c) CDR-H3 comprising the amino acid sequence of SEQ ID NO: 15705.

[0203] In one aspect, the disclosure provides an antibody or antigen-binding fragment thereof comprising the CDRs: (a) CDR-H1 comprising the amino acid sequence of SEQ ID NO: 10705; (b) CDR-H2 comprising the amino acid sequence of SEQ ID NO: 13205; (c) CDR-H3 comprising the amino acid sequence of SEQ ID NO: 15705; (d) CDR-L1 comprising the amino acid sequence of SEQ ID NO: 11955; (e) CDR-L2 comprising the amino acid sequence of SEQ ID NO: 14455; and (f) CDR-L3 comprising the amino acid sequence of SEQ ID NO: 16955.

[0204] In one aspect, an antibody or antigen-binding fragment thereof comprises a VH sequence having at least 90%, 91%, 92%, 93%, 94%, 95%, 96%, 97%, 98%, 99%, or 100% sequence identity to the amino acid sequence of SEQ ID NO: 18205. In some embodiments, a VH sequence having at least 90%, 91%, 92%, 93%, 94%, 95%, 96%, 97%, 98%, or 99% identity contains substitutions (e.g., conservative substitutions), insertions, or deletions relative to the reference sequence, but an antibody or antigen-binding fragment thereof comprising that sequence retains the ability to bind to antigen. In some embodiments, a total of 1 to 10 amino acids have been substituted, inserted and/or deleted in the amino acid sequence of SEQ ID NO: 18205. In some embodiments, substitutions, insertions, or deletions occur in regions outside the CDRs (e.g., in the FRs). Optionally, the antibody or antigen-binding fragment thereof comprises the VH sequence of the amino acid sequence of SEQ ID NO: 18205, including post-translational modifications of that sequence. In a particular embodiment, the VH comprises one, two or three CDRs selected from: (a) CDR-H1 comprising the amino acid sequence of SEQ ID NO: 10705, (b) CDR-H2 comprising the amino acid sequence of SEQ ID NO: 13205, and (c) CDR-H3 comprising the amino acid sequence of SEQ ID NO: 15705.

[0205] In one aspect, an antibody or antigen-binding fragment thereof is provided, wherein the antibody or antigen-binding fragment thereof comprises a light chain variable domain (VL) having at least 90%, 91%, 92%, 93%, 94%, 95%, 96%, 97%, 98%, 99%, or 100% sequence identity to the amino acid sequence of SEQ ID NO: 19455. In some embodiments, a VL sequence having at least 90%, 91%, 92%, 93%, 94%, 95%, 96%, 97%, 98%, or 99% identity contains substitutions (e.g., conservative substitutions), insertions, or deletions relative to the reference sequence, but an antibody or antigen-binding fragment thereof comprising that sequence retains the ability to bind to antigen. In some embodiments, a total of 1 to 10 amino acids have been substituted, inserted and/or deleted in any one of the amino acid sequence of SEQ ID NO: 19455. In some embodiments, the substitutions, insertions, or deletions occur in regions outside the CDRs (e.g., in the FRs). Optionally, the antibody or antigen-binding fragment thereof comprises the VL sequence of SEQ ID NO: 19455, including post-translational modifications of that sequence. In a particular embodiment, the VL comprises one, two or three CDRs selected from (a) CDR-L1 comprising the amino acid sequence of SEQ ID NO: 11955; (b) CDR-L2 comprising the amino acid sequence of SEQ ID NO: 14455; and (c) CDR-L3 comprising the amino acid sequence of SEQ ID NO: 16955.

[0206] In one aspect, an antibody or antigen-binding fragment thereof is provided, wherein the antibody or antigen-binding fragment thereof comprises a VH as in any of the embodiments provided above, and a VL as in any of the embodiments provided above. In some embodiments, the antibody comprises a VH comprising the amino acid sequence of SEQ ID NO: 18205, and a VL sequence in SEQ ID NO: 19455, including post-translational modifications of those sequences.

### TOTCOVID00540

[0207] In one aspect, the present disclosure provides an antibody or antigen-binding fragment thereof comprises one or more variable regions selected from the group consisting of (a) VH comprising the amino acid sequence of SEQ ID NO: 17984, (b) VL comprising the amino acid sequence of SEQ ID NO: 19234, and (c) a combination thereof.

[0208] In one aspect, the present disclosure provides an antibody or antigen-binding fragment thereof comprising at least one, two, three, four, five, or six CDRs selected from (a) CDR-H1 comprising the amino acid sequence of SEQ ID NO: 10484; (b) CDR-H2 comprising the amino acid sequence of SEQ ID NO: 12984; (c) CDR-H3 comprising the amino acid sequence of SEQ ID NO: 15484; (d) CDR-L1 comprising the amino acid sequence of SEQ ID NO: 11734; (e) CDR-L2 comprising the amino acid sequence of SEQ ID NO: 14234; and (f) CDR-L3 comprising the amino acid sequence of SEQ ID NO: 16734.

[0209] In one aspect, the present disclosure provides an antibody or antigen-binding fragment thereof comprising at least one, at least two, or all three VH CDR sequences selected from (a) CDR-H1 comprising the amino acid sequence of SEQ ID NO: 10484; (b) CDR-H2 comprising the amino acid sequence of SEQ ID NO: 12984; and (c) CDR-H3 comprising the amino acid sequence of SEQ ID NO: 15484; and (d) a VL comprising the amino acid sequence of SEQ ID NO: 19234.

[0210] In one aspect, the present disclosure provides an antibody or antigen-binding fragment thereof comprising at least one, at least two, or all three VL CDR sequences selected from (a) CDR-L1 comprising the amino acid sequence of SEQ ID NO: 11734; (b) CDR-L2 comprising the amino acid sequence of SEQ ID NO: 14234; and (c) CDR-L3 comprising the amino acid sequence of SEQ ID NO: 16734; and a VH comprising the amino acid sequence of SEQ ID NO: 17984.

[0211] In one aspect, the present disclosure provides an antibody or antigen-binding fragment thereof comprising the CDRs: CDR-H3 comprising the amino acid sequence of SEQ ID NO: 15484; and CDR-L3 comprising the amino acid sequence of SEQ ID NO: 16734.

[0212] In one aspect, the disclosure herein provides an antibody or antigen-binding fragment thereof comprising at least one, at least two, or all three VL CDR sequences selected from (a) CDR-L1 comprising the amino acid sequence of SEQ ID NO: 11734; (b) CDR-L2 comprising the amino acid sequence of SEQ ID NO: 14234 and (c) CDR-L3 comprising the amino acid sequence of SEQ ID NO: 16734. In one aspect, the disclosure provides an antibody or antigen-binding fragment thereof comprising at least one, at least two, or all three VH CDR sequences selected from (a) CDR-H1 comprising the amino acid sequence of SEQ ID NO: 10484; (b) CDR-H2 comprising the amino acid sequence of SEQ ID NO: 12984 and (c) CDR-H3 comprising the amino acid sequence of SEQ ID NO: 15484.

[0213] In one aspect, the disclosure provides an antibody or antigen-binding fragment thereof comprising the CDRs: (a) CDR-H1 comprising the amino acid sequence of SEQ ID NO: 10484; (b) CDR-H2 comprising the amino acid sequence of SEQ ID NO: 12984; (c) CDR-H3 comprising the amino acid sequence of SEQ ID NO: 15484; (d) CDR-L1 comprising the amino acid sequence of SEQ ID NO: 11734; (e) CDR-L2 comprising the amino acid sequence of SEQ ID NO: 14234; and (f) CDR-L3 comprising the amino acid sequence of SEQ ID NO: 16734.

[0214] In one aspect, an antibody or antigen-binding fragment thereof comprises a VH sequence having at least 90%, 91%, 92%, 93%, 94%, 95%, 96%, 97%, 98%, 99%, or 100% sequence identity to the amino acid sequence of SEQ ID NO: 17984. In some embodiments, a VH sequence having at least 90%, 91%, 92%, 93%, 94%, 95%, 96%, 97%, 98%, or 99% identity contains substitutions (e.g., conservative substitutions), insertions, or deletions relative to the reference sequence, but an antibody or antigen-binding fragment thereof comprising that sequence retains the ability to bind to antigen. In some embodiments, a total of 1 to 10 amino acids have been substituted, inserted and/or deleted in the amino acid sequence of SEQ ID NO: 17984. In some embodiments, substitutions, insertions, or deletions occur in regions outside the CDRs (e.g., in the FRs). Optionally, the antibody or antigen-binding fragment thereof comprises the VH sequence of the amino acid sequence of SEQ ID NO: 17984, including post-translational modifications of that sequence. In a particular embodiment, the VH comprises one, two or three CDRs selected from: (a) CDR-H1 comprising the amino acid sequence of SEQ ID NO: 10484, (b) CDR-H2 comprising the amino acid sequence of SEQ ID NO: 12984, and (c) CDR-H3 comprising the amino acid sequence of SEQ ID NO: 15484.

[0215] In one aspect, an antibody or antigen-binding fragment thereof is provided, wherein the antibody or antigen-binding fragment thereof comprises a light chain variable domain (VL) having at least 90%, 91%, 92%, 93%, 94%, 95%, 96%, 97%, 98%, 99%, or 100% sequence identity to the amino acid sequence of SEQ ID NO: 19234. In some embodiments, a VL sequence having at least 90%, 91%, 92%, 93%, 94%, 95%, 96%, 97%, 98%, or 99% identity contains substitutions (e.g., conservative substitutions), insertions, or deletions relative to the reference sequence, but an antibody or antigen-binding fragment thereof comprising that sequence retains the ability to bind to antigen. In some embodiments, a total of 1 to 10 amino acids have been substituted, inserted and/or deleted in any one of the amino acid sequence of SEQ ID NO: 19234. In some embodiments, the substitutions, insertions, or deletions occur in regions outside the CDRs (e.g., in the FRs). Optionally, the antibody or antigen-binding fragment thereof comprises the VL sequence of SEQ ID NO: 19234, including post-translational modifications of that sequence. In a particular embodiment, the VL comprises one, two or three CDRs selected from (a) CDR-L1 comprising the amino acid sequence of SEQ ID NO: 11734; (b) CDR-L2 comprising the amino acid sequence of SEQ ID NO: 14234; and (c) CDR-L3 comprising the amino acid sequence of SEQ ID NO: 16734.

[0216] In one aspect, an antibody or antigen-binding fragment thereof is provided, wherein the antibody or antigen-binding fragment thereof comprises a VH as in any of the embodiments provided above, and a VL as in any of the embodiments provided above. In some embodiments, the antibody comprises a VH comprising the amino acid sequence of SEQ ID NO: 17984, and a VL sequence in SEQ ID NO: 19234, including post-translational modifications of those sequences.

### TOTCOVID00347

[0217] In one aspect, the present disclosure provides an antibody or antigen-binding fragment thereof comprises one or more variable regions selected from the group consisting of (a) VH comprising the amino acid sequence of SEQ ID NO: 17791, (b) VL comprising the amino acid sequence of SEQ ID NO: 19041, and (c) a combination thereof.

[0218] In one aspect, the present disclosure provides an antibody or antigen-binding fragment thereof comprising at least one, two, three, four, five, or six CDRs selected from (a) CDR-H1 comprising the amino acid sequence of SEQ ID NO: 10291; (b) CDR-H2 comprising the amino acid sequence of SEQ ID NO: 12791; (c) CDR-H3 comprising the amino acid sequence of SEQ ID NO: 15291; (d) CDR-L1 comprising the amino acid sequence of SEQ ID NO: 11541; (e) CDR-L2 comprising the amino acid sequence of SEQ ID NO: 14041; and (f) CDR-L3 comprising the amino acid sequence of SEQ ID NO: 16541.

[0219] In one aspect, the present disclosure provides an antibody or antigen-binding fragment thereof comprising at least one, at least two, or all three VH CDR sequences selected from (a) CDR-H1 comprising the amino acid sequence of SEQ ID NO: 10291; (b) CDR-H2 comprising the amino acid sequence of SEQ ID NO: 12791; and (c) CDR-H3 comprising the amino acid sequence of SEQ ID NO: 15291; and (d) a VL comprising the amino acid sequence of SEQ ID NO: 19041.

[0220] In one aspect, the present disclosure provides an antibody or antigen-binding fragment thereof comprising at least one, at least two, or all three VL CDR sequences selected from (a) CDR-L1 comprising the amino acid sequence of SEQ ID NO: 11541; (b) CDR-L2 comprising the amino acid sequence of SEQ ID NO: 14041; and (c) CDR-L3 comprising the amino acid sequence of SEQ ID NO: 16541; and a VH comprising the amino acid sequence of SEQ ID NO: 17791.

[0221] In one aspect, the present disclosure provides an antibody or antigen-binding fragment thereof comprising the CDRs: CDR-H3 comprising the amino acid sequence of SEQ ID NO: 15291; and CDR-L3 comprising the amino acid sequence of SEQ ID NO: 16541.

[0222] In one aspect, the disclosure herein provides an antibody or antigen-binding fragment thereof comprising at least one, at least two, or all three VL CDR sequences selected from (a) CDR-L1 comprising the amino acid sequence of SEQ ID NO: 11541; (b) CDR-L2 comprising the amino acid sequence of SEQ ID NO: 14041 and (c) CDR-L3 comprising the amino acid sequence of SEQ ID NO: 16541. In one aspect, the disclosure provides an antibody or antigen-binding fragment thereof comprising at least one, at least two, or all three VH CDR sequences selected from (a) CDR-H1 comprising the amino acid sequence of SEQ ID NO: 10291; (b) CDR-H2 comprising the amino acid sequence of SEQ ID NO: 12791 and (c) CDR-H3 comprising the amino acid sequence of SEQ ID NO: 15291.

[0223] In one aspect, the disclosure provides an antibody or antigen-binding fragment thereof comprising the CDRs: (a) CDR-H1 comprising the amino acid sequence of SEQ ID NO: 10291; (b) CDR-H2 comprising the amino acid sequence of SEQ ID NO: 12791; (c) CDR-H3 comprising the amino acid sequence of SEQ ID NO: 15291; (d) CDR-L1 comprising the amino acid sequence of SEQ ID NO: 11541; (e) CDR-L2 comprising the amino acid sequence of SEQ ID NO: 14041; and (f) CDR-L3 comprising the amino acid sequence of SEQ ID NO: 16541.

[0224] In one aspect, an antibody or antigen-binding fragment thereof comprises a VH sequence having at least 90%, 91%, 92%, 93%, 94%, 95%, 96%, 97%, 98%, 99%, or 100% sequence identity to the amino acid sequence of SEQ ID NO: 17791. In some embodiments, a VH sequence having at least 90%, 91%, 92%, 93%, 94%, 95%, 96%, 97%, 98%, or 99% identity contains substitutions (e.g., conservative substitutions), insertions, or deletions relative to the reference sequence, but an antibody or antigen-binding fragment thereof comprising that sequence retains the ability to bind to antigen. In some embodiments, a total of 1 to 10 amino acids have been substituted, inserted and/or deleted in the amino acid sequence of SEQ ID NO: 17791. In some embodiments, substitutions, insertions, or deletions occur in regions outside the CDRs (e.g., in the FRs). Optionally, the antibody or antigen-binding fragment thereof comprises the VH sequence of the amino acid sequence of SEQ ID NO: 17791, including post-translational modifications of that sequence. In a particular embodiment, the VH comprises one, two or three CDRs selected from: (a) CDR-H1 comprising the amino acid sequence of SEQ ID NO: 10291, (b) CDR-H2 comprising the amino acid sequence of SEQ ID NO: 12791, and (c) CDR-H3 comprising the amino acid sequence of SEQ ID NO: 15291.

[0225] In one aspect, an antibody or antigen-binding fragment thereof is provided, wherein the antibody or antigen-binding fragment thereof comprises a light chain variable domain (VL) having at least 90%, 91%, 92%, 93%, 94%, 95%, 96%, 97%, 98%, 99%, or 100% sequence identity to the amino acid sequence of SEQ ID NO: 19041. In some embodiments, a VL sequence having at least 90%, 91%, 92%, 93%, 94%, 95%, 96%, 97%, 98%, or 99% identity contains substitutions (e.g., conservative substitutions), insertions, or deletions relative to the reference sequence, but an antibody or antigen-binding fragment thereof comprising that sequence retains the ability to bind to antigen. In some embodiments, a total of 1 to 10 amino acids have been substituted, inserted and/or deleted in any one of the amino acid sequence of SEQ ID NO: 19041. In some embodiments, the substitutions, insertions, or deletions occur in regions outside the CDRs (e.g., in the FRs). Optionally, the antibody or antigen-binding fragment thereof comprises the VL sequence of SEQ ID NO: 19041, including post-translational modifications of that sequence. In a particular embodiment, the VL comprises one, two or three CDRs selected from (a) CDR-L1 comprising the amino acid sequence of SEQ ID NO: 11541; (b) CDR-L2 comprising the amino acid sequence of SEQ ID NO: 14041; and (c) CDR-L3 comprising the amino acid sequence of SEQ ID NO: 16541.

[0226] In one aspect, an antibody or antigen-binding fragment thereof is provided, wherein the antibody or antigen-binding fragment thereof comprises a VH as in any of the embodiments provided above, and a VL as in any of the embodiments provided above. In some embodiments, the antibody comprises a VH comprising the amino acid sequence of SEQ ID NO: 17791, and a VL sequence in SEQ ID NO: 19041, including post-translational modifications of those sequences.

### TOTCOVID00124

[0227] In one aspect, the present disclosure provides an antibody or antigen-binding fragment thereof comprises one or more variable regions selected from the group consisting of (a) VH comprising the amino acid sequence of SEQ ID NO: 17614, (b) VL comprising the amino acid sequence of SEQ ID NO: 18864, and (c) a combination thereof.

[0228] In one aspect, the present disclosure provides an antibody or antigen-binding fragment thereof comprising at least one, two, three, four, five, or six CDRs selected from (a) CDR-H1 comprising the amino acid sequence of SEQ ID NO: 10114; (b) CDR-H2 comprising the amino acid sequence of SEQ ID NO: 12614; (c) CDR-H3 comprising the amino acid sequence of SEQ ID NO: 15114; (d) CDR-L1 comprising the amino acid sequence of SEQ ID NO: 11364; (e) CDR-L2 comprising the amino acid sequence of SEQ ID NO: 13864; and (f) CDR-L3 comprising the amino acid sequence of SEQ ID NO: 16364.

[0229] In one aspect, the present disclosure provides an antibody or antigen-binding fragment thereof comprising at least one, at least two, or all three VH CDR sequences selected from (a) CDR-H1 comprising the amino acid sequence of SEQ ID NO: 10114; (b) CDR-H2 comprising the amino acid sequence of SEQ ID NO: 12614; and (c) CDR-H3 comprising the amino acid sequence of SEQ ID NO: 15114; and (d) a VL comprising the amino acid sequence of SEQ ID NO: 18864.

[0230] In one aspect, the present disclosure provides an antibody or antigen-binding fragment thereof comprising at least one, at least two, or all three VL CDR sequences selected from (a) CDR-L1 comprising the amino acid sequence of SEQ ID NO: 11364; (b) CDR-L2 comprising the amino acid sequence of SEQ ID NO: 13864; and (c) CDR-L3 comprising the amino acid sequence of SEQ ID NO: 16364; and a VH comprising the amino acid sequence of SEQ ID NO: 17614.

[0231] In one aspect, the present disclosure provides an antibody or antigen-binding fragment thereof comprising the CDRs: CDR-H3 comprising the amino acid sequence of SEQ ID NO: 15114; and CDR-L3 comprising the amino acid sequence of SEQ ID NO: 16364.

[0232] In one aspect, the disclosure herein provides an antibody or antigen-binding fragment thereof comprising at least one, at least two, or all three VL CDR sequences selected from (a) CDR-L1 comprising the amino acid sequence of SEQ ID NO: 11364; (b) CDR-L2 comprising the amino acid sequence of SEQ ID NO: 13864 and (c) CDR-L3 comprising the amino acid sequence of SEQ ID NO: 16364. In one aspect, the disclosure provides an antibody or antigen-binding fragment thereof comprising at least one, at least two, or all three VH CDR sequences selected from (a) CDR-H1 comprising the amino acid sequence of SEQ ID NO: 10114; (b) CDR-H2 comprising the amino acid sequence of SEQ ID NO: 12614 and (c) CDR-H3 comprising the amino acid sequence of SEQ ID NO: 15114.

[0233] In one aspect, the disclosure provides an antibody or antigen-binding fragment thereof comprising the CDRs: (a) CDR-H1 comprising the amino acid sequence of SEQ ID NO: 10114; (b) CDR-H2 comprising the amino acid sequence of SEQ ID NO: 12614; (c) CDR-H3 comprising the amino acid sequence of SEQ ID NO: 15114; (d) CDR-L1 comprising the amino acid sequence of SEQ ID NO: 11364; (e) CDR-L2 comprising the amino acid sequence of SEQ ID NO: 13864; and (f) CDR-L3 comprising the amino acid sequence of SEQ ID NO: 16364.

[0234] In one aspect, an antibody or antigen-binding fragment thereof comprises a VH sequence having at least 90%, 91%, 92%, 93%, 94%, 95%, 96%, 97%, 98%, 99%, or 100% sequence identity to the amino acid sequence of SEQ ID NO: 17614. In some embodiments, a VH sequence having at least 90%, 91%, 92%, 93%, 94%, 95%, 96%, 97%, 98%, or 99% identity contains substitutions (e.g., conservative substitutions), insertions, or deletions relative to the reference sequence, but an antibody or antigen-binding fragment thereof comprising that sequence retains the ability to bind to antigen. In some embodiments, a total of 1 to 10 amino acids have been substituted, inserted and/or deleted in the amino acid sequence of SEQ ID NO: 17614. In some embodiments, substitutions, insertions, or deletions occur in regions outside the CDRs (e.g., in the FRs). Optionally, the antibody or antigen-binding fragment thereof comprises the VH sequence of the amino acid sequence of SEQ ID NO: 17614, including post-translational modifications of that sequence. In a particular embodiment, the VH comprises one, two or three CDRs selected from: (a) CDR-H1 comprising the amino acid sequence of SEQ ID NO: 10114, (b) CDR-H2 comprising the amino acid sequence of SEQ ID NO: 12614, and (c) CDR-H3 comprising the amino acid sequence of SEQ ID NO: 15114.

[0235] In one aspect, an antibody or antigen-binding fragment thereof is provided, wherein the antibody or antigen-binding fragment thereof comprises a light chain variable domain (VL) having at least 90%, 91%, 92%, 93%, 94%, 95%, 96%, 97%, 98%, 99%, or 100% sequence identity to the amino acid sequence of SEQ ID NO: 18864. In some embodiments, a VL sequence having at least 90%, 91%, 92%, 93%, 94%, 95%, 96%, 97%, 98%, or 99% identity contains substitutions (e.g., conservative substitutions), insertions, or deletions relative to the reference sequence, but an antibody or antigen-binding fragment thereof comprising that sequence retains the ability to bind to antigen. In some embodiments, a total of 1 to 10 amino acids have been substituted, inserted and/or deleted in any one of the amino acid sequence of SEQ ID NO: 18864. In some embodiments, the substitutions, insertions, or deletions occur in regions outside the CDRs (e.g., in the FRs). Optionally, the antibody or antigen-binding fragment thereof comprises the VL sequence of SEQ ID NO: 18864, including post-translational modifications of that sequence. In a particular embodiment, the VL comprises one, two or three CDRs selected from (a) CDR-L1 comprising the amino acid sequence of SEQ ID NO: 11364; (b) CDR-L2 comprising the amino acid sequence of SEQ ID NO: 13864; and (c) CDR-L3 comprising the amino acid sequence of SEQ ID NO: 16364.

[0236] In one aspect, an antibody or antigen-binding fragment thereof is provided, wherein the antibody or antigen-binding fragment thereof comprises a VH as in any of the embodiments provided above, and a VL as in any of the embodiments provided above. In some embodiments, the antibody comprises a VH comprising the amino acid sequence of SEQ ID NO: 17614, and a VL sequence in SEQ ID NO: 18864, including post-translational modifications of those sequences.

### TOTCOVID00450

[0237] In one aspect, the present disclosure provides an antibody or antigen-binding fragment thereof comprises one or more variable regions selected from the group consisting of (a) VH comprising the amino acid sequence of SEQ ID NO: 17894, (b) VL comprising the amino acid sequence of SEQ ID NO: 19144, and (c) a combination thereof.

[0238] In one aspect, the present disclosure provides an antibody or antigen-binding fragment thereof comprising at least one, two, three, four, five, or six CDRs selected from (a) CDR-H1 comprising the amino acid sequence of SEQ ID NO: 10394; (b) CDR-H2 comprising the amino acid sequence of SEQ ID NO: 12894; (c) CDR-H3 comprising the amino acid sequence of SEQ ID NO: 15394; (d) CDR-L1 comprising the amino acid sequence of SEQ ID NO: 11644; (e) CDR-L2 comprising the amino acid sequence of SEQ ID NO: 14144; and (f) CDR-L3 comprising the amino acid sequence of SEQ ID NO: 16644.

[0239] In one aspect, the present disclosure provides an antibody or antigen-binding fragment thereof comprising at least one, at least two, or all three VH CDR sequences selected from (a) CDR-H1 comprising the amino acid sequence of SEQ ID NO: 10394; (b) CDR-H2 comprising the amino acid sequence of SEQ ID NO: 12894; and (c) CDR-H3 comprising the amino acid sequence of SEQ ID NO: 15394; and (d) a VL comprising the amino acid sequence of SEQ ID NO: 19144.

[0240] In one aspect, the present disclosure provides an antibody or antigen-binding fragment thereof comprising at least one, at least two, or all three VL CDR sequences selected from (a) CDR-L1 comprising the amino acid sequence of SEQ ID NO: 11644; (b) CDR-L2 comprising the amino acid sequence of SEQ ID NO: 14144; and (c) CDR-L3 comprising the amino acid sequence of SEQ ID NO: 16644; and a VH comprising the amino acid sequence of SEQ ID NO: 17894.

[0241] In one aspect, the present disclosure provides an antibody or antigen-binding fragment thereof comprising the CDRs: CDR-H3 comprising the amino acid sequence of SEQ ID NO: 15394; and CDR-L3 comprising the amino acid sequence of SEQ ID NO: 16644.

[0242] In one aspect, the disclosure herein provides an antibody or antigen-binding fragment thereof comprising at least one, at least two, or all three VL CDR sequences selected from (a) CDR-L1 comprising the amino acid sequence of SEQ ID NO: 11644; (b) CDR-L2 comprising the amino acid sequence of SEQ ID NO: 14144 and (c) CDR-L3 comprising the amino acid sequence of SEQ ID NO: 16644. In one aspect, the disclosure provides an antibody or antigen-binding fragment thereof comprising at least one, at least two, or all three VH CDR sequences selected from (a) CDR-H1 comprising the amino acid sequence of SEQ ID NO: 10394; (b) CDR-H2 comprising the amino acid sequence of SEQ ID NO: 12894 and (c) CDR-H3 comprising the amino acid sequence of SEQ ID NO: 15394.

[0243] In one aspect, the disclosure provides an antibody or antigen-binding fragment thereof comprising the CDRs: (a) CDR-H1 comprising the amino acid sequence of SEQ ID NO: 10394; (b) CDR-H2 comprising the amino acid sequence of SEQ ID NO: 12894; (c) CDR-H3 comprising the amino acid sequence of SEQ ID NO: 15394; (d) CDR-L1 comprising the amino acid sequence of SEQ ID NO: 11644; (e) CDR-L2 comprising the amino acid sequence of SEQ ID NO: 14144; and (f) CDR-L3 comprising the amino acid sequence of SEQ ID NO: 16644.

[0244] In one aspect, an antibody or antigen-binding fragment thereof comprises a VH sequence having at least 90%, 91%, 92%, 93%, 94%, 95%, 96%, 97%, 98%, 99%, or 100% sequence identity to the amino acid sequence of SEQ ID NO: 17894. In some embodiments, a VH sequence having at least 90%, 91%, 92%, 93%, 94%, 95%, 96%, 97%, 98%, or 99% identity contains substitutions (e.g., conservative substitutions), insertions, or deletions relative to the reference sequence, but an antibody or antigen-binding fragment thereof comprising that sequence retains the ability to bind to antigen. In some embodiments, a total of 1 to 10 amino acids have been substituted, inserted and/or deleted in the amino acid sequence of SEQ ID NO: 17894. In some embodiments, substitutions, insertions, or deletions occur in regions outside the CDRs (e.g., in the FRs). Optionally, the antibody or antigen-binding fragment thereof comprises the VH sequence of the amino acid sequence of SEQ ID NO: 17894, including post-translational modifications of that sequence. In a particular embodiment, the VH comprises one, two or three CDRs selected from: (a) CDR-H1 comprising the amino acid sequence of SEQ ID NO: 10394, (b) CDR-H2 comprising the amino acid sequence of SEQ ID NO: 12894, and (c) CDR-H3 comprising the amino acid sequence of SEQ ID NO: 15394.

[0245] In one aspect, an antibody or antigen-binding fragment thereof is provided, wherein the antibody or antigen-binding fragment thereof comprises a light chain variable domain (VL) having at least 90%, 91%, 92%, 93%, 94%, 95%, 96%, 97%, 98%, 99%, or 100% sequence identity to the amino acid sequence of SEQ ID NO: 19144. In some embodiments, a VL sequence having at least 90%, 91%, 92%, 93%, 94%, 95%, 96%, 97%, 98%, or 99% identity contains substitutions (e.g., conservative substitutions), insertions, or deletions relative to the reference sequence, but an antibody or antigen-binding fragment thereof comprising that sequence retains the ability to bind to antigen. In some embodiments, a total of 1 to 10 amino acids have been substituted, inserted and/or deleted in any one of the amino acid sequence of SEQ ID NO: 19144. In some embodiments, the substitutions, insertions, or deletions occur in regions outside the CDRs (e.g., in the FRs). Optionally, the antibody or antigen-binding fragment thereof comprises the VL sequence of SEQ ID NO: 19144, including post-translational modifications of that sequence. In a particular embodiment, the VL comprises one, two or three CDRs selected from (a) CDR-L1 comprising the amino acid sequence of SEQ ID NO: 11644; (b) CDR-L2 comprising the amino acid sequence of SEQ ID NO: 14144; and (c) CDR-L3 comprising the amino acid sequence of SEQ ID NO: 16644.

[0246] In one aspect, an antibody or antigen-binding fragment thereof is provided, wherein the antibody or antigen-binding fragment thereof comprises a VH as in any of the embodiments provided above, and a VL as in any of the embodiments provided above. In some embodiments, the antibody comprises a VH comprising the amino acid sequence of SEQ ID NO: 17894, and a VL sequence in SEQ ID NO: 19144, including post-translational modifications of those sequences.

### Variants and Modifications

[0247] In another aspect, provided herein are variants of antibodies or antigen-binding fragments thereof.

### Substitution, Insertion, and Deletion Variants

[0248] In some embodiments, amino acid sequence variants of the antibodies provided herein are contemplated. A variant typically differs from a polypeptide specifically disclosed herein in one or more substitutions, deletions, additions and/or insertions. Such variants can be naturally occurring or can be synthetically generated, for example, by modifying one or more of the above polypeptide sequences of the invention and evaluating one or more biological activities of the polypeptide as described herein and/or using any of a number of techniques well known in the art. For example, it may be desirable to improve the binding affinity and/or other biological properties of the antibody amino acid sequence variants of an antibody may be prepared by introducing appropriate modifications into the nucleotide sequence encoding the antibody, or by peptide synthesis. Such modifications include, for example, deletions from, and/or insertions into and/or substitutions of residues within the amino acid sequences of the antibody. Any combination of deletion, insertion, and substitution can be made to arrive at the final construct, provided that the final construct possesses the desired characteristics, e.g., antigen-binding.

[0249] In some embodiments, antibody variants or antigen-binding fragment thereof having one or more amino acid substitutions are provided. Sites of interest for mutagenesis by substitution include the CDRs and FRs. Amino acid substitutions may be introduced into an antibody of interest and the products screened for a desired activity, e.g., retained/improved antigen binding, decreased immunogenicity, or improved ADCC or CDC function.

| Original Residue | Exemplary Conserved Substitutions |
|---|---|
| Ala (A) | Val; Leu; Ile |
| Arg (R) | Lys; Gln; Asn |
| Asn (N) | Gln; His; Asp, Lys; Arg |
| Asp (D) | Glu; Asn |
| Cys (C) | Ser; Ala |
| Gln (Q) | Asn; Glu |
| Glu (E) | Asp; Gln |
| Gly (G) | Ala |
| His (H) | Asn; Gln; Lys; Arg |
| Ile (I) | Leu; Val; Met; Ala; Phe; Norleucine |
| Leu (L) | Norleucine; Ile; Val; Met; Ala; Phe |
| Lys (K) | Arg; Gln; Asn |
| Met (M) | Leu; Phe; Ile |
| Phe (F) | Trp; Leu; Val; Ile; Ala; Tyr |
| Pro (P) | Ala |
| Ser (S) | Thr |
| Thr (T) | Val; Ser |
| Trp (W) | Tyr; Phe |
| Tyr (Y) | Trp; Phe; Thr; Ser |
| Val (V) | Ile; Leu; Met; Phe; Ala; Norleucine |

[0250] Hydrophobic amino acids include: Norleucine, Met, Ala, Val, Leu, and Ile. Neutral hydrophilic amino acids include: Cys, Ser, Thr, Asn, and Gln. Acidic amino acids include: Asp and Glu. Basic amino acids include: His, Lys, and Arg. Amino acids with residues that influence chain orientation include: Gly and Pro. Aromatic amino acids include: Trp, Tyr, and Phe.

[0251] In some embodiments, substitutions, insertions, or deletions may occur within one or more CDRs, wherein the substitutions, insertions, or deletions do not substantially reduce antibody binding to antigen. For example, conservative substitutions that do not substantially reduce binding affinity may be made in CDRs. Such alterations may be outside of CDR “hotspots” or SDRs. In some embodiments of the variant V_{H} and V_{L} sequences, each CDR either is unaltered, or contains no more than one, two or three amino acid substitutions.

[0252] Alterations (e.g., substitutions) may be made in CDRs, e.g., to improve antibody affinity. Such alterations may be made in CDR encoding codons with a high mutation rate during somatic maturation (see, e.g., Chowdhury, Methods Mol. Biol. 207:179-196 (2008)), and the resulting variant can be tested for binding affinity. Affinity maturation (e.g., using error-prone PCR, chain shuffling, randomization of CDRs, or oligonucleotide-directed mutagenesis) can be used to improve antibody affinity (see, e.g., Hoogenboom et al. in Methods Mol. Biol. 178:1-37 (2001)). CDR residues involved in antigen-binding may be specifically identified, e.g., using alanine scanning mutagenesis or modeling (see, e.g., Cunningham and Wells, Science 244:1081-1085 (1989)). CDR-H3 and CDR-L3 in particular are often targeted. Alternatively, or additionally, a crystal structure of an antigen-antibody complex to identify contact points between the antibody and antigen. Such contact residues and neighboring residues may be targeted or eliminated as candidates for substitution. Variants may be screened to determine whether they contain the desired properties.

[0253] Amino acid sequence insertions and deletions include amino- and/or carboxyl-terminal fusions ranging in length from one residue to polypeptides containing a hundred or more residues, as well as intrasequence insertions and deletions of single or multiple amino acid residues. Examples of terminal insertions include an antibody with an N-terminal methionyl residue. Other insertional variants of the antibody molecule include the fusion to a polypeptide which increases serum half-life of the antibody, for example, at the N-terminus or C-terminus. The term “epitope tagged” refers to the antibody fused to an epitope tag. The epitope tag polypeptide has enough residues to provide an epitope against which an antibody there against can be made, yet is short enough such that it does not interfere with activity of the antibody. The epitope tag preferably is sufficiently unique so that the antibody there against does not substantially cross-react with other epitopes. Suitable tag polypeptides generally have at least 6 amino acid residues and usually between about 8-50 amino acid residues (preferably between about 9-30 residues). Examples include the flu HA tag polypeptide and its antibody 12CA5 (Field et al., Mal. Cell. Biol. 8:2159-2165 (1988)); the c-myc tag and the 8F9, 3C7, 6E10, G4, B7 and 9E10 antibodies thereto (Evan et al., Mal. Cell. Biol. 5(12):3610-3616 (1985)); and the Herpes Simplex virus glycoprotein D (gD) tag and its antibody (Paborsky et al., Protein Engineering 3(6):547-553 (1990)). Other exemplary tags are a poly-histidine sequence, generally around six histidine residues, that permits isolation of a compound so labeled using nickel chelation. Other labels and tags, such as the FLAG® tag (Eastman Kodak, Rochester, N.Y.), well known and routinely used in the art, are embraced by the invention.

[0254] Other insertional variants of the antibody molecule include the fusion to the N- or C-terminus of the antibody to an enzyme (e.g., for ADEPT) or a polypeptide which increases the serum half-life of the antibody. Examples of intrasequence insertion variants of the antibody molecules include an insertion of 3 amino acids in the light chain. Examples of terminal deletions include an antibody with a deletion of 7 or less amino acids at an end of the light chain.

### Glycosylation Variants

[0255] In some embodiments, the antibodies are altered to increase or decrease their glycosylation (e.g., by altering the amino acid sequence such that one or more glycosylation sites are created or removed). A carbohydrate attached to an Fc region of an antibody may be altered. Native antibodies from mammalian cells typically comprise a branched, biantennary oligosaccharide attached by an N-linkage to Asn297 of the C_{H}2 domain of the Fc region (see, e.g., Wright et al. TIBTECH 15:26-32 (1997)). The oligosaccharide can be various carbohydrates, e.g., mannose, N-acetyl glucosamine (GlcNAc), galactose, sialic acid, fucose attached to a GlcNAc in the stem of the biantennary oligosaccharide structure. Modifications of the oligosaccharide in an antibody can be made, for example, to create antibody variants with certain improved properties. Antibody glycosylation variants can have improved ADCC and/or CDC function.

[0256] In some embodiments, antibody variants are provided having a carbohydrate structure that lacks fucose attached (directly or indirectly) to an Fc region. For example, the amount of fucose in such antibody may be from 1% to 80%, from 1% to 65%, from 5% to 65% or from 20% to 40%. The amount of fucose is determined by calculating the average amount of fucose within the sugar chain at Asn297, relative to the sum of all glycostructures attached to Asn297 (see, e.g., WO 08/077546). Asn297 refers to the asparagine residue located at about position 297 in the Fc region (Eu numbering of Fc region residues); however, Asn297 may also be located about ±3 amino acids upstream or downstream of position 297, i.e., between positions 294 and 300, due to minor sequence variations in antibodies. Such fucosylation variants can have improved ADCC function (see, e.g. Okazaki et al. J. Mol. Biol. 336:1239-1249 (2004); and Yamane-Ohnuki et al. Biotech. Bioeng. 87: 614 (2004)). Cell lines, e.g., knockout cell lines and methods of their use can be used to produce defucosylated antibodies, e.g., Lec13 CHO cells deficient in protein fucosylation and alpha-1,6-fucosyltransferase gene (FUT8) knockout CHO cells (see, e.g., Ripka et al. Arch. Biochem. Biophys. 249:533-545 (1986); Yamane-Ohnuki et al. Biotech. Bioeng. 87: 614 (2004); Kanda, Y. et al., Biotechnol. Bioeng. 94(4):680-688 (2006). Other antibody glycosylation variants are also contemplated.

[0257] In still another embodiment, the glycosylation of an antibody is modified. For example, an aglycosylated antibody can be made (i.e., the antibody lacks glycosylation). Glycosylation can be altered to, for example, increase the affinity of the antibody for antigen. Such carbohydrate modifications can be accomplished by, for example, altering one or more sites of glycosylation within the antibody sequence. For example, one or more amino acid substitutions can be made that result in elimination of one or more variable region framework glycosylation sites to thereby eliminate glycosylation at that site. Such aglycosylation may increase the affinity of the antibody for antigen. Such an approach is described in further detail in U.S. Pat. Nos. 5,714,350 and 6,350,861 by Co et al. Conservative substitutions involve replacing an amino acid with another member of its class. Non-conservative substitutions involve replacing a member of one of these classes with a member of another class.

[0258] Accordingly, an antibody or antigen-binding fragment thereof of the present disclosure can be produced by a host cell with one or more of exogenous and/or high endogenous glycosyltransferase activities. Genes with glycosyltransferase activity include β(1,4)-N-acetylglucosaminyltransferase III (GnTII), α-mannosidase II (ManII), β(1,4)-galactosyltransferase (GalT), β(1,2)-N-acetylglucosaminyltransferase I (GnTI), and β(1,2)-N-acetylglucosaminyltransferase II (GnTII). The glycotranferases can comprise a fusion comprising a Golgi localization domain (see, e.g., Lifely et al., Glycobiology 318:813-22 (1995); Schachter, Biochem. Cell Biol. 64:163-81 (1986)). In some embodiments, an antibody can be expressed in a host cell comprising a disrupted or deactivated glycosyltransferase gene. Accordingly, in some embodiments, the present disclosure is directed to a host cell comprising (a) an isolated nucleic acid comprising a sequence encoding a polypeptide having a glycosyltransferase activity; and (b) an isolated polynucleotide encoding an antibody or antigen-binding fragment thereof of the present disclosure. In a particular embodiment, the modified antibody produced by the host cell has an IgG constant region or a fragment thereof comprising the Fc region. In another particular embodiment the antibody is a humanized antibody or a fragment thereof comprising an Fc region.

[0259] Antibodies with altered glycosylation produced by the host cells of the invention can exhibit increased Fc receptor binding affinity (e.g., increased binding to a Fcγ activating receptor, such as the FcγRIIIa receptor) and/or increased effector function. The increased effector function can be an increase in one or more of the following: increased antibody-dependent cellular cytotoxicity, increased antibody-dependent cellular phagocytosis (ADCP), increased cytokine secretion, increased immune-complex-mediated antigen uptake by antigen-presenting cells, increased Fc-mediated cellular cytotoxicity, increased binding to NK cells, increased binding to macrophages, increased binding to polymorphonuclear cells (PMNs), increased binding to monocytes, increased crosslinking of target-bound antibodies, increased direct signaling inducing apoptosis, increased dendritic cell maturation, and increased T cell priming. Accordingly, in one aspect, the present invention provides glycoforms of an antibody having increased effector function as compared to the antibody that has not been glycoengineered. (see, e.g., Tang et al., J. Immunol. 179: 2815-2823 (2007)).

[0260] The present disclosure is also directed to a method for producing an antibody or antigen-binding fragment thereof, described herein having modified oligosaccharides, comprising (a) culturing a host cell engineered to express at least one nucleic acid encoding a polypeptide having glycosyltransferase activity under conditions which permit the production of an antibody according to the present disclosure, wherein said polypeptide having glycosyltransferase activity is expressed in an amount sufficient to modify the oligosaccharides in the Fc region of said antibody produced by said host cell; and (b) isolating said antibody. In another embodiment, there are two polypeptides having glycosyltransferase activity. The antibodies or antigen-binding fragment thereof produced by the methods of the present invention can have increased Fc receptor binding affinity and/or increased effector function.

[0261] In some embodiments, the percentage of bisected N-linked oligosaccharides in the Fc region of the antibody is at least about 10% to about 100%, specifically at least about 50%, more specifically, at least about 60%, at least about 70%, at least about 80%, or at least about 90-95% of the total oligosaccharides. In yet another embodiment, the antibody produced by the methods of the invention has an increased proportion of nonfucosylated oligosaccharides in the Fc region as a result of the modification of its oligosaccharides by the methods of the present invention. In some embodiments, the percentage of nonfucosylated oligosaccharides is at least about 20% to about 100%, specifically at least about 50%, at least about 60% to about 70%, and more specifically, at least about 75%. The nonfucosylated oligosaccharides may be of the hybrid or complex type. In yet another embodiment, the antibody or antigen-binding fragment thereof produced by the methods of the invention has an increased proportion of bisected oligosaccharides in the Fc region as a result of the modification of its oligosaccharides by the methods of the present invention. In some embodiments, the percentage of bisected oligosaccharides is at least about 20% to about 100%, specifically at least about 50%, at least about 60% to about 70%, and more specifically, at least about 75%.

[0262] In another embodiment, the present invention is directed to an antibody or antigen-binding fragment thereof engineered to have increased effector function and/or increased Fc receptor binding affinity, produced by the methods of the disclosure. In some embodiments, the antibody is an intact antibody. In some embodiments, the antibody is an antibody fragment containing the Fc region, or a fusion protein that includes a region equivalent to the Fc region of an immunoglobulin.

[0263] In one aspect, the present disclosure provides host cell expression systems for the generation of the antibodies or antigen-binding fragment thereof of the present disclosure having modified glycosylation patterns. In particular, the present disclosure provides host cell systems for the generation of glycoforms of the antibodies or antigen-binding fragment thereof, disclosed herein, having an improved therapeutic value. Therefore, the present disclosure provides host cell expression systems selected or engineered to express a polypeptide having a glycosyltransferase activity. Generally, any type of cultured cell line, including the cell lines discussed above, can be used as a background to engineer the host cell lines of the present invention. In some embodiments, CHO cells, BHK cells, NSO cells, SP2/0 cells, YO myeloma cells, P3X63 mouse myeloma cells, PER cells, PER.C6 cells or hybridoma cells, other mammalian cells, yeast cells, insect cells, or plant cells are used as the background cell line to generate the engineered host cells of the invention.

[0264] The host cells which contain the coding sequence of an antibody or antigen-binding fragment thereof of the invention and which express the biologically active gene products may be identified by at least four general approaches: (a) DNA-DNA or DNA-RNA hybridization; (b) the presence or absence of “marker” gene functions; (c) assessing the level of transcription as measured by the expression of the respective mRNA transcripts in the host cell; and (d) detection of the gene product as measured by immunoassay or by its biological activity.

### Cysteine Engineered Antibody Variants

[0265] In some embodiments, it may be desirable to create cysteine engineered antibodies or antigen-binding fragments thereof, e.g., “thioMAbs,” in which one or more residues of an antibody are substituted with cysteine residues. In some embodiments, the substituted residues occur at accessible sites of the antibody. Reactive thiol groups can be positioned at sites for conjugation to other moieties, such as drug moieties or linker-drug moieties, to create an immunoconjugate. In some embodiments, any one or more of the following residues may be substituted with cysteine: V205 (Kabat numbering) of the light chain; A118 (EU numbering) of the heavy chain; and S400 (EU numbering) of the heavy chain Fc region. Cysteine engineered antibodies may be generated as described.

[0266] Any cysteine residue not involved in maintaining the proper conformation of the monoclonal, human, humanized, or variant antibody also may be substituted, generally with serine, to improve the oxidative stability of the molecule and prevent aberrant crosslinking. Conversely, cysteine bond(s) may be added to the antibody to improve its stability (particularly where the antibody is an antibody fragment such as an Fv fragment).

### Fc Region Variants

[0267] Mutation of residues within Fc receptor binding sites can result in altered effector function, such as altered ADCC, CDC activity, and/or altered half-life. Mutations include, for example, insertion, deletion, and/or substitution of one or more residues as described in more detail above, including substitution with alanine, a conservative substitution, a non-conservative substitution, and/or replacement with a corresponding amino acid residue at the same position from a different IgG subclass (e.g., replacing an IgG1 residue with a corresponding IgG2 residue at that position).

[0268] An Fc region herein is a C-terminal region of an immunoglobulin heavy chain that contains at least a portion of the constant region. An Fc region includes native sequence Fc regions and variant Fc regions. The Fc region variant may comprise a human Fc region sequence (e.g., a human IgG1, IgG2, IgG3 or IgG4 Fc region) comprising an amino acid modification (e.g., a substitution) at one or more amino acid positions.

[0269] Previous studies mapped the binding site on human and murine IgG for FcγR primarily to the lower hinge region composed of IgG residues 233-239. Other studies proposed additional broad segments, e.g., Gly316-Lys338 for human Fc gamma receptor I, Lys274-Arg301 and Tyr407Arg416 for human Fc gamma receptor III, or found a few specific residues outside the lower hinge, e.g., Asn297 and Glu318 for murine IgG2b interacting with murine Fc gamma receptor II. The report of the 3.2-A crystal structure of the human IgG Fc fragment with human Fc gamma receptor IIIA delineated IgG1 residues Leu234-Ser239, Asp265-Glu269, Asn297-Thr299, and Ala327-Ile332 as involved in binding to Fc receptor γIIIA. It has been suggested based on crystal structure that in addition to the lower hinge (Leu234-Gly237), residues in IgG C_{H}2 domain loops FG (residues 326-330) and BC (residues 265-271) might play a role in binding to Fc gamma receptor IIA. See Shields et al., J. Biol. Chem. 276(9):6591-6604 (2001). Shields et al. reported that IgG1 residues involved in binding to all human Fc receptors are located in the C_{H}2 domain proximal to the hinge and fall into two categories as follows: 1) positions that may interact directly with all FcR include Leu234-Pro238, Ala327, and Pro329 (and possibly Asp265); 2) positions that influence carbohydrate nature or position include Asp265 and Asn297.

[0270] In some embodiments, the invention contemplates an antibody variant that possesses some but not all effector functions, which make it a desirable candidate for applications in which the half-life of the antibody in vivo is important yet certain effector functions (such as complement and ADCC) are unnecessary or deleterious. In vitro and/or in vivo cytotoxicity assays can be conducted to confirm the effect of one or more Fc amino acid modifications on CDC and/or ADCC activities. For example, Fc receptor (FcR) binding assays can be conducted to ensure that the antibody lacks FcγR binding (hence likely lacking ADCC activity), but retains FcRn binding ability.

Fc Variants with Altered Binding to an Fc Gamma Receptor

[0271] In some instances, an Fc variant exhibits altered affinity for one or more Fc gamma receptors (FcγR). For example, an Fc variant exhibits increased affinity for one or more Fc gamma receptors (FcγR), decreased affinity for one or more Fc gamma receptors (FcγR), or a combination thereof. In one instance, an Fc variant exhibits increased ADCC activity. In yet another example, the Fc region is modified to increase the ability of the antibody to mediate antibody dependent cellular cytotoxicity (ADCC). The binding sites on human IgG1 for Fc gamma RI (FcγRI), Fc gamma RH (FcγRII), Fc gamma RIII (FcγRIIII), and FcRn have been mapped and variants with altered binding have been described. Non-limiting examples of such modifications are described in, for example, U.S. Pat. No. 6,737,056; PCT Publication WO 00/42072 by Presta; Shields, R. L. et al. (2001) J. Biol. Chem. 276:6591-6604; U.S. Pat. No. 7,332,581, etc. In some embodiments, the constant region of the antibodies disclosed herein is replaced with an IGHG1.

[0272] Armour et al. (Mol Immunol. 2003; 40(9):585-93) identified IgG1 variants which react with the activating receptor, FcγRIIa, at least 10-fold less efficiently than wildtype IgG1, but whose binding to the inhibitory receptor, FcγRIIb, is only four-fold reduced. Mutations were made in the region of amino acids 233-236 and/or at amino acid positions 327, 330 and 331. See also WO 99/58572.

[0273] Non-limiting examples of in vitro assays to assess ADCC activity of a molecule of interest are described, for example, in U.S. Pat. Nos. 5,500,362 and 5,821,337. Alternatively, non-radioactive assays methods may be employed (e.g., ACTI™ and CYTOTOX 96® non-radioactive cytotoxicity assays). Useful effector cells for such assays include peripheral blood mononuclear cells (PBMC) and Natural Killer (NK) cells. Alternatively, or additionally, ADCC activity of the molecule of interest may be assessed in vivo, e.g., in an animal model (see, e.g., Clynes et al., Proc. Nat'l Acad. Sci. USA 95:652-656 (1998)).

Fc Variants with Decreased C1q Binding

[0274] In another instance, an Fc variant exhibits reduced C1q binding. C1q binding assays may also be carried out to confirm that the antibody is able or unable bind C1q and, hence, contains or lacks CDC activity (Idusogie et al., J. Immunol. 164: 4178-4184 (2000)). To assess complement activation, a CDC assay may be performed (see, e.g., Gazzano-Santoro et al., J. Immunol. Methods 202:163 (1996); Cragg, M. S. et al., Blood 101:1045-1052 (2003); and Cragg et al., Blood 103:2738-2743 (2004)).

[0275] In another example, one or more amino acids can be replaced with a different amino acid residue such that the antibody has altered Clq binding and/or reduced or abolished complement dependent cytotoxicity (CDC). This approach is described in further detail in U.S. Pat. No. 6,194,551 by Idusogie et al. In another example, one or more amino acid residues are altered to thereby alter the ability of the antibody to fix complement. This approach is described further in PCT Publication WO 94/29351 by Bodmer et al. In one instance, an Fc variant provided herein can contain a mutation at amino acid position 329, 331, and/or 322 (using Kabat numbering), and exhibits reduced Clq binding and/or CDC activity. In some instances, Clq binding activity and/or CDC activity of an antibody can be reduced by mutating amino acid residue 318, 320, and/or 322 (using Kabat numbering) of a heavy chain; replacing residue 297 (Asn) may result in removal of lytic activity of an antibody.

[0276] Cytophilic activity of IgG1 is a property of its heavy chain C_{H}2 domain. In one instance, where an Fc variant is an IgG, amino acid residues 234-237 are maintained as wild type to preserve cytophilic activity of the molecule. An IgG2 antibody containing the entire ELLGGP sequence (residues 233-238) may, in some instances, be more active than wild-type IgG1.

[0277] In some instances, Clq binding activity and/or lytic activity of an IgG1 antibody can be reduced by mutating amino acid residue Pro331 to Ser. In other instances, Clq binding activity and/or lytic activity of an IgG4 antibody can be reduced by mutating amino acid residue Pro for Ser331 (Xu et al., J Biol Chem. 1994; 269(5):3469-74).

Fc Variants with Interchain Disulfide Bonds or Dual Fc Regions

[0278] In yet another embodiment, it may be desirable to modify the antibody of the invention with respect to effector function, so as to enhance the therapeutic effectiveness of the antibody. For example, one or more cysteine residue(s) may be introduced in the Fc region, thereby allowing interchain disulfide bond formation in this region. The homodimeric antibody thus generated may have improved internalization capability, increased complement-mediated cell killing, and/or antibody-dependent cellular cytotoxicity (ADCC). See Caron et al., J. Exp Med. 176:1191-1195 (1992) and Shapes, B. J. Immunol. 148:2918-2922 (1992). Alternatively, an antibody can be engineered which has dual Fc regions and may thereby have enhanced complement lysis and/or ADCC capabilities. See, Stevenson et al., Anti-Cancer Drug Design 3: 219-230 (1989).

Fc Variants with Increased FcRn Binding and In Vivo Half-Life

[0279] Fc region variants with altered binding affinity for the neonatal receptor (FcRn) are also contemplated herein. Fc region variants with improved affinity for FcRn are anticipated to have longer serum half-lives, and such variants are useful in methods of treating subjects where long half-life of the administered polypeptide is desired, e.g., to treat a chronic infection. Fc region variants with decreased FcRn binding affinity, on the contrary, are expected to have shorter half-lives, and such variants may be administered to a subject where a shortened circulation time may be preferred, e.g. for in vivo diagnostic imaging or for antibodies which have toxic side effects when left circulating in the blood stream for extended periods, etc. Determination of FcRn binding and in vivo clearance/half-life can be performed using methods known in the art (see, e.g., Petkova, S. B. et al., Int'l. Immunol. 18(12):1759-1769 (2006)).

[0280] Schuurman et al., Mol Immunol. 2001; 38(1):1-8, incorporated by reference herein in its entirety, report that mutating one of the hinge cysteines involved in the inter-heavy chain bond formation, Cys226, to serine resulted in a more stable inter-heavy chain linkage. Mutating the IgG4 hinge sequence Cys-Pro-Ser-Cys to the IgG1 hinge sequence Cys-Pro-Pro-Cys also markedly stabilizes the covalent interaction between the heavy chains. Angal et al., Mol Immunol. 1993; 30(1):105-8, incorporated by reference herein in its entirety, report that mutating the serine at amino acid position 241 in IgG4 to praline (found at that position in IgG1 and IgG2) led to the production of a homogeneous antibody, as well as extending serum half-life and improving tissue distribution compared to the original chimeric IgG4. Other such examples of Fc region variants are also contemplated (see, e.g., Duncan & Winter, Nature 322:738-40 (1988); Chan C A and Carter P J (2010) Nature Rev. Immunol. 10:301-316); and Shields et al., J. Biol. Chem. 9(2): 6591-6604 (2001).

### Antibody Composition and Structural Conformation

[0281] In various embodiments of the invention, the resulting antibody polypeptides may take on a range of compositions or structural conformations. Included herein are bispecific antibodies, multispecific antibodies, multivalent antibodies, chimeric antibodies, human antibodies, humanized antibodies, monoclonal antibodies, deimmunized antibodies, or a combination thereof.

### Bispecific and Multispecific Antibodies

[0282] In some embodiments, it may be desirable to generate multispecific (e.g. bispecific) monoclonal antibody including monoclonal, human, humanized, or variant antibodies having binding specificities for at least two different epitopes. In some embodiments, the antibodies disclosed herein are multispecific. Exemplary bispecific antibodies may bind to two different epitopes of an antigen (e.g., SARS-CoV-2 associated antigen). Alternatively, an antigen-binding region may be combined with a region which binds to a triggering molecule on a leukocyte such as a T-cell receptor molecule (e.g., CD2 or CD3), or Fe receptors for IgG (FcγR), such as FcγRI (CD64), FcγRII (CD32) and FcγRIII (CD16) so as to focus cellular defense mechanisms to the antigen-expressing cell. Bispecific antibodies can be prepared as full length antibodies or antibody fragments (e.g., F(ab′)2 bispecific antibodies).

[0283] According to another approach for making bispecific antibodies, the interface between a pair of antibody molecules can be engineered to maximize the percentage of heterodimers which are recovered from recombinant cell culture. The preferred interface comprises at least a part of the C_{H}3 domain of an antibody constant domain. In this method, one or more small amino acid side chains from the interface of the first antibody molecule are replaced with larger side chains (e.g., tyrosine or tryptophan). Compensatory “cavities” of identical or similar size to the large side chain(s) are created on the interface of the second antibody molecule by replacing large amino acid side chains with smaller ones (e.g., alanine or threonine). This provides a mechanism for increasing the yield of the heterodimer over other unwanted end-products such as homodimers.

[0284] Bispecific antibodies include cross-linked or “heteroconjugate” antibodies. For example, one of the antibodies in the heteroconjugate can be coupled to avidin, the other to biotin. Heteroconjugate antibodies may be made using any convenient cross-linking methods. Suitable cross-linking agents are contemplated, along with a number of cross-linking techniques.

[0285] Techniques for generating bispecific antibodies from antibody fragments have also been described in the literature. For example, bispecific antibodies can be prepared using chemical linkage. Brennan et al., Science 229: 81 (1985) describe a procedure wherein intact antibodies are proteolytically cleaved to generate F(ab′)2 fragments. These fragments are reduced in the presence of the dithiol complexing agent sodium arsenite to stabilize vicinal dithiols and prevent intermolecular disulfide formation. The Fab′ fragments generated are then converted to thionitrobenzoate (TNB) derivatives. One of the Fab′-TNB derivatives is then reconverted to the Fab′-thiol by reduction with mercaptoethylamine and is mixed with an equimolar amount of the other Fab′-TNB derivative to form the bispecific antibody. The bispecific antibodies produced can be used as agents for the selective immobilization of enzymes. In yet a further embodiment, Fab′-SH fragments directly recovered from E. coli can be chemically coupled in vitro to form bispecific antibodies. (Shalaby et al., J. Exp. Med. 175:217-225 (1992))

[0286] Exemplary techniques for making multispecific antibodies include recombinant co-expression of two immunoglobulin heavy chain-light chain pairs having different specificities, engineering electrostatic steering effects for making antibody Fc-heterodimeric molecules, cross-linking two or more antibodies or fragments, using leucine zippers to produce bi-specific antibodies, using “diabody” technology for making bispecific antibody fragments, using single-chain Fv (sFv) dimers, preparing trispecific antibodies, and “knob-in-hole” engineering (see, e.g., Milstein and Cuello, Nature 305: 537 (1983); Traunecker et al., EMBO J. 10: 3655 (1991); U.S. Pat. Nos. 4,676,980 and 5,731,168; Brennan et al., Science, 229: 81 (1985); Kostelny et al., J. Immunol. 148(5):1547-1553 (1992); Hollinger et al., Proc. Natl. Acad. Sci. USA 90:6444-6448 (1993); Gruber et al., J. Immunol. 152:5368 (1994)); and Tutt et al. J. Immunol. 147: 60 (1991)). Engineered antibodies with three or more functional antigen-binding sites are also contemplated.

### Chimeric Antibodies

[0287] In some embodiments, an antibody provided herein is a chimeric. A chimeric antibody is an antibody in which a portion of the heavy and/or light chain is derived from a particular source or species, while the remainder of the heavy and/or light chain is derived from a different source or species. In one example, a chimeric antibody comprises a non-human variable region (e.g., a variable region derived from a mouse, rat, hamster, rabbit, or non-human primate, such as a monkey) and a human constant region. In a further example, a chimeric antibody is a “class switched” antibody in which the class or subclass has been changed from that of the parent antibody. Chimeric antibodies include antigen-binding fragments thereof. For details, see, for example, Jones et al., Nature 321: 522-525 (1986); Reichmann et al., Nature 332: 323-329 (1988); Presta, Curr. Op. Struct. Biol. 2: 593-596 (1992); and Morrison et al., Proc. Natl. Acad. Sci. USA 81:6851-6855 (1984).

### Human Antibodies

[0288] In some embodiments, an antibody provided herein is a human antibody. Human antibodies can be produced using various techniques known in the art (see, e.g., van Dijk and van de Winkel, Curr. Opin. Pharmacol. 5: 368-74 (2001); and Lonberg, Curr. Opin. Immunol. 20:450-459 (2008)). A human antibody is one which possesses an amino acid sequence which corresponds to that of an antibody produced by a human or a human cell or derived from a non-human source that utilizes human antibody repertoires or other human antibody-encoding sequences. This definition of a human antibody specifically excludes a humanized antibody comprising non-human antigen-binding residues. Human antibodies may be prepared by administering an immunogen (e.g., a SARS-CoV-2 antigen) to a transgenic animal that has been modified to produce intact human antibodies or intact antibodies with human variable regions in response to antigenic challenge. (see, e.g., Lonberg, Nat. Biotech. 23:1117-1125 (2005)). Human variable regions from intact antibodies generated by such animals may be further modified, e.g., by combining with a different human constant region.

[0289] Human antibodies can also be made by hybridoma-based methods. For example, human antibodies can be produced from human myeloma and mouse-human heteromyeloma cell lines, using human B-cell hybridoma technology, and other methods (see, e.g., Kozbor J. Immunol. 133: 3001 (1984); Brodeur et al., Monoclonal Antibody Production Techniques and Applications, pp. 51-63 (1987); Boerner et al., J. Immunol. 147: 86 (1991); Li et al., Proc. Natl. Acad. USA 103:3557-3562 (2006); Ni, Xiandai Mianyixue, 26(4):265-268 (2006); Vollmers and Brandlein, Histology and Histopathology 20(3):927-937 (2005); and Vollmers and Brandlein, Methods and Findings in Experimental and Clinical Pharmacology 27(3):185-91 (2005)). Human antibodies may also be generated by isolating Fv clone variable domain sequences selected from human-derived phage display libraries. Such variable domain sequences may then be combined with a desired human constant domain.

### Recombinant Human Antibodies

[0290] The term “recombinant human antibody”, as used herein, includes all human antibodies that are prepared, expressed, created or isolated by recombinant means, such as: (a) antibodies isolated from an animal (e.g., a mouse) that is transgenic or transchromosomal for human immunoglobulin genes or a hybridoma prepared therefrom (described further below); (b) antibodies isolated from a host cell transformed to express the human antibody, e.g., from a transfectoma; (c) antibodies isolated from a recombinant, combinatorial human antibody library; and (d) antibodies prepared, expressed, created or isolated by any other means that involve splicing of human immunoglobulin gene sequences to other DNA sequences. Such recombinant human antibodies have variable regions in which the framework and CDR regions are derived from reconstructed immunoglobulin consensus sequences, disclosed herein. In certain embodiments, however, such recombinant human antibodies can be subjected to in vitro mutagenesis (or, when an animal transgenic for human Ig sequences is used, in vivo somatic mutagenesis) and thus the amino acid sequences of the V_{H} and V_{L} regions of the recombinant antibodies are sequences that, while derived from and related to human immunoglobulin V_{H} and V_{L} sequences, may not naturally exist within the human antibody germline repertoire in vivo.

### Humanized Antibodies

[0291] In some embodiments, an antibody provided herein is a humanized antibody. In one embodiment, a humanized antibody is an antibody comprising amino acid residues from non-human HVRs and amino acid residues from human FRs. In certain embodiments, a humanized antibody will comprise substantially all of at least one, and typically two, variable domains, in which all or substantially all of the HVRs (e.g., CDRs) correspond to those of a non-human antibody, and all or substantially all of the FRs correspond to those of a human antibody. A humanized antibody optionally may comprise at least a portion of an antibody constant region derived from a human antibody. See, e.g., Almagro and Fransson, Front. Biosci. 13:1619-1633 (2008); Riechmann et al., Nature 332:323-329 (1988); Queen et al., Proc. Nat'l Acad. Sci. USA 86:10029-10033 (1989); Kashmiri et al., Methods 36:25-34 (2005); Padlan, Mol. Immunol. 28:489-498 (1991); Dall'Acqua et al., Methods 36:43-60 (2005); Osbourn et al., Methods 36:61-68 (2005); and Klimka et al., Br. J. Cancer 83:252-260 (2000).

[0292] A non-human antibody can be humanized to reduce immunogenicity to humans, while retaining the specificity and affinity of the parental non-human antibody. A humanized antibody can comprise one or more variable domains comprising one or more CDRs, or portions thereof, derived from a non-human antibody. A humanized antibody can comprise one or more variable domains comprising one or more FRs, or portions thereof, derived from human antibody sequences. A humanized antibody can optionally comprise at least a portion of a human constant region. In some embodiments, one or more FR residues in a humanized antibody are substituted with corresponding residues from a non-human antibody (e.g., the antibody from which the CDR residues are derived), e.g., to restore or improve antibody specificity or affinity.

[0293] Human framework regions that may be used for humanization include but are not limited to: framework regions selected using a “best-fit” method; framework regions derived from the consensus sequence of human antibodies of a particular subgroup of light or heavy chain variable regions; human mature (somatically mutated) framework regions or human germline framework regions; and framework regions derived from screening FR libraries (see, e.g., Sims et al. J. Immunol. 151:2296 (1993); Carter et al. Proc. Natl. Acad. Sci. USA 89:4285 (1992); Presta et al. J. Immunol. 151:2623 (1993); Baca et al. J. Biol. Chem. 272:10678-10684 (1997); and Rosok et al. J. Biol. Chem. 271:22611-22618 (1996)).

### Monoclonal Antibodies

[0294] A monoclonal antibody is obtained from a population of substantially homogeneous antibodies, i.e., the individual antibodies comprising the population are identical except for possible naturally occurring mutations that may be present in minor amounts. In some embodiments, the antibodies of the present disclosure are monoclonal. In a preferred embodiment, monoclonal antibodies may be made using recombinant DNA methods, or in an alternative embodiment, by the hybridoma method first described by Kohler et al., Nature, 256:495 (1975).

### Deimmunized Antibodies

[0295] An antibody or an antigen-binding fragment thereof described herein can be optionally assessed for immunogenicity and, as needed, be deimmunized (i.e., the antibody is made less immunoreactive by altering one or more T cell epitopes). As used herein, a “deimmunized antibody” means that one or more T cell epitopes in an antibody sequence have been modified such that a T cell response after administration of the antibody to a subject is reduced compared to an antibody that has not been deimmunized, yet the antibody retains its binding activity. Analysis of immunogenicity and T-cell epitopes present in the antibodies and antigen-binding fragments described herein can be carried out via the use of software and specific databases known in the art. Exemplary software and databases include iTope™ developed by Antitope of Cambridge, England. iTope™, is an in silico technology for analysis of peptide binding to human MHC class II alleles. The iTope™ software predicts peptide binding to human MHC class II alleles and thereby provides an initial screen for the location of such “potential T cell epitopes.” iTope™ software predicts favorable interactions between amino acid side chains of a peptide and specific binding pockets within the binding grooves of 34 human MHC class II alleles. The location of key binding residues is achieved by the in silico generation of 9mer peptides that overlap by one amino acid spanning the test antibody variable region sequence. Each 9mer peptide can be tested against each of the 34 MHC class II allotypes and scored based on their potential “fit” and interactions with the MHC class II binding groove. Peptides that produce a high mean binding score (>0.55 in the iTope™ scoring function) against >50% of the MHC class II alleles are considered as potential T cell epitopes. In such regions, the core 9 amino acid sequence for peptide binding within the MHC class II groove is analyzed to determine the MHC class II pocket residues (P1, P4, P6, P7 and P9) and the possible T cell receptor (TCR) contact residues (P-1, P2, P3, P5, P8). After identification of any T-cell epitopes, amino acid residue changes, substitutions, additions, and/or deletions can be introduced to remove the identified T-cell epitope. Such changes can be made so as to preserve antibody structure and function while still removing the identified epitope. Exemplary changes can include, but are not limited to, conservative amino acid changes.

### Engineered and Modified Antibodies

[0296] An antibody according to at least some embodiments of the invention further can be prepared using an antibody having one or more of the V_{H} and/or V_{L} sequences derived from an antibody or antigen-binding fragment thereof, disclosed herein, starting material to engineer a modified antibody, which modified antibody may have altered properties from the starting antibody. Provided herein are complete reconstructed amino acid and nucleic acid consensus sequences of V_{H} and V_{L} chain regions of antibodies disclosed herein. Also provided herein, are the amino acid and nucleic acid sequences of the CDR3 regions of the V_{H} and V_{L} of the antibodies, described herein. An antibody can be engineered by modifying one or more residues within one or both variable regions (i.e., V_{H} and/or V_{L}), for example within one or more CDR regions and/or within one or more framework regions. Additionally or alternatively, an antibody can be engineered by modifying residues within the constant regions, for example to alter the effector functions of the antibody.

[0297] One type of variable region engineering that can be performed is CDR grafting. Antibodies interact with target antigens predominantly through amino acid residues that are located in the six heavy and light chain complementarity determining regions (CDRs). For this reason, the amino acid sequences within CDRs are more diverse between individual antibodies than sequences outside of CDRs. Because CDR sequences are responsible for most antibody-antigen interactions, it is possible to express recombinant antibodies that mimic the properties of specific antibodies by constructing expression vectors that include CDR sequences from the specific antibody (e.g., antibodies disclosed herein) grafted onto framework sequences from a different antibody with different properties (see, e.g., Riechmann, L. et al. (1998) Nature 332:323-327; Jones, P. et al. (1986) Nature 321:522-525; Queen, C. et al. (1989) Proc. Natl. Acad. Sci. USA. 86:10029-10033; U.S. Pat. No. 5,225,539 to Winter, and U.S. Pat. Nos. 5,530,101; 5,585,089; 5,693,762 and 6,180,370 to Queen et al.)

[0298] Suitable framework sequences can be obtained from public DNA databases or published references that include germline antibody gene sequences. For example, germline DNA sequences for human heavy and light chain variable region genes can be found in the “VBase” human germline sequence database (available on the Internet), as well as in Kabat, E. A., et al. (1991) Sequences of Proteins of Immunological Interest, Fifth Edition, U.S. Department of Health and Human Services, NIH Publication No. 91-3242; Tomlinson, I. M., et al. (1992) “The Repertoire of Human Germline V_{H} Sequences Reveals about Fifty Groups of V_{H} Segments with Different Hypervariable Loops” J. Mol. Biol. 227:776-798; and Cox, J. P. L. et al. (1994) “A Directory of Human Germ-line V_{H} Segments Reveals a Strong Bias in their Usage” Eur. J. Immunol. 24:827-836; the contents of each of which are expressly incorporated herein by reference.

[0299] Another type of variable region modification is to mutate amino acid residues within the V_{H} and/or V_{L} CDR 1, CDR2 and/or CDR3 regions to thereby improve one or more binding properties (e.g., affinity) of the antibody of interest. Site-directed mutagenesis or PCR-mediated mutagenesis can be performed to introduce the mutations and the effect on antibody binding, or other functional property of interest, can be evaluated in appropriate in vitro or in vivo assays. Preferably conservative modifications (as discussed above) are introduced. The mutations may be amino acid substitutions, additions or deletions, but are preferably substitutions. Moreover, typically no more than one, two, three, four or five residues within a CDR region are altered.

[0300] Engineered antibodies according to at least some embodiments of the invention include those in which modifications have been made to framework residues within V_{H} and/or V_{L}, e.g. to improve the properties of the antibody. Typically, such framework modifications are made to decrease the immunogenicity of the antibody. For example, one approach is to “backmutate” one or more framework residues to the corresponding germline sequence. More specifically, an antibody that has undergone somatic mutation may contain framework residues that differ from the germline sequence from which the antibody is derived. Such residues can be identified by comparing the antibody framework sequences to the germline sequences from which the antibody is derived.

[0301] In addition or alternative to modifications made within the framework or CDR regions, antibodies according to at least some embodiments of the disclosure may be engineered to include modifications within the Fc region, typically to alter one or more functional properties of the antibody, such as serum half-life, complement fixation, Fc receptor binding, and/or antigen-dependent cellular cytotoxicity. Furthermore, an antibody according to at least some embodiments of the invention may be chemically modified (e.g., one or more chemical moieties can be attached to the antibody) or be modified to alter its glycosylation, again to alter one or more functional properties of the antibody. Such embodiments are described above. The numbering of residues in the Fc region is that of the EU index of Kabat.

[0302] In one embodiment, the hinge region of C_{H}1 is modified such that the number of cysteine residues in the hinge region is altered, e.g., increased or decreased. This approach is described further in U.S. Pat. No. 5,677,425 by Bodmer et al. The number of cysteine residues in the hinge region of C_{H}1 is altered to, for example, facilitate assembly of the light and heavy chains or to increase or decrease the stability of the antibody. In another embodiment, the Fc hinge region of an antibody is mutated to decrease the biological half-life of the antibody. More specifically, one or more amino acid mutations are introduced into the C_{H}2-C_{H}3 domain interface region of the Fc-hinge fragment such that the antibody has impaired Staphylococcyl protein A (SpA) binding relative to native Fc-hinge domain SpA binding. This approach is described in further detail in U.S. Pat. No. 6,165,745 by Ward et al.

[0303] In another embodiment, the antibody is modified to increase its biological half-life. Various approaches are possible. For example, to increase the biological half-life, the antibody can be altered within the C_{H}1 or C_{L} region to contain a salvage receptor binding epitope taken from two loops of a C_{H}2 domain of an Fc region of an IgG, as described in U.S. Pat. Nos. 5,869,046 and 6,121,022 by Presta et al.

### Antigen-Binding Fragments

### Antigen-Binding Fragment Terminology

[0304] The terms “antibody fragment,” “antigen-binding fragment,” or “antibody binding domain” refer to at least one portion of an antibody, or recombinant variants thereof, that contains the antigen-binding domain, i.e., an antigenic determining variable region of an intact antibody, that is sufficient to confer recognition and specific binding of the antibody fragment to a target, such as an antigen and its defined epitope. Examples of antigen-binding fragments include, but are not limited to, Fab, Fab′, F(ab′)₂, and Fv fragments, single-chain (sc)Fv (“scFv”) antibody fragments, linear antibodies, single domain antibodies such as sdAb (either V_{L} or V_{H}), camelid V_{H}H domains, and multi-specific antibodies formed from antibody fragments.

[0305] Antibody fragments can be made by various techniques, including but not limited to proteolytic digestion of an intact antibody as well as production by recombinant host cells (e.g., E. coli or phage), as described herein.

[0306] An Fv is the minimum antibody fragment that contains a complete antigen-recognition and antigen-binding site. This fragment contains a dimer of one heavy- and one light-chain variable region domain in tight, non-covalent association. From the folding of these two domains emanate six hypervariable loops (three loops each from the H and L chain) that contribute the amino acid residues for antigen-binding and confer antigen-binding specificity to the antibody. However, even a single variable region (or half of an Fv comprising only three CDRs specific for an antigen) has the ability to recognize and bind antigen, although at a lower affinity than the entire binding site.

[0307] The term “scFv” refers to a fusion protein comprising at least one antibody fragment comprising a variable region of a light chain and at least one antibody fragment comprising a variable region of a heavy chain, wherein the light and heavy chain variable regions are contiguously linked via a short flexible polypeptide linker, and capable of being expressed as a single polypeptide chain, and wherein the scFv retains the specificity of the intact antibody from which it is derived. Unless specified, as used herein a scFv may have the V_{L} and V_{H} variable regions in either order, e.g., with respect to the N-terminal and C-terminal ends of the polypeptide, the scFv may comprise V_{L}-linker-V_{H} or may comprise V_{H}-linker-V_{L}.

[0308] A diabody is a small antibody fragment prepared by constructing a scFv fragment with a short linker (about 5-10 residues) between the V_{H} and V_{L} domains such that inter-chain but not intra-chain pairing of the V domains is achieved, resulting in a bivalent fragment. Bispecific diabodies are heterodimers of two crossover scFv fragments in which the V_{H} and V_{L} domains of the two antibodies are present on different polypeptide chains. (see, e.g., Hollinger et al. Proc. Natl. Acad. Sci. USA 90:6444-6448 (1993)).

[0309] Domain antibodies (dAbs), which can be produced in fully human form, are the smallest known antigen-binding fragments of antibodies, ranging from about 11 kDa to about 15 kDa. DAbs are the robust variable regions of the heavy and light chains of immunoglobulins (V_{H} and V_{L}, respectively). They are highly expressed in microbial cell culture, show favorable biophysical properties including, for example, but not limited to, solubility and temperature stability, and are well suited to selection and affinity maturation by in vitro selection systems such as, for example, phage display. DAbs are bioactive as monomers and, owing to their small size and inherent stability can be formatted into larger molecules to create drugs with prolonged serum half-lives or other pharmacological activities.

[0310] Fv and scFv are the only species with intact combining sites that are devoid of constant regions. Thus, they are suitable for reduced nonspecific binding during in vivo use. scFv fusion proteins can be constructed to yield fusion of an effector protein at either the amino or the carboxy terminus of an scFv. The antibody fragment also can be a “linear antibody”. Such linear antibody fragments can be monospecific or bispecific.

### Antigen-Binding Fragment SEQ ID NOs

[0311] In an alternative embodiment of the invention, an antigen-binding fragment may be produced in a variety of forms where the antigen-binding domain is expressed as part of a contiguous polypeptide chain including, for example, a single domain antibody fragment (sdAb), a single chain antibody (scFv) derived from a human antibody (Harlow et al., 1999, In: Using Antibodies: A Laboratory Manual, Cold Spring Harbor Laboratory Press, N.Y.; Harlow et al., 1989, In: Antibodies: A Laboratory Manual, Cold Spring Harbor, N.Y.; Houston et al., 1988, Proc. Natl. Acad. Sci. USA 85:5879-5883; Bird et al., 1988, Science 242:423-426). In such an embodiment, the antigen-binding domain comprises:
[0312] (a) one or more (e.g., one, two, or all three) of:
   [0313] (i) heavy chain complementary determining region 1 (CDR-H1), wherein the CDR-H1 comprises a sequence selected from any one of SEQ ID NOs: 10001-11250,
   [0314] (ii) heavy chain complementary determining region 2 (CDR-H2), wherein the CDR-H2 comprises a sequence selected from any one of SEQ ID NOs: 12501-13750,
   [0315] (iii) heavy chain complementary determining region 3 (CDR-H3), wherein the CDR-H3 comprises a sequence selected from any one of SEQ ID NOS: 15001-16250, and/or
[0316] (b) one or more (e.g., one, two, or all three) of:
   [0317] (i) light chain complementary determining region 1 (CDR-L1), wherein the CDR-L1 comprises a sequence selected from any one of SEQ ID NOs: 11251-12500,
   [0318] (ii) light chain complementary determining region 2 (CDR-L2), wherein the CDR-L2 comprises a sequence selected from any one of SEQ ID NOs: 13751-15000,
   [0319] (iii) light chain complementary determining region 3 (CDR-L3), wherein the CDR-L3 comprises a sequence selected from any one of SEQ ID NOs: 16251-17500.
      In one embodiment, the antigen-binding domain comprises a heavy chain variable region described herein and/or a light chain variable region described herein. In some embodiments:
[0320] (a) the heavy chain variable region comprises a sequence selected from any one of SEQ ID NOs: 17501-18750, and/or
[0321] (b) the light chain variable region comprises a sequence selected from any one of SEQ ID NOs: 18751-20000.
   In one embodiment, the antigen-binding domain is a scFv comprising a heavy chain variable region and a light chain variable region of an amino acid sequence, e.g., a heavy chain variable region and light chain variable region described herein. In an embodiment, the antigen-binding domain (e.g., an scFv) comprises:
[0322] (a) a heavy chain variable region comprising:
   [0323] (i) an amino acid sequence having at least one, two or three modifications (e.g., substitutions) but not more than 30, 20 or 10 modifications (e.g., substitutions) of an amino acid sequence of a heavy chain variable region provided herein, or
   [0324] (ii) a sequence with 85-99% (e.g., 90-99%, or 95-99%) identity to an amino acid sequence provided herein; and/or
[0325] (b) a light chain variable region comprising:
   [0326] (i) an amino acid sequence having at least one, two or three modifications (e.g., substitutions) but not more than 30, 20 or 10 modifications (e.g., substitutions) of an amino acid sequence of a light chain variable region provided herein, or
   [0327] (ii) a sequence with 85-99% (e.g., 90-99%, or 95-99%) identity to an amino acid sequence provided herein.

### Synthesis of Antigen Binding Fragments

[0328] Once DNA fragments encoding V_{H} and V_{L} segments are obtained, these DNA fragments can be further manipulated by standard recombinant DNA techniques, for example to convert the variable region genes to full-length antibody chain genes, to Fab fragment genes or to a scFv gene. In these manipulations, a V_{L}- or V_{H}-encoding DNA fragment is operatively linked to another DNA fragment encoding another protein, such as an antibody constant region or a flexible linker. The term “operatively linked”, as used in this context, is intended to mean that the two DNA fragments are joined such that the amino acid sequences encoded by the two DNA fragments remain in-frame. The isolated DNA encoding the V_{H} region can be converted to a full-length heavy chain gene by operatively linking the V_{H}-encoding DNA to another DNA molecule encoding heavy chain constant regions (C_{H}1, C_{H}2 and C_{H}3). The sequences of human heavy chain constant region genes are known in the art (see e.g., Kabat, E. A., et al. (1991) Sequences of Proteins of Immunological Interest, Fifth Edition, U.S. Department of Health and Human Services, NIH Publication No. 91-3242) and DNA fragments encompassing these regions can be obtained by standard PCR amplification. The heavy chain constant region can be an IgG1, IgG2, IgG3, IgG4, IgA, IgE, IgM or IgD constant region, but most preferably is an IgG1 or IgG4 constant region. For a Fab fragment heavy chain gene, the V_{H}-encoding DNA can be operatively linked to another DNA molecule encoding only the heavy chain C_{H}1 constant region.

[0329] The isolated DNA encoding the V_{L} region can be converted to a full-length light chain gene (as well as a Fab light chain gene) by operatively linking the V_{L}-encoding DNA to another DNA molecule encoding the light chain constant region, C_{L}. The sequences of human light chain constant region genes are known in the art (see e.g., Kabat, E. A., et al. (1991) Sequences of Proteins of Immunological Interest, Fifth Edition, U.S. Department of Health and Human Services, NIH Publication No. 91-3242) and DNA fragments encompassing these regions can be obtained by standard PCR amplification. The light chain constant region can be a kappa or lambda constant region, but most preferably is a kappa constant region.

[0330] To create a scFv gene, the V_{H}- and V_{L}-encoding DNA fragments are operatively linked to another fragment encoding a flexible linker, e.g., encoding the amino acid sequence (Gly-Gly-Gly-Gly-Ser)₃, such that the V_{H} and V_{L} sequences can be expressed as a contiguous single-chain protein, with the V_{L} and V_{H} regions joined by the flexible linker (see e.g., Bird et al. (1988) Science 242:423-426; Huston et al. (1988) Proc. Natl. Acad. Sci. USA 85:5879-5883; McCafferty et al., (1990) Nature 348:552-554).

### Alternative Paths to Antibody Production

[0331] As an alternative to direct synthesis using recombinant DNA methods, the antibody or antigen binding fragments described in this disclosure may be produced via hybridoma. In the hybridoma method, a mouse or other appropriate host animal, such as a hamster or macaque monkey, is immunized as herein described to elicit lymphocytes that produce or are capable of producing antibodies that will specifically bind to the protein used for immunization. Alternatively, lymphocytes may be immunized in vitro. Lymphocytes then are fused with myeloma cells using a suitable fusing agent, such as polyethylene glycol, to form a hybridoma cell (Goding, Monoclonal Antibodies: Principles and Practice, pp. 59-103 (Academic Press, 1986)).

[0332] The hybridoma cells thus prepared are seeded and grown in a suitable culture medium that preferably contains one or more substances that inhibit the growth or survival of the unfused, parental myeloma cells. For example, if the parental myeloma cells lack the enzyme hypoxanthine guanine phosphoribosyl transferase (HGPRT or HPRT), the culture medium for the hybridomas typically will include hypoxanthine, aminopterin, and thymidine (HAT medium), which substances prevent the growth of HGPRT-deficient cells. Preferred myeloma cells are those that fuse efficiently, support stable high-level production of antibody by the selected antibody-producing cells, and are sensitive to a medium. Human myeloma and mouse-human heteromyeloma cell lines also have been described for the production of human monoclonal antibodies (Kozbor, J. Immunol., 133: 3001 (1984); Brodeur et al., Monoclonal Antibody Production Techniques and Applications, pp. 51-63 (Marcel Dekker, Inc., New York, 1987)). Exemplary murine myeloma lines include those derived from MOP-21 and M.C.-11 mouse tumors available from the Salk Institute Cell Distribution Center, San Diego, Calif USA, and SP-2 or X63-Ag8-653 cells available from the American Type Culture Collection, Rockville, Md. USA. Culture medium in which hybridoma cells are growing is assayed for production of monoclonal antibodies directed against the antigen. Accordingly, in one aspect the present disclosure provides a hybridoma producing the antibody or antigen-binding fragment thereof, described herein. Preferably, the binding specificity of monoclonal antibodies produced by hybridoma cells is determined by immunoprecipitation or by an in vitro binding assay, such as radioimmunoassay (RIA) or enzyme-linked immunoabsorbent assay (ELISA). The binding affinity of the monoclonal antibody can, for example, be determined by Scatchard analysis (Munson et al., Anal. Biochem. 107:220 (1980)).

[0333] After hybridoma cells are identified that produce antibodies of the desired specificity, affinity, and/or activity, the clones may be subcloned by limiting dilution procedures and grown by standard methods (Goding, Monoclonal Anti-bodies: Principles and Practice, pp. 59-103 (Academic Press, 1986)). Suitable culture media for this purpose include, for example, D-MEM or RPMI-1640 medium. In addition, the hybridoma cells may be grown in vivo as ascites tumors in an animal. The monoclonal antibodies secreted by the subclones are suitably separated from the culture medium, ascites fluid, or serum by conventional immunoglobulin purification procedures such as, for example, protein A-Sepharose, hydroxylapatite chromatography, gel electrophoresis, dialysis, or affinity chromatography.

### Screening Methods for Identification of Target Antigens

### Binding Affinity

[0334] Antibodies may be screened for binding affinity by methods known in the art. For example, gel-shift assays, Western blots, radiolabeled competition assay, co-fractionation by chromatography, co-precipitation, cross linking, ELISA, and the like may be used, which are described in, for example, Current Protocols in Molecular Biology (1999) John Wiley & Sons, NY, which is incorporated herein by reference in its entirety.

[0335] To initially screen for antibodies which bind to the desired epitope on an antigen (e.g., a SARS-CoV-2 associated antigen), a routine cross-blocking assay such as that described in Antibodies, A Laboratory Manual, Cold Spring Harbor Laboratory, Ed Harlow and David Lane (1988), can be performed. Routine competitive binding assays may also be used, in which the unknown antibody is characterized by its ability to inhibit binding of antigen to an antigen specific antibody of the invention. Intact antigen, fragments thereof, or linear epitopes can be used. Epitope mapping is described in Champe et al., J. Biol. Chem. 270: 1388-1394 (1995).

[0336] In one variation of an in vitro assay, the present disclosure provides a method comprising the steps of (a) contacting an immobilized antigen with a candidate antibody and (b) detecting binding of the candidate antibody to the antigen. In an alternative embodiment, the candidate antibody is immobilized and binding of antigen is detected. Immobilization is accomplished using any of the methods well known in the art, including covalent bonding to a support, a bead, or a chromatographic resin, as well as non-covalent, high affinity interaction such as antibody binding, or use of streptavidin/biotin binding wherein the immobilized compound includes a biotin moiety. Detection of binding can be accomplished (a) using a radioactive label on the compound that is not immobilized, (b) using a fluorescent label on the non-immobilized compound, (c) using an antibody immunospecific for the non-immobilized compound, (d) using a label on the non-immobilized compound that excites a fluorescent support to which the immobilized compound is attached, as well as other techniques well known and routinely practiced in the art.

### Modulator Activity

[0337] Another aspect of the present invention is directed to methods of identifying antibodies which modulate (i.e., decrease) activity of a target antigen comprising contacting a target antigen with an antibody, and determining whether the antibody modifies activity of the antigen. The activity in the presence of the test antibody is compared to the activity in the absence of the test antibody. Where the activity of the sample containing the test antibody is lower than the activity in the sample lacking the test antibody, the antibody will have inhibited activity.

[0338] Antibodies that modulate (i.e., increase, decrease, or block) the activity or expression of desired target may be identified by incubating a putative modulator with a cell expressing the desired target and determining the effect of the putative modulator on the activity or expression of the target. The selectivity of an antibody that modulates the activity of a target polypeptide or polynucleotide can be evaluated by comparing its effects on the target polypeptide or polynucleotide to its effect on other related compounds. Selective modulators may include, for example, antibodies and other proteins, peptides, or organic molecules which specifically bind to target polypeptides or to a nucleic acid encoding a target polypeptide. Modulators of target activity will be therapeutically useful in treatment of diseases and physiological conditions in which normal or aberrant activity of target polypeptide is involved. The target can be a for example, a SARS-CoV-2 associated antigen.

[0339] In one embodiment of the invention, methods of screening for antibodies which modulate the activity of target antigen comprise contacting antibodies with a target antigen polypeptide and assaying for the presence of a complex between the antibody and the target antigen. In such assays, the ligand is typically labeled. After suitable incubation, free ligand is separated from that present in bound form, and the amount of free or uncomplexed label is a measure of the ability of the particular antibody to bind to the target antigen.

### High Throughput Screening

[0340] The invention also contemplates high throughput screening (HTS) assays to identify antibodies that interact with or inhibit biological activity (i.e., inhibit enzymatic activity, binding activity, etc.) of an antigen. FITS assays permit screening of large numbers of compounds in an efficient manner. Cell-based HTS systems are contemplated to investigate the interaction between antibodies and their target antigen and their binding partners. HTS assays are designed to identify “hits” or “lead compounds” having the desired property, from which modifications can be designed to improve the desired property. Chemical modification of the “hit” or “lead compound” is often based on an identifiable structure/activity relationship between the “hit” and target antigen.

[0341] An FITS array may consist of one or more protein arrays (e.g., antibody arrays, antibody microarrays, protein microarray). The array can comprise one or more antibodies or antigen-binding fragment thereof, disclosed herein, immobilized on a solid support. Methods of production and use of such arrays are known well known in art (e.g., (Buessow et al., Nucleic Acids Res. 1998, Lueking et al., Mol Cell Proteomics., 2003; Angenendt et al., Mol Cell Proteomics., 2006) In some embodiments, very small amounts (e.g., 1 to 500 μg) of antibody or antigen-binding fragment thereof is immobilized. In some embodiments, there will be from 1 μg to 100 from 1 μg to 50 μg, from 1 μg to 20 μg, from 3 μg to 100 μg, from 3 μg to 50 μg, from 3 μg to 20, from 5 μg to 100 from 5 μg to 50 from 5 to 20 μg of antibody present in a single sample. In one aspect, at least one of the samples in a plurality of samples will have from 1 μg to 100 from 1 μg to 50 from 1 μg to 20 from 3 μg to 100 from 3 μg to 50 from 3 μg to 20, from 5 μg to 100 from 5 μg to 50 from 5 μg to 20 μg of antibody present. A solid support refers to an insoluble, functionalized material to which the antibodies can be reversibly attached, either directly or indirectly, allowing them to be separated from unwanted materials, for example, excess reagents, contaminants, and solvents. Examples of solid supports include, for example, functionalized polymeric materials, e.g., agarose, or its bead form Sepharose®, dextran, polystyrene and polypropylene, or mixtures thereof; compact discs comprising microfluidic channel structures; protein array chips; pipet tips; membranes, e.g., nitrocellulose or PVDF membranes; and microparticles, e.g., paramagnetic or non-paramagnetic beads. In some embodiments, an affinity medium will be bound to the solid support and the antibody will be indirectly attached to solid support via the affinity medium. In one aspect, the solid support comprises a protein A affinity medium or protein G affinity medium. A “protein A affinity medium” and a “protein G affinity medium” each refer to a solid phase onto which is bound a natural or synthetic protein comprising an Fc-binding domain of protein A or protein G, respectively, or a mutated variant or fragment of an Fc-binding domain of protein A or protein G, respectively, which variant or fragment retains the affinity for an Fc-portion of an antibody. Antibody arrays can be fabricated by the transfer of antibodies onto the solid surface in an organized high-density format followed by chemical immobilization. Representative techniques for fabrication of an array include photolithography, ink jet and contact printing, liquid dispensing and piezoelectrics. The patterns and dimensions of antibody arrays are to be determined by each specific application. The sizes of each antibody spot may be easily controlled by the users. Antibodies may be attached to various kinds of surfaces via diffusion, adsorption/absorption, or covalent cross-linking and affinity. Antibodies may be directly spotted onto a plain glass surface. To keep antibodies in a wet environment during the printing process, high percent glycerol (e.g., 30-40%) may be used in sample buffer and the spotting is carried out in a humidity-controlled environment.

### Antibody Arrays

[0342] The surface of a substrate may be modified to achieve better binding capacity. For example, the glass surface may be coated with a thin nitrocellulose membrane or poly-L-lysine such that antibodies can be passively adsorbed to the modified surface through non-specific interactions. Antibodies may be immobilized onto a support surface either by chemical ligation through a covalent bond or non-covalent binding. There are many known methods for covalently immobilizing antibodies onto a solid support. For example, MacBeath et al., (1999) J Am. Chem. Soc. 121:7967-7968) use the Michael addition to link thiol-containing compounds to maleimide-derivatized glass slides to form a microarray of small molecules. See also, Lam & Renil (2002) Current Opin. Chemical Biol. 6:353-358. Representative examples of biomarkers include, TROP/TNFRSF19, IL-1 sRI, uPAR, IL-10, VCAM-1 (CD106), IL-10 receptor-β, VE-cadherin, IL-13 receptor-α1, VEGF, IL-13 receptor-α2, VEGF R2 (KDR), IL-17, VEGF R3

[0343] The arrays can employ single-antibody (label-base) detection or 2-antibody (sandwich-based) detection. In some embodiments, an ELISA (also known as an antibody sandwich assay) may be performed following standard techniques as follows. Antibodies used as the capture antibodies for an antigen disposed on (e.g., coated onto) a solid support, which may then be washed at least once (e.g., with water and/or a buffer such as PBS-t), followed by a standard blocking buffer, and then at least one more wash. The solid support may then be brought into contact with the sample/biosample under conditions to allow antibody-antigen complexes to form (e.g., incubating from 1 hour to about 24 hours at a temperature from about 4° C. to about room temperature). As used herein, “biosample” and “sample” are used interchangeably and embrace both fluids (also referred to herein as fluid samples and biofluids) and tissue obtained from the subject. The term “biofluid” as used herein refers to a biological fluid sample such as blood samples, cerebral spinal fluid (CSF), urine and other liquids obtained from the subject, or a solubilized preparation of such fluids wherein the cell components have been lysed to release intra-cellular contents into a buffer or other liquid medium. The definition also includes samples that have been manipulated in any way after their procurement, such as by treatment with reagents, or enrichment for certain components, such as proteins or polynucleotides. The term “blood sample” embraces whole blood, plasma, and serum. Solid tissue samples include biopsy specimens and tissue cultures or cells derived therefrom, and the progeny thereof. A sample may comprise a single cell or more than a single cell. The biosample may also be a cultured population of cells derived from the subject human or animal. However, whenever the biosample comprises a population of cells, the method will first require that the constituents of the cells be solubilized by lysing the cells, and removing solid cell debris, thereby providing a solution of the biomarkers. Samples can be prepared by methods known in the art such as lysing, fractionation, purification, including affinity purification, FACS, laser capture micro-dissection or iospycnic centrifugation. The support may then be washed at least once (e.g., with a buffer such as PBS-t). To detect the complexation between the capture antibodies and the antigen that may be present in the sample, secondary or “detection” antibodies are applied to the solid support (e.g., diluted in blocking buffer) under conditions to allow complexation between the secondary antibodies and the respective biomarkers (e.g., at room temperature for at least one hour). The secondary antibodies are selected so as to bind a different epitope on the antigen than the capture antibody. The optimum concentrations of capture and detection antibodies are determined using standard techniques such as the “criss-cross” method of dilutions. The detection antibody may be conjugated, directly or indirectly, to a detectable label.

[0344] The term “detectable label” as used herein refers to labeling moieties known in the art. Said moiety may be, for example, a radiolabel (e.g., ³H, ¹²⁵I, ³⁵S, ¹⁴C, ³²P, etc.), detectable enzyme (e.g., horse radish peroxidase (HRP), alkaline phosphatase etc.), a dye (e.g., a fluorescent dye), a colorimetric label such as colloidal gold or colored glass or plastic (e.g., polystyrene, polypropylene, latex, etc.), beads, or any other moiety capable of generating a detectable signal such as a colorimetric, fluorescent, chemiluminescent or electrochemiluminescent (ECL) signal. The term “dye” as used herein refers to any reporter group whose presence can be detected by its light absorbing or light emitting properties. For example, Cy5 is a reactive water-soluble fluorescent dye of the cyanine dye family. Cy5 is fluorescent in the red region (about 650 to about 670 nm). It may be synthesized with reactive groups on either one or both of the nitrogen side chains so that they can be chemically linked to either nucleic acids or protein molecules. Labeling is done for visualization and quantification purposes. Cy5 is excited maximally at about 649 nm and emits maximally at about 670 nm, in the far red part of the spectrum; quantum yield is 0.28 (FW=792). Suitable fluorophores (chromes) for the probes of the disclosure may be selected from, but not intended to be limited to, fluorescein isothiocyanate (FITC, green), cyanine dyes Cy2, Cy3, Cy3.5, Cy5, Cy5.5 Cy7, Cy7.5 (ranging from green to near-infrared), Texas Red, and the like. Derivatives of these dyes for use in the embodiments of the disclosure may be, but are not limited to, Cy dyes (Amersham Bioscience), Alexa Fluors (Molecular Probes Inc.), HILYTE™ Fluors (AnaSpec), and DYLITE™ Fluors (Pierce, Inc). In some embodiments, the detectable label is a chromogenic label such as biotin, in which case the detection antibody-biotin conjugate is detected using Streptavidin/Horseradish Peroxidase (HRP) or the equivalent. The streptavidin may be diluted in an appropriate block and incubated for 30 minutes at room temperature. Other detectable labels suitable for use in the present invention include fluorescent labels and chemiluminescent labels.

[0345] The support may then be washed and the label (e.g., HRP enzymatic conjugate on the streptavidin) is detected using the following standard protocols such as a chromogenic system (the SIGMA FAST™ OPD system), a fluorescent system or a chemiluminescent system. The amounts of antigen present in the sample may then be read on an ELISA plate reader (e.g., SpectraMax 384 or the equivalent). The concentration of each of the antigens may then be back-calculated (e.g., by using the standard curve generated from purified antigens and multiplied by the dilution factor following standard curve fitting methods), and then compared to a control (generated from tissue samples obtained from healthy subjects).

[0346] In one embodiment, a biosample, e.g., a biofluid, is contacted with a system of reagents, well-known in the art, that can attach biotin moieties to some or all of the constituent components of the sample, and especially to the protein or peptide constituents thereof, including the biomarkers. Following this biotinylation step, the biotinylated biosample may then be contacted with the antibody array that contains an array of antibodies specific to each of the antigens.

[0347] After an adequate incubation period, readily selected to allow the binding of any antigen in the sample to its corresponding antibody of the array, the fluid sample is washed from the array. The array is then contacted with a biotin-binding polypeptide such as avidin or streptavidin, that has been conjugated with a detectable label (as described above in connection with the ELISA). Detection of the label on the array (relative to a control) will indicate which of the biomarkers captured by the respective antibody is present in the sample.

[0348] Regardless of the specific assay format, the biotin-label-based array methods are relatively advantageous from several standpoints. Biotin-label can be used as signal amplification. Biotin is the most common method for labeling protein and the label process can be highly efficient. Furthermore, biotin can be detected using fluorescence-streptavidin and, therefore, visualized via laser scanner, or HRP-streptavidin using chemiluminescence. Using biotin-label-based antibody arrays, most targeted proteins can be detected at pg/ml levels. The detection sensitivity of the present methods can be further enhanced by using 3-DNA detection technology or rolling circle amplification (Schweitzer et al., (2000) Proc. Natl. Acad. Sci. U.S.A. 97:10113-10119; Horie et al., (1996) Int. J. Hematol. 63:303-309).

[0349] As it relates to the present disclosure, the sample can be obtained from a subject having disease (e.g., infection with SARS-CoV-2) and a healthy subject.

### Protein Arrays

[0350] In some embodiments, protein arrays can be used where protein antigens with known identities are immobilized on a solid support as capture molecules and one seeks to determine whether the known antigens binds to a candidate antibody. The antigen can be labeled with a tag that allows detection or immunoprecipitation after capture by an immobilized antibody. Protein antigens can be obtained, for example, from a patient infected with SARS-CoV-2. A number of commercial protein arrays are available e.g., PROTOARRAY®, KINEX™, RAYBIO® Human RTK Phosphorylation Antibody Array. The antibody-antigen complexes can be obtained by methods known in the art (e.g., immunoprecipitation or Western blot). For reviews on Protein array and antibody array that can be of interest in this study, see Reymond Sutandy, et al. 2013; Liu, B. C.-S., et al. 2012; Haab B B, 2005.

[0351] In an exemplary immunoprecipitation method, an antibody or antigen-binding fragment thereof, described herein is added first to a sample comprising an antigen, and incubated to allow antigen-antibody complexes to form. Subsequently, the antigen-antibody complexes are or with protein A/G-coated beads to allow them to absorb the complexes. In a modified approach, the antibody or antigen-binding fragment thereof is fused to a His tag or other tags (e.g., FLAG tag, Biotin Tag) by recombinant DNA techniques, and immunoprecipitated using an antibody to the tag (pull-down assay). The beads are then thoroughly washed, and the antigen is eluted from the beads by an acidic solution or SDS. The eluted sampled can be analyzed using Mass Spectrometry or SDS page to identify and confirm the antigen. Methods to analyze antibody-antigen complexes formed on a protein microarray and identify the antigen via mass spec are known.

### ADCC and CDC Assays

[0352] In one aspect, the antibodies or antigen-binding fragment thereof, disclosed herein, are contemplated as therapeutic antibodies for treatment of infection with SARS-CoV-2. Accordingly, the antibodies or antigen-binding fragment thereof, can be further screened in an antibody-dependent cell-mediated cytotoxicity (ADCC) assay and/or Complement-dependent cytotoxicity (CDC) assay. “ADCC activity” refers to the ability of an antibody to elicit an ADCC reaction. ADCC is a cell-mediated reaction in which antigen-nonspecific cytotoxic cells that express FcRs (e.g., natural killer (NK) cells, neutrophils, and macrophages) recognize antibody bound to the surface of a target cell and subsequently cause lysis of (i.e., “kill”) the target cell (e.g., a cell which has been infected by SARS-CoV-2). The primary mediator cells are natural killer (NK) cells. NK cells express FcγRIII only, with FcγRIIIA being an activating receptor and FcγRIIIB an inhibiting one; monocytes express FcγRI, FcγRII and FcγRIII (Ravetch et al. (1991) Annu. Rev. Immunol. 9:457-92). ADCC activity can be assessed directly using an in vitro assay, e.g., a ⁵¹Cr release assay using peripheral blood mononuclear cells (PBMC) and/or NK effector cells as described in the Examples and Shields et al. (2001) J. Biol. Chem. 276:6591-6604, or another suitable method known in the art. ADCC activity may be expressed as a concentration of antibody at which the lysis of target cells is half-maximal. Accordingly, in some embodiments, the concentration of an antibody or antigen-binding fragment thereof of the disclosure, at which the lysis level is the same as the half-maximal lysis level by the wild-type control, is at least 2-, 3-, 5-, 10-, 20-, 50-, 100-fold lower than the concentration of the wild-type control itself.

[0353] Additionally, in some embodiments, the antibody or antigen-binding fragment thereof of the present disclosure may exhibit a higher maximal target cell lysis as compared to the wild-type control. For example, the maximal target cell lysis of an antibody or Fc fusion protein of the invention may be 10%, 15%, 20%, 25% or more higher than that of the wild-type control. “Complement dependent cytotoxicity” or “CDC” refer to the ability of a molecule to lyse a target (e.g. a cell infected with SARS-CoV-2) in the presence of complement. The complement activation pathway is initiated by the binding of the first component of the complement system (C1q) to a molecule (e.g. an antibody) complexed with a cognate antigen. To assess complement activation, a CDC assay, e.g. as described in Gazzano-Santoro et al. J. Immunol. Methods 202:163 (1996), may be performed.

### Target Antigen

[0354] In some embodiments, an antibody or antigen binding fragment thereof disclosed herein binds a coronavirus or an antigen on the coronavirus. In some embodiments, an antibody or antigen binding fragment thereof disclosed herein binds a Severe acute respiratory syndrome—related coronavirus (SARSr-CoV or SARS-CoV), or an antigen on the SARS-CoV. In some embodiments, an antibody or antigen binding fragment thereof disclosed herein binds a Middle East respiratory syndrome (MERS), or an antigen thereof. In some embodiments, an antibody or antigen binding fragment thereof binds a SARS-CoV-2, or an antigen thereof. In some embodiments, an antibody or antigen biding fragment thereof, disclosed herein, binds to a SARS-Cov-2 antigen, or a homolog thereof, or a variant thereof. In some embodiments, an antibody or antigen binding fragment thereof disclosed herein binds a SARS-Cov-2 spike (S) protein, or a homolog thereof, or a variant thereof. The S protein is comprised of an N-terminal subunit (S1) that mediates receptor binding and a C-terminal 47 subunit (S2) responsible for virus-cell membrane fusion (Wrapp et al., 2020). During viral entry into cells, the receptor-binding domain (RBD) of 51 engages a human host cell receptor; human angiotensin converting enzyme 2 (hACE2) (Letko et al., 2020). Processing of S by host cell proteases, typically TMPRSS2, TMPRSS4, or endosomal cathepsins, facilitates the S2 dependent fusion of viral and host-cell membranes (Hoffmann et al., 2020; Zang et al., 2020). In some embodiments, an antibody or antigen binding fragment thereof of the present disclosure binds subunit 51 of the SARS-Cov-2 spike (S) protein, or a homolog thereof, or a variant thereof. In some embodiments, an antibody or antigen binding fragment thereof of the present disclosure binds subunit S2 of the SARS-Cov-2 spike (S) protein, or a homolog thereof, or a variant thereof. In some embodiments, an antibody or antigen binding fragment thereof of the present disclosure binds a receptor-binding domain of subunit S1 of the SARS-Cov-2 spike (S) protein, or a homolog thereof, or a variant thereof. In some embodiments, an antibody or the antigen binding thereof of the present disclosure inhibits binding of the receptor-binding domain of subunit S1 of SARS-Cov-2 spike (S) protein to a host cell receptor (e.g., human angiotensin converting enzyme 2 (hACE2)).

[0355] In some embodiments, an antibody or antigen binding fragment thereof of the present disclosure binds an epitope on the target antigen (e.g., SARS-Cov-2 spike (S) protein). In some embodiments, an antibody or antigen binding fragment thereof of the present disclosure binds multiple (e.g., 1, 2, 3, 4, 5, 6, 7, 8, 9, 10, or more epitopes on a target antigen (e.g., SARS-Cov-2 spike (S) protein). In some embodiments, an antibody or antigen binding fragment thereof disclosed herein binds an epitope comprising an amino acid sequence selected Table 3. In some embodiments, an antibody or antigen binding fragment thereof disclosed herein binds an epitope comprising an amino acid sequence set forth at SEQ NO: 20061. In some embodiments, an antibody or antigen binding fragment thereof disclosed herein binds an epitope comprising an amino acid sequence set forth at SEQ NO: 20045. In some embodiments, an antibody or antigen binding fragment thereof disclosed herein binds an epitope comprising an amino acid sequence set forth at SEQ NO: 20082. In some embodiments, an antibody or antigen binding fragment thereof disclosed herein binds an epitope comprising an amino acid sequence set forth at SEQ NO: 20023.

[0356] The binding affinity and dissociation rate of an antibody or an antigen binding fragment thereof disclosed herein to an epitope on a SARS-CoV2 antigen (e.g., SARS-Cov-2 spike (S) protein, subunit S1, subunit S2, or a receptor-binding domain of subunit S1) can be determined by methods known in the art. The binding affinity can be measured by ELISAs, RIAs, flow cytometry, surface plasmon resonance, such as BIACORE™. The dissociate rate can be measured by surface plasmon resonance. Preferably, the binding affinity and dissociation rate is measured by surface plasmon resonance. More preferably, the binding affinity and dissociation rate are measured using BIACORE™.

### Epitope Mapping

[0357] The term “epitope,” as used herein, refers to an antigenic determinant that interacts with a specific antigen-binding site in the variable region of an antibody molecule known as a paratope. A single antigen can have more than one epitope. Thus, different antibodies may bind to different areas on an antigen and can have different biological effects. Epitopes may be either conformational or linear. A conformational epitope is produced by spatially juxtaposed amino acids from different segments of the linear polypeptide chain. A linear epitope is one produced by adjacent amino acid residues in a polypeptide chain. In certain circumstance, an epitope may include moieties of saccharides, phosphoryl groups, or sulfonyl groups on the antigen.

[0358] Various techniques known to persons of ordinary skill in the art can be used to determine whether an antigen-binding domain of an antibody “interacts with one or more amino acids” within a polypeptide or protein. Exemplary techniques include, e.g., routine cross-blocking assay such as that described Antibodies, Harlow and Lane (Cold Spring Harbor Press, Cold Spring Harb., NY), alanine scanning mutational analysis, peptide blots analysis (Reineke, 2004, Methods Mol. Biol. 248:443-463), and peptide cleavage analysis. In addition, methods such as epitope excision, epitope extraction and chemical modification of antigens can be employed (Tomer, 2000, Protein Science 9:487-496). Another method that can be used to identify the amino acids within a polypeptide with which an antigen-binding domain of an antibody interacts is hydrogen/deuterium exchange detected by mass spectrometry. In general terms, the hydrogen/deuterium exchange method involves deuterium-labeling the protein of interest, followed by binding the antibody to the deuterium-labeled protein. Next, the protein/antibody complex is transferred to water to allow hydrogen-deuterium exchange to occur at all residues except for the residues protected by the antibody (which remain deuterium-labeled). After dissociation of the antibody, the target protein is subjected to protease cleavage and mass spectrometry analysis, thereby revealing the deuterium-labeled residues, which correspond to the specific amino acids with which the antibody interacts. See, e.g., Ehring (1999) Analytical Biochemistry 267(2):252-259; Engen and Smith (2001) Anal. Chem. 73:256A-265A. X-ray crystallography of the antigen/antibody complex may also be used for epitope mapping purposes.

[0359] The epitope on a target antigen to which the antibody or antigen-binding fragment, disclosed herein, bind may consist of a single contiguous sequence of 3 or more (e.g., 3, 4, 5, 6, 7, 8, 9, 10, 11, 12, 13, 14, 15, 16, 17, 18, 19, 20 or more) amino acids of the target antigen. Alternatively, the epitope may consist of a plurality of non-contiguous amino acids (or amino acid sequences) of antigen.

### Pharmaceutical Compositions and Medicaments

[0360] In one aspect, the present disclosure provides a composition comprising an antibody or antigen binding fragment thereof disclosed herein and/or a nucleic acid encoding the antibody or antigen binding fragment thereof disclosed herein. The nucleic acids encoding the antibodies or antigen binding fragment are described above including their sequences. For the clinical use of the methods described herein, administration of the antibodies or antigen binding fragments thereof, and/or nucleic acids encoding the antibodies or antigen binding fragment thereof of the present disclosure can include formulation into pharmaceutical compositions, pharmaceutical formulations, or medicaments, for administration, e.g., subcutaneous, intravenous, intradermal, intraperitoneal, oral, intramuscular, intracranial or other routs of administration. In some embodiments, the antibodies or antigen binding fragments thereof, described herein, or nucleic acids encoding the antibodies or antigen binding fragment thereof can be administered along with any pharmaceutically acceptable carrier, excipient, or diluent, which results in an effective treatment and/or effective prophylaxis in the subject. Thus, in one aspect, the present disclosure provides pharmaceutical compositions comprising one or more antibodies or antigen binding fragment thereof, and/or nucleic acids encoding the one or more antibodies or antigen binding fragment thereof described herein, in combination with one or more pharmaceutically acceptable carrier, excipient, or diluent.

[0361] The phrase “pharmaceutically acceptable” refers to those compounds, materials, compositions, and/or dosage forms which are, within the scope of sound medical judgment, suitable for use in contact with the tissues of human beings and animals without excessive toxicity, irritation, allergic response, or other problem or complication, commensurate with a reasonable benefit/risk ratio. The phrase “pharmaceutically acceptable carrier” as used herein means a pharmaceutically acceptable material, composition or vehicle, such as a liquid or solid filler, diluent, excipient, solvent, media, encapsulating material, manufacturing aid (e.g., lubricant, talc magnesium, calcium or zinc stearate, or steric acid), or solvent encapsulating material, involved in maintaining the stability, solubility, or activity of, an antibody or antigen binding fragment thereof of the present disclosure. Examples include, but are not limited to, any of a number of standard pharmaceutical carriers such as sterile phosphate buffered saline solutions, bacteriostatic water, and the like. A variety of aqueous carriers may be used, e.g., water, buffered water, 0.4% saline, 0.3% glycine and the like, and may include other proteins for enhanced stability, such as albumin, lipoprotein, globulin, etc., subjected to mild chemical modifications or the like. Each carrier must be “acceptable” in the sense of being compatible with the other ingredients of the formulation and not injurious to the patient. The terms “excipient”, “carrier”, “pharmaceutically acceptable carrier”, or the like are used interchangeably herein. The compositions of the present disclosure may further comprise one or more pharmaceutically acceptable carriers, excipients, and other agents that are incorporated into formulations to provide improved transfer, delivery, tolerance, and the like (herein collectively referred to as “pharmaceutically acceptable carriers or diluents”). A multitude of appropriate formulations can be found in the formulary known to all pharmaceutical chemists: Remington's Pharmaceutical Sciences, Mack Publishing Company, Easton, Pa. These formulations include, for example, powders, pastes, ointments, jellies, waxes, oils, lipids, lipid (cationic or anionic) containing vesicles (such as LIPOFECTIN™), DNA conjugates, anhydrous absorption pastes, oil-in-water and water-in-oil emulsions, emulsions carbowax (polyethylene glycols of various molecular weights), semi-solid gels, and semi-solid mixtures containing carbowax. See also Powell et al. “Compendium of excipients for parenteral formulations” PDA, 1998, J. Pharm. Sci. Technol. 52:238-311.

[0362] Acceptable carriers, excipients, or stabilizers are nontoxic to recipients at the dosages and concentrations employed, and include buffers such as phosphate, citrate, and other organic acids; antioxidants including ascorbic acid and methionine; preservatives (such as octadecyldimethylbenzyl ammonium chloride; hexamethonium chloride; benzalkonium chloride, benzethonium chloride; phenol, butyl or benzyl alcohol; alkyl parabens such as methyl or propyl paraben; catechol; resorcinol; cyclohexanol; 3-pentanol; and m-cresol); low molecular weight (less than about 10 residues) polypeptides; proteins, such as serum albumin, gelatin, or immunoglobulins; hydrophilic polymers such as polyvinylpyrrolidone; amino acids such as glycine, glutamine, asparagine, histidine, arginine, or lysine; monosaccharides, disaccharides, and other carbohydrates including glucose, mannose, or dextrins; chelating agents such as EDTA; sugars such as sucrose, mannitol, trehalose or sorbitol; salt-forming counter-ions such as sodium; metal complexes (e.g., Zn-protein complexes); and/or non-ionic surfactants such as TWEEN®, PLURONICS® or polyethylene glycol (PEG).

[0363] Optionally, the formulations comprising the compositions described herein contain a pharmaceutically acceptable salt, typically, e.g., sodium chloride, and preferably at about physiological concentrations. Optionally, the formulations of the invention can contain a pharmaceutically acceptable preservative. In some embodiments the preservative concentration ranges from 0.1 to 2.0%, typically v/v. Suitable preservatives include those known in the pharmaceutical arts. Benzyl alcohol, phenol, m-cresol, methylparaben, and propylparaben are examples of preservatives. Optionally, the formulations of the invention can include a pharmaceutically acceptable surfactant at a concentration of 0.005 to 0.02%.

[0364] The compositions described herein can be specially formulated for administration of the antibody or antigen binding fragment thereof to a subject in solid, liquid or gel form, including those adapted for the following: (a) parenteral administration, for example, by subcutaneous, intramuscular, intravenous or epidural injection as, for example, a sterile solution or suspension, or sustained-release formulation; (b) topical application, for example, as a cream, ointment, or a controlled-release patch or spray applied to the skin; (c) intravaginally or intrarectally, for example, as a pessary, cream or foam; (d) ocularly; (e) transdermally; (f) transmucosally; or (g) nasally. Additionally, an antibody or antigen binding fragment thereof, or compositions of the present disclosure can be implanted into a patient or injected using a drug delivery system. See, e.g., Urquhart et al., 24 Ann. Rev. Pharmacol. Toxicol. 199 (1984); Controlled Release of Pesticides & Pharmaceuticals (Lewis, ed., Plenum Press, New York, 1981); U.S. Pat. Nos. 3,773,919, 3,270,960.

[0365] In some embodiments, sustained-release preparations can be used. Suitable examples of sustained-release preparations include semipermeable matrices of solid hydrophobic polymers containing an antibody or antigen binding fragment of the present disclosure, in which the matrices are in the form of shaped articles, e.g., films, or microcapsule. Examples of sustained-release matrices include polyesters, hydrogels (for example, poly(2-hydroxyethyl-methacrylate), or poly(vinylalcohol)), polylactides (U.S. Pat. No. 3,773,919), copolymers of L-glutamic acid and y ethyl-L-glutamate, non-degradable ethylene-vinyl acetate, degradable lactic acid-glycolic acid copolymers such as the LUPRON DEPOT™ (injectable microspheres composed of lactic acid-glycolic acid copolymer and leuprolide acetate), and poly-D-(−)-3-hydroxybutyric acid. While polymers such as ethylene-vinyl acetate and lactic acid-glycolic acid enable release of molecules for over 100 days, certain hydrogels release proteins for shorter time periods. When encapsulated antibodies remain in the body for a long time, they can denature or aggregate as a result of exposure to moisture at 37° C., resulting in a loss of biological activity and possible changes in immunogenicity. Rational strategies can be devised for stabilization depending on the mechanism involved. For example, if the aggregation mechanism is discovered to be intermolecular S—S bond formation through thio-disulfide interchange, stabilization can be achieved by modifying sulfhydryl residues, lyophilizing from acidic solutions, controlling moisture content, using appropriate additives, and developing specific polymer matrix compositions. In certain situations, the pharmaceutical composition can be delivered in a controlled release system. In one embodiment, a pump may be used (see Langer R. Science 249(4976):1527-1533 (1990); Sefton 1987 CRC Crit. Ref. Biomed. Eng. 14:201). In another embodiment, polymeric materials can be used. In yet another embodiment, a controlled release system can be placed in proximity of the composition's target, thus requiring only a fraction of the systemic dose (see, e.g., Goodson, in R. S. Langer and D. L. Wise (eds.), Medical Applications of Controlled Release, vol. 2, pp. 115-138 (CRC Press, Boca Raton, 1984)).

[0366] A pharmaceutical composition of the present disclosure can be delivered, e.g., subcutaneously or intravenously with a standard needle and syringe. In addition, with respect to subcutaneous delivery, a pen delivery device readily has applications in delivering a pharmaceutical composition of the present invention. Such a pen delivery device can be reusable or disposable. A reusable pen delivery device generally utilizes a replaceable cartridge that contains a pharmaceutical composition. Once all of the pharmaceutical composition within the cartridge has been administered and the cartridge is empty, the empty cartridge can readily be discarded and replaced with a new cartridge that contains the pharmaceutical composition. The pen delivery device can then be reused. In a disposable pen delivery device, there is no replaceable cartridge. Rather, the disposable pen delivery device comes prefilled with the pharmaceutical composition held in a reservoir within the device. Once the reservoir is emptied of the pharmaceutical composition, the entire device is discarded. Numerous reusable pen and autoinjector delivery devices have applications in the subcutaneous delivery of a pharmaceutical composition of the present invention. Examples include, but certainly are not limited to AUTOPEN™ (Owen Mumford, Inc., Woodstock, UK), DISETRONIC™ pen (Disetronic Medical Systems, Burghdorf, Switzerland), HUMALOG MIX 75/25™ pen, HUMALOG™ pen, HUMALIN70130™ pen (Eli Lilly and Co., Indianapolis, Ind.), NOVOPEN™ I, II and III (Novo Nordisk, Copenhagen, Denmark), NOVOPEN JUNIOR™ (Novo Nordisk, Copenhagen, Denmark), BD™ pen (Becton Dickinson, Franklin Lakes, N.J.), OPTIPEN™, OPTIPEN PRO™, OPTIPEN STARLET™, and OPTICLIK™ (Sanofi-Aventis, Frankfurt, Germany), to name only a few. Examples of disposable pen delivery devices having applications in subcutaneous delivery of a pharmaceutical composition include, but certainly are not limited to the SOLOSTAR™ pen (Sanofi-Aventis), the FLEXPEN™ (Novo Nordisk), and the KWIKPEN™ (Eli Lilly).

[0367] The injectable preparations may include dosage forms for intravenous, subcutaneous, intracutaneous and intramuscular injections, drip infusions, etc. These injectable preparations may be prepared by methods publicly known. For example, the injectable preparations may be prepared, e.g., by dissolving, suspending or emulsifying the antibody or its salt described above in a sterile aqueous medium or an oily medium conventionally used for injections. As the aqueous medium for injections, there are, for example, physiological saline, an isotonic solution containing glucose and other auxiliary agents, etc., which may be used in combination with an appropriate solubilizing agent such as an alcohol (e.g., ethanol), a polyalcohol (e.g., propylene glycol, polyethylene glycol), a nonionic surfactant [e.g., polysorbate 80, HCO-50 (polyoxyethylene (50 mol) adduct of hydrogenated castor oil)], etc. As the oily medium, there are employed, e.g., sesame oil, soybean oil, etc., which may be used in combination with a solubilizing agent such as benzyl benzoate, benzyl alcohol, etc. The injection thus prepared is preferably filled in an appropriate ampoule.

[0368] Compositions of the present disclosure can be in the form of, for example, granules, powders, tablets, capsules, syrup, suppositories, injections, emulsions, elixirs, suspensions or solutions. The amount of the aforesaid antibody contained can be about 5 to about 500 mg per dosage form in a unit dose; especially in the form of injection, it is preferred that the aforesaid antibody is contained in about 5 to about 100 mg and in about 10 to about 250 mg for the other dosage forms.

[0369] For oral, buccal, and sublingual administration, powders, suspensions, granules, tablets, pills, capsules, gelcaps, and caplets are acceptable as solid dosage forms. These can be prepared, for example, by mixing one or more compounds of the instant invention, or pharmaceutically acceptable salts or tautomers thereof, with at least one additive such as a starch or other additive. Suitable additives are sucrose, lactose, cellulose sugar, mannitol, maltitol, dextran, starch, agar, alginates, chitins, chitosans, pectins, tragacanth gum, gum arabic, gelatins, collagens, casein, albumin, synthetic or semi-synthetic polymers or glycerides. Optionally, oral dosage forms can contain other ingredients to aid in administration, such as an inactive diluent, or lubricants such as magnesium stearate, or preservatives such as paraben or sorbic acid, or anti-oxidants such as ascorbic acid, tocopherol or cysteine, a disintegrating agent, binders, thickeners, buffers, sweeteners, flavoring agents or perfuming agents. Tablets and pills may be further treated with suitable coating materials known in the art.

[0370] Liquid dosage forms for oral administration may be in the form of pharmaceutically acceptable emulsions, syrups, elixirs, suspensions, and solutions, which may contain an inactive diluent, such as water. Pharmaceutical formulations and medicaments may be prepared as liquid suspensions or solutions using a sterile liquid, such as, but not limited to, an oil, water, an alcohol, and combinations of these. Pharmaceutically suitable surfactants, suspending agents, emulsifying agents, may be added for oral or par-enteral administration. In some embodiments, pharmaceutical compositions can be prepared in a lyophilized form. The lyophilized preparations can comprise a cryoprotectant known in the art. The term “cryoprotectants” as used herein generally includes agents, which provide stability to the protein from freezing-induced stresses. Examples of cryoprotectants include polyols such as, for example, mannitol, and include saccharides such as, for example, sucrose, as well as including surfactants such as, for example, polysorbate, poloxamer or polyethylene glycol, and the like. Cryoprotectants also contribute to the tonicity of the formulations. Pharmaceutically suitable surfactants, suspending agents, emulsifying agents, may be added for oral or par-enteral administration.

[0371] As noted above, suspensions may include oils. Such oils include, but are not limited to, peanut oil, sesame oil, cottonseed oil, corn oil and olive oil. Suspension preparation may also contain esters of fatty acids such as ethyl oleate, isopropyl myristate, fatty acid glycerides and acetylated fatty acid glycerides. Suspension formulations may include alcohols, such as, but not limited to, ethanol, iso-propyl alcohol, hexadecyl alcohol, glycerol and propylene glycol. Ethers, such as but not limited to, poly(ethyleneglycol), petroleum hydrocarbons such as mineral oil and petrolatum; and water may also be used in suspension formulations.

[0372] For nasal administration, the pharmaceutical formulations and medicaments may be a spray or aerosol containing an appropriate solvent(s) and optionally other compounds such as, but not limited to, stabilizers, antimicrobial agents, antioxidants, pH modifiers, surfactants, bio-availability modifiers and combinations of these. A propellant for an aerosol formulation may include compressed air, nitrogen, carbon dioxide, or a hydrocarbon based low boiling solvent.

[0373] Injectable dosage forms generally include aqueous suspensions or oil suspensions which may be prepared using a suitable dispersant or wetting agent and a suspending agent. Injectable forms may be in solution phase or in the form of a suspension, which is prepared with a solvent or diluent. Acceptable solvents or vehicles include sterilized water, Ringer's solution, or an isotonic aqueous saline solution. Alternatively, sterile oils may be employed as solvents or suspending agents. Preferably, the oil or fatty acid is non-volatile, including natural or synthetic oils, fatty acids, mono-, di-, or tri-glycerides.

[0374] For injection, the pharmaceutical formulation and/or medicament may be a powder suitable for reconstitution with an appropriate solution as described above. Examples of these include, but are not limited to, freeze dried, rotary dried or spray dried powders, amorphous powders, granules, precipitates, or particulates. For injection, the formulations may optionally contain stabilizers, pH modifiers, surfactants, bioavailability modifiers and combinations of these.

[0375] For rectal administration, the pharmaceutical formulations and medicaments may be in the form of a suppository, an ointment, an enema, a tablet or a cream for release of compound in the intestines, sigmoid flexure and/or rectum. Rectal suppositories are prepared by mixing one or more compounds of the instant invention, or pharmaceutically acceptable salts or tautomers of the compound, with acceptable vehicles, for example, cocoa butter or polyethylene glycol, which is present in a solid phase at normal storing temperatures, and present in a liquid phase at those temperatures suitable to release a drug inside the body, such as in the rectum. Oils may also be employed in the preparation of formulations of the soft gelatin type and suppositories. Water, saline, aqueous dextrose and related sugar solutions, and glycerols may be employed in the preparation of suspension formulations which may also contain suspending agents such as pectins, carbomers, methyl cellulose, hydroxypropyl cellulose or carboxymethyl cellulose, as well as buffers and preservatives.

[0376] The concentration of an antibody or an antigen binding fragment thereof in these compositions can vary widely, i.e., from less than about 10%, usually at least about 25% to as much as 75% or 90% by weight and will be selected primarily by fluid volumes, viscosities, etc., in accordance with the particular mode of administration selected. Actual methods for preparing orally, topically and parenterally administrable compositions will be known or apparent to those skilled in the art and are described in detail in, for example, Remington's Pharmaceutical Science, 19th ed., Mack Publishing Co., Easton, Pa. (1995), which is incorporated herein by reference.

[0377] In another embodiment of the invention, an article of manufacture containing materials useful for prophylaxis against or treatment of an infection with SARS-CoV-2. The article of manufacture comprises a container and a label. Suitable containers include, for example, bottles, vials, syringes, and test tubes. The containers may be formed from a variety of materials such as glass or plastic. The container holds a composition which is effective for treating the condition and may have a sterile access port (for example the container may be an intravenous solution bag or a vial having a stopper pierceable by a hypodermic injection needle). The active agent in the composition is the antibody of the invention. The label on or associated with, the container indicates that the composition is used for treating the condition of choice. The article of manufacture may further comprise a second container comprising a pharmaceutically-acceptable buffer, such as phosphate-buffered saline, Ringer's solution and dextrose solution. It may further include other materials desirable from a commercial and user stand-point, including other buffers, diluents, filters, needles, syringes, and package inserts with instructions for use.

Methods of Treatment and prevention

[0378] The present disclosure provides methods for treating a subject infected with a coronavirus, is at risk of infection with a coronavirus, or suffering from or suspected to suffer from a coronavirus associated disease. The present disclosure provides methods for treating a subject infected with a severe acute respiratory syndrome associated coronavirus (SARS-CoV), is at risk of infection with a SARS-CoV, or suffering from or suspected to suffer from a SARS-CoV associated disease. The present disclosure provides methods for treating a subject infected with a Middle East Respiratory Syndrome (MERS), is at risk of infection with a MERS, or suffering from or suspected to suffer from a MERS associated disease. The methods comprise administering to the subject, an effective amount of an antibody or antigen binding fragment thereof disclosed herein.

[0379] In one aspect, the disclosure provides methods for treatment or prevention of infection with a SARS-CoV-2, by the administration of an antibody or antigen-binding fragment thereof disclosed herein, to a patient in an amount effective to treat the patient.

[0380] The disclosure provides methods for treatment or prevention of infection with a SARS-CoV-2, by the administration of an antibody or antigen-binding fragment thereof disclosed herein, to a patient in an amount effective to treat the patient. The present disclosure provides a method of preventing an infection with a SARS-CoV-2 in a subject, the method comprising administering to the subject, an effective amount of an antibody or an antigen binding fragment thereof disclosed herein or an effective amount of a composition comprising an antibody or an antigen binding fragment disclosed herein or a nucleic acid encoding the antibody or antigen binding fragment thereof disclosed herein. The present disclosure provides a method of treating a subject infected with a SARS-Cov-2 (COVID) or suspected of being infected with a SARS-Cov-2, comprising administering to the subject an effective amount of an antibody or antigen-binding fragment herein, or an effective amount of a composition comprising an antibody or antigen binding fragment thereof disclosed herein or a nucleic acid encoding the antibody or antigen binding fragment thereof disclosed herein. In one aspect, the present disclosure provides a method for treating, or preventing COVID-19, comprising administering a subject in need thereof, an effective amount of an effective amount of an antibody or antigen-binding fragment herein, or an effective amount of a composition comprising an antibody or antigen binding fragment thereof disclosed herein or a nucleic acid encoding the antibody or antigen binding fragment thereof disclosed herein.

[0381] In some embodiments, the subject has one or more co-morbidities or has an increased risk of infection. Non-limiting exemplary co-morbidities or an underlying condition that the subject can have include high blood pressure, cardiac disease, diabetes, lung disease, cancer, clots, thrombosis, autoimmune disease, an inflammatory disease, or a combination thereof. In some embodiments, the subject is immunocompromised. In some embodiments, the subject is pregnant. In some embodiments, the subject to be treated is symptomatic prior to the administration. In other embodiments, the subject to be treated is asymptomatic prior to the administration.

[0382] In some embodiments, the subject is exhibiting one or more symptoms associated with infection with SARS-Cov-2. Non-limiting exemplary symptoms include fever, chills, cough, sore throat, diarrhea, shortness of breath or difficulty breathing, fatigue, muscle aches, body aches, headache, loss of taste, loss of smell, sore throat, congestion, runny nose, nausea, vomiting, diarrhea, trouble breathing, persistent pain or pressure in the chest, new confusion, inability to wake or stay awake and pale, gray, blue-colored skin, lips, or nail beds, depending on skin tone, dyspnea, hypoxemia, pneumonia, severe acute respiratory syndrome, renal failure, or any combination thereof.

[0383] As used herein, a “subject”, “patient”, “individual” and like terms are used interchangeably and refers to a vertebrate, a mammal, a primate, or a human. A subject can be male or female. A subject can be one who has been previously diagnosed with or identified as suffering from an infection with SARS-CoV-2. A subject can be one who is currently being treated for, or seeking treatment, monitoring, adjustment or modification of an existing therapeutic treatment, or is at a risk of developing an infection with SARS-CoV-2. Mammals include, without limitation, humans, primates, rodents, wild or domesticated animals, including feral animals, farm animals, sport animals, and pets. Primates include, for example, chimpanzees, cynomologous monkeys, spider monkeys, and macaques, e.g., Rhesus. Rodents include, for example, mice, rats, woodchucks, ferrets, rabbits and hamsters. Domestic and game animals include, for example, cows, horses, pigs, deer, bison, buffalo, feline species, e.g., domestic cat, and canine species, e.g., dog, fox, wolf, avian species, e.g., chicken, emu, ostrich, and fish, e.g., trout, catfish and salmon. Mammals other than humans can be advantageously used as subjects that represent animal models of conditions or disorders associated with infection with SARS-CoV-2. In addition, the compositions and methods described herein can be used to treat domesticated animals and/or pets. In some embodiments, the subject is a human.

[0384] The terms “disease”, “disorder”, or “condition” are used interchangeably herein, refer to any alternation in state of the body or of some of the organs, interrupting or disturbing the performance of the functions and/or causing symptoms such as discomfort, dysfunction, distress, or even death to the person afflicted or those in contact with a person. A disease or disorder can also be related to a distemper, ailing, ailment, malady, disorder, sickness, illness, complaint, or affectation.

[0385] The term “in need thereof” when used in the context of a therapeutic or prophylactic treatment, means having a disease, being diagnosed with a disease, or being in need of preventing a disease, e.g., for one at risk of developing the disease. Thus, a subject in need thereof can be a subject in need of treating or preventing a disease.

[0386] As used herein, the term “administering,” refers to the placement of a compound (e.g., an antibody or antigen binding fragment thereof as disclosed herein) into a subject by a method or route that results in at least partial delivery of the agent at a desired site. Pharmaceutical compositions comprising an antibody or antigen binding fragment thereof, disclosed herein can be administered by any appropriate route which results in an effective treatment in the subject, including but not limited to intravenous, intraarterial, injection or infusion directly into a tissue parenchyma, etc. Where necessary or desired, administration can include, for example, intracerebroventricular (“icy”) administration, intranasal administration, intracranial administration, intracelial administration, intracerebellar administration, or intrathecal administration.

[0387] The phrases “parenteral administration” and “administered parenterally” as used herein, refer to modes of administration other than enteral and topical administration, usually by injection. The phrases “systemic administration,” “administered systemically”, “peripheral administration” and “administered peripherally” as used herein refer to the administration of the antibody or antibody fragment other than directly into a target site, tissue, or organ, such as a tumor site, such that it enters the subject's circulatory system and, thus, is subject to metabolism and other like processes.

[0388] As used herein, the terms “treat,” “treatment,” “treating,” or “amelioration” refer to therapeutic treatments, wherein the object is to reverse, alleviate, ameliorate, inhibit, slow down or stop the progression or severity of a condition associated with, a disease or disorder. The term “treating” includes reducing or alleviating at least one adverse effect or symptom of a condition, disease or disorder associated with infection by SARS-CoV-2. Treatment is generally “effective” if one or more symptoms or clinical markers are reduced. Alternatively, treatment is “effective” if the progression of a disease is reduced or halted. That is, “treatment” includes not just the improvement of symptoms or markers, but also a cessation of at least slowing of progress or worsening of symptoms that would be expected in absence of treatment. Beneficial or desired clinical results include, but are not limited to, alleviation of one or more symptom(s), diminishment of extent of disease, stabilized (i.e., not worsening) state of disease, delay or slowing of disease progression, amelioration or palliation of the disease state, and remission (whether partial or total), whether detectable or undetectable. The term “treatment” of a disease also includes providing relief from the symptoms or side-effects of the disease (including palliative treatment).

[0389] The term “effective amount” as used herein refers to the amount of an antibody or antigen binding fragment thereof or composition comprising the same needed to alleviate at least one or more symptom of the disease or disorder, and relates to a sufficient amount of pharmacological composition to provide the desired effect. The term “therapeutically effective amount” therefore refers to an amount of an antibody or antigen binding fragment thereof using the methods as disclosed herein, that is sufficient to effect a particular effect when administered to a typical subject. An effective amount as used herein would also include an amount sufficient to delay the development of a symptom of the disease, alter the course of a symptom disease (for example but not limited to, slow the progression of a symptom of the disease), or reverse a symptom of the disease. Thus, it is not possible to specify the exact “effective amount”. For any given case, however, an appropriate “effective amount” can be determined by one of ordinary skill in the art using only routine experimentation.

[0390] Effective amounts, toxicity, and therapeutic efficacy can be determined by standard pharmaceutical procedures in cell cultures or experimental animals, e.g., for determining the LD₅₀ (the dose lethal to 50% of the population) and the ED₅₀ (the dose therapeutically effective in 50% of the population). The dosage can vary depending upon the dosage form employed and the route of administration utilized. The dose ratio between toxic and therapeutic effects is the therapeutic index and can be expressed as the ratio LD₅₀/ED₅₀-Compositions and methods that exhibit large therapeutic indices are preferred. A therapeutically effective dose can be estimated initially from cell culture assays. Also, a dose can be formulated in animal models to achieve a circulating plasma concentration range that includes the IC₅₀ (i.e., the concentration of the antibody or antigen binding fragment thereof), which achieves a half-maximal inhibition of symptoms as determined in cell culture, or in an appropriate animal model. Levels in plasma can be measured, for example, by high performance liquid chromatography. The effects of any particular dosage can be monitored by a suitable bioassay. The dosage can be determined by a physician and adjusted, as necessary, to suit observed effects of the treatment.

[0391] The terms “increased”, “increase”, or “enhance” are all used herein to generally mean an increase by a statically significant amount; for the avoidance of doubt, the terms “increased”, “increase”, or “enhance”, mean an increase of at least 10% as compared to a reference level, for example an increase of at least about 10%, at least about 20%, or at least about 30%, or at least about 40%, or at least about 50%, or at least about 60%, or at least about 70%, or at least about 80%, or at least about 90% or up to and including a 100% increase or any increase between 10-100% as compared to a reference level, or at least about a 2-fold, or at least about a 3-fold, or at least about a 4-fold, or at least about a 5-fold or at least about a 10-fold increase, or any increase between 2-fold and 10-fold or greater as compared to a reference level.

[0392] The terms, “decrease”, “reduce”, “reduction”, “lower” or “lowering,” or “inhibit” are all used herein generally to mean a decrease by a statistically significant amount. For example, “decrease”, “reduce”, “reduction”, or “inhibit” means a decrease by at least 10% as compared to a reference level, for example a decrease by at least about 20%, or at least about 30%, or at least about 40%, or at least about 50%, or at least about 60%, or at least about 70%, or at least about 80%, or at least about 90% or up to and including a 100% decrease (e.g., tumor size after treatment as compared to a reference level prior to the treatment), or any decrease between 10-100% as compared to a reference level. In the context of a marker or symptom, by these terms is meant a statistically significant decrease in such level. The decrease can be, for example, at least 10%, at least 20%, at least 30%, at least 40% or more, and is preferably down to a level accepted as within the range of normal for an individual without a given disease. Reduce or inhibit can refer to, for example, the symptoms of the disorder being treated, or the viral titer measurable in a subject's blood or other bodily fluids.

[0393] The antibodies or antigen binding fragment thereof or the compositions described herein (e.g., comprising an antibody or antigen binding fragment thereof, or a nucleic acid encoding said antibody or antigen binding fragment thereof described herein) can be administered alone or in combination with an additional therapeutic agent or therapy. In some embodiments, the methods of the present disclosure further comprise administering an additional therapeutic agent or therapy (e.g., administering a combination of an antibody disclosed herein and an additional therapeutic agent or therapy. In some embodiments, a combination with an additional therapeutic agent or therapy induces a synergistic effect relative to an effect induced upon administering the antibody or antigen binding fragment thereof or the composition alone, or the additional therapeutic agent or therapy alone. In some embodiments, the synergistic effect is therapeutic or prophylactic. In some embodiments, a combination with an additional therapeutic agent or therapy induces an additive effect relative to an effect induced upon administering the antibody or antigen binding fragment thereof, or the composition alone, or the additional therapeutic agent or therapy alone. In some embodiments, the additive effect is therapeutic or prophylactic.

[0394] In some embodiments, an antibody or an antigen binding fragment thereof or a composition disclosed herein is administered, for the prevention or treatment of a SARS-CoV-2 infection or COVID-19 e.g., at least 1 minute, 15 minutes, 30 minutes, 45 minutes, 1 hour, 2 hours, 4 hours, 6 hours, 8 hours, 12 hours, 24 hours, 2 days, or 1 week before), subsequent to administering an additional therapeutic agent or therapy. In some embodiments, an antibody or antigen binding fragment thereof or a composition disclosed herein is administered, for the prevention or treatment of a SARS-CoV-2 infection or COVID-19 e.g., at least 1 minute, 15 minutes, 30 minutes, 45 minutes, 1 hour, 2 hours, 4 hours, 6 hours, 8 hours, 12 hours, 24 hours, 2 days, or 1 week before), prior to administering an additional therapeutic agent or therapy. In some embodiments, an antibody or an antigen binding fragment thereof, or a composition disclosed herein is administered, for the prevention or treatment of a SARS-CoV-2 infection concomitantly with an additional therapeutic agent or therapy.

[0395] In some embodiments, the additional therapeutic agent or therapy is useful for treating an infection of SARS-CoV-2, or COVID-19. In some embodiments, the additional therapy is convalescent plasma therapy. In some embodiments, an additional therapeutic agent, can be a small molecule, an mRNA vaccine, a peptide, a pepti-body, a cytotoxic agent, a cytostatic agent, immunological modifier, interferon, interleukin, immunostimulatory growth hormone, cytokine, vitamin, mineral, aromatase inhibitor, RNAi, Histone Deacetylase Inhibitor, proteasome inhibitor, another antibody (for example, a SAR-Cov-2 neutralizing antibody), immunostimulatory antibody, a NSAID, a corticosteroid, a dietary supplement such as an antioxidant, cisplatin, ifosfamide, paclitaxel, taxanes, topoisomerase I inhibitors (e.g., CPT-11, topotecan, 9-AC, and GG-211), gemcitabine, vinorelbine, oxaliplatin, 5-fluorouracil (5-FU), leucovorin, vinorelbine, temodal, taxol, one or more antibiotics (e.g., doxycycline, Azithromycin, etc.); one or more decongestants (e.g., Mucinex, Sudafed, etc.); one or more anti-histamines and/or glucocorticoids (e.g., Zyrtec, Claritin, Allegra, fluticasone luroate, etc.); one or more pain relievers (e.g., acetominophen); one or more zinc-containing medications (e.g., Zycam, etc.); Azithromycin, hydroquinolone, or a combination thereof; one or more integrase inhibitors (e.g. Bictegravir, dolutegravir (Tivicay), elvitegravir, raltegravir, or a combination thereof); one or more nucleoside/nucleotide reverse transcriptase inhibitors (NRTIs; e.g., abacavir (Ziagen), emtricitabine (Emtriva), lamivudine (Epivir), tenofovir alafenamide fumarate (Vemlidy), tenofovir disoproxil fumarate (Viread), zidovudine (Retrovir), didanosine (Videx, Videx EC), stavudine (Zerit), or a combination thereof); a combination of NRTIs (e.g., (i) abacavir, lamivudine, and zidovudine (Trizivir), abacavir and lamivudine (Epzicom), (iii) emtricitabine and tenofovir alafenamide fumarate (Descovy), (iv) emtricitabine and tenofovir disoproxil fumarate (Truvada), (v) lamivudine and tenofovir disoproxil fumarate (Cimduo, Temixys), (vi) lamivudine and zidovudine (Combivir), etc.); a combination of Descovy and Truvada; one or more non-nucleoside reverse transcriptase inhibitors (NNRTIs; e.g., doravirine (Pifeltro), efavirenz (Sustiva), etravirine (Intelence), nevirapine (Viramune, Viramune rilpivirine (Edurant), delavirdine (Rescriptor), or a combination thereof); one or more Cytochrome P4503A (CYP3A) inhibitors (e.g., cobicistat (Tybost), ritonavir (Norvir), etc.); one or more protease inhibitors (PIs; e.g., atazanavir (Reyataz), darunavir (Prezista), fosamprenavir (Lexiva), lopinavir, ritonavir (Norvir), tipranavir (Aptivus), etc.); one or PIs in combination with cobicistat, ritonavir, Lopinavir, Tipranavir, Atazanavir, fosamprenavir, indinavir (Crixivan), nelfinavir (Viracept), saquinavir (Invirase), or a combination thereof; Atazanavir; fosamprenavir; a combination of Atazanavir, darunavir and cobicistat; one or more fusion inhibitors (e.g., enfuvirtide (Fuzeon); one or more post-attachment inhibitors (e.g., ibalizumab-uiyk (Trogarzo)); one or more Chemokine coreceptor antagonists (CCR5 antagonists; maraviroc (Selzentry)); and one or more viral entry inhibitors (e.g., enfuvirtide (Fuzeon), ibalizumab-uiyk (Trogarzo), maraviroc (Selzentry), etc.); or a combination thereof.

[0396] In some embodiments, the additional therapeutic agent can be an additional anti-SARS-CoV-2 antibody or an antigen binding fragment thereof. In some embodiments, the additional anti-SARS-CoV-2 antibody is 2B04, 1B07, and 2H04 mAbs (Alsoussi et al., 2020, which is incorporated herein by reference in its entirety), bamlanivimab, etesevimab, casirivimab, imdevimab, Sotrovimab, JMB2002, LY-CovMab, ABBV-47D11, ADM03820, DXP604, ZRC-3308, HLX70, COR-101, VIR-7832, LY-CoV1404, LY3853113, COVI-AMG (STI-2020), DXP593, JS016, LY3832479, LY-CoV016, MW33, MAD0004J08, C144-LS, C-135-LS, SCTA01, ADG20, BRII-196, BRII-198, TY027, AZD7442 (AZD8895+AZD1061), CT-P59, VIR-7831, GSK4182136, LY-CoV555 (LY3819253), a combination of LY-CoV555 with LY-CoV016 (LY3832479), REGN10933, REGN10987, REGN-COV2 (REGN10933+REGN10987), or a combination thereof. In some embodiments, the additional therapeutic agent is an adjuvant (e.g., AddaVax). In some embodiments, the additional therapeutic agent is an anti-SARS-CoV-2 antibody described in Robbiani et al., Nature, 2020; Baum et al., Science 2020; Cao et al., Cell 2020; Hansen et al., Science 2020; Ju et al., Nature 2020; Liu et al., Nature 2020; Pinto et al., Nature 2020; Wang et al., 2020,Preprint; Zost et al., 2020a; Li et al., Nature 2020, each of which is incorporated herein by reference in its entirety. In some embodiments, the additional therapeutic agent is Remdesvir. In some embodiments, the additional therapeutic agent is Favipiravir. In some embodiments, an additional therapy is a cell based therapy including for example, administering mesenchymal stem cells. In some embodiments, the additional therapeutic agent is an immunomodulator. Non-limiting examples of immunomodulators include Colchicine, Corticosteroids (e.g., Budesonide (Inhaled), Dexamethasone (Systemic)), Fluvoxamine, Granulocyte-Macrophage Colony-Stimulating Factor Inhibitors (e.g., Lenzilumab, Mavrilimumab, Otilimab), Interferons (e.g., Interferon Alfa, Interferon Beta), Interleukin-1 Inhibitor (e.g., Anakinra), Interleukin-6 Inhibitors (e.g., Sarilumab, Tocilizumab), Anti-Interleukin-6 Monoclonal Antibody (e.g., Siltuximab), Kinase Inhibitors (e.g., Acalabrutinib, Ibrutinib, Zanubrutinib), Janus Kinase Inhibitors (e.g., Baricitinib, Ruxolitinib, Tofacitinib. In some embodiments, the additional therapy is an antithrombotic therapy (e.g., administering an anticoagulant). In some embodiments, the additional therapeutic agent is an angiotensin-converting enzyme [ACE] inhibitors, angiotensin receptor blockers [ARBs], HMG-CoA Reductase Inhibitors (Statins), systemic or inhaled corticosteroids, nonsteroidal anti-inflammatory drugs, acid-suppressive therapy, or acetaminophen. In some embodiments, the additional therapeutic agent is a dietary supplement (e.g., Vitamin C, Vitamin D, and Zinc). In some embodiments, the additional therapeutic agent is a therapeutic vaccine selected from a group consisting of exogenous vaccines including proteins, peptides, DNA, or mRNA used to mount an immunogenic response to a SARS-Cov-2, recombinant virus and bacteria vectors encoding SARS-CoV-2 antigens, DNA-based vaccines encoding SARS-CoV-2 antigens. In some embodiments, the additional therapeutic agent is EpiVacCorona, mRNA-1273 (RNA), BNT162b2, Ad5-nCoV, Sputnik V, Ad26.COV2.S, AZD1222, Covishield, Covaxin, BBIBP-CorV, Inactivated (Vero Cells), or CoronaVac. In some embodiments, the additional therapeutic agent is an antiviral agent. Non-limiting examples of an antiviral agent that can be used include Remdesivir, Ivermectin, Nitazoxanide, Hydroxychloroquine or Chloroquine and/or Azithromycin, Lopinavir/Ritonavir and Other HIV Protease Inhibitors.

[0397] The methods and compositions of the present disclosure contemplate single antibody or antigen binding fragment thereof, disclosed herein, as well as combinations, or “cocktails”, of more than one antibody or antigen binding fragment thereof, disclosed herein. In some embodiments, more than one antibody comprises at least 2, at least 3, at least 4, at least 5 or more antibodies or antigen binding fragment thereof, disclosed herein. In some embodiments, the methods of the present disclosure comprising administering to a subject, a first antibody disclosed herein, or a nucleic acid encoding the first antibody, and subsequently administering an additional antibody disclosed herein, or a nucleic acid encoding the additional antibody, wherein the first antibody and the additional antibody are not the same. In some embodiments, a subject is administered one of the antibodies or antigen-binding fragments herein one or more times. In some embodiments, a subject is administered two of the antibodies or antigen-binding fragments herein one or more times. In some embodiments, a subject is administered three of the antibodies or antigen-binding fragments herein one or more times. In some embodiments, a subject is administered four of the antibodies or antigen-binding fragments herein one or more times. In some embodiments, a subject is administered four or more of the antibodies or antigen-binding fragments herein one or more times. In some embodiments, a subject is administered five of the antibodies or antigen-binding fragments herein one or more times.

[0398] In some embodiments, an antibody or an antigen binding fragment thereof disclosed herein, or a composition disclosed herein (e.g., comprising an antibody or antigen binding fragment thereof, or a nucleic acid encoding said antibody or antigen binding fragment thereof described herein) can be administered as a booster dose after an initial dose. The term “booster” refers to an extra administration of an antibody or an antigen binding fragment thereof disclosed herein, or a composition disclosed herein typically provided subsequent to an initial dose of the antibody or an antigen binding fragment thereof, or a composition disclosed herein. In some embodiments, the methods of the present disclosure further comprise administering at least one booster dose to a subject. In some embodiments, the methods disclosed herein comprises administering at least 1, 2, 3, 4, or 5 booster doses. In some embodiments a booster dose is administered at least about 1 minute, 2 minutes, 3 minutes, 4 minutes, 5 minutes, 6 minutes, 7 minutes, 8 minutes, 9 minutes, 10 minutes, 15 minutes, 20 minutes 35 minutes, 40 minutes, 45 minutes, 50 minutes, 55 minutes, 1 hour, 2 hours, 3 hours, 4 hours, 5 hours, 6 hours, 7 hours, 8 hours, 9 hours, 10 hours, 11 hours, 12 hours, 13 hours, 14 hours, 15 hours, 16 hours, 17 hours, 18 hours, 19 hours, 20 hours, 21 hours, 22 hours, 23 hours, 1 day, 36 hours, 2 days, 3 days, 4 days, 5 days, 6 days, 1 week, 10 days, 2 weeks, 3 weeks, 1 month, 2 months, 3 months, 4 months, 5 months, 6 months, 7 months, 8 months, 9 months, 10 months, 11 months, 1 year, 18 months, 2 years, 3 years, 4 years, 5 years, 6 years, 7 years, 8 years, 9 years, 10 years, 11 years, 12 years, 13 years, 14 years, 15 years, 16 years, 17 years, 18 years, 19 years, 20 years, 25 years, 30 years, 35 years, 40 years, 45 years, 50 years, 55 years, 60 years, 65 years, 70 years, 75 years, 80 years, 85 years, 90 years, 95 years or more than 99 years after administering an initial dose of an antibody, or a composition disclosed herein. In some embodiments, the booster dose comprises a reduced amount of an antibody or antigen binding fragment disclosed herein, or a composition disclosed herein than the initial dose. For example, a booster or subsequent dose of an antibody or antigen binding fragment thereof, or a composition can comprise an amount that is about: 1%, 2%, 3%, 4%, 5%, 7.5%, 10%, 15%, 20%, 25%, 30%, 40%, 50%, 60%, or 75% or less than the initial or preceding dose of the antibody or the antigen binding fragment thereof, or the composition. In some case a therapeutic or prophylactic effect is achieved in absence of a booster dose.

[0399] The present disclosure provides methods of reducing the death rate of infection by SARS-CoV-2 by administering to a population of subjects in need thereof an antibody or antigen-binding fragment disclosed herein, or a composition disclosed herein. Reduction in death rate can be determined for example by comparing the rate of death of subjects infected by SARS-CoV-2 between the population of subjects that receives an antibody or antigen binding fragment thereof, or a composition and a corresponding population of subjects that does not receive the antibody or antigen binding fragment thereof, or the composition, or are untreated. Death rate can be determined, for example, by determining the number of infected subjects of a population wherein infection by SARS-CoV-2 results in death. In some cases, the death rate can be reduced by at least 5%, at least 10%, at least 20%, at least 30%, at least 40%, at least 50%, at least 60%, at least 70%, at least 80%, or at least 90%. The present disclosure also provides methods for reducing the infection rate of SARS-CoV-2 by administering to a population of subjects non infected with SARS-CoV-2, an antibody or antigen binding fragment thereof disclosed herein or a composition disclosed herein. Reduction in infection rate can be determined for example by comparing the rate of infection of subjects exposed to SARS-CoV-2 between a population of subjects that receive an antibody or antigen binding fragment thereof disclosed herein or a composition disclosed herein, and a population of subjects that does not receive the antibody or antigen binding fragment thereof disclosed herein or the composition disclosed herein. Infection of a subject can be determined by analyzing a sample from the subject for the presence or absence of SARS-CoV-2 after suspected or confirmed exposure to SARS-CoV-2, or after an elapsed time in which exposure to SARS-CoV-2 is likely. In some embodiments, the infection rate can be reduced by at least 5%, at least 10%, at least 20%, at least 30%, at least 40%, at least 50%, at least 60%, at least 70%, at least 80%, or at least 90%.

[0400] The present disclosure also provides methods for slowing or preventing reproduction or replication of SARS-CoV-2 in a subject by administering to a subject infected with SARS-CoV-2 an antibody or antigen binding fragment thereof disclosed herein, or a composition disclosed herein. In some embodiments, the methods described herein slow or prevent reproduction or replication of SARS-CoV-2 in a subject relative that in a corresponding untreated subject.

[0401] Slowing or preventing reproduction or replication of a SARS-CoV-2 can be determined for example by comparing the rate of reproduction of the virus in a subject infected with SARS-CoV-2 between a subject who receives an antibody or antigen binding fragment thereof disclosed herein, or a composition disclosed herein and a corresponding subject that does not receive the antibody or antigen binding fragment thereof disclosed herein, or the composition disclosed herein, or a corresponding untreated subject. Replication of SARS-CoV-2 can be determined, for example by determining (directly or indirectly) the amount of SARS-Cov-2 in a sample acquired from a subject at different time points. Assays that can be used to determine amount of SARS-CoV-2 in a sample can include a plaque assay, a focus forming assay, an endpoint dilution assay, a protein assay (e.g., a bicinchoninic acid assay or a single radial immunodiffusion assay), transmission electron microscopy, tunable resistive pulse sensing, flow cytometry, qPCR, ELISA, or another acceptable method. An assay can be performed on a whole sample or a fraction of a sample, or SARS-CoV-2 can be isolated from the sample prior to performing an assay. In some embodiments, the reproduction of SARS-CoV-2 can be slowed by at least 5%, at least 10%, at least 20%, at least 30%, at least 40%, at least 50%, at least 60%, at least 70%, at least 80%, or at least 90%, or a range between any two foregoing values.

[0402] In some embodiments of the methods herein, said administering to a subject of an antibody or antigen binding fragment thereof, or a composition disclosed herein comprising the antibody or antigen binding fragment thereof, or a nucleic acid encoding the antibody or antigen binding fragment thereof results in inhibition of binding of a SARS-CoV-2 with a receptor (angiotensin-converting enzyme 2 (ACE2)) on a cell in the subject. In some embodiments, the inhibition of binding is by at least about 1%, 2%, 3%, 4%, 5%, 6%, 7%, 8%, 9%, 10%, 15%, 20%, 30%, 40%, 50%, 60%, 70%, 80%, 90%, or more or more compared to that in a subject not treated with the antibody or antigen-binding fragment thereof disclosed herein, or the composition disclosed herein or compared to an untreated subject.

[0403] In some embodiments of the methods herein, said administering to a subject of an antibody or antigen binding fragment thereof, or a composition disclosed herein comprising the antibody or antigen binding fragment thereof, or a nucleic acid encoding the antibody or antigen binding fragment thereof results in inhibition of entry of a SARS-CoV-2 in a cell in the subject. In some embodiments, the inhibition of entry is by at least about 1%, 2%, 3%, 4%, 5%, 6%, 7%, 8%, 9%, 10%, 15%, 20%, 30%, 40%, 50%, 60%, 70%, 80%, 90%, or more or more compared to that in a subject not treated with the antibody or antigen-binding fragment thereof disclosed herein, or the composition disclosed herein or compared to an untreated subject.

[0404] In some embodiments of the methods herein, said administering to a subject of an antibody or antigen binding fragment thereof, or a composition disclosed herein comprising the antibody or antigen binding fragment thereof, or a nucleic acid encoding the antibody or antigen binding fragment thereof results in inhibition of fusion of a SARS-CoV-2 cell membrane and the subject's cell membrane in the subject. In some embodiments, the inhibition of fusion is by at least about 1%, 2%, 3%, 4%, 5%, 6%, 7%, 8%, 9%, 10%, 15%, 20%, 30%, 40%, 50%, 60%, 70%, 80%, 90%, or more or more compared to that in a subject not treated with the antibody or antigen-binding fragment thereof disclosed herein, or the composition disclosed herein or compared to an untreated subject.

[0405] In some embodiments of the methods herein, said administering to a subject of an antibody or antigen binding fragment thereof, or a composition disclosed herein comprising the antibody or antigen binding fragment thereof, or a nucleic acid encoding the antibody or antigen binding fragment thereof results in decrease in viral load in the subject. In some embodiments, the decrease in viral load is by at least about 1%, 2%, 3%, 4%, 5%, 6%, 7%, 8%, 9%, 10%, 15%, 20%, 30%, 40%, 50%, 60%, 70%, 80%, 90%, or more or more compared to that in a subject not treated with the antibody or antigen-binding fragment thereof disclosed herein, or the composition disclosed herein or compared to an untreated subject.

[0406] In some embodiments of the methods herein, said administering to a subject of an antibody or antigen binding fragment thereof, or a composition disclosed herein comprising the antibody or antigen binding fragment thereof, or a nucleic acid encoding the antibody or antigen binding fragment thereof results in a decrease in one or more symptoms or conditions resulting from a SARS-CoV-2 infection in the subject for any period of time (e.g., for a day, a week, a month, 6 months, a year, or for the remainder of the subject's life).

[0407] In some embodiments of the methods herein, said administering to a subject of an antibody or antigen binding fragment thereof, or a composition disclosed herein comprising the antibody or antigen binding fragment thereof, or a nucleic acid encoding the antibody or antigen binding fragment thereof results in a decrease in one or more symptoms or conditions resulting from a SARS-CoV-2 infection in the subject for any period of time (e.g., for a day, a week, a month, 6 months, a year, or for the remainder of the subject's life).

[0408] In some embodiments of the methods herein, said administering to a subject of an antibody or antigen binding fragment thereof, or a composition disclosed herein comprising the antibody or antigen binding fragment thereof, or a nucleic acid encoding the antibody or antigen binding fragment thereof results in neutralization of SARS-CoV-2 in the subject, (i.e., inhibition of the SARS-CoV-2 to infect and cause a disease in the subject).

### Inhibition of a SARS-CoV-2 Activity

[0409] In some embodiments, the disclosure provides antibodies or antigen binding fragment thereof disclosed herein that are neutralizing antibodies. As used herein a “neutralizing antibody” is an antibody or antigen binding fragment thereof that binds to a SARS-CoV-2 and inhibits the ability to infect a host cell and/or cause a disease (e.g., COVID-19) in the subject. A neutralizing antibody specifically binds a target antigen on a SARS-CoV-2 and inhibits the ability of SARS-CoV-2 to infect a host cell and/or cause disease (e.g., COVID-19). Neutralization can be induced by an antibody or antigen binding fragment thereof disclosed herein by any mechanism, such as by inhibiting binding of a target antigen on SARS-Cov-2 (e.g., a SARS-Cov-2 spike (S) protein, a subunit S1, a subunit S2, or a receptor binding domain of subunit S1) with a receptor on a host cell. Neutralization can also be induced by inhibiting fusion of cell membrane of a SARS-CoV-2 with that of a host cell membrane, inhibiting entry of SARS-CoV-2 in a host cell, or a combination thereof. Neutralization assays are capable of being performed and measured in different ways, including the use of techniques such as plaque reduction (which compares counts of virus plaques in control wells with those in inoculated cultures), microneutralization (which is performed in microtiter plates filled with small amounts of sera), and colorimetric assays (which depend on biomarkers indicating metabolic inhibition of the virus). In some embodiments, the antibodies or antigen binding fragment thereof exhibits increased neutralizing activity relative to that by a corresponding control antibody or an antigen binding fragment thereof. In some embodiments, the increased neutralization activity is by at least about 1%, 2%, 3%, 4%, 5%, 6%, 7%, 8%, 9%, 10%, 15%, 20%, 30%, 40%, 50%, 60%, 70%, 80%, 90%, or more compared a corresponding control antibody or an antigen binding fragment thereof.

[0410] In another embodiment, the disclosure provides antibodies or antigen binding fragment thereof disclosed herein that inhibit, block, or decrease a SARS-CoV-2 binding to a receptor on a host cell, in particular, to angiotensin-converting enzyme 2 (ACE2). Provided herein is a method to inhibit binding of a SARS-CoV-2 to a receptor on a host cell, comprising contacting the SARS-CoV-2 with an antibody or an antigen binding fragment thereof disclosed herein. In some embodiments, inhibition of a SARS-CoV-2 binding comprises inhibition of a target antigen on SARS-CoV-2 (e.g., a SARS-Cov-2 spike (S) protein, a subunit S1, a subunit S2, or a receptor binding domain of subunit S1) to a receptor on a receptor on a host cell.

[0411] In another embodiment, the disclosure provides an antibody or an antigen binding fragment thereof that inhibits, blocks, or decreases SARS-CoV-2 entry into a host cell. Provided herein is a method to inhibit entry of a SARS-CoV-2 in a host cell, comprising contacting the SARS-CoV-2 with an antibody or an antigen binding fragment thereof disclosed herein.

[0412] In another embodiment, the disclosure provides an antibody or an antigen binding fragment thereof that inhibits, blocks, or decreases fusion of a SARS-CoV-2 cell membrane and a host cell membrane. Provided herein is a method to inhibit fusion of a SARS-CoV-2 cell membrane and a host cell membrane, comprising contacting the SARS-CoV-2 with an antibody or an antigen binding fragment thereof disclosed herein.

[0413] In another embodiment, the disclosure provides an antibody or an antigen binding fragment thereof disclosed herein that decreases viral load. Provided herein is a method to decrease viral load, comprising contacting the SARS-CoV-2 with an antibody or an antigen binding fragment thereof disclosed herein.

[0414] In another embodiment, the disclosure provides an antibody or an antigen binding fragment thereof disclosed herein that inhibits, blocks, or decreases one or more symptoms or conditions resulting from a SARS-CoV-2 infection for any period of time. In certain embodiments, the one or more symptoms are decreased for a day, a week, a month, 6 months, a year, or for the remainder of the subject's life. In certain embodiments, the disclosure provides an antibody or an antigen binding fragment thereof disclosed herein that can perform any combination of the preceding embodiments.

### Dosages

[0415] The compositions are to be used for in vivo administration to a subject by any available means, such as parenteral administration. For administration to a subject, a composition or medicament described herein can be sterile, which can readily be accomplished by filtration through sterile filtration membranes, or other methods known to those of skill in the art. In one embodiment, a composition of medicament has been treated to be free of pyrogens or endotoxins. Testing pharmaceutical compositions or medicaments for pyrogens or endotoxins and preparing pharmaceutical compositions or medicaments free of pyrogens or endotoxins, or preparing pharmaceutical compositions or medicaments that have endotoxins at a clinically-acceptable level, are well understood to one of ordinary skill in the art. Commercial kits are available to test pharmaceutical compositions or medicaments for pyrogens or endotoxins.

[0416] The antibodies or antigen binding fragments thereof, describe herein, are formulated, dosed, and administered in a fashion consistent with good medical practice. Factors for consideration in this context include the particular disorder being treated, the particular subject being treated, the clinical condition of the individual subject, the cause of the disorder, the site of delivery of the agent, the method of administration, the scheduling of administration, and other factors known to medical practitioners. The “therapeutically effective amount” to be administered will be governed by such considerations, and refers to the minimum amount necessary to ameliorate, treat, or resolve, an infection with SARS-CoV-2; or to prevent or protect against an infection with SARS-CoV-2.

[0417] The dose of antibody may vary depending upon the age and the size of a subject to be administered, target disease, conditions, route of administration, and the like. The preferred dose is typically calculated according to body weight or body surface area. When an antibody or antigen binding fragment thereof disclosed herein is used for treating a condition or disease in an adult patient, it may be advantageous to intravenously administer the antibody of the present invention normally at a single dose of about 0.01 to about 20 mg/kg body weight, more preferably about 0.02 to about 7, about 0.03 to about 5, or about 0.05 to about 3 mg/kg, about 5 mg/kg, about 7.5 mg/kg, about 10 mg/kg, or about 15 mg/kg body weight. Depending on the severity of the condition, the frequency and the duration of the treatment can be adjusted. Effective dosages and schedules for administering may be determined empirically; for example, patient progress can be monitored by periodic assessment, and the dose adjusted accordingly. Moreover, interspecies scaling of dosages can be performed using well-known methods in the art (e.g., Mordenti et al., 1991, Pharmaceut. Res. 8:1351).

[0418] Advantageously, the pharmaceutical compositions for oral or parenteral use described above are prepared into dosage forms in a unit dose suited to fit a dose of the active ingredients. Such dosage forms in a unit dose include, for example, tablets, pills, capsules, injections (ampoules), suppositories, etc.

[0419] The administration can be, for example, by one or more separate administrations, or by continuous infusion. However, other dosage regimens can be useful. In one non-limiting example, an antibody or antigen binding fragment thereof, disclosed herein is administered once every week, every two weeks, or every three weeks, at a dose range from about 5 mg/kg to about 15 mg/kg, including but not limited to 5 mg/kg, 7.5 mg/kg, 10 mg/kg or 15 mg/kg. The duration of a therapy using the methods described herein will continue for as long as medically indicated or until a desired therapeutic effect (e.g., those described herein) is achieved.

### Efficacy of Treatment

[0420] The efficacy of treatment or prevention of infection with SARS-CoV-2, comprising administering the antibodies or antigen binding fragment thereof, or pharmaceutical compositions of the present disclosure, may be assessed using standard techniques, for example by measuring a patient's SARS-CoV-2 viral load via reverse transcriptase quantitative PCR (RT-qPCR) (see, e.g., To, K. K. et al., Lancet Infect. Dis. 20(5):565-574 (2020)), microscopy, or phage assays. Other measures may include duration of survival, progression free survival, overall response rate, duration of response, and quality of life.

[0421] In some embodiments, an antibody or antigen binding fragment thereof disclosed herein is a neutralizing antibody or an antigen binding fragment thereof. In some embodiments, an antibody or antigen binding fragment thereof disclosed herein inhibits entry of SARS-Cov-2 in a host cell, viral replication, fusion of viral membrane to host cell membrane, endocytosis of SARS-Cov-2 in a host cell, activity of SARS-CoV-2 3-chymotrypsin-like protease (3CLpro) or the RNA-dependent RNA polymerase.

[0422] A subject can be administered an antibody or antigen-binding fragment thereof disclosed herein, or a composition disclosed herein in an amount that achieves at least partially, a partial, or complete reduction of one or more symptoms (e.g., one or more symptoms associated with COVID-19. Reduction can be, for example, a decrease of one or more symptoms by at least about 1%, 2%, 3%, 4%, 5%, 6%, 7%, 8%, 9%, 10%, 15%, 20%, 30%, 40%, 50%, 60%, 70%, 80%, 90%, or more or more compared to that in a subject not treated with the antibody or antigen-binding fragment thereof disclosed herein, or the composition disclosed herein or compared to an untreated subject. The amount of an antibody necessary to bring about therapeutic treatment of COVID-19 is not fixed per se. The amount of an antibody administered can vary for example with the extensiveness of the disease, the size of the human suffering from COVID-19, and if the subject is suffering from, or is at risk of another comorbidity. Treatment, in one instance, lowers infection rates in a population of subjects for example by at least about 1%, 2%, 3%, 4%, 5%, 6%, 7%, 8%, 9%, 10%, 15%, 20%, 30%, 40%, 50%, 60%, 70%, 80%, 90%, or more or more compared to treatment of a corresponding population of subjects with another treatment for COVID-19, or compared to a corresponding untreated subject population. Treatment can also result in a shortened recovery time, in fewer symptoms, or in less severe symptoms, or a combination thereof compared to an untreated subject who has COVID-19.

[0423] The antibodies and antigen-binding fragments herein can be used to treat a COVID-19 infection (an infection caused by SARS-Cov-2) in a subject in need thereof, thereby reducing one or more symptoms of the infection. The one or more symptoms to be treated include, but are not limited to, fever of over 100.4.degree.F, chills, cough, sore throat, diarrhea, shortness of breath or difficulty breathing, fatigue, muscle aches, body aches, headache, loss of taste, loss of smell, sore throat, congestion, runny nose, lung disease, nausea, vomiting, diarrhea, trouble breathing, persistent pain or pressure in the chest, new confusion, inability to wake or stay awake and pale, gray, blue-colored skin, lips, or nail beds, depending on skin tone, dyspnea, hypoxemia, pneumonia, severe acute respiratory syndrome, or renal failure, or any combination thereof. In some embodiments, treatment of a subject includes a reduction by at least 1%, 2%, 3%, 4%, 5%, 6%, 7%, 8%, 9%, 10%, 15%, 20%, 30%, 40%, 50%, 60%, 70%, 80%, 90%, or more in 1 symptom, 2 symptoms, 3 symptoms, 4 symptoms, 5 symptoms, 6 symptoms, 7 symptoms, 8 symptoms, 9 symptoms, 10 symptoms, or 11 symptoms. During at least a portion of this time period the antibody or antigen-binding fragment can protect the subject from infection by SARS-Cov-2. Protecting can comprise for example reducing an infection rate of SARS-Cov-2 or reducing or preventing reproduction of SARS-Cov-2. Treatment can comprise for example reducing symptoms of COVID-19, reducing a death rate, or reducing or preventing reproduction of SARS-Cov-2.

[0424] In some embodiments, the antibodies or antigen binding fragment thereof disclosed herein or a composition disclosed herein induce an inhibition of a SARS-CoV-2 activity in vivo, and in vitro, for example, binding of a SARS-CoV-2 to a receptor on a host cell, entry of a SARS-CoV-2 in a host cell, fusion of a SARS-CoV-2 cell membrane and a host cell membrane, or viral load. Methods to measure SARS-CoV-2 activity are known in the art, for example, assays for viral entry or fusion, viral load, and viral attachment to a cell membrane are described in Tai et al. J Vis Exp. 2015; (104): 53124, Pohl et al. J Vis Exp. 2015; (105): 53372, and Berry et al. Bio-protocol, Vol 7, Iss 2, Jan. 20, 2017, Schmidt, F. et al. Measuring SARS-CoV-2 neutralizing antibody activity using pseudotyped and chimeric viruses. J. Exp. Med. 217, e20201181 (2020), Greaney, A. J. et al. Complete mapping of mutations to the SARS-CoV-2 spike receptor-binding domain that escape antibody recognition. Preprint at bioRxiv doi.org/10.1101/2020.09.10.292078, Starr, T. N. et al. Deep mutational scanning of SARS-CoV-2 receptor binding domain reveals constraints on folding and ACE2 binding. Cell 182, 1295-1310 (2020), Tan, C. W. et al. A SARS-CoV-2 surrogate virus neutralization test based on antibody-mediated blockage of ACE2-spike protein-protein interaction. Nat. Biotechnol. 38, 1073-1078 (2020), and Abe, K. T. et al. A simple protein-based surrogate neutralization assay for SARS-CoV-2. JCI Insight 5, e142362 (2020). A person of skill in the art would be easily able to perform these measurements.

[0425] In some embodiments, the antibodies or antigen binding fragment thereof disclosed herein are neutralizing antibodies. The neutralization capacity of an antibody can be demonstrated by measuring the ability of antibodies to inhibit the binding of the receptor binding domain (RBD) of the SARS-CoV-2 to the ACE2. The assays for these measurements are well known in the art, and described for example, in Tan, C. W. et al. A SARS-CoV-2 surrogate virus neutralization test based on antibody-mediated blockage of ACE2-spike protein-protein interaction. Nat. Biotechnol. 38, 1073-1078 (2020), and Abe, K. T. et al. A simple protein-based surrogate neutralization assay for SARS-CoV-2. JCI Insight 5, e142362 (2020). Neutralization activity is measured by comparing infection levels in antibody-treated and untreated samples (e.g., from a subject), and efficacy is reported, for example, as an IC50 (the concentration of antibody required to reduce infection to 50% of that seen in an untreated sample). The IC50 in these assays is typically interpreted as the concentration of an antibody or an antigen binding fragment thereof required to neutralize 50% of SARS-Cov-2 virions. Neutralization assays are well known in the art, and are described for example, in Khoury, D. S., Wheatley, A. K., Ramuta, M. D. et al. Measuring immunity to SARS-CoV-2 infection: comparing assays and animal models. Nat Rev Immunol 20, 727-738 (2020). The Examples described herein demonstrate IC50 of antibodies disclosed herein, and their neutralization capacity.

### Modes of Administration

[0426] The antibodies or antigen binding fragment thereof, described herein, can be administered to a subject in need thereof by any appropriate route which results in an effective treatment in the subject. In some embodiments, the antibodies or antigen binding fragment thereof, described herein, or compositions comprising the same is administered to a subject infected with SARS-CoV-2, or seeking to prevent infection with SARS-CoV-2, by any mode of administration that delivers the agent systemically or to a desired surface or target, and can include, but is not limited to, injection, infusion, instillation, inhalation, parenteral, subcutaneous, intraperitoneal, intrapulmonary, oral and intranasal administration. “Injection” includes, without limitation, intravenous, intramuscular, intraarterial, intrathecal, intraventricular, intracapsular, intraorbital, intracardiac, intradermal, intraperitoneal, transtracheal, subcutaneous, subcuticular, intraarticular, sub capsular, subarachnoid, intracranial, intraspinal, intracerebro spinal, and intrasternal injection and infusion. Parenteral infusions include intramuscular, intravenous, intraarterial, intraperitoneal, or subcutaneous administration.

### Diagnostic and Other Uses

[0427] Provided herein are methods of using the antibodies or the antigen binding fragment disclosed herein for detection, diagnosis and monitoring of a disease, disorder or condition associated with the target antigen expression (either increased or decreased relative to a normal sample, and/or inappropriate expression, such as presence of expression in tissues(s) and/or cell(s) that normally lack the epitope expression). Provided herein are methods of determining whether a patient will respond to an antibody therapy. Provided herein are methods of diagnosing a subject suspected of being infected with SARS-CoV-2 or suffering from COVID-19 by contacting a sample obtained from the subject with one or more antibodies or antigen-binding fragments herein. Provided herein are methods of detecting infection with SARS-CoV-2 in a subject suspected of being infected with SARS-CoV-2 or suffering from COVID-19 by contacting a sample obtained from the subject with one or more antibodies or antigen-binding fragments herein.

[0428] Provided herein are methods of monitoring progression of COVID-19 in a subject suspected of being infected with SARS-CoV-2 or suffering from COVID-19 by contacting a first sample obtained from the subject with one or more antibodies or antigen-binding fragments herein, measuring a first level of binding of the one or more antibodies or antigen-binding fragments herein, contacting a second sample obtained from the subject with the one or more antibodies or antigen-binding fragments herein, and measuring a second level of binding of the one or more antibodies or antigen-binding fragments herein, wherein an increase in the second level relative to the first level indicates an increase in COVID-19 in the subject, and a decrease in the second level relative to the first indicates a decrease in COVID-19 in the subject, thereby monitoring the disease. In some embodiments, the first sample is obtained prior to administering a select treatment. In some embodiments, the second sample is obtained after administering a select treatment. A decrease in COVID-19 indicates the select treatment to be effective. A “sample” from a subject to be tested utilizing one or more of the assays described herein includes, but is not limited to, a nasal swab, a tissue sample, saliva, blood, etc. In some instances, the sample is treated prior to use in a diagnostic assay. For example, a nasal swab may be flushed with phosphate buffered saline (PBS); a fluid sample may be centrifuged to concentrate the sample components; blood may be treated with heparin to prevent coagulation, etc. The sample is contacted with an antibody or antigen-binding fragment herein, and when the presence of the antibody bound to a SARS-CoV-2 target antigen is detected, the subject is diagnosed as being infected with SARS-CoV-2 and/or having a COVID-19 infection. In some embodiments, a sample obtained from a subject is contacted with an antibody or antigen-binding fragment herein that selectively binds to a SARS-CoV-2 target antigen and the presence or absence of the antibody or antigen-binding fragment is determined. The subject is diagnosed as being infected with SARS-CoV-2 when the presence of the antibody or antigen-binding fragment is detected.

[0429] In some embodiments, the method of detection comprises contacting a sample from a subject with an antibody or antigen binding fragment thereof of the disclosure, and determining whether the level of binding differs from that of a reference or comparison sample (such as a control). In some embodiments, the method may be useful to determine whether the antibodies or polypeptides described herein are an appropriate treatment for the subject. When the sample show binding activity as compared to a corresponding reference sample, it can indicate that the subject would benefit from treatment with an antibody.

[0430] Samples can be tested in any suitable assay including, but not limited to, an enzyme linked immunosorbent assay (ELISA), an immunospot assay, a lateral flow assay, immunohistochemistry (IHC), western blot, flow cytometry, etc.

[0431] Various methods known in the art for detecting specific antibody-antigen binding can be used. Exemplary immunoassays which can be conducted include fluorescence polarization immunoassay (FPIA), fluorescence immunoassay (FIA), enzyme immunoassay (EIA), nephelometric inhibition immunoassay (NIA), enzyme linked immunosorbent assay (ELISA), and radioimmunoassay (RIA). An indicator moiety, or label group, can be attached to the subject antibodies and is selected so as to meet the needs of various uses of the method which are often dictated by the availability of assay equipment and compatible immunoassay procedures.

[0432] Appropriate labels include, without limitation, radionuclides (for example 125I, 131I, 35S, 3H, or 32P), enzymes (for example, alkaline phosphatase, horseradish peroxidase, luciferase, or β-glactosidase), fluorescent moieties or proteins (for example, fluorescein, rhodamine, phycoerythrin, GFP, or BFP), or luminescent moieties (for example, Qdot™ nanoparticles supplied by the Quantum Dot Corporation, Palo Alto, Calif.). General techniques to be used in performing the various immunoassays noted above are known to those of ordinary skill in the art.

[0433] For purposes of diagnosis, the antibodies or antigen binding fragment thereof can be labeled with a detectable moiety including but not limited to radioisotopes, fluorescent labels, and various enzyme-substrate labels know in the art. Methods of conjugating labels to an antibody are known in the art.

[0434] In some embodiments, the antibodies need not be labeled, and the presence thereof can be detected using a second labeled antibody which binds to the first antibody. The antibodies or antigen binding fragment thereof of the present invention can be used as affinity purification agents for a SARS-CoV-2 target antigen or in diagnostic assays for COVID-19, e.g., detecting its presence in a sample from a subject suffering from or suspected to suffer from COVID-19. The antibodies or antigen binding fragment thereof, disclosed herein, may also be used for in vivo diagnostic assays. Generally, for these purposes the antibody is labeled with a radionuclide (such as u1In, 99Tc, 14C, 131I, 12sI, 3H, 32p or 3sS) so that the virus can be localized using immunoscintiography.

[0435] The antibodies of the present invention can be employed in any known assay method, such as competitive binding assays, direct and indirect sandwich assays, such as ELISAs, and immunoprecipitation assays. Zola, Monoclonal Antibodies: A Manual of Techniques, pp. 147-158 (CRC Press, Inc. 1987). The antibodies can also be used for immunohistochemistry, to label tumor samples using methods known in the art. As a matter of convenience, the antibody of the present invention can be provided in a kit, i.e., a packaged combination of reagents in predetermined amounts with instructions for performing the diagnostic assay. Where the antibody is labeled with an enzyme, the kit will include substrates and cofactors required by the enzyme (e.g., a substrate precursor which provides the detectable chromophore or fluorophore). In addition, other additives can be included such as stabilizers, buffers (e.g., a block buffer or lysis buffer) and the like. The relative amounts of the various reagents can be varied widely to provide for concentrations in solution of the reagents which substantially optimize the sensitivity of the assay. Particularly, the reagents can be provided as dry powders, usually lyophilized, including excipients which on dissolution will provide a reagent solution having the appropriate concentration.

### Fusion Proteins

[0436] In one aspect, provided herein is a fusion protein comprising an antibody or an antigen binding fragment, disclosed herein. In some embodiments, fusion protein comprises one or more antibody or antigen binding fragment thereof, disclosed herein, and an immunomodulator or toxin moiety. Methods of making antibody fusion proteins are known. Antibody fusion proteins comprising an interleukin-2 moiety are described by Boleti et al., Ann. Oneal. 6:945 (1995), Nicolet et al., Cancer Gene Ther. 2:161 (1995), Becker et al., Proc. Natl Acad. Sci. USA 93:7826 (1996), Hank et al., Clin. Cancer Res. 2:1951 (1996), and Hu et al., Cancer Res. 56:4998 (1996). In addition, Yang et al., Hum. Antibodies Hybridomas 6:129 (1995), describe a fusion protein that includes an F(ab′)2 fragment and a tumor necrosis factor alpha moiety.

[0437] Methods of making antibody-toxin fusion proteins in which a recombinant molecule comprises one or more antibody components and a toxin or a therapeutic agent also are known to those of skill in the art. For example, antibody-Pseudomonas exotoxin A fusion proteins have been described by Chaudhary et al., Nature 339:394 (1989), Brinkmann et al., Proc. Nat'l Acad. Sci. USA 88:8616 (1991), Batra et al., Proc. Natl Acad. Sci. USA 89:5867 (1992), Friedman et al., J. Immunol. 150:3054 (1993), Weis et al., Int. J. Can. 60:137 (1995), Fominaya et al., J. Biol. Chem. 271:10560 (1996), Kuan et al., Biochemistry 35:2872 (1996), and Schmidt et al., Int. J. Can. 65:538 (1996). Antibody-toxin fusion proteins containing a diphtheria toxin moiety have been described by Kreitman et al., Leukemia 7:553 (1993), Nicholls et al., J. Biol. Chem. 268:5302 (1993), Thompson et al., J. Biol. Chem. 270:28037 (1995), and Vallera et al., Blood 88:2342 (1996). Deonarain et al., Tumor Targeting 1:177 (1995), have described an antibody-toxin fusion protein having an RNase moiety, while Linardou et al., Cell Biophys. 24-25:243 (1994), produced an antibody-toxin fusion protein comprising a DNase I component. Gelonin was used as the toxin moiety in the antibody-toxin fusion protein of Wang et al., Abstracts of the 209th ACS National Meeting, Anaheim, Calif., Apr. 2-6, 1995, Part 1, BIOT005. As a further example, Dohlsten et al., Proc. Natl Acad. Sci. USA 91:8945 (1994), reported an antibody-toxin fusion protein comprising Staphylococcal enterotoxin-A.

[0438] Illustrative of toxins which are suitably employed in the preparation of such conjugates are ricin, abrin, ribonuclease, DNase I, Staphylococcal enterotoxin-A, pokeweed antiviral protein, gelonin, diphtherin toxin, Pseudomonas exotoxin, and Pseudomonas endotoxin. See, for example, Pastan et al., Cell 47:641 (1986), and Goldenberg, C A-A Cancer Journal for Clinicians 44:43 (1994). Other suitable toxins are known to those of skill in the art.

[0439] Antibodies or antigen binding fragment thereof, disclosed herein, may also be used in ADEPT by conjugating the antibody to a prodrug-activating enzyme which converts a prodrug (e.g., a peptidyl chemotherapeutic agent, See WO81/01145) to an active anti-cancer drug. See, for example, WO88/07378 and U.S. Pat. No. 4,975,278. The enzyme component of the immunoconjugate useful for ADEPT includes any enzyme capable of acting on a prodrug in such a way so as to convert it into its more active, cytotoxic form.

[0440] Enzymes that are useful in the method of this invention include, but are not limited to, alkaline phosphatase useful for converting phosphate-containing prodrugs into free drugs; arylsulfatase useful for converting sulfate-containing prodrugs into free drugs; cytosine deaminase useful for converting non-toxic 5-fluorocytosine into the anti-cancer drug, 5-fluorouracil; proteases, such as serratia protease, thermolysin, subtilisin, carboxypeptidases and cathepsins (such as cathepsins B and L), that are useful for converting peptide-containing prodrugs into free drugs; D-alanylcarboxypeptidases, useful for converting prodrugs that contain D-amino acid substituents; carbohydrate-cleaving enzymes such as galactosidase and neuraminidase useful for converting glycosylated prodrugs into free drugs; lactamase useful for converting drugs derivatized with lactams into free drugs; and penicillin amidases, such as penicillin V amidase or penicillin G amidase, useful for converting drugs derivatized at their amine nitrogens with phenoxyacetyl or phenylacetyl groups, respectively, into free drugs. Alternatively, antibodies with enzymatic activity, also known in the art as abzymes, can be used to convert the prodrugs of the invention into free active drugs (See, e.g., Massey, Nature 328: 457-458 (1987)). Antibody-abzyme conjugates can be prepared as described herein for delivery of the abzyme to a tumor cell population. The enzymes can be covalently bound to the antibodies by techniques well known in the art such as the use of the heterobifunctional crosslinking reagents discussed above. Alternatively, fusion proteins comprising at least the antigen binding region of an antibody of the invention linked to at least a functionally active portion of an enzyme can be constructed using recombinant DNA techniques well known in the art (See, e.g., Neuberger et al., Nature 312: 604-608 (1984)).

### Immunoconjugates

[0441] The antibodies or antigen binding fragment thereof, disclosed herein, may be administered in their “naked” or unconjugated form, or may have an additional therapeutic agent conjugated to them. For example, the antibodies or antigen binding fragment of the present disclosure can have a toxin, radioisotope, or a label conjugated to them. In one embodiment, antibodies or antigen binding fragment thereof are used as a radiosensitizer. In such embodiments, the antibodies or antigen binding fragment are conjugated to a radiosensitizing agent. The term “radiosensitizer,” as used herein, is defined as a molecule, preferably a low molecular weight molecule, administered to animals in therapeutically effective amounts to increase the sensitivity of the cells to be detected by radiation, or radiosensitized to electromagnetic radiation and/or to promote the treatment of diseases that are treatable with electromagnetic radiation.

[0442] The terms “electromagnetic radiation” and “radiation” as used herein include, but are not limited to, radiation having the wavelength of 10-20 to 100 meters. Preferred embodiments of the present disclosure can employ for example, the electro-magnetic radiation of: gamma-radiation c10-20 to 10-13 m), X-ray radiation (10-12 to 10-9 m), ultraviolet light (10 nm to 400 nm), visible light (400 nm to 700 nm), infrared radiation (700 nm to 1.0 mm), and microwave radiation (1 mm to 30 cm).

[0443] Examples of photodynamic radiosensitizers include the following, but are not limited to: hematoporphyrin derivatives, Photofrin®, benzoporphyrin derivatives, NPe6, tin etioporphyrin (SnET2), pheoborbide-a, bacteriochlorophyll-a, naphthalocyanines, phthalocyanines, zinc phthalocyanine, and therapeutically effective analogs and derivatives of the same that can be conjugated to the antibodies or antigen binding fragment thereof disclosed herein.

[0444] In another embodiment, the antibody may be conjugated to a receptor (such streptavidin), wherein the antibody-receptor conjugate is administered to the patient, followed by removal of unbound conjugate from the circulation using a clearing agent and then administration of a ligand (e.g., avidin) which is conjugated to an additional therapeutic agent (e.g., an anti-viral agent).

[0445] The present disclosure further provides the above-described antibodies or antigen binding thereof in detectably labeled form. Antibodies can be detectably labeled through the use of radioisotopes, affinity labels (such as biotin, avidin, etc.), enzymatic labels (such as horseradish peroxidase, alkaline phosphatase, etc.) fluorescent or luminescent or bioluminescent labels (such as FITC or rhodamine, etc.), paramagnetic atoms, and the like. Procedures for accomplishing such labeling are well known in the art; for example, see (Sternberger, L. A. et al., J. Histochem. Cytochem. 18:315 (1970); Bayer, E. A. et al., Meth. Enzym. 62:308 (1979); Engval, E. et al., Immunol. 109:129 (1972); Goding, J. W. J. Immunol. Meth. 13:215 (1976)).

[0446] “Label” refers to a detectable compound or composition which is conjugated directly or indirectly to the antibody. The label may itself be detectable by itself (e.g., radioisotope labels or fluorescent labels) or, in the case of an enzymatic label, may catalyze chemical alteration of a substrate compound or composition which is detectable. Alternatively, the label may not be detectable on its own but may be an element that is bound by another agent that is detectable (e.g. an epitope tag or one of a binding partner pair such as biotin-avidin, etc.). Thus, the antibody may comprise a label or tag that facilitates its isolation, and methods of the invention to identify antibodies include a step of isolating the antigen/antibody through interaction with the label or tag.

[0447] Exemplary therapeutic immunoconjugates comprise the antibody described herein conjugated to an antiviral agent, or a radioactive isotope (i.e., a radioconjugate). Fusion proteins are described in further detail above.

[0448] In some embodiments, antibodies and antigen binding fragments thereof disclosed herein can be conjugated to an additional therapeutic agent described herein. In another embodiment, antibodies and antigen binding fragments thereof disclosed herein are conjugated to a detectable substrate such as, e.g., an enzyme, fluorescent marker, chemiluminescent marker, bioluminescent material, or radioactive material. In some embodiments of the aspects described herein, the antibody and antibody fragments thereof disclosed herein are conjugated to a toxin (e.g., an enzymatically active toxin of bacterial, fungal, plant or animal origin, or fragments thereof), a small molecule, an siRNA, a nanoparticle, a targeting agent (e.g., a microbubble), or a radioactive isotope (i.e., a radioconjugate). Such conjugates are referred to herein as “immunoconjugates”. Such immunoconjugates can be used, for example, in diagnostic, theranostic, or targeting methods.

[0449] Enzymatically active toxins and fragments thereof which can be used include diphtheria A chain, nonbinding active fragments of diphtheria toxin, exotoxin A chain (from Pseudomonas aeruginosa), ricin A chain, abrin A chain, modeccin A chain, alpha-sarcin, Aleurites fordii proteins, dianthin proteins, Phytolaca americana proteins (PAPI, PAPII, and PAP-S), Momordica charantia inhibitor, curcin, crotin, Sapaonaria officinalis inhibitor, gelonin, mitogellin, restrictocin, phenomycin, enomycin and the tricothecenes. A variety of radioisotopes are available for the production of radioconjugate antibodies. Examples include, but are not limited to, 212 Bi, 131 I, 131 In, 90Y and 186Re.

[0450] Conjugates of the antibodies or antigen binding fragments thereof described herein and a therapeutic agent can be made using any of a variety of bifunctional protein coupling agents such as N-succinimidyl-3-(2-pyridyldithiol) propionate (SPDP), iminothiolane (IT), bifunctional derivatives of imidoesters (such as dimethyl adipimidate HCL), active esters (such as disuccinimidyl suberate), aldehydes (such as glutareldehyde), bis-azido compounds (such as bis (p-azidobenzoyl) hexanediamine), bis-diazonium derivatives (such as bis-(p-diazoniumbenzoyl)-ethylenediamine), diisocyanates (such as tolyene 2,6-diisocyanate), and bis-active fluorine compounds (such as 1,5-difluoro-2,4-dinitrobenzene). For example, a ricin immunotoxin can be prepared as described in Vitetta et al., 238 Science 1098 (1987). Carbon-14-labeled 1-isothiocyanatobenzyl-3-methyldiethylene triaminepentaacetic acid (MX-DTPA) is an exemplary chelating agent for conjugation of radionucleotide to the antibody. See WO 94/11026.

[0451] Techniques for conjugating such therapeutic moiety to antibodies are well known, see, e.g., Amon et al., “Monoclonal Antibodies For Immunotargeting Of Drugs In Cancer Therapy”, in Monoclonal Antibodies And Cancer Therapy, Reisfeld et al. (eds.), pp. 243-56 (Alan R. Liss, Inc. 1985); Hellstrom et al., “Antibodies For Drug Delivery”, in Controlled Drug Delivery (2nd Ed.), Robinson et al. (eds.), pp. 623-53 (Marcel Dekker, Inc. 1987); Thorpe, “Antibody Carriers Of Cytotoxic Agents In Cancer Therapy: A Review”, in Monoclonal Antibodies '84: Biological And Clinical Applications, Pinchera et al. (eds.), pp. 475-506 (1985); “Analysis, Results, And Future Prospective Of The Therapeutic Use Of Radiolabeled Antibody In Cancer Therapy”, in Monoclonal Antibodies For Cancer Detection And Therapy, Baldwin et al. (eds.), pp. 303-16 (Academic Press 1985), and Thorpe et al., “The Preparation And Cytotoxic Properties Of Antibody-Toxin Conjugates”, Immunol. Rev., 62: 119-58 (1982).

[0452] Production of immunoconjugates is described in U.S. Pat. No. 6,306,393. Immunoconjugates can be pre-pared by indirectly conjugating a therapeutic agent to an antibody component. General techniques are described in Shih et al., Int. J. Cancer 41:832-839 (1988); Shih et al., Int. J. Cancer 46:1101-1106 (1990); and Shih et al., U.S. Pat. No. 5,057,313. The general method involves reacting an antibody component having an oxidized carbohydrate portion with a carrier polymer that has at least one free amine function and that is loaded with a plurality of drug, toxin, chelator, boron addends, or other therapeutic agent. This reaction results in an initial Schiff base (imine) linkage, which can be stabilized by reduction to a secondary amine to form the final conjugate.

### Kits

[0453] Provided herein are also kits, medicines, compositions, and unit dosage forms for use in any of the methods described herein. Provided herein is a kit comprising an effective amount of at least one of the antibody or antigen binding fragment thereof disclosed herein, or a composition comprising the at least one antibody or antigen binding fragment thereof or a nucleic acid encoding the at least one antibody or antigen binding fragment thereof disclosed herein. In some embodiments, the kit further comprises an additional therapeutic agent described herein. In some embodiments, the antibody or antigen binding fragment thereof disclosed herein, or a composition disclosed herein is an aqueous form or a lyophilized form. In some embodiments, the kit further comprises a diluent or a reconstitution solution.

[0454] Kits can include one or more containers comprising an antibody or a composition described herein (or unit dosage forms and/or articles of manufacture). In some embodiments, a unit dosage is provided wherein the unit dosage contains a predetermined amount of an antibody or antigen binding fragment thereof or a composition disclosed herein, with or without one or more additional agents. In some embodiments, such a unit dosage is supplied in single-use prefilled syringe for injection. In some embodiments, the composition can comprise saline, sucrose, or the like; a buffer, such as phosphate, or the like; and/or be formulated within a stable and effective pH range. In some embodiments, an antibody or antigen binding fragment thereof, or a composition of the disclosure can be provided as a lyophilized powder that can be reconstituted upon addition of an appropriate liquid, for example, sterile water. In some embodiments, the composition further comprises one or more substances that inhibit protein aggregation, including, but not limited to, sucrose and arginine. In some embodiments, the composition further comprises heparin and/or a proteoglycan.

[0455] In some embodiments, kits further comprise instructions for use in the treatment of disease associated an infection with a coronavirus (e.g., COVID-19) in accordance with any of the methods described herein. The kit may further comprise a description of selection an individual suitable or treatment. Instructions supplied in the kits are typically written instructions on a label or package insert (for example, a paper sheet included in the kit), but machine-readable instructions (for example, instructions carried on a magnetic or optical storage disk) are also acceptable. In some embodiments, the kit further comprises an additional therapeutic agent described herein.

[0456] The kits are in suitable packaging. Suitable packaging includes, but is not limited to, vials, bottles, jars, flexible packaging (for example, sealed Mylar or plastic bags), and the like. Kits may optionally provide additional components such as buffers and interpretative information. The present application thus also provides articles of manufacture, which include vials (such as sealed vials), bottles, jars, flexible packaging, and the like.

### EXAMPLES

[0457] Provided below are exemplary methods for in silico reconstruction of consensus sequences of SARS-CoV-2 associated antibodies, and identification of the clonal rearranged immunoglobulin CDR sequences present in the immunoglobulin repertoire. The approaches are contemplated for the reconstruction of complete consensus sequences of the variable heavy chain, variable light chain and the respective CDRs of said immunoglobulins.

### Example 1: Extraction of RNA-Seq Reads from Immunoglobulin Genes

[0458] RNA-Seq sequencing reads were run through a three-stage filtering procedure to remove: a.) reads known to have originated from non-immunoglobulin genes, b.) reads that may have arisen from other sources of human DNA contamination, and c.) reads from non-human sources of contamination. To execute the first stage, a Kallisto index file (see, e.g., Bray, N. L. et al. Nat. Biotechnol. 34(5):525-527 (2016)) was created of the human transcriptome of the HG38 human reference genome, with the immunoglobulin gene sequences removed. RNA-Seq FASTQ input files obtained from fluid specimens of patients diagnosed with infection by SARS-CoV-2 were run against this index file using Kallisto. For paired-end FASTQ files, reads in which one of the mates failed to map were saved for further analysis; all other reads were discarded. For single-ended FASTQ files, reads which failed to map were saved for further analysis, and all other reads were similarly discarded. For stage two, the remaining reads were then further filtered to eliminate other possible sources of human DNA contamination. The reads were aligned to the complete HG38 human reference genome using BWA-MEM (Li, H. arXiv: Genomics arXiv:1303.3997v2), and they were discarded unless they fit one of the following criteria: a.) paired-end reads in which one mate was unmapped (or, for single-ended reads, in which the read was unmapped), or b.) reads which mapped to known human immunoglobulin gene locations. For the third and final stage, any read sequences still remaining were compared to a database of common sources of non-human contamination (see, e.g., Wood, D. E. et al. Genome Biol. 15(3):R46 (2014)). Reads which matched a known sequence in a database were removed.

### Example 2: Consensus Sequence Assembly

[0459] RNA-Seq reads which passed the filtration procedure were assembled into contigs using a De Brujin graph-based sequence assembly algorithm, optimized for RNA-Seq data (see, e.g., Grabherr, M. G. et al. Nat. Biotechnol. 29(7):644-652 (2011)). Assembled contigs were passed through IgBLAST (Jian, Y. et al. Nucleic Acids Res. 41(W1):W34-W40 (2013)), and only sequences which were marked as significant matches to an immunoglobulin chain were kept.

### Example 3: Chain Quantification and Selection of the Top Clone

[0460] Immunoglobulin chains identified in the previous exemplary method were then quantified using Kallisto. A Kallisto index file was generated for the assembled immunoglobulin chain sequences, and the original set of RNA-Seq sequencing reads (prior to any filtering) was run through Kallisto quantification using this index file. The most abundant heavy and light chain antibody sequences counted by the Kallisto quantification step were identified as the top clones.

### Example 4: Annotation of the Reference Chain Segments

[0461] For each individual patient specimen, the heavy and light chains of the top clone were further analyzed using IgBLAST to annotate the V, D, and J segments of that clone. Amino acid translation was also performed to produce the polypeptide consensus sequence for the heavy and light chains of the top clone.

TABLE 1
SEQ ID NOs of exemplary amino acid sequences of complementarity determining, heavy chain, and
light chain regions of the antibodies disclosed herein or antigen binding fragment thereof.
Corresponding amino acid sequences are provided in the sequence listing submitted herewith.

| | CDR-1 | | CDR-2 | | CDR-3 | | Variable Region | |
|---|---|---|---|---|---|---|---|---|
| | Heavy | Light | Heavy | Light | Heavy | Light | Heavy | Light |
| | Chain | Chain | Chain | Chain | Chain | Chain | Chain | Chain |
| Antibody ID | (CDR-H1) | (CDR-L1) | (CDR-H2) | (CDR-L2) | (CDR-H3) | (CDR-L3) | (V_{H}) | (V_{L}) |
| TOTCOVID1 | 10001 | 11251 | 12501 | 13751 | 15001 | 16251 | 17501 | 18751 |
| TOTCOVID2 | 10002 | 11252 | 12502 | 13752 | 15002 | 16252 | 17502 | 18752 |
| TOTCOVID3 | 10003 | 11253 | 12503 | 13753 | 15003 | 16253 | 17503 | 18753 |
| TOTCOVID4 | 10004 | 11254 | 12504 | 13754 | 15004 | 16254 | 17504 | 18754 |
| TOTCOVID5 | 10005 | 11255 | 12505 | 13755 | 15005 | 16255 | 17505 | 18755 |
| TOTCOVID6 | 10006 | 11256 | 12506 | 13756 | 15006 | 16256 | 17506 | 18756 |
| TOTCOVID7 | 10007 | 11257 | 12507 | 13757 | 15007 | 16257 | 17507 | 18757 |
| TOTCOVID8 | 10008 | 11258 | 12508 | 13758 | 15008 | 16258 | 17508 | 18758 |
| TOTCOVID9 | 10009 | 11259 | 12509 | 13759 | 15009 | 16259 | 17509 | 18759 |
| TOTCOVID282 | 10010 | 11260 | 12510 | 13760 | 15010 | 16260 | 17510 | 18760 |
| TOTCOVID10 | 10011 | 11261 | 12511 | 13761 | 15011 | 16261 | 17511 | 18761 |
| TOTCOVID11 | 10012 | 11262 | 12512 | 13762 | 15012 | 16262 | 17512 | 18762 |
| TOTCOVID12 | 10013 | 11263 | 12513 | 13763 | 15013 | 16263 | 17513 | 18763 |
| TOTCOVID13 | 10014 | 11264 | 12514 | 13764 | 15014 | 16264 | 17514 | 18764 |
| TOTCOVID14 | 10015 | 11265 | 12515 | 13765 | 15015 | 16265 | 17515 | 18765 |
| TOTCOVID15 | 10016 | 11266 | 12516 | 13766 | 15016 | 16266 | 17516 | 18766 |
| TOTCOVID16 | 10017 | 11267 | 12517 | 13767 | 15017 | 16267 | 17517 | 18767 |
| TOTCOVID17 | 10018 | 11268 | 12518 | 13768 | 15018 | 16268 | 17518 | 18768 |
| TOTCOVID18 | 10019 | 11269 | 12519 | 13769 | 15019 | 16269 | 17519 | 18769 |
| TOTCOVID25 | 10020 | 11270 | 12520 | 13770 | 15020 | 16270 | 17520 | 18770 |
| TOTCOVID26 | 10021 | 11271 | 12521 | 13771 | 15021 | 16271 | 17521 | 18771 |
| TOTCOVID27 | 10022 | 11272 | 12522 | 13772 | 15022 | 16272 | 17522 | 18772 |
| TOTCOVID28 | 10023 | 11273 | 12523 | 13773 | 15023 | 16273 | 17523 | 18773 |
| TOTCOVID29 | 10024 | 11274 | 12524 | 13774 | 15024 | 16274 | 17524 | 18774 |
| TOTCOVID30 | 10025 | 11275 | 12525 | 13775 | 15025 | 16275 | 17525 | 18775 |
| TOTCOVID31 | 10026 | 11276 | 12526 | 13776 | 15026 | 16276 | 17526 | 18776 |
| TOTCOVID32 | 10027 | 11277 | 12527 | 13777 | 15027 | 16277 | 17527 | 18777 |
| TOTCOVID33 | 10028 | 11278 | 12528 | 13778 | 15028 | 16278 | 17528 | 18778 |
| TOTCOVID34 | 10029 | 11279 | 12529 | 13779 | 15029 | 16279 | 17529 | 18779 |
| TOTCOVID35 | 10030 | 11280 | 12530 | 13780 | 15030 | 16280 | 17530 | 18780 |
| TOTCOVID36 | 10031 | 11281 | 12531 | 13781 | 15031 | 16281 | 17531 | 18781 |
| TOTCOVID37 | 10032 | 11282 | 12532 | 13782 | 15032 | 16282 | 17532 | 18782 |
| TOTCOVID38 | 10033 | 11283 | 12533 | 13783 | 15033 | 16283 | 17533 | 18783 |
| TOTCOVID39 | 10034 | 11284 | 12534 | 13784 | 15034 | 16284 | 17534 | 18784 |
| TOTCOVID40 | 10035 | 11285 | 12535 | 13785 | 15035 | 16285 | 17535 | 18785 |
| TOTCOVID41 | 10036 | 11286 | 12536 | 13786 | 15036 | 16286 | 17536 | 18786 |
| TOTCOVID42 | 10037 | 11287 | 12537 | 13787 | 15037 | 16287 | 17537 | 18787 |
| TOTCOVID43 | 10038 | 11288 | 12538 | 13788 | 15038 | 16288 | 17538 | 18788 |
| TOTCOVID44 | 10039 | 11289 | 12539 | 13789 | 15039 | 16289 | 17539 | 18789 |
| TOTCOVID45 | 10040 | 11290 | 12540 | 13790 | 15040 | 16290 | 17540 | 18790 |
| TOTCOVID46 | 10041 | 11291 | 12541 | 13791 | 15041 | 16291 | 17541 | 18791 |
| TOTCOVID47 | 10042 | 11292 | 12542 | 13792 | 15042 | 16292 | 17542 | 18792 |
| TOTCOVID48 | 10043 | 11293 | 12543 | 13793 | 15043 | 16293 | 17543 | 18793 |
| TOTCOVID49 | 10044 | 11294 | 12544 | 13794 | 15044 | 16294 | 17544 | 18794 |
| TOTCOVID50 | 10045 | 11295 | 12545 | 13795 | 15045 | 16295 | 17545 | 18795 |
| TOTCOVID51 | 10046 | 11296 | 12546 | 13796 | 15046 | 16296 | 17546 | 18796 |
| TOTCOVID53 | 10047 | 11297 | 12547 | 13797 | 15047 | 16297 | 17547 | 18797 |
| TOTCOVID54 | 10048 | 11298 | 12548 | 13798 | 15048 | 16298 | 17548 | 18798 |
| TOTCOVID55 | 10049 | 11299 | 12549 | 13799 | 15049 | 16299 | 17549 | 18799 |
| TOTCOVID56 | 10050 | 11300 | 12550 | 13800 | 15050 | 16300 | 17550 | 18800 |
| TOTCOVID57 | 10051 | 11301 | 12551 | 13801 | 15051 | 16301 | 17551 | 18801 |
| TOTCOVID58 | 10052 | 11302 | 12552 | 13802 | 15052 | 16302 | 17552 | 18802 |
| TOTCOVID59 | 10053 | 11303 | 12553 | 13803 | 15053 | 16303 | 17553 | 18803 |
| TOTCOVID60 | 10054 | 11304 | 12554 | 13804 | 15054 | 16304 | 17554 | 18804 |
| TOTCOVID61 | 10055 | 11305 | 12555 | 13805 | 15055 | 16305 | 17555 | 18805 |
| TOTCOVID62 | 10056 | 11306 | 12556 | 13806 | 15056 | 16306 | 17556 | 18806 |
| TOTCOVID63 | 10057 | 11307 | 12557 | 13807 | 15057 | 16307 | 17557 | 18807 |
| TOTCOVID64 | 10058 | 11308 | 12558 | 13808 | 15058 | 16308 | 17558 | 18808 |
| TOTCOVID65 | 10059 | 11309 | 12559 | 13809 | 15059 | 16309 | 17559 | 18809 |
| TOTCOVID66 | 10060 | 11310 | 12560 | 13810 | 15060 | 16310 | 17560 | 18810 |
| TOTCOVID67 | 10061 | 11311 | 12561 | 13811 | 15061 | 16311 | 17561 | 18811 |
| TOTCOVID68 | 10062 | 11312 | 12562 | 13812 | 15062 | 16312 | 17562 | 18812 |
| TOTCOVID69 | 10063 | 11313 | 12563 | 13813 | 15063 | 16313 | 17563 | 18813 |
| TOTCOVID70 | 10064 | 11314 | 12564 | 13814 | 15064 | 16314 | 17564 | 18814 |
| TOTCOVID71 | 10065 | 11315 | 12565 | 13815 | 15065 | 16315 | 17565 | 18815 |
| TOTCOVID72 | 10066 | 11316 | 12566 | 13816 | 15066 | 16316 | 17566 | 18816 |
| TOTCOVID73 | 10067 | 11317 | 12567 | 13817 | 15067 | 16317 | 17567 | 18817 |
| TOTCOVID74 | 10068 | 11318 | 12568 | 13818 | 15068 | 16318 | 17568 | 18818 |
| TOTCOVID75 | 10069 | 11319 | 12569 | 13819 | 15069 | 16319 | 17569 | 18819 |
| TOTCOVID76 | 10070 | 11320 | 12570 | 13820 | 15070 | 16320 | 17570 | 18820 |
| TOTCOVID77 | 10071 | 11321 | 12571 | 13821 | 15071 | 16321 | 17571 | 18821 |
| TOTCOVID78 | 10072 | 11322 | 12572 | 13822 | 15072 | 16322 | 17572 | 18822 |
| TOTCOVID79 | 10073 | 11323 | 12573 | 13823 | 15073 | 16323 | 17573 | 18823 |
| TOTCOVID80 | 10074 | 11324 | 12574 | 13824 | 15074 | 16324 | 17574 | 18824 |
| TOTCOVID81 | 10075 | 11325 | 12575 | 13825 | 15075 | 16325 | 17575 | 18825 |
| TOTCOVID82 | 10076 | 11326 | 12576 | 13826 | 15076 | 16326 | 17576 | 18826 |
| TOTCOVID83 | 10077 | 11327 | 12577 | 13827 | 15077 | 16327 | 17577 | 18827 |
| TOTCOVID84 | 10078 | 11328 | 12578 | 13828 | 15078 | 16328 | 17578 | 18828 |
| TOTCOVID85 | 10079 | 11329 | 12579 | 13829 | 15079 | 16329 | 17579 | 18829 |
| TOTCOVID86 | 10080 | 11330 | 12580 | 13830 | 15080 | 16330 | 17580 | 18830 |
| TOTCOVID87 | 10081 | 11331 | 12581 | 13831 | 15081 | 16331 | 17581 | 18831 |
| TOTCOVID88 | 10082 | 11332 | 12582 | 13832 | 15082 | 16332 | 17582 | 18832 |
| TOTCOVID90 | 10083 | 11333 | 12583 | 13833 | 15083 | 16333 | 17583 | 18833 |
| TOTCOVID91 | 10084 | 11334 | 12584 | 13834 | 15084 | 16334 | 17584 | 18834 |
| TOTCOVID92 | 10085 | 11335 | 12585 | 13835 | 15085 | 16335 | 17585 | 18835 |
| TOTCOVID93 | 10086 | 11336 | 12586 | 13836 | 15086 | 16336 | 17586 | 18836 |
| TOTCOVID94 | 10087 | 11337 | 12587 | 13837 | 15087 | 16337 | 17587 | 18837 |
| TOTCOVID95 | 10088 | 11338 | 12588 | 13838 | 15088 | 16338 | 17588 | 18838 |
| TOTCOVID96 | 10089 | 11339 | 12589 | 13839 | 15089 | 16339 | 17589 | 18839 |
| TOTCOVID97 | 10090 | 11340 | 12590 | 13840 | 15090 | 16340 | 17590 | 18840 |
| TOTCOVID98 | 10091 | 11341 | 12591 | 13841 | 15091 | 16341 | 17591 | 18841 |
| TOTCOVID99 | 10092 | 11342 | 12592 | 13842 | 15092 | 16342 | 17592 | 18842 |
| TOTCOVID100 | 10093 | 11343 | 12593 | 13843 | 15093 | 16343 | 17593 | 18843 |
| TOTCOVID101 | 10094 | 11344 | 12594 | 13844 | 15094 | 16344 | 17594 | 18844 |
| TOTCOVID102 | 10095 | 11345 | 12595 | 13845 | 15095 | 16345 | 17595 | 18845 |
| TOTCOVID103 | 10096 | 11346 | 12596 | 13846 | 15096 | 16346 | 17596 | 18846 |
| TOTCOVID105 | 10097 | 11347 | 12597 | 13847 | 15097 | 16347 | 17597 | 18847 |
| TOTCOVID107 | 10098 | 11348 | 12598 | 13848 | 15098 | 16348 | 17598 | 18848 |
| TOTCOVID108 | 10099 | 11349 | 12599 | 13849 | 15099 | 16349 | 17599 | 18849 |
| TOTCOVID109 | 10100 | 11350 | 12600 | 13850 | 15100 | 16350 | 17600 | 18850 |
| TOTCOVID110 | 10101 | 11351 | 12601 | 13851 | 15101 | 16351 | 17601 | 18851 |
| TOTCOVID111 | 10102 | 11352 | 12602 | 13852 | 15102 | 16352 | 17602 | 18852 |
| TOTCOVID112 | 10103 | 11353 | 12603 | 13853 | 15103 | 16353 | 17603 | 18853 |
| TOTCOVID113 | 10104 | 11354 | 12604 | 13854 | 15104 | 16354 | 17604 | 18854 |
| TOTCOVID114 | 10105 | 11355 | 12605 | 13855 | 15105 | 16355 | 17605 | 18855 |
| TOTCOVID115 | 10106 | 11356 | 12606 | 13856 | 15106 | 16356 | 17606 | 18856 |
| TOTCOVID116 | 10107 | 11357 | 12607 | 13857 | 15107 | 16357 | 17607 | 18857 |
| TOTCOVID117 | 10108 | 11358 | 12608 | 13858 | 15108 | 16358 | 17608 | 18858 |
| TOTCOVID118 | 10109 | 11359 | 12609 | 13859 | 15109 | 16359 | 17609 | 18859 |
| TOTCOVID119 | 10110 | 11360 | 12610 | 13860 | 15110 | 16360 | 17610 | 18860 |
| TOTCOVID120 | 10111 | 11361 | 12611 | 13861 | 15111 | 16361 | 17611 | 18861 |
| TOTCOVID121 | 10112 | 11362 | 12612 | 13862 | 15112 | 16362 | 17612 | 18862 |
| TOTCOVID122 | 10113 | 11363 | 12613 | 13863 | 15113 | 16363 | 17613 | 18863 |
| TOTCOVID124 | 10114 | 11364 | 12614 | 13864 | 15114 | 16364 | 17614 | 18864 |
| TOTCOVID125 | 10115 | 11365 | 12615 | 13865 | 15115 | 16365 | 17615 | 18865 |
| TOTCOVID126 | 10116 | 11366 | 12616 | 13866 | 15116 | 16366 | 17616 | 18866 |
| TOTCOVID127 | 10117 | 11367 | 12617 | 13867 | 15117 | 16367 | 17617 | 18867 |
| TOTCOVID128 | 10118 | 11368 | 12618 | 13868 | 15118 | 16368 | 17618 | 18868 |
| TOTCOVID129 | 10119 | 11369 | 12619 | 13869 | 15119 | 16369 | 17619 | 18869 |
| TOTCOVID130 | 10120 | 11370 | 12620 | 13870 | 15120 | 16370 | 17620 | 18870 |
| TOTCOVID131 | 10121 | 11371 | 12621 | 13871 | 15121 | 16371 | 17621 | 18871 |
| TOTCOVID132 | 10122 | 11372 | 12622 | 13872 | 15122 | 16372 | 17622 | 18872 |
| TOTCOVID133 | 10123 | 11373 | 12623 | 13873 | 15123 | 16373 | 17623 | 18873 |
| TOTCOVID134 | 10124 | 11374 | 12624 | 13874 | 15124 | 16374 | 17624 | 18874 |
| TOTCOVID135 | 10125 | 11375 | 12625 | 13875 | 15125 | 16375 | 17625 | 18875 |
| TOTCOVID136 | 10126 | 11376 | 12626 | 13876 | 15126 | 16376 | 17626 | 18876 |
| TOTCOVID137 | 10127 | 11377 | 12627 | 13877 | 15127 | 16377 | 17627 | 18877 |
| TOTCOVID138 | 10128 | 11378 | 12628 | 13878 | 15128 | 16378 | 17628 | 18878 |
| TOTCOVID139 | 10129 | 11379 | 12629 | 13879 | 15129 | 16379 | 17629 | 18879 |
| TOTCOVID140 | 10130 | 11380 | 12630 | 13880 | 15130 | 16380 | 17630 | 18880 |
| TOTCOVID141 | 10131 | 11381 | 12631 | 13881 | 15131 | 16381 | 17631 | 18881 |
| TOTCOVID142 | 10132 | 11382 | 12632 | 13882 | 15132 | 16382 | 17632 | 18882 |
| TOTCOVID143 | 10133 | 11383 | 12633 | 13883 | 15133 | 16383 | 17633 | 18883 |
| TOTCOVID144 | 10134 | 11384 | 12634 | 13884 | 15134 | 16384 | 17634 | 18884 |
| TOTCOVID150 | 10135 | 11385 | 12635 | 13885 | 15135 | 16385 | 17635 | 18885 |
| TOTCOVID152 | 10136 | 11386 | 12636 | 13886 | 15136 | 16386 | 17636 | 18886 |
| TOTCOVID154 | 10137 | 11387 | 12637 | 13887 | 15137 | 16387 | 17637 | 18887 |
| TOTCOVID155 | 10138 | 11388 | 12638 | 13888 | 15138 | 16388 | 17638 | 18888 |
| TOTCOVID156 | 10139 | 11389 | 12639 | 13889 | 15139 | 16389 | 17639 | 18889 |
| TOTCOVID158 | 10140 | 11390 | 12640 | 13890 | 15140 | 16390 | 17640 | 18890 |
| TOTCOVID159 | 10141 | 11391 | 12641 | 13891 | 15141 | 16391 | 17641 | 18891 |
| TOTCOVID160 | 10142 | 11392 | 12642 | 13892 | 15142 | 16392 | 17642 | 18892 |
| TOTCOVID161 | 10143 | 11393 | 12643 | 13893 | 15143 | 16393 | 17643 | 18893 |
| TOTCOVID162 | 10144 | 11394 | 12644 | 13894 | 15144 | 16394 | 17644 | 18894 |
| TOTCOVID163 | 10145 | 11395 | 12645 | 13895 | 15145 | 16395 | 17645 | 18895 |
| TOTCOVID164 | 10146 | 11396 | 12646 | 13896 | 15146 | 16396 | 17646 | 18896 |
| TOTCOVID165 | 10147 | 11397 | 12647 | 13897 | 15147 | 16397 | 17647 | 18897 |
| TOTCOVID166 | 10148 | 11398 | 12648 | 13898 | 15148 | 16398 | 17648 | 18898 |
| TOTCOVID168 | 10149 | 11399 | 12649 | 13899 | 15149 | 16399 | 17649 | 18899 |
| TOTCOVID170 | 10150 | 11400 | 12650 | 13900 | 15150 | 16400 | 17650 | 18900 |
| TOTCOVID173 | 10151 | 11401 | 12651 | 13901 | 15151 | 16401 | 17651 | 18901 |
| TOTCOVID174 | 10152 | 11402 | 12652 | 13902 | 15152 | 16402 | 17652 | 18902 |
| TOTCOVID176 | 10153 | 11403 | 12653 | 13903 | 15153 | 16403 | 17653 | 18903 |
| TOTCOVID177 | 10154 | 11404 | 12654 | 13904 | 15154 | 16404 | 17654 | 18904 |
| TOTCOVID178 | 10155 | 11405 | 12655 | 13905 | 15155 | 16405 | 17655 | 18905 |
| TOTCOVID179 | 10156 | 11406 | 12656 | 13906 | 15156 | 16406 | 17656 | 18906 |
| TOTCOVID182 | 10157 | 11407 | 12657 | 13907 | 15157 | 16407 | 17657 | 18907 |
| TOTCOVID186 | 10158 | 11408 | 12658 | 13908 | 15158 | 16408 | 17658 | 18908 |
| TOTCOVID189 | 10159 | 11409 | 12659 | 13909 | 15159 | 16409 | 17659 | 18909 |
| TOTCOVID191 | 10160 | 11410 | 12660 | 13910 | 15160 | 16410 | 17660 | 18910 |
| TOTCOVID193 | 10161 | 11411 | 12661 | 13911 | 15161 | 16411 | 17661 | 18911 |
| TOTCOVID194 | 10162 | 11412 | 12662 | 13912 | 15162 | 16412 | 17662 | 18912 |
| TOTCOVID195 | 10163 | 11413 | 12663 | 13913 | 15163 | 16413 | 17663 | 18913 |
| TOTCOVID196 | 10164 | 11414 | 12664 | 13914 | 15164 | 16414 | 17664 | 18914 |
| TOTCOVID197 | 10165 | 11415 | 12665 | 13915 | 15165 | 16415 | 17665 | 18915 |
| TOTCOVID198 | 10166 | 11416 | 12666 | 13916 | 15166 | 16416 | 17666 | 18916 |
| TOTCOVID199 | 10167 | 11417 | 12667 | 13917 | 15167 | 16417 | 17667 | 18917 |
| TOTCOVID200 | 10168 | 11418 | 12668 | 13918 | 15168 | 16418 | 17668 | 18918 |
| TOTCOVID201 | 10169 | 11419 | 12669 | 13919 | 15169 | 16419 | 17669 | 18919 |
| TOTCOVID203 | 10170 | 11420 | 12670 | 13920 | 15170 | 16420 | 17670 | 18920 |
| TOTCOVID204 | 10171 | 11421 | 12671 | 13921 | 15171 | 16421 | 17671 | 18921 |
| TOTCOVID207 | 10172 | 11422 | 12672 | 13922 | 15172 | 16422 | 17672 | 18922 |
| TOTCOVID208 | 10173 | 11423 | 12673 | 13923 | 15173 | 16423 | 17673 | 18923 |
| TOTCOVID209 | 10174 | 11424 | 12674 | 13924 | 15174 | 16424 | 17674 | 18924 |
| TOTCOVID210 | 10175 | 11425 | 12675 | 13925 | 15175 | 16425 | 17675 | 18925 |
| TOTCOVID211 | 10176 | 11426 | 12676 | 13926 | 15176 | 16426 | 17676 | 18926 |
| TOTCOVID212 | 10177 | 11427 | 12677 | 13927 | 15177 | 16427 | 17677 | 18927 |
| TOTCOVID213 | 10178 | 11428 | 12678 | 13928 | 15178 | 16428 | 17678 | 18928 |
| TOTCOVID214 | 10179 | 11429 | 12679 | 13929 | 15179 | 16429 | 17679 | 18929 |
| TOTCOVID215 | 10180 | 11430 | 12680 | 13930 | 15180 | 16430 | 17680 | 18930 |
| TOTCOVID217 | 10181 | 11431 | 12681 | 13931 | 15181 | 16431 | 17681 | 18931 |
| TOTCOVID218 | 10182 | 11432 | 12682 | 13932 | 15182 | 16432 | 17682 | 18932 |
| TOTCOVID219 | 10183 | 11433 | 12683 | 13933 | 15183 | 16433 | 17683 | 18933 |
| TOTCOVID222 | 10184 | 11434 | 12684 | 13934 | 15184 | 16434 | 17684 | 18934 |
| TOTCOVID223 | 10185 | 11435 | 12685 | 13935 | 15185 | 16435 | 17685 | 18935 |
| TOTCOVID225 | 10186 | 11436 | 12686 | 13936 | 15186 | 16436 | 17686 | 18936 |
| TOTCOVID226 | 10187 | 11437 | 12687 | 13937 | 15187 | 16437 | 17687 | 18937 |
| TOTCOVID227 | 10188 | 11438 | 12688 | 13938 | 15188 | 16438 | 17688 | 18938 |
| TOTCOVID230 | 10189 | 11439 | 12689 | 13939 | 15189 | 16439 | 17689 | 18939 |
| TOTCOVID232 | 10190 | 11440 | 12690 | 13940 | 15190 | 16440 | 17690 | 18940 |
| TOTCOVID233 | 10191 | 11441 | 12691 | 13941 | 15191 | 16441 | 17691 | 18941 |
| TOTCOVID236 | 10192 | 11442 | 12692 | 13942 | 15192 | 16442 | 17692 | 18942 |
| TOTCOVID237 | 10193 | 11443 | 12693 | 13943 | 15193 | 16443 | 17693 | 18943 |
| TOTCOVID240 | 10194 | 11444 | 12694 | 13944 | 15194 | 16444 | 17694 | 18944 |
| TOTCOVID241 | 10195 | 11445 | 12695 | 13945 | 15195 | 16445 | 17695 | 18945 |
| TOTCOVID242 | 10196 | 11446 | 12696 | 13946 | 15196 | 16446 | 17696 | 18946 |
| TOTCOVID244 | 10197 | 11447 | 12697 | 13947 | 15197 | 16447 | 17697 | 18947 |
| TOTCOVID245 | 10198 | 11448 | 12698 | 13948 | 15198 | 16448 | 17698 | 18948 |
| TOTCOVID247 | 10199 | 11449 | 12699 | 13949 | 15199 | 16449 | 17699 | 18949 |
| TOTCOVID249 | 10200 | 11450 | 12700 | 13950 | 15200 | 16450 | 17700 | 18950 |
| TOTCOVID250 | 10201 | 11451 | 12701 | 13951 | 15201 | 16451 | 17701 | 18951 |
| TOTCOVID251 | 10202 | 11452 | 12702 | 13952 | 15202 | 16452 | 17702 | 18952 |
| TOTCOVID253 | 10203 | 11453 | 12703 | 13953 | 15203 | 16453 | 17703 | 18953 |
| TOTCOVID255 | 10204 | 11454 | 12704 | 13954 | 15204 | 16454 | 17704 | 18954 |
| TOTCOVID256 | 10205 | 11455 | 12705 | 13955 | 15205 | 16455 | 17705 | 18955 |
| TOTCOVID257 | 10206 | 11456 | 12706 | 13956 | 15206 | 16456 | 17706 | 18956 |
| TOTCOVID259 | 10207 | 11457 | 12707 | 13957 | 15207 | 16457 | 17707 | 18957 |
| TOTCOVID260 | 10208 | 11458 | 12708 | 13958 | 15208 | 16458 | 17708 | 18958 |
| TOTCOVID261 | 10209 | 11459 | 12709 | 13959 | 15209 | 16459 | 17709 | 18959 |
| TOTCOVID263 | 10210 | 11460 | 12710 | 13960 | 15210 | 16460 | 17710 | 18960 |
| TOTCOVID266 | 10211 | 11461 | 12711 | 13961 | 15211 | 16461 | 17711 | 18961 |
| TOTCOVID267 | 10212 | 11462 | 12712 | 13962 | 15212 | 16462 | 17712 | 18962 |
| TOTCOVID268 | 10213 | 11463 | 12713 | 13963 | 15213 | 16463 | 17713 | 18963 |
| TOTCOVID269 | 10214 | 11464 | 12714 | 13964 | 15214 | 16464 | 17714 | 18964 |
| TOTCOVID270 | 10215 | 11465 | 12715 | 13965 | 15215 | 16465 | 17715 | 18965 |
| TOTCOVID271 | 10216 | 11466 | 12716 | 13966 | 15216 | 16466 | 17716 | 18966 |
| TOTCOVID272 | 10217 | 11467 | 12717 | 13967 | 15217 | 16467 | 17717 | 18967 |
| TOTCOVID273 | 10218 | 11468 | 12718 | 13968 | 15218 | 16468 | 17718 | 18968 |
| TOTCOVID274 | 10219 | 11469 | 12719 | 13969 | 15219 | 16469 | 17719 | 18969 |
| TOTCOVID275 | 10220 | 11470 | 12720 | 13970 | 15220 | 16470 | 17720 | 18970 |
| TOTCOVID276 | 10221 | 11471 | 12721 | 13971 | 15221 | 16471 | 17721 | 18971 |
| TOTCOVID277 | 10222 | 11472 | 12722 | 13972 | 15222 | 16472 | 17722 | 18972 |
| TOTCOVID278 | 10223 | 11473 | 12723 | 13973 | 15223 | 16473 | 17723 | 18973 |
| TOTCOVID279 | 10224 | 11474 | 12724 | 13974 | 15224 | 16474 | 17724 | 18974 |
| TOTCOVID280 | 10225 | 11475 | 12725 | 13975 | 15225 | 16475 | 17725 | 18975 |
| TOTCOVID281 | 10226 | 11476 | 12726 | 13976 | 15226 | 16476 | 17726 | 18976 |
| TOTCOVID00283 | 10227 | 11477 | 12727 | 13977 | 15227 | 16477 | 17727 | 18977 |
| TOTCOVID00284 | 10228 | 11478 | 12728 | 13978 | 15228 | 16478 | 17728 | 18978 |
| TOTCOVID00285 | 10229 | 11479 | 12729 | 13979 | 15229 | 16479 | 17729 | 18979 |
| TOTCOVID00286 | 10230 | 11480 | 12730 | 13980 | 15230 | 16480 | 17730 | 18980 |
| TOTCOVID00287 | 10231 | 11481 | 12731 | 13981 | 15231 | 16481 | 17731 | 18981 |
| TOTCOVID00288 | 10232 | 11482 | 12732 | 13982 | 15232 | 16482 | 17732 | 18982 |
| TOTCOVID00289 | 10233 | 11483 | 12733 | 13983 | 15233 | 16483 | 17733 | 18983 |
| TOTCOVID00290 | 10234 | 11484 | 12734 | 13984 | 15234 | 16484 | 17734 | 18984 |
| TOTCOVID00291 | 10235 | 11485 | 12735 | 13985 | 15235 | 16485 | 17735 | 18985 |
| TOTCOVID00292 | 10236 | 11486 | 12736 | 13986 | 15236 | 16486 | 17736 | 18986 |
| TOTCOVID00293 | 10237 | 11487 | 12737 | 13987 | 15237 | 16487 | 17737 | 18987 |
| TOTCOVID00294 | 10238 | 11488 | 12738 | 13988 | 15238 | 16488 | 17738 | 18988 |
| TOTCOVID00295 | 10239 | 11489 | 12739 | 13989 | 15239 | 16489 | 17739 | 18989 |
| TOTCOVID00296 | 10240 | 11490 | 12740 | 13990 | 15240 | 16490 | 17740 | 18990 |
| TOTCOVID00297 | 10241 | 11491 | 12741 | 13991 | 15241 | 16491 | 17741 | 18991 |
| TOTCOVID00298 | 10242 | 11492 | 12742 | 13992 | 15242 | 16492 | 17742 | 18992 |
| TOTCOVID00299 | 10243 | 11493 | 12743 | 13993 | 15243 | 16493 | 17743 | 18993 |
| TOTCOVID00300 | 10244 | 11494 | 12744 | 13994 | 15244 | 16494 | 17744 | 18994 |
| TOTCOVID00301 | 10245 | 11495 | 12745 | 13995 | 15245 | 16495 | 17745 | 18995 |
| TOTCOVID00302 | 10246 | 11496 | 12746 | 13996 | 15246 | 16496 | 17746 | 18996 |
| TOTCOVID00303 | 10247 | 11497 | 12747 | 13997 | 15247 | 16497 | 17747 | 18997 |
| TOTCOVID00304 | 10248 | 11498 | 12748 | 13998 | 15248 | 16498 | 17748 | 18998 |
| TOTCOVID00305 | 10249 | 11499 | 12749 | 13999 | 15249 | 16499 | 17749 | 18999 |
| TOTCOVID00306 | 10250 | 11500 | 12750 | 14000 | 15250 | 16500 | 17750 | 19000 |
| TOTCOVID00307 | 10251 | 11501 | 12751 | 14001 | 15251 | 16501 | 17751 | 19001 |
| TOTCOVID00308 | 10252 | 11502 | 12752 | 14002 | 15252 | 16502 | 17752 | 19002 |
| TOTCOVID00309 | 10253 | 11503 | 12753 | 14003 | 15253 | 16503 | 17753 | 19003 |
| TOTCOVID00310 | 10254 | 11504 | 12754 | 14004 | 15254 | 16504 | 17754 | 19004 |
| TOTCOVID00311 | 10255 | 11505 | 12755 | 14005 | 15255 | 16505 | 17755 | 19005 |
| TOTCOVID00312 | 10256 | 11506 | 12756 | 14006 | 15256 | 16506 | 17756 | 19006 |
| TOTCOVID00313 | 10257 | 11507 | 12757 | 14007 | 15257 | 16507 | 17757 | 19007 |
| TOTCOVID00314 | 10258 | 11508 | 12758 | 14008 | 15258 | 16508 | 17758 | 19008 |
| TOTCOVID00315 | 10259 | 11509 | 12759 | 14009 | 15259 | 16509 | 17759 | 19009 |
| TOTCOVID00316 | 10260 | 11510 | 12760 | 14010 | 15260 | 16510 | 17760 | 19010 |
| TOTCOVID00317 | 10261 | 11511 | 12761 | 14011 | 15261 | 16511 | 17761 | 19011 |
| TOTCOVID00318 | 10262 | 11512 | 12762 | 14012 | 15262 | 16512 | 17762 | 19012 |
| TOTCOVID00319 | 10263 | 11513 | 12763 | 14013 | 15263 | 16513 | 17763 | 19013 |
| TOTCOVID00320 | 10264 | 11514 | 12764 | 14014 | 15264 | 16514 | 17764 | 19014 |
| TOTCOVID00321 | 10265 | 11515 | 12765 | 14015 | 15265 | 16515 | 17765 | 19015 |
| TOTCOVID00322 | 10266 | 11516 | 12766 | 14016 | 15266 | 16516 | 17766 | 19016 |
| TOTCOVID00323 | 10267 | 11517 | 12767 | 14017 | 15267 | 16517 | 17767 | 19017 |
| TOTCOVID00324 | 10268 | 11518 | 12768 | 14018 | 15268 | 16518 | 17768 | 19018 |
| TOTCOVID00325 | 10269 | 11519 | 12769 | 14019 | 15269 | 16519 | 17769 | 19019 |
| TOTCOVID00326 | 10270 | 11520 | 12770 | 14020 | 15270 | 16520 | 17770 | 19020 |
| TOTCOVID00327 | 10271 | 11521 | 12771 | 14021 | 15271 | 16521 | 17771 | 19021 |
| TOTCOVID00328 | 10272 | 11522 | 12772 | 14022 | 15272 | 16522 | 17772 | 19022 |
| TOTCOVID00329 | 10273 | 11523 | 12773 | 14023 | 15273 | 16523 | 17773 | 19023 |
| TOTCOVID00330 | 10274 | 11524 | 12774 | 14024 | 15274 | 16524 | 17774 | 19024 |
| TOTCOVID00331 | 10275 | 11525 | 12775 | 14025 | 15275 | 16525 | 17775 | 19025 |
| TOTCOVID00332 | 10276 | 11526 | 12776 | 14026 | 15276 | 16526 | 17776 | 19026 |
| TOTCOVID00333 | 10277 | 11527 | 12777 | 14027 | 15277 | 16527 | 17777 | 19027 |
| TOTCOVID00334 | 10278 | 11528 | 12778 | 14028 | 15278 | 16528 | 17778 | 19028 |
| TOTCOVID00335 | 10279 | 11529 | 12779 | 14029 | 15279 | 16529 | 17779 | 19029 |
| TOTCOVID00336 | 10280 | 11530 | 12780 | 14030 | 15280 | 16530 | 17780 | 19030 |
| TOTCOVID00337 | 10281 | 11531 | 12781 | 14031 | 15281 | 16531 | 17781 | 19031 |
| TOTCOVID00338 | 10282 | 11532 | 12782 | 14032 | 15282 | 16532 | 17782 | 19032 |
| TOTCOVID00339 | 10283 | 11533 | 12783 | 14033 | 15283 | 16533 | 17783 | 19033 |
| TOTCOVID00340 | 10284 | 11534 | 12784 | 14034 | 15284 | 16534 | 17784 | 19034 |
| TOTCOVID00341 | 10285 | 11535 | 12785 | 14035 | 15285 | 16535 | 17785 | 19035 |
| TOTCOVID00342 | 10286 | 11536 | 12786 | 14036 | 15286 | 16536 | 17786 | 19036 |
| TOTCOVID00343 | 10287 | 11537 | 12787 | 14037 | 15287 | 16537 | 17787 | 19037 |
| TOTCOVID00344 | 10288 | 11538 | 12788 | 14038 | 15288 | 16538 | 17788 | 19038 |
| TOTCOVID00345 | 10289 | 11539 | 12789 | 14039 | 15289 | 16539 | 17789 | 19039 |
| TOTCOVID00346 | 10290 | 11540 | 12790 | 14040 | 15290 | 16540 | 17790 | 19040 |
| TOTCOVID00347 | 10291 | 11541 | 12791 | 14041 | 15291 | 16541 | 17791 | 19041 |
| TOTCOVID00348 | 10292 | 11542 | 12792 | 14042 | 15292 | 16542 | 17792 | 19042 |
| TOTCOVID00349 | 10293 | 11543 | 12793 | 14043 | 15293 | 16543 | 17793 | 19043 |
| TOTCOVID00350 | 10294 | 11544 | 12794 | 14044 | 15294 | 16544 | 17794 | 19044 |
| TOTCOVID00351 | 10295 | 11545 | 12795 | 14045 | 15295 | 16545 | 17795 | 19045 |
| TOTCOVID00352 | 10296 | 11546 | 12796 | 14046 | 15296 | 16546 | 17796 | 19046 |
| TOTCOVID00353 | 10297 | 11547 | 12797 | 14047 | 15297 | 16547 | 17797 | 19047 |
| TOTCOVID00354 | 10298 | 11548 | 12798 | 14048 | 15298 | 16548 | 17798 | 19048 |
| TOTCOVID00355 | 10299 | 11549 | 12799 | 14049 | 15299 | 16549 | 17799 | 19049 |
| TOTCOVID00356 | 10300 | 11550 | 12800 | 14050 | 15300 | 16550 | 17800 | 19050 |
| TOTCOVID00357 | 10301 | 11551 | 12801 | 14051 | 15301 | 16551 | 17801 | 19051 |
| TOTCOVID00358 | 10302 | 11552 | 12802 | 14052 | 15302 | 16552 | 17802 | 19052 |
| TOTCOVID00359 | 10303 | 11553 | 12803 | 14053 | 15303 | 16553 | 17803 | 19053 |
| TOTCOVID00360 | 10304 | 11554 | 12804 | 14054 | 15304 | 16554 | 17804 | 19054 |
| TOTCOVID00361 | 10305 | 11555 | 12805 | 14055 | 15305 | 16555 | 17805 | 19055 |
| TOTCOVID00362 | 10306 | 11556 | 12806 | 14056 | 15306 | 16556 | 17806 | 19056 |
| TOTCOVID00363 | 10307 | 11557 | 12807 | 14057 | 15307 | 16557 | 17807 | 19057 |
| TOTCOVID00364 | 10308 | 11558 | 12808 | 14058 | 15308 | 16558 | 17808 | 19058 |
| TOTCOVID00365 | 10309 | 11559 | 12809 | 14059 | 15309 | 16559 | 17809 | 19059 |
| TOTCOVID00366 | 10310 | 11560 | 12810 | 14060 | 15310 | 16560 | 17810 | 19060 |
| TOTCOVID00367 | 10311 | 11561 | 12811 | 14061 | 15311 | 16561 | 17811 | 19061 |
| TOTCOVID00368 | 10312 | 11562 | 12812 | 14062 | 15312 | 16562 | 17812 | 19062 |
| TOTCOVID00369 | 10313 | 11563 | 12813 | 14063 | 15313 | 16563 | 17813 | 19063 |
| TOTCOVID00370 | 10314 | 11564 | 12814 | 14064 | 15314 | 16564 | 17814 | 19064 |
| TOTCOVID00371 | 10315 | 11565 | 12815 | 14065 | 15315 | 16565 | 17815 | 19065 |
| TOTCOVID00372 | 10316 | 11566 | 12816 | 14066 | 15316 | 16566 | 17816 | 19066 |
| TOTCOVID00373 | 10317 | 11567 | 12817 | 14067 | 15317 | 16567 | 17817 | 19067 |
| TOTCOVID00374 | 10318 | 11568 | 12818 | 14068 | 15318 | 16568 | 17818 | 19068 |
| TOTCOVID00375 | 10319 | 11569 | 12819 | 14069 | 15319 | 16569 | 17819 | 19069 |
| TOTCOVID00376 | 10320 | 11570 | 12820 | 14070 | 15320 | 16570 | 17820 | 19070 |
| TOTCOVID00377 | 10321 | 11571 | 12821 | 14071 | 15321 | 16571 | 17821 | 19071 |
| TOTCOVID00378 | 10322 | 11572 | 12822 | 14072 | 15322 | 16572 | 17822 | 19072 |
| TOTCOVID00379 | 10323 | 11573 | 12823 | 14073 | 15323 | 16573 | 17823 | 19073 |
| TOTCOVID00380 | 10324 | 11574 | 12824 | 14074 | 15324 | 16574 | 17824 | 19074 |
| TOTCOVID00381 | 10325 | 11575 | 12825 | 14075 | 15325 | 16575 | 17825 | 19075 |
| TOTCOVID00382 | 10326 | 11576 | 12826 | 14076 | 15326 | 16576 | 17826 | 19076 |
| TOTCOVID00383 | 10327 | 11577 | 12827 | 14077 | 15327 | 16577 | 17827 | 19077 |
| TOTCOVID00384 | 10328 | 11578 | 12828 | 14078 | 15328 | 16578 | 17828 | 19078 |
| TOTCOVID00385 | 10329 | 11579 | 12829 | 14079 | 15329 | 16579 | 17829 | 19079 |
| TOTCOVID00386 | 10330 | 11580 | 12830 | 14080 | 15330 | 16580 | 17830 | 19080 |
| TOTCOVID00387 | 10331 | 11581 | 12831 | 14081 | 15331 | 16581 | 17831 | 19081 |
| TOTCOVID00388 | 10332 | 11582 | 12832 | 14082 | 15332 | 16582 | 17832 | 19082 |
| TOTCOVID00389 | 10333 | 11583 | 12833 | 14083 | 15333 | 16583 | 17833 | 19083 |
| TOTCOVID00390 | 10334 | 11584 | 12834 | 14084 | 15334 | 16584 | 17834 | 19084 |
| TOTCOVID00391 | 10335 | 11585 | 12835 | 14085 | 15335 | 16585 | 17835 | 19085 |
| TOTCOVID00392 | 10336 | 11586 | 12836 | 14086 | 15336 | 16586 | 17836 | 19086 |
| TOTCOVID00393 | 10337 | 11587 | 12837 | 14087 | 15337 | 16587 | 17837 | 19087 |
| TOTCOVID00394 | 10338 | 11588 | 12838 | 14088 | 15338 | 16588 | 17838 | 19088 |
| TOTCOVID00395 | 10339 | 11589 | 12839 | 14089 | 15339 | 16589 | 17839 | 19089 |
| TOTCOVID00396 | 10340 | 11590 | 12840 | 14090 | 15340 | 16590 | 17840 | 19090 |
| TOTCOVID00397 | 10341 | 11591 | 12841 | 14091 | 15341 | 16591 | 17841 | 19091 |
| TOTCOVID00398 | 10342 | 11592 | 12842 | 14092 | 15342 | 16592 | 17842 | 19092 |
| TOTCOVID00399 | 10343 | 11593 | 12843 | 14093 | 15343 | 16593 | 17843 | 19093 |
| TOTCOVID00400 | 10344 | 11594 | 12844 | 14094 | 15344 | 16594 | 17844 | 19094 |
| TOTCOVID00401 | 10345 | 11595 | 12845 | 14095 | 15345 | 16595 | 17845 | 19095 |
| TOTCOVID00402 | 10346 | 11596 | 12846 | 14096 | 15346 | 16596 | 17846 | 19096 |
| TOTCOVID00403 | 10347 | 11597 | 12847 | 14097 | 15347 | 16597 | 17847 | 19097 |
| TOTCOVID00404 | 10348 | 11598 | 12848 | 14098 | 15348 | 16598 | 17848 | 19098 |
| TOTCOVID00405 | 10349 | 11599 | 12849 | 14099 | 15349 | 16599 | 17849 | 19099 |
| TOTCOVID00406 | 10350 | 11600 | 12850 | 14100 | 15350 | 16600 | 17850 | 19100 |
| TOTCOVID00407 | 10351 | 11601 | 12851 | 14101 | 15351 | 16601 | 17851 | 19101 |
| TOTCOVID00408 | 10352 | 11602 | 12852 | 14102 | 15352 | 16602 | 17852 | 19102 |
| TOTCOVID00409 | 10353 | 11603 | 12853 | 14103 | 15353 | 16603 | 17853 | 19103 |
| TOTCOVID00410 | 10354 | 11604 | 12854 | 14104 | 15354 | 16604 | 17854 | 19104 |
| TOTCOVID00411 | 10355 | 11605 | 12855 | 14105 | 15355 | 16605 | 17855 | 19105 |
| TOTCOVID00412 | 10356 | 11606 | 12856 | 14106 | 15356 | 16606 | 17856 | 19106 |
| TOTCOVID00413 | 10357 | 11607 | 12857 | 14107 | 15357 | 16607 | 17857 | 19107 |
| TOTCOVID00414 | 10358 | 11608 | 12858 | 14108 | 15358 | 16608 | 17858 | 19108 |
| TOTCOVID00415 | 10359 | 11609 | 12859 | 14109 | 15359 | 16609 | 17859 | 19109 |
| TOTCOVID00416 | 10360 | 11610 | 12860 | 14110 | 15360 | 16610 | 17860 | 19110 |
| TOTCOVID00417 | 10361 | 11611 | 12861 | 14111 | 15361 | 16611 | 17861 | 19111 |
| TOTCOVID00418 | 10362 | 11612 | 12862 | 14112 | 15362 | 16612 | 17862 | 19112 |
| TOTCOVID00419 | 10363 | 11613 | 12863 | 14113 | 15363 | 16613 | 17863 | 19113 |
| TOTCOVID00420 | 10364 | 11614 | 12864 | 14114 | 15364 | 16614 | 17864 | 19114 |
| TOTCOVID00421 | 10365 | 11615 | 12865 | 14115 | 15365 | 16615 | 17865 | 19115 |
| TOTCOVID00422 | 10366 | 11616 | 12866 | 14116 | 15366 | 16616 | 17866 | 19116 |
| TOTCOVID00423 | 10367 | 11617 | 12867 | 14117 | 15367 | 16617 | 17867 | 19117 |
| TOTCOVID00424 | 10368 | 11618 | 12868 | 14118 | 15368 | 16618 | 17868 | 19118 |
| TOTCOVID00425 | 10369 | 11619 | 12869 | 14119 | 15369 | 16619 | 17869 | 19119 |
| TOTCOVID00426 | 10370 | 11620 | 12870 | 14120 | 15370 | 16620 | 17870 | 19120 |
| TOTCOVID00427 | 10371 | 11621 | 12871 | 14121 | 15371 | 16621 | 17871 | 19121 |
| TOTCOVID00428 | 10372 | 11622 | 12872 | 14122 | 15372 | 16622 | 17872 | 19122 |
| TOTCOVID00429 | 10373 | 11623 | 12873 | 14123 | 15373 | 16623 | 17873 | 19123 |
| TOTCOVID00430 | 10374 | 11624 | 12874 | 14124 | 15374 | 16624 | 17874 | 19124 |
| TOTCOVID00431 | 10375 | 11625 | 12875 | 14125 | 15375 | 16625 | 17875 | 19125 |
| TOTCOVID00432 | 10376 | 11626 | 12876 | 14126 | 15376 | 16626 | 17876 | 19126 |
| TOTCOVID00433 | 10377 | 11627 | 12877 | 14127 | 15377 | 16627 | 17877 | 19127 |
| TOTCOVID00434 | 10378 | 11628 | 12878 | 14128 | 15378 | 16628 | 17878 | 19128 |
| TOTCOVID00435 | 10379 | 11629 | 12879 | 14129 | 15379 | 16629 | 17879 | 19129 |
| TOTCOVID00436 | 10380 | 11630 | 12880 | 14130 | 15380 | 16630 | 17880 | 19130 |
| TOTCOVID00437 | 10381 | 11631 | 12881 | 14131 | 15381 | 16631 | 17881 | 19131 |
| TOTCOVID00438 | 10382 | 11632 | 12882 | 14132 | 15382 | 16632 | 17882 | 19132 |
| TOTCOVID00439 | 10383 | 11633 | 12883 | 14133 | 15383 | 16633 | 17883 | 19133 |
| TOTCOVID00440 | 10384 | 11634 | 12884 | 14134 | 15384 | 16634 | 17884 | 19134 |
| TOTCOVID00441 | 10385 | 11635 | 12885 | 14135 | 15385 | 16635 | 17885 | 19135 |
| TOTCOVID00442 | 10386 | 11636 | 12886 | 14136 | 15386 | 16636 | 17886 | 19136 |
| TOTCOVID00443 | 10387 | 11637 | 12887 | 14137 | 15387 | 16637 | 17887 | 19137 |
| TOTCOVID00444 | 10388 | 11638 | 12888 | 14138 | 15388 | 16638 | 17888 | 19138 |
| TOTCOVID00445 | 10389 | 11639 | 12889 | 14139 | 15389 | 16639 | 17889 | 19139 |
| TOTCOVID00446 | 10390 | 11640 | 12890 | 14140 | 15390 | 16640 | 17890 | 19140 |
| TOTCOVID00447 | 10391 | 11641 | 12891 | 14141 | 15391 | 16641 | 17891 | 19141 |
| TOTCOVID00448 | 10392 | 11642 | 12892 | 14142 | 15392 | 16642 | 17892 | 19142 |
| TOTCOVID00449 | 10393 | 11643 | 12893 | 14143 | 15393 | 16643 | 17893 | 19143 |
| TOTCOVID00450 | 10394 | 11644 | 12894 | 14144 | 15394 | 16644 | 17894 | 19144 |
| TOTCOVID00451 | 10395 | 11645 | 12895 | 14145 | 15395 | 16645 | 17895 | 19145 |
| TOTCOVID00452 | 10396 | 11646 | 12896 | 14146 | 15396 | 16646 | 17896 | 19146 |
| TOTCOVID00453 | 10397 | 11647 | 12897 | 14147 | 15397 | 16647 | 17897 | 19147 |
| TOTCOVID00454 | 10398 | 11648 | 12898 | 14148 | 15398 | 16648 | 17898 | 19148 |
| TOTCOVID00455 | 10399 | 11649 | 12899 | 14149 | 15399 | 16649 | 17899 | 19149 |
| TOTCOVID00456 | 10400 | 11650 | 12900 | 14150 | 15400 | 16650 | 17900 | 19150 |
| TOTCOVID00457 | 10401 | 11651 | 12901 | 14151 | 15401 | 16651 | 17901 | 19151 |
| TOTCOVID00458 | 10402 | 11652 | 12902 | 14152 | 15402 | 16652 | 17902 | 19152 |
| TOTCOVID00459 | 10403 | 11653 | 12903 | 14153 | 15403 | 16653 | 17903 | 19153 |
| TOTCOVID00460 | 10404 | 11654 | 12904 | 14154 | 15404 | 16654 | 17904 | 19154 |
| TOTCOVID00461 | 10405 | 11655 | 12905 | 14155 | 15405 | 16655 | 17905 | 19155 |
| TOTCOVID00462 | 10406 | 11656 | 12906 | 14156 | 15406 | 16656 | 17906 | 19156 |
| TOTCOVID00463 | 10407 | 11657 | 12907 | 14157 | 15407 | 16657 | 17907 | 19157 |
| TOTCOVID00464 | 10408 | 11658 | 12908 | 14158 | 15408 | 16658 | 17908 | 19158 |
| TOTCOVID00465 | 10409 | 11659 | 12909 | 14159 | 15409 | 16659 | 17909 | 19159 |
| TOTCOVID00466 | 10410 | 11660 | 12910 | 14160 | 15410 | 16660 | 17910 | 19160 |
| TOTCOVID00467 | 10411 | 11661 | 12911 | 14161 | 15411 | 16661 | 17911 | 19161 |
| TOTCOVID00468 | 10412 | 11662 | 12912 | 14162 | 15412 | 16662 | 17912 | 19162 |
| TOTCOVID00469 | 10413 | 11663 | 12913 | 14163 | 15413 | 16663 | 17913 | 19163 |
| TOTCOVID00470 | 10414 | 11664 | 12914 | 14164 | 15414 | 16664 | 17914 | 19164 |
| TOTCOVID00471 | 10415 | 11665 | 12915 | 14165 | 15415 | 16665 | 17915 | 19165 |
| TOTCOVID00472 | 10416 | 11666 | 12916 | 14166 | 15416 | 16666 | 17916 | 19166 |
| TOTCOVID00473 | 10417 | 11667 | 12917 | 14167 | 15417 | 16667 | 17917 | 19167 |
| TOTCOVID00474 | 10418 | 11668 | 12918 | 14168 | 15418 | 16668 | 17918 | 19168 |
| TOTCOVID00475 | 10419 | 11669 | 12919 | 14169 | 15419 | 16669 | 17919 | 19169 |
| TOTCOVID00476 | 10420 | 11670 | 12920 | 14170 | 15420 | 16670 | 17920 | 19170 |
| TOTCOVID00477 | 10421 | 11671 | 12921 | 14171 | 15421 | 16671 | 17921 | 19171 |
| TOTCOVID00478 | 10422 | 11672 | 12922 | 14172 | 15422 | 16672 | 17922 | 19172 |
| TOTCOVID00479 | 10423 | 11673 | 12923 | 14173 | 15423 | 16673 | 17923 | 19173 |
| TOTCOVID00480 | 10424 | 11674 | 12924 | 14174 | 15424 | 16674 | 17924 | 19174 |
| TOTCOVID00481 | 10425 | 11675 | 12925 | 14175 | 15425 | 16675 | 17925 | 19175 |
| TOTCOVID00482 | 10426 | 11676 | 12926 | 14176 | 15426 | 16676 | 17926 | 19176 |
| TOTCOVID00483 | 10427 | 11677 | 12927 | 14177 | 15427 | 16677 | 17927 | 19177 |
| TOTCOVID00484 | 10428 | 11678 | 12928 | 14178 | 15428 | 16678 | 17928 | 19178 |
| TOTCOVID00485 | 10429 | 11679 | 12929 | 14179 | 15429 | 16679 | 17929 | 19179 |
| TOTCOVID00486 | 10430 | 11680 | 12930 | 14180 | 15430 | 16680 | 17930 | 19180 |
| TOTCOVID00487 | 10431 | 11681 | 12931 | 14181 | 15431 | 16681 | 17931 | 19181 |
| TOTCOVID00488 | 10432 | 11682 | 12932 | 14182 | 15432 | 16682 | 17932 | 19182 |
| TOTCOVID00489 | 10433 | 11683 | 12933 | 14183 | 15433 | 16683 | 17933 | 19183 |
| TOTCOVID00490 | 10434 | 11684 | 12934 | 14184 | 15434 | 16684 | 17934 | 19184 |
| TOTCOVID00491 | 10435 | 11685 | 12935 | 14185 | 15435 | 16685 | 17935 | 19185 |
| TOTCOVID00492 | 10436 | 11686 | 12936 | 14186 | 15436 | 16686 | 17936 | 19186 |
| TOTCOVID00493 | 10437 | 11687 | 12937 | 14187 | 15437 | 16687 | 17937 | 19187 |
| TOTCOVID00494 | 10438 | 11688 | 12938 | 14188 | 15438 | 16688 | 17938 | 19188 |
| TOTCOVID00495 | 10439 | 11689 | 12939 | 14189 | 15439 | 16689 | 17939 | 19189 |
| TOTCOVID00496 | 10440 | 11690 | 12940 | 14190 | 15440 | 16690 | 17940 | 19190 |
| TOTCOVID00497 | 10441 | 11691 | 12941 | 14191 | 15441 | 16691 | 17941 | 19191 |
| TOTCOVID00498 | 10442 | 11692 | 12942 | 14192 | 15442 | 16692 | 17942 | 19192 |
| TOTCOVID00499 | 10443 | 11693 | 12943 | 14193 | 15443 | 16693 | 17943 | 19193 |
| TOTCOVID00500 | 10444 | 11694 | 12944 | 14194 | 15444 | 16694 | 17944 | 19194 |
| TOTCOVID00501 | 10445 | 11695 | 12945 | 14195 | 15445 | 16695 | 17945 | 19195 |
| TOTCOVID00502 | 10446 | 11696 | 12946 | 14196 | 15446 | 16696 | 17946 | 19196 |
| TOTCOVID00503 | 10447 | 11697 | 12947 | 14197 | 15447 | 16697 | 17947 | 19197 |
| TOTCOVID00504 | 10448 | 11698 | 12948 | 14198 | 15448 | 16698 | 17948 | 19198 |
| TOTCOVID00505 | 10449 | 11699 | 12949 | 14199 | 15449 | 16699 | 17949 | 19199 |
| TOTCOVID00506 | 10450 | 11700 | 12950 | 14200 | 15450 | 16700 | 17950 | 19200 |
| TOTCOVID00507 | 10451 | 11701 | 12951 | 14201 | 15451 | 16701 | 17951 | 19201 |
| TOTCOVID00508 | 10452 | 11702 | 12952 | 14202 | 15452 | 16702 | 17952 | 19202 |
| TOTCOVID00509 | 10453 | 11703 | 12953 | 14203 | 15453 | 16703 | 17953 | 19203 |
| TOTCOVID00510 | 10454 | 11704 | 12954 | 14204 | 15454 | 16704 | 17954 | 19204 |
| TOTCOVID00511 | 10455 | 11705 | 12955 | 14205 | 15455 | 16705 | 17955 | 19205 |
| TOTCOVID00512 | 10456 | 11706 | 12956 | 14206 | 15456 | 16706 | 17956 | 19206 |
| TOTCOVID00513 | 10457 | 11707 | 12957 | 14207 | 15457 | 16707 | 17957 | 19207 |
| TOTCOVID00514 | 10458 | 11708 | 12958 | 14208 | 15458 | 16708 | 17958 | 19208 |
| TOTCOVID00515 | 10459 | 11709 | 12959 | 14209 | 15459 | 16709 | 17959 | 19209 |
| TOTCOVID00516 | 10460 | 11710 | 12960 | 14210 | 15460 | 16710 | 17960 | 19210 |
| TOTCOVID00517 | 10461 | 11711 | 12961 | 14211 | 15461 | 16711 | 17961 | 19211 |
| TOTCOVID00518 | 10462 | 11712 | 12962 | 14212 | 15462 | 16712 | 17962 | 19212 |
| TOTCOVID00519 | 10463 | 11713 | 12963 | 14213 | 15463 | 16713 | 17963 | 19213 |
| TOTCOVID00520 | 10464 | 11714 | 12964 | 14214 | 15464 | 16714 | 17964 | 19214 |
| TOTCOVID00521 | 10465 | 11715 | 12965 | 14215 | 15465 | 16715 | 17965 | 19215 |
| TOTCOVID00522 | 10466 | 11716 | 12966 | 14216 | 15466 | 16716 | 17966 | 19216 |
| TOTCOVID00523 | 10467 | 11717 | 12967 | 14217 | 15467 | 16717 | 17967 | 19217 |
| TOTCOVID00524 | 10468 | 11718 | 12968 | 14218 | 15468 | 16718 | 17968 | 19218 |
| TOTCOVID00525 | 10469 | 11719 | 12969 | 14219 | 15469 | 16719 | 17969 | 19219 |
| TOTCOVID00526 | 10470 | 11720 | 12970 | 14220 | 15470 | 16720 | 17970 | 19220 |
| TOTCOVID00527 | 10471 | 11721 | 12971 | 14221 | 15471 | 16721 | 17971 | 19221 |
| TOTCOVID00528 | 10472 | 11722 | 12972 | 14222 | 15472 | 16722 | 17972 | 19222 |
| TOTCOVID00529 | 10473 | 11723 | 12973 | 14223 | 15473 | 16723 | 17973 | 19223 |
| TOTCOVID00530 | 10474 | 11724 | 12974 | 14224 | 15474 | 16724 | 17974 | 19224 |
| TOTCOVID00531 | 10475 | 11725 | 12975 | 14225 | 15475 | 16725 | 17975 | 19225 |
| TOTCOVID00532 | 10476 | 11726 | 12976 | 14226 | 15476 | 16726 | 17976 | 19226 |
| TOTCOVID00533 | 10477 | 11727 | 12977 | 14227 | 15477 | 16727 | 17977 | 19227 |
| TOTCOVID00534 | 10478 | 11728 | 12978 | 14228 | 15478 | 16728 | 17978 | 19228 |
| TOTCOVID00535 | 10479 | 11729 | 12979 | 14229 | 15479 | 16729 | 17979 | 19229 |
| TOTCOVID00536 | 10480 | 11730 | 12980 | 14230 | 15480 | 16730 | 17980 | 19230 |
| TOTCOVID00537 | 10481 | 11731 | 12981 | 14231 | 15481 | 16731 | 17981 | 19231 |
| TOTCOVID00538 | 10482 | 11732 | 12982 | 14232 | 15482 | 16732 | 17982 | 19232 |
| TOTCOVID00539 | 10483 | 11733 | 12983 | 14233 | 15483 | 16733 | 17983 | 19233 |
| TOTCOVID00540 | 10484 | 11734 | 12984 | 14234 | 15484 | 16734 | 17984 | 19234 |
| TOTCOVID00541 | 10485 | 11735 | 12985 | 14235 | 15485 | 16735 | 17985 | 19235 |
| TOTCOVID00542 | 10486 | 11736 | 12986 | 14236 | 15486 | 16736 | 17986 | 19236 |
| TOTCOVID00543 | 10487 | 11737 | 12987 | 14237 | 15487 | 16737 | 17987 | 19237 |
| TOTCOVID00544 | 10488 | 11738 | 12988 | 14238 | 15488 | 16738 | 17988 | 19238 |
| TOTCOVID00545 | 10489 | 11739 | 12989 | 14239 | 15489 | 16739 | 17989 | 19239 |
| TOTCOVID00546 | 10490 | 11740 | 12990 | 14240 | 15490 | 16740 | 17990 | 19240 |
| TOTCOVID00547 | 10491 | 11741 | 12991 | 14241 | 15491 | 16741 | 17991 | 19241 |
| TOTCOVID00548 | 10492 | 11742 | 12992 | 14242 | 15492 | 16742 | 17992 | 19242 |
| TOTCOVID00549 | 10493 | 11743 | 12993 | 14243 | 15493 | 16743 | 17993 | 19243 |
| TOTCOVID00550 | 10494 | 11744 | 12994 | 14244 | 15494 | 16744 | 17994 | 19244 |
| TOTCOVID00551 | 10495 | 11745 | 12995 | 14245 | 15495 | 16745 | 17995 | 19245 |
| TOTCOVID00552 | 10496 | 11746 | 12996 | 14246 | 15496 | 16746 | 17996 | 19246 |
| TOTCOVID00553 | 10497 | 11747 | 12997 | 14247 | 15497 | 16747 | 17997 | 19247 |
| TOTCOVID00554 | 10498 | 11748 | 12998 | 14248 | 15498 | 16748 | 17998 | 19248 |
| TOTCOVID00555 | 10499 | 11749 | 12999 | 14249 | 15499 | 16749 | 17999 | 19249 |
| TOTCOVID00556 | 10500 | 11750 | 13000 | 14250 | 15500 | 16750 | 18000 | 19250 |
| TOTCOVID00557 | 10501 | 11751 | 13001 | 14251 | 15501 | 16751 | 18001 | 19251 |
| TOTCOVID00558 | 10502 | 11752 | 13002 | 14252 | 15502 | 16752 | 18002 | 19252 |
| TOTCOVID00559 | 10503 | 11753 | 13003 | 14253 | 15503 | 16753 | 18003 | 19253 |
| TOTCOVID00560 | 10504 | 11754 | 13004 | 14254 | 15504 | 16754 | 18004 | 19254 |
| TOTCOVID00561 | 10505 | 11755 | 13005 | 14255 | 15505 | 16755 | 18005 | 19255 |
| TOTCOVID00562 | 10506 | 11756 | 13006 | 14256 | 15506 | 16756 | 18006 | 19256 |
| TOTCOVID00563 | 10507 | 11757 | 13007 | 14257 | 15507 | 16757 | 18007 | 19257 |
| TOTCOVID00564 | 10508 | 11758 | 13008 | 14258 | 15508 | 16758 | 18008 | 19258 |
| TOTCOVID00565 | 10509 | 11759 | 13009 | 14259 | 15509 | 16759 | 18009 | 19259 |
| TOTCOVID00566 | 10510 | 11760 | 13010 | 14260 | 15510 | 16760 | 18010 | 19260 |
| TOTCOVID00567 | 10511 | 11761 | 13011 | 14261 | 15511 | 16761 | 18011 | 19261 |
| TOTCOVID00568 | 10512 | 11762 | 13012 | 14262 | 15512 | 16762 | 18012 | 19262 |
| TOTCOVID00569 | 10513 | 11763 | 13013 | 14263 | 15513 | 16763 | 18013 | 19263 |
| TOTCOVID00570 | 10514 | 11764 | 13014 | 14264 | 15514 | 16764 | 18014 | 19264 |
| TOTCOVID00571 | 10515 | 11765 | 13015 | 14265 | 15515 | 16765 | 18015 | 19265 |
| TOTCOVID00572 | 10516 | 11766 | 13016 | 14266 | 15516 | 16766 | 18016 | 19266 |
| TOTCOVID00573 | 10517 | 11767 | 13017 | 14267 | 15517 | 16767 | 18017 | 19267 |
| TOTCOVID00574 | 10518 | 11768 | 13018 | 14268 | 15518 | 16768 | 18018 | 19268 |
| TOTCOVID00575 | 10519 | 11769 | 13019 | 14269 | 15519 | 16769 | 18019 | 19269 |
| TOTCOVID00576 | 10520 | 11770 | 13020 | 14270 | 15520 | 16770 | 18020 | 19270 |
| TOTCOVID00577 | 10521 | 11771 | 13021 | 14271 | 15521 | 16771 | 18021 | 19271 |
| TOTCOVID00578 | 10522 | 11772 | 13022 | 14272 | 15522 | 16772 | 18022 | 19272 |
| TOTCOVID00579 | 10523 | 11773 | 13023 | 14273 | 15523 | 16773 | 18023 | 19273 |
| TOTCOVID00580 | 10524 | 11774 | 13024 | 14274 | 15524 | 16774 | 18024 | 19274 |
| TOTCOVID00581 | 10525 | 11775 | 13025 | 14275 | 15525 | 16775 | 18025 | 19275 |
| TOTCOVID00582 | 10526 | 11776 | 13026 | 14276 | 15526 | 16776 | 18026 | 19276 |
| TOTCOVID00583 | 10527 | 11777 | 13027 | 14277 | 15527 | 16777 | 18027 | 19277 |
| TOTCOVID00584 | 10528 | 11778 | 13028 | 14278 | 15528 | 16778 | 18028 | 19278 |
| TOTCOVID00585 | 10529 | 11779 | 13029 | 14279 | 15529 | 16779 | 18029 | 19279 |
| TOTCOVID00586 | 10530 | 11780 | 13030 | 14280 | 15530 | 16780 | 18030 | 19280 |
| TOTCOVID00587 | 10531 | 11781 | 13031 | 14281 | 15531 | 16781 | 18031 | 19281 |
| TOTCOVID00588 | 10532 | 11782 | 13032 | 14282 | 15532 | 16782 | 18032 | 19282 |
| TOTCOVID00589 | 10533 | 11783 | 13033 | 14283 | 15533 | 16783 | 18033 | 19283 |
| TOTCOVID00590 | 10534 | 11784 | 13034 | 14284 | 15534 | 16784 | 18034 | 19284 |
| TOTCOVID00591 | 10535 | 11785 | 13035 | 14285 | 15535 | 16785 | 18035 | 19285 |
| TOTCOVID00592 | 10536 | 11786 | 13036 | 14286 | 15536 | 16786 | 18036 | 19286 |
| TOTCOVID00593 | 10537 | 11787 | 13037 | 14287 | 15537 | 16787 | 18037 | 19287 |
| TOTCOVID00594 | 10538 | 11788 | 13038 | 14288 | 15538 | 16788 | 18038 | 19288 |
| TOTCOVID00595 | 10539 | 11789 | 13039 | 14289 | 15539 | 16789 | 18039 | 19289 |
| TOTCOVID00596 | 10540 | 11790 | 13040 | 14290 | 15540 | 16790 | 18040 | 19290 |
| TOTCOVID00597 | 10541 | 11791 | 13041 | 14291 | 15541 | 16791 | 18041 | 19291 |
| TOTCOVID00598 | 10542 | 11792 | 13042 | 14292 | 15542 | 16792 | 18042 | 19292 |
| TOTCOVID00599 | 10543 | 11793 | 13043 | 14293 | 15543 | 16793 | 18043 | 19293 |
| TOTCOVID00600 | 10544 | 11794 | 13044 | 14294 | 15544 | 16794 | 18044 | 19294 |
| TOTCOVID00601 | 10545 | 11795 | 13045 | 14295 | 15545 | 16795 | 18045 | 19295 |
| TOTCOVID00602 | 10546 | 11796 | 13046 | 14296 | 15546 | 16796 | 18046 | 19296 |
| TOTCOVID00603 | 10547 | 11797 | 13047 | 14297 | 15547 | 16797 | 18047 | 19297 |
| TOTCOVID00604 | 10548 | 11798 | 13048 | 14298 | 15548 | 16798 | 18048 | 19298 |
| TOTCOVID00605 | 10549 | 11799 | 13049 | 14299 | 15549 | 16799 | 18049 | 19299 |
| TOTCOVID00606 | 10550 | 11800 | 13050 | 14300 | 15550 | 16800 | 18050 | 19300 |
| TOTCOVID00607 | 10551 | 11801 | 13051 | 14301 | 15551 | 16801 | 18051 | 19301 |
| TOTCOVID00608 | 10552 | 11802 | 13052 | 14302 | 15552 | 16802 | 18052 | 19302 |
| TOTCOVID00609 | 10553 | 11803 | 13053 | 14303 | 15553 | 16803 | 18053 | 19303 |
| TOTCOVID00610 | 10554 | 11804 | 13054 | 14304 | 15554 | 16804 | 18054 | 19304 |
| TOTCOVID00611 | 10555 | 11805 | 13055 | 14305 | 15555 | 16805 | 18055 | 19305 |
| TOTCOVID00612 | 10556 | 11806 | 13056 | 14306 | 15556 | 16806 | 18056 | 19306 |
| TOTCOVID00613 | 10557 | 11807 | 13057 | 14307 | 15557 | 16807 | 18057 | 19307 |
| TOTCOVID00614 | 10558 | 11808 | 13058 | 14308 | 15558 | 16808 | 18058 | 19308 |
| TOTCOVID00615 | 10559 | 11809 | 13059 | 14309 | 15559 | 16809 | 18059 | 19309 |
| TOTCOVID00616 | 10560 | 11810 | 13060 | 14310 | 15560 | 16810 | 18060 | 19310 |
| TOTCOVID00617 | 10561 | 11811 | 13061 | 14311 | 15561 | 16811 | 18061 | 19311 |
| TOTCOVID00618 | 10562 | 11812 | 13062 | 14312 | 15562 | 16812 | 18062 | 19312 |
| TOTCOVID00619 | 10563 | 11813 | 13063 | 14313 | 15563 | 16813 | 18063 | 19313 |
| TOTCOVID00620 | 10564 | 11814 | 13064 | 14314 | 15564 | 16814 | 18064 | 19314 |
| TOTCOVID00621 | 10565 | 11815 | 13065 | 14315 | 15565 | 16815 | 18065 | 19315 |
| TOTCOVID00622 | 10566 | 11816 | 13066 | 14316 | 15566 | 16816 | 18066 | 19316 |
| TOTCOVID00623 | 10567 | 11817 | 13067 | 14317 | 15567 | 16817 | 18067 | 19317 |
| TOTCOVID00624 | 10568 | 11818 | 13068 | 14318 | 15568 | 16818 | 18068 | 19318 |
| TOTCOVID00625 | 10569 | 11819 | 13069 | 14319 | 15569 | 16819 | 18069 | 19319 |
| TOTCOVID00626 | 10570 | 11820 | 13070 | 14320 | 15570 | 16820 | 18070 | 19320 |
| TOTCOVID00627 | 10571 | 11821 | 13071 | 14321 | 15571 | 16821 | 18071 | 19321 |
| TOTCOVID00628 | 10572 | 11822 | 13072 | 14322 | 15572 | 16822 | 18072 | 19322 |
| TOTCOVID00629 | 10573 | 11823 | 13073 | 14323 | 15573 | 16823 | 18073 | 19323 |
| TOTCOVID00630 | 10574 | 11824 | 13074 | 14324 | 15574 | 16824 | 18074 | 19324 |
| TOTCOVID00631 | 10575 | 11825 | 13075 | 14325 | 15575 | 16825 | 18075 | 19325 |
| TOTCOVID00632 | 10576 | 11826 | 13076 | 14326 | 15576 | 16826 | 18076 | 19326 |
| TOTCOVID00633 | 10577 | 11827 | 13077 | 14327 | 15577 | 16827 | 18077 | 19327 |
| TOTCOVID00634 | 10578 | 11828 | 13078 | 14328 | 15578 | 16828 | 18078 | 19328 |
| TOTCOVID00635 | 10579 | 11829 | 13079 | 14329 | 15579 | 16829 | 18079 | 19329 |
| TOTCOVID00636 | 10580 | 11830 | 13080 | 14330 | 15580 | 16830 | 18080 | 19330 |
| TOTCOVID00637 | 10581 | 11831 | 13081 | 14331 | 15581 | 16831 | 18081 | 19331 |
| TOTCOVID00638 | 10582 | 11832 | 13082 | 14332 | 15582 | 16832 | 18082 | 19332 |
| TOTCOVID00639 | 10583 | 11833 | 13083 | 14333 | 15583 | 16833 | 18083 | 19333 |
| TOTCOVID00640 | 10584 | 11834 | 13084 | 14334 | 15584 | 16834 | 18084 | 19334 |
| TOTCOVID00641 | 10585 | 11835 | 13085 | 14335 | 15585 | 16835 | 18085 | 19335 |
| TOTCOVID00642 | 10586 | 11836 | 13086 | 14336 | 15586 | 16836 | 18086 | 19336 |
| TOTCOVID00643 | 10587 | 11837 | 13087 | 14337 | 15587 | 16837 | 18087 | 19337 |
| TOTCOVID00644 | 10588 | 11838 | 13088 | 14338 | 15588 | 16838 | 18088 | 19338 |
| TOTCOVID00645 | 10589 | 11839 | 13089 | 14339 | 15589 | 16839 | 18089 | 19339 |
| TOTCOVID00646 | 10590 | 11840 | 13090 | 14340 | 15590 | 16840 | 18090 | 19340 |
| TOTCOVID00647 | 10591 | 11841 | 13091 | 14341 | 15591 | 16841 | 18091 | 19341 |
| TOTCOVID00648 | 10592 | 11842 | 13092 | 14342 | 15592 | 16842 | 18092 | 19342 |
| TOTCOVID00649 | 10593 | 11843 | 13093 | 14343 | 15593 | 16843 | 18093 | 19343 |
| TOTCOVID00650 | 10594 | 11844 | 13094 | 14344 | 15594 | 16844 | 18094 | 19344 |
| TOTCOVID00651 | 10595 | 11845 | 13095 | 14345 | 15595 | 16845 | 18095 | 19345 |
| TOTCOVID00652 | 10596 | 11846 | 13096 | 14346 | 15596 | 16846 | 18096 | 19346 |
| TOTCOVID00653 | 10597 | 11847 | 13097 | 14347 | 15597 | 16847 | 18097 | 19347 |
| TOTCOVID00654 | 10598 | 11848 | 13098 | 14348 | 15598 | 16848 | 18098 | 19348 |
| TOTCOVID00655 | 10599 | 11849 | 13099 | 14349 | 15599 | 16849 | 18099 | 19349 |
| TOTCOVID00656 | 10600 | 11850 | 13100 | 14350 | 15600 | 16850 | 18100 | 19350 |
| TOTCOVID00657 | 10601 | 11851 | 13101 | 14351 | 15601 | 16851 | 18101 | 19351 |
| TOTCOVID00658 | 10602 | 11852 | 13102 | 14352 | 15602 | 16852 | 18102 | 19352 |
| TOTCOVID00659 | 10603 | 11853 | 13103 | 14353 | 15603 | 16853 | 18103 | 19353 |
| TOTCOVID00660 | 10604 | 11854 | 13104 | 14354 | 15604 | 16854 | 18104 | 19354 |
| TOTCOVID00661 | 10605 | 11855 | 13105 | 14355 | 15605 | 16855 | 18105 | 19355 |
| TOTCOVID00662 | 10606 | 11856 | 13106 | 14356 | 15606 | 16856 | 18106 | 19356 |
| TOTCOVID00663 | 10607 | 11857 | 13107 | 14357 | 15607 | 16857 | 18107 | 19357 |
| TOTCOVID00664 | 10608 | 11858 | 13108 | 14358 | 15608 | 16858 | 18108 | 19358 |
| TOTCOVID00665 | 10609 | 11859 | 13109 | 14359 | 15609 | 16859 | 18109 | 19359 |
| TOTCOVID00666 | 10610 | 11860 | 13110 | 14360 | 15610 | 16860 | 18110 | 19360 |
| TOTCOVID00667 | 10611 | 11861 | 13111 | 14361 | 15611 | 16861 | 18111 | 19361 |
| TOTCOVID00668 | 10612 | 11862 | 13112 | 14362 | 15612 | 16862 | 18112 | 19362 |
| TOTCOVID00669 | 10613 | 11863 | 13113 | 14363 | 15613 | 16863 | 18113 | 19363 |
| TOTCOVID00670 | 10614 | 11864 | 13114 | 14364 | 15614 | 16864 | 18114 | 19364 |
| TOTCOVID00671 | 10615 | 11865 | 13115 | 14365 | 15615 | 16865 | 18115 | 19365 |
| TOTCOVID00672 | 10616 | 11866 | 13116 | 14366 | 15616 | 16866 | 18116 | 19366 |
| TOTCOVID00673 | 10617 | 11867 | 13117 | 14367 | 15617 | 16867 | 18117 | 19367 |
| TOTCOVID00674 | 10618 | 11868 | 13118 | 14368 | 15618 | 16868 | 18118 | 19368 |
| TOTCOVID00675 | 10619 | 11869 | 13119 | 14369 | 15619 | 16869 | 18119 | 19369 |
| TOTCOVID00676 | 10620 | 11870 | 13120 | 14370 | 15620 | 16870 | 18120 | 19370 |
| TOTCOVID00677 | 10621 | 11871 | 13121 | 14371 | 15621 | 16871 | 18121 | 19371 |
| TOTCOVID00678 | 10622 | 11872 | 13122 | 14372 | 15622 | 16872 | 18122 | 19372 |
| TOTCOVID00679 | 10623 | 11873 | 13123 | 14373 | 15623 | 16873 | 18123 | 19373 |
| TOTCOVID00680 | 10624 | 11874 | 13124 | 14374 | 15624 | 16874 | 18124 | 19374 |
| TOTCOVID00681 | 10625 | 11875 | 13125 | 14375 | 15625 | 16875 | 18125 | 19375 |
| TOTCOVID00682 | 10626 | 11876 | 13126 | 14376 | 15626 | 16876 | 18126 | 19376 |
| TOTCOVID00683 | 10627 | 11877 | 13127 | 14377 | 15627 | 16877 | 18127 | 19377 |
| TOTCOVID00684 | 10628 | 11878 | 13128 | 14378 | 15628 | 16878 | 18128 | 19378 |
| TOTCOVID00685 | 10629 | 11879 | 13129 | 14379 | 15629 | 16879 | 18129 | 19379 |
| TOTCOVID00686 | 10630 | 11880 | 13130 | 14380 | 15630 | 16880 | 18130 | 19380 |
| TOTCOVID00687 | 10631 | 11881 | 13131 | 14381 | 15631 | 16881 | 18131 | 19381 |
| TOTCOVID00688 | 10632 | 11882 | 13132 | 14382 | 15632 | 16882 | 18132 | 19382 |
| TOTCOVID00689 | 10633 | 11883 | 13133 | 14383 | 15633 | 16883 | 18133 | 19383 |
| TOTCOVID00690 | 10634 | 11884 | 13134 | 14384 | 15634 | 16884 | 18134 | 19384 |
| TOTCOVID00691 | 10635 | 11885 | 13135 | 14385 | 15635 | 16885 | 18135 | 19385 |
| TOTCOVID00692 | 10636 | 11886 | 13136 | 14386 | 15636 | 16886 | 18136 | 19386 |
| TOTCOVID00693 | 10637 | 11887 | 13137 | 14387 | 15637 | 16887 | 18137 | 19387 |
| TOTCOVID00694 | 10638 | 11888 | 13138 | 14388 | 15638 | 16888 | 18138 | 19388 |
| TOTCOVID00695 | 10639 | 11889 | 13139 | 14389 | 15639 | 16889 | 18139 | 19389 |
| TOTCOVID00696 | 10640 | 11890 | 13140 | 14390 | 15640 | 16890 | 18140 | 19390 |
| TOTCOVID00697 | 10641 | 11891 | 13141 | 14391 | 15641 | 16891 | 18141 | 19391 |
| TOTCOVID00698 | 10642 | 11892 | 13142 | 14392 | 15642 | 16892 | 18142 | 19392 |
| TOTCOVID00699 | 10643 | 11893 | 13143 | 14393 | 15643 | 16893 | 18143 | 19393 |
| TOTCOVID00700 | 10644 | 11894 | 13144 | 14394 | 15644 | 16894 | 18144 | 19394 |
| TOTCOVID00701 | 10645 | 11895 | 13145 | 14395 | 15645 | 16895 | 18145 | 19395 |
| TOTCOVID00702 | 10646 | 11896 | 13146 | 14396 | 15646 | 16896 | 18146 | 19396 |
| TOTCOVID00703 | 10647 | 11897 | 13147 | 14397 | 15647 | 16897 | 18147 | 19397 |
| TOTCOVID00704 | 10648 | 11898 | 13148 | 14398 | 15648 | 16898 | 18148 | 19398 |
| TOTCOVID00705 | 10649 | 11899 | 13149 | 14399 | 15649 | 16899 | 18149 | 19399 |
| TOTCOVID00706 | 10650 | 11900 | 13150 | 14400 | 15650 | 16900 | 18150 | 19400 |
| TOTCOVID00707 | 10651 | 11901 | 13151 | 14401 | 15651 | 16901 | 18151 | 19401 |
| TOTCOVID00708 | 10652 | 11902 | 13152 | 14402 | 15652 | 16902 | 18152 | 19402 |
| TOTCOVID00709 | 10653 | 11903 | 13153 | 14403 | 15653 | 16903 | 18153 | 19403 |
| TOTCOVID00710 | 10654 | 11904 | 13154 | 14404 | 15654 | 16904 | 18154 | 19404 |
| TOTCOVID00711 | 10655 | 11905 | 13155 | 14405 | 15655 | 16905 | 18155 | 19405 |
| TOTCOVID00712 | 10656 | 11906 | 13156 | 14406 | 15656 | 16906 | 18156 | 19406 |
| TOTCOVID00713 | 10657 | 11907 | 13157 | 14407 | 15657 | 16907 | 18157 | 19407 |
| TOTCOVID00714 | 10658 | 11908 | 13158 | 14408 | 15658 | 16908 | 18158 | 19408 |
| TOTCOVID00715 | 10659 | 11909 | 13159 | 14409 | 15659 | 16909 | 18159 | 19409 |
| TOTCOVID00716 | 10660 | 11910 | 13160 | 14410 | 15660 | 16910 | 18160 | 19410 |
| TOTCOVID00717 | 10661 | 11911 | 13161 | 14411 | 15661 | 16911 | 18161 | 19411 |
| TOTCOVID00718 | 10662 | 11912 | 13162 | 14412 | 15662 | 16912 | 18162 | 19412 |
| TOTCOVID00719 | 10663 | 11913 | 13163 | 14413 | 15663 | 16913 | 18163 | 19413 |
| TOTCOVID00720 | 10664 | 11914 | 13164 | 14414 | 15664 | 16914 | 18164 | 19414 |
| TOTCOVID00721 | 10665 | 11915 | 13165 | 14415 | 15665 | 16915 | 18165 | 19415 |
| TOTCOVID00722 | 10666 | 11916 | 13166 | 14416 | 15666 | 16916 | 18166 | 19416 |
| TOTCOVID00723 | 10667 | 11917 | 13167 | 14417 | 15667 | 16917 | 18167 | 19417 |
| TOTCOVID00724 | 10668 | 11918 | 13168 | 14418 | 15668 | 16918 | 18168 | 19418 |
| TOTCOVID00725 | 10669 | 11919 | 13169 | 14419 | 15669 | 16919 | 18169 | 19419 |
| TOTCOVID00726 | 10670 | 11920 | 13170 | 14420 | 15670 | 16920 | 18170 | 19420 |
| TOTCOVID00727 | 10671 | 11921 | 13171 | 14421 | 15671 | 16921 | 18171 | 19421 |
| TOTCOVID00728 | 10672 | 11922 | 13172 | 14422 | 15672 | 16922 | 18172 | 19422 |
| TOTCOVID00729 | 10673 | 11923 | 13173 | 14423 | 15673 | 16923 | 18173 | 19423 |
| TOTCOVID00730 | 10674 | 11924 | 13174 | 14424 | 15674 | 16924 | 18174 | 19424 |
| TOTCOVID00731 | 10675 | 11925 | 13175 | 14425 | 15675 | 16925 | 18175 | 19425 |
| TOTCOVID00732 | 10676 | 11926 | 13176 | 14426 | 15676 | 16926 | 18176 | 19426 |
| TOTCOVID00733 | 10677 | 11927 | 13177 | 14427 | 15677 | 16927 | 18177 | 19427 |
| TOTCOVID00734 | 10678 | 11928 | 13178 | 14428 | 15678 | 16928 | 18178 | 19428 |
| TOTCOVID00735 | 10679 | 11929 | 13179 | 14429 | 15679 | 16929 | 18179 | 19429 |
| TOTCOVID00736 | 10680 | 11930 | 13180 | 14430 | 15680 | 16930 | 18180 | 19430 |
| TOTCOVID00737 | 10681 | 11931 | 13181 | 14431 | 15681 | 16931 | 18181 | 19431 |
| TOTCOVID00738 | 10682 | 11932 | 13182 | 14432 | 15682 | 16932 | 18182 | 19432 |
| TOTCOVID00739 | 10683 | 11933 | 13183 | 14433 | 15683 | 16933 | 18183 | 19433 |
| TOTCOVID00740 | 10684 | 11934 | 13184 | 14434 | 15684 | 16934 | 18184 | 19434 |
| TOTCOVID00741 | 10685 | 11935 | 13185 | 14435 | 15685 | 16935 | 18185 | 19435 |
| TOTCOVID00742 | 10686 | 11936 | 13186 | 14436 | 15686 | 16936 | 18186 | 19436 |
| TOTCOVID00743 | 10687 | 11937 | 13187 | 14437 | 15687 | 16937 | 18187 | 19437 |
| TOTCOVID00744 | 10688 | 11938 | 13188 | 14438 | 15688 | 16938 | 18188 | 19438 |
| TOTCOVID00745 | 10689 | 11939 | 13189 | 14439 | 15689 | 16939 | 18189 | 19439 |
| TOTCOVID00746 | 10690 | 11940 | 13190 | 14440 | 15690 | 16940 | 18190 | 19440 |
| TOTCOVID00747 | 10691 | 11941 | 13191 | 14441 | 15691 | 16941 | 18191 | 19441 |
| TOTCOVID00748 | 10692 | 11942 | 13192 | 14442 | 15692 | 16942 | 18192 | 19442 |
| TOTCOVID00749 | 10693 | 11943 | 13193 | 14443 | 15693 | 16943 | 18193 | 19443 |
| TOTCOVID00750 | 10694 | 11944 | 13194 | 14444 | 15694 | 16944 | 18194 | 19444 |
| TOTCOVID00751 | 10695 | 11945 | 13195 | 14445 | 15695 | 16945 | 18195 | 19445 |
| TOTCOVID00752 | 10696 | 11946 | 13196 | 14446 | 15696 | 16946 | 18196 | 19446 |
| TOTCOVID00753 | 10697 | 11947 | 13197 | 14447 | 15697 | 16947 | 18197 | 19447 |
| TOTCOVID00754 | 10698 | 11948 | 13198 | 14448 | 15698 | 16948 | 18198 | 19448 |
| TOTCOVID00755 | 10699 | 11949 | 13199 | 14449 | 15699 | 16949 | 18199 | 19449 |
| TOTCOVID00756 | 10700 | 11950 | 13200 | 14450 | 15700 | 16950 | 18200 | 19450 |
| TOTCOVID00757 | 10701 | 11951 | 13201 | 14451 | 15701 | 16951 | 18201 | 19451 |
| TOTCOVID00758 | 10702 | 11952 | 13202 | 14452 | 15702 | 16952 | 18202 | 19452 |
| TOTCOVID00759 | 10703 | 11953 | 13203 | 14453 | 15703 | 16953 | 18203 | 19453 |
| TOTCOVID00760 | 10704 | 11954 | 13204 | 14454 | 15704 | 16954 | 18204 | 19454 |
| TOTCOVID00761 | 10705 | 11955 | 13205 | 14455 | 15705 | 16955 | 18205 | 19455 |
| TOTCOVID00762 | 10706 | 11956 | 13206 | 14456 | 15706 | 16956 | 18206 | 19456 |
| TOTCOVID00763 | 10707 | 11957 | 13207 | 14457 | 15707 | 16957 | 18207 | 19457 |
| TOTCOVID00764 | 10708 | 11958 | 13208 | 14458 | 15708 | 16958 | 18208 | 19458 |
| TOTCOVID00765 | 10709 | 11959 | 13209 | 14459 | 15709 | 16959 | 18209 | 19459 |
| TOTCOVID00766 | 10710 | 11960 | 13210 | 14460 | 15710 | 16960 | 18210 | 19460 |
| TOTCOVID00767 | 10711 | 11961 | 13211 | 14461 | 15711 | 16961 | 18211 | 19461 |
| TOTCOVID00768 | 10712 | 11962 | 13212 | 14462 | 15712 | 16962 | 18212 | 19462 |
| TOTCOVID00769 | 10713 | 11963 | 13213 | 14463 | 15713 | 16963 | 18213 | 19463 |
| TOTCOVID00770 | 10714 | 11964 | 13214 | 14464 | 15714 | 16964 | 18214 | 19464 |
| TOTCOVID00771 | 10715 | 11965 | 13215 | 14465 | 15715 | 16965 | 18215 | 19465 |
| TOTCOVID00772 | 10716 | 11966 | 13216 | 14466 | 15716 | 16966 | 18216 | 19466 |
| TOTCOVID00773 | 10717 | 11967 | 13217 | 14467 | 15717 | 16967 | 18217 | 19467 |
| TOTCOVID00774 | 10718 | 11968 | 13218 | 14468 | 15718 | 16968 | 18218 | 19468 |
| TOTCOVID00775 | 10719 | 11969 | 13219 | 14469 | 15719 | 16969 | 18219 | 19469 |
| TOTCOVID00776 | 10720 | 11970 | 13220 | 14470 | 15720 | 16970 | 18220 | 19470 |
| TOTCOVID00777 | 10721 | 11971 | 13221 | 14471 | 15721 | 16971 | 18221 | 19471 |
| TOTCOVID00778 | 10722 | 11972 | 13222 | 14472 | 15722 | 16972 | 18222 | 19472 |
| TOTCOVID00779 | 10723 | 11973 | 13223 | 14473 | 15723 | 16973 | 18223 | 19473 |
| TOTCOVID00780 | 10724 | 11974 | 13224 | 14474 | 15724 | 16974 | 18224 | 19474 |
| TOTCOVID00781 | 10725 | 11975 | 13225 | 14475 | 15725 | 16975 | 18225 | 19475 |
| TOTCOVID00782 | 10726 | 11976 | 13226 | 14476 | 15726 | 16976 | 18226 | 19476 |
| TOTCOVID00783 | 10727 | 11977 | 13227 | 14477 | 15727 | 16977 | 18227 | 19477 |
| TOTCOVID00784 | 10728 | 11978 | 13228 | 14478 | 15728 | 16978 | 18228 | 19478 |
| TOTCOVID00785 | 10729 | 11979 | 13229 | 14479 | 15729 | 16979 | 18229 | 19479 |
| TOTCOVID00786 | 10730 | 11980 | 13230 | 14480 | 15730 | 16980 | 18230 | 19480 |
| TOTCOVID00787 | 10731 | 11981 | 13231 | 14481 | 15731 | 16981 | 18231 | 19481 |
| TOTCOVID00788 | 10732 | 11982 | 13232 | 14482 | 15732 | 16982 | 18232 | 19482 |
| TOTCOVID00789 | 10733 | 11983 | 13233 | 14483 | 15733 | 16983 | 18233 | 19483 |
| TOTCOVID00790 | 10734 | 11984 | 13234 | 14484 | 15734 | 16984 | 18234 | 19484 |
| TOTCOVID00791 | 10735 | 11985 | 13235 | 14485 | 15735 | 16985 | 18235 | 19485 |
| TOTCOVID00792 | 10736 | 11986 | 13236 | 14486 | 15736 | 16986 | 18236 | 19486 |
| TOTCOVID00793 | 10737 | 11987 | 13237 | 14487 | 15737 | 16987 | 18237 | 19487 |
| TOTCOVID00794 | 10738 | 11988 | 13238 | 14488 | 15738 | 16988 | 18238 | 19488 |
| TOTCOVID00795 | 10739 | 11989 | 13239 | 14489 | 15739 | 16989 | 18239 | 19489 |
| TOTCOVID00796 | 10740 | 11990 | 13240 | 14490 | 15740 | 16990 | 18240 | 19490 |
| TOTCOVID00797 | 10741 | 11991 | 13241 | 14491 | 15741 | 16991 | 18241 | 19491 |
| TOTCOVID00798 | 10742 | 11992 | 13242 | 14492 | 15742 | 16992 | 18242 | 19492 |
| TOTCOVID00799 | 10743 | 11993 | 13243 | 14493 | 15743 | 16993 | 18243 | 19493 |
| TOTCOVID00800 | 10744 | 11994 | 13244 | 14494 | 15744 | 16994 | 18244 | 19494 |
| TOTCOVID00801 | 10745 | 11995 | 13245 | 14495 | 15745 | 16995 | 18245 | 19495 |
| TOTCOVID00802 | 10746 | 11996 | 13246 | 14496 | 15746 | 16996 | 18246 | 19496 |
| TOTCOVID00803 | 10747 | 11997 | 13247 | 14497 | 15747 | 16997 | 18247 | 19497 |
| TOTCOVID00804 | 10748 | 11998 | 13248 | 14498 | 15748 | 16998 | 18248 | 19498 |
| TOTCOVID00805 | 10749 | 11999 | 13249 | 14499 | 15749 | 16999 | 18249 | 19499 |
| TOTCOVID00806 | 10750 | 12000 | 13250 | 14500 | 15750 | 17000 | 18250 | 19500 |
| TOTCOVID00807 | 10751 | 12001 | 13251 | 14501 | 15751 | 17001 | 18251 | 19501 |
| TOTCOVID00808 | 10752 | 12002 | 13252 | 14502 | 15752 | 17002 | 18252 | 19502 |
| TOTCOVID00809 | 10753 | 12003 | 13253 | 14503 | 15753 | 17003 | 18253 | 19503 |
| TOTCOVID00810 | 10754 | 12004 | 13254 | 14504 | 15754 | 17004 | 18254 | 19504 |
| TOTCOVID00811 | 10755 | 12005 | 13255 | 14505 | 15755 | 17005 | 18255 | 19505 |
| TOTCOVID00812 | 10756 | 12006 | 13256 | 14506 | 15756 | 17006 | 18256 | 19506 |
| TOTCOVID00813 | 10757 | 12007 | 13257 | 14507 | 15757 | 17007 | 18257 | 19507 |
| TOTCOVID00814 | 10758 | 12008 | 13258 | 14508 | 15758 | 17008 | 18258 | 19508 |
| TOTCOVID00815 | 10759 | 12009 | 13259 | 14509 | 15759 | 17009 | 18259 | 19509 |
| TOTCOVID00816 | 10760 | 12010 | 13260 | 14510 | 15760 | 17010 | 18260 | 19510 |
| TOTCOVID00817 | 10761 | 12011 | 13261 | 14511 | 15761 | 17011 | 18261 | 19511 |
| TOTCOVID00818 | 10762 | 12012 | 13262 | 14512 | 15762 | 17012 | 18262 | 19512 |
| TOTCOVID00819 | 10763 | 12013 | 13263 | 14513 | 15763 | 17013 | 18263 | 19513 |
| TOTCOVID00820 | 10764 | 12014 | 13264 | 14514 | 15764 | 17014 | 18264 | 19514 |
| TOTCOVID00821 | 10765 | 12015 | 13265 | 14515 | 15765 | 17015 | 18265 | 19515 |
| TOTCOVID00822 | 10766 | 12016 | 13266 | 14516 | 15766 | 17016 | 18266 | 19516 |
| TOTCOVID00823 | 10767 | 12017 | 13267 | 14517 | 15767 | 17017 | 18267 | 19517 |
| TOTCOVID00824 | 10768 | 12018 | 13268 | 14518 | 15768 | 17018 | 18268 | 19518 |
| TOTCOVID00825 | 10769 | 12019 | 13269 | 14519 | 15769 | 17019 | 18269 | 19519 |
| TOTCOVID00826 | 10770 | 12020 | 13270 | 14520 | 15770 | 17020 | 18270 | 19520 |
| TOTCOVID00827 | 10771 | 12021 | 13271 | 14521 | 15771 | 17021 | 18271 | 19521 |
| TOTCOVID00828 | 10772 | 12022 | 13272 | 14522 | 15772 | 17022 | 18272 | 19522 |
| TOTCOVID00829 | 10773 | 12023 | 13273 | 14523 | 15773 | 17023 | 18273 | 19523 |
| TOTCOVID00830 | 10774 | 12024 | 13274 | 14524 | 15774 | 17024 | 18274 | 19524 |
| TOTCOVID00831 | 10775 | 12025 | 13275 | 14525 | 15775 | 17025 | 18275 | 19525 |
| TOTCOVID00832 | 10776 | 12026 | 13276 | 14526 | 15776 | 17026 | 18276 | 19526 |
| TOTCOVID00833 | 10777 | 12027 | 13277 | 14527 | 15777 | 17027 | 18277 | 19527 |
| TOTCOVID00834 | 10778 | 12028 | 13278 | 14528 | 15778 | 17028 | 18278 | 19528 |
| TOTCOVID00835 | 10779 | 12029 | 13279 | 14529 | 15779 | 17029 | 18279 | 19529 |
| TOTCOVID00836 | 10780 | 12030 | 13280 | 14530 | 15780 | 17030 | 18280 | 19530 |
| TOTCOVID00837 | 10781 | 12031 | 13281 | 14531 | 15781 | 17031 | 18281 | 19531 |
| TOTCOVID00838 | 10782 | 12032 | 13282 | 14532 | 15782 | 17032 | 18282 | 19532 |
| TOTCOVID00839 | 10783 | 12033 | 13283 | 14533 | 15783 | 17033 | 18283 | 19533 |
| TOTCOVID00840 | 10784 | 12034 | 13284 | 14534 | 15784 | 17034 | 18284 | 19534 |
| TOTCOVID00841 | 10785 | 12035 | 13285 | 14535 | 15785 | 17035 | 18285 | 19535 |
| TOTCOVID00842 | 10786 | 12036 | 13286 | 14536 | 15786 | 17036 | 18286 | 19536 |
| TOTCOVID00843 | 10787 | 12037 | 13287 | 14537 | 15787 | 17037 | 18287 | 19537 |
| TOTCOVID00844 | 10788 | 12038 | 13288 | 14538 | 15788 | 17038 | 18288 | 19538 |
| TOTCOVID00845 | 10789 | 12039 | 13289 | 14539 | 15789 | 17039 | 18289 | 19539 |
| TOTCOVID00846 | 10790 | 12040 | 13290 | 14540 | 15790 | 17040 | 18290 | 19540 |
| TOTCOVID00847 | 10791 | 12041 | 13291 | 14541 | 15791 | 17041 | 18291 | 19541 |
| TOTCOVID00848 | 10792 | 12042 | 13292 | 14542 | 15792 | 17042 | 18292 | 19542 |
| TOTCOVID00849 | 10793 | 12043 | 13293 | 14543 | 15793 | 17043 | 18293 | 19543 |
| TOTCOVID00850 | 10794 | 12044 | 13294 | 14544 | 15794 | 17044 | 18294 | 19544 |
| TOTCOVID00851 | 10795 | 12045 | 13295 | 14545 | 15795 | 17045 | 18295 | 19545 |
| TOTCOVID00852 | 10796 | 12046 | 13296 | 14546 | 15796 | 17046 | 18296 | 19546 |
| TOTCOVID00853 | 10797 | 12047 | 13297 | 14547 | 15797 | 17047 | 18297 | 19547 |
| TOTCOVID00854 | 10798 | 12048 | 13298 | 14548 | 15798 | 17048 | 18298 | 19548 |
| TOTCOVID00855 | 10799 | 12049 | 13299 | 14549 | 15799 | 17049 | 18299 | 19549 |
| TOTCOVID00856 | 10800 | 12050 | 13300 | 14550 | 15800 | 17050 | 18300 | 19550 |
| TOTCOVID00857 | 10801 | 12051 | 13301 | 14551 | 15801 | 17051 | 18301 | 19551 |
| TOTCOVID00858 | 10802 | 12052 | 13302 | 14552 | 15802 | 17052 | 18302 | 19552 |
| TOTCOVID00859 | 10803 | 12053 | 13303 | 14553 | 15803 | 17053 | 18303 | 19553 |
| TOTCOVID00860 | 10804 | 12054 | 13304 | 14554 | 15804 | 17054 | 18304 | 19554 |
| TOTCOVID00861 | 10805 | 12055 | 13305 | 14555 | 15805 | 17055 | 18305 | 19555 |
| TOTCOVID00862 | 10806 | 12056 | 13306 | 14556 | 15806 | 17056 | 18306 | 19556 |
| TOTCOVID00863 | 10807 | 12057 | 13307 | 14557 | 15807 | 17057 | 18307 | 19557 |
| TOTCOVID00864 | 10808 | 12058 | 13308 | 14558 | 15808 | 17058 | 18308 | 19558 |
| TOTCOVID00865 | 10809 | 12059 | 13309 | 14559 | 15809 | 17059 | 18309 | 19559 |
| TOTCOVID00866 | 10810 | 12060 | 13310 | 14560 | 15810 | 17060 | 18310 | 19560 |
| TOTCOVID00867 | 10811 | 12061 | 13311 | 14561 | 15811 | 17061 | 18311 | 19561 |
| TOTCOVID00868 | 10812 | 12062 | 13312 | 14562 | 15812 | 17062 | 18312 | 19562 |
| TOTCOVID00869 | 10813 | 12063 | 13313 | 14563 | 15813 | 17063 | 18313 | 19563 |
| TOTCOVID00870 | 10814 | 12064 | 13314 | 14564 | 15814 | 17064 | 18314 | 19564 |
| TOTCOVID00871 | 10815 | 12065 | 13315 | 14565 | 15815 | 17065 | 18315 | 19565 |
| TOTCOVID00872 | 10816 | 12066 | 13316 | 14566 | 15816 | 17066 | 18316 | 19566 |
| TOTCOVID00873 | 10817 | 12067 | 13317 | 14567 | 15817 | 17067 | 18317 | 19567 |
| TOTCOVID00874 | 10818 | 12068 | 13318 | 14568 | 15818 | 17068 | 18318 | 19568 |
| TOTCOVID00875 | 10819 | 12069 | 13319 | 14569 | 15819 | 17069 | 18319 | 19569 |
| TOTCOVID00876 | 10820 | 12070 | 13320 | 14570 | 15820 | 17070 | 18320 | 19570 |
| TOTCOVID00877 | 10821 | 12071 | 13321 | 14571 | 15821 | 17071 | 18321 | 19571 |
| TOTCOVID00878 | 10822 | 12072 | 13322 | 14572 | 15822 | 17072 | 18322 | 19572 |
| TOTCOVID00879 | 10823 | 12073 | 13323 | 14573 | 15823 | 17073 | 18323 | 19573 |
| TOTCOVID00880 | 10824 | 12074 | 13324 | 14574 | 15824 | 17074 | 18324 | 19574 |
| TOTCOVID00881 | 10825 | 12075 | 13325 | 14575 | 15825 | 17075 | 18325 | 19575 |
| TOTCOVID00882 | 10826 | 12076 | 13326 | 14576 | 15826 | 17076 | 18326 | 19576 |
| TOTCOVID00883 | 10827 | 12077 | 13327 | 14577 | 15827 | 17077 | 18327 | 19577 |
| TOTCOVID00884 | 10828 | 12078 | 13328 | 14578 | 15828 | 17078 | 18328 | 19578 |
| TOTCOVID00885 | 10829 | 12079 | 13329 | 14579 | 15829 | 17079 | 18329 | 19579 |
| TOTCOVID00886 | 10830 | 12080 | 13330 | 14580 | 15830 | 17080 | 18330 | 19580 |
| TOTCOVID00887 | 10831 | 12081 | 13331 | 14581 | 15831 | 17081 | 18331 | 19581 |
| TOTCOVID00888 | 10832 | 12082 | 13332 | 14582 | 15832 | 17082 | 18332 | 19582 |
| TOTCOVID00889 | 10833 | 12083 | 13333 | 14583 | 15833 | 17083 | 18333 | 19583 |
| TOTCOVID00890 | 10834 | 12084 | 13334 | 14584 | 15834 | 17084 | 18334 | 19584 |
| TOTCOVID00891 | 10835 | 12085 | 13335 | 14585 | 15835 | 17085 | 18335 | 19585 |
| TOTCOVID00892 | 10836 | 12086 | 13336 | 14586 | 15836 | 17086 | 18336 | 19586 |
| TOTCOVID00893 | 10837 | 12087 | 13337 | 14587 | 15837 | 17087 | 18337 | 19587 |
| TOTCOVID00894 | 10838 | 12088 | 13338 | 14588 | 15838 | 17088 | 18338 | 19588 |
| TOTCOVID00895 | 10839 | 12089 | 13339 | 14589 | 15839 | 17089 | 18339 | 19589 |
| TOTCOVID00896 | 10840 | 12090 | 13340 | 14590 | 15840 | 17090 | 18340 | 19590 |
| TOTCOVID00897 | 10841 | 12091 | 13341 | 14591 | 15841 | 17091 | 18341 | 19591 |
| TOTCOVID00898 | 10842 | 12092 | 13342 | 14592 | 15842 | 17092 | 18342 | 19592 |
| TOTCOVID00899 | 10843 | 12093 | 13343 | 14593 | 15843 | 17093 | 18343 | 19593 |
| TOTCOVID00900 | 10844 | 12094 | 13344 | 14594 | 15844 | 17094 | 18344 | 19594 |
| TOTCOVID00901 | 10845 | 12095 | 13345 | 14595 | 15845 | 17095 | 18345 | 19595 |
| TOTCOVID00902 | 10846 | 12096 | 13346 | 14596 | 15846 | 17096 | 18346 | 19596 |
| TOTCOVID00903 | 10847 | 12097 | 13347 | 14597 | 15847 | 17097 | 18347 | 19597 |
| TOTCOVID00904 | 10848 | 12098 | 13348 | 14598 | 15848 | 17098 | 18348 | 19598 |
| TOTCOVID00905 | 10849 | 12099 | 13349 | 14599 | 15849 | 17099 | 18349 | 19599 |
| TOTCOVID00906 | 10850 | 12100 | 13350 | 14600 | 15850 | 17100 | 18350 | 19600 |
| TOTCOVID00907 | 10851 | 12101 | 13351 | 14601 | 15851 | 17101 | 18351 | 19601 |
| TOTCOVID00908 | 10852 | 12102 | 13352 | 14602 | 15852 | 17102 | 18352 | 19602 |
| TOTCOVID00909 | 10853 | 12103 | 13353 | 14603 | 15853 | 17103 | 18353 | 19603 |
| TOTCOVID00910 | 10854 | 12104 | 13354 | 14604 | 15854 | 17104 | 18354 | 19604 |
| TOTCOVID00911 | 10855 | 12105 | 13355 | 14605 | 15855 | 17105 | 18355 | 19605 |
| TOTCOVID00912 | 10856 | 12106 | 13356 | 14606 | 15856 | 17106 | 18356 | 19606 |
| TOTCOVID00913 | 10857 | 12107 | 13357 | 14607 | 15857 | 17107 | 18357 | 19607 |
| TOTCOVID00914 | 10858 | 12108 | 13358 | 14608 | 15858 | 17108 | 18358 | 19608 |
| TOTCOVID00915 | 10859 | 12109 | 13359 | 14609 | 15859 | 17109 | 18359 | 19609 |
| TOTCOVID00916 | 10860 | 12110 | 13360 | 14610 | 15860 | 17110 | 18360 | 19610 |
| TOTCOVID00917 | 10861 | 12111 | 13361 | 14611 | 15861 | 17111 | 18361 | 19611 |
| TOTCOVID00918 | 10862 | 12112 | 13362 | 14612 | 15862 | 17112 | 18362 | 19612 |
| TOTCOVID00919 | 10863 | 12113 | 13363 | 14613 | 15863 | 17113 | 18363 | 19613 |
| TOTCOVID00920 | 10864 | 12114 | 13364 | 14614 | 15864 | 17114 | 18364 | 19614 |
| TOTCOVID00921 | 10865 | 12115 | 13365 | 14615 | 15865 | 17115 | 18365 | 19615 |
| TOTCOVID00922 | 10866 | 12116 | 13366 | 14616 | 15866 | 17116 | 18366 | 19616 |
| TOTCOVID00923 | 10867 | 12117 | 13367 | 14617 | 15867 | 17117 | 18367 | 19617 |
| TOTCOVID00924 | 10868 | 12118 | 13368 | 14618 | 15868 | 17118 | 18368 | 19618 |
| TOTCOVID00925 | 10869 | 12119 | 13369 | 14619 | 15869 | 17119 | 18369 | 19619 |
| TOTCOVID00926 | 10870 | 12120 | 13370 | 14620 | 15870 | 17120 | 18370 | 19620 |
| TOTCOVID00927 | 10871 | 12121 | 13371 | 14621 | 15871 | 17121 | 18371 | 19621 |
| TOTCOVID00928 | 10872 | 12122 | 13372 | 14622 | 15872 | 17122 | 18372 | 19622 |
| TOTCOVID00929 | 10873 | 12123 | 13373 | 14623 | 15873 | 17123 | 18373 | 19623 |
| TOTCOVID00930 | 10874 | 12124 | 13374 | 14624 | 15874 | 17124 | 18374 | 19624 |
| TOTCOVID00931 | 10875 | 12125 | 13375 | 14625 | 15875 | 17125 | 18375 | 19625 |
| TOTCOVID00932 | 10876 | 12126 | 13376 | 14626 | 15876 | 17126 | 18376 | 19626 |
| TOTCOVID00933 | 10877 | 12127 | 13377 | 14627 | 15877 | 17127 | 18377 | 19627 |
| TOTCOVID00934 | 10878 | 12128 | 13378 | 14628 | 15878 | 17128 | 18378 | 19628 |
| TOTCOVID00935 | 10879 | 12129 | 13379 | 14629 | 15879 | 17129 | 18379 | 19629 |
| TOTCOVID00936 | 10880 | 12130 | 13380 | 14630 | 15880 | 17130 | 18380 | 19630 |
| TOTCOVID00937 | 10881 | 12131 | 13381 | 14631 | 15881 | 17131 | 18381 | 19631 |
| TOTCOVID00938 | 10882 | 12132 | 13382 | 14632 | 15882 | 17132 | 18382 | 19632 |
| TOTCOVID00939 | 10883 | 12133 | 13383 | 14633 | 15883 | 17133 | 18383 | 19633 |
| TOTCOVID00940 | 10884 | 12134 | 13384 | 14634 | 15884 | 17134 | 18384 | 19634 |
| TOTCOVID00941 | 10885 | 12135 | 13385 | 14635 | 15885 | 17135 | 18385 | 19635 |
| TOTCOVID00942 | 10886 | 12136 | 13386 | 14636 | 15886 | 17136 | 18386 | 19636 |
| TOTCOVID00943 | 10887 | 12137 | 13387 | 14637 | 15887 | 17137 | 18387 | 19637 |
| TOTCOVID00944 | 10888 | 12138 | 13388 | 14638 | 15888 | 17138 | 18388 | 19638 |
| TOTCOVID00945 | 10889 | 12139 | 13389 | 14639 | 15889 | 17139 | 18389 | 19639 |
| TOTCOVID00946 | 10890 | 12140 | 13390 | 14640 | 15890 | 17140 | 18390 | 19640 |
| TOTCOVID00947 | 10891 | 12141 | 13391 | 14641 | 15891 | 17141 | 18391 | 19641 |
| TOTCOVID00948 | 10892 | 12142 | 13392 | 14642 | 15892 | 17142 | 18392 | 19642 |
| TOTCOVID00949 | 10893 | 12143 | 13393 | 14643 | 15893 | 17143 | 18393 | 19643 |
| TOTCOVID00950 | 10894 | 12144 | 13394 | 14644 | 15894 | 17144 | 18394 | 19644 |
| TOTCOVID00951 | 10895 | 12145 | 13395 | 14645 | 15895 | 17145 | 18395 | 19645 |
| TOTCOVID00952 | 10896 | 12146 | 13396 | 14646 | 15896 | 17146 | 18396 | 19646 |
| TOTCOVID00953 | 10897 | 12147 | 13397 | 14647 | 15897 | 17147 | 18397 | 19647 |
| TOTCOVID00954 | 10898 | 12148 | 13398 | 14648 | 15898 | 17148 | 18398 | 19648 |
| TOTCOVID00955 | 10899 | 12149 | 13399 | 14649 | 15899 | 17149 | 18399 | 19649 |
| TOTCOVID00956 | 10900 | 12150 | 13400 | 14650 | 15900 | 17150 | 18400 | 19650 |
| TOTCOVID00957 | 10901 | 12151 | 13401 | 14651 | 15901 | 17151 | 18401 | 19651 |
| TOTCOVID00958 | 10902 | 12152 | 13402 | 14652 | 15902 | 17152 | 18402 | 19652 |
| TOTCOVID00959 | 10903 | 12153 | 13403 | 14653 | 15903 | 17153 | 18403 | 19653 |
| TOTCOVID00960 | 10904 | 12154 | 13404 | 14654 | 15904 | 17154 | 18404 | 19654 |
| TOTCOVID00961 | 10905 | 12155 | 13405 | 14655 | 15905 | 17155 | 18405 | 19655 |
| TOTCOVID00962 | 10906 | 12156 | 13406 | 14656 | 15906 | 17156 | 18406 | 19656 |
| TOTCOVID00963 | 10907 | 12157 | 13407 | 14657 | 15907 | 17157 | 18407 | 19657 |
| TOTCOVID00964 | 10908 | 12158 | 13408 | 14658 | 15908 | 17158 | 18408 | 19658 |
| TOTCOVID00965 | 10909 | 12159 | 13409 | 14659 | 15909 | 17159 | 18409 | 19659 |
| TOTCOVID00966 | 10910 | 12160 | 13410 | 14660 | 15910 | 17160 | 18410 | 19660 |
| TOTCOVID00967 | 10911 | 12161 | 13411 | 14661 | 15911 | 17161 | 18411 | 19661 |
| TOTCOVID00968 | 10912 | 12162 | 13412 | 14662 | 15912 | 17162 | 18412 | 19662 |
| TOTCOVID00969 | 10913 | 12163 | 13413 | 14663 | 15913 | 17163 | 18413 | 19663 |
| TOTCOVID00970 | 10914 | 12164 | 13414 | 14664 | 15914 | 17164 | 18414 | 19664 |
| TOTCOVID00971 | 10915 | 12165 | 13415 | 14665 | 15915 | 17165 | 18415 | 19665 |
| TOTCOVID00972 | 10916 | 12166 | 13416 | 14666 | 15916 | 17166 | 18416 | 19666 |
| TOTCOVID00973 | 10917 | 12167 | 13417 | 14667 | 15917 | 17167 | 18417 | 19667 |
| TOTCOVID00974 | 10918 | 12168 | 13418 | 14668 | 15918 | 17168 | 18418 | 19668 |
| TOTCOVID00975 | 10919 | 12169 | 13419 | 14669 | 15919 | 17169 | 18419 | 19669 |
| TOTCOVID00976 | 10920 | 12170 | 13420 | 14670 | 15920 | 17170 | 18420 | 19670 |
| TOTCOVID00977 | 10921 | 12171 | 13421 | 14671 | 15921 | 17171 | 18421 | 19671 |
| TOTCOVID00978 | 10922 | 12172 | 13422 | 14672 | 15922 | 17172 | 18422 | 19672 |
| TOTCOVID00979 | 10923 | 12173 | 13423 | 14673 | 15923 | 17173 | 18423 | 19673 |
| TOTCOVID00980 | 10924 | 12174 | 13424 | 14674 | 15924 | 17174 | 18424 | 19674 |
| TOTCOVID00981 | 10925 | 12175 | 13425 | 14675 | 15925 | 17175 | 18425 | 19675 |
| TOTCOVID00982 | 10926 | 12176 | 13426 | 14676 | 15926 | 17176 | 18426 | 19676 |
| TOTCOVID00983 | 10927 | 12177 | 13427 | 14677 | 15927 | 17177 | 18427 | 19677 |
| TOTCOVID00984 | 10928 | 12178 | 13428 | 14678 | 15928 | 17178 | 18428 | 19678 |
| TOTCOVID00985 | 10929 | 12179 | 13429 | 14679 | 15929 | 17179 | 18429 | 19679 |
| TOTCOVID00986 | 10930 | 12180 | 13430 | 14680 | 15930 | 17180 | 18430 | 19680 |
| TOTCOVID00987 | 10931 | 12181 | 13431 | 14681 | 15931 | 17181 | 18431 | 19681 |
| TOTCOVID00988 | 10932 | 12182 | 13432 | 14682 | 15932 | 17182 | 18432 | 19682 |
| TOTCOVID00989 | 10933 | 12183 | 13433 | 14683 | 15933 | 17183 | 18433 | 19683 |
| TOTCOVID00990 | 10934 | 12184 | 13434 | 14684 | 15934 | 17184 | 18434 | 19684 |
| TOTCOVID00991 | 10935 | 12185 | 13435 | 14685 | 15935 | 17185 | 18435 | 19685 |
| TOTCOVID00992 | 10936 | 12186 | 13436 | 14686 | 15936 | 17186 | 18436 | 19686 |
| TOTCOVID00993 | 10937 | 12187 | 13437 | 14687 | 15937 | 17187 | 18437 | 19687 |
| TOTCOVID00994 | 10938 | 12188 | 13438 | 14688 | 15938 | 17188 | 18438 | 19688 |
| TOTCOVID00995 | 10939 | 12189 | 13439 | 14689 | 15939 | 17189 | 18439 | 19689 |
| TOTCOVID00996 | 10940 | 12190 | 13440 | 14690 | 15940 | 17190 | 18440 | 19690 |
| TOTCOVID00997 | 10941 | 12191 | 13441 | 14691 | 15941 | 17191 | 18441 | 19691 |
| TOTCOVID00998 | 10942 | 12192 | 13442 | 14692 | 15942 | 17192 | 18442 | 19692 |
| TOTCOVID00999 | 10943 | 12193 | 13443 | 14693 | 15943 | 17193 | 18443 | 19693 |
| TOTCOVID01000 | 10944 | 12194 | 13444 | 14694 | 15944 | 17194 | 18444 | 19694 |
| TOTCOVID01001 | 10945 | 12195 | 13445 | 14695 | 15945 | 17195 | 18445 | 19695 |
| TOTCOVID01002 | 10946 | 12196 | 13446 | 14696 | 15946 | 17196 | 18446 | 19696 |
| TOTCOVID01003 | 10947 | 12197 | 13447 | 14697 | 15947 | 17197 | 18447 | 19697 |
| TOTCOVID01004 | 10948 | 12198 | 13448 | 14698 | 15948 | 17198 | 18448 | 19698 |
| TOTCOVID01005 | 10949 | 12199 | 13449 | 14699 | 15949 | 17199 | 18449 | 19699 |
| TOTCOVID01006 | 10950 | 12200 | 13450 | 14700 | 15950 | 17200 | 18450 | 19700 |
| TOTCOVID01007 | 10951 | 12201 | 13451 | 14701 | 15951 | 17201 | 18451 | 19701 |
| TOTCOVID01008 | 10952 | 12202 | 13452 | 14702 | 15952 | 17202 | 18452 | 19702 |
| TOTCOVID01009 | 10953 | 12203 | 13453 | 14703 | 15953 | 17203 | 18453 | 19703 |
| TOTCOVID01010 | 10954 | 12204 | 13454 | 14704 | 15954 | 17204 | 18454 | 19704 |
| TOTCOVID01011 | 10955 | 12205 | 13455 | 14705 | 15955 | 17205 | 18455 | 19705 |
| TOTCOVID01012 | 10956 | 12206 | 13456 | 14706 | 15956 | 17206 | 18456 | 19706 |
| TOTCOVID01013 | 10957 | 12207 | 13457 | 14707 | 15957 | 17207 | 18457 | 19707 |
| TOTCOVID01014 | 10958 | 12208 | 13458 | 14708 | 15958 | 17208 | 18458 | 19708 |
| TOTCOVID01015 | 10959 | 12209 | 13459 | 14709 | 15959 | 17209 | 18459 | 19709 |
| TOTCOVID01016 | 10960 | 12210 | 13460 | 14710 | 15960 | 17210 | 18460 | 19710 |
| TOTCOVID01017 | 10961 | 12211 | 13461 | 14711 | 15961 | 17211 | 18461 | 19711 |
| TOTCOVID01018 | 10962 | 12212 | 13462 | 14712 | 15962 | 17212 | 18462 | 19712 |
| TOTCOVID01019 | 10963 | 12213 | 13463 | 14713 | 15963 | 17213 | 18463 | 19713 |
| TOTCOVID01020 | 10964 | 12214 | 13464 | 14714 | 15964 | 17214 | 18464 | 19714 |
| TOTCOVID01021 | 10965 | 12215 | 13465 | 14715 | 15965 | 17215 | 18465 | 19715 |
| TOTCOVID01022 | 10966 | 12216 | 13466 | 14716 | 15966 | 17216 | 18466 | 19716 |
| TOTCOVID01023 | 10967 | 12217 | 13467 | 14717 | 15967 | 17217 | 18467 | 19717 |
| TOTCOVID01024 | 10968 | 12218 | 13468 | 14718 | 15968 | 17218 | 18468 | 19718 |
| TOTCOVID01025 | 10969 | 12219 | 13469 | 14719 | 15969 | 17219 | 18469 | 19719 |
| TOTCOVID01026 | 10970 | 12220 | 13470 | 14720 | 15970 | 17220 | 18470 | 19720 |
| TOTCOVID01027 | 10971 | 12221 | 13471 | 14721 | 15971 | 17221 | 18471 | 19721 |
| TOTCOVID01028 | 10972 | 12222 | 13472 | 14722 | 15972 | 17222 | 18472 | 19722 |
| TOTCOVID01029 | 10973 | 12223 | 13473 | 14723 | 15973 | 17223 | 18473 | 19723 |
| TOTCOVID01030 | 10974 | 12224 | 13474 | 14724 | 15974 | 17224 | 18474 | 19724 |
| TOTCOVID01031 | 10975 | 12225 | 13475 | 14725 | 15975 | 17225 | 18475 | 19725 |
| TOTCOVID01032 | 10976 | 12226 | 13476 | 14726 | 15976 | 17226 | 18476 | 19726 |
| TOTCOVID01033 | 10977 | 12227 | 13477 | 14727 | 15977 | 17227 | 18477 | 19727 |
| TOTCOVID01034 | 10978 | 12228 | 13478 | 14728 | 15978 | 17228 | 18478 | 19728 |
| TOTCOVID01035 | 10979 | 12229 | 13479 | 14729 | 15979 | 17229 | 18479 | 19729 |
| TOTCOVID01036 | 10980 | 12230 | 13480 | 14730 | 15980 | 17230 | 18480 | 19730 |
| TOTCOVID01037 | 10981 | 12231 | 13481 | 14731 | 15981 | 17231 | 18481 | 19731 |
| TOTCOVID01038 | 10982 | 12232 | 13482 | 14732 | 15982 | 17232 | 18482 | 19732 |
| TOTCOVID01039 | 10983 | 12233 | 13483 | 14733 | 15983 | 17233 | 18483 | 19733 |
| TOTCOVID01040 | 10984 | 12234 | 13484 | 14734 | 15984 | 17234 | 18484 | 19734 |
| TOTCOVID01041 | 10985 | 12235 | 13485 | 14735 | 15985 | 17235 | 18485 | 19735 |
| TOTCOVID01042 | 10986 | 12236 | 13486 | 14736 | 15986 | 17236 | 18486 | 19736 |
| TOTCOVID01043 | 10987 | 12237 | 13487 | 14737 | 15987 | 17237 | 18487 | 19737 |
| TOTCOVID01044 | 10988 | 12238 | 13488 | 14738 | 15988 | 17238 | 18488 | 19738 |
| TOTCOVID01045 | 10989 | 12239 | 13489 | 14739 | 15989 | 17239 | 18489 | 19739 |
| TOTCOVID01046 | 10990 | 12240 | 13490 | 14740 | 15990 | 17240 | 18490 | 19740 |
| TOTCOVID01047 | 10991 | 12241 | 13491 | 14741 | 15991 | 17241 | 18491 | 19741 |
| TOTCOVID01048 | 10992 | 12242 | 13492 | 14742 | 15992 | 17242 | 18492 | 19742 |
| TOTCOVID01049 | 10993 | 12243 | 13493 | 14743 | 15993 | 17243 | 18493 | 19743 |
| TOTCOVID01050 | 10994 | 12244 | 13494 | 14744 | 15994 | 17244 | 18494 | 19744 |
| TOTCOVID01051 | 10995 | 12245 | 13495 | 14745 | 15995 | 17245 | 18495 | 19745 |
| TOTCOVID01052 | 10996 | 12246 | 13496 | 14746 | 15996 | 17246 | 18496 | 19746 |
| TOTCOVID01053 | 10997 | 12247 | 13497 | 14747 | 15997 | 17247 | 18497 | 19747 |
| TOTCOVID01054 | 10998 | 12248 | 13498 | 14748 | 15998 | 17248 | 18498 | 19748 |
| TOTCOVID01055 | 10999 | 12249 | 13499 | 14749 | 15999 | 17249 | 18499 | 19749 |
| TOTCOVID01056 | 11000 | 12250 | 13500 | 14750 | 16000 | 17250 | 18500 | 19750 |
| TOTCOVID01057 | 11001 | 12251 | 13501 | 14751 | 16001 | 17251 | 18501 | 19751 |
| TOTCOVID01058 | 11002 | 12252 | 13502 | 14752 | 16002 | 17252 | 18502 | 19752 |
| TOTCOVID01059 | 11003 | 12253 | 13503 | 14753 | 16003 | 17253 | 18503 | 19753 |
| TOTCOVID01060 | 11004 | 12254 | 13504 | 14754 | 16004 | 17254 | 18504 | 19754 |
| TOTCOVID01061 | 11005 | 12255 | 13505 | 14755 | 16005 | 17255 | 18505 | 19755 |
| TOTCOVID01062 | 11006 | 12256 | 13506 | 14756 | 16006 | 17256 | 18506 | 19756 |
| TOTCOVID01063 | 11007 | 12257 | 13507 | 14757 | 16007 | 17257 | 18507 | 19757 |
| TOTCOVID01064 | 11008 | 12258 | 13508 | 14758 | 16008 | 17258 | 18508 | 19758 |
| TOTCOVID01065 | 11009 | 12259 | 13509 | 14759 | 16009 | 17259 | 18509 | 19759 |
| TOTCOVID01066 | 11010 | 12260 | 13510 | 14760 | 16010 | 17260 | 18510 | 19760 |
| TOTCOVID01067 | 11011 | 12261 | 13511 | 14761 | 16011 | 17261 | 18511 | 19761 |
| TOTCOVID01068 | 11012 | 12262 | 13512 | 14762 | 16012 | 17262 | 18512 | 19762 |
| TOTCOVID01069 | 11013 | 12263 | 13513 | 14763 | 16013 | 17263 | 18513 | 19763 |
| TOTCOVID01070 | 11014 | 12264 | 13514 | 14764 | 16014 | 17264 | 18514 | 19764 |
| TOTCOVID01071 | 11015 | 12265 | 13515 | 14765 | 16015 | 17265 | 18515 | 19765 |
| TOTCOVID01072 | 11016 | 12266 | 13516 | 14766 | 16016 | 17266 | 18516 | 19766 |
| TOTCOVID01073 | 11017 | 12267 | 13517 | 14767 | 16017 | 17267 | 18517 | 19767 |
| TOTCOVID01074 | 11018 | 12268 | 13518 | 14768 | 16018 | 17268 | 18518 | 19768 |
| TOTCOVID01075 | 11019 | 12269 | 13519 | 14769 | 16019 | 17269 | 18519 | 19769 |
| TOTCOVID01076 | 11020 | 12270 | 13520 | 14770 | 16020 | 17270 | 18520 | 19770 |
| TOTCOVID01077 | 11021 | 12271 | 13521 | 14771 | 16021 | 17271 | 18521 | 19771 |
| TOTCOVID01078 | 11022 | 12272 | 13522 | 14772 | 16022 | 17272 | 18522 | 19772 |
| TOTCOVID01079 | 11023 | 12273 | 13523 | 14773 | 16023 | 17273 | 18523 | 19773 |
| TOTCOVID01080 | 11024 | 12274 | 13524 | 14774 | 16024 | 17274 | 18524 | 19774 |
| TOTCOVID01081 | 11025 | 12275 | 13525 | 14775 | 16025 | 17275 | 18525 | 19775 |
| TOTCOVID01082 | 11026 | 12276 | 13526 | 14776 | 16026 | 17276 | 18526 | 19776 |
| TOTCOVID01083 | 11027 | 12277 | 13527 | 14777 | 16027 | 17277 | 18527 | 19777 |
| TOTCOVID01084 | 11028 | 12278 | 13528 | 14778 | 16028 | 17278 | 18528 | 19778 |
| TOTCOVID01085 | 11029 | 12279 | 13529 | 14779 | 16029 | 17279 | 18529 | 19779 |
| TOTCOVID01086 | 11030 | 12280 | 13530 | 14780 | 16030 | 17280 | 18530 | 19780 |
| TOTCOVID01087 | 11031 | 12281 | 13531 | 14781 | 16031 | 17281 | 18531 | 19781 |
| TOTCOVID01088 | 11032 | 12282 | 13532 | 14782 | 16032 | 17282 | 18532 | 19782 |
| TOTCOVID01089 | 11033 | 12283 | 13533 | 14783 | 16033 | 17283 | 18533 | 19783 |
| TOTCOVID01090 | 11034 | 12284 | 13534 | 14784 | 16034 | 17284 | 18534 | 19784 |
| TOTCOVID01091 | 11035 | 12285 | 13535 | 14785 | 16035 | 17285 | 18535 | 19785 |
| TOTCOVID01092 | 11036 | 12286 | 13536 | 14786 | 16036 | 17286 | 18536 | 19786 |
| TOTCOVID01093 | 11037 | 12287 | 13537 | 14787 | 16037 | 17287 | 18537 | 19787 |
| TOTCOVID01094 | 11038 | 12288 | 13538 | 14788 | 16038 | 17288 | 18538 | 19788 |
| TOTCOVID01095 | 11039 | 12289 | 13539 | 14789 | 16039 | 17289 | 18539 | 19789 |
| TOTCOVID01096 | 11040 | 12290 | 13540 | 14790 | 16040 | 17290 | 18540 | 19790 |
| TOTCOVID01097 | 11041 | 12291 | 13541 | 14791 | 16041 | 17291 | 18541 | 19791 |
| TOTCOVID01098 | 11042 | 12292 | 13542 | 14792 | 16042 | 17292 | 18542 | 19792 |
| TOTCOVID01099 | 11043 | 12293 | 13543 | 14793 | 16043 | 17293 | 18543 | 19793 |
| TOTCOVID01100 | 11044 | 12294 | 13544 | 14794 | 16044 | 17294 | 18544 | 19794 |
| TOTCOVID01101 | 11045 | 12295 | 13545 | 14795 | 16045 | 17295 | 18545 | 19795 |
| TOTCOVID01102 | 11046 | 12296 | 13546 | 14796 | 16046 | 17296 | 18546 | 19796 |
| TOTCOVID01103 | 11047 | 12297 | 13547 | 14797 | 16047 | 17297 | 18547 | 19797 |
| TOTCOVID01104 | 11048 | 12298 | 13548 | 14798 | 16048 | 17298 | 18548 | 19798 |
| TOTCOVID01105 | 11049 | 12299 | 13549 | 14799 | 16049 | 17299 | 18549 | 19799 |
| TOTCOVID01106 | 11050 | 12300 | 13550 | 14800 | 16050 | 17300 | 18550 | 19800 |
| TOTCOVID01107 | 11051 | 12301 | 13551 | 14801 | 16051 | 17301 | 18551 | 19801 |
| TOTCOVID01108 | 11052 | 12302 | 13552 | 14802 | 16052 | 17302 | 18552 | 19802 |
| TOTCOVID01109 | 11053 | 12303 | 13553 | 14803 | 16053 | 17303 | 18553 | 19803 |
| TOTCOVID01110 | 11054 | 12304 | 13554 | 14804 | 16054 | 17304 | 18554 | 19804 |
| TOTCOVID01111 | 11055 | 12305 | 13555 | 14805 | 16055 | 17305 | 18555 | 19805 |
| TOTCOVID01112 | 11056 | 12306 | 13556 | 14806 | 16056 | 17306 | 18556 | 19806 |
| TOTCOVID01113 | 11057 | 12307 | 13557 | 14807 | 16057 | 17307 | 18557 | 19807 |
| TOTCOVID01114 | 11058 | 12308 | 13558 | 14808 | 16058 | 17308 | 18558 | 19808 |
| TOTCOVID01115 | 11059 | 12309 | 13559 | 14809 | 16059 | 17309 | 18559 | 19809 |
| TOTCOVID01116 | 11060 | 12310 | 13560 | 14810 | 16060 | 17310 | 18560 | 19810 |
| TOTCOVID01117 | 11061 | 12311 | 13561 | 14811 | 16061 | 17311 | 18561 | 19811 |
| TOTCOVID01118 | 11062 | 12312 | 13562 | 14812 | 16062 | 17312 | 18562 | 19812 |
| TOTCOVID01119 | 11063 | 12313 | 13563 | 14813 | 16063 | 17313 | 18563 | 19813 |
| TOTCOVID01120 | 11064 | 12314 | 13564 | 14814 | 16064 | 17314 | 18564 | 19814 |
| TOTCOVID01121 | 11065 | 12315 | 13565 | 14815 | 16065 | 17315 | 18565 | 19815 |
| TOTCOVID01122 | 11066 | 12316 | 13566 | 14816 | 16066 | 17316 | 18566 | 19816 |
| TOTCOVID01123 | 11067 | 12317 | 13567 | 14817 | 16067 | 17317 | 18567 | 19817 |
| TOTCOVID01124 | 11068 | 12318 | 13568 | 14818 | 16068 | 17318 | 18568 | 19818 |
| TOTCOVID01125 | 11069 | 12319 | 13569 | 14819 | 16069 | 17319 | 18569 | 19819 |
| TOTCOVID01126 | 11070 | 12320 | 13570 | 14820 | 16070 | 17320 | 18570 | 19820 |
| TOTCOVID01127 | 11071 | 12321 | 13571 | 14821 | 16071 | 17321 | 18571 | 19821 |
| TOTCOVID01128 | 11072 | 12322 | 13572 | 14822 | 16072 | 17322 | 18572 | 19822 |
| TOTCOVID01129 | 11073 | 12323 | 13573 | 14823 | 16073 | 17323 | 18573 | 19823 |
| TOTCOVID01130 | 11074 | 12324 | 13574 | 14824 | 16074 | 17324 | 18574 | 19824 |
| TOTCOVID01131 | 11075 | 12325 | 13575 | 14825 | 16075 | 17325 | 18575 | 19825 |
| TOTCOVID01132 | 11076 | 12326 | 13576 | 14826 | 16076 | 17326 | 18576 | 19826 |
| TOTCOVID01133 | 11077 | 12327 | 13577 | 14827 | 16077 | 17327 | 18577 | 19827 |
| TOTCOVID01134 | 11078 | 12328 | 13578 | 14828 | 16078 | 17328 | 18578 | 19828 |
| TOTCOVID01135 | 11079 | 12329 | 13579 | 14829 | 16079 | 17329 | 18579 | 19829 |
| TOTCOVID01136 | 11080 | 12330 | 13580 | 14830 | 16080 | 17330 | 18580 | 19830 |
| TOTCOVID01137 | 11081 | 12331 | 13581 | 14831 | 16081 | 17331 | 18581 | 19831 |
| TOTCOVID01138 | 11082 | 12332 | 13582 | 14832 | 16082 | 17332 | 18582 | 19832 |
| TOTCOVID01139 | 11083 | 12333 | 13583 | 14833 | 16083 | 17333 | 18583 | 19833 |
| TOTCOVID01140 | 11084 | 12334 | 13584 | 14834 | 16084 | 17334 | 18584 | 19834 |
| TOTCOVID01141 | 11085 | 12335 | 13585 | 14835 | 16085 | 17335 | 18585 | 19835 |
| TOTCOVID01142 | 11086 | 12336 | 13586 | 14836 | 16086 | 17336 | 18586 | 19836 |
| TOTCOVID01143 | 11087 | 12337 | 13587 | 14837 | 16087 | 17337 | 18587 | 19837 |
| TOTCOVID01144 | 11088 | 12338 | 13588 | 14838 | 16088 | 17338 | 18588 | 19838 |
| TOTCOVID01145 | 11089 | 12339 | 13589 | 14839 | 16089 | 17339 | 18589 | 19839 |
| TOTCOVID01146 | 11090 | 12340 | 13590 | 14840 | 16090 | 17340 | 18590 | 19840 |
| TOTCOVID01147 | 11091 | 12341 | 13591 | 14841 | 16091 | 17341 | 18591 | 19841 |
| TOTCOVID01148 | 11092 | 12342 | 13592 | 14842 | 16092 | 17342 | 18592 | 19842 |
| TOTCOVID01149 | 11093 | 12343 | 13593 | 14843 | 16093 | 17343 | 18593 | 19843 |
| TOTCOVID01150 | 11094 | 12344 | 13594 | 14844 | 16094 | 17344 | 18594 | 19844 |
| TOTCOVID01151 | 11095 | 12345 | 13595 | 14845 | 16095 | 17345 | 18595 | 19845 |
| TOTCOVID01152 | 11096 | 12346 | 13596 | 14846 | 16096 | 17346 | 18596 | 19846 |
| TOTCOVID01153 | 11097 | 12347 | 13597 | 14847 | 16097 | 17347 | 18597 | 19847 |
| TOTCOVID01154 | 11098 | 12348 | 13598 | 14848 | 16098 | 17348 | 18598 | 19848 |
| TOTCOVID01155 | 11099 | 12349 | 13599 | 14849 | 16099 | 17349 | 18599 | 19849 |
| TOTCOVID01156 | 11100 | 12350 | 13600 | 14850 | 16100 | 17350 | 18600 | 19850 |
| TOTCOVID01157 | 11101 | 12351 | 13601 | 14851 | 16101 | 17351 | 18601 | 19851 |
| TOTCOVID01158 | 11102 | 12352 | 13602 | 14852 | 16102 | 17352 | 18602 | 19852 |
| TOTCOVID01159 | 11103 | 12353 | 13603 | 14853 | 16103 | 17353 | 18603 | 19853 |
| TOTCOVID01160 | 11104 | 12354 | 13604 | 14854 | 16104 | 17354 | 18604 | 19854 |
| TOTCOVID01161 | 11105 | 12355 | 13605 | 14855 | 16105 | 17355 | 18605 | 19855 |
| TOTCOVID01162 | 11106 | 12356 | 13606 | 14856 | 16106 | 17356 | 18606 | 19856 |
| TOTCOVID01163 | 11107 | 12357 | 13607 | 14857 | 16107 | 17357 | 18607 | 19857 |
| TOTCOVID01164 | 11108 | 12358 | 13608 | 14858 | 16108 | 17358 | 18608 | 19858 |
| TOTCOVID01165 | 11109 | 12359 | 13609 | 14859 | 16109 | 17359 | 18609 | 19859 |
| TOTCOVID01166 | 11110 | 12360 | 13610 | 14860 | 16110 | 17360 | 18610 | 19860 |
| TOTCOVID01167 | 11111 | 12361 | 13611 | 14861 | 16111 | 17361 | 18611 | 19861 |
| TOTCOVID01168 | 11112 | 12362 | 13612 | 14862 | 16112 | 17362 | 18612 | 19862 |
| TOTCOVID01169 | 11113 | 12363 | 13613 | 14863 | 16113 | 17363 | 18613 | 19863 |
| TOTCOVID01170 | 11114 | 12364 | 13614 | 14864 | 16114 | 17364 | 18614 | 19864 |
| TOTCOVID01171 | 11115 | 12365 | 13615 | 14865 | 16115 | 17365 | 18615 | 19865 |
| TOTCOVID01172 | 11116 | 12366 | 13616 | 14866 | 16116 | 17366 | 18616 | 19866 |
| TOTCOVID01173 | 11117 | 12367 | 13617 | 14867 | 16117 | 17367 | 18617 | 19867 |
| TOTCOVID01174 | 11118 | 12368 | 13618 | 14868 | 16118 | 17368 | 18618 | 19868 |
| TOTCOVID01175 | 11119 | 12369 | 13619 | 14869 | 16119 | 17369 | 18619 | 19869 |
| TOTCOVID01176 | 11120 | 12370 | 13620 | 14870 | 16120 | 17370 | 18620 | 19870 |
| TOTCOVID01177 | 11121 | 12371 | 13621 | 14871 | 16121 | 17371 | 18621 | 19871 |
| TOTCOVID01178 | 11122 | 12372 | 13622 | 14872 | 16122 | 17372 | 18622 | 19872 |
| TOTCOVID01179 | 11123 | 12373 | 13623 | 14873 | 16123 | 17373 | 18623 | 19873 |
| TOTCOVID01180 | 11124 | 12374 | 13624 | 14874 | 16124 | 17374 | 18624 | 19874 |
| TOTCOVID01181 | 11125 | 12375 | 13625 | 14875 | 16125 | 17375 | 18625 | 19875 |
| TOTCOVID01182 | 11126 | 12376 | 13626 | 14876 | 16126 | 17376 | 18626 | 19876 |
| TOTCOVID01183 | 11127 | 12377 | 13627 | 14877 | 16127 | 17377 | 18627 | 19877 |
| TOTCOVID01184 | 11128 | 12378 | 13628 | 14878 | 16128 | 17378 | 18628 | 19878 |
| TOTCOVID01185 | 11129 | 12379 | 13629 | 14879 | 16129 | 17379 | 18629 | 19879 |
| TOTCOVID01186 | 11130 | 12380 | 13630 | 14880 | 16130 | 17380 | 18630 | 19880 |
| TOTCOVID01187 | 11131 | 12381 | 13631 | 14881 | 16131 | 17381 | 18631 | 19881 |
| TOTCOVID01188 | 11132 | 12382 | 13632 | 14882 | 16132 | 17382 | 18632 | 19882 |
| TOTCOVID01189 | 11133 | 12383 | 13633 | 14883 | 16133 | 17383 | 18633 | 19883 |
| TOTCOVID01190 | 11134 | 12384 | 13634 | 14884 | 16134 | 17384 | 18634 | 19884 |
| TOTCOVID01191 | 11135 | 12385 | 13635 | 14885 | 16135 | 17385 | 18635 | 19885 |
| TOTCOVID01192 | 11136 | 12386 | 13636 | 14886 | 16136 | 17386 | 18636 | 19886 |
| TOTCOVID01193 | 11137 | 12387 | 13637 | 14887 | 16137 | 17387 | 18637 | 19887 |
| TOTCOVID01194 | 11138 | 12388 | 13638 | 14888 | 16138 | 17388 | 18638 | 19888 |
| TOTCOVID01195 | 11139 | 12389 | 13639 | 14889 | 16139 | 17389 | 18639 | 19889 |
| TOTCOVID01196 | 11140 | 12390 | 13640 | 14890 | 16140 | 17390 | 18640 | 19890 |
| TOTCOVID01197 | 11141 | 12391 | 13641 | 14891 | 16141 | 17391 | 18641 | 19891 |
| TOTCOVID01198 | 11142 | 12392 | 13642 | 14892 | 16142 | 17392 | 18642 | 19892 |
| TOTCOVID01199 | 11143 | 12393 | 13643 | 14893 | 16143 | 17393 | 18643 | 19893 |
| TOTCOVID01200 | 11144 | 12394 | 13644 | 14894 | 16144 | 17394 | 18644 | 19894 |
| TOTCOVID01201 | 11145 | 12395 | 13645 | 14895 | 16145 | 17395 | 18645 | 19895 |
| TOTCOVID01202 | 11146 | 12396 | 13646 | 14896 | 16146 | 17396 | 18646 | 19896 |
| TOTCOVID01203 | 11147 | 12397 | 13647 | 14897 | 16147 | 17397 | 18647 | 19897 |
| TOTCOVID01204 | 11148 | 12398 | 13648 | 14898 | 16148 | 17398 | 18648 | 19898 |
| TOTCOVID01205 | 11149 | 12399 | 13649 | 14899 | 16149 | 17399 | 18649 | 19899 |
| TOTCOVID01206 | 11150 | 12400 | 13650 | 14900 | 16150 | 17400 | 18650 | 19900 |
| TOTCOVID01207 | 11151 | 12401 | 13651 | 14901 | 16151 | 17401 | 18651 | 19901 |
| TOTCOVID01208 | 11152 | 12402 | 13652 | 14902 | 16152 | 17402 | 18652 | 19902 |
| TOTCOVID01209 | 11153 | 12403 | 13653 | 14903 | 16153 | 17403 | 18653 | 19903 |
| TOTCOVID01210 | 11154 | 12404 | 13654 | 14904 | 16154 | 17404 | 18654 | 19904 |
| TOTCOVID01211 | 11155 | 12405 | 13655 | 14905 | 16155 | 17405 | 18655 | 19905 |
| TOTCOVID01212 | 11156 | 12406 | 13656 | 14906 | 16156 | 17406 | 18656 | 19906 |
| TOTCOVID01213 | 11157 | 12407 | 13657 | 14907 | 16157 | 17407 | 18657 | 19907 |
| TOTCOVID01214 | 11158 | 12408 | 13658 | 14908 | 16158 | 17408 | 18658 | 19908 |
| TOTCOVID01215 | 11159 | 12409 | 13659 | 14909 | 16159 | 17409 | 18659 | 19909 |
| TOTCOVID01216 | 11160 | 12410 | 13660 | 14910 | 16160 | 17410 | 18660 | 19910 |
| TOTCOVID01217 | 11161 | 12411 | 13661 | 14911 | 16161 | 17411 | 18661 | 19911 |
| TOTCOVID01218 | 11162 | 12412 | 13662 | 14912 | 16162 | 17412 | 18662 | 19912 |
| TOTCOVID01219 | 11163 | 12413 | 13663 | 14913 | 16163 | 17413 | 18663 | 19913 |
| TOTCOVID01220 | 11164 | 12414 | 13664 | 14914 | 16164 | 17414 | 18664 | 19914 |
| TOTCOVID01221 | 11165 | 12415 | 13665 | 14915 | 16165 | 17415 | 18665 | 19915 |
| TOTCOVID01222 | 11166 | 12416 | 13666 | 14916 | 16166 | 17416 | 18666 | 19916 |
| TOTCOVID01223 | 11167 | 12417 | 13667 | 14917 | 16167 | 17417 | 18667 | 19917 |
| TOTCOVID01224 | 11168 | 12418 | 13668 | 14918 | 16168 | 17418 | 18668 | 19918 |
| TOTCOVID01225 | 11169 | 12419 | 13669 | 14919 | 16169 | 17419 | 18669 | 19919 |
| TOTCOVID01226 | 11170 | 12420 | 13670 | 14920 | 16170 | 17420 | 18670 | 19920 |
| TOTCOVID01227 | 11171 | 12421 | 13671 | 14921 | 16171 | 17421 | 18671 | 19921 |
| TOTCOVID01228 | 11172 | 12422 | 13672 | 14922 | 16172 | 17422 | 18672 | 19922 |
| TOTCOVID01229 | 11173 | 12423 | 13673 | 14923 | 16173 | 17423 | 18673 | 19923 |
| TOTCOVID01230 | 11174 | 12424 | 13674 | 14924 | 16174 | 17424 | 18674 | 19924 |
| TOTCOVID01231 | 11175 | 12425 | 13675 | 14925 | 16175 | 17425 | 18675 | 19925 |
| TOTCOVID01232 | 11176 | 12426 | 13676 | 14926 | 16176 | 17426 | 18676 | 19926 |
| TOTCOVID01233 | 11177 | 12427 | 13677 | 14927 | 16177 | 17427 | 18677 | 19927 |
| TOTCOVID01234 | 11178 | 12428 | 13678 | 14928 | 16178 | 17428 | 18678 | 19928 |
| TOTCOVID01235 | 11179 | 12429 | 13679 | 14929 | 16179 | 17429 | 18679 | 19929 |
| TOTCOVID01236 | 11180 | 12430 | 13680 | 14930 | 16180 | 17430 | 18680 | 19930 |
| TOTCOVID01237 | 11181 | 12431 | 13681 | 14931 | 16181 | 17431 | 18681 | 19931 |
| TOTCOVID01238 | 11182 | 12432 | 13682 | 14932 | 16182 | 17432 | 18682 | 19932 |
| TOTCOVID01239 | 11183 | 12433 | 13683 | 14933 | 16183 | 17433 | 18683 | 19933 |
| TOTCOVID01240 | 11184 | 12434 | 13684 | 14934 | 16184 | 17434 | 18684 | 19934 |
| TOTCOVID01241 | 11185 | 12435 | 13685 | 14935 | 16185 | 17435 | 18685 | 19935 |
| TOTCOVID01242 | 11186 | 12436 | 13686 | 14936 | 16186 | 17436 | 18686 | 19936 |
| TOTCOVID01243 | 11187 | 12437 | 13687 | 14937 | 16187 | 17437 | 18687 | 19937 |
| TOTCOVID01244 | 11188 | 12438 | 13688 | 14938 | 16188 | 17438 | 18688 | 19938 |
| TOTCOVID01245 | 11189 | 12439 | 13689 | 14939 | 16189 | 17439 | 18689 | 19939 |
| TOTCOVID01246 | 11190 | 12440 | 13690 | 14940 | 16190 | 17440 | 18690 | 19940 |
| TOTCOVID01247 | 11191 | 12441 | 13691 | 14941 | 16191 | 17441 | 18691 | 19941 |
| TOTCOVID01248 | 11192 | 12442 | 13692 | 14942 | 16192 | 17442 | 18692 | 19942 |
| TOTCOVID01249 | 11193 | 12443 | 13693 | 14943 | 16193 | 17443 | 18693 | 19943 |
| TOTCOVID01250 | 11194 | 12444 | 13694 | 14944 | 16194 | 17444 | 18694 | 19944 |
| TOTCOVID01251 | 11195 | 12445 | 13695 | 14945 | 16195 | 17445 | 18695 | 19945 |
| TOTCOVID01252 | 11196 | 12446 | 13696 | 14946 | 16196 | 17446 | 18696 | 19946 |
| TOTCOVID01253 | 11197 | 12447 | 13697 | 14947 | 16197 | 17447 | 18697 | 19947 |
| TOTCOVID01254 | 11198 | 12448 | 13698 | 14948 | 16198 | 17448 | 18698 | 19948 |
| TOTCOVID01255 | 11199 | 12449 | 13699 | 14949 | 16199 | 17449 | 18699 | 19949 |
| TOTCOVID01256 | 11200 | 12450 | 13700 | 14950 | 16200 | 17450 | 18700 | 19950 |
| TOTCOVID01257 | 11201 | 12451 | 13701 | 14951 | 16201 | 17451 | 18701 | 19951 |
| TOTCOVID01258 | 11202 | 12452 | 13702 | 14952 | 16202 | 17452 | 18702 | 19952 |
| TOTCOVID01259 | 11203 | 12453 | 13703 | 14953 | 16203 | 17453 | 18703 | 19953 |
| TOTCOVID01260 | 11204 | 12454 | 13704 | 14954 | 16204 | 17454 | 18704 | 19954 |
| TOTCOVID01261 | 11205 | 12455 | 13705 | 14955 | 16205 | 17455 | 18705 | 19955 |
| TOTCOVID01262 | 11206 | 12456 | 13706 | 14956 | 16206 | 17456 | 18706 | 19956 |
| TOTCOVID01263 | 11207 | 12457 | 13707 | 14957 | 16207 | 17457 | 18707 | 19957 |
| TOTCOVID01264 | 11208 | 12458 | 13708 | 14958 | 16208 | 17458 | 18708 | 19958 |
| TOTCOVID01265 | 11209 | 12459 | 13709 | 14959 | 16209 | 17459 | 18709 | 19959 |
| TOTCOVID01266 | 11210 | 12460 | 13710 | 14960 | 16210 | 17460 | 18710 | 19960 |
| TOTCOVID01267 | 11211 | 12461 | 13711 | 14961 | 16211 | 17461 | 18711 | 19961 |
| TOTCOVID01268 | 11212 | 12462 | 13712 | 14962 | 16212 | 17462 | 18712 | 19962 |
| TOTCOVID01269 | 11213 | 12463 | 13713 | 14963 | 16213 | 17463 | 18713 | 19963 |
| TOTCOVID01270 | 11214 | 12464 | 13714 | 14964 | 16214 | 17464 | 18714 | 19964 |
| TOTCOVID01271 | 11215 | 12465 | 13715 | 14965 | 16215 | 17465 | 18715 | 19965 |
| TOTCOVID01272 | 11216 | 12466 | 13716 | 14966 | 16216 | 17466 | 18716 | 19966 |
| TOTCOVID01273 | 11217 | 12467 | 13717 | 14967 | 16217 | 17467 | 18717 | 19967 |
| TOTCOVID01274 | 11218 | 12468 | 13718 | 14968 | 16218 | 17468 | 18718 | 19968 |
| TOTCOVID01275 | 11219 | 12469 | 13719 | 14969 | 16219 | 17469 | 18719 | 19969 |
| TOTCOVID01276 | 11220 | 12470 | 13720 | 14970 | 16220 | 17470 | 18720 | 19970 |
| TOTCOVID01277 | 11221 | 12471 | 13721 | 14971 | 16221 | 17471 | 18721 | 19971 |
| TOTCOVID01278 | 11222 | 12472 | 13722 | 14972 | 16222 | 17472 | 18722 | 19972 |
| TOTCOVID01279 | 11223 | 12473 | 13723 | 14973 | 16223 | 17473 | 18723 | 19973 |
| TOTCOVID01280 | 11224 | 12474 | 13724 | 14974 | 16224 | 17474 | 18724 | 19974 |
| TOTCOVID01281 | 11225 | 12475 | 13725 | 14975 | 16225 | 17475 | 18725 | 19975 |
| TOTCOVID01282 | 11226 | 12476 | 13726 | 14976 | 16226 | 17476 | 18726 | 19976 |
| TOTCOVID01283 | 11227 | 12477 | 13727 | 14977 | 16227 | 17477 | 18727 | 19977 |
| TOTCOVID01284 | 11228 | 12478 | 13728 | 14978 | 16228 | 17478 | 18728 | 19978 |
| TOTCOVID01285 | 11229 | 12479 | 13729 | 14979 | 16229 | 17479 | 18729 | 19979 |
| TOTCOVID01286 | 11230 | 12480 | 13730 | 14980 | 16230 | 17480 | 18730 | 19980 |
| TOTCOVID01287 | 11231 | 12481 | 13731 | 14981 | 16231 | 17481 | 18731 | 19981 |
| TOTCOVID01288 | 11232 | 12482 | 13732 | 14982 | 16232 | 17482 | 18732 | 19982 |
| TOTCOVID01289 | 11233 | 12483 | 13733 | 14983 | 16233 | 17483 | 18733 | 19983 |
| TOTCOVID01290 | 11234 | 12484 | 13734 | 14984 | 16234 | 17484 | 18734 | 19984 |
| TOTCOVID01291 | 11235 | 12485 | 13735 | 14985 | 16235 | 17485 | 18735 | 19985 |
| TOTCOVID01292 | 11236 | 12486 | 13736 | 14986 | 16236 | 17486 | 18736 | 19986 |
| TOTCOVID01293 | 11237 | 12487 | 13737 | 14987 | 16237 | 17487 | 18737 | 19987 |
| TOTCOVID01294 | 11238 | 12488 | 13738 | 14988 | 16238 | 17488 | 18738 | 19988 |
| TOTCOVID01295 | 11239 | 12489 | 13739 | 14989 | 16239 | 17489 | 18739 | 19989 |
| TOTCOVID01296 | 11240 | 12490 | 13740 | 14990 | 16240 | 17490 | 18740 | 19990 |
| TOTCOVID01297 | 11241 | 12491 | 13741 | 14991 | 16241 | 17491 | 18741 | 19991 |
| TOTCOVID01298 | 11242 | 12492 | 13742 | 14992 | 16242 | 17492 | 18742 | 19992 |
| TOTCOVID01299 | 11243 | 12493 | 13743 | 14993 | 16243 | 17493 | 18743 | 19993 |
| TOTCOVID01300 | 11244 | 12494 | 13744 | 14994 | 16244 | 17494 | 18744 | 19994 |
| TOTCOVID01301 | 11245 | 12495 | 13745 | 14995 | 16245 | 17495 | 18745 | 19995 |
| TOTCOVID01302 | 11246 | 12496 | 13746 | 14996 | 16246 | 17496 | 18746 | 19996 |
| TOTCOVID01303 | 11247 | 12497 | 13747 | 14997 | 16247 | 17497 | 18747 | 19997 |
| TOTCOVID01304 | 11248 | 12498 | 13748 | 14998 | 16248 | 17498 | 18748 | 19998 |
| TOTCOVID01305 | 11249 | 12499 | 13749 | 14999 | 16249 | 17499 | 18749 | 19999 |
| TOTCOVID01306 | 11250 | 12500 | 13750 | 15000 | 16250 | 17500 | 18750 | 20000 |

### Example 5: Antibody Neutralization Experiment

[0462] Neutralizing antibodies against SARS-CoV-2 can block the interaction between the SARS-CoV-2 receptor binding domain (RBD) and the ACE2 receptor on target cells, and so have potential to reduce viral replication and lung damage. The following experiment was performed to evaluate the effectiveness of various antibodies of the disclosure for SARS-CoV-2 neutralization. A SARS-CoV-2 pseudovirus neutralization assay kit (Genscript, SC2087A) was used with a known monoclonal antibody directed against SARS-CoV-2 (Regeneron, REGN10933) selected as a positive control. Serial dilutions of positive control and antibody samples were prepared with Opti-MEM® reduced serum medium and 254 of each dilution was transferred to dedicated wells in a 96-well assay plate. 254 of pseudovirus solution was added to each well, mixed thoroughly, and incubated at room temperature for 1 hour to allow for neutralization. During pseudovirus incubation, Opti-HEK293/ACE2 cells were prepared with an adjusted cell density of 6×10⁵ cells/mL. 504 of this suspension was added to each of the wells and the plate was incubated at 37° C. in a 5% CO2 environment for 24 hours. 50 μL of prewarmed fresh DMEM with 10% FBS was then added for another 24-hour period. After 48 hours of infection, the supernatant in the 96-well plate was carefully aspirated and discarded, and 50 μL of fresh-made luciferase detection agent (L00877C) was added. After about 5 minutes, the bioluminescent signal from each well was read using a microplate reader at 560 nm.

[0463] Results for an exemplary antibody of the disclosure (TOTCOVID00425) are displayed in Table 2, below. The units provided indicate relative fluorescence observed for two replicate samples. Lower fluorescence indicates SARS-CoV-2 pseudovirus neutralization. As shown in Table 2, antibody TOTCOVID00425 has neutralizing properties like that of the positive control and therefore is a suitable candidate therapy for the treatment of COVID-19.

TABLE 2
Results of neutralization assay comparing antibody of the disclosure TOTCOVID00425 and positive control REGN-10933.

| | | | | | | | | | | |
|---|---|---|---|---|---|---|---|---|---|---|
| Conc. (mg/mL) | 0.5 | 0.1667 | 0.0556 | 0.0185 | 0.0062 | 0.0021 | 0.0007 | 0.0002 | 8E−05 | 3E−05 |
| TOTCOVID00425 | 1920 | 3120 | 7920 | 2.86E+04 | 1.49E+05 | 4.12E+05 | 6.56E+05 | 6.87E+05 | 7.97E+05 | 1.77E+06 |
| | 7520 | 3280 | 8680 | 3.32E+04 | 1.65E+05 | 4.34E+05 | 8.01E+05 | 1.14E+06 | 1.21E+06 | 1.65E+06 |
| Conc. (mg/mL) | 0.17 | 0.0567 | 0.0189 | 0.0063 | 0.0021 | 0.0007 | 0.0002 | 8E−05 | 3E−05 | 9E−09 |
| REGN 10933 | 440 | 360 | 600 | 360 | 1560 | 2.64E+04 | 2.98E+05 | 9.33E+05 | 1.14E+06 | 1.93E+06 |
| | 720 | 720 | 600 | 400 | 4560 | 4.94E+04 | 2.67E+05 | 1.02E+06 | 1.90E+06 | 2.11E+06 |

[0464] FIGS. 1-8 are charts depicting dose response curves generated from the concentration values and estimated fraction infectivity from the above experiment. The charts include calculated half maximal inhibitory concentrations (IC₅₀) values for various antibodies according to the disclosure, indicating the therapeutic effectiveness of each antibody for the treatment of COVID-19. As shown in FIGS. 1-2, antibody TOTCOVID00425 has an IC₅₀ of 9.60e-04 mg/mL, comparable to the positive control antibody REGN-10933 which has an IC₅₀ of 8.41e-05 mg/mL.

[0465] FIGS. 3A-3B depict dose response curves using additional data for antibody TOTCOVID00425, showing IC₅₀ values of 6.25 nM and 9.92 nM. FIGS. 4A-4B depict dose response curves for antibody TOTCOVID00316, showing IC₅₀ values of 20.9 nM and 112.78 nM. FIGS. 5A-5C depict dose response curves for antibody TOTCOVID00761, showing IC₅₀ values of 105.84 nM, 168.1 nM, and 114.97 nM. FIGS. 6A-6C depict dose response curves for antibody TOTCOVID00540, showing IC₅₀ values of 343 0.57 nM, 373 0.57 nM, and 225.13 nM. FIGS. 7A-7C depict dose response curves for antibody TOTCOVID00347, showing IC₅₀ values of 343.57 nM, 373.57 nM, and 225.13 nM. FIG. 8 depicts a dose response curve for antibody TOTCOVID00124, showing an IC₅₀ value of 67.39 nM.

[0466] The results demonstrate that the antibodies of the disclosure are functionally equivalent to the positive control, indicating their utility for the treatment of a SARS-CoV-2 infection and COVID-19.

### Example 6: Epitope Mapping

[0467] Epitope mapping was performed on various antibodies according to the disclosure to demonstrate their therapeutic utility. Antibody samples were processed using a microarray-based antibody detection assay including full-length proteins and peptides spanning the 51 and S2 subunits of the SARS-CoV-2 spike protein (CDI Labs SARS-CoV-2 Protein Microarray, CDICOV2-001.0).

[0468] Representative spike protein peptides on the array are listed in Table 3, below.

TABLE 3
Representative amino acid sequences, start and
end positions, and SEQ ID NOs for peptide
fragments from the S1 and S2 subunits of SARS-
COV-2 spike protein on a microarray-based
antibody detection assay.

| SEQ | | | | |
|---|---|---|---|---|
| ID | Peptide | Start | Amino acid | End |
| NO. | ID | Position | sequence | Position |
| 20001 | S1-1 | 1 | MFVFLVLLPLVS | 12 |
| 20002 | S1-2 | 7 | LLPLVSSQCVNL | 18 |
| 20003 | S1-3 | 13 | SQCVNLTTRTQL | 24 |
| 20004 | S1-4 | 19 | TTRTQLPPAYTN | 30 |
| 20005 | S1-5 | 25 | PPAYTNSFTRGV | 36 |
| 20006 | S1-6 | 31 | SFTRGVYYPDKV | 42 |
| 20007 | S1-7 | 37 | YYPDKVFRSSVL | 48 |
| 20008 | S1-8 | 43 | FRSSVLHSTQDL | 54 |
| 20009 | S1-9 | 49 | HSTQDLFLPFFS | 60 |
| 20010 | S1-10 | 55 | FLPFFSNVTWFH | 66 |
| 20011 | S1-11 | 61 | NVTWFHAIHVSG | 72 |
| 20012 | S1-12 | 67 | AIHVSGTNGTKR | 78 |
| 20013 | S1-13 | 73 | TNGTKRFDNPVL | 84 |
| 20014 | S1-14 | 7 | FDNPVLPFNDGV | 90 |
| 20015 | S1-15 | 85 | PFNDGVYFASTE | 96 |
| 20016 | S1-16 | 91 | YFASTEKSNIIR | 102 |
| 20017 | S1-17 | 97 | KSNIIRGWIFGT | 108 |
| 20018 | S1-18 | 103 | GWIFGTTLDSKT | 114 |
| 20019 | S1-19 | 109 | TLDSKTQSLLIV | 120 |
| 20020 | S1-20 | 115 | QSLLIVNNATNV | 126 |
| 20021 | S1-21 | 121 | NNATNVVIKVCE | 132 |
| 20022 | S1-22 | 127 | VIKVCEFQFCND | 138 |
| 20023 | S1-23 | 133 | FQFCNDPFLGVY | 144 |
| 20024 | S1-24 | 139 | PFLGVYYHKNNK | 150 |
| 20025 | S1-25 | 145 | YHKNNKSWMESE | 156 |
| 20026 | S1-26 | 151 | SWMESEFRVYSS | 162 |
| 20027 | S1-27 | 157 | FRVYSSANNCTF | 168 |
| 20028 | S1-28 | 163 | ANNCTFEYVSQP | 174 |
| 20029 | S1-29 | 169 | EYVSQPFLMDLE | 180 |
| 20030 | S1-30 | 175 | FLMDLEGKQGNF | 186 |
| 20031 | S1-31 | 181 | GKQGNFKNLREF | 192 |
| 20032 | S1-32 | 187 | KNLREFVFKNID | 198 |
| 20033 | S1-33 | 193 | VFKNIDGYFKIY | 204 |
| 20034 | S1-34 | 199 | GYFKIYSKHTPI | 210 |
| 20035 | S1-35 | 205 | SKHTPINLVRDL | 216 |
| 20036 | S1-36 | 211 | NLVRDLPQGFSA | 222 |
| 20037 | S1-37 | 217 | PQGFSALEPLVD | 228 |
| 20038 | S1-38 | 223 | LEPLVDLPIGIN | 234 |
| 20039 | S1-39 | 229 | LPIGINITRFQT | 240 |
| 20040 | S1-40 | 235 | ITRFQTLLALHR | 246 |
| 20041 | S1-41 | 241 | LLALHRSYLTPG | 252 |
| 20042 | S1-42 | 247 | SYLTPGDSSSGW | 258 |
| 20043 | S1-43 | 253 | DSSSGWTAGAAA | 264 |
| 20044 | S1-44 | 259 | TAGAAAYYVGYL | 270 |
| 20045 | S1-45 | 265 | YYVGYLQPRTFL | 276 |
| 20046 | S1-46 | 271 | QPRTFLLKYNEN | 282 |
| 20047 | S1-47 | 277 | LKYNENGTITDA | 288 |
| 20048 | S1-48 | 283 | GTITDAVDCALD | 294 |
| 20049 | S1-49 | 289 | VDCALDPLSETK | 300 |
| 20050 | S1-50 | 295 | PLSETKCTLKSF | 306 |
| 20051 | S1-51 | 301 | CTLKSFTVEKGI | 312 |
| 20052 | S1-52 | 307 | TVEKGIYQTSNF | 318 |
| 20053 | S1-53 | 313 | YQTSNFRVQPTE | 324 |
| 20054 | S1-54 | 319 | RVQPTESIVRFP | 330 |
| 20055 | S1-55 | 325 | SIVRFPNITNLC | 336 |
| 20056 | S1-56 | 331 | NITNLCPFGEVF | 342 |
| 20057 | S1-57 | 337 | PFGEVFNATRFA | 348 |
| 20058 | S1-58 | 343 | NATRFASVYAWN | 354 |
| 20059 | S1-59 | 349 | SVYAWNRKRISN | 360 |
| 20060 | S1-60 | 355 | RKRISNCVADYS | 366 |
| 20061 | S1-61 | 361 | CVADYSVLYNSA | 372 |
| 20062 | S1-62 | 367 | VLYNSASFSTFK | 378 |
| 20063 | S1-63 | 373 | SFSTFKCYGVSP | 384 |
| 20064 | S1-64 | 379 | CYGVSPTKLNDL | 390 |
| 20065 | S1-65 | 385 | TKLNDLCFTNVY | 396 |
| 20066 | S1-66 | 391 | CFTNVYADSFVI | 402 |
| 20067 | S1-67 | 397 | ADSFVIRGDEVR | 408 |
| 20068 | S1-68 | 403 | RGDEVRQIAPGQ | 414 |
| 20069 | S1-69 | 409 | QIAPGQTGKIAD | 420 |
| 20070 | S1-70 | 415 | TGKIADYNYKLP | 426 |
| 20071 | S1-71 | 421 | YNYKLPDDFTGC | 432 |
| 20072 | S1-72 | 427 | DDFTGCVIAWNS | 438 |
| 20073 | S1-73 | 433 | VIAWNSNNLDSK | 444 |
| 20074 | S1-74 | 439 | NNLDSKVGGNYN | 450 |
| 20075 | S1-75 | 445 | VGGNYNYLYRLF | 456 |
| 20076 | S1-76 | 451 | YLYRLFRKSNLK | 462 |
| 20077 | S1-77 | 457 | RKSNLKPFERDI | 468 |
| 20078 | S1-78 | 463 | PFERDISTEIYQ | 474 |
| 20079 | S1-79 | 469 | STEIYQAGSTPC | 480 |
| 20080 | S1-80 | 475 | AGSTPCNGVEGF | 486 |
| 20081 | S1-81 | 481 | NGVEGFNCYFPL | 492 |
| 20082 | S1-82 | 487 | NCYFPLQSYGFQ | 498 |
| 20083 | S1-83 | 493 | QSYGFQPTNGVG | 504 |
| 20084 | S1-84 | 499 | PTNGVGYQPYRV | 510 |
| 20085 | S1-85 | 505 | YQPYRVVVLSFE | 516 |
| 20086 | S1-86 | 511 | VVLSFELLHAPA | 522 |
| 20087 | S1-87 | 517 | LLHAPATVCGPK | 528 |
| 20088 | S1-88 | 523 | TVCGPKKSTNLV | 534 |
| 20089 | S1-89 | 529 | KSTNLVKNKCVN | 540 |
| 20090 | S1-90 | 535 | KNKCVNFNFNGL | 546 |
| 20091 | S1-91 | 541 | FNFNGLTGTGVL | 552 |
| 20092 | S1-92 | 547 | TGTGVLTESNKK | 558 |
| 20093 | S1-93 | 553 | TESNKKFLPFQQ | 564 |
| 20094 | S1-94 | 559 | FLPFQQFGRDIA | 570 |
| 20095 | S1-95 | 565 | FGRDIADTTDAV | 576 |
| 20096 | S1-96 | 571 | DTTDAVRDPQTL | 582 |
| 20097 | S1-97 | 577 | RDPQTLEILDIT | 588 |
| 20098 | S1-98 | 583 | EILDITPCSFGG | 594 |
| 20099 | S1-99 | 589 | PCSFGGVSVITP | 600 |
| 20100 | S1-100 | 595 | VSVITPGTNTSN | 606 |
| 20101 | S1-101 | 601 | GTNTSNQVAVLY | 612 |
| 20102 | S1-102 | 607 | QVAVLYQDVNCT | 618 |
| 20103 | S1-103 | 613 | QDVNCTEVPVAI | 624 |
| 20104 | S1-104 | 619 | EVPVAIHADQLT | 630 |
| 20105 | S1-105 | 625 | HADQLTPTWRVY | 636 |
| 20106 | S1-106 | 631 | PTWRVYSTGSNV | 642 |
| 20107 | S1-107 | 637 | STGSNVFQTRAG | 648 |
| 20108 | S1-108 | 643 | FQTRAGCLIGAE | 654 |
| 20109 | S1-109 | 649 | CLIGAEHVNNSY | 660 |
| 20110 | S1-110 | 655 | HVNNSYECDIPI | 666 |
| 20111 | S1-111 | 661 | ECDIPIGAGICA | 672 |
| 20112 | S1-112 | 667 | GAGICASYQTQT | 678 |
| 20113 | S1-113 | 673 | SYQTQTNSPRRA | 684 |
| 20114 | S1-114 | 679 | NSPRRARGGGGS | 685 |
| 20115 | S2-1 | 686 | SVASQSIIAYTM | 697 |
| 20116 | S2-2 | 692 | IIAYTMSLGAEN | 703 |
| 20117 | S2-3 | 698 | SLGAENSVAYSN | 709 |
| 20118 | S2-4 | 704 | SVAYSNNSIAIP | 715 |
| 20119 | S2-5 | 710 | NSIAIPTNFTIS | 721 |
| 20120 | S2-6 | 716 | TNFTISVTTEIL | 727 |
| 20121 | S2-7 | 722 | VTTEILPVSMTK | 733 |
| 20122 | S2-8 | 728 | PVSMTKTSVDCT | 739 |
| 20123 | S2-9 | 734 | TSVDCTMYICGD | 745 |
| 20124 | S2-10 | 740 | MYICGDSTECSN | 751 |
| 20125 | S2-11 | 746 | STECSNLLLQYG | 757 |
| 20126 | S2-12 | 752 | LLLQYGSFCTQL | 763 |
| 20127 | S2-13 | 758 | SFCTQLNRALTG | 769 |
| 20128 | S2-14 | 764 | NRALTGIAVEQD | 775 |
| 20129 | S2-15 | 770 | IAVEQDKNTQEV | 781 |
| 20130 | S2-16 | 776 | KNTQEVFAQVKQ | 787 |
| 20131 | S2-17 | 782 | FAQVKQIYKTPP | 793 |
| 20132 | S2-18 | 788 | TYKTPPIKDFGG | 799 |
| 20133 | S2-19 | 794 | IKDFGGFNFSQI | 805 |
| 20134 | S2-20 | 800 | FNFSQILPDPSK | 811 |
| 20135 | S2-21 | 806 | LPDPSKPSKRSF | 817 |
| 20136 | S2-22 | 812 | PSKRSFIEDLLF | 823 |
| 20137 | S2-23 | 818 | IEDLLFNKVTLA | 829 |
| 20138 | S2-24 | 824 | NKVTLADAGFIK | 835 |
| 20139 | S2-25 | 830 | DAGFIKQYGDCL | 841 |
| 20140 | S2-26 | 836 | QYGDCLGDIAAR | 847 |
| 20141 | S2-27 | 842 | GDIAARDLICAQ | 853 |
| 20142 | S2-28 | 848 | DLICAQKFNGLT | 859 |
| 20143 | S2-29 | 854 | KFNGLTVLPPLL | 865 |
| 20144 | S2-30 | 860 | VLPPLLTDEMIA | 871 |
| 20145 | S2-31 | 866 | TDEMIAQYTSAL | 877 |
| 20146 | S2-32 | 872 | QYTSALLAGTIT | 883 |
| 20147 | S2-33 | 878 | LAGTITSGWTFG | 889 |
| 20148 | S2-34 | 884 | SGWTFGAGAALQ | 895 |
| 20149 | S2-35 | 890 | AGAALQIPFAMQ | 901 |
| 20150 | S2-36 | 896 | IPFAMQMAYRFN | 907 |
| 20151 | S2-37 | 902 | MAYRFNGIGVTQ | 913 |
| 20152 | S2-38 | 908 | GIGVTQNVLYEN | 919 |
| 20153 | S2-39 | 914 | NVLYENQKLIAN | 925 |
| 20154 | S2-40 | 920 | QKLIANQFNSAI | 931 |
| 20155 | S2-41 | 926 | QFNSAIGKIQDS | 937 |
| 20156 | S2-42 | 932 | GKIQDSLSSTAS | 943 |
| 20157 | S2-43 | 938 | LSSTASALGKLQ | 949 |
| 20158 | S2-44 | 944 | ALGKLQDVVNQN | 955 |
| 20159 | S2-45 | 950 | DVVNQNAQALNT | 961 |
| 20160 | S2-46 | 956 | AQALNTLVKQLS | 967 |
| 20161 | S2-47 | 962 | LVKQLSSNFGAI | 973 |
| 20162 | S2-48 | 968 | SNFGAISSVLND | 979 |
| 20163 | S2-49 | 974 | SSVLNDILSRLD | 985 |
| 20164 | S2-50 | 980 | ILSRLDKVEAEV | 991 |
| 20165 | S2-51 | 986 | KVEAEVQIDRLI | 997 |
| 20166 | S2-52 | 992 | QIDRLITGRLQS | 1003 |
| 20167 | S2-53 | 998 | TGRLQSLQTYVT | 1009 |
| 20168 | S2-54 | 1004 | LQTYVTQQLIRA | 1015 |
| 20169 | S2-55 | 1010 | QQLIRAAEIRAS | 1021 |
| 20170 | S2-56 | 1016 | AEIRASANLAAT | 1027 |
| 20171 | S2-57 | 1022 | ANLAATKMSECV | 1033 |
| 20172 | S2-58 | 1028 | KMSECVLGQSKR | 1039 |
| 20173 | S2-59 | 1034 | LGQSKRVDFCGK | 1045 |
| 20174 | S2-60 | 1040 | VDFCGKGYHLMS | 1051 |
| 20175 | S2-61 | 1046 | GYHLMSFPQSAP | 1057 |
| 20176 | S2-62 | 1052 | FPQSAPHGVVFL | 1063 |
| 20177 | S2-63 | 1058 | HGVVFLHVTYVP | 1069 |
| 20178 | S2-64 | 1064 | HVTYVPAQEKNF | 1075 |
| 20179 | S2-65 | 1070 | AQEKNFTTAPAI | 1081 |
| 20180 | S2-66 | 1076 | TTAPAICHDGKA | 1087 |
| 20181 | S2-67 | 1082 | CHDGKAHFPREG | 1093 |
| 20182 | S2-68 | 1088 | HFPREGVFVSNG | 1099 |
| 20183 | S2-69 | 1094 | VFVSNGTHWFVT | 1105 |
| 20184 | S2-70 | 1100 | THWFVTQRNFYE | 1111 |
| 20185 | S2-71 | 1106 | QRNFYEPQIITT | 1117 |
| 20186 | S2-72 | 1112 | PQIITTDNTFVS | 1123 |
| 20187 | S2-73 | 1118 | DNTFVSGNCDVV | 1129 |
| 20188 | S2-74 | 1124 | GNCDVVIGIVNN | 1135 |
| 20189 | S2-75 | 1130 | IGIVNNTVYDPL | 1141 |
| 20190 | S2-76 | 1136 | TVYDPLQPELDS | 1147 |
| 20191 | S2-77 | 1142 | QPELDSFKEELD | 1153 |
| 20192 | S2-78 | 1148 | FKEELDKYFKNH | 1159 |
| 20193 | S2-79 | 1154 | KYFKNHTSPDVD | 1165 |
| 20194 | S2-80 | 1160 | TSPDVDLGDISG | 1171 |
| 20195 | S2-81 | 1166 | LGDISGINASVV | 1177 |
| 20196 | S2-82 | 1172 | INASVVNIQKEI | 1183 |
| 20197 | S2-83 | 1178 | NIQKEIDRLNEV | 1189 |
| 20198 | S2-84 | 1184 | DRLNEVAKNLNE | 1195 |
| 20199 | S2-85 | 1190 | AKNLNESLIDLQ | 1201 |
| 20200 | S2-86 | 1196 | SLIDLQELGKYE | 1207 |
| 20201 | S2-87 | 1202 | ELGKYEQYIKWP | 1213 |
| 20202 | S2-88 | 1208 | QYIKWPWYIWLG | 1219 |
| 20203 | S2-89 | 1214 | WYIWLGFIAGLI | 1225 |
| 20204 | S2-90 | 1220 | FIAGLIAIVMVT | 1231 |
| 20205 | S2-91 | 1226 | AIVMVTIMLCCM | 1237 |
| 20206 | S2-92 | 1232 | IMLCCMTSCCSC | 1243 |
| 20207 | S2-93 | 1238 | TSCCSCLKGCCS | 1249 |
| 20208 | S2-94 | 1244 | LKGCCSCGSCCK | 1255 |
| 20209 | S2-95 | 1250 | CGSCCKFDEDDS | 1261 |
| 20210 | S2-96 | 1256 | FDEDDSEPVLKG | 1267 |
| 20211 | S2-97 | 1262 | EPVLKGVKLHYT | 1273 |

[0469] Antibody samples were diluted (1:200) in PBS buffer containing 0.1% Tween 20, 1% BSA, and 0.5 mg/ml total E. coli lysate. 200 uL of diluted samples were then added to each of the wells and incubated at room temperature for 2 hours. Each well was then washed according to manufacturer's instructions to avoid contamination among samples. Secondary antibodies were diluted (according to manufacturer's recommend dilution) in PBS buffer containing 0.1% Tween 20 and 1% BSA and incubated at room temperature for 1 hour. This solution was then added to the wells and incubated for 1 hour with gentle shaking. The array was then washed according to manufacturer's instructions, dried, and scanned using a microarray scanner. Results were then analyzed using GenePix® Pro 7 Microarray Acquisitions and Analysis Software.

[0470] Results of the analysis for antibodies TOTCOVID00316, TOTCOVID00347, TOTCOVID00425, TOTCOVID00450, TOTCOVID00761, and a control (Anti-Human IgG) are provided in Tables 4-10, below. In each of Tables 4-10, the top 15 most significant hits are provided. As shown in Tables 4-10, each of the antibodies bound well to the S1 subunit, with peptide S1-61 representing the most likely epitope for antibodies TOTCOVID00316, TOTCOVID00347, TOTCOVID00425, TOTCOVID00450, and TOTCOVID00761. However, antibody TOTCOVID00761 also bound well to S1-45, S1-82, and S1-23, particularly when diluted to a higher concentration (see Tables 8, 9). This suggests that TOTCOVID00761 can be a multi-specific antibody and bind to separate epitopes from TOTCOVID00316, TOTCOVID00347, TOTCOVID00425, and TOTCOVID00450. Accordingly, this indicates that in one embodiment of the compositions, and methods of the present disclosure, antibody TOTCOVID00761 can be combined in a solution with one or more antibodies of the disclosure to target multiple regions of the SARS-CoV-2 spike protein, thereby increasing the efficacy of a therapeutic.

[0471] In conclusion, the inventors have analyzed the binding properties of the antibodies of the disclosure to the SARS-CoV-2 spike protein using the above-described experiment. As shown, the antibodies binds to at least one epitope, with at least one antibody having multi-specific properties.

Tables 4-10: Statistical analysis from microarray-based assay showing binding effectiveness of various antibodies of the disclosure to peptides from the S1 and S2 subunits of the SARS-CoV-2 spike unit protein. Human IgG, ACE2_Fc_0.5, and ACE2_Fc_0.17 are included as positive controls. F635 represents foreground fluorescence and F532 represents the frequency at which light is detected. Relative signal strength is provided as a Z-score.

TABLE 4
Results demonstrating target antigen binding by antibody TOTCOVID00316 (1 ug/mL)
Table 4: Antibody TOTCOVID00316 (1 ug/mL)

| Replicate 1 | | | | | Replicate 2 | | | | |
|---|---|---|---|---|---|---|---|---|---|
| Name | ID | F635 | F532 | Z-Score | Name | ID | F635 | F532 | Z-Score |
| Human IgG | 1G4 | 65535 | 211.7 | 7.52 | Human IgG | 1G4 | 65535 | 163.7 | 7.97 |
| ACE2_Fc_0.5 | 1.00E+07 | 65535 | 233.7 | 7.52 | ACE2_Fc_0.5 | 1.00E+07 | 65452.7 | 167 | 7.96 |
| ACE2_Fc_0.17 | 1H7 | 65535 | 197.7 | 7.52 | ACE2_Fc_0.17 | 1H7 | 60233.7 | 151 | 7.32 |
| S1_0.5 | 1B8 | 64421.7 | 241 | 7.39 | S1_0.5 | 1B8 | 54394 | 155.7 | 6.59 |
| S1_0.17 | 1C8 | 39154.3 | 197 | 4.43 | S1_0.17 | 1C8 | 35055 | 144 | 4.19 |
| S1 | 1H23 | 20538 | 150 | 2.24 | Anti-H-IgG | 1G20 | 23323 | 116 | 2.73 |
| Anti-H-IgG | 1G20 | 19796 | 134.7 | 2.16 | S1 | 1H23 | 16880.7 | 120 | 1.93 |
| S1-61 | 1O4 | 9907.7 | 161.3 | 1 | S1-61 | 1O4 | 9280 | 117 | 0.99 |

TABLE 5
Results demonstrating target antigen binding by antibody TOTCOVID00347 (1 ug/mL)
Table 5: Antibody TOTCOVID00347 (1 ug/mL)

| Replicate 1 | | | | | Replicate 2 | | | | |
|---|---|---|---|---|---|---|---|---|---|
| Name | ID | F635 | F532 | Z-Score | Name | ID | F635 | F532 | Z-Score |
| Human IgG | 1G4 | 65535 | 196.7 | 8.93 | Human IgG | 1G4 | 65535 | 179 | 8.89 |
| ACE2_Fc_0.5 | 1.00E+07 | 65535 | 219.3 | 8.93 | ACE2_Fc_0.5 | 1.00E+07 | 65535 | 160 | 8.89 |
| ACE2_Fc_0.17 | 1H7 | 65535 | 191.7 | 8.93 | ACE2_Fc_0.17 | 1H7 | 65535 | 138 | 8.89 |
| Anti-H-IgG | 1G20 | 22181.7 | 168.7 | 2.93 | Anti-H-IgG | 1G20 | 25767 | 166.3 | 3.41 |
| S1-61 | 1O4 | 16045 | 141 | 2.08 | S1-61 | 1O4 | 16238 | 123 | 2.09 |
| S1_0.5 | 1B8 | 10111.7 | 150.7 | 1.26 | S1_0.5 | 1B8 | 11066.7 | 134 | 1.38 |
| S1_0.17 | 1C8 | 8920.7 | 144.7 | 1.09 | S1_0.17 | 1C8 | 9034.7 | 120.3 | 1.1 |
| S1 | 1H23 | 4108.7 | 162.3 | 0.43 | S1 | 1H23 | 3235.3 | 156.3 | 0.3 |

TABLE 6
Results demonstrating target antigen binding by antibody TOTCOVID00425 (1 ug/mL)
Table 6: Antibody TOTCOVID00425 (1 ug/mL)

| Replicate 1 | | | | | Replicate 2 | | | | |
|---|---|---|---|---|---|---|---|---|---|
| Name | ID | F635 | F532 | Z-Score | Name | ID | F635 | F532 | Z-Score |
| Human IgG | 1G4 | 65535 | 215 | 8.38 | Human IgG | 1G4 | 65535 | 173.3 | 7.95 |
| ACE2_Fc_0.5 | 1.00E+07 | 65535 | 232.7 | 8.38 | ACE2_Fc_0.5 | 1.00E+07 | 65535 | 190.7 | 7.95 |
| ACE2_Fc_0.17 | 1H7 | 65535 | 192.3 | 8.38 | ACE2_Fc_0.17 | 1H7 | 65535 | 162 | 7.95 |
| S1_0.5 | 1B8 | 37755.3 | 168 | 4.76 | S1_0.5 | 1B8 | 48730.3 | 144.7 | 5.87 |
| S1_0.17 | 1C8 | 27634 | 156.3 | 3.45 | S1_0.17 | 1C8 | 35553.7 | 126 | 4.24 |
| Anti-H-IgG | 1G20 | 24947.3 | 162 | 3.1 | Anti-H-IgG | 1G20 | 28519.7 | 135.7 | 3.37 |
| S1 | 1H23 | 6928 | 159.7 | 0.75 | S1 | 1H23 | 9764 | 130 | 1.05 |
| S1-61 | 1O4 | 2761.7 | 144.3 | 0.21 | S1-61 | 1O4 | 2077.7 | 119.7 | 0.1 |

TABLE 7
Results demonstrating target antigen binding by antibody TOTCOVID00450 (1 ug/mL)
Table 7: Antibody TOTCOVID00450 (1 ug/mL)

| Replicate 1 | | | | | Replicate 2 | | | | |
|---|---|---|---|---|---|---|---|---|---|
| Name | ID | F635 | F532 | Z-Score | Name | ID | F635 | F532 | Z-Score |
| Human IgG | 1G4 | 65535 | 225.7 | 8.84 | Human IgG | 1G4 | 65535 | 173.3 | 8.73 |
| ACE2_Fc_0.5 | 1.00E+07 | 65535 | 256.3 | 8.84 | ACE2_Fc_0.5 | 1.00E+07 | 65535 | 206.7 | 8.73 |
| ACE2_Fc_0.17 | 1H7 | 65535 | 218.3 | 8.84 | ACE2_Fc_0.17 | 1H7 | 65535 | 160.3 | 8.73 |
| Anti-H-IgG | 1G20 | 29446.3 | 176.3 | 3.89 | Anti-H-IgG | 1G20 | 28447 | 127.7 | 3.7 |
| S1_0.17 | 1C8 | 14007.3 | 166 | 1.78 | S1_0.5 | 1B8 | 20314 | 136 | 2.6 |
| S1_0.5 | 1B8 | 13808.3 | 184.7 | 1.75 | S1_0.17 | 1C8 | 18819 | 119.7 | 2.4 |
| S1 | 1H23 | 4852.3 | 170 | 0.52 | S1 | 1H23 | 5411 | 127 | 0.58 |
| S1-61 | 1O4 | 959.3 | 160.3 | −0.01 | S1-61 | 1O4 | 3701.3 | 121 | 0.35 |

TABLE 8
Results demonstrating target antigen binding by antibody TOTCOVID00761 (1 ug/mL)
Table 8: Antibody TOTCOVID00761 (1 ug/mL)

| Replicate 1 | | | | | Replicate 2 | | | | |
|---|---|---|---|---|---|---|---|---|---|
| Name | ID | F635 | F532 | Z-Score | Name | ID | F635 | F532 | Z-Score |
| Human IgG | 1G4 | 65535 | 219.7 | 8.75 | Human IgG | 1G4 | 65535 | 169.7 | 8.79 |
| ACE2_Fc_0.5 | 1.00E+07 | 65535 | 248.3 | 8.75 | ACE2_Fc_0.5 | 1.00E+07 | 65535 | 192.3 | 8.79 |
| ACE2_Fc_0.17 | 1H7 | 65535 | 207 | 8.75 | ACE2_Fc_0.17 | 1H7 | 65535 | 155.7 | 8.79 |
| Anti-H-IgG | 1G20 | 39391.3 | 182.7 | 5.2 | Anti-H-IgG | 1G20 | 37940.7 | 143.3 | 5.03 |
| S1-61 | 1O4 | 2243.7 | 173 | 0.16 | S1-45 | 1P4 | 1804.7 | 169.3 | 0.11 |
| S1-45 | 1P4 | 1843.7 | 206 | 0.1 | S1-61 | 1O4 | 1669.7 | 133.7 | 0.09 |
| S1_0.5 | 1B8 | 1238.7 | 172.7 | 0.02 | S1_0.5 | 1B8 | 1251 | 134 | 0.03 |

TABLE 9
Results demonstrate target antigen binding by antibody TOTCOVID00761 (10 ug/mL)
Table 9: Antibody TOTCOVID00761 (10 ug/mL)

| Replicate 1 | | | | | Replicate 2 | | | | |
|---|---|---|---|---|---|---|---|---|---|
| Name | ID | F635 | F532 | Z-Score | Name | ID | F635 | F532 | Z-Score |
| Human IgG | 1G4 | 65535 | 236.3 | 7.28 | Human IgG | 1G4 | 65535 | 189.7 | 7.67 |
| ACE2_Fc_0.5 | 1.00E+07 | 65535 | 260.3 | 7.28 | ACE2_Fc_0.5 | 1.00E+07 | 65535 | 204 | 7.67 |
| ACE2_Fc_0.17 | 1H7 | 65535 | 210.7 | 7.28 | ACE2_Fc_0.17 | 1H7 | 65535 | 172.3 | 7.67 |
| Anti-H-IgG | 1G20 | 64244.7 | 172.3 | 7.13 | Anti-H-IgG | 1G20 | 55913.3 | 130.7 | 6.49 |
| S1-45 | 1P4 | 36227.7 | 196.7 | 3.87 | S1-45 | 1P4 | 31916.3 | 163.7 | 3.57 |
| RdRp_0.5 | 1A5 | 18134 | 190.3 | 1.76 | UBE2D3-His- | 1.00E+06 | 15571.7 | 192 | 1.58 |
| | | | | | biotin | | | | |
| UBE2D3-His- | 1.00E+06 | 18127.3 | 254.7 | 1.76 | NSP7_0.13 | 1A4 | 14432.7 | 211.3 | 1.44 |
| biotin | | | | | | | | | |
| S1-82 | 1J14 | 15226.7 | 171.3 | 1.42 | NSP9_0.25 | 1B3 | 13957.7 | 349.7 | 1.39 |
| NSP7_0.13 | 1A4 | 14377.7 | 264.7 | 1.32 | RdRp_0.5 | 1A5 | 12903.7 | 151.3 | 1.26 |
| NSP1_0.13 | 1B1 | 13128 | 238 | 1.17 | S1-82 | 1J14 | 10363.3 | 127.3 | 0.95 |
| ORF-3b_0.05 | 1H3 | 12776.7 | 209.3 | 1.13 | RdRp_0.17 | 1D5 | 10242.3 | 146.3 | 0.93 |
| NSP9_0.25 | 1B3 | 12688 | 401 | 1.12 | NSP4_0.1 | 1C2 | 9527 | 327.3 | 0.85 |
| NSP4_0.1 | 1C2 | 11066.7 | 405 | 0.93 | NSP14_0.5 | 1A6 | 8726 | 228.3 | 0.75 |
| RdRp_0.17 | 1D5 | 11058.7 | 178 | 0.93 | NSP1_0.13 | 1B1 | 8635 | 184 | 0.74 |
| S1-23 | 1C15 | 9728.7 | 172.3 | 0.78 | NSP8_0.25 | 1C3 | 8482 | 260.7 | 0.72 |

TABLE 10
Results demonstrate target antigen binding by Anti-Hu IgG (Control)
Table 10: Anti-Hu IgG (Control)

| Replicate 1 | | | | | Replicate 2 | | | | |
|---|---|---|---|---|---|---|---|---|---|
| Name | ID | F635 | F532 | Z-Score | Name | ID | F635 | F532 | Z-Score |
| Human IgG | 1G4 | 65535 | 228.7 | 9.27 | Human IgG | 1G4 | 65535 | 187.7 | 9.27 |
| ACE2_Fc_0.5 | 1.00E+07 | 65535 | 267.3 | 9.27 | ACE2_Fc_0.5 | 1.00E+07 | 65535 | 198.3 | 9.27 |
| ACE2_Fc_0.17 | 1H7 | 65535 | 209 | 9.27 | ACE2_Fc_0.17 | 1H7 | 65535 | 163 | 9.27 |
| Anti-H-IgG | 1G20 | 1830 | 151.7 | 0.14 | Anti-H-IgG | 1G20 | 1350 | 132.3 | 0.08 |
| S1_0.5 | 1B8 | 1559 | 150.7 | 0.1 | S1-61 | 1O4 | 1251.7 | 110 | 0.06 |
| S1_0.17 | 1C8 | 1413.7 | 151.7 | 0.08 | S1_0.5 | 1B8 | 1225.3 | 132.3 | 0.06 |
| S1-61 | 1O4 | 859.3 | 144.3 | 0 | S1_0.17 | 1C8 | 752.7 | 124.3 | −0.01 |

[0472] Having described several embodiments of the techniques described herein in detail, various modifications, and improvements will readily occur to those skilled in the art. Such modifications and improvements are intended to be within the spirit and scope of the disclosure. Accordingly, the foregoing description is by way of example only, and is not intended as limiting. The techniques are limited only as defined by the following claims and the equivalents thereto.

What is claimed is:

1. An antibody or antigen-binding fragment thereof comprising at least one of:
(a) a variable heavy chain complementarity-determining region CDR-H1, CDR-H2 and CDR-H3, wherein:
(i) CDR-H1 comprises a reconstructed polypeptide consensus sequence selected from any one of SEQ ID NOs: 10001-11250,
(ii) CDR-H2 comprises a reconstructed polypeptide consensus sequence selected from any one of SEQ ID NOs: 12501-13750, and
(iii) CDR-H3 comprises a reconstructed polypeptide consensus sequence selected from any one of SEQ ID NOs: 15001-16250; and
(b) a variable light chain complementarity-determining region CDR-L1, CDR-L2 and CDR-L3, wherein:
(i) CDR-L1 comprises a reconstructed polypeptide consensus sequence selected from any one of SEQ ID NOs: 11251-12500,
(ii) CDR-L2 comprises a reconstructed polypeptide consensus sequence selected from any one of SEQ ID NOs: 13751-15000, and
(iii) CDR-L3 comprises a reconstructed polypeptide consensus sequence selected from any one of SEQ ID NOs: 16251-17500.

2. An antibody or antigen-binding fragment thereof comprising at least one of:
(a) a variable heavy chain, wherein the variable heavy chain comprises a reconstructed polypeptide consensus sequence having at least 90% sequence identity to an amino acid sequence selected from any one of SEQ ID NOs: 17501-18750; and
(b) a variable light chain, wherein the variable light chain comprises a reconstructed polypeptide consensus sequence having at least 90% sequence identity to an amino acid sequence selected from any one of SEQ ID NOs: 18751-20000.

3. An antibody or antigen-binding fragment thereof that comprises:
(a) a variable heavy chain complementarity-determining region CDR-H1, CDR-H2, and CDR-H3, wherein CDR-H1 comprises a reconstructed polypeptide consensus sequence selected from any one of SEQ ID NOs: 10001-11250, CDR-H2 comprises a reconstructed polypeptide consensus sequence selected from any one of SEQ ID NOs: 12501-13750, and CDR-H3 comprises a reconstructed polypeptide sequence selected from any one of SEQ ID NOs: 15001-16250; and
(b) a variable light chain complementarity-determining region CDR-L1, CDR-L2, and CDR-L3, wherein CDR-L1 comprises a reconstructed polypeptide consensus sequence selected from any one of SEQ ID NOs: 11251-12500, CDR-L2 comprises a reconstructed polypeptide consensus sequence selected from any one of SEQ ID NOs: 13751-15000, and CDR-L3 comprises a reconstructed polypeptide sequence selected from any one of SEQ ID NOs: 16251-17500.

4. An antibody or antigen-binding fragment thereof that comprises a variable heavy chain, wherein the variable heavy chain comprises a reconstructed polypeptide consensus sequence selected from any one of SEQ ID NOs: 17501-18750; and a variable light chain, wherein the variable light chain comprises a reconstructed polypeptide consensus sequence selected from any one of SEQ ID NOs: 18751-20000.

5. An antibody or antigen-binding fragment thereof that comprises a variable heavy chain complementarity-determining region CDR-H1, CDR-H2, and CDR-H3, wherein CDR-H1 comprises a reconstructed polypeptide consensus sequence selected from any one of SEQ ID NOs: 10001-11250, CDR-H2 comprises a reconstructed polypeptide consensus sequence selected from any one of SEQ ID NOs: 12501-13750, and CDR-H3 comprises a reconstructed polypeptide sequence selected from any one of SEQ ID NOs: 15001-16250.

6. An antibody or antigen-binding fragment thereof that comprises a variable light chain complementarity-determining region CDR-L1, CDR-L2, and CDR-L3, wherein CDR-L1 comprises a reconstructed polypeptide consensus sequence selected from any one of SEQ ID NOs: 11251-12500, CDR-L2 comprises a reconstructed polypeptide consensus sequence selected from any one of SEQ ID NOs: 13751-15000, and CDR-L3 comprises a reconstructed polypeptide sequence selected from any one of SEQ ID NOs: 16251-17500.

7. An antibody or antigen-binding fragment thereof that comprises:
a variable heavy chain complementarity-determining region CDR-H1, CDR-H2, and CDR-H3, wherein CDR-H1 comprises a reconstructed polypeptide consensus sequence selected from any one of SEQ ID NOs: 10001-11250, CDR-H2 comprises a reconstructed polypeptide consensus sequence selected from any one of SEQ ID NOs: 12501-13750, and CDR-H3 comprises a reconstructed polypeptide sequence selected from any one of SEQ ID NOs: 15001-16250; and
a variable light chain complementarity-determining region CDR-L1, CDR-L2, and CDR-L3, wherein CDR-L1 comprises a reconstructed polypeptide consensus sequence selected from any one of SEQ ID NOs: 11251-12500, CDR-L2 comprises a reconstructed polypeptide consensus sequence selected from any one of SEQ ID NOs: 13751-15000, and CDR-L3 comprises a reconstructed polypeptide sequence selected from any one of SEQ ID NOs: 16251-17500.

8. An antibody or antigen-binding fragment thereof that comprises a variable heavy chain, wherein the variable heavy chain comprises a reconstructed polypeptide consensus sequence selected from any one of SEQ ID NOS: 17501-18750.

9. An antibody or antigen-binding fragment thereof that comprises a variable light chain, wherein the variable light chain comprises a reconstructed polypeptide consensus sequence selected from any of SEQ ID NOS: 18751-20000.

10. An antibody or antigen-binding fragment thereof that comprises:
(a) a variable heavy chain, wherein the variable heavy chain comprises a reconstructed polypeptide consensus sequence selected from any one of SEQ ID NOS: 17501-18750; and
(b) an antibody or antigen-binding fragment thereof that comprises a variable light chain, wherein the variable light chain comprises a reconstructed polypeptide consensus sequence selected from any of SEQ ID NOS: 18751-20000.

11. An antibody or antigen-binding fragment thereof that comprises:
(i) a variable heavy chain complementarity-determining region CDR-H1, CDR-H2 and CDR-H3, wherein
(a) the CDR-H1 comprises the amino acid sequence of SEQ ID NO: 10369,
(b) the CDR-H2 comprises the amino acid sequence of SEQ ID NO: 12869, and
(c) the CDR-H3 comprises the amino acid sequence of SEQ ID NO: 15369;
(ii) a variable light chain complementarity-determining region CDR-L1, CDR-L2 and CDR-L3, wherein:
(a) CDR-L1 comprises the amino acid sequence of SEQ ID NO: 11619,
(b) CDR-L2 comprises the amino acid sequence of SEQ ID NO: 14119, and
(c) CDR-L3 comprises the amino acid sequence of SEQ ID NO: 16619; or
(iii) the variable heavy chain complementarity-determining region CDR-H1, CDR-H2 and CDR-H3 of (i), and the variable light chain complementarity-determining region CDR-L1, CDR-L2 and CDR-L3 of (ii).

12. An antibody or antigen binding fragment thereof that comprises:
(a) a variable heavy chain that comprises a polypeptide sequence having at least 90% sequence identity to an amino acid sequence of SEQ ID NO: 17869;
(b) a variable light chain that comprises a polypeptide sequence having at least 90% sequence identity to an amino acid sequence of SEQ ID NO: 19119; or
(c) the variable heavy chain of (a), and the variable light chain of (b).

13. An antibody or antigen-binding fragment thereof that comprises:
(i) a variable heavy chain complementarity-determining region CDR-H1, CDR-H2 and CDR-H3, wherein
(a) the CDR-H1 comprises the amino acid sequence of SEQ ID NO: 10260,
(b) the CDR-H2 comprises the amino acid sequence of SEQ ID NO: 12760, and
(c) the CDR-H3 comprises the amino acid sequence of SEQ ID NO: 15260;
(ii) a variable light chain complementarity-determining region CDR-L1, CDR-L2 and CDR-L3, wherein:
(a) the CDR-L1 comprises the amino acid sequence of SEQ ID NO: 11510,
(b) the CDR-L2 comprises the amino acid sequence of SEQ ID NO: 14010, and
(c) the CDR-L3 comprises the amino acid sequence of SEQ ID NO: 16510; or
(iii) the variable heavy chain complementarity-determining region CDR-H1, CDR-H2 and CDR-H3 of (i), and the variable light chain complementarity-determining region CDR-L1, CDR-L2 and CDR-L3 of (ii).

14. An antibody or antigen binding fragment thereof that comprises:
(a) a variable heavy chain that comprises a polypeptide sequence having at least 90% sequence identity to an amino acid sequence of SEQ ID NO: 17760;
(b) a variable light chain that comprises a polypeptide sequence having at least 90% sequence identity to an amino acid sequence of SEQ ID NO: 19010; or
(c) the variable heavy chain of (a), and the variable light chain of (b).

15. An antibody or antigen-binding fragment thereof that comprises:
(i) a variable heavy chain complementarity-determining region CDR-H1, CDR-H2 and CDR-H3, wherein
(a) the CDR-H1 comprises the amino acid sequence of SEQ ID NO: 10705,
(b) the CDR-H2 comprises the amino acid sequence of SEQ ID NO: 13205, and
(c) the CDR-H3 comprises the amino acid sequence of SEQ ID NO: 15705;
(ii) a variable light chain complementarity-determining region CDR-L1, CDR-L2 and CDR-L3, wherein:
(a) the CDR-L1 comprises the amino acid sequence of SEQ ID NO: 11955,
(b) the CDR-L2 comprises the amino acid sequence of SEQ ID NO: 14455, and
(c) the CDR-L3 comprises the amino acid sequence of SEQ ID NO: 16955; or
(iii) the variable heavy chain complementarity-determining region CDR-H1, CDR-H2 and CDR-H3 of (i), and the variable light chain complementarity-determining region CDR-L1, CDR-L2 and CDR-L3 of (ii).

16. An antibody or antigen binding fragment thereof that comprises:
(a) a variable heavy chain that comprises a polypeptide sequence having at least 90% sequence identity to an amino acid sequence of SEQ ID NO: 18205;
(b) a variable light chain that comprises a polypeptide sequence having at least 90% sequence identity to an amino acid sequence of SEQ ID NO: 19455; or
(c) the variable heavy chain of (a), and the variable light chain of (b).

17. An antibody or antigen-binding fragment thereof that comprises:
(i) a variable heavy chain complementarity-determining region CDR-H1, CDR-H2 and CDR-H3, wherein
(a) the CDR-H1 comprises the amino acid sequence of SEQ ID NO: 10484,
(b) the CDR-H2 comprises the amino acid sequence of SEQ ID NO: 12984, and
(c) the CDR-H3 comprises the amino acid sequence of SEQ ID NO: 15484;
(ii) a variable light chain complementarity-determining region CDR-L1, CDR-L2 and CDR-L3, wherein:
(a) the CDR-L1 comprises the amino acid sequence of SEQ ID NO: 11734,
(b) the CDR-L2 comprises the amino acid sequence of SEQ ID NO: 14234, and
(c) the CDR-L3 comprises the amino acid sequence of SEQ ID NO: 16734; or
(iii) the variable heavy chain complementarity-determining region CDR-H1, CDR-H2 and CDR-H3 of (i), and the variable light chain complementarity-determining region CDR-L1, CDR-L2 and CDR-L3 of (ii).

18. An antibody or antigen binding fragment thereof that comprises:
(a) a variable heavy chain that comprises a polypeptide sequence having at least 90% sequence identity to an amino acid sequence of SEQ ID NO: 17984;
(b) a variable light chain that comprises a polypeptide sequence having at least 90% sequence identity to an amino acid sequence of SEQ ID NO: 19234; or
(c) the variable heavy chain of (a), and the variable light chain of (b).

19. An antibody or antigen-binding fragment thereof that comprises:
(i) a variable heavy chain complementarity-determining region CDR-H1, CDR-H2 and CDR-H3, wherein
(a) the CDR-H1 comprises the amino acid sequence of SEQ ID NO: 10291,
(b) the CDR-H2 comprises the amino acid sequence of SEQ ID NO: 12791, and
(c) the CDR-H3 comprises the amino acid sequence of SEQ ID NO: 15291;
(ii) a variable light chain complementarity-determining region CDR-L1, CDR-L2 and CDR-L3, wherein:
(a) the CDR-L1 comprises the amino acid sequence of SEQ ID NO: 11541,
(b) the CDR-L2 comprises the amino acid sequence of SEQ ID NO: 14041, and
(c) the CDR-L3 comprises the amino acid sequence of SEQ ID NO: 16541; or
(iii) the variable heavy chain complementarity-determining region CDR-H1, CDR-H2 and CDR-H3 of (i), and the variable light chain complementarity-determining region CDR-L1, CDR-L2 and CDR-L3 of (ii).

20. An antibody or antigen binding fragment thereof that comprises:
(a) a variable heavy chain that comprises a polypeptide sequence having at least 90% sequence identity to an amino acid sequence of SEQ ID NO: 17791;
(b) a variable light chain that comprises a polypeptide sequence having at least 90% sequence identity to an amino acid sequence of SEQ ID NO: 19041; or
(c) the variable heavy chain of (a), and the variable light chain of (b).

21. An antibody or antigen-binding fragment thereof that comprises:
(i) a variable heavy chain complementarity-determining region CDR-H1, CDR-H2 and CDR-H3, wherein
(a) the CDR-H1 comprises the amino acid sequence of SEQ ID NO: 10114,
(b) the CDR-H2 comprises the amino acid sequence of SEQ ID NO: 12614, and
(c) the CDR-H3 comprises the amino acid sequence of SEQ ID NO: 15114;
(ii) a variable light chain complementarity-determining region CDR-L1, CDR-L2 and CDR-L3, wherein:
(a) the CDR-L1 comprises the amino acid sequence of SEQ ID NO: 11364,
(b) the CDR-L2 comprises the amino acid sequence of SEQ ID NO: 13864, and
(c) the CDR-L3 comprises the amino acid sequence of SEQ ID NO: 16364; or
(iii) the variable heavy chain complementarity-determining region CDR-H1, CDR-H2 and CDR-H3 of (i), and the variable light chain complementarity-determining region CDR-L1, CDR-L2 and CDR-L3 of (ii).

22. An antibody or antigen binding fragment thereof that comprises:
(a) a variable heavy chain that comprises a polypeptide sequence having at least 90% sequence identity to an amino acid sequence of SEQ ID NO: 17614;
(b) a variable light chain that comprises a polypeptide sequence having at least 90% sequence identity to an amino acid sequence of SEQ ID NO: 18864; or
(c) the variable heavy chain of (a), and the variable light chain of (b).

23. An antibody or antigen-binding fragment thereof that comprises:
(i) a variable heavy chain complementarity-determining region CDR-H1, CDR-H2 and CDR-H3, wherein
(a) the CDR-H1 comprises the amino acid sequence of SEQ ID NO: 10394,
(b) the CDR-H2 comprises the amino acid sequence of SEQ ID NO: 12894, and
(c) the CDR-H3 comprises the amino acid sequence of SEQ ID NO: 15394;
(ii) a variable light chain complementarity-determining region CDR-L1, CDR-L2 and CDR-L3, wherein:
(a) the CDR-L1 comprises the amino acid sequence of SEQ ID NO: 11644,
(b) the CDR-L2 comprises the amino acid sequence of SEQ ID NO: 14144, and
(c) the CDR-L3 comprises the amino acid sequence of SEQ ID NO: 16644; or
(iii) the variable heavy chain complementarity-determining region CDR-H1, CDR-H2 and CDR-H3 of (i), and the variable light chain complementarity-determining region CDR-L1, CDR-L2 and CDR-L3 of (ii).

24. An antibody or antigen binding fragment thereof that comprises:
(a) a variable heavy chain that comprises a polypeptide sequence having at least 90% sequence identity to an amino acid sequence of SEQ ID NO: 17894;
(b) a variable light chain that comprises a polypeptide sequence having at least 90% sequence identity to an amino acid sequence of SEQ ID NO: 19144; or
(c) the variable heavy chain of (a), and the variable light chain of (b).

25. The antibody or antigen-binding fragment thereof of any one of claims 1-24, wherein the antibody comprises an IgG, IgA, IgM, or IgE antibody.

26. The antibody or antigen-binding fragment thereof of claim 25, wherein the IgG comprises IgG1, IgG2, IgG3, IgG4, IgGA1, or IgGA2.

27. The antibody or antigen-binding fragment thereof of any one of claims 1-26, wherein the antibody comprises a bispecific antibody, a multispecific antibody, a multivalent antibody, a chimeric antibody, a human antibody, humanized antibody, a monoclonal antibody, a deimmunized antibody, or a combination thereof.

28. The antibody or antigen-binding fragment thereof of any one of claims 1-27, wherein the antigen-binding fragment comprises a Fab, Fab′, Fab′-SH, Fv, scFv, F(ab′)₂, a diabody, a linear antibody, a single domain antibody (sdAb), a camelid V_{H}H domain, or a multi-specific antibody formed from antibody fragments.

29. The antibody or antigen-binding fragment thereof of any one of claims 1-28 wherein the antibody or antigen-binding fragment thereof is recombinant or synthetic.

30. The antibody or antigen-binding fragment thereof of any of claims 1-29, wherein the antibody or antigen-binding fragment thereof further comprise an enzyme, a substrate, cofactor, a fluorescent marker, a chemiluminescent marker, a peptide tag, a magnetic particle, a drug, a toxin, or a combination thereof.

31. The antibody or antigen-binding fragment thereof of any one of claims 1-30, wherein the antibody or antigen-binding fragment thereof binds to a SARS-CoV-2.

32. The antibody or antigen-binding fragment thereof of any one of claims 1-31, wherein the antibody or antigen binding fragment thereof binds a SARS-Cov-2 spike (S) protein, or a homolog thereof, or a variant thereof.

33. The antibody or antigen-binding fragment thereof of claim 32, wherein the antibody or antigen binding fragment thereof binds subunit S1, or a subunit S2 of the SARS-Cov-2 spike (S) protein.

34. The antibody or antigen-binding fragment thereof of claim 33, wherein the antibody or antigen binding fragment thereof binds a receptor binding domain of the subunit S1.

35. The antibody or antigen-binding fragment thereof of any one of claims 1-34, wherein the antibody or antigen-binding fragment thereof inhibits infection from SARS-CoV-2.

36. The antibody or antigen-binding fragment thereof of any one of claims 1-35, wherein the antibody or antigen-binding fragment thereof inhibits binding of a receptor binding domain of a subunit S1 of a SARS-CoV-2 with a receptor on a host cell.

37. The antibody or antigen-binding fragment thereof of any one of claims 1-36, wherein the antibody or antigen-binding fragment thereof inhibits entry of a SARS-CoV-2 in a host cell.

38. The antibody or antigen-binding fragment thereof of any one of claims 1-37, wherein the antibody or antigen-binding fragment is useful for treating COVID-19.

39. A pharmaceutical composition or a medicament that comprises the antibody or antigen-binding fragment thereof of any one of claims 1-38 and a pharmaceutically acceptable carrier, excipient or diluent.

40. The pharmaceutical composition or medicament of claim 39 formulated for administration via a subcutaneous, intravenous, intradermal, intraperitoneal, intramuscular, intracerebroventricular, intracranial, intracelial, or intracerebellar administration route.

41. The pharmaceutical composition or medicament of any one of claims 39-40, in an aqueous or in a lyophilized form.

42. The pharmaceutical composition or medicament of any one of claims 39-41, contained in a delivery device selected from the group consisting of a syringe, a blunt tip syringe, a catheter, and an implantable pump.

43. The pharmaceutical composition or medicament of any one of claims 39-42, comprising an additional therapeutic agent.

44. The pharmaceutical composition or medicament of claim 43, wherein the additional therapeutic agent is a nonsteroidal anti-inflammatory drug, a corticosteroid, a dietary supplement such as an antioxidant, a small molecule, a therapeutic vaccine, an immunomodulator, an angiotensin-converting enzyme [ACE] inhibitor, an angiotensin receptor blockers [ARBs], a HMG-CoA Reductase Inhibitors (Statins), an anti-viral agent, acetaminophen, or an additional anti-SARS-CoV-2 antibody.

45. A method for preventing a SARS-CoV-2 infection or COVID-19 in a subject in need thereof, the method comprising administering to the subject a therapeutically effective amount of either the antibody or antigen binding fragment of any one of claims 1-38, or the pharmaceutical composition of any one of claims 39-44.

46. A method for treating a SARS-CoV-2 infection or COVID-19 in a subject in need thereof, the method comprising administering to the subject,
(a) the antibody or antigen-binding fragment thereof of any one of claims 1-38; or
(b) the pharmaceutical composition or medicament of any one of claims 39-44.

47. The method of any one of claims 45-46, wherein the antibody or antigen-binding fragment thereof binds to the SARS-CoV-2.

48. The method of any one of claims 45-47, wherein the antibody or antigen binding fragment thereof binds a SARS-Cov-2 spike (S) protein, or a homolog thereof, or a variant thereof.

49. The method of claim 48, wherein the antibody or antigen binding fragment thereof binds subunit S1, or a subunit S2 of the SARS-Cov-2 spike (S) protein.

50. The method of claim 49, wherein the antibody or antigen binding fragment thereof binds a receptor binding domain of the subunit S1.

51. The method of any one of claims 45-50, wherein the antibody or antigen-binding fragment thereof inhibits binding of a receptor binding domain of a subunit S1 of the SARS-CoV-2 with a receptor on a host cell.

52. The method of any one of claims 45-51, wherein the antibody or antigen-binding fragment thereof inhibits entry of the SARS-CoV-2 in a host cell.

53. The method of any one of claims 45-52, wherein the antibody or antigen-binding fragment thereof inhibits fusion of the SARS-CoV-2 membrane with a host cell membrane.

54. The method of any one of claims 45-53, wherein the antibody or antigen binding fragment thereof neutralizes the SARS-CoV-2.

55. The method of any one of claims 46-54, wherein administering reduces one or more symptoms associated with a SARS-CoV-2 infection.

56. The method of any one of claims 46-55, wherein the administering reduces viral load in the subject.

57. The method of any one of claims 45-56, wherein the antibody or antigen binding fragment thereof is administered to the subject with an additional therapeutic agent.

58. The method of claim 57, wherein the additional therapeutic agent is a nonsteroidal anti-inflammatory drug, a corticosteroid, a dietary supplement such as an antioxidant, a small molecule, a therapeutic vaccine, an immunomodulator, an angiotensin-converting enzyme [ACE] inhibitor, an angiotensin receptor blockers [ARBs], a HMG-CoA Reductase Inhibitors (Statins), an anti-viral agent, acetaminophen, or an additional anti-SARS-CoV-2 antibody.

59. A hybridoma that produces the antibody or antigen-binding fragment thereof of any one of claims 1-38.

60. A fusion protein that comprises the antibody or antigen-binding fragment thereof of any one of claims 1-38.

61. An immunoconjugate comprising the antibody or the antigen binding fragment thereof of any one of claims 1-38, and a therapeutic agent.

62. An isolated nucleic acid comprising at least one of:
(a) a nucleic acid sequence encoding CDR-H1, wherein the nucleic acid sequence is selected from SEQ ID NOs: 1-1250;
(b) a nucleic acid sequence encoding CDR-L1, wherein the nucleic acid sequence is selected from SEQ ID NOs: 1251-2500;
(c) a nucleic acid sequence encoding CDR-H2, wherein the nucleic acid sequence is selected from SEQ ID NOs: 2501-3750;
(d) a nucleic acid sequence encoding CDR-L2, wherein the nucleic acid sequence is selected from SEQ ID NOs: 3751-5000;
(e) a nucleic acid sequence encoding CDR-H3, wherein the nucleic acid sequence is selected from SEQ ID NOs: 5001-6250; or
(f) a nucleic acid sequence encoding CDR-L3, wherein the nucleic acid sequence is selected from SEQ ID NOs: 6251-7500.

63. An isolated nucleic acid comprising at least one of:
(a) a nucleic acid sequence encoding a heavy chain polypeptide of an antibody, wherein the nucleic acid sequence is selected from any one of SEQ ID NOs: 7501-8750, and
(b) a nucleic acid sequence encoding a light chain polypeptide of an antibody, wherein the nucleic acid sequence is selected from any one of SEQ ID NOs: 8751-10000.

64. An isolated nucleic acid that comprises a reconstructed nucleic acid consensus sequence encoding a heavy chain polypeptide of an antibody, wherein the nucleic acid consensus sequence is selected from any of SEQ ID NOS: 7501-8750.

65. An isolated nucleic acid that comprises a reconstructed nucleic acid consensus sequence encoding a light chain polypeptide of an antibody, wherein the nucleic acid consensus sequence is selected from any of SEQ ID NOS: 8751-10000.

66. An expression vector comprising the isolated nucleic acid molecule of any one of claims 62-65.

67. The expression vector of claim 66, wherein the isolated nucleic acid is operably linked to a regulatory control sequence.

68. A host cell comprising the expression vector of any one of claims 66-67, or the isolated nucleic acid molecule of any one of claims 62-65.

69. The host cell of claim 68, wherein said host cell is a mammalian cell, or a bacterial cell.

70. The host cell of claim 68 or claim 69, wherein said bacterial cell is an Escherichia. coli cell.

71. The host cell of any one of claims 68-70, wherein the expression of the nucleic acid is under control of one or more inducible promoters.

72. A method of diagnosing a subject as being infected with a SARS-Cov-2 virus or suspected of being infected with a SARS-Cov-2 virus, the method comprising contacting a sample obtained from the subject with the antibody or the antigen-binding fragment of any one of claims 1-38; detecting the presence or absence of the antibody or the antigen-binding fragment; and diagnosing the subject as being infected with a SARS-CoV-2 virus when the presence of the antibody or the antigen-binding fragment is detected.

73. The method of claim 72, wherein the sample comprises a nasal swab, a tissue sample, saliva, or blood.

74. The method of any one of claims 72-73, wherein detecting the presence or absence of the antibody or the antigen-binding fragment comprises an enzyme linked immunosorbent assay (ELISA), an immunospot assay, a lateral flow assay, flow cytometry, immunohistochemistry, or a western blot.

75. An immunohistochemical assay comprising;
(a) contacting a sample with the antibody or antigen binding fragment thereof of any one of claims 1-38 under conditions permitting selective binding of the antibody or antigen binding fragment thereof with a SARS-CoV-2, to form an antibody-antigen complex; and
(b) detecting the presence or absence of the antibody-antigen complex by an immunodetection method.

76. The immunohistochemical assay of claim 75, wherein the sample is a nasal swab, a tissue sample, saliva, or blood.

77. The immunohistochemical assay of claim 75 or claim 76, wherein the sample is from a subject suspected to be suffering from a SARS-CoV-2 infection or COVID-19.

78. A method of inhibiting binding of a SARS-CoV-2 with a host cell, or inhibiting entry of a SARS-CoV2 in a host cell, the method comprising contacting the SARS-CoV-2 with the antibody or antigen binding fragment thereof of any one of claims 1-38.

79. The method of claim 78, wherein the antibody or antigen binding fragment thereof binds a SARS-Cov-2 spike (S) protein, or a homolog thereof, or a variant thereof.

80. The method of claim 79, wherein the antibody or antigen binding fragment thereof binds subunit S1, or a subunit S2 of the SARS-Cov-2 spike (S) protein.

81. The method of claim 79, wherein the antibody or antigen binding fragment thereof binds a receptor binding domain of the subunit S1.

82. The method of any one of claims 78-81, wherein the antibody or antigen-binding fragment thereof inhibits binding of a receptor binding domain of a subunit S1 of the SARS-CoV-2 with a receptor on the host cell.

83. The method of any one of claims 78-82, wherein the antibody or antigen-binding fragment thereof inhibits fusion of the SARS-CoV-2 membrane with the host cell membrane.

84. The method of any one of claims 78-83, wherein the antibody or antigen binding fragment thereof neutralizes the SARS-CoV-2.

85. A method of producing an antibody or an antigen binding fragment thereof, the method comprising:
(a) culturing the host cell of any one of claims 68-71, in a medium under conditions permitting expression of a polypeptide encoded by the isolated nucleic acid, and assembling of the antibody or an antigen binding fragment thereof; and
(b) purifying the antibody or antigen binding fragment thereof from the cultured cell or the cell culturing medium.

86. An antibody or antigen-binding fragment thereof comprising at least one of:
(a) a variable heavy chain complementarity-determining region CDR-H1, CDR-H2 and CDR-H3, wherein:
(i) CDR-H1 comprises a polypeptide sequence selected from any one of SEQ ID NOs: 10001-11250,
(ii) CDR-H2 comprises a polypeptide sequence selected from any one of SEQ ID NOs: 12501-13750, and
(iii) CDR-H3 comprises a polypeptide sequence selected from any one of SEQ ID NOs: 15001-16250; and
(b) a variable light chain complementarity-determining region CDR-L1, CDR-L2 and CDR-L3, wherein:
(i) CDR-L1 comprises a polypeptide sequence selected from any one of SEQ ID NOs: 11251-12500,
(ii) CDR-L2 comprises a polypeptide sequence selected from any one of SEQ ID NOs: 13751-15000, and
(iii) CDR-L3 comprises a polypeptide sequence selected from any one of SEQ ID NOs: 16251-17500.

87. An antibody or antigen-binding fragment thereof comprising at least one of:
(c) a variable heavy chain, wherein the variable heavy chain comprises a polypeptide sequence having at least 90% sequence identity to an amino acid sequence selected from any one of SEQ ID NOs: 17501-18750; and
(d) a variable light chain, wherein the variable light chain comprises a polypeptide sequence having at least 90% sequence identity to an amino acid sequence selected from any one of SEQ ID NOs: 18751-20000.

88. The antibody or antigen-binding fragment thereof of any one of claims 86-87, wherein the antibody comprises an IgG, IgA, IgM, or IgE antibody.

89. The antibody or antigen-binding fragment thereof of claim 88, wherein the IgG comprises IgG1, IgG2, IgG3, IgG4, IgGA1, or IgGA2.

90. The antibody or antigen-binding fragment thereof of any of claims 86-89, wherein the antibody comprises a bispecific antibody, a multispecific antibody, a multivalent antibody, a chimeric antibody, a human antibody, humanized antibody, a monoclonal antibody, a deimmunized antibody, or a combination thereof.

91. The antibody or antigen-binding fragment thereof of any one of claims 86-90, wherein the antigen-binding fragment comprises a Fab, Fab′, Fab′-SH, Fv, scFv, F(ab′)2, a diabody, a linear antibody, a single domain antibody (sdAb), a camelid V_{H}H domain, or a multi-specific antibody formed from antibody fragments.

92. The antibody or antigen-binding fragment thereof of any one of claims 86-91, wherein the antibody or antigen-binding fragment thereof is recombinant or synthetic.

93. The antibody or antigen-binding fragment thereof of any one of claims 86-92, wherein the antibody or antigen-binding fragment binds SARS-CoV-2, the virus that causes COVID-19.

94. A hybridoma that produces the antibody or antigen-binding fragment thereof of any one of claims 86-93.

95. A pharmaceutical composition or a medicament that comprises the antibody or antigen-binding fragment thereof of any one of claims 86-94, and a pharmaceutically acceptable carrier, excipient or diluent.

96. The pharmaceutical composition or medicament of claim 95, formulated for administration via a subcutaneous, intravenous, intradermal, intraperitoneal, intramuscular, intracerebroventricular, intracranial, intracelial, or intracerebellar administration route.

97. The pharmaceutical composition or medicament of any one of claims 95-96, in an aqueous or in a lyophilized form.

98. The pharmaceutical composition or medicament of any one of claims 95-97, contained in a delivery device selected from the group consisting of a syringe, a blunt tip syringe, a catheter, and an implantable pump.

99. A method for treating or preventing a SARS-CoV2 infection or a COVID-19 in a subject tin need thereof, the method comprising administering to the subject the antibody or antigen-binding fragment thereof of any one of claims 86-93, or the pharmaceutical composition or medicament of any one of claims 95-98.

100. Use of the antibody or antigen binding fragment of any one of claims 1-38, and claims 86-93 for treatment or prevention of a SARS-CoV-2 infection or COVID-19.

The application's sequence listing, which the Patent Office published only in electronic form, follows.

SEQUENCE LISTING (20211 sequences)

SEQ ID NO: 1 - DNA, 24 bp, Artificial Sequence
  Synthetic polynucleotide encoding artificial human antibody CDR-H1 region
ggattcaccttcactacttactgg

SEQ ID NO: 2 - DNA, 30 bp, Artificial Sequence
  Synthetic polynucleotide encoding artificial human antibody CDR-H1 region
gggttctcactcagcaatcgtagaatgggt

SEQ ID NO: 3 - DNA, 30 bp, Artificial Sequence; identical to SEQ ID NO: 2
  Synthetic polynucleotide encoding artificial human antibody CDR-H1 region

SEQ ID NO: 4 - DNA, 30 bp, Artificial Sequence; identical to SEQ ID NO: 2
  Synthetic polynucleotide encoding artificial human antibody CDR-H1 region

SEQ ID NO: 5 - DNA, 30 bp, Artificial Sequence; identical to SEQ ID NO: 2
  Synthetic polynucleotide encoding artificial human antibody CDR-H1 region

SEQ ID NO: 6 - DNA, 30 bp, Artificial Sequence; identical to SEQ ID NO: 2
  Synthetic polynucleotide encoding artificial human antibody CDR-H1 region

SEQ ID NO: 7 - DNA, 30 bp, Artificial Sequence; identical to SEQ ID NO: 2
  Synthetic polynucleotide encoding artificial human antibody CDR-H1 region

SEQ ID NO: 8 - DNA, 24 bp, Artificial Sequence
  Synthetic polynucleotide encoding artificial human antibody CDR-H1 region
ggattcaccttcagtagctatagc

SEQ ID NO: 9 - DNA, 24 bp, Artificial Sequence
  Synthetic polynucleotide encoding artificial human antibody CDR-H1 region
ggattcaccttcagtagctatagc

SEQ ID NO: 10 - DNA, 30 bp, Artificial Sequence
  Synthetic polynucleotide encoding artificial human antibody CDR-H1 region
ggtggctccctcagcagtagtagttactac

SEQ ID NO: 11 - DNA, 24 bp, Artificial Sequence
  Synthetic polynucleotide encoding artificial human antibody CDR-H1 region
gagttcaccgtcagtagcaattac

SEQ ID NO: 12 - DNA, 24 bp, Artificial Sequence
  Synthetic polynucleotide encoding artificial human antibody CDR-H1 region
ggattcacctttagcagctatgcc

SEQ ID NO: 13 - DNA, 24 bp, Artificial Sequence
  Synthetic polynucleotide encoding artificial human antibody CDR-H1 region
ggattcacctttagcagctatgcc

SEQ ID NO: 14 - DNA, 27 bp, Artificial Sequence
  Synthetic polynucleotide encoding artificial human antibody CDR-H1 region
ggtggctccatcagcagtagtaactgg

SEQ ID NO: 15 - DNA, 30 bp, Artificial Sequence
  Synthetic polynucleotide encoding artificial human antibody CDR-H1 region
gggttctcactcagcactagtggagtgggt

SEQ ID NO: 16 - DNA, 24 bp, Artificial Sequence
  Synthetic polynucleotide encoding artificial human antibody CDR-H1 region
ggattcgccttcaataattttggc

SEQ ID NO: 17 - DNA, 24 bp, Artificial Sequence
  Synthetic polynucleotide encoding artificial human antibody CDR-H1 region
ggatacaccttcaccggtcactat

SEQ ID NO: 18 - DNA, 24 bp, Artificial Sequence
  Synthetic polynucleotide encoding artificial human antibody CDR-H1 region
ggatacaccttcactagctatgct

SEQ ID NO: 19 - DNA, 24 bp, Artificial Sequence
  Synthetic polynucleotide encoding artificial human antibody CDR-H1 region
ggatacaccttcaccgactacttt

SEQ ID NO: 20 - DNA, 24 bp, Artificial Sequence
  Synthetic polynucleotide encoding artificial human antibody CDR-H1 region
ggattcatttttgatgatcatggc

SEQ ID NO: 21 - DNA, 24 bp, Artificial Sequence
  Synthetic polynucleotide encoding artificial human antibody CDR-H1 region
ggaggcaccttcagcggctttgct

SEQ ID NO: 22 - DNA, 24 bp, Artificial Sequence
  Synthetic polynucleotide encoding artificial human antibody CDR-H1 region
ggattcagtttcagtaactataat

SEQ ID NO: 23 - DNA, 24 bp, Artificial Sequence
  Synthetic polynucleotide encoding artificial human antibody CDR-H1 region
ggatacaccctcactgaattatcc

SEQ ID NO: 24 - DNA, 24 bp, Artificial Sequence
  Synthetic polynucleotide encoding artificial human antibody CDR-H1 region
ggatacaccttcactagctatgct

SEQ ID NO: 25 - DNA, 24 bp, Artificial Sequence
  Synthetic polynucleotide encoding artificial human antibody CDR-H1 region
ggatacaccctcactgaattatcc

SEQ ID NO: 26 - DNA, 24 bp, Artificial Sequence
  Synthetic polynucleotide encoding artificial human antibody CDR-H1 region
ggattccacttcagtagctatgct

SEQ ID NO: 27 - DNA, 24 bp, Artificial Sequence
  Synthetic polynucleotide encoding artificial human antibody CDR-H1 region
ggattcacctttagcaattacgcc

SEQ ID NO: 28 - DNA, 24 bp, Artificial Sequence
  Synthetic polynucleotide encoding artificial human antibody CDR-H1 region
ggattcaccttcagtagctatgct

SEQ ID NO: 29 - DNA, 24 bp, Artificial Sequence
  Synthetic polynucleotide encoding artificial human antibody CDR-H1 region
ggattcaccttcagtagctatggc

SEQ ID NO: 30 - DNA, 24 bp, Artificial Sequence
  Synthetic polynucleotide encoding artificial human antibody CDR-H1 region
ggattcaccttcagtagatatgct

SEQ ID NO: 31 - DNA, 24 bp, Artificial Sequence
  Synthetic polynucleotide encoding artificial human antibody CDR-H1 region
ggatacaccttcaccagttatgat

SEQ ID NO: 32 - DNA, 24 bp, Artificial Sequence
  Synthetic polynucleotide encoding artificial human antibody CDR-H1 region
ggttacacctttatcaacaatcgt

SEQ ID NO: 33 - DNA, 24 bp, Artificial Sequence
  Synthetic polynucleotide encoding artificial human antibody CDR-H1 region
ggattcacctttggtgattttgct

SEQ ID NO: 34 - DNA, 24 bp, Artificial Sequence
  Synthetic polynucleotide encoding artificial human antibody CDR-H1 region
attggctccatcagttctcactac

SEQ ID NO: 35 - DNA, 24 bp, Artificial Sequence
  Synthetic polynucleotide encoding artificial human antibody CDR-H1 region
ggattcacctttaaaaaatatctc

SEQ ID NO: 36 - DNA, 24 bp, Artificial Sequence
  Synthetic polynucleotide encoding artificial human antibody CDR-H1 region
ggattcatttttgatgattatgcc

SEQ ID NO: 37 - DNA, 24 bp, Artificial Sequence
  Synthetic polynucleotide encoding artificial human antibody CDR-H1 region
ggattcaccttcagtagctatgct

SEQ ID NO: 38 - DNA, 24 bp, Artificial Sequence
  Synthetic polynucleotide encoding artificial human antibody CDR-H1 region
ggaggcaccttcagcagctatgct

SEQ ID NO: 39 - DNA, 24 bp, Artificial Sequence
  Synthetic polynucleotide encoding artificial human antibody CDR-H1 region
ggatacaccttcaccagttatgat

SEQ ID NO: 40 - DNA, 24 bp, Artificial Sequence
  Synthetic polynucleotide encoding artificial human antibody CDR-H1 region
ggattcaccttcagcagctatgcc

SEQ ID NO: 41 - DNA, 24 bp, Artificial Sequence
  Synthetic polynucleotide encoding artificial human antibody CDR-H1 region
ggattcacctttgatgattatgcc

SEQ ID NO: 42 - DNA, 24 bp, Artificial Sequence
  Synthetic polynucleotide encoding artificial human antibody CDR-H1 region
ggattcagtctcggaaaattttgg

SEQ ID NO: 43 - DNA, 24 bp, Artificial Sequence
  Synthetic polynucleotide encoding artificial human antibody CDR-H1 region
ggattcaccttcgtgagctttgct

SEQ ID NO: 44 - DNA, 24 bp, Artificial Sequence
  Synthetic polynucleotide encoding artificial human antibody CDR-H1 region
ggtggctccatcagtcgttactac

SEQ ID NO: 45 - DNA, 30 bp, Artificial Sequence
  Synthetic polynucleotide encoding artificial human antibody CDR-H1 region
ggtggctccatcagcagtagtagttactac

SEQ ID NO: 46 - DNA, 24 bp, Artificial Sequence
  Synthetic polynucleotide encoding artificial human antibody CDR-H1 region
ggattcaccttcagtagctatggc

SEQ ID NO: 47 - DNA, 24 bp, Artificial Sequence
  Synthetic polynucleotide encoding artificial human antibody CDR-H1 region
ggatacaggctcactgaagtagcc

SEQ ID NO: 48 - DNA, 24 bp, Artificial Sequence
  Synthetic polynucleotide encoding artificial human antibody CDR-H1 region
ggattcacctttggtgatcatgcc

SEQ ID NO: 49 - DNA, 24 bp, Artificial Sequence
  Synthetic polynucleotide encoding artificial human antibody CDR-H1 region
ggattctccttcagtcgctatgct

SEQ ID NO: 50 - DNA, 24 bp, Artificial Sequence
  Synthetic polynucleotide encoding artificial human antibody CDR-H1 region
ggattcaccttttctactcattgg

SEQ ID NO: 51 - DNA, 24 bp, Artificial Sequence
  Synthetic polynucleotide encoding artificial human antibody CDR-H1 region
ggattcactttccgtagctattgg

SEQ ID NO: 52 - DNA, 24 bp, Artificial Sequence
  Synthetic polynucleotide encoding artificial human antibody CDR-H1 region
ggattcacctttactagctctgct

SEQ ID NO: 53 - DNA, 24 bp, Artificial Sequence
  Synthetic polynucleotide encoding artificial human antibody CDR-H1 region
ggctatagttttaccacctatggt

SEQ ID NO: 54 - DNA, 24 bp, Artificial Sequence
  Synthetic polynucleotide encoding artificial human antibody CDR-H1 region
ggattcaccttcagtagctatagc

SEQ ID NO: 55 - DNA, 30 bp, Artificial Sequence
  Synthetic polynucleotide encoding artificial human antibody CDR-H1 region
ggggacagtgtctctagcaacagtgctgct

SEQ ID NO: 56 - DNA, 30 bp, Artificial Sequence
  Synthetic polynucleotide encoding artificial human antibody CDR-H1 region
gggttttcactcagcacaagtacagtgggt

SEQ ID NO: 57 - DNA, 24 bp, Artificial Sequence
  Synthetic polynucleotide encoding artificial human antibody CDR-H1 region
ggattcaccttcagtagctatagc

SEQ ID NO: 58 - DNA, 24 bp, Artificial Sequence
  Synthetic polynucleotide encoding artificial human antibody CDR-H1 region
ggatacaccttcaccggctactat

SEQ ID NO: 59 - DNA, 24 bp, Artificial Sequence
  Synthetic polynucleotide encoding artificial human antibody CDR-H1 region
ggattcaccttcagtagctatggc

SEQ ID NO: 60 - DNA, 24 bp, Artificial Sequence
  Synthetic polynucleotide encoding artificial human antibody CDR-H1 region
gggttcagcatcagtgacaactac

SEQ ID NO: 61 - DNA, 30 bp, Artificial Sequence; identical to SEQ ID NO: 15
  Synthetic polynucleotide encoding artificial human antibody CDR-H1 region

SEQ ID NO: 62 - DNA, 24 bp, Artificial Sequence
  Synthetic polynucleotide encoding artificial human antibody CDR-H1 region
ggattcaccttcagtagctatggc

SEQ ID NO: 63 - DNA, 24 bp, Artificial Sequence
  Synthetic polynucleotide encoding artificial human antibody CDR-H1 region
ggattcaccttcagtagctatggc

SEQ ID NO: 64 - DNA, 24 bp, Artificial Sequence
  Synthetic polynucleotide encoding artificial human antibody CDR-H1 region
ggattcaccttcagtagctatagc

SEQ ID NO: 65 - DNA, 30 bp, Artificial Sequence; identical to SEQ ID NO: 15
  Synthetic polynucleotide encoding artificial human antibody CDR-H1 region

SEQ ID NO: 66 - DNA, 24 bp, Artificial Sequence
  Synthetic polynucleotide encoding artificial human antibody CDR-H1 region
ggattcacctttagtagctatgcc

SEQ ID NO: 67 - DNA, 24 bp, Artificial Sequence
  Synthetic polynucleotide encoding artificial human antibody CDR-H1 region
ggtggctccatcagtagtttctac

SEQ ID NO: 68 - DNA, 24 bp, Artificial Sequence
  Synthetic polynucleotide encoding artificial human antibody CDR-H1 region
ggattcaccttcaagacctatagc

SEQ ID NO: 69 - DNA, 24 bp, Artificial Sequence
  Synthetic polynucleotide encoding artificial human antibody CDR-H1 region
ggcttcacctttagtggttatggc

SEQ ID NO: 70 - DNA, 24 bp, Artificial Sequence
  Synthetic polynucleotide encoding artificial human antibody CDR-H1 region
ggattcacctttagcagctatgcc

SEQ ID NO: 71 - DNA, 24 bp, Artificial Sequence
  Synthetic polynucleotide encoding artificial human antibody CDR-H1 region
gggttcgccttcagtggctctgct

SEQ ID NO: 72 - DNA, 30 bp, Artificial Sequence
  Synthetic polynucleotide encoding artificial human antibody CDR-H1 region
gatggctccagcagtaggaattactacttc

SEQ ID NO: 73 - DNA, 24 bp, Artificial Sequence
  Synthetic polynucleotide encoding artificial human antibody CDR-H1 region
ggattcacctttgatgattatgcc

SEQ ID NO: 74 - DNA, 24 bp, Artificial Sequence
  Synthetic polynucleotide encoding artificial human antibody CDR-H1 region
ggatacaccttcactagctatgct

SEQ ID NO: 75 - DNA, 24 bp, Artificial Sequence
  Synthetic polynucleotide encoding artificial human antibody CDR-H1 region
gggttcaacgtcagtaacaactac

SEQ ID NO: 76 - DNA, 24 bp, Artificial Sequence
  Synthetic polynucleotide encoding artificial human antibody CDR-H1 region
ggattcaccttcagtagctatagc

SEQ ID NO: 77 - DNA, 24 bp, Artificial Sequence
  Synthetic polynucleotide encoding artificial human antibody CDR-H1 region
ggattcatgtttgatggttatgcc

SEQ ID NO: 78 - DNA, 24 bp, Artificial Sequence
  Synthetic polynucleotide encoding artificial human antibody CDR-H1 region
ggattcacctttgatgattatgcc

SEQ ID NO: 79 - DNA, 24 bp, Artificial Sequence
  Synthetic polynucleotide encoding artificial human antibody CDR-H1 region
ggattcaccttcagtagctatagc

SEQ ID NO: 80 - DNA, 24 bp, Artificial Sequence
  Synthetic polynucleotide encoding artificial human antibody CDR-H1 region
ggattcacctttagcagctatgcc

SEQ ID NO: 81 - DNA, 24 bp, Artificial Sequence
  Synthetic polynucleotide encoding artificial human antibody CDR-H1 region
ggattcaccttcagtagctactgg

SEQ ID NO: 82 - DNA, 24 bp, Artificial Sequence
  Synthetic polynucleotide encoding artificial human antibody CDR-H1 region
ggatacaccttcaccagctatgat

SEQ ID NO: 83 - DNA, 24 bp, Artificial Sequence
  Synthetic polynucleotide encoding artificial human antibody CDR-H1 region
ggattcaccttcagtagctatgct

SEQ ID NO: 84 - DNA, 30 bp, Artificial Sequence
  Synthetic polynucleotide encoding artificial human antibody CDR-H1 region
gggttctcactcagcactagtggaatgtgt

SEQ ID NO: 85 - DNA, 24 bp, Artificial Sequence
  Synthetic polynucleotide encoding artificial human antibody CDR-H1 region
ggattcaccttcagtagctatggc

SEQ ID NO: 86 - DNA, 24 bp, Artificial Sequence
  Synthetic polynucleotide encoding artificial human antibody CDR-H1 region
ggatacaccttcaccagctactat

SEQ ID NO: 87 - DNA, 24 bp, Artificial Sequence
  Synthetic polynucleotide encoding artificial human antibody CDR-H1 region
ggattcactttcagcaatttttgg

SEQ ID NO: 88 - DNA, 24 bp, Artificial Sequence
  Synthetic polynucleotide encoding artificial human antibody CDR-H1 region
ggaggcaccttcagcagctatgct

SEQ ID NO: 89 - DNA, 24 bp, Artificial Sequence
  Synthetic polynucleotide encoding artificial human antibody CDR-H1 region
ggattcacctttgatgattatgcc

SEQ ID NO: 90 - DNA, 24 bp, Artificial Sequence
  Synthetic polynucleotide encoding artificial human antibody CDR-H1 region
gggttcaccgtcagtagcaactac

SEQ ID NO: 91 - DNA, 24 bp, Artificial Sequence
  Synthetic polynucleotide encoding artificial human antibody CDR-H1 region
agattcacttttagtagccatgcc

SEQ ID NO: 92 - DNA, 24 bp, Artificial Sequence
  Synthetic polynucleotide encoding artificial human antibody CDR-H1 region
ggatacagcttcactgactatgtt

SEQ ID NO: 93 - DNA, 24 bp, Artificial Sequence
  Synthetic polynucleotide encoding artificial human antibody CDR-H1 region
ggatacaccttcagtaactatgtt

SEQ ID NO: 94 - DNA, 24 bp, Artificial Sequence
  Synthetic polynucleotide encoding artificial human antibody CDR-H1 region
ggatacaccttcacctaccgctac

SEQ ID NO: 95 - DNA, 24 bp, Artificial Sequence
  Synthetic polynucleotide encoding artificial human antibody CDR-H1 region
ggatacaccttcaccagctactat

SEQ ID NO: 96 - DNA, 24 bp, Artificial Sequence
  Synthetic polynucleotide encoding artificial human antibody CDR-H1 region
ggattctccttcggtgactatggc

SEQ ID NO: 97 - DNA, 24 bp, Artificial Sequence
  Synthetic polynucleotide encoding artificial human antibody CDR-H1 region
ggaggcaccttcagcagctatgct

SEQ ID NO: 98 - DNA, 24 bp, Artificial Sequence
  Synthetic polynucleotide encoding artificial human antibody CDR-H1 region
ggattcaccttcagtagctatgct

SEQ ID NO: 99 - DNA, 24 bp, Artificial Sequence
  Synthetic polynucleotide encoding artificial human antibody CDR-H1 region
ggattcaccttcagtagctactgg

SEQ ID NO: 100 - DNA, 24 bp, Artificial Sequence
  Synthetic polynucleotide encoding artificial human antibody CDR-H1 region
ggattcacttttagcgaatatgcc

SEQ ID NO: 101 - DNA, 24 bp, Artificial Sequence
  Synthetic polynucleotide encoding artificial human antibody CDR-H1 region
ggatacaccttcaccagttatgat

SEQ ID NO: 102 - DNA, 24 bp, Artificial Sequence
  Synthetic polynucleotide encoding artificial human antibody CDR-H1 region
ggattcaccttcagtagctatgct

SEQ ID NO: 103 - DNA, 30 bp, Artificial Sequence
  Synthetic polynucleotide encoding artificial human antibody CDR-H1 region
tatgcctccgtcagcggtactaccgactac

SEQ ID NO: 104 - DNA, 30 bp, Artificial Sequence
  Synthetic polynucleotide encoding artificial human antibody CDR-H1 region
ggtgactccatcagcagtaatggttattac

SEQ ID NO: 105 - DNA, 24 bp, Artificial Sequence
  Synthetic polynucleotide encoding artificial human antibody CDR-H1 region
ggaggcaccttcaccagttatgct

SEQ ID NO: 106 - DNA, 30 bp, Artificial Sequence
  Synthetic polynucleotide encoding artificial human antibody CDR-H1 region
ggtggctccatcagcagtagtagttacttc

SEQ ID NO: 107 - DNA, 24 bp, Artificial Sequence
  Synthetic polynucleotide encoding artificial human antibody CDR-H1 region
ggattcaccttcagtagctatgct

SEQ ID NO: 108 - DNA, 24 bp, Artificial Sequence
  Synthetic polynucleotide encoding artificial human antibody CDR-H1 region
ggattcacctttgatgattatgcc

SEQ ID NO: 109 - DNA, 30 bp, Artificial Sequence
  Synthetic polynucleotide encoding artificial human antibody CDR-H1 region
ggtgactccataagcagtagtagttattac

SEQ ID NO: 110 - DNA, 24 bp, Artificial Sequence
  Synthetic polynucleotide encoding artificial human antibody CDR-H1 region
ggattcacctttagtagctattgg

SEQ ID NO: 111 - DNA, 24 bp, Artificial Sequence
  Synthetic polynucleotide encoding artificial human antibody CDR-H1 region
ggattcaccttcagtagctatgct

SEQ ID NO: 112 - DNA, 24 bp, Artificial Sequence
  Synthetic polynucleotide encoding artificial human antibody CDR-H1 region
ggatacaccttcaccagctactat

SEQ ID NO: 113 - DNA, 24 bp, Artificial Sequence
  Synthetic polynucleotide encoding artificial human antibody CDR-H1 region
ggattcaccttcagtagctatgct

SEQ ID NO: 114 - DNA, 30 bp, Artificial Sequence
  Synthetic polynucleotide encoding artificial human antibody CDR-H1 region
ggtggctccatcagcagtggtagttactac

SEQ ID NO: 115 - DNA, 24 bp, Artificial Sequence
  Synthetic polynucleotide encoding artificial human antibody CDR-H1 region
ggatacacctttaccgcctactat

SEQ ID NO: 116 - DNA, 24 bp, Artificial Sequence
  Synthetic polynucleotide encoding artificial human antibody CDR-H1 region
ggttacacgttcaccagctatgga

SEQ ID NO: 117 - DNA, 24 bp, Artificial Sequence
  Synthetic polynucleotide encoding artificial human antibody CDR-H1 region
ggatacaaattcaccgccttctat

SEQ ID NO: 118 - DNA, 24 bp, Artificial Sequence
  Synthetic polynucleotide encoding artificial human antibody CDR-H1 region
ggtgactccttccgtggttactac

SEQ ID NO: 119 - DNA, 24 bp, Artificial Sequence
  Synthetic polynucleotide encoding artificial human antibody CDR-H1 region
ggtgggtccttcactgctaactac

SEQ ID NO: 120 - DNA, 24 bp, Artificial Sequence
  Synthetic polynucleotide encoding artificial human antibody CDR-H1 region
ggattcaccttcggttcctttgat

SEQ ID NO: 121 - DNA, 24 bp, Artificial Sequence
  Synthetic polynucleotide encoding artificial human antibody CDR-H1 region
ggtgactccttccgtggttactac

SEQ ID NO: 122 - DNA, 24 bp, Artificial Sequence
  Synthetic polynucleotide encoding artificial human antibody CDR-H1 region
ggtgggtccttcaatgcttactac

SEQ ID NO: 123 - DNA, 24 bp, Artificial Sequence
  Synthetic polynucleotide encoding artificial human antibody CDR-H1 region
ggattcaccttcagtagctatgct

SEQ ID NO: 124 - DNA, 30 bp, Artificial Sequence
  Synthetic polynucleotide encoding artificial human antibody CDR-H1 region
gggttctcactcaccaccgctggactgggt

SEQ ID NO: 125 - DNA, 24 bp, Artificial Sequence
  Synthetic polynucleotide encoding artificial human antibody CDR-H1 region
ggatacagctttaccagctactgg

SEQ ID NO: 126 - DNA, 30 bp, Artificial Sequence; identical to SEQ ID NO: 55
  Synthetic polynucleotide encoding artificial human antibody CDR-H1 region

SEQ ID NO: 127 - DNA, 24 bp, Artificial Sequence
  Synthetic polynucleotide encoding artificial human antibody CDR-H1 region
ggatacagctttaccagctactgg

SEQ ID NO: 128 - DNA, 24 bp, Artificial Sequence
  Synthetic polynucleotide encoding artificial human antibody CDR-H1 region
ggtggctccatgaatagctatcac

SEQ ID NO: 129 - DNA, 24 bp, Artificial Sequence
  Synthetic polynucleotide encoding artificial human antibody CDR-H1 region
ggtgggtccttcagtgtttaccag

SEQ ID NO: 130 - DNA, 24 bp, Artificial Sequence
  Synthetic polynucleotide encoding artificial human antibody CDR-H1 region
ggattcaatttcaatatttactgg

SEQ ID NO: 131 - DNA, 24 bp, Artificial Sequence
  Synthetic polynucleotide encoding artificial human antibody CDR-H1 region
ggatacaccttcaccagctactat

SEQ ID NO: 132 - DNA, 24 bp, Artificial Sequence
  Synthetic polynucleotide encoding artificial human antibody CDR-H1 region
ggatacagctttaccagctactgg

SEQ ID NO: 133 - DNA, 30 bp, Artificial Sequence; identical to SEQ ID NO: 84
  Synthetic polynucleotide encoding artificial human antibody CDR-H1 region

SEQ ID NO: 134 - DNA, 24 bp, Artificial Sequence
  Synthetic polynucleotide encoding artificial human antibody CDR-H1 region
ggtgtgtcgcccactacttactat

SEQ ID NO: 135 - DNA, 24 bp, Artificial Sequence
  Synthetic polynucleotide encoding artificial human antibody CDR-H1 region
ggattcaccttcaacaaccacggc

SEQ ID NO: 136 - DNA, 24 bp, Artificial Sequence
  Synthetic polynucleotide encoding artificial human antibody CDR-H1 region
ggatacaccctcactgaattatcc

SEQ ID NO: 137 - DNA, 24 bp, Artificial Sequence
  Synthetic polynucleotide encoding artificial human antibody CDR-H1 region
ggattccccctcagtccctattgg

SEQ ID NO: 138 - DNA, 24 bp, Artificial Sequence
  Synthetic polynucleotide encoding artificial human antibody CDR-H1 region
ggtgtgtcgcccactatttactat

SEQ ID NO: 139 - DNA, 24 bp, Artificial Sequence
  Synthetic polynucleotide encoding artificial human antibody CDR-H1 region
ggtgagtcctccagcgatcactac

SEQ ID NO: 140 - DNA, 24 bp, Artificial Sequence
  Synthetic polynucleotide encoding artificial human antibody CDR-H1 region
ggattcacctttgatgattatgcc

SEQ ID NO: 141 - DNA, 24 bp, Artificial Sequence
  Synthetic polynucleotide encoding artificial human antibody CDR-H1 region
ggtgtgtcgcccagtaattactat

SEQ ID NO: 142 - DNA, 24 bp, Artificial Sequence
  Synthetic polynucleotide encoding artificial human antibody CDR-H1 region
ggatacattttaaccagcaactgg

SEQ ID NO: 143 - DNA, 24 bp, Artificial Sequence
  Synthetic polynucleotide encoding artificial human antibody CDR-H1 region
ggattcaccttcagtagctacgac

SEQ ID NO: 144 - DNA, 24 bp, Artificial Sequence
  Synthetic polynucleotide encoding artificial human antibody CDR-H1 region
ggattcagcttcagtgactactac

SEQ ID NO: 145 - DNA, 30 bp, Artificial Sequence
  Synthetic polynucleotide encoding artificial human antibody CDR-H1 region
ggattctcactcagcacaagtggagtgggt

SEQ ID NO: 146 - DNA, 30 bp, Artificial Sequence
  Synthetic polynucleotide encoding artificial human antibody CDR-H1 region
ggtgcctccatcagcagtggtggttattac

SEQ ID NO: 147 - DNA, 24 bp, Artificial Sequence
  Synthetic polynucleotide encoding artificial human antibody CDR-H1 region
ggattcaccttcagtacctatgct

SEQ ID NO: 148 - DNA, 24 bp, Artificial Sequence
  Synthetic polynucleotide encoding artificial human antibody CDR-H1 region
ggattcaccttcagtagttcttgg

SEQ ID NO: 149 - DNA, 27 bp, Artificial Sequence
  Synthetic polynucleotide encoding artificial human antibody CDR-H1 region
ggtgactccatcagcagtagcaactgg

SEQ ID NO: 150 - DNA, 24 bp, Artificial Sequence
  Synthetic polynucleotide encoding artificial human antibody CDR-H1 region
ggtgagtcctccagcgatcacttc

SEQ ID NO: 151 - DNA, 30 bp, Artificial Sequence; identical to SEQ ID NO: 45
  Synthetic polynucleotide encoding artificial human antibody CDR-H1 region

SEQ ID NO: 152 - DNA, 24 bp, Artificial Sequence
  Synthetic polynucleotide encoding artificial human antibody CDR-H1 region
ggtgtgtcgcccactacttactac

SEQ ID NO: 153 - DNA, 24 bp, Artificial Sequence
  Synthetic polynucleotide encoding artificial human antibody CDR-H1 region
ggattcaccttcagtagctatggc

SEQ ID NO: 154 - DNA, 24 bp, Artificial Sequence
  Synthetic polynucleotide encoding artificial human antibody CDR-H1 region
ggtgtgtcgcccactccttactac

SEQ ID NO: 155 - DNA, 24 bp, Artificial Sequence
  Synthetic polynucleotide encoding artificial human antibody CDR-H1 region
ggattcatcttcagtaattatgcc

SEQ ID NO: 156 - DNA, 24 bp, Artificial Sequence
  Synthetic polynucleotide encoding artificial human antibody CDR-H1 region
ggactcaccttcagtgactttgct

SEQ ID NO: 157 - DNA, 24 bp, Artificial Sequence
  Synthetic polynucleotide encoding artificial human antibody CDR-H1 region
ggatacaccttcactagctatgct

SEQ ID NO: 158 - DNA, 24 bp, Artificial Sequence
  Synthetic polynucleotide encoding artificial human antibody CDR-H1 region
ggattcaccttcagtagctatagc

SEQ ID NO: 159 - DNA, 24 bp, Artificial Sequence
  Synthetic polynucleotide encoding artificial human antibody CDR-H1 region
ggttacagctttaccaattatggt

SEQ ID NO: 160 - DNA, 24 bp, Artificial Sequence
  Synthetic polynucleotide encoding artificial human antibody CDR-H1 region
gggttcatcgtcggtgacaattac

SEQ ID NO: 161 - DNA, 24 bp, Artificial Sequence
  Synthetic polynucleotide encoding artificial human antibody CDR-H1 region
ggatacaccctcactgaattatcc

SEQ ID NO: 162 - DNA, 24 bp, Artificial Sequence
  Synthetic polynucleotide encoding artificial human antibody CDR-H1 region
ggattcacctttagtagttcttgg

SEQ ID NO: 163 - DNA, 24 bp, Artificial Sequence
  Synthetic polynucleotide encoding artificial human antibody CDR-H1 region
ggatttaatttcggtgaccataat

SEQ ID NO: 164 - DNA, 30 bp, Artificial Sequence; identical to SEQ ID NO: 15
  Synthetic polynucleotide encoding artificial human antibody CDR-H1 region

SEQ ID NO: 165 - DNA, 24 bp, Artificial Sequence
  Synthetic polynucleotide encoding artificial human antibody CDR-H1 region
ggtgtgtcgcccagtaattactac

SEQ ID NO: 166 - DNA, 30 bp, Artificial Sequence
  Synthetic polynucleotide encoding artificial human antibody CDR-H1 region
agtgtctccatcaccagtggtggttcctac

SEQ ID NO: 167 - DNA, 24 bp, Artificial Sequence
  Synthetic polynucleotide encoding artificial human antibody CDR-H1 region
ggtgtgtcgcccagtagttactct

SEQ ID NO: 168 - DNA, 24 bp, Artificial Sequence
  Synthetic polynucleotide encoding artificial human antibody CDR-H1 region
ggtgggtccttcagtggttactac

SEQ ID NO: 169 - DNA, 30 bp, Artificial Sequence
  Synthetic polynucleotide encoding artificial human antibody CDR-H1 region
ggtggctccgtcagcagtgggagtaactac

SEQ ID NO: 170 - DNA, 24 bp, Artificial Sequence
  Synthetic polynucleotide encoding artificial human antibody CDR-H1 region
ggtgtgtcgcccagtgattactat

SEQ ID NO: 171 - DNA, 24 bp, Artificial Sequence
  Synthetic polynucleotide encoding artificial human antibody CDR-H1 region
ggattcaccctcagaagctatgct

SEQ ID NO: 172 - DNA, 24 bp, Artificial Sequence
  Synthetic polynucleotide encoding artificial human antibody CDR-H1 region
ggattcaccttccatgaatatggc

SEQ ID NO: 173 - DNA, 24 bp, Artificial Sequence
  Synthetic polynucleotide encoding artificial human antibody CDR-H1 region
ggatacaccttcatcgattatgat

SEQ ID NO: 174 - DNA, 24 bp, Artificial Sequence
  Synthetic polynucleotide encoding artificial human antibody CDR-H1 region
ggatacaccctcactgaattatcc

SEQ ID NO: 175 - DNA, 24 bp, Artificial Sequence
  Synthetic polynucleotide encoding artificial human antibody CDR-H1 region
ggattcacctttgatgattatgcc

SEQ ID NO: 176 - DNA, 24 bp, Artificial Sequence
  Synthetic polynucleotide encoding artificial human antibody CDR-H1 region
ggattcaccttcagtagctatgct

SEQ ID NO: 177 - DNA, 24 bp, Artificial Sequence
  Synthetic polynucleotide encoding artificial human antibody CDR-H1 region
ggtgtgtcgcccagtaatttctat

SEQ ID NO: 178 - DNA, 24 bp, Artificial Sequence
  Synthetic polynucleotide encoding artificial human antibody CDR-H1 region
ggattcagtttcaacaactatggc

SEQ ID NO: 179 - DNA, 24 bp, Artificial Sequence
  Synthetic polynucleotide encoding artificial human antibody CDR-H1 region
ggattcaccttcagaacctatact

SEQ ID NO: 180 - DNA, 24 bp, Artificial Sequence
  Synthetic polynucleotide encoding artificial human antibody CDR-H1 region
ggatacagctttaccagctactgg

SEQ ID NO: 181 - DNA, 24 bp, Artificial Sequence
  Synthetic polynucleotide encoding artificial human antibody CDR-H1 region
ggattcgccttcagtagttcttgg

SEQ ID NO: 182 - DNA, 30 bp, Artificial Sequence
  Synthetic polynucleotide encoding artificial human antibody CDR-H1 region
ggcttctcaatcagcactagtggagtgggt

SEQ ID NO: 183 - DNA, 24 bp, Artificial Sequence
  Synthetic polynucleotide encoding artificial human antibody CDR-H1 region
ggatacagctttaccagctactgg

SEQ ID NO: 184 - DNA, 24 bp, Artificial Sequence
  Synthetic polynucleotide encoding artificial human antibody CDR-H1 region
ggatacaccctcactgaattatcc

SEQ ID NO: 185 - DNA, 24 bp, Artificial Sequence
  Synthetic polynucleotide encoding artificial human antibody CDR-H1 region
ggattcaccttcagtagctacgac

SEQ ID NO: 186 - DNA, 24 bp, Artificial Sequence
  Synthetic polynucleotide encoding artificial human antibody CDR-H1 region
ggattcaccttcaagaactatcct

SEQ ID NO: 187 - DNA, 24 bp, Artificial Sequence
  Synthetic polynucleotide encoding artificial human antibody CDR-H1 region
ggattcacctttgatgattatggc

SEQ ID NO: 188 - DNA, 24 bp, Artificial Sequence
  Synthetic polynucleotide encoding artificial human antibody CDR-H1 region
ggaatcacgtttgaggattatggc

SEQ ID NO: 189 - DNA, 24 bp, Artificial Sequence
  Synthetic polynucleotide encoding artificial human antibody CDR-H1 region
ggatacagctttcccacttactgg

SEQ ID NO: 190 - DNA, 24 bp, Artificial Sequence
  Synthetic polynucleotide encoding artificial human antibody CDR-H1 region
ggattcaccttcagtagctatggc

SEQ ID NO: 191 - DNA, 24 bp, Artificial Sequence
  Synthetic polynucleotide encoding artificial human antibody CDR-H1 region
ggattcaccttcagacactatcct

SEQ ID NO: 192 - DNA, 24 bp, Artificial Sequence
  Synthetic polynucleotide encoding artificial human antibody CDR-H1 region
ggatacagctttaccagctactgg

SEQ ID NO: 193 - DNA, 30 bp, Artificial Sequence
  Synthetic polynucleotide encoding artificial human antibody CDR-H1 region
ggtggctccatcagcagtggtgattactac

SEQ ID NO: 194 - DNA, 24 bp, Artificial Sequence
  Synthetic polynucleotide encoding artificial human antibody CDR-H1 region
ggatacaccttcaccagctactat

SEQ ID NO: 195 - DNA, 24 bp, Artificial Sequence
  Synthetic polynucleotide encoding artificial human antibody CDR-H1 region
ggattcacctttaacagctatgcc

SEQ ID NO: 196 - DNA, 24 bp, Artificial Sequence
  Synthetic polynucleotide encoding artificial human antibody CDR-H1 region
ggtgggtccttcagtggttactac

SEQ ID NO: 197 - DNA, 24 bp, Artificial Sequence
  Synthetic polynucleotide encoding artificial human antibody CDR-H1 region
ggattcgtcttcagtgacagttac

SEQ ID NO: 198 - DNA, 24 bp, Artificial Sequence
  Synthetic polynucleotide encoding artificial human antibody CDR-H1 region
ggatacagctttaccagctactgg

SEQ ID NO: 199 - DNA, 24 bp, Artificial Sequence
  Synthetic polynucleotide encoding artificial human antibody CDR-H1 region
ggattcacctttggcggccatgcc

SEQ ID NO: 200 - DNA, 24 bp, Artificial Sequence
  Synthetic polynucleotide encoding artificial human antibody CDR-H1 region
ggattcaccctcagcacttactgg

SEQ ID NO: 201 - DNA, 24 bp, Artificial Sequence
  Synthetic polynucleotide encoding artificial human antibody CDR-H1 region
ggattcacctttagtagctattgg

SEQ ID NO: 202 - DNA, 24 bp, Artificial Sequence
  Synthetic polynucleotide encoding artificial human antibody CDR-H1 region
ggattcgccttcagtaattatgct

SEQ ID NO: 203 - DNA, 24 bp, Artificial Sequence
  Synthetic polynucleotide encoding artificial human antibody CDR-H1 region
ggattcaccttcaatacctatagc

SEQ ID NO: 204 - DNA, 24 bp, Artificial Sequence
  Synthetic polynucleotide encoding artificial human antibody CDR-H1 region
ggtgagtcctccagcgatcactac

SEQ ID NO: 205 - DNA, 24 bp, Artificial Sequence
  Synthetic polynucleotide encoding artificial human antibody CDR-H1 region
ggattcacctttgatgattatgcc

SEQ ID NO: 206 - DNA, 24 bp, Artificial Sequence
  Synthetic polynucleotide encoding artificial human antibody CDR-H1 region
ggattcaccttcagtgactactac

SEQ ID NO: 207 - DNA, 30 bp, Artificial Sequence; identical to SEQ ID NO: 193
  Synthetic polynucleotide encoding artificial human antibody CDR-H1 region

SEQ ID NO: 208 - DNA, 24 bp, Artificial Sequence
  Synthetic polynucleotide encoding artificial human antibody CDR-H1 region
gggttcacctttgacgatcatgcc

SEQ ID NO: 209 - DNA, 24 bp, Artificial Sequence
  Synthetic polynucleotide encoding artificial human antibody CDR-H1 region
ggatacaccttcactagctatgct

SEQ ID NO: 210 - DNA, 24 bp, Artificial Sequence
  Synthetic polynucleotide encoding artificial human antibody CDR-H1 region
ggaggcaccttcagcagctatgct

SEQ ID NO: 211 - DNA, 24 bp, Artificial Sequence
  Synthetic polynucleotide encoding artificial human antibody CDR-H1 region
ggattcacctttagcacctatacc

SEQ ID NO: 212 - DNA, 24 bp, Artificial Sequence
  Synthetic polynucleotide encoding artificial human antibody CDR-H1 region
ggatacaggctcactgaggtagcc

SEQ ID NO: 213 - DNA, 24 bp, Artificial Sequence
  Synthetic polynucleotide encoding artificial human antibody CDR-H1 region
ggtggctccatcactggttattac

SEQ ID NO: 214 - DNA, 24 bp, Artificial Sequence
  Synthetic polynucleotide encoding artificial human antibody CDR-H1 region
ggtggctccctcagtccttactac

SEQ ID NO: 215 - DNA, 30 bp, Artificial Sequence
  Synthetic polynucleotide encoding artificial human antibody CDR-H1 region
ggtggctccgtcagcagtggtagttactac

SEQ ID NO: 216 - DNA, 30 bp, Artificial Sequence
  Synthetic polynucleotide encoding artificial human antibody CDR-H1 region
gatggcttcatcagcaatgatgattactcc

SEQ ID NO: 217 - DNA, 24 bp, Artificial Sequence
  Synthetic polynucleotide encoding artificial human antibody CDR-H1 region
ggatacatcttcactgattttgct

SEQ ID NO: 218 - DNA, 24 bp, Artificial Sequence
  Synthetic polynucleotide encoding artificial human antibody CDR-H1 region
ggattcatctttggtgattttgac

SEQ ID NO: 219 - DNA, 24 bp, Artificial Sequence
  Synthetic polynucleotide encoding artificial human antibody CDR-H1 region
ggatacaccttcaccggctactat

SEQ ID NO: 220 - DNA, 24 bp, Artificial Sequence
  Synthetic polynucleotide encoding artificial human antibody CDR-H1 region
ggatccactctcagcaacgcctgg

SEQ ID NO: 221 - DNA, 30 bp, Artificial Sequence; identical to SEQ ID NO: 55
  Synthetic polynucleotide encoding artificial human antibody CDR-H1 region

SEQ ID NO: 222 - DNA, 24 bp, Artificial Sequence
  Synthetic polynucleotide encoding artificial human antibody CDR-H1 region
ggattcatctttggtgattatgac

SEQ ID NO: 223 - DNA, 24 bp, Artificial Sequence
  Synthetic polynucleotide encoding artificial human antibody CDR-H1 region
ggaggcaccctcagtaattcaggc

SEQ ID NO: 224 - DNA, 24 bp, Artificial Sequence
  Synthetic polynucleotide encoding artificial human antibody CDR-H1 region
ggttacacctttaccagctatggt

SEQ ID NO: 225 - DNA, 24 bp, Artificial Sequence
  Synthetic polynucleotide encoding artificial human antibody CDR-H1 region
ggtgcgtccctcagtggtaacgac

SEQ ID NO: 226 - DNA, 24 bp, Artificial Sequence
  Synthetic polynucleotide encoding artificial human antibody CDR-H1 region
ggatacaccttcaccggctactat

SEQ ID NO: 227 - DNA, 24 bp, Artificial Sequence
  Synthetic polynucleotide encoding artificial human antibody CDR-H1 region
ggattcaccttcagtagctatggc

SEQ ID NO: 228 - DNA, 24 bp, Artificial Sequence
  Synthetic polynucleotide encoding artificial human antibody CDR-H1 region
ggattcacctttagtgactattgg

SEQ ID NO: 229 - DNA, 24 bp, Artificial Sequence
  Synthetic polynucleotide encoding artificial human antibody CDR-H1 region
ggtggctccatcagtggtcactac

SEQ ID NO: 230 - DNA, 24 bp, Artificial Sequence
  Synthetic polynucleotide encoding artificial human antibody CDR-H1 region
ggatacgtcttcactaactatgct

SEQ ID NO: 231 - DNA, 24 bp, Artificial Sequence
  Synthetic polynucleotide encoding artificial human antibody CDR-H1 region
ggaggcaccttcagcagctatgct

SEQ ID NO: 232 - DNA, 24 bp, Artificial Sequence
  Synthetic polynucleotide encoding artificial human antibody CDR-H1 region
ggtgggtccttcactgattattac

SEQ ID NO: 233 - DNA, 24 bp, Artificial Sequence
  Synthetic polynucleotide encoding artificial human antibody CDR-H1 region
ggattcaccttcaatgtctatggc

SEQ ID NO: 234 - DNA, 24 bp, Artificial Sequence
  Synthetic polynucleotide encoding artificial human antibody CDR-H1 region
ggattcaccttcagcggctatgtc

SEQ ID NO: 235 - DNA, 24 bp, Artificial Sequence
  Synthetic polynucleotide encoding artificial human antibody CDR-H1 region
ggattcacctttagcaactttgcc

SEQ ID NO: 236 - DNA, 24 bp, Artificial Sequence
  Synthetic polynucleotide encoding artificial human antibody CDR-H1 region
ggattcacctttaataattattgg

SEQ ID NO: 237 - DNA, 24 bp, Artificial Sequence
  Synthetic polynucleotide encoding artificial human antibody CDR-H1 region
ggtggctccatcagtagttcctac

SEQ ID NO: 238 - DNA, 24 bp, Artificial Sequence
  Synthetic polynucleotide encoding artificial human antibody CDR-H1 region
ggattcacctttagtacttattgg

SEQ ID NO: 239 - DNA, 24 bp, Artificial Sequence
  Synthetic polynucleotide encoding artificial human antibody CDR-H1 region
ggattcaccttcagcaattatgaa

SEQ ID NO: 240 - DNA, 30 bp, Artificial Sequence
  Synthetic polynucleotide encoding artificial human antibody CDR-H1 region
ggtggctccatcagtagtggtggttattac

SEQ ID NO: 241 - DNA, 24 bp, Artificial Sequence
  Synthetic polynucleotide encoding artificial human antibody CDR-H1 region
ggattcaccttcagtgactactac

SEQ ID NO: 242 - DNA, 30 bp, Artificial Sequence; identical to SEQ ID NO: 45
  Synthetic polynucleotide encoding artificial human antibody CDR-H1 region

SEQ ID NO: 243 - DNA, 24 bp, Artificial Sequence
  Synthetic polynucleotide encoding artificial human antibody CDR-H1 region
ggattcacatttagcagctatgcc

SEQ ID NO: 244 - DNA, 24 bp, Artificial Sequence
  Synthetic polynucleotide encoding artificial human antibody CDR-H1 region
gggttcacctttaacatccatgcc

SEQ ID NO: 245 - DNA, 24 bp, Artificial Sequence
  Synthetic polynucleotide encoding artificial human antibody CDR-H1 region
ggattcacctttagtagctattgg

SEQ ID NO: 246 - DNA, 24 bp, Artificial Sequence
  Synthetic polynucleotide encoding artificial human antibody CDR-H1 region
ggatacaccttcaccagctactat

SEQ ID NO: 247 - DNA, 24 bp, Artificial Sequence
  Synthetic polynucleotide encoding artificial human antibody CDR-H1 region
ggattcaccgtcagtgactactat

SEQ ID NO: 248 - DNA, 24 bp, Artificial Sequence
  Synthetic polynucleotide encoding artificial human antibody CDR-H1 region
ggattcaacttcaataactatggc

SEQ ID NO: 249 - DNA, 24 bp, Artificial Sequence
  Synthetic polynucleotide encoding artificial human antibody CDR-H1 region
ggattcaccttcagtaattatggc

SEQ ID NO: 250 - DNA, 24 bp, Artificial Sequence
  Synthetic polynucleotide encoding artificial human antibody CDR-H1 region
ggtgggtccctcagtggttacttc

SEQ ID NO: 251 - DNA, 24 bp, Artificial Sequence
  Synthetic polynucleotide encoding artificial human antibody CDR-H1 region
ggattcaccttcagtagttatggc

SEQ ID NO: 252 - DNA, 24 bp, Artificial Sequence
  Synthetic polynucleotide encoding artificial human antibody CDR-H1 region
ggatacaccttcactagctatgct

SEQ ID NO: 253 - DNA, 24 bp, Artificial Sequence
  Synthetic polynucleotide encoding artificial human antibody CDR-H1 region
ggattcacctttactacttatttt

SEQ ID NO: 254 - DNA, 24 bp, Artificial Sequence
  Synthetic polynucleotide encoding artificial human antibody CDR-H1 region
ggattcgcctttgacaattatgcc

SEQ ID NO: 255 - DNA, 24 bp, Artificial Sequence
  Synthetic polynucleotide encoding artificial human antibody CDR-H1 region
ggattctttttcagtgactatggc

SEQ ID NO: 256 - DNA, 24 bp, Artificial Sequence
  Synthetic polynucleotide encoding artificial human antibody CDR-H1 region
ggattcaccttcagtgactactac

SEQ ID NO: 257 - DNA, 24 bp, Artificial Sequence
  Synthetic polynucleotide encoding artificial human antibody CDR-H1 region
ggtggctccatcagtagttacttc

SEQ ID NO: 258 - DNA, 24 bp, Artificial Sequence
  Synthetic polynucleotide encoding artificial human antibody CDR-H1 region
ggattcaccttcagtagttatgct

SEQ ID NO: 259 - DNA, 24 bp, Artificial Sequence
  Synthetic polynucleotide encoding artificial human antibody CDR-H1 region
ggattcactttcagtagctatggt

SEQ ID NO: 260 - DNA, 30 bp, Artificial Sequence
  Synthetic polynucleotide encoding artificial human antibody CDR-H1 region
ggggacagtgtctctagcgacagtgctgct

SEQ ID NO: 261 - DNA, 24 bp, Artificial Sequence
  Synthetic polynucleotide encoding artificial human antibody CDR-H1 region
ggtggctccatcagtagttactac

SEQ ID NO: 262 - DNA, 24 bp, Artificial Sequence
  Synthetic polynucleotide encoding artificial human antibody CDR-H1 region
ggttacacctccagtaattacgct

SEQ ID NO: 263 - DNA, 24 bp, Artificial Sequence
  Synthetic polynucleotide encoding artificial human antibody CDR-H1 region
ggattcacctttgatgattatgcc

SEQ ID NO: 264 - DNA, 30 bp, Artificial Sequence
  Synthetic polynucleotide encoding artificial human antibody CDR-H1 region
ggcgacctgttcagcagcactgccttctac

SEQ ID NO: 265 - DNA, 27 bp, Artificial Sequence
  Synthetic polynucleotide encoding artificial human antibody CDR-H1 region
ggtgaccccctcacccttggtatcttc

SEQ ID NO: 266 - DNA, 30 bp, Artificial Sequence
  Synthetic polynucleotide encoding artificial human antibody CDR-H1 region
ggtgcctccatcaccagtagtggttactac

SEQ ID NO: 267 - DNA, 24 bp, Artificial Sequence
  Synthetic polynucleotide encoding artificial human antibody CDR-H1 region
ggattcaccttcagtacctatgca

SEQ ID NO: 268 - DNA, 24 bp, Artificial Sequence
  Synthetic polynucleotide encoding artificial human antibody CDR-H1 region
ggattcactttcagttacgcctgg

SEQ ID NO: 269 - DNA, 24 bp, Artificial Sequence
  Synthetic polynucleotide encoding artificial human antibody CDR-H1 region
ggtgggtccttcagtgattactac

SEQ ID NO: 270 - DNA, 24 bp, Artificial Sequence
  Synthetic polynucleotide encoding artificial human antibody CDR-H1 region
ggatacaccttcaccgactactgg

SEQ ID NO: 271 - DNA, 24 bp, Artificial Sequence
  Synthetic polynucleotide encoding artificial human antibody CDR-H1 region
ggattcaccttcagcggctatgtc

SEQ ID NO: 272 - DNA, 24 bp, Artificial Sequence
  Synthetic polynucleotide encoding artificial human antibody CDR-H1 region
ggttacacctttgccagctatggt

SEQ ID NO: 273 - DNA, 24 bp, Artificial Sequence
  Synthetic polynucleotide encoding artificial human antibody CDR-H1 region
ggtgcctccgtccttacttactac

SEQ ID NO: 274 - DNA, 24 bp, Artificial Sequence
  Synthetic polynucleotide encoding artificial human antibody CDR-H1 region
ggattcatcttcagaaattatgac

SEQ ID NO: 275 - DNA, 24 bp, Artificial Sequence
  Synthetic polynucleotide encoding artificial human antibody CDR-H1 region
ggattcacctttgatgattatacc

SEQ ID NO: 276 - DNA, 24 bp, Artificial Sequence
  Synthetic polynucleotide encoding artificial human antibody CDR-H1 region
ggattcaccttcagtagctatgct

SEQ ID NO: 277 - DNA, 24 bp, Artificial Sequence
  Synthetic polynucleotide encoding artificial human antibody CDR-H1 region
ggatacagctttaccagctactgg

SEQ ID NO: 278 - DNA, 30 bp, Artificial Sequence
  Synthetic polynucleotide encoding artificial human antibody CDR-H1 region
ggtggctccatcagcagtagtacttactac

SEQ ID NO: 279 - DNA, 24 bp, Artificial Sequence
  Synthetic polynucleotide encoding artificial human antibody CDR-H1 region
ggatacaccttcactagctatgct

SEQ ID NO: 280 - DNA, 24 bp, Artificial Sequence
  Synthetic polynucleotide encoding artificial human antibody CDR-H1 region
ggattcacttttagggattatggt

SEQ ID NO: 281 - DNA, 24 bp, Artificial Sequence
  Synthetic polynucleotide encoding artificial human antibody CDR-H1 region
ggatacgacttcactaagtttgtt

SEQ ID NO: 282 - DNA, 24 bp, Artificial Sequence
  Synthetic polynucleotide encoding artificial human antibody CDR-H1 region
ggattcaccttcgattatcacact

SEQ ID NO: 283 - DNA, 30 bp, Artificial Sequence
  Synthetic polynucleotide encoding artificial human antibody CDR-H1 region
gggttctcactgaagactaatggagtggct

SEQ ID NO: 284 - DNA, 24 bp, Artificial Sequence
  Synthetic polynucleotide encoding artificial human antibody CDR-H1 region
ggattcacctttagcaactatgcc

SEQ ID NO: 285 - DNA, 24 bp, Artificial Sequence
  Synthetic polynucleotide encoding artificial human antibody CDR-H1 region
ggtttcatctttgaagattatgtt

SEQ ID NO: 286 - DNA, 24 bp, Artificial Sequence
  Synthetic polynucleotide encoding artificial human antibody CDR-H1 region
ggtggctccatcagtagttactac

SEQ ID NO: 287 - DNA, 30 bp, Artificial Sequence; identical to SEQ ID NO: 45
  Synthetic polynucleotide encoding artificial human antibody CDR-H1 region

SEQ ID NO: 288 - DNA, 24 bp, Artificial Sequence
  Synthetic polynucleotide encoding artificial human antibody CDR-H1 region
ggattcaccttcagtagctatggc

SEQ ID NO: 289 - DNA, 24 bp, Artificial Sequence
  Synthetic polynucleotide encoding artificial human antibody CDR-H1 region
ggatacaccctcactgaattatcc

SEQ ID NO: 290 - DNA, 30 bp, Artificial Sequence
  Synthetic polynucleotide encoding artificial human antibody CDR-H1 region
ggtgcctccatcagcagtggtaatcacttc

SEQ ID NO: 291 - DNA, 24 bp, Artificial Sequence
  Synthetic polynucleotide encoding artificial human antibody CDR-H1 region
ggattcacctttagcacctatgcc

SEQ ID NO: 292 - DNA, 24 bp, Artificial Sequence
  Synthetic polynucleotide encoding artificial human antibody CDR-H1 region
ggtggctccatcagtagttactac

SEQ ID NO: 293 - DNA, 24 bp, Artificial Sequence
  Synthetic polynucleotide encoding artificial human antibody CDR-H1 region
ggtgtctccatcactacctactac

SEQ ID NO: 294 - DNA, 24 bp, Artificial Sequence
  Synthetic polynucleotide encoding artificial human antibody CDR-H1 region
ggatacaccttcaccggctactat

SEQ ID NO: 295 - DNA, 30 bp, Artificial Sequence; identical to SEQ ID NO: 45
  Synthetic polynucleotide encoding artificial human antibody CDR-H1 region

SEQ ID NO: 296 - DNA, 24 bp, Artificial Sequence
  Synthetic polynucleotide encoding artificial human antibody CDR-H1 region
ggattcaccttcagtagctatggc

SEQ ID NO: 297 - DNA, 24 bp, Artificial Sequence
  Synthetic polynucleotide encoding artificial human antibody CDR-H1 region
ggattcacctttggtgattatgct

SEQ ID NO: 298 - DNA, 24 bp, Artificial Sequence
  Synthetic polynucleotide encoding artificial human antibody CDR-H1 region
ggatacaccttcaccggctactat

SEQ ID NO: 299 - DNA, 30 bp, Artificial Sequence
  Synthetic polynucleotide encoding artificial human antibody CDR-H1 region
ggtggctccatcagcagtggtggttactac

SEQ ID NO: 300 - DNA, 24 bp, Artificial Sequence
  Synthetic polynucleotide encoding artificial human antibody CDR-H1 region
ggattcgccctccgcggcaatggc

SEQ ID NO: 301 - DNA, 24 bp, Artificial Sequence
  Synthetic polynucleotide encoding artificial human antibody CDR-H1 region
ggatacaccctcactgaattatcc

SEQ ID NO: 302 - DNA, 24 bp, Artificial Sequence
  Synthetic polynucleotide encoding artificial human antibody CDR-H1 region
ggactcagcttcaccagctttgcc

SEQ ID NO: 303 - DNA, 24 bp, Artificial Sequence
  Synthetic polynucleotide encoding artificial human antibody CDR-H1 region
ggatacaccctcactgaattatcc

SEQ ID NO: 304 - DNA, 24 bp, Artificial Sequence
  Synthetic polynucleotide encoding artificial human antibody CDR-H1 region
ggtggctccatcagtagttactac

SEQ ID NO: 305 - DNA, 30 bp, Artificial Sequence; identical to SEQ ID NO: 15
  Synthetic polynucleotide encoding artificial human antibody CDR-H1 region

SEQ ID NO: 306 - DNA, 24 bp, Artificial Sequence
  Synthetic polynucleotide encoding artificial human antibody CDR-H1 region
ggatacaccttcaccggctactat

SEQ ID NO: 307 - DNA, 24 bp, Artificial Sequence
  Synthetic polynucleotide encoding artificial human antibody CDR-H1 region
ggatacaggttcaccacatatcac

SEQ ID NO: 308 - DNA, 24 bp, Artificial Sequence
  Synthetic polynucleotide encoding artificial human antibody CDR-H1 region
ggtgcctccatcactacttactac

SEQ ID NO: 309 - DNA, 24 bp, Artificial Sequence
  Synthetic polynucleotide encoding artificial human antibody CDR-H1 region
ggatacagctttaccagctactgg

SEQ ID NO: 310 - DNA, 24 bp, Artificial Sequence
  Synthetic polynucleotide encoding artificial human antibody CDR-H1 region
ggatacaccctcactgaattatcc

SEQ ID NO: 311 - DNA, 24 bp, Artificial Sequence
  Synthetic polynucleotide encoding artificial human antibody CDR-H1 region
gggttcaccgtcagtagcaactac

SEQ ID NO: 312 - DNA, 24 bp, Artificial Sequence
  Synthetic polynucleotide encoding artificial human antibody CDR-H1 region
ggattcaccttcagtgacttctac

SEQ ID NO: 313 - DNA, 24 bp, Artificial Sequence
  Synthetic polynucleotide encoding artificial human antibody CDR-H1 region
ggatacaccctcactgaattatcc

SEQ ID NO: 314 - DNA, 24 bp, Artificial Sequence
  Synthetic polynucleotide encoding artificial human antibody CDR-H1 region
ggattcacctttagtagctattgg

SEQ ID NO: 315 - DNA, 24 bp, Artificial Sequence
  Synthetic polynucleotide encoding artificial human antibody CDR-H1 region
ggatacaccctcactgaattatcc

SEQ ID NO: 316 - DNA, 24 bp, Artificial Sequence
  Synthetic polynucleotide encoding artificial human antibody CDR-H1 region
ggattcacctttagcaactctgcc

SEQ ID NO: 317 - DNA, 30 bp, Artificial Sequence
  Synthetic polynucleotide encoding artificial human antibody CDR-H1 region
ggtggctccatcaccagtggtgattcctac

SEQ ID NO: 318 - DNA, 30 bp, Artificial Sequence
  Synthetic polynucleotide encoding artificial human antibody CDR-H1 region
gggttctcactcagcaatgctagaatgggt

SEQ ID NO: 319 - DNA, 24 bp, Artificial Sequence
  Synthetic polynucleotide encoding artificial human antibody CDR-H1 region
gaattcacctttagtaactatgcc

SEQ ID NO: 320 - DNA, 30 bp, Artificial Sequence; identical to SEQ ID NO: 114
  Synthetic polynucleotide encoding artificial human antibody CDR-H1 region

SEQ ID NO: 321 - DNA, 24 bp, Artificial Sequence
  Synthetic polynucleotide encoding artificial human antibody CDR-H1 region
ggattcaccttcagtagctactgg

SEQ ID NO: 322 - DNA, 24 bp, Artificial Sequence
  Synthetic polynucleotide encoding artificial human antibody CDR-H1 region
ggattcagtatcagtagctatagc

SEQ ID NO: 323 - DNA, 24 bp, Artificial Sequence
  Synthetic polynucleotide encoding artificial human antibody CDR-H1 region
ggattcatcttcagtagctatgct

SEQ ID NO: 324 - DNA, 24 bp, Artificial Sequence
  Synthetic polynucleotide encoding artificial human antibody CDR-H1 region
ggattcacctttagcacctatgtc

SEQ ID NO: 325 - DNA, 24 bp, Artificial Sequence
  Synthetic polynucleotide encoding artificial human antibody CDR-H1 region
ggatacaactttaacgattactgg

SEQ ID NO: 326 - DNA, 24 bp, Artificial Sequence
  Synthetic polynucleotide encoding artificial human antibody CDR-H1 region
ggattcaccttcagtagttatgaa

SEQ ID NO: 327 - DNA, 24 bp, Artificial Sequence
  Synthetic polynucleotide encoding artificial human antibody CDR-H1 region
ggaggcaccttcagcagctatgct

SEQ ID NO: 328 - DNA, 24 bp, Artificial Sequence
  Synthetic polynucleotide encoding artificial human antibody CDR-H1 region
ggtgggtccttcagtggttactac

SEQ ID NO: 329 - DNA, 30 bp, Artificial Sequence
  Synthetic polynucleotide encoding artificial human antibody CDR-H1 region
ggtggctccatcagcagtagtacttacttc

SEQ ID NO: 330 - DNA, 24 bp, Artificial Sequence
  Synthetic polynucleotide encoding artificial human antibody CDR-H1 region
ggattcactttcagtaacgcctgg

SEQ ID NO: 331 - DNA, 24 bp, Artificial Sequence
  Synthetic polynucleotide encoding artificial human antibody CDR-H1 region
ggattcaccttcagtagctatggc

SEQ ID NO: 332 - DNA, 24 bp, Artificial Sequence
  Synthetic polynucleotide encoding artificial human antibody CDR-H1 region
ggttacacctttaccagctatggt

SEQ ID NO: 333 - DNA, 24 bp, Artificial Sequence
  Synthetic polynucleotide encoding artificial human antibody CDR-H1 region
ggactcaccttcagtgaccactac

SEQ ID NO: 334 - DNA, 24 bp, Artificial Sequence
  Synthetic polynucleotide encoding artificial human antibody CDR-H1 region
ggatacaccttcaccggctactat

SEQ ID NO: 335 - DNA, 30 bp, Artificial Sequence; identical to SEQ ID NO: 15
  Synthetic polynucleotide encoding artificial human antibody CDR-H1 region

SEQ ID NO: 336 - DNA, 24 bp, Artificial Sequence
  Synthetic polynucleotide encoding artificial human antibody CDR-H1 region
ggtgcccccatcacaacttactac

SEQ ID NO: 337 - DNA, 24 bp, Artificial Sequence
  Synthetic polynucleotide encoding artificial human antibody CDR-H1 region
ggattcacctttagtacctattgg

SEQ ID NO: 338 - DNA, 24 bp, Artificial Sequence
  Synthetic polynucleotide encoding artificial human antibody CDR-H1 region
ggattcacctttgatgattatgcc

SEQ ID NO: 339 - DNA, 30 bp, Artificial Sequence
  Synthetic polynucleotide encoding artificial human antibody CDR-H1 region
ggcgactccatcagcaggggcacttactac

SEQ ID NO: 340 - DNA, 24 bp, Artificial Sequence
  Synthetic polynucleotide encoding artificial human antibody CDR-H1 region
ggattcacctttagtaggtattgg

SEQ ID NO: 341 - DNA, 30 bp, Artificial Sequence
  Synthetic polynucleotide encoding artificial human antibody CDR-H1 region
ggtggccccatcagcagtggtaattactac

SEQ ID NO: 342 - DNA, 24 bp, Artificial Sequence
  Synthetic polynucleotide encoding artificial human antibody CDR-H1 region
ggatacaccctcattgaattatcc

SEQ ID NO: 343 - DNA, 30 bp, Artificial Sequence; identical to SEQ ID NO: 15
  Synthetic polynucleotide encoding artificial human antibody CDR-H1 region

SEQ ID NO: 344 - DNA, 24 bp, Artificial Sequence
  Synthetic polynucleotide encoding artificial human antibody CDR-H1 region
ggatacaccctcactgaattatcc

SEQ ID NO: 345 - DNA, 30 bp, Artificial Sequence; identical to SEQ ID NO: 299
  Synthetic polynucleotide encoding artificial human antibody CDR-H1 region

SEQ ID NO: 346 - DNA, 24 bp, Artificial Sequence
  Synthetic polynucleotide encoding artificial human antibody CDR-H1 region
ggtgggtccttcagtggttactac

SEQ ID NO: 347 - DNA, 24 bp, Artificial Sequence
  Synthetic polynucleotide encoding artificial human antibody CDR-H1 region
ggtgggtccttcagtggttactac

SEQ ID NO: 348 - DNA, 24 bp, Artificial Sequence
  Synthetic polynucleotide encoding artificial human antibody CDR-H1 region
ggatacaccttcaccggctactat

SEQ ID NO: 349 - DNA, 30 bp, Artificial Sequence; identical to SEQ ID NO: 55
  Synthetic polynucleotide encoding artificial human antibody CDR-H1 region

SEQ ID NO: 350 - DNA, 24 bp, Artificial Sequence
  Synthetic polynucleotide encoding artificial human antibody CDR-H1 region
ggtggctccatcagtagttactac

SEQ ID NO: 351 - DNA, 30 bp, Artificial Sequence; identical to SEQ ID NO: 114
  Synthetic polynucleotide encoding artificial human antibody CDR-H1 region

SEQ ID NO: 352 - DNA, 24 bp, Artificial Sequence
  Synthetic polynucleotide encoding artificial human antibody CDR-H1 region
ggattcacctttagcagctttgcc

SEQ ID NO: 353 - DNA, 24 bp, Artificial Sequence
  Synthetic polynucleotide encoding artificial human antibody CDR-H1 region
ggattcaccttcagtagctatggc

SEQ ID NO: 354 - DNA, 24 bp, Artificial Sequence
  Synthetic polynucleotide encoding artificial human antibody CDR-H1 region
ggattcaccttcagtagctatggc

SEQ ID NO: 355 - DNA, 24 bp, Artificial Sequence
  Synthetic polynucleotide encoding artificial human antibody CDR-H1 region
ggaggcaccttcagcagctatact

SEQ ID NO: 356 - DNA, 24 bp, Artificial Sequence
  Synthetic polynucleotide encoding artificial human antibody CDR-H1 region
ggattcaccttcagtagctatggc

SEQ ID NO: 357 - DNA, 24 bp, Artificial Sequence
  Synthetic polynucleotide encoding artificial human antibody CDR-H1 region
gggttcaccgtcagtagcaactac

SEQ ID NO: 358 - DNA, 30 bp, Artificial Sequence; identical to SEQ ID NO: 55
  Synthetic polynucleotide encoding artificial human antibody CDR-H1 region

SEQ ID NO: 359 - DNA, 24 bp, Artificial Sequence
  Synthetic polynucleotide encoding artificial human antibody CDR-H1 region
ggagacagcctcactgaattttcc

SEQ ID NO: 360 - DNA, 24 bp, Artificial Sequence
  Synthetic polynucleotide encoding artificial human antibody CDR-H1 region
ggatacaccttcaccacctatgac

SEQ ID NO: 361 - DNA, 24 bp, Artificial Sequence
  Synthetic polynucleotide encoding artificial human antibody CDR-H1 region
ggattcaccttcagtaactatggc

SEQ ID NO: 362 - DNA, 24 bp, Artificial Sequence
  Synthetic polynucleotide encoding artificial human antibody CDR-H1 region
ggattcaccttcagtagttatgaa

SEQ ID NO: 363 - DNA, 24 bp, Artificial Sequence
  Synthetic polynucleotide encoding artificial human antibody CDR-H1 region
agattcacctttagcagctatgcc

SEQ ID NO: 364 - DNA, 30 bp, Artificial Sequence; identical to SEQ ID NO: 45
  Synthetic polynucleotide encoding artificial human antibody CDR-H1 region

SEQ ID NO: 365 - DNA, 30 bp, Artificial Sequence; identical to SEQ ID NO: 114
  Synthetic polynucleotide encoding artificial human antibody CDR-H1 region

SEQ ID NO: 366 - DNA, 24 bp, Artificial Sequence
  Synthetic polynucleotide encoding artificial human antibody CDR-H1 region
ggatacaccttcaccagttatgat

SEQ ID NO: 367 - DNA, 24 bp, Artificial Sequence
  Synthetic polynucleotide encoding artificial human antibody CDR-H1 region
ggattcttccttaggggtcgtggc

SEQ ID NO: 368 - DNA, 24 bp, Artificial Sequence
  Synthetic polynucleotide encoding artificial human antibody CDR-H1 region
ggattcaccttcagtagttatgaa

SEQ ID NO: 369 - DNA, 24 bp, Artificial Sequence
  Synthetic polynucleotide encoding artificial human antibody CDR-H1 region
ggattcaccttcagtagctatggc

SEQ ID NO: 370 - DNA, 24 bp, Artificial Sequence
  Synthetic polynucleotide encoding artificial human antibody CDR-H1 region
gggttcaccgtcagtagcaactac

SEQ ID NO: 371 - DNA, 30 bp, Artificial Sequence; identical to SEQ ID NO: 84
  Synthetic polynucleotide encoding artificial human antibody CDR-H1 region

SEQ ID NO: 372 - DNA, 24 bp, Artificial Sequence
  Synthetic polynucleotide encoding artificial human antibody CDR-H1 region
ggtgggcccttcagtgattcctac

SEQ ID NO: 373 - DNA, 30 bp, Artificial Sequence; identical to SEQ ID NO: 45
  Synthetic polynucleotide encoding artificial human antibody CDR-H1 region

SEQ ID NO: 374 - DNA, 24 bp, Artificial Sequence
  Synthetic polynucleotide encoding artificial human antibody CDR-H1 region
ggattcaccttcagtagctatggc

SEQ ID NO: 375 - DNA, 24 bp, Artificial Sequence
  Synthetic polynucleotide encoding artificial human antibody CDR-H1 region
ggattcaccttcagtaattatgaa

SEQ ID NO: 376 - DNA, 24 bp, Artificial Sequence
  Synthetic polynucleotide encoding artificial human antibody CDR-H1 region
ggatacaccttcaccagctactat

SEQ ID NO: 377 - DNA, 30 bp, Artificial Sequence
  Synthetic polynucleotide encoding artificial human antibody CDR-H1 region
gggttctcactcagtactagtggagtgggt

SEQ ID NO: 378 - DNA, 24 bp, Artificial Sequence
  Synthetic polynucleotide encoding artificial human antibody CDR-H1 region
ggattcaccttcagtagctatgct

SEQ ID NO: 379 - DNA, 24 bp, Artificial Sequence
  Synthetic polynucleotide encoding artificial human antibody CDR-H1 region
ggattcaccttcaacagctatgcc

SEQ ID NO: 380 - DNA, 30 bp, Artificial Sequence
  Synthetic polynucleotide encoding artificial human antibody CDR-H1 region
ggtggctccatcagcagtggtgattactat

SEQ ID NO: 381 - DNA, 24 bp, Artificial Sequence
  Synthetic polynucleotide encoding artificial human antibody CDR-H1 region
ggattcacgttcagtacctatggc

SEQ ID NO: 382 - DNA, 24 bp, Artificial Sequence
  Synthetic polynucleotide encoding artificial human antibody CDR-H1 region
ggatacaccctcactgaattatcc

SEQ ID NO: 383 - DNA, 24 bp, Artificial Sequence
  Synthetic polynucleotide encoding artificial human antibody CDR-H1 region
ggattcaccttcagtagttatgaa

SEQ ID NO: 384 - DNA, 30 bp, Artificial Sequence; identical to SEQ ID NO: 299
  Synthetic polynucleotide encoding artificial human antibody CDR-H1 region

SEQ ID NO: 385 - DNA, 30 bp, Artificial Sequence; identical to SEQ ID NO: 84
  Synthetic polynucleotide encoding artificial human antibody CDR-H1 region

SEQ ID NO: 386 - DNA, 30 bp, Artificial Sequence; identical to SEQ ID NO: 15
  Synthetic polynucleotide encoding artificial human antibody CDR-H1 region

SEQ ID NO: 387 - DNA, 24 bp, Artificial Sequence
  Synthetic polynucleotide encoding artificial human antibody CDR-H1 region
ggattcaccttcagtagctatggc

SEQ ID NO: 388 - DNA, 24 bp, Artificial Sequence
  Synthetic polynucleotide encoding artificial human antibody CDR-H1 region
ggtggctccatcagtagttactac

SEQ ID NO: 389 - DNA, 27 bp, Artificial Sequence
  Synthetic polynucleotide encoding artificial human antibody CDR-H1 region
ggtggctccatcagcagtagtaactgg

SEQ ID NO: 390 - DNA, 24 bp, Artificial Sequence
  Synthetic polynucleotide encoding artificial human antibody CDR-H1 region
ggatacaccttcaccagctactat

SEQ ID NO: 391 - DNA, 24 bp, Artificial Sequence
  Synthetic polynucleotide encoding artificial human antibody CDR-H1 region
ggatacaccctcactgaattatcc

SEQ ID NO: 392 - DNA, 24 bp, Artificial Sequence
  Synthetic polynucleotide encoding artificial human antibody CDR-H1 region
gggttcaccttcagtggctctgct

SEQ ID NO: 393 - DNA, 24 bp, Artificial Sequence
  Synthetic polynucleotide encoding artificial human antibody CDR-H1 region
ggattcaccttcagtgactactac

SEQ ID NO: 394 - DNA, 24 bp, Artificial Sequence
  Synthetic polynucleotide encoding artificial human antibody CDR-H1 region
ggatacatatttactaagtactgg

SEQ ID NO: 395 - DNA, 24 bp, Artificial Sequence
  Synthetic polynucleotide encoding artificial human antibody CDR-H1 region
ggatacaccttcaccggctactat

SEQ ID NO: 396 - DNA, 24 bp, Artificial Sequence
  Synthetic polynucleotide encoding artificial human antibody CDR-H1 region
ggattccacttcagtggcactgac

SEQ ID NO: 397 - DNA, 24 bp, Artificial Sequence
  Synthetic polynucleotide encoding artificial human antibody CDR-H1 region
ggatacaccctcactgaattatcc

SEQ ID NO: 398 - DNA, 24 bp, Artificial Sequence
  Synthetic polynucleotide encoding artificial human antibody CDR-H1 region
ggattcaccttcagtagctatgct

SEQ ID NO: 399 - DNA, 24 bp, Artificial Sequence
  Synthetic polynucleotide encoding artificial human antibody CDR-H1 region
ggattcaccttcagtagctatggc

SEQ ID NO: 400 - DNA, 24 bp, Artificial Sequence
  Synthetic polynucleotide encoding artificial human antibody CDR-H1 region
ggattcacctttagtagctattgg

SEQ ID NO: 401 - DNA, 30 bp, Artificial Sequence; identical to SEQ ID NO: 45
  Synthetic polynucleotide encoding artificial human antibody CDR-H1 region

SEQ ID NO: 402 - DNA, 24 bp, Artificial Sequence
  Synthetic polynucleotide encoding artificial human antibody CDR-H1 region
ggattcaccttcagtgactactac

SEQ ID NO: 403 - DNA, 24 bp, Artificial Sequence
  Synthetic polynucleotide encoding artificial human antibody CDR-H1 region
ggatacaccctcactgaattatcc

SEQ ID NO: 404 - DNA, 27 bp, Artificial Sequence
  Synthetic polynucleotide encoding artificial human antibody CDR-H1 region
ggtggctccatcagcagtagtaactgg

SEQ ID NO: 405 - DNA, 24 bp, Artificial Sequence
  Synthetic polynucleotide encoding artificial human antibody CDR-H1 region
ggattcaccgtcagtagcaactac

SEQ ID NO: 406 - DNA, 30 bp, Artificial Sequence; identical to SEQ ID NO: 45
  Synthetic polynucleotide encoding artificial human antibody CDR-H1 region

SEQ ID NO: 407 - DNA, 24 bp, Artificial Sequence
  Synthetic polynucleotide encoding artificial human antibody CDR-H1 region
ggattcacctttagcagctatgcc

SEQ ID NO: 408 - DNA, 24 bp, Artificial Sequence
  Synthetic polynucleotide encoding artificial human antibody CDR-H1 region
ggatacaccctcactgaattatcc

SEQ ID NO: 409 - DNA, 30 bp, Artificial Sequence; identical to SEQ ID NO: 318
  Synthetic polynucleotide encoding artificial human antibody CDR-H1 region

SEQ ID NO: 410 - DNA, 24 bp, Artificial Sequence
  Synthetic polynucleotide encoding artificial human antibody CDR-H1 region
ggattcacctttggtgattatgct

SEQ ID NO: 411 - DNA, 30 bp, Artificial Sequence; identical to SEQ ID NO: 15
  Synthetic polynucleotide encoding artificial human antibody CDR-H1 region

SEQ ID NO: 412 - DNA, 24 bp, Artificial Sequence
  Synthetic polynucleotide encoding artificial human antibody CDR-H1 region
ggtggctccatcaatagttactac

SEQ ID NO: 413 - DNA, 24 bp, Artificial Sequence
  Synthetic polynucleotide encoding artificial human antibody CDR-H1 region
ggattcaccttcagtagctactgg

SEQ ID NO: 414 - DNA, 30 bp, Artificial Sequence; identical to SEQ ID NO: 114
  Synthetic polynucleotide encoding artificial human antibody CDR-H1 region

SEQ ID NO: 415 - DNA, 30 bp, Artificial Sequence; identical to SEQ ID NO: 45
  Synthetic polynucleotide encoding artificial human antibody CDR-H1 region

SEQ ID NO: 416 - DNA, 24 bp, Artificial Sequence
  Synthetic polynucleotide encoding artificial human antibody CDR-H1 region
ggtggctccatcagtagttactac

SEQ ID NO: 417 - DNA, 24 bp, Artificial Sequence
  Synthetic polynucleotide encoding artificial human antibody CDR-H1 region
ggtggctccatcagtagttactac

SEQ ID NO: 418 - DNA, 24 bp, Artificial Sequence
  Synthetic polynucleotide encoding artificial human antibody CDR-H1 region
ggcttcgacttcactaactttttc

SEQ ID NO: 419 - DNA, 24 bp, Artificial Sequence
  Synthetic polynucleotide encoding artificial human antibody CDR-H1 region
ggttacacctttaccagctatggt

SEQ ID NO: 420 - DNA, 24 bp, Artificial Sequence
  Synthetic polynucleotide encoding artificial human antibody CDR-H1 region
ggatacaccctcactgaattatcc

SEQ ID NO: 421 - DNA, 24 bp, Artificial Sequence
  Synthetic polynucleotide encoding artificial human antibody CDR-H1 region
ggatacaccctcactgaattatcc

SEQ ID NO: 422 - DNA, 24 bp, Artificial Sequence
  Synthetic polynucleotide encoding artificial human antibody CDR-H1 region
ggatacaccctcactgaattatcc

SEQ ID NO: 423 - DNA, 30 bp, Artificial Sequence; identical to SEQ ID NO: 45
  Synthetic polynucleotide encoding artificial human antibody CDR-H1 region

SEQ ID NO: 424 - DNA, 30 bp, Artificial Sequence; identical to SEQ ID NO: 114
  Synthetic polynucleotide encoding artificial human antibody CDR-H1 region

SEQ ID NO: 425 - DNA, 24 bp, Artificial Sequence
  Synthetic polynucleotide encoding artificial human antibody CDR-H1 region
ggattcgcctttaccacctatggc

SEQ ID NO: 426 - DNA, 24 bp, Artificial Sequence
  Synthetic polynucleotide encoding artificial human antibody CDR-H1 region
ggattcacctttagcagctatgcc

SEQ ID NO: 427 - DNA, 24 bp, Artificial Sequence
  Synthetic polynucleotide encoding artificial human antibody CDR-H1 region
ggattcaccttcagtagctatggc

SEQ ID NO: 428 - DNA, 30 bp, Artificial Sequence; identical to SEQ ID NO: 45
  Synthetic polynucleotide encoding artificial human antibody CDR-H1 region

SEQ ID NO: 429 - DNA, 30 bp, Artificial Sequence; identical to SEQ ID NO: 114
  Synthetic polynucleotide encoding artificial human antibody CDR-H1 region

SEQ ID NO: 430 - DNA, 24 bp, Artificial Sequence
  Synthetic polynucleotide encoding artificial human antibody CDR-H1 region
ggaggcaccttcagcaactatgct

SEQ ID NO: 431 - DNA, 24 bp, Artificial Sequence
  Synthetic polynucleotide encoding artificial human antibody CDR-H1 region
ggattcttccttaggggtcgtggc

SEQ ID NO: 432 - DNA, 30 bp, Artificial Sequence; identical to SEQ ID NO: 318
  Synthetic polynucleotide encoding artificial human antibody CDR-H1 region

SEQ ID NO: 433 - DNA, 30 bp, Artificial Sequence; identical to SEQ ID NO: 15
  Synthetic polynucleotide encoding artificial human antibody CDR-H1 region

SEQ ID NO: 434 - DNA, 24 bp, Artificial Sequence
  Synthetic polynucleotide encoding artificial human antibody CDR-H1 region
ggattcggcttcaataactatggc

SEQ ID NO: 435 - DNA, 24 bp, Artificial Sequence
  Synthetic polynucleotide encoding artificial human antibody CDR-H1 region
ggattcaccttcagtagctactgg

SEQ ID NO: 436 - DNA, 24 bp, Artificial Sequence
  Synthetic polynucleotide encoding artificial human antibody CDR-H1 region
ggatacaccttcaccggctactat

SEQ ID NO: 437 - DNA, 30 bp, Artificial Sequence; identical to SEQ ID NO: 84
  Synthetic polynucleotide encoding artificial human antibody CDR-H1 region

SEQ ID NO: 438 - DNA, 24 bp, Artificial Sequence
  Synthetic polynucleotide encoding artificial human antibody CDR-H1 region
ggatacaccctcactgaattatcc

SEQ ID NO: 439 - DNA, 24 bp, Artificial Sequence
  Synthetic polynucleotide encoding artificial human antibody CDR-H1 region
ggattcacctttagtagctattgg

SEQ ID NO: 440 - DNA, 24 bp, Artificial Sequence
  Synthetic polynucleotide encoding artificial human antibody CDR-H1 region
ggattcacctttgatgattatgcc

SEQ ID NO: 441 - DNA, 24 bp, Artificial Sequence
  Synthetic polynucleotide encoding artificial human antibody CDR-H1 region
ggagcctccttcgacaacaatgcg

SEQ ID NO: 442 - DNA, 24 bp, Artificial Sequence
  Synthetic polynucleotide encoding artificial human antibody CDR-H1 region
ggattcacctttagtagttatagc

SEQ ID NO: 443 - DNA, 24 bp, Artificial Sequence
  Synthetic polynucleotide encoding artificial human antibody CDR-H1 region
ggtggctccatcagtagttactac

SEQ ID NO: 444 - DNA, 24 bp, Artificial Sequence
  Synthetic polynucleotide encoding artificial human antibody CDR-H1 region
ggatacaccttcaccagttatgat

SEQ ID NO: 445 - DNA, 24 bp, Artificial Sequence
  Synthetic polynucleotide encoding artificial human antibody CDR-H1 region
ggattcaccttcagtagctatagc

SEQ ID NO: 446 - DNA, 24 bp, Artificial Sequence
  Synthetic polynucleotide encoding artificial human antibody CDR-H1 region
ggtgggtccttcagtggttactac

SEQ ID NO: 447 - DNA, 24 bp, Artificial Sequence
  Synthetic polynucleotide encoding artificial human antibody CDR-H1 region
ggatacaccctcactgaattatcc

SEQ ID NO: 448 - DNA, 30 bp, Artificial Sequence; identical to SEQ ID NO: 45
  Synthetic polynucleotide encoding artificial human antibody CDR-H1 region

SEQ ID NO: 449 - DNA, 30 bp, Artificial Sequence; identical to SEQ ID NO: 114
  Synthetic polynucleotide encoding artificial human antibody CDR-H1 region

SEQ ID NO: 450 - DNA, 24 bp, Artificial Sequence
  Synthetic polynucleotide encoding artificial human antibody CDR-H1 region
ggttacacctttaccagctatggt

SEQ ID NO: 451 - DNA, 24 bp, Artificial Sequence
  Synthetic polynucleotide encoding artificial human antibody CDR-H1 region
gggttcacttttagcaactatgtc

SEQ ID NO: 452 - DNA, 24 bp, Artificial Sequence
  Synthetic polynucleotide encoding artificial human antibody CDR-H1 region
ggatacaccctcactgaattatcc

SEQ ID NO: 453 - DNA, 24 bp, Artificial Sequence
  Synthetic polynucleotide encoding artificial human antibody CDR-H1 region
ggatacaccttcaccagttatgat

SEQ ID NO: 454 - DNA, 30 bp, Artificial Sequence; identical to SEQ ID NO: 114
  Synthetic polynucleotide encoding artificial human antibody CDR-H1 region

SEQ ID NO: 455 - DNA, 30 bp, Artificial Sequence; identical to SEQ ID NO: 318
  Synthetic polynucleotide encoding artificial human antibody CDR-H1 region

SEQ ID NO: 456 - DNA, 24 bp, Artificial Sequence
  Synthetic polynucleotide encoding artificial human antibody CDR-H1 region
ggttacaacttcatgaactctggt

SEQ ID NO: 457 - DNA, 24 bp, Artificial Sequence
  Synthetic polynucleotide encoding artificial human antibody CDR-H1 region
ggattcacctttgatgattatgcc

SEQ ID NO: 458 - DNA, 30 bp, Artificial Sequence; identical to SEQ ID NO: 318
  Synthetic polynucleotide encoding artificial human antibody CDR-H1 region

SEQ ID NO: 459 - DNA, 30 bp, Artificial Sequence; identical to SEQ ID NO: 45
  Synthetic polynucleotide encoding artificial human antibody CDR-H1 region

SEQ ID NO: 460 - DNA, 30 bp, Artificial Sequence; identical to SEQ ID NO: 114
  Synthetic polynucleotide encoding artificial human antibody CDR-H1 region

SEQ ID NO: 461 - DNA, 24 bp, Artificial Sequence
  Synthetic polynucleotide encoding artificial human antibody CDR-H1 region
ggatacaccttcaccagctactat

SEQ ID NO: 462 - DNA, 30 bp, Artificial Sequence; identical to SEQ ID NO: 55
  Synthetic polynucleotide encoding artificial human antibody CDR-H1 region

SEQ ID NO: 463 - DNA, 24 bp, Artificial Sequence
  Synthetic polynucleotide encoding artificial human antibody CDR-H1 region
ggatacaccttcaccggctactat

SEQ ID NO: 464 - DNA, 24 bp, Artificial Sequence
  Synthetic polynucleotide encoding artificial human antibody CDR-H1 region
ggattcgacttcgacacctttggc

SEQ ID NO: 465 - DNA, 24 bp, Artificial Sequence
  Synthetic polynucleotide encoding artificial human antibody CDR-H1 region
ggattctccttccgagacaatgtt

SEQ ID NO: 466 - DNA, 30 bp, Artificial Sequence; identical to SEQ ID NO: 299
  Synthetic polynucleotide encoding artificial human antibody CDR-H1 region

SEQ ID NO: 467 - DNA, 24 bp, Artificial Sequence
  Synthetic polynucleotide encoding artificial human antibody CDR-H1 region
ggatacaccctcactgaattatcc

SEQ ID NO: 468 - DNA, 30 bp, Artificial Sequence; identical to SEQ ID NO: 114
  Synthetic polynucleotide encoding artificial human antibody CDR-H1 region

SEQ ID NO: 469 - DNA, 24 bp, Artificial Sequence
  Synthetic polynucleotide encoding artificial human antibody CDR-H1 region
ggattcactttcagtaacgcctgg

SEQ ID NO: 470 - DNA, 24 bp, Artificial Sequence
  Synthetic polynucleotide encoding artificial human antibody CDR-H1 region
ggtgacatctttgctagtgagggt

SEQ ID NO: 471 - DNA, 24 bp, Artificial Sequence
  Synthetic polynucleotide encoding artificial human antibody CDR-H1 region
ggatacagcctcagtaaattatcc

SEQ ID NO: 472 - DNA, 24 bp, Artificial Sequence
  Synthetic polynucleotide encoding artificial human antibody CDR-H1 region
ggatacaccctcactgaattatcc

SEQ ID NO: 473 - DNA, 24 bp, Artificial Sequence
  Synthetic polynucleotide encoding artificial human antibody CDR-H1 region
ggattcaccttcagtagctatggc

SEQ ID NO: 474 - DNA, 24 bp, Artificial Sequence
  Synthetic polynucleotide encoding artificial human antibody CDR-H1 region
ggtggctccatcagtagttactac

SEQ ID NO: 475 - DNA, 24 bp, Artificial Sequence
  Synthetic polynucleotide encoding artificial human antibody CDR-H1 region
ggattcacctttagcacctatgcc

SEQ ID NO: 476 - DNA, 24 bp, Artificial Sequence
  Synthetic polynucleotide encoding artificial human antibody CDR-H1 region
ggattcaccttcagtagctatggc

SEQ ID NO: 477 - DNA, 24 bp, Artificial Sequence
  Synthetic polynucleotide encoding artificial human antibody CDR-H1 region
gggctcaccgtcagtagcaactac

SEQ ID NO: 478 - DNA, 24 bp, Artificial Sequence
  Synthetic polynucleotide encoding artificial human antibody CDR-H1 region
ggatacaccttcaccggctactat

SEQ ID NO: 479 - DNA, 24 bp, Artificial Sequence
  Synthetic polynucleotide encoding artificial human antibody CDR-H1 region
ggattcaccgtcagtagcaactac

SEQ ID NO: 480 - DNA, 24 bp, Artificial Sequence
  Synthetic polynucleotide encoding artificial human antibody CDR-H1 region
ggattcattttcagtaacgcctgg

SEQ ID NO: 481 - DNA, 24 bp, Artificial Sequence
  Synthetic polynucleotide encoding artificial human antibody CDR-H1 region
ggattcaccttcagtagctatagc

SEQ ID NO: 482 - DNA, 24 bp, Artificial Sequence
  Synthetic polynucleotide encoding artificial human antibody CDR-H1 region
ggattcacctttagcagctatgcc

SEQ ID NO: 483 - DNA, 24 bp, Artificial Sequence
  Synthetic polynucleotide encoding artificial human antibody CDR-H1 region
ggatacaccttcaccggctactat

SEQ ID NO: 484 - DNA, 24 bp, Artificial Sequence
  Synthetic polynucleotide encoding artificial human antibody CDR-H1 region
ggttacacctttaccagctacggt

SEQ ID NO: 485 - DNA, 24 bp, Artificial Sequence
  Synthetic polynucleotide encoding artificial human antibody CDR-H1 region
ggattcaccttcagtagctatggc

SEQ ID NO: 486 - DNA, 24 bp, Artificial Sequence
  Synthetic polynucleotide encoding artificial human antibody CDR-H1 region
ggattcaccttcagtagctatgct

SEQ ID NO: 487 - DNA, 24 bp, Artificial Sequence
  Synthetic polynucleotide encoding artificial human antibody CDR-H1 region
ggatacaccctcactgaattatcc

SEQ ID NO: 488 - DNA, 24 bp, Artificial Sequence
  Synthetic polynucleotide encoding artificial human antibody CDR-H1 region
ggattcaccttcagtagctatggc

SEQ ID NO: 489 - DNA, 30 bp, Artificial Sequence; identical to SEQ ID NO: 84
  Synthetic polynucleotide encoding artificial human antibody CDR-H1 region

SEQ ID NO: 490 - DNA, 30 bp, Artificial Sequence
  Synthetic polynucleotide encoding artificial human antibody CDR-H1 region
ggtgcctccattagcagtgatgattactac

SEQ ID NO: 491 - DNA, 24 bp, Artificial Sequence
  Synthetic polynucleotide encoding artificial human antibody CDR-H1 region
ggattcaccttcagtagctatggc

SEQ ID NO: 492 - DNA, 24 bp, Artificial Sequence
  Synthetic polynucleotide encoding artificial human antibody CDR-H1 region
ggatacagctttaccagctactgg

SEQ ID NO: 493 - DNA, 24 bp, Artificial Sequence
  Synthetic polynucleotide encoding artificial human antibody CDR-H1 region
ggtggctccatgagtcgttactac

SEQ ID NO: 494 - DNA, 24 bp, Artificial Sequence
  Synthetic polynucleotide encoding artificial human antibody CDR-H1 region
ggattcacctttggtgattatgct

SEQ ID NO: 495 - DNA, 24 bp, Artificial Sequence
  Synthetic polynucleotide encoding artificial human antibody CDR-H1 region
ggaggcaccttcagcagctatgct

SEQ ID NO: 496 - DNA, 24 bp, Artificial Sequence
  Synthetic polynucleotide encoding artificial human antibody CDR-H1 region
ggattcaccttcagtagctatggc

SEQ ID NO: 497 - DNA, 24 bp, Artificial Sequence
  Synthetic polynucleotide encoding artificial human antibody CDR-H1 region
ggatacaccttcaccagttatgat

SEQ ID NO: 498 - DNA, 24 bp, Artificial Sequence
  Synthetic polynucleotide encoding artificial human antibody CDR-H1 region
ggaggttctttcaacacctatgca

SEQ ID NO: 499 - DNA, 24 bp, Artificial Sequence
  Synthetic polynucleotide encoding artificial human antibody CDR-H1 region
ggattcagcttcaataactataac

SEQ ID NO: 500 - DNA, 24 bp, Artificial Sequence
  Synthetic polynucleotide encoding artificial human antibody CDR-H1 region
ggattcaccttcagtagctatgct

SEQ ID NO: 501 - DNA, 24 bp, Artificial Sequence
  Synthetic polynucleotide encoding artificial human antibody CDR-H1 region
ggattcacctttagcagctatgcc

SEQ ID NO: 502 - DNA, 24 bp, Artificial Sequence
  Synthetic polynucleotide encoding artificial human antibody CDR-H1 region
ggattcactttcagtaacgcctgg

SEQ ID NO: 503 - DNA, 30 bp, Artificial Sequence; identical to SEQ ID NO: 215
  Synthetic polynucleotide encoding artificial human antibody CDR-H1 region

SEQ ID NO: 504 - DNA, 24 bp, Artificial Sequence
  Synthetic polynucleotide encoding artificial human antibody CDR-H1 region
ggattcaccttcagtagctatggc

SEQ ID NO: 505 - DNA, 24 bp, Artificial Sequence
  Synthetic polynucleotide encoding artificial human antibody CDR-H1 region
ggattcaccttcagtagctatgct

SEQ ID NO: 506 - DNA, 24 bp, Artificial Sequence
  Synthetic polynucleotide encoding artificial human antibody CDR-H1 region
ggattcaccttcagtagctacgac

SEQ ID NO: 507 - DNA, 24 bp, Artificial Sequence
  Synthetic polynucleotide encoding artificial human antibody CDR-H1 region
ggattcacctttagcagctatgcc

SEQ ID NO: 508 - DNA, 30 bp, Artificial Sequence
  Synthetic polynucleotide encoding artificial human antibody CDR-H1 region
ggcgcctccgtcagagggggcggctactcc

SEQ ID NO: 509 - DNA, 24 bp, Artificial Sequence
  Synthetic polynucleotide encoding artificial human antibody CDR-H1 region
ggattcaccttcagtagctatagc

SEQ ID NO: 510 - DNA, 24 bp, Artificial Sequence
  Synthetic polynucleotide encoding artificial human antibody CDR-H1 region
ggattcgccgtcagttccatctac

SEQ ID NO: 511 - DNA, 24 bp, Artificial Sequence
  Synthetic polynucleotide encoding artificial human antibody CDR-H1 region
caattcaccttcagtcactatgaa

SEQ ID NO: 512 - DNA, 24 bp, Artificial Sequence
  Synthetic polynucleotide encoding artificial human antibody CDR-H1 region
ggattcacctttgatgattatgcc

SEQ ID NO: 513 - DNA, 30 bp, Artificial Sequence; identical to SEQ ID NO: 84
  Synthetic polynucleotide encoding artificial human antibody CDR-H1 region

SEQ ID NO: 514 - DNA, 24 bp, Artificial Sequence
  Synthetic polynucleotide encoding artificial human antibody CDR-H1 region
ggattcacctttcagaactatgtc

SEQ ID NO: 515 - DNA, 30 bp, Artificial Sequence
  Synthetic polynucleotide encoding artificial human antibody CDR-H1 region
tgggacagtgtctcaactaaagaggctact

SEQ ID NO: 516 - DNA, 24 bp, Artificial Sequence
  Synthetic polynucleotide encoding artificial human antibody CDR-H1 region
ggattcaccttcagtagctatggc

SEQ ID NO: 517 - DNA, 30 bp, Artificial Sequence; identical to SEQ ID NO: 84
  Synthetic polynucleotide encoding artificial human antibody CDR-H1 region

SEQ ID NO: 518 - DNA, 24 bp, Artificial Sequence
  Synthetic polynucleotide encoding artificial human antibody CDR-H1 region
ggttacacctttaccagctatggt

SEQ ID NO: 519 - DNA, 24 bp, Artificial Sequence
  Synthetic polynucleotide encoding artificial human antibody CDR-H1 region
ggattcaccttcagtagctatgct

SEQ ID NO: 520 - DNA, 24 bp, Artificial Sequence
  Synthetic polynucleotide encoding artificial human antibody CDR-H1 region
ggattcaccttcagtagctatgct

SEQ ID NO: 521 - DNA, 24 bp, Artificial Sequence
  Synthetic polynucleotide encoding artificial human antibody CDR-H1 region
ggatacagctttaccagctactgg

SEQ ID NO: 522 - DNA, 24 bp, Artificial Sequence
  Synthetic polynucleotide encoding artificial human antibody CDR-H1 region
ggattcaccttcagtagctatgct

SEQ ID NO: 523 - DNA, 24 bp, Artificial Sequence
  Synthetic polynucleotide encoding artificial human antibody CDR-H1 region
ggatacagctttaccagctactgg

SEQ ID NO: 524 - DNA, 24 bp, Artificial Sequence
  Synthetic polynucleotide encoding artificial human antibody CDR-H1 region
ggtggctccatcagtagttactac

SEQ ID NO: 525 - DNA, 24 bp, Artificial Sequence
  Synthetic polynucleotide encoding artificial human antibody CDR-H1 region
ggattcaccttcagtagctatagc

SEQ ID NO: 526 - DNA, 24 bp, Artificial Sequence
  Synthetic polynucleotide encoding artificial human antibody CDR-H1 region
ggatacaccctcactgaattatcc

SEQ ID NO: 527 - DNA, 24 bp, Artificial Sequence
  Synthetic polynucleotide encoding artificial human antibody CDR-H1 region
ggattcacctttagtagccgttgg

SEQ ID NO: 528 - DNA, 30 bp, Artificial Sequence; identical to SEQ ID NO: 299
  Synthetic polynucleotide encoding artificial human antibody CDR-H1 region

SEQ ID NO: 529 - DNA, 24 bp, Artificial Sequence
  Synthetic polynucleotide encoding artificial human antibody CDR-H1 region
ggatacaccctcactgaattatcc

SEQ ID NO: 530 - DNA, 24 bp, Artificial Sequence
  Synthetic polynucleotide encoding artificial human antibody CDR-H1 region
ggttacagctttcccagctactgg

SEQ ID NO: 531 - DNA, 24 bp, Artificial Sequence
  Synthetic polynucleotide encoding artificial human antibody CDR-H1 region
ggattcaccttcagtagctatggc

SEQ ID NO: 532 - DNA, 24 bp, Artificial Sequence
  Synthetic polynucleotide encoding artificial human antibody CDR-H1 region
ggtggctccatcagtagttactac

SEQ ID NO: 533 - DNA, 24 bp, Artificial Sequence
  Synthetic polynucleotide encoding artificial human antibody CDR-H1 region
ggattcaccttcagtagctatggc

SEQ ID NO: 534 - DNA, 24 bp, Artificial Sequence
  Synthetic polynucleotide encoding artificial human antibody CDR-H1 region
ggattcacctttagcagctatgcc

SEQ ID NO: 535 - DNA, 24 bp, Artificial Sequence
  Synthetic polynucleotide encoding artificial human antibody CDR-H1 region
ggattcactttcagtaacgcctgg

SEQ ID NO: 536 - DNA, 24 bp, Artificial Sequence
  Synthetic polynucleotide encoding artificial human antibody CDR-H1 region
ggatacaccctcactgaattatcc

SEQ ID NO: 537 - DNA, 24 bp, Artificial Sequence
  Synthetic polynucleotide encoding artificial human antibody CDR-H1 region
ggatacaccctcactgaattatcc

SEQ ID NO: 538 - DNA, 24 bp, Artificial Sequence
  Synthetic polynucleotide encoding artificial human antibody CDR-H1 region
ggttacacctttaccagctatggt

SEQ ID NO: 539 - DNA, 24 bp, Artificial Sequence
  Synthetic polynucleotide encoding artificial human antibody CDR-H1 region
ggattcacgtttagcagctatgac

SEQ ID NO: 540 - DNA, 30 bp, Artificial Sequence; identical to SEQ ID NO: 215
  Synthetic polynucleotide encoding artificial human antibody CDR-H1 region

SEQ ID NO: 541 - DNA, 24 bp, Artificial Sequence
  Synthetic polynucleotide encoding artificial human antibody CDR-H1 region
ggatacaccttcactagctatgct

SEQ ID NO: 542 - DNA, 24 bp, Artificial Sequence
  Synthetic polynucleotide encoding artificial human antibody CDR-H1 region
ggattcaccttcagtagctatgct

SEQ ID NO: 543 - DNA, 24 bp, Artificial Sequence
  Synthetic polynucleotide encoding artificial human antibody CDR-H1 region
ggattcaccttcagtagctatggc

SEQ ID NO: 544 - DNA, 24 bp, Artificial Sequence
  Synthetic polynucleotide encoding artificial human antibody CDR-H1 region
ggatacaccttcaccagctactat

SEQ ID NO: 545 - DNA, 24 bp, Artificial Sequence
  Synthetic polynucleotide encoding artificial human antibody CDR-H1 region
ggattcaccttcagtagctatgct

SEQ ID NO: 546 - DNA, 24 bp, Artificial Sequence
  Synthetic polynucleotide encoding artificial human antibody CDR-H1 region
ggatacaccttcaccagctactat

SEQ ID NO: 547 - DNA, 27 bp, Artificial Sequence
  Synthetic polynucleotide encoding artificial human antibody CDR-H1 region
gatgactccatcagcagtaaaaactgg

SEQ ID NO: 548 - DNA, 30 bp, Artificial Sequence; identical to SEQ ID NO: 45
  Synthetic polynucleotide encoding artificial human antibody CDR-H1 region

SEQ ID NO: 549 - DNA, 24 bp, Artificial Sequence
  Synthetic polynucleotide encoding artificial human antibody CDR-H1 region
ggatacaggtttaccagctactgg

SEQ ID NO: 550 - DNA, 24 bp, Artificial Sequence
  Synthetic polynucleotide encoding artificial human antibody CDR-H1 region
gggttcatcttcgaagactattct

SEQ ID NO: 551 - DNA, 30 bp, Artificial Sequence
  Synthetic polynucleotide encoding artificial human antibody CDR-H1 region
ggtgactccatcagcagtggtggttactac

SEQ ID NO: 552 - DNA, 24 bp, Artificial Sequence
  Synthetic polynucleotide encoding artificial human antibody CDR-H1 region
gatacgtccctcaggagttactcg

SEQ ID NO: 553 - DNA, 24 bp, Artificial Sequence
  Synthetic polynucleotide encoding artificial human antibody CDR-H1 region
ggattcacctttgatgattatgcc

SEQ ID NO: 554 - DNA, 30 bp, Artificial Sequence; identical to SEQ ID NO: 299
  Synthetic polynucleotide encoding artificial human antibody CDR-H1 region

SEQ ID NO: 555 - DNA, 24 bp, Artificial Sequence
  Synthetic polynucleotide encoding artificial human antibody CDR-H1 region
ggtggctccatgagtagttactac

SEQ ID NO: 556 - DNA, 24 bp, Artificial Sequence
  Synthetic polynucleotide encoding artificial human antibody CDR-H1 region
ggattcaccttcagtagctatgct

SEQ ID NO: 557 - DNA, 24 bp, Artificial Sequence
  Synthetic polynucleotide encoding artificial human antibody CDR-H1 region
ggattcacctttagcagctatgcc

SEQ ID NO: 558 - DNA, 24 bp, Artificial Sequence
  Synthetic polynucleotide encoding artificial human antibody CDR-H1 region
ggtggctccatcagtagttactac

SEQ ID NO: 559 - DNA, 24 bp, Artificial Sequence
  Synthetic polynucleotide encoding artificial human antibody CDR-H1 region
gggttcaccgtcagtagcaactac

SEQ ID NO: 560 - DNA, 24 bp, Artificial Sequence
  Synthetic polynucleotide encoding artificial human antibody CDR-H1 region
ggattcgttttcactggcgcctgg

SEQ ID NO: 561 - DNA, 24 bp, Artificial Sequence
  Synthetic polynucleotide encoding artificial human antibody CDR-H1 region
ggattcatcttcagtagttatgaa

SEQ ID NO: 562 - DNA, 24 bp, Artificial Sequence
  Synthetic polynucleotide encoding artificial human antibody CDR-H1 region
ggattcagcttaagtaaatattgg

SEQ ID NO: 563 - DNA, 24 bp, Artificial Sequence
  Synthetic polynucleotide encoding artificial human antibody CDR-H1 region
ggattcacctttattcactctgct

SEQ ID NO: 564 - DNA, 24 bp, Artificial Sequence
  Synthetic polynucleotide encoding artificial human antibody CDR-H1 region
ggaggcaccttcagcacctatact

SEQ ID NO: 565 - DNA, 24 bp, Artificial Sequence
  Synthetic polynucleotide encoding artificial human antibody CDR-H1 region
ggtggctccatcagtagttactac

SEQ ID NO: 566 - DNA, 24 bp, Artificial Sequence
  Synthetic polynucleotide encoding artificial human antibody CDR-H1 region
gggtataccttcaccgactattat

SEQ ID NO: 567 - DNA, 30 bp, Artificial Sequence
  Synthetic polynucleotide encoding artificial human antibody CDR-H1 region
ggggacagtatctctagcgacactgctgct

SEQ ID NO: 568 - DNA, 30 bp, Artificial Sequence
  Synthetic polynucleotide encoding artificial human antibody CDR-H1 region
ggtgactccatcagtggtggtgattattat

SEQ ID NO: 569 - DNA, 24 bp, Artificial Sequence
  Synthetic polynucleotide encoding artificial human antibody CDR-H1 region
ggatacgtgtttgccaagtatgcc

SEQ ID NO: 570 - DNA, 24 bp, Artificial Sequence
  Synthetic polynucleotide encoding artificial human antibody CDR-H1 region
ggaaacagtctcagtgatttatcc

SEQ ID NO: 571 - DNA, 24 bp, Artificial Sequence
  Synthetic polynucleotide encoding artificial human antibody CDR-H1 region
ggattcagtttcagtgaccactac

SEQ ID NO: 572 - DNA, 24 bp, Artificial Sequence
  Synthetic polynucleotide encoding artificial human antibody CDR-H1 region
ggattcagcttcagtaactattgg

SEQ ID NO: 573 - DNA, 24 bp, Artificial Sequence
  Synthetic polynucleotide encoding artificial human antibody CDR-H1 region
ggtcgctccattagtggctcctac

SEQ ID NO: 574 - DNA, 24 bp, Artificial Sequence
  Synthetic polynucleotide encoding artificial human antibody CDR-H1 region
gggttcagcgtcactaccacccaa

SEQ ID NO: 575 - DNA, 24 bp, Artificial Sequence
  Synthetic polynucleotide encoding artificial human antibody CDR-H1 region
ggattcaccttcagtagctatgct

SEQ ID NO: 576 - DNA, 24 bp, Artificial Sequence
  Synthetic polynucleotide encoding artificial human antibody CDR-H1 region
ggattcacctttagtaactatgcc

SEQ ID NO: 577 - DNA, 24 bp, Artificial Sequence
  Synthetic polynucleotide encoding artificial human antibody CDR-H1 region
ggatttttcgtcactgagtacgac

SEQ ID NO: 578 - DNA, 24 bp, Artificial Sequence
  Synthetic polynucleotide encoding artificial human antibody CDR-H1 region
ggtgactccctcaatggcttcgac

SEQ ID NO: 579 - DNA, 30 bp, Artificial Sequence
  Synthetic polynucleotide encoding artificial human antibody CDR-H1 region
ggtgactccatcagcattgatggtttctac

SEQ ID NO: 580 - DNA, 24 bp, Artificial Sequence
  Synthetic polynucleotide encoding artificial human antibody CDR-H1 region
ggattcacgttcagttcctattgg

SEQ ID NO: 581 - DNA, 24 bp, Artificial Sequence
  Synthetic polynucleotide encoding artificial human antibody CDR-H1 region
ggattcacctttagtccctattgg

SEQ ID NO: 582 - DNA, 24 bp, Artificial Sequence
  Synthetic polynucleotide encoding artificial human antibody CDR-H1 region
agactaagcgtcagcagatatgcc

SEQ ID NO: 583 - DNA, 24 bp, Artificial Sequence
  Synthetic polynucleotide encoding artificial human antibody CDR-H1 region
ggattcatcttcagtgaccactac

SEQ ID NO: 584 - DNA, 30 bp, Artificial Sequence
  Synthetic polynucleotide encoding artificial human antibody CDR-H1 region
ggtgcctccctcagcagtggtagttattac

SEQ ID NO: 585 - DNA, 24 bp, Artificial Sequence
  Synthetic polynucleotide encoding artificial human antibody CDR-H1 region
ggatacaccttcactcgctatgct

SEQ ID NO: 586 - DNA, 24 bp, Artificial Sequence
  Synthetic polynucleotide encoding artificial human antibody CDR-H1 region
ggattcatgtttagttcctcctgg

SEQ ID NO: 587 - DNA, 24 bp, Artificial Sequence
  Synthetic polynucleotide encoding artificial human antibody CDR-H1 region
ggagacaccttcaccaagtatgct

SEQ ID NO: 588 - DNA, 24 bp, Artificial Sequence
  Synthetic polynucleotide encoding artificial human antibody CDR-H1 region
ggatacagctttaccagctactgg

SEQ ID NO: 589 - DNA, 24 bp, Artificial Sequence
  Synthetic polynucleotide encoding artificial human antibody CDR-H1 region
ggatttaccttcaccaaccatggc

SEQ ID NO: 590 - DNA, 24 bp, Artificial Sequence
  Synthetic polynucleotide encoding artificial human antibody CDR-H1 region
ggattcagctttagtagttatgcc

SEQ ID NO: 591 - DNA, 27 bp, Artificial Sequence
  Synthetic polynucleotide encoding artificial human antibody CDR-H1 region
cctggctccataaatttgagtttaagg

SEQ ID NO: 592 - DNA, 24 bp, Artificial Sequence
  Synthetic polynucleotide encoding artificial human antibody CDR-H1 region
ggattcactttcagttcttatagt

SEQ ID NO: 593 - DNA, 24 bp, Artificial Sequence
  Synthetic polynucleotide encoding artificial human antibody CDR-H1 region
ggattcaccttcagtagctatggc

SEQ ID NO: 594 - DNA, 30 bp, Artificial Sequence; identical to SEQ ID NO: 193
  Synthetic polynucleotide encoding artificial human antibody CDR-H1 region

SEQ ID NO: 595 - DNA, 24 bp, Artificial Sequence
  Synthetic polynucleotide encoding artificial human antibody CDR-H1 region
ggatacaccttcaccagctactat

SEQ ID NO: 596 - DNA, 24 bp, Artificial Sequence
  Synthetic polynucleotide encoding artificial human antibody CDR-H1 region
ggcttcctcgtcacttccaacttc

SEQ ID NO: 597 - DNA, 24 bp, Artificial Sequence
  Synthetic polynucleotide encoding artificial human antibody CDR-H1 region
ggattcaccttcagtagttatgaa

SEQ ID NO: 598 - DNA, 30 bp, Artificial Sequence; identical to SEQ ID NO: 193
  Synthetic polynucleotide encoding artificial human antibody CDR-H1 region

SEQ ID NO: 599 - DNA, 24 bp, Artificial Sequence
  Synthetic polynucleotide encoding artificial human antibody CDR-H1 region
ggattcaccttcagtgaccactac

SEQ ID NO: 600 - DNA, 24 bp, Artificial Sequence
  Synthetic polynucleotide encoding artificial human antibody CDR-H1 region
ggattccggtttttcaattattgg

SEQ ID NO: 601 - DNA, 24 bp, Artificial Sequence
  Synthetic polynucleotide encoding artificial human antibody CDR-H1 region
ggattcaccttcagtgactactac

SEQ ID NO: 602 - DNA, 30 bp, Artificial Sequence; identical to SEQ ID NO: 84
  Synthetic polynucleotide encoding artificial human antibody CDR-H1 region

SEQ ID NO: 603 - DNA, 24 bp, Artificial Sequence
  Synthetic polynucleotide encoding artificial human antibody CDR-H1 region
ggattcgtcttcagtaactttgct

SEQ ID NO: 604 - DNA, 24 bp, Artificial Sequence
  Synthetic polynucleotide encoding artificial human antibody CDR-H1 region
ggattcaccttcagtagctatgct

SEQ ID NO: 605 - DNA, 30 bp, Artificial Sequence
  Synthetic polynucleotide encoding artificial human antibody CDR-H1 region
ggtggctccatcagcaatggtaattactac

SEQ ID NO: 606 - DNA, 24 bp, Artificial Sequence
  Synthetic polynucleotide encoding artificial human antibody CDR-H1 region
ggattcatcttcgattattatgag

SEQ ID NO: 607 - DNA, 24 bp, Artificial Sequence
  Synthetic polynucleotide encoding artificial human antibody CDR-H1 region
ggatacagcctcactgaagtaggc

SEQ ID NO: 608 - DNA, 30 bp, Artificial Sequence; identical to SEQ ID NO: 114
  Synthetic polynucleotide encoding artificial human antibody CDR-H1 region

SEQ ID NO: 609 - DNA, 24 bp, Artificial Sequence
  Synthetic polynucleotide encoding artificial human antibody CDR-H1 region
ggaggcaccttcagtaattatgct

SEQ ID NO: 610 - DNA, 24 bp, Artificial Sequence
  Synthetic polynucleotide encoding artificial human antibody CDR-H1 region
ggatacattctcagtgcattaccc

SEQ ID NO: 611 - DNA, 24 bp, Artificial Sequence
  Synthetic polynucleotide encoding artificial human antibody CDR-H1 region
ggattcacctttgatgattatgcc

SEQ ID NO: 612 - DNA, 30 bp, Artificial Sequence
  Synthetic polynucleotide encoding artificial human antibody CDR-H1 region
ggtggctccatcagcagtggtgaatattac

SEQ ID NO: 613 - DNA, 24 bp, Artificial Sequence
  Synthetic polynucleotide encoding artificial human antibody CDR-H1 region
ggattcaccttcagtagctatggc

SEQ ID NO: 614 - DNA, 24 bp, Artificial Sequence
  Synthetic polynucleotide encoding artificial human antibody CDR-H1 region
ggatacagatttagcactcactgg

SEQ ID NO: 615 - DNA, 24 bp, Artificial Sequence
  Synthetic polynucleotide encoding artificial human antibody CDR-H1 region
ggatacaccttcagcagttatttc

SEQ ID NO: 616 - DNA, 24 bp, Artificial Sequence
  Synthetic polynucleotide encoding artificial human antibody CDR-H1 region
ggatacaccttcaccagctactat

SEQ ID NO: 617 - DNA, 24 bp, Artificial Sequence
  Synthetic polynucleotide encoding artificial human antibody CDR-H1 region
ggttacacctttaccagctatggt

SEQ ID NO: 618 - DNA, 24 bp, Artificial Sequence
  Synthetic polynucleotide encoding artificial human antibody CDR-H1 region
ggattcacctttagtagctattgg

SEQ ID NO: 619 - DNA, 24 bp, Artificial Sequence
  Synthetic polynucleotide encoding artificial human antibody CDR-H1 region
ggattcactttcagcatggcctgg

SEQ ID NO: 620 - DNA, 24 bp, Artificial Sequence
  Synthetic polynucleotide encoding artificial human antibody CDR-H1 region
ggattcaccttcagtagctatggc

SEQ ID NO: 621 - DNA, 30 bp, Artificial Sequence
  Synthetic polynucleotide encoding artificial human antibody CDR-H1 region
ggtgtctccatcagcagtagtcgtgacttt

SEQ ID NO: 622 - DNA, 30 bp, Artificial Sequence; identical to SEQ ID NO: 84
  Synthetic polynucleotide encoding artificial human antibody CDR-H1 region

SEQ ID NO: 623 - DNA, 24 bp, Artificial Sequence
  Synthetic polynucleotide encoding artificial human antibody CDR-H1 region
ggttacacctttaccagctatggt

SEQ ID NO: 624 - DNA, 24 bp, Artificial Sequence
  Synthetic polynucleotide encoding artificial human antibody CDR-H1 region
ggattcaccttcagcagctatggc

SEQ ID NO: 625 - DNA, 24 bp, Artificial Sequence
  Synthetic polynucleotide encoding artificial human antibody CDR-H1 region
ggaggcaccttcagcagtcatgct

SEQ ID NO: 626 - DNA, 30 bp, Artificial Sequence
  Synthetic polynucleotide encoding artificial human antibody CDR-H1 region
gggttctcactcagcactagtggagtgagt

SEQ ID NO: 627 - DNA, 24 bp, Artificial Sequence
  Synthetic polynucleotide encoding artificial human antibody CDR-H1 region
ggattcacgttcaacctctactat

SEQ ID NO: 628 - DNA, 30 bp, Artificial Sequence
  Synthetic polynucleotide encoding artificial human antibody CDR-H1 region
ggtgactccgtcagcagtagtacttactac

SEQ ID NO: 629 - DNA, 24 bp, Artificial Sequence
  Synthetic polynucleotide encoding artificial human antibody CDR-H1 region
ggattcaccgtcggtagcagcttc

SEQ ID NO: 630 - DNA, 24 bp, Artificial Sequence
  Synthetic polynucleotide encoding artificial human antibody CDR-H1 region
ggatacagctttgtcagcgaccga

SEQ ID NO: 631 - DNA, 24 bp, Artificial Sequence
  Synthetic polynucleotide encoding artificial human antibody CDR-H1 region
ggattcaccttcagtagctatgct

SEQ ID NO: 632 - DNA, 30 bp, Artificial Sequence
  Synthetic polynucleotide encoding artificial human antibody CDR-H1 region
ggtgactccatcggtactaccagttactac

SEQ ID NO: 633 - DNA, 24 bp, Artificial Sequence
  Synthetic polynucleotide encoding artificial human antibody CDR-H1 region
ggactcaccttcaaaaactactgg

SEQ ID NO: 634 - DNA, 30 bp, Artificial Sequence
  Synthetic polynucleotide encoding artificial human antibody CDR-H1 region
ggggacagggtctcaagcaacactggtgct

SEQ ID NO: 635 - DNA, 24 bp, Artificial Sequence
  Synthetic polynucleotide encoding artificial human antibody CDR-H1 region
ggttacacctttaccacctatggc

SEQ ID NO: 636 - DNA, 24 bp, Artificial Sequence
  Synthetic polynucleotide encoding artificial human antibody CDR-H1 region
ggttacacctttaccacctatggc

SEQ ID NO: 637 - DNA, 24 bp, Artificial Sequence
  Synthetic polynucleotide encoding artificial human antibody CDR-H1 region
gagttcacctttcgcgtctatgac

SEQ ID NO: 638 - DNA, 30 bp, Artificial Sequence
  Synthetic polynucleotide encoding artificial human antibody CDR-H1 region
gggttctcactcagcactagtggagtggct

SEQ ID NO: 639 - DNA, 24 bp, Artificial Sequence
  Synthetic polynucleotide encoding artificial human antibody CDR-H1 region
ggattcacctttaacacctttgac

SEQ ID NO: 640 - DNA, 24 bp, Artificial Sequence
  Synthetic polynucleotide encoding artificial human antibody CDR-H1 region
ggattcacctttaacacctttgac

SEQ ID NO: 641 - DNA, 30 bp, Artificial Sequence
  Synthetic polynucleotide encoding artificial human antibody CDR-H1 region
ggtgactccatcagtagtacgagtaactac

SEQ ID NO: 642 - DNA, 30 bp, Artificial Sequence
  Synthetic polynucleotide encoding artificial human antibody CDR-H1 region
ggtgactccatcaccagtagtagttactac

SEQ ID NO: 643 - DNA, 24 bp, Artificial Sequence
  Synthetic polynucleotide encoding artificial human antibody CDR-H1 region
ggattcaccttcgccacccatgct

SEQ ID NO: 644 - DNA, 24 bp, Artificial Sequence
  Synthetic polynucleotide encoding artificial human antibody CDR-H1 region
ggattcagcgtcagtagcaactac

SEQ ID NO: 645 - DNA, 30 bp, Artificial Sequence
  Synthetic polynucleotide encoding artificial human antibody CDR-H1 region
ggtgactccatcagcagtagtagttaccac

SEQ ID NO: 646 - DNA, 24 bp, Artificial Sequence
  Synthetic polynucleotide encoding artificial human antibody CDR-H1 region
ggatacaccttcaccgactactac

SEQ ID NO: 647 - DNA, 30 bp, Artificial Sequence; identical to SEQ ID NO: 45
  Synthetic polynucleotide encoding artificial human antibody CDR-H1 region

SEQ ID NO: 648 - DNA, 24 bp, Artificial Sequence
  Synthetic polynucleotide encoding artificial human antibody CDR-H1 region
ggattcacctttagcagctatgcc

SEQ ID NO: 649 - DNA, 24 bp, Artificial Sequence
  Synthetic polynucleotide encoding artificial human antibody CDR-H1 region
ggtgggtccttcagtggttaccac

SEQ ID NO: 650 - DNA, 24 bp, Artificial Sequence
  Synthetic polynucleotide encoding artificial human antibody CDR-H1 region
ggattcagtatcagtaattattat

SEQ ID NO: 651 - DNA, 24 bp, Artificial Sequence
  Synthetic polynucleotide encoding artificial human antibody CDR-H1 region
ggattcaactttggcacctatgcc

SEQ ID NO: 652 - DNA, 24 bp, Artificial Sequence
  Synthetic polynucleotide encoding artificial human antibody CDR-H1 region
ggaatcaccttcagttcctatgaa

SEQ ID NO: 653 - DNA, 24 bp, Artificial Sequence
  Synthetic polynucleotide encoding artificial human antibody CDR-H1 region
ggattcagcttcaccaattacgat

SEQ ID NO: 654 - DNA, 24 bp, Artificial Sequence
  Synthetic polynucleotide encoding artificial human antibody CDR-H1 region
ggattcacctttagtaactatgcc

SEQ ID NO: 655 - DNA, 24 bp, Artificial Sequence
  Synthetic polynucleotide encoding artificial human antibody CDR-H1 region
ggtgtctccatgagtgggttctac

SEQ ID NO: 656 - DNA, 24 bp, Artificial Sequence
  Synthetic polynucleotide encoding artificial human antibody CDR-H1 region
ggaatgattttcagtagttatgaa

SEQ ID NO: 657 - DNA, 24 bp, Artificial Sequence
  Synthetic polynucleotide encoding artificial human antibody CDR-H1 region
gatatccccatcagatatttcttc

SEQ ID NO: 658 - DNA, 24 bp, Artificial Sequence
  Synthetic polynucleotide encoding artificial human antibody CDR-H1 region
ggtggctccatcagcggtcactac

SEQ ID NO: 659 - DNA, 24 bp, Artificial Sequence
  Synthetic polynucleotide encoding artificial human antibody CDR-H1 region
ggattcaacttcggcgattatgct

SEQ ID NO: 660 - DNA, 24 bp, Artificial Sequence
  Synthetic polynucleotide encoding artificial human antibody CDR-H1 region
ggattcaccttcagtagctatggc

SEQ ID NO: 661 - DNA, 24 bp, Artificial Sequence
  Synthetic polynucleotide encoding artificial human antibody CDR-H1 region
ggattcaacttcagtagtcatgaa

SEQ ID NO: 662 - DNA, 24 bp, Artificial Sequence
  Synthetic polynucleotide encoding artificial human antibody CDR-H1 region
ggattcatcttaggtaactactgg

SEQ ID NO: 663 - DNA, 24 bp, Artificial Sequence
  Synthetic polynucleotide encoding artificial human antibody CDR-H1 region
ggtaggtcattcagtggttatcac

SEQ ID NO: 664 - DNA, 24 bp, Artificial Sequence
  Synthetic polynucleotide encoding artificial human antibody CDR-H1 region
ggattcttcttcagtagttttgaa

SEQ ID NO: 665 - DNA, 24 bp, Artificial Sequence
  Synthetic polynucleotide encoding artificial human antibody CDR-H1 region
ggattcccctttagcagttatgtc

SEQ ID NO: 666 - DNA, 24 bp, Artificial Sequence
  Synthetic polynucleotide encoding artificial human antibody CDR-H1 region
ggatacaccttcaccaagaactat

SEQ ID NO: 667 - DNA, 24 bp, Artificial Sequence
  Synthetic polynucleotide encoding artificial human antibody CDR-H1 region
gaattcgccttcagtatctatgcc

SEQ ID NO: 668 - DNA, 30 bp, Artificial Sequence
  Synthetic polynucleotide encoding artificial human antibody CDR-H1 region
ggtggctccatcagcgggagttttttctac

SEQ ID NO: 669 - DNA, 36 bp, Artificial Sequence
  Synthetic polynucleotide encoding artificial human antibody CDR-H1 region
ggatacccttttgtcaagcgatttaccaacttctgg

SEQ ID NO: 670 - DNA, 24 bp, Artificial Sequence
  Synthetic polynucleotide encoding artificial human antibody CDR-H1 region
ggattcatcttccggacttatgaa

SEQ ID NO: 671 - DNA, 24 bp, Artificial Sequence
  Synthetic polynucleotide encoding artificial human antibody CDR-H1 region
gagttcactttcagtggttctact

SEQ ID NO: 672 - DNA, 24 bp, Artificial Sequence
  Synthetic polynucleotide encoding artificial human antibody CDR-H1 region
ggattcgccttcagtttctatggc

SEQ ID NO: 673 - DNA, 33 bp, Artificial Sequence
  Synthetic polynucleotide encoding artificial human antibody CDR-H1 region
ggtggctccattagtagttttcattggaatcac

SEQ ID NO: 674 - DNA, 30 bp, Artificial Sequence
  Synthetic polynucleotide encoding artificial human antibody CDR-H1 region
ggtgtctccaccagtagtagtgactactac

SEQ ID NO: 675 - DNA, 24 bp, Artificial Sequence
  Synthetic polynucleotide encoding artificial human antibody CDR-H1 region
gggttcagcgtcagcagtaattac

SEQ ID NO: 676 - DNA, 24 bp, Artificial Sequence
  Synthetic polynucleotide encoding artificial human antibody CDR-H1 region
ggattcaccttcagtagctatggc

SEQ ID NO: 677 - DNA, 24 bp, Artificial Sequence
  Synthetic polynucleotide encoding artificial human antibody CDR-H1 region
ggattcaccttcagtgactatagt

SEQ ID NO: 678 - DNA, 24 bp, Artificial Sequence
  Synthetic polynucleotide encoding artificial human antibody CDR-H1 region
ggattcaccttcacaacgtctaac

SEQ ID NO: 679 - DNA, 24 bp, Artificial Sequence
  Synthetic polynucleotide encoding artificial human antibody CDR-H1 region
ggcttccccttcactgccttgggc

SEQ ID NO: 680 - DNA, 24 bp, Artificial Sequence
  Synthetic polynucleotide encoding artificial human antibody CDR-H1 region
ggatacaccttcaccggttatgat

SEQ ID NO: 681 - DNA, 24 bp, Artificial Sequence
  Synthetic polynucleotide encoding artificial human antibody CDR-H1 region
ggattcacctttagcgactacgcc

SEQ ID NO: 682 - DNA, 30 bp, Artificial Sequence
  Synthetic polynucleotide encoding artificial human antibody CDR-H1 region
ggtggctccgtcaccaatagaacttactac

SEQ ID NO: 683 - DNA, 24 bp, Artificial Sequence
  Synthetic polynucleotide encoding artificial human antibody CDR-H1 region
ggattcaccttcagtaactatggc

SEQ ID NO: 684 - DNA, 24 bp, Artificial Sequence
  Synthetic polynucleotide encoding artificial human antibody CDR-H1 region
ggatataccttcaccggctactat

SEQ ID NO: 685 - DNA, 24 bp, Artificial Sequence
  Synthetic polynucleotide encoding artificial human antibody CDR-H1 region
ggtgggtccttcagtggttactac

SEQ ID NO: 686 - DNA, 24 bp, Artificial Sequence
  Synthetic polynucleotide encoding artificial human antibody CDR-H1 region
ggattcaccttcagttcctacgac

SEQ ID NO: 687 - DNA, 30 bp, Artificial Sequence; identical to SEQ ID NO: 45
  Synthetic polynucleotide encoding artificial human antibody CDR-H1 region

SEQ ID NO: 688 - DNA, 24 bp, Artificial Sequence
  Synthetic polynucleotide encoding artificial human antibody CDR-H1 region
ggatacagctttaccacccactgg

SEQ ID NO: 689 - DNA, 30 bp, Artificial Sequence
  Synthetic polynucleotide encoding artificial human antibody CDR-H1 region
ggtgactccatcagcactactaattactac

SEQ ID NO: 690 - DNA, 24 bp, Artificial Sequence
  Synthetic polynucleotide encoding artificial human antibody CDR-H1 region
ggtgggtccttcagtggttaccac

SEQ ID NO: 691 - DNA, 24 bp, Artificial Sequence
  Synthetic polynucleotide encoding artificial human antibody CDR-H1 region
ggattcaccttcagtagttattgg

SEQ ID NO: 692 - DNA, 30 bp, Artificial Sequence
  Synthetic polynucleotide encoding artificial human antibody CDR-H1 region
ggtggctccataagaggtagtcgtgactac

SEQ ID NO: 693 - DNA, 24 bp, Artificial Sequence
  Synthetic polynucleotide encoding artificial human antibody CDR-H1 region
ggatacagcttcaccggctattat

SEQ ID NO: 694 - DNA, 24 bp, Artificial Sequence
  Synthetic polynucleotide encoding artificial human antibody CDR-H1 region
ggatacaccttcaccggctactat

SEQ ID NO: 695 - DNA, 24 bp, Artificial Sequence
  Synthetic polynucleotide encoding artificial human antibody CDR-H1 region
ggtgggtccttcagtggttaccac

SEQ ID NO: 696 - DNA, 24 bp, Artificial Sequence
  Synthetic polynucleotide encoding artificial human antibody CDR-H1 region
ggattcaccttcagtagttatagc

SEQ ID NO: 697 - DNA, 30 bp, Artificial Sequence
  Synthetic polynucleotide encoding artificial human antibody CDR-H1 region
ggtggctccatcaacagaagtagattcttg

SEQ ID NO: 698 - DNA, 24 bp, Artificial Sequence
  Synthetic polynucleotide encoding artificial human antibody CDR-H1 region
ggattcatcttccggacttatgaa

SEQ ID NO: 699 - DNA, 30 bp, Artificial Sequence; identical to SEQ ID NO: 318
  Synthetic polynucleotide encoding artificial human antibody CDR-H1 region

SEQ ID NO: 700 - DNA, 24 bp, Artificial Sequence
  Synthetic polynucleotide encoding artificial human antibody CDR-H1 region
ggattcacctttaacgcctattgg

SEQ ID NO: 701 - DNA, 24 bp, Artificial Sequence
  Synthetic polynucleotide encoding artificial human antibody CDR-H1 region
ggatatccctttacagacttcggt

SEQ ID NO: 702 - DNA, 24 bp, Artificial Sequence
  Synthetic polynucleotide encoding artificial human antibody CDR-H1 region
ggattcagctttagcttctatgcc

SEQ ID NO: 703 - DNA, 24 bp, Artificial Sequence
  Synthetic polynucleotide encoding artificial human antibody CDR-H1 region
ggattcaccttcagtagttatgaa

SEQ ID NO: 704 - DNA, 24 bp, Artificial Sequence
  Synthetic polynucleotide encoding artificial human antibody CDR-H1 region
ggagtcaccttcactagatatagc

SEQ ID NO: 705 - DNA, 24 bp, Artificial Sequence
  Synthetic polynucleotide encoding artificial human antibody CDR-H1 region
ggtggggccttcagagggcactac

SEQ ID NO: 706 - DNA, 24 bp, Artificial Sequence
  Synthetic polynucleotide encoding artificial human antibody CDR-H1 region
ggtggctccatcagtagttactac

SEQ ID NO: 707 - DNA, 30 bp, Artificial Sequence; identical to SEQ ID NO: 299
  Synthetic polynucleotide encoding artificial human antibody CDR-H1 region

SEQ ID NO: 708 - DNA, 30 bp, Artificial Sequence; identical to SEQ ID NO: 299
  Synthetic polynucleotide encoding artificial human antibody CDR-H1 region

SEQ ID NO: 709 - DNA, 30 bp, Artificial Sequence; identical to SEQ ID NO: 299
  Synthetic polynucleotide encoding artificial human antibody CDR-H1 region

SEQ ID NO: 710 - DNA, 24 bp, Artificial Sequence
  Synthetic polynucleotide encoding artificial human antibody CDR-H1 region
ggattcaccttcagtagctatgct

SEQ ID NO: 711 - DNA, 24 bp, Artificial Sequence
  Synthetic polynucleotide encoding artificial human antibody CDR-H1 region
ggattcactttcagtaacgcctgg

SEQ ID NO: 712 - DNA, 24 bp, Artificial Sequence
  Synthetic polynucleotide encoding artificial human antibody CDR-H1 region
ggtgggtccttcagtgattactac

SEQ ID NO: 713 - DNA, 24 bp, Artificial Sequence
  Synthetic polynucleotide encoding artificial human antibody CDR-H1 region
gggttcaccgtcagtagcaactac

SEQ ID NO: 714 - DNA, 24 bp, Artificial Sequence
  Synthetic polynucleotide encoding artificial human antibody CDR-H1 region
ggaggcaccttcagcagctatgct

SEQ ID NO: 715 - DNA, 24 bp, Artificial Sequence
  Synthetic polynucleotide encoding artificial human antibody CDR-H1 region
ggattcaccttcagtagatatgcc

SEQ ID NO: 716 - DNA, 24 bp, Artificial Sequence
  Synthetic polynucleotide encoding artificial human antibody CDR-H1 region
ggttacacctttaccagctatggt

SEQ ID NO: 717 - DNA, 30 bp, Artificial Sequence; identical to SEQ ID NO: 45
  Synthetic polynucleotide encoding artificial human antibody CDR-H1 region

SEQ ID NO: 718 - DNA, 30 bp, Artificial Sequence
  Synthetic polynucleotide encoding artificial human antibody CDR-H1 region
gggttctcactcagcaatgatagaatgggt

SEQ ID NO: 719 - DNA, 24 bp, Artificial Sequence
  Synthetic polynucleotide encoding artificial human antibody CDR-H1 region
ggatacagctttaccagctactgg

SEQ ID NO: 720 - DNA, 30 bp, Artificial Sequence; identical to SEQ ID NO: 45
  Synthetic polynucleotide encoding artificial human antibody CDR-H1 region

SEQ ID NO: 721 - DNA, 24 bp, Artificial Sequence
  Synthetic polynucleotide encoding artificial human antibody CDR-H1 region
ggtgcctccgtcagggatgagttc

SEQ ID NO: 722 - DNA, 30 bp, Artificial Sequence; identical to SEQ ID NO: 15
  Synthetic polynucleotide encoding artificial human antibody CDR-H1 region

SEQ ID NO: 723 - DNA, 24 bp, Artificial Sequence
  Synthetic polynucleotide encoding artificial human antibody CDR-H1 region
ggattcaccttcacaacatatggc

SEQ ID NO: 724 - DNA, 24 bp, Artificial Sequence
  Synthetic polynucleotide encoding artificial human antibody CDR-H1 region
ggattcacctttagcaactatgcc

SEQ ID NO: 725 - DNA, 24 bp, Artificial Sequence
  Synthetic polynucleotide encoding artificial human antibody CDR-H1 region
ggattcaccttcagtagctatggc

SEQ ID NO: 726 - DNA, 24 bp, Artificial Sequence
  Synthetic polynucleotide encoding artificial human antibody CDR-H1 region
ggtgggtccttcagtgactcctat

SEQ ID NO: 727 - DNA, 30 bp, Artificial Sequence; identical to SEQ ID NO: 193
  Synthetic polynucleotide encoding artificial human antibody CDR-H1 region

SEQ ID NO: 728 - DNA, 24 bp, Artificial Sequence
  Synthetic polynucleotide encoding artificial human antibody CDR-H1 region
ggattcaccttcagtagctatggc

SEQ ID NO: 729 - DNA, 24 bp, Artificial Sequence
  Synthetic polynucleotide encoding artificial human antibody CDR-H1 region
ggattcaccttcagtagctatagc

SEQ ID NO: 730 - DNA, 24 bp, Artificial Sequence
  Synthetic polynucleotide encoding artificial human antibody CDR-H1 region
ggatacagctttaccagctactgg

SEQ ID NO: 731 - DNA, 24 bp, Artificial Sequence
  Synthetic polynucleotide encoding artificial human antibody CDR-H1 region
ggaggcaccttcagcagctatgct

SEQ ID NO: 732 - DNA, 24 bp, Artificial Sequence
  Synthetic polynucleotide encoding artificial human antibody CDR-H1 region
ggaggcaccttcaacaaatacggc

SEQ ID NO: 733 - DNA, 24 bp, Artificial Sequence
  Synthetic polynucleotide encoding artificial human antibody CDR-H1 region
ggaggcaccttcagcagctatgct

SEQ ID NO: 734 - DNA, 24 bp, Artificial Sequence
  Synthetic polynucleotide encoding artificial human antibody CDR-H1 region
ggaggcaccttcagcagctatgct

SEQ ID NO: 735 - DNA, 24 bp, Artificial Sequence
  Synthetic polynucleotide encoding artificial human antibody CDR-H1 region
ggattcagcctcagcagatttggc

SEQ ID NO: 736 - DNA, 24 bp, Artificial Sequence
  Synthetic polynucleotide encoding artificial human antibody CDR-H1 region
ggatacagctttaccagctactgg

SEQ ID NO: 737 - DNA, 24 bp, Artificial Sequence
  Synthetic polynucleotide encoding artificial human antibody CDR-H1 region
ggattcacctttagtaactatgtc

SEQ ID NO: 738 - DNA, 30 bp, Artificial Sequence; identical to SEQ ID NO: 45
  Synthetic polynucleotide encoding artificial human antibody CDR-H1 region

SEQ ID NO: 739 - DNA, 24 bp, Artificial Sequence
  Synthetic polynucleotide encoding artificial human antibody CDR-H1 region
ggattcacctttagcagctatgcc

SEQ ID NO: 740 - DNA, 24 bp, Artificial Sequence
  Synthetic polynucleotide encoding artificial human antibody CDR-H1 region
ggatacaccttcactagctatgct

SEQ ID NO: 741 - DNA, 24 bp, Artificial Sequence
  Synthetic polynucleotide encoding artificial human antibody CDR-H1 region
ggattcactttcagcacctaccgg

SEQ ID NO: 742 - DNA, 24 bp, Artificial Sequence
  Synthetic polynucleotide encoding artificial human antibody CDR-H1 region
ggatacaccctcactgaattatcc

SEQ ID NO: 743 - DNA, 30 bp, Artificial Sequence
  Synthetic polynucleotide encoding artificial human antibody CDR-H1 region
ggtggctccatgagtgggagtggttacacc

SEQ ID NO: 744 - DNA, 24 bp, Artificial Sequence
  Synthetic polynucleotide encoding artificial human antibody CDR-H1 region
gggttcaccgtcagtagcaactac

SEQ ID NO: 745 - DNA, 30 bp, Artificial Sequence; identical to SEQ ID NO: 15
  Synthetic polynucleotide encoding artificial human antibody CDR-H1 region

SEQ ID NO: 746 - DNA, 30 bp, Artificial Sequence; identical to SEQ ID NO: 84
  Synthetic polynucleotide encoding artificial human antibody CDR-H1 region

SEQ ID NO: 747 - DNA, 24 bp, Artificial Sequence
  Synthetic polynucleotide encoding artificial human antibody CDR-H1 region
ggaggcaccttcagaaagtatgat

SEQ ID NO: 748 - DNA, 24 bp, Artificial Sequence
  Synthetic polynucleotide encoding artificial human antibody CDR-H1 region
ggtgggtccttcactgaaaactac

SEQ ID NO: 749 - DNA, 24 bp, Artificial Sequence
  Synthetic polynucleotide encoding artificial human antibody CDR-H1 region
ggattcacctttagcagctatgcc

SEQ ID NO: 750 - DNA, 24 bp, Artificial Sequence
  Synthetic polynucleotide encoding artificial human antibody CDR-H1 region
ggattcaccttcagtagctatggc

SEQ ID NO: 751 - DNA, 24 bp, Artificial Sequence
  Synthetic polynucleotide encoding artificial human antibody CDR-H1 region
ggatacaccttcactagctatgct

SEQ ID NO: 752 - DNA, 24 bp, Artificial Sequence
  Synthetic polynucleotide encoding artificial human antibody CDR-H1 region
gggttcaccttcagtagctatagc

SEQ ID NO: 753 - DNA, 24 bp, Artificial Sequence
  Synthetic polynucleotide encoding artificial human antibody CDR-H1 region
ggactccccctcagtgactcctac

SEQ ID NO: 754 - DNA, 24 bp, Artificial Sequence
  Synthetic polynucleotide encoding artificial human antibody CDR-H1 region
ggattcacctttagcagctctgcc

SEQ ID NO: 755 - DNA, 24 bp, Artificial Sequence
  Synthetic polynucleotide encoding artificial human antibody CDR-H1 region
ggattcaccttcagtagctatagc

SEQ ID NO: 756 - DNA, 24 bp, Artificial Sequence
  Synthetic polynucleotide encoding artificial human antibody CDR-H1 region
ggatacaccttcaccagctactat

SEQ ID NO: 757 - DNA, 24 bp, Artificial Sequence
  Synthetic polynucleotide encoding artificial human antibody CDR-H1 region
ggattcacctttgatgattatgcc

SEQ ID NO: 758 - DNA, 24 bp, Artificial Sequence
  Synthetic polynucleotide encoding artificial human antibody CDR-H1 region
ggattcacctttagcagctatgcc

SEQ ID NO: 759 - DNA, 24 bp, Artificial Sequence
  Synthetic polynucleotide encoding artificial human antibody CDR-H1 region
ggattcacctttagcagctatgcc

SEQ ID NO: 760 - DNA, 24 bp, Artificial Sequence
  Synthetic polynucleotide encoding artificial human antibody CDR-H1 region
ggattcaccttcagtagctatagc

SEQ ID NO: 761 - DNA, 24 bp, Artificial Sequence
  Synthetic polynucleotide encoding artificial human antibody CDR-H1 region
ggatacaccttcaccggctactat

SEQ ID NO: 762 - DNA, 24 bp, Artificial Sequence
  Synthetic polynucleotide encoding artificial human antibody CDR-H1 region
ggattcaccttcagtagctatggc

SEQ ID NO: 763 - DNA, 24 bp, Artificial Sequence
  Synthetic polynucleotide encoding artificial human antibody CDR-H1 region
ggattcaccttcaccgactattat

SEQ ID NO: 764 - DNA, 24 bp, Artificial Sequence
  Synthetic polynucleotide encoding artificial human antibody CDR-H1 region
ggattcacctttagcagctatgcc

SEQ ID NO: 765 - DNA, 24 bp, Artificial Sequence
  Synthetic polynucleotide encoding artificial human antibody CDR-H1 region
ggattcaccttcagtagctatagc

SEQ ID NO: 766 - DNA, 30 bp, Artificial Sequence; identical to SEQ ID NO: 299
  Synthetic polynucleotide encoding artificial human antibody CDR-H1 region

SEQ ID NO: 767 - DNA, 30 bp, Artificial Sequence
  Synthetic polynucleotide encoding artificial human antibody CDR-H1 region
ggtggctccatcagcagtagtaatcactac

SEQ ID NO: 768 - DNA, 30 bp, Artificial Sequence; identical to SEQ ID NO: 299
  Synthetic polynucleotide encoding artificial human antibody CDR-H1 region

SEQ ID NO: 769 - DNA, 24 bp, Artificial Sequence
  Synthetic polynucleotide encoding artificial human antibody CDR-H1 region
ggattcaccttcagtagctatgct

SEQ ID NO: 770 - DNA, 24 bp, Artificial Sequence
  Synthetic polynucleotide encoding artificial human antibody CDR-H1 region
ggattcaccttcagtagctatgct

SEQ ID NO: 771 - DNA, 24 bp, Artificial Sequence
  Synthetic polynucleotide encoding artificial human antibody CDR-H1 region
ggattcagattcagtctctatagc

SEQ ID NO: 772 - DNA, 24 bp, Artificial Sequence
  Synthetic polynucleotide encoding artificial human antibody CDR-H1 region
ggactcacctttagtcgctatgct

SEQ ID NO: 773 - DNA, 24 bp, Artificial Sequence
  Synthetic polynucleotide encoding artificial human antibody CDR-H1 region
gaattcatctttaacaactatgcc

SEQ ID NO: 774 - DNA, 24 bp, Artificial Sequence
  Synthetic polynucleotide encoding artificial human antibody CDR-H1 region
ggattcagtttcgataacgcctgg

SEQ ID NO: 775 - DNA, 24 bp, Artificial Sequence
  Synthetic polynucleotide encoding artificial human antibody CDR-H1 region
ggaggcaccttcagcagctatgct

SEQ ID NO: 776 - DNA, 24 bp, Artificial Sequence
  Synthetic polynucleotide encoding artificial human antibody CDR-H1 region
ggattcaccctcaccggctattat

SEQ ID NO: 777 - DNA, 24 bp, Artificial Sequence
  Synthetic polynucleotide encoding artificial human antibody CDR-H1 region
ggattcaggtttagaagttatgcc

SEQ ID NO: 778 - DNA, 24 bp, Artificial Sequence
  Synthetic polynucleotide encoding artificial human antibody CDR-H1 region
ggattcaccttcagtagctatagc

SEQ ID NO: 779 - DNA, 30 bp, Artificial Sequence; identical to SEQ ID NO: 299
  Synthetic polynucleotide encoding artificial human antibody CDR-H1 region

SEQ ID NO: 780 - DNA, 24 bp, Artificial Sequence
  Synthetic polynucleotide encoding artificial human antibody CDR-H1 region
ggattcaccttcagtagctatagc

SEQ ID NO: 781 - DNA, 24 bp, Artificial Sequence
  Synthetic polynucleotide encoding artificial human antibody CDR-H1 region
ggcgactccatcaatcagtaccag

SEQ ID NO: 782 - DNA, 24 bp, Artificial Sequence
  Synthetic polynucleotide encoding artificial human antibody CDR-H1 region
ggttacacgttttccacctttggc

SEQ ID NO: 783 - DNA, 30 bp, Artificial Sequence
  Synthetic polynucleotide encoding artificial human antibody CDR-H1 region
ggtggctccatcagcattaataatcactac

SEQ ID NO: 784 - DNA, 30 bp, Artificial Sequence; identical to SEQ ID NO: 45
  Synthetic polynucleotide encoding artificial human antibody CDR-H1 region

SEQ ID NO: 785 - DNA, 24 bp, Artificial Sequence
  Synthetic polynucleotide encoding artificial human antibody CDR-H1 region
ggattcacttttgatgattatacc

SEQ ID NO: 786 - DNA, 30 bp, Artificial Sequence; identical to SEQ ID NO: 299
  Synthetic polynucleotide encoding artificial human antibody CDR-H1 region

SEQ ID NO: 787 - DNA, 24 bp, Artificial Sequence
  Synthetic polynucleotide encoding artificial human antibody CDR-H1 region
ggattcaccttcagtagttataat

SEQ ID NO: 788 - DNA, 24 bp, Artificial Sequence
  Synthetic polynucleotide encoding artificial human antibody CDR-H1 region
ggatacaccttcaccagctactat

SEQ ID NO: 789 - DNA, 24 bp, Artificial Sequence
  Synthetic polynucleotide encoding artificial human antibody CDR-H1 region
ggattcactttcagtaacgcctgg

SEQ ID NO: 790 - DNA, 24 bp, Artificial Sequence
  Synthetic polynucleotide encoding artificial human antibody CDR-H1 region
ggcggctccattagttcttacctc

SEQ ID NO: 791 - DNA, 24 bp, Artificial Sequence
  Synthetic polynucleotide encoding artificial human antibody CDR-H1 region
ggattcaccttcagtagctatgct

SEQ ID NO: 792 - DNA, 24 bp, Artificial Sequence
  Synthetic polynucleotide encoding artificial human antibody CDR-H1 region
ggattcaccttcagtagctatgct

SEQ ID NO: 793 - DNA, 24 bp, Artificial Sequence
  Synthetic polynucleotide encoding artificial human antibody CDR-H1 region
ggattcaccttcagtagctatggc

SEQ ID NO: 794 - DNA, 24 bp, Artificial Sequence
  Synthetic polynucleotide encoding artificial human antibody CDR-H1 region
ggatacaccttcactagctatgct

SEQ ID NO: 795 - DNA, 24 bp, Artificial Sequence
  Synthetic polynucleotide encoding artificial human antibody CDR-H1 region
ggattcaccttcaccagccatggc

SEQ ID NO: 796 - DNA, 24 bp, Artificial Sequence
  Synthetic polynucleotide encoding artificial human antibody CDR-H1 region
ggattcaccttcagtagctatgct

SEQ ID NO: 797 - DNA, 24 bp, Artificial Sequence
  Synthetic polynucleotide encoding artificial human antibody CDR-H1 region
ggtgggtccttcagtggttactac

SEQ ID NO: 798 - DNA, 30 bp, Artificial Sequence
  Synthetic polynucleotide encoding artificial human antibody CDR-H1 region
ggtgactccatcagcagtagtagttactac

SEQ ID NO: 799 - DNA, 24 bp, Artificial Sequence
  Synthetic polynucleotide encoding artificial human antibody CDR-H1 region
ggattcagcatcagtaactacgag

SEQ ID NO: 800 - DNA, 24 bp, Artificial Sequence
  Synthetic polynucleotide encoding artificial human antibody CDR-H1 region
ggaggcaccttcagcagctatgct

SEQ ID NO: 801 - DNA, 24 bp, Artificial Sequence
  Synthetic polynucleotide encoding artificial human antibody CDR-H1 region
ggatacaccttcactagctatgct

SEQ ID NO: 802 - DNA, 24 bp, Artificial Sequence
  Synthetic polynucleotide encoding artificial human antibody CDR-H1 region
ggattcaccttcagtagctatggc

SEQ ID NO: 803 - DNA, 30 bp, Artificial Sequence
  Synthetic polynucleotide encoding artificial human antibody CDR-H1 region
ggtggctccatcagcagtaataatcactac

SEQ ID NO: 804 - DNA, 24 bp, Artificial Sequence
  Synthetic polynucleotide encoding artificial human antibody CDR-H1 region
ggattcaccttcagtagctttggc

SEQ ID NO: 805 - DNA, 24 bp, Artificial Sequence
  Synthetic polynucleotide encoding artificial human antibody CDR-H1 region
ggatacaccttcactagctatgct

SEQ ID NO: 806 - DNA, 24 bp, Artificial Sequence
  Synthetic polynucleotide encoding artificial human antibody CDR-H1 region
ggattcgctttcagtgattattcc

SEQ ID NO: 807 - DNA, 24 bp, Artificial Sequence
  Synthetic polynucleotide encoding artificial human antibody CDR-H1 region
ggagacagcttctccaccttgagg

SEQ ID NO: 808 - DNA, 24 bp, Artificial Sequence
  Synthetic polynucleotide encoding artificial human antibody CDR-H1 region
ggttacacctttaccagctatggt

SEQ ID NO: 809 - DNA, 30 bp, Artificial Sequence; identical to SEQ ID NO: 45
  Synthetic polynucleotide encoding artificial human antibody CDR-H1 region

SEQ ID NO: 810 - DNA, 30 bp, Artificial Sequence
  Synthetic polynucleotide encoding artificial human antibody CDR-H1 region
ggtggctccatcagtagtagtaatcactac

SEQ ID NO: 811 - DNA, 24 bp, Artificial Sequence
  Synthetic polynucleotide encoding artificial human antibody CDR-H1 region
ggaggcgacttcaacaactatgct

SEQ ID NO: 812 - DNA, 24 bp, Artificial Sequence
  Synthetic polynucleotide encoding artificial human antibody CDR-H1 region
ggattcactttcagtaacgcctgg

SEQ ID NO: 813 - DNA, 24 bp, Artificial Sequence
  Synthetic polynucleotide encoding artificial human antibody CDR-H1 region
ggattcaccttcagtagctatgct

SEQ ID NO: 814 - DNA, 24 bp, Artificial Sequence
  Synthetic polynucleotide encoding artificial human antibody CDR-H1 region
ggattcaccttcagtagctatggc

SEQ ID NO: 815 - DNA, 24 bp, Artificial Sequence
  Synthetic polynucleotide encoding artificial human antibody CDR-H1 region
ggatacagctttaccagctactgg

SEQ ID NO: 816 - DNA, 24 bp, Artificial Sequence
  Synthetic polynucleotide encoding artificial human antibody CDR-H1 region
ggattcagtttcagtgattattcc

SEQ ID NO: 817 - DNA, 24 bp, Artificial Sequence
  Synthetic polynucleotide encoding artificial human antibody CDR-H1 region
ggattcacttttagcaactatgcc

SEQ ID NO: 818 - DNA, 24 bp, Artificial Sequence
  Synthetic polynucleotide encoding artificial human antibody CDR-H1 region
ggattcacctttattaattattgg

SEQ ID NO: 819 - DNA, 24 bp, Artificial Sequence
  Synthetic polynucleotide encoding artificial human antibody CDR-H1 region
ggattcaccttcagtagctatagc

SEQ ID NO: 820 - DNA, 24 bp, Artificial Sequence
  Synthetic polynucleotide encoding artificial human antibody CDR-H1 region
ggatacaccttcaccggctactat

SEQ ID NO: 821 - DNA, 24 bp, Artificial Sequence
  Synthetic polynucleotide encoding artificial human antibody CDR-H1 region
ggattcaccttcaataactatggc

SEQ ID NO: 822 - DNA, 24 bp, Artificial Sequence
  Synthetic polynucleotide encoding artificial human antibody CDR-H1 region
ggattcaccttcagtagctatagc

SEQ ID NO: 823 - DNA, 24 bp, Artificial Sequence
  Synthetic polynucleotide encoding artificial human antibody CDR-H1 region
ggattcacgtttggagactattcc

SEQ ID NO: 824 - DNA, 24 bp, Artificial Sequence
  Synthetic polynucleotide encoding artificial human antibody CDR-H1 region
ggattcaccttcagtgcttacaat

SEQ ID NO: 825 - DNA, 24 bp, Artificial Sequence
  Synthetic polynucleotide encoding artificial human antibody CDR-H1 region
ggattccttctcgattcctattac

SEQ ID NO: 826 - DNA, 24 bp, Artificial Sequence
  Synthetic polynucleotide encoding artificial human antibody CDR-H1 region
ggattgacctttagcacctttggc

SEQ ID NO: 827 - DNA, 24 bp, Artificial Sequence
  Synthetic polynucleotide encoding artificial human antibody CDR-H1 region
ggattcaactttaacacttacaac

SEQ ID NO: 828 - DNA, 24 bp, Artificial Sequence
  Synthetic polynucleotide encoding artificial human antibody CDR-H1 region
ggactcaccttcagtctcgcctgg

SEQ ID NO: 829 - DNA, 24 bp, Artificial Sequence
  Synthetic polynucleotide encoding artificial human antibody CDR-H1 region
ggattcaactttgatgaccatgcc

SEQ ID NO: 830 - DNA, 24 bp, Artificial Sequence
  Synthetic polynucleotide encoding artificial human antibody CDR-H1 region
ggactcacctttaagaagtatgcc

SEQ ID NO: 831 - DNA, 24 bp, Artificial Sequence
  Synthetic polynucleotide encoding artificial human antibody CDR-H1 region
ggattcacctttagtaattataat

SEQ ID NO: 832 - DNA, 24 bp, Artificial Sequence
  Synthetic polynucleotide encoding artificial human antibody CDR-H1 region
ggggacacctttcgaaactttgaa

SEQ ID NO: 833 - DNA, 24 bp, Artificial Sequence
  Synthetic polynucleotide encoding artificial human antibody CDR-H1 region
ggcttcaccctcagtagctatacc

SEQ ID NO: 834 - DNA, 24 bp, Artificial Sequence
  Synthetic polynucleotide encoding artificial human antibody CDR-H1 region
ggattcacgtttaagaacttttgg

SEQ ID NO: 835 - DNA, 24 bp, Artificial Sequence
  Synthetic polynucleotide encoding artificial human antibody CDR-H1 region
ggatacagctttaccagctactgg

SEQ ID NO: 836 - DNA, 24 bp, Artificial Sequence
  Synthetic polynucleotide encoding artificial human antibody CDR-H1 region
ggattcatttttggtacttattgg

SEQ ID NO: 837 - DNA, 24 bp, Artificial Sequence
  Synthetic polynucleotide encoding artificial human antibody CDR-H1 region
ggatacactttcaccagttatgat

SEQ ID NO: 838 - DNA, 24 bp, Artificial Sequence
  Synthetic polynucleotide encoding artificial human antibody CDR-H1 region
ggattcacctttggtgattatgct

SEQ ID NO: 839 - DNA, 30 bp, Artificial Sequence; identical to SEQ ID NO: 45
  Synthetic polynucleotide encoding artificial human antibody CDR-H1 region

SEQ ID NO: 840 - DNA, 30 bp, Artificial Sequence
  Synthetic polynucleotide encoding artificial human antibody CDR-H1 region
ggtggctccgtcagcgatagtacttactac

SEQ ID NO: 841 - DNA, 24 bp, Artificial Sequence
  Synthetic polynucleotide encoding artificial human antibody CDR-H1 region
ggactcacctttggcaactatgcc

SEQ ID NO: 842 - DNA, 30 bp, Artificial Sequence
  Synthetic polynucleotide encoding artificial human antibody CDR-H1 region
ggtgactccatcagcagtcgttctttctac

SEQ ID NO: 843 - DNA, 30 bp, Artificial Sequence
  Synthetic polynucleotide encoding artificial human antibody CDR-H1 region
gggggctccattagcagtagtagttactac

SEQ ID NO: 844 - DNA, 24 bp, Artificial Sequence
  Synthetic polynucleotide encoding artificial human antibody CDR-H1 region
ggattcaccttcagtacctatgct

SEQ ID NO: 845 - DNA, 24 bp, Artificial Sequence
  Synthetic polynucleotide encoding artificial human antibody CDR-H1 region
ggattcagttttagtaacgcctgg

SEQ ID NO: 846 - DNA, 24 bp, Artificial Sequence
  Synthetic polynucleotide encoding artificial human antibody CDR-H1 region
ggattcacctttagcagctatgcc

SEQ ID NO: 847 - DNA, 24 bp, Artificial Sequence
  Synthetic polynucleotide encoding artificial human antibody CDR-H1 region
ggattcaccttcaccgactacttt

SEQ ID NO: 848 - DNA, 30 bp, Artificial Sequence
  Synthetic polynucleotide encoding artificial human antibody CDR-H1 region
gggttctcactcaccactagtggagtgggt

SEQ ID NO: 849 - DNA, 24 bp, Artificial Sequence
  Synthetic polynucleotide encoding artificial human antibody CDR-H1 region
ggattcagcttcagttcttatggc

SEQ ID NO: 850 - DNA, 24 bp, Artificial Sequence
  Synthetic polynucleotide encoding artificial human antibody CDR-H1 region
ggcttcaccctcagtagctattcc

SEQ ID NO: 851 - DNA, 24 bp, Artificial Sequence
  Synthetic polynucleotide encoding artificial human antibody CDR-H1 region
ggactcaccattagcacctatgcc

SEQ ID NO: 852 - DNA, 24 bp, Artificial Sequence
  Synthetic polynucleotide encoding artificial human antibody CDR-H1 region
ggattcatcttcagacactatgcc

SEQ ID NO: 853 - DNA, 24 bp, Artificial Sequence
  Synthetic polynucleotide encoding artificial human antibody CDR-H1 region
ggattcacctttaatagttttgcc

SEQ ID NO: 854 - DNA, 24 bp, Artificial Sequence
  Synthetic polynucleotide encoding artificial human antibody CDR-H1 region
ggattccccttcagtgattactac

SEQ ID NO: 855 - DNA, 24 bp, Artificial Sequence
  Synthetic polynucleotide encoding artificial human antibody CDR-H1 region
ggattcagtttcagtaactatgcc

SEQ ID NO: 856 - DNA, 24 bp, Artificial Sequence
  Synthetic polynucleotide encoding artificial human antibody CDR-H1 region
ggattcacctttagaagccatgcc

SEQ ID NO: 857 - DNA, 24 bp, Artificial Sequence
  Synthetic polynucleotide encoding artificial human antibody CDR-H1 region
ggatacaccttcagtagttatgcc

SEQ ID NO: 858 - DNA, 24 bp, Artificial Sequence
  Synthetic polynucleotide encoding artificial human antibody CDR-H1 region
ggtggctccatgagttattcctac

SEQ ID NO: 859 - DNA, 24 bp, Artificial Sequence
  Synthetic polynucleotide encoding artificial human antibody CDR-H1 region
ggattcacctttcaaacctatccc

SEQ ID NO: 860 - DNA, 24 bp, Artificial Sequence
  Synthetic polynucleotide encoding artificial human antibody CDR-H1 region
gggttcaccttcagtggtgctgct

SEQ ID NO: 861 - DNA, 24 bp, Artificial Sequence
  Synthetic polynucleotide encoding artificial human antibody CDR-H1 region
ggattcaccttcagtgactacttc

SEQ ID NO: 862 - DNA, 24 bp, Artificial Sequence
  Synthetic polynucleotide encoding artificial human antibody CDR-H1 region
ggattcaccttcagtagctatagc

SEQ ID NO: 863 - DNA, 30 bp, Artificial Sequence
  Synthetic polynucleotide encoding artificial human antibody CDR-H1 region
ggtgactccatcatcagttggactcactat

SEQ ID NO: 864 - DNA, 24 bp, Artificial Sequence
  Synthetic polynucleotide encoding artificial human antibody CDR-H1 region
ggattcgttttcaagaccgcctgg

SEQ ID NO: 865 - DNA, 24 bp, Artificial Sequence
  Synthetic polynucleotide encoding artificial human antibody CDR-H1 region
ggaggcaccttcaccagttatgct

SEQ ID NO: 866 - DNA, 24 bp, Artificial Sequence
  Synthetic polynucleotide encoding artificial human antibody CDR-H1 region
ggtgcgtcgatcggtgactacttg

SEQ ID NO: 867 - DNA, 24 bp, Artificial Sequence
  Synthetic polynucleotide encoding artificial human antibody CDR-H1 region
ggatacagctttagcaactaccac

SEQ ID NO: 868 - DNA, 24 bp, Artificial Sequence
  Synthetic polynucleotide encoding artificial human antibody CDR-H1 region
ggattcacgtttagtagatatggc

SEQ ID NO: 869 - DNA, 30 bp, Artificial Sequence; identical to SEQ ID NO: 45
  Synthetic polynucleotide encoding artificial human antibody CDR-H1 region

SEQ ID NO: 870 - DNA, 24 bp, Artificial Sequence
  Synthetic polynucleotide encoding artificial human antibody CDR-H1 region
ggattcacatttagtaactattgg

SEQ ID NO: 871 - DNA, 24 bp, Artificial Sequence
  Synthetic polynucleotide encoding artificial human antibody CDR-H1 region
ggattcgagtttgatgcttatgcc

SEQ ID NO: 872 - DNA, 24 bp, Artificial Sequence
  Synthetic polynucleotide encoding artificial human antibody CDR-H1 region
ggattcacctttagaagccatgcc

SEQ ID NO: 873 - DNA, 24 bp, Artificial Sequence
  Synthetic polynucleotide encoding artificial human antibody CDR-H1 region
gggtacaccttcggtgcccactac

SEQ ID NO: 874 - DNA, 24 bp, Artificial Sequence
  Synthetic polynucleotide encoding artificial human antibody CDR-H1 region
gctgaggccttcaatggttactac

SEQ ID NO: 875 - DNA, 24 bp, Artificial Sequence
  Synthetic polynucleotide encoding artificial human antibody CDR-H1 region
ggattcaccttcagtaaccactac

SEQ ID NO: 876 - DNA, 24 bp, Artificial Sequence
  Synthetic polynucleotide encoding artificial human antibody CDR-H1 region
ggatataccttcactaattatgct

SEQ ID NO: 877 - DNA, 24 bp, Artificial Sequence
  Synthetic polynucleotide encoding artificial human antibody CDR-H1 region
ggattcaccttcagtagctatgct

SEQ ID NO: 878 - DNA, 24 bp, Artificial Sequence
  Synthetic polynucleotide encoding artificial human antibody CDR-H1 region
ggatacaacttcaacacctactgg

SEQ ID NO: 879 - DNA, 24 bp, Artificial Sequence
  Synthetic polynucleotide encoding artificial human antibody CDR-H1 region
ggatactccttcagcacttactat

SEQ ID NO: 880 - DNA, 24 bp, Artificial Sequence
  Synthetic polynucleotide encoding artificial human antibody CDR-H1 region
ggattcaccttcagtacctactgg

SEQ ID NO: 881 - DNA, 24 bp, Artificial Sequence
  Synthetic polynucleotide encoding artificial human antibody CDR-H1 region
ggattcaccttcagtagctatggc

SEQ ID NO: 882 - DNA, 24 bp, Artificial Sequence
  Synthetic polynucleotide encoding artificial human antibody CDR-H1 region
ggattcacctttgccagttatgcc

SEQ ID NO: 883 - DNA, 30 bp, Artificial Sequence
  Synthetic polynucleotide encoding artificial human antibody CDR-H1 region
ggtggctccattagcagtggtggttactac

SEQ ID NO: 884 - DNA, 24 bp, Artificial Sequence
  Synthetic polynucleotide encoding artificial human antibody CDR-H1 region
ggattcagctttagaaaccatgcc

SEQ ID NO: 885 - DNA, 30 bp, Artificial Sequence
  Synthetic polynucleotide encoding artificial human antibody CDR-H1 region
ggtggctccgtcagcagtgataattactac

SEQ ID NO: 886 - DNA, 24 bp, Artificial Sequence
  Synthetic polynucleotide encoding artificial human antibody CDR-H1 region
ggcttcagcgtcagtgacctctac

SEQ ID NO: 887 - DNA, 24 bp, Artificial Sequence
  Synthetic polynucleotide encoding artificial human antibody CDR-H1 region
ggatacagcattcgcagcttctgg

SEQ ID NO: 888 - DNA, 24 bp, Artificial Sequence
  Synthetic polynucleotide encoding artificial human antibody CDR-H1 region
ggattcaccttcagtgcctctgag

SEQ ID NO: 889 - DNA, 27 bp, Artificial Sequence
  Synthetic polynucleotide encoding artificial human antibody CDR-H1 region
ggtgacgactccatgaaaagctactac

SEQ ID NO: 890 - DNA, 24 bp, Artificial Sequence
  Synthetic polynucleotide encoding artificial human antibody CDR-H1 region
ggattccttctcagttcctattac

SEQ ID NO: 891 - DNA, 24 bp, Artificial Sequence
  Synthetic polynucleotide encoding artificial human antibody CDR-H1 region
ggattcagcttcaataattatgtt

SEQ ID NO: 892 - DNA, 24 bp, Artificial Sequence
  Synthetic polynucleotide encoding artificial human antibody CDR-H1 region
ggattcaccttcagcaactccgtt

SEQ ID NO: 893 - DNA, 24 bp, Artificial Sequence
  Synthetic polynucleotide encoding artificial human antibody CDR-H1 region
ggattcacctttagtaattatgcc

SEQ ID NO: 894 - DNA, 24 bp, Artificial Sequence
  Synthetic polynucleotide encoding artificial human antibody CDR-H1 region
ggattccagtttgaagctttcgcc

SEQ ID NO: 895 - DNA, 24 bp, Artificial Sequence
  Synthetic polynucleotide encoding artificial human antibody CDR-H1 region
ggattcagttttcatgattatgcc

SEQ ID NO: 896 - DNA, 24 bp, Artificial Sequence
  Synthetic polynucleotide encoding artificial human antibody CDR-H1 region
ggactcacctttaggaactatgcc

SEQ ID NO: 897 - DNA, 24 bp, Artificial Sequence
  Synthetic polynucleotide encoding artificial human antibody CDR-H1 region
ggtgggtccttcagtggttactac

SEQ ID NO: 898 - DNA, 24 bp, Artificial Sequence
  Synthetic polynucleotide encoding artificial human antibody CDR-H1 region
ggattcaccttcaagagtaatgat

SEQ ID NO: 899 - DNA, 24 bp, Artificial Sequence
  Synthetic polynucleotide encoding artificial human antibody CDR-H1 region
ggttacacctttatcagctatggt

SEQ ID NO: 900 - DNA, 24 bp, Artificial Sequence
  Synthetic polynucleotide encoding artificial human antibody CDR-H1 region
ggtggctccatcagtagttactac

SEQ ID NO: 901 - DNA, 24 bp, Artificial Sequence
  Synthetic polynucleotide encoding artificial human antibody CDR-H1 region
ggattcacctttagaaactttgcc

SEQ ID NO: 902 - DNA, 24 bp, Artificial Sequence
  Synthetic polynucleotide encoding artificial human antibody CDR-H1 region
ggattcaccttcagtggcttttcc

SEQ ID NO: 903 - DNA, 24 bp, Artificial Sequence
  Synthetic polynucleotide encoding artificial human antibody CDR-H1 region
ggattcttattcaaggtctactct

SEQ ID NO: 904 - DNA, 24 bp, Artificial Sequence
  Synthetic polynucleotide encoding artificial human antibody CDR-H1 region
ggattcaccttcagtagttatgaa

SEQ ID NO: 905 - DNA, 24 bp, Artificial Sequence
  Synthetic polynucleotide encoding artificial human antibody CDR-H1 region
ggattcacatttaacaactatgcc

SEQ ID NO: 906 - DNA, 24 bp, Artificial Sequence
  Synthetic polynucleotide encoding artificial human antibody CDR-H1 region
ggattcactttcaacatttatgaa

SEQ ID NO: 907 - DNA, 24 bp, Artificial Sequence
  Synthetic polynucleotide encoding artificial human antibody CDR-H1 region
gaattcacgttcggaaattccgtt

SEQ ID NO: 908 - DNA, 24 bp, Artificial Sequence
  Synthetic polynucleotide encoding artificial human antibody CDR-H1 region
ggtgggtccttcagtggttaccac

SEQ ID NO: 909 - DNA, 24 bp, Artificial Sequence
  Synthetic polynucleotide encoding artificial human antibody CDR-H1 region
ggattcatccttcggaggcttggt

SEQ ID NO: 910 - DNA, 24 bp, Artificial Sequence
  Synthetic polynucleotide encoding artificial human antibody CDR-H1 region
ggactcacctttgccagctatgcc

SEQ ID NO: 911 - DNA, 24 bp, Artificial Sequence
  Synthetic polynucleotide encoding artificial human antibody CDR-H1 region
ggattcaccttcagtaactataac

SEQ ID NO: 912 - DNA, 24 bp, Artificial Sequence
  Synthetic polynucleotide encoding artificial human antibody CDR-H1 region
ggattcaccttcaatacctatggc

SEQ ID NO: 913 - DNA, 24 bp, Artificial Sequence
  Synthetic polynucleotide encoding artificial human antibody CDR-H1 region
ggattcaccttcaaaagttatgaa

SEQ ID NO: 914 - DNA, 24 bp, Artificial Sequence
  Synthetic polynucleotide encoding artificial human antibody CDR-H1 region
ggttacaccttcagcatctactat

SEQ ID NO: 915 - DNA, 24 bp, Artificial Sequence
  Synthetic polynucleotide encoding artificial human antibody CDR-H1 region
ggattcaccttccgaggttatgcc

SEQ ID NO: 916 - DNA, 24 bp, Artificial Sequence
  Synthetic polynucleotide encoding artificial human antibody CDR-H1 region
ggattcaccttcaacgaccatgcc

SEQ ID NO: 917 - DNA, 24 bp, Artificial Sequence
  Synthetic polynucleotide encoding artificial human antibody CDR-H1 region
ggattcacatttaacaactatgcc

SEQ ID NO: 918 - DNA, 24 bp, Artificial Sequence
  Synthetic polynucleotide encoding artificial human antibody CDR-H1 region
ggatttagtttcagtaattcctgg

SEQ ID NO: 919 - DNA, 24 bp, Artificial Sequence
  Synthetic polynucleotide encoding artificial human antibody CDR-H1 region
gggttcatcttcagtgactactac

SEQ ID NO: 920 - DNA, 24 bp, Artificial Sequence
  Synthetic polynucleotide encoding artificial human antibody CDR-H1 region
gaattcacctttagcaactatgtc

SEQ ID NO: 921 - DNA, 24 bp, Artificial Sequence
  Synthetic polynucleotide encoding artificial human antibody CDR-H1 region
ggactcacctttagcagctatgcc

SEQ ID NO: 922 - DNA, 30 bp, Artificial Sequence
  Synthetic polynucleotide encoding artificial human antibody CDR-H1 region
gggttctcactcagcactagaggaatgtct

SEQ ID NO: 923 - DNA, 24 bp, Artificial Sequence
  Synthetic polynucleotide encoding artificial human antibody CDR-H1 region
ggatacaccttcaaaaattatata

SEQ ID NO: 924 - DNA, 24 bp, Artificial Sequence
  Synthetic polynucleotide encoding artificial human antibody CDR-H1 region
ggtggttcattcaatagttactac

SEQ ID NO: 925 - DNA, 24 bp, Artificial Sequence
  Synthetic polynucleotide encoding artificial human antibody CDR-H1 region
ggattcaactttaatctctatgcc

SEQ ID NO: 926 - DNA, 24 bp, Artificial Sequence
  Synthetic polynucleotide encoding artificial human antibody CDR-H1 region
ggattccccttcggtaacattatt

SEQ ID NO: 927 - DNA, 24 bp, Artificial Sequence
  Synthetic polynucleotide encoding artificial human antibody CDR-H1 region
ggattcaccttcagtagctatgct

SEQ ID NO: 928 - DNA, 24 bp, Artificial Sequence
  Synthetic polynucleotide encoding artificial human antibody CDR-H1 region
ggatggacctttacgtacccctat

SEQ ID NO: 929 - DNA, 24 bp, Artificial Sequence
  Synthetic polynucleotide encoding artificial human antibody CDR-H1 region
ggtggctccctcagtagttactac

SEQ ID NO: 930 - DNA, 24 bp, Artificial Sequence
  Synthetic polynucleotide encoding artificial human antibody CDR-H1 region
ggattcaccctgagcgaccactac

SEQ ID NO: 931 - DNA, 24 bp, Artificial Sequence
  Synthetic polynucleotide encoding artificial human antibody CDR-H1 region
ggattcacctttgatgattatgcc

SEQ ID NO: 932 - DNA, 24 bp, Artificial Sequence
  Synthetic polynucleotide encoding artificial human antibody CDR-H1 region
ggactcacctttagcagctatgcc

SEQ ID NO: 933 - DNA, 24 bp, Artificial Sequence
  Synthetic polynucleotide encoding artificial human antibody CDR-H1 region
ggactcacctttagcaaatttgcc

SEQ ID NO: 934 - DNA, 24 bp, Artificial Sequence
  Synthetic polynucleotide encoding artificial human antibody CDR-H1 region
ggattcaactttggtgaagatgct

SEQ ID NO: 935 - DNA, 24 bp, Artificial Sequence
  Synthetic polynucleotide encoding artificial human antibody CDR-H1 region
ggtggctccgtcgatggttacttc

SEQ ID NO: 936 - DNA, 24 bp, Artificial Sequence
  Synthetic polynucleotide encoding artificial human antibody CDR-H1 region
ggattcgcctttgatgattctgcc

SEQ ID NO: 937 - DNA, 30 bp, Artificial Sequence; identical to SEQ ID NO: 45
  Synthetic polynucleotide encoding artificial human antibody CDR-H1 region

SEQ ID NO: 938 - DNA, 24 bp, Artificial Sequence
  Synthetic polynucleotide encoding artificial human antibody CDR-H1 region
caattcacaatccagaattccatt

SEQ ID NO: 939 - DNA, 24 bp, Artificial Sequence
  Synthetic polynucleotide encoding artificial human antibody CDR-H1 region
ggtggctccatcagtagttactac

SEQ ID NO: 940 - DNA, 24 bp, Artificial Sequence
  Synthetic polynucleotide encoding artificial human antibody CDR-H1 region
ggataccccttcaccggctattat

SEQ ID NO: 941 - DNA, 24 bp, Artificial Sequence
  Synthetic polynucleotide encoding artificial human antibody CDR-H1 region
ggattcaccttcagtagctatggc

SEQ ID NO: 942 - DNA, 24 bp, Artificial Sequence
  Synthetic polynucleotide encoding artificial human antibody CDR-H1 region
ggattcacctttagcggttatagt

SEQ ID NO: 943 - DNA, 30 bp, Artificial Sequence
  Synthetic polynucleotide encoding artificial human antibody CDR-H1 region
ggtgactccatcaccaggagacattcctac

SEQ ID NO: 944 - DNA, 24 bp, Artificial Sequence
  Synthetic polynucleotide encoding artificial human antibody CDR-H1 region
gggttcaccgtcagtagcagctac

SEQ ID NO: 945 - DNA, 24 bp, Artificial Sequence
  Synthetic polynucleotide encoding artificial human antibody CDR-H1 region
ggactcacctttagcggctttacc

SEQ ID NO: 946 - DNA, 24 bp, Artificial Sequence
  Synthetic polynucleotide encoding artificial human antibody CDR-H1 region
ggaggcagcttcagtaactatgtt

SEQ ID NO: 947 - DNA, 24 bp, Artificial Sequence
  Synthetic polynucleotide encoding artificial human antibody CDR-H1 region
aagtttggcttcactacctctggc

SEQ ID NO: 948 - DNA, 24 bp, Artificial Sequence
  Synthetic polynucleotide encoding artificial human antibody CDR-H1 region
ggattcaccctcagtaactgtggc

SEQ ID NO: 949 - DNA, 24 bp, Artificial Sequence
  Synthetic polynucleotide encoding artificial human antibody CDR-H1 region
ggatacaccttcactagacatgct

SEQ ID NO: 950 - DNA, 24 bp, Artificial Sequence
  Synthetic polynucleotide encoding artificial human antibody CDR-H1 region
gcattaaatttcacaaaagatgcg

SEQ ID NO: 951 - DNA, 24 bp, Artificial Sequence
  Synthetic polynucleotide encoding artificial human antibody CDR-H1 region
ggatacagcttcactagctattct

SEQ ID NO: 952 - DNA, 24 bp, Artificial Sequence
  Synthetic polynucleotide encoding artificial human antibody CDR-H1 region
ggactcacctttagcggctttacc

SEQ ID NO: 953 - DNA, 24 bp, Artificial Sequence
  Synthetic polynucleotide encoding artificial human antibody CDR-H1 region
ggagtcaccgtcagtcaccactac

SEQ ID NO: 954 - DNA, 24 bp, Artificial Sequence
  Synthetic polynucleotide encoding artificial human antibody CDR-H1 region
ggatacaccttcactaccagtcct

SEQ ID NO: 955 - DNA, 24 bp, Artificial Sequence
  Synthetic polynucleotide encoding artificial human antibody CDR-H1 region
ggacactcattcaactactacttt

SEQ ID NO: 956 - DNA, 24 bp, Artificial Sequence
  Synthetic polynucleotide encoding artificial human antibody CDR-H1 region
ggatacaacttctttaatcatgcc

SEQ ID NO: 957 - DNA, 24 bp, Artificial Sequence
  Synthetic polynucleotide encoding artificial human antibody CDR-H1 region
ggagtccctttcagtaacgcctgg

SEQ ID NO: 958 - DNA, 24 bp, Artificial Sequence
  Synthetic polynucleotide encoding artificial human antibody CDR-H1 region
ggcttcaccgtcactagcaactac

SEQ ID NO: 959 - DNA, 30 bp, Artificial Sequence
  Synthetic polynucleotide encoding artificial human antibody CDR-H1 region
gggttctcactcacgactagtggagtgggt

SEQ ID NO: 960 - DNA, 24 bp, Artificial Sequence
  Synthetic polynucleotide encoding artificial human antibody CDR-H1 region
gggtacaccttcagtgactattct

SEQ ID NO: 961 - DNA, 24 bp, Artificial Sequence
  Synthetic polynucleotide encoding artificial human antibody CDR-H1 region
ggattcaccttcagtagttatagc

SEQ ID NO: 962 - DNA, 24 bp, Artificial Sequence
  Synthetic polynucleotide encoding artificial human antibody CDR-H1 region
ggatacacctttaccgattattgg

SEQ ID NO: 963 - DNA, 24 bp, Artificial Sequence
  Synthetic polynucleotide encoding artificial human antibody CDR-H1 region
ggatacaccttcaccaactactat

SEQ ID NO: 964 - DNA, 24 bp, Artificial Sequence
  Synthetic polynucleotide encoding artificial human antibody CDR-H1 region
gggtccaccatcagtggctactgg

SEQ ID NO: 965 - DNA, 24 bp, Artificial Sequence
  Synthetic polynucleotide encoding artificial human antibody CDR-H1 region
ggattcaccttcaacaactgtgcc

SEQ ID NO: 966 - DNA, 24 bp, Artificial Sequence
  Synthetic polynucleotide encoding artificial human antibody CDR-H1 region
ggattcaattttagtaactttgcc

SEQ ID NO: 967 - DNA, 27 bp, Artificial Sequence
  Synthetic polynucleotide encoding artificial human antibody CDR-H1 region
ggactcagttttagtaggaggtatgcc

SEQ ID NO: 968 - DNA, 24 bp, Artificial Sequence
  Synthetic polynucleotide encoding artificial human antibody CDR-H1 region
ggatacaccttcagtagacattct

SEQ ID NO: 969 - DNA, 24 bp, Artificial Sequence
  Synthetic polynucleotide encoding artificial human antibody CDR-H1 region
ggattcacctttagtacttattgg

SEQ ID NO: 970 - DNA, 24 bp, Artificial Sequence
  Synthetic polynucleotide encoding artificial human antibody CDR-H1 region
ggattcacctttagcgactatgcc

SEQ ID NO: 971 - DNA, 24 bp, Artificial Sequence
  Synthetic polynucleotide encoding artificial human antibody CDR-H1 region
ggattcaccttcagtacatactgg

SEQ ID NO: 972 - DNA, 24 bp, Artificial Sequence
  Synthetic polynucleotide encoding artificial human antibody CDR-H1 region
ggattcaccttcagtagctatagc

SEQ ID NO: 973 - DNA, 24 bp, Artificial Sequence
  Synthetic polynucleotide encoding artificial human antibody CDR-H1 region
ggattcacctttcgcaactatgcc

SEQ ID NO: 974 - DNA, 24 bp, Artificial Sequence
  Synthetic polynucleotide encoding artificial human antibody CDR-H1 region
ggattcaccttcgctggctactgg

SEQ ID NO: 975 - DNA, 24 bp, Artificial Sequence
  Synthetic polynucleotide encoding artificial human antibody CDR-H1 region
ggttacacgtttaccaactatggt

SEQ ID NO: 976 - DNA, 24 bp, Artificial Sequence
  Synthetic polynucleotide encoding artificial human antibody CDR-H1 region
ggattcacatttagcagctatgcc

SEQ ID NO: 977 - DNA, 24 bp, Artificial Sequence
  Synthetic polynucleotide encoding artificial human antibody CDR-H1 region
ggatacaccttcaccgactacttt

SEQ ID NO: 978 - DNA, 24 bp, Artificial Sequence
  Synthetic polynucleotide encoding artificial human antibody CDR-H1 region
ggattcaattttaatagttatgcc

SEQ ID NO: 979 - DNA, 24 bp, Artificial Sequence
  Synthetic polynucleotide encoding artificial human antibody CDR-H1 region
ggattcacctttagaacctacgac

SEQ ID NO: 980 - DNA, 24 bp, Artificial Sequence
  Synthetic polynucleotide encoding artificial human antibody CDR-H1 region
ggattcaccttttcgaacaccttg

SEQ ID NO: 981 - DNA, 24 bp, Artificial Sequence
  Synthetic polynucleotide encoding artificial human antibody CDR-H1 region
ggactcacctttagcggctttacc

SEQ ID NO: 982 - DNA, 24 bp, Artificial Sequence
  Synthetic polynucleotide encoding artificial human antibody CDR-H1 region
ggatacaccttcaccaggaatcct

SEQ ID NO: 983 - DNA, 24 bp, Artificial Sequence
  Synthetic polynucleotide encoding artificial human antibody CDR-H1 region
ggattcccgttcagcacctctgat

SEQ ID NO: 984 - DNA, 30 bp, Artificial Sequence; identical to SEQ ID NO: 15
  Synthetic polynucleotide encoding artificial human antibody CDR-H1 region

SEQ ID NO: 985 - DNA, 24 bp, Artificial Sequence
  Synthetic polynucleotide encoding artificial human antibody CDR-H1 region
gaattcaccttcagtaactatggc

SEQ ID NO: 986 - DNA, 24 bp, Artificial Sequence
  Synthetic polynucleotide encoding artificial human antibody CDR-H1 region
ggatacaccctcactagttatgct

SEQ ID NO: 987 - DNA, 24 bp, Artificial Sequence
  Synthetic polynucleotide encoding artificial human antibody CDR-H1 region
ggattcaccctcagtgcctactgg

SEQ ID NO: 988 - DNA, 24 bp, Artificial Sequence
  Synthetic polynucleotide encoding artificial human antibody CDR-H1 region
gaatacacctccaccggcgactat

SEQ ID NO: 989 - DNA, 24 bp, Artificial Sequence
  Synthetic polynucleotide encoding artificial human antibody CDR-H1 region
ggatacaccttcactaacaatcct

SEQ ID NO: 990 - DNA, 24 bp, Artificial Sequence
  Synthetic polynucleotide encoding artificial human antibody CDR-H1 region
ggattcacctttaacaactttgcc

SEQ ID NO: 991 - DNA, 24 bp, Artificial Sequence
  Synthetic polynucleotide encoding artificial human antibody CDR-H1 region
ggatacaccttcactaaccatgcc

SEQ ID NO: 992 - DNA, 24 bp, Artificial Sequence
  Synthetic polynucleotide encoding artificial human antibody CDR-H1 region
ggattcagtttcgataaagtgtgg

SEQ ID NO: 993 - DNA, 24 bp, Artificial Sequence
  Synthetic polynucleotide encoding artificial human antibody CDR-H1 region
ggattcaccttcagtcatcatgcc

SEQ ID NO: 994 - DNA, 24 bp, Artificial Sequence
  Synthetic polynucleotide encoding artificial human antibody CDR-H1 region
gaatacaccttcactgactatgct

SEQ ID NO: 995 - DNA, 24 bp, Artificial Sequence
  Synthetic polynucleotide encoding artificial human antibody CDR-H1 region
ggattctccttcagtagctttggc

SEQ ID NO: 996 - DNA, 24 bp, Artificial Sequence
  Synthetic polynucleotide encoding artificial human antibody CDR-H1 region
ggatacacctttaccaactactgg

SEQ ID NO: 997 - DNA, 24 bp, Artificial Sequence
  Synthetic polynucleotide encoding artificial human antibody CDR-H1 region
ggattcaccctcagtggctactgg

SEQ ID NO: 998 - DNA, 24 bp, Artificial Sequence
  Synthetic polynucleotide encoding artificial human antibody CDR-H1 region
ggtgggtccttcagtgattaccac

SEQ ID NO: 999 - DNA, 24 bp, Artificial Sequence
  Synthetic polynucleotide encoding artificial human antibody CDR-H1 region
ggattcaactttagcaactatgcc

SEQ ID NO: 1000 - DNA, 24 bp, Artificial Sequence
  Synthetic polynucleotide encoding artificial human antibody CDR-H1 region
ggatacaccttcactaacaatgct

SEQ ID NO: 1001 - DNA, 24 bp, Artificial Sequence
  Synthetic polynucleotide encoding artificial human antibody CDR-H1 region
gggttcaccttcagcacctactgg

SEQ ID NO: 1002 - DNA, 30 bp, Artificial Sequence
  Synthetic polynucleotide encoding artificial human antibody CDR-H1 region
ggtgcctccatcggcagtgggggttactac

SEQ ID NO: 1003 - DNA, 24 bp, Artificial Sequence
  Synthetic polynucleotide encoding artificial human antibody CDR-H1 region
gggttcagcgtcagtgccacctac

SEQ ID NO: 1004 - DNA, 24 bp, Artificial Sequence
  Synthetic polynucleotide encoding artificial human antibody CDR-H1 region
ggattcaacttcagaaactactgg

SEQ ID NO: 1005 - DNA, 30 bp, Artificial Sequence; identical to SEQ ID NO: 45
  Synthetic polynucleotide encoding artificial human antibody CDR-H1 region

SEQ ID NO: 1006 - DNA, 30 bp, Artificial Sequence
  Synthetic polynucleotide encoding artificial human antibody CDR-H1 region
ggtggctccatcagcagtggtaattactac

SEQ ID NO: 1007 - DNA, 24 bp, Artificial Sequence
  Synthetic polynucleotide encoding artificial human antibody CDR-H1 region
ggattcactttcagtgacgcctgg

SEQ ID NO: 1008 - DNA, 24 bp, Artificial Sequence
  Synthetic polynucleotide encoding artificial human antibody CDR-H1 region
ggactcacctttgacaactttgcc

SEQ ID NO: 1009 - DNA, 24 bp, Artificial Sequence
  Synthetic polynucleotide encoding artificial human antibody CDR-H1 region
ggattcacctttaatacttatgcc

SEQ ID NO: 1010 - DNA, 24 bp, Artificial Sequence
  Synthetic polynucleotide encoding artificial human antibody CDR-H1 region
ggattcacctttagcaactatgcc

SEQ ID NO: 1011 - DNA, 24 bp, Artificial Sequence
  Synthetic polynucleotide encoding artificial human antibody CDR-H1 region
ggatacaccttcactagctatgct

SEQ ID NO: 1012 - DNA, 30 bp, Artificial Sequence
  Synthetic polynucleotide encoding artificial human antibody CDR-H1 region
ggagactccgtcaccagtcatttttactac

SEQ ID NO: 1013 - DNA, 24 bp, Artificial Sequence
  Synthetic polynucleotide encoding artificial human antibody CDR-H1 region
ggatacaccttcaccggctactat

SEQ ID NO: 1014 - DNA, 30 bp, Artificial Sequence
  Synthetic polynucleotide encoding artificial human antibody CDR-H1 region
ggtgcctccatcagaagttctagttactac

SEQ ID NO: 1015 - DNA, 24 bp, Artificial Sequence
  Synthetic polynucleotide encoding artificial human antibody CDR-H1 region
gggttcaccgtcatggacacctac

SEQ ID NO: 1016 - DNA, 24 bp, Artificial Sequence
  Synthetic polynucleotide encoding artificial human antibody CDR-H1 region
ggatacactttcactaaatattct

SEQ ID NO: 1017 - DNA, 24 bp, Artificial Sequence
  Synthetic polynucleotide encoding artificial human antibody CDR-H1 region
ggattcacctttcgtgattatgct

SEQ ID NO: 1018 - DNA, 24 bp, Artificial Sequence
  Synthetic polynucleotide encoding artificial human antibody CDR-H1 region
ggattcaccttcagtagctatagc

SEQ ID NO: 1019 - DNA, 24 bp, Artificial Sequence
  Synthetic polynucleotide encoding artificial human antibody CDR-H1 region
ggtgggtccttcagtggttactac

SEQ ID NO: 1020 - DNA, 24 bp, Artificial Sequence
  Synthetic polynucleotide encoding artificial human antibody CDR-H1 region
gggtccaccatcagtggctactgg

SEQ ID NO: 1021 - DNA, 24 bp, Artificial Sequence
  Synthetic polynucleotide encoding artificial human antibody CDR-H1 region
ggattcacctttagcatctacgcc

SEQ ID NO: 1022 - DNA, 24 bp, Artificial Sequence
  Synthetic polynucleotide encoding artificial human antibody CDR-H1 region
ggattcaccttcagtagttatggc

SEQ ID NO: 1023 - DNA, 24 bp, Artificial Sequence
  Synthetic polynucleotide encoding artificial human antibody CDR-H1 region
ggattcacctttggcgattttgcc

SEQ ID NO: 1024 - DNA, 24 bp, Artificial Sequence
  Synthetic polynucleotide encoding artificial human antibody CDR-H1 region
ggatacaccttcactaccagtcct

SEQ ID NO: 1025 - DNA, 30 bp, Artificial Sequence
  Synthetic polynucleotide encoding artificial human antibody CDR-H1 region
ggtgtctccgtcagcagtccttcttactac

SEQ ID NO: 1026 - DNA, 24 bp, Artificial Sequence
  Synthetic polynucleotide encoding artificial human antibody CDR-H1 region
gaactcagctttagcaactatgtc

SEQ ID NO: 1027 - DNA, 24 bp, Artificial Sequence
  Synthetic polynucleotide encoding artificial human antibody CDR-H1 region
ggattcactttcagtgacgcctgg

SEQ ID NO: 1028 - DNA, 27 bp, Artificial Sequence
  Synthetic polynucleotide encoding artificial human antibody CDR-H1 region
ggtggctccatcagcagtagtaactgg

SEQ ID NO: 1029 - DNA, 24 bp, Artificial Sequence
  Synthetic polynucleotide encoding artificial human antibody CDR-H1 region
ggactcacctttagcggctttacc

SEQ ID NO: 1030 - DNA, 24 bp, Artificial Sequence
  Synthetic polynucleotide encoding artificial human antibody CDR-H1 region
ggattcatcttcagcaactatggc

SEQ ID NO: 1031 - DNA, 24 bp, Artificial Sequence
  Synthetic polynucleotide encoding artificial human antibody CDR-H1 region
ggattcaccttcagtggctatggc

SEQ ID NO: 1032 - DNA, 24 bp, Artificial Sequence
  Synthetic polynucleotide encoding artificial human antibody CDR-H1 region
ggattcacctttagcagctatgcc

SEQ ID NO: 1033 - DNA, 24 bp, Artificial Sequence
  Synthetic polynucleotide encoding artificial human antibody CDR-H1 region
ggaggctccgtcactagttactac

SEQ ID NO: 1034 - DNA, 24 bp, Artificial Sequence
  Synthetic polynucleotide encoding artificial human antibody CDR-H1 region
ggagtccccgtgagtaacgcctgg

SEQ ID NO: 1035 - DNA, 24 bp, Artificial Sequence
  Synthetic polynucleotide encoding artificial human antibody CDR-H1 region
ggtggctccatcattaattacttt

SEQ ID NO: 1036 - DNA, 30 bp, Artificial Sequence
  Synthetic polynucleotide encoding artificial human antibody CDR-H1 region
ggtggctccatcagcagtagtggttatttc

SEQ ID NO: 1037 - DNA, 24 bp, Artificial Sequence
  Synthetic polynucleotide encoding artificial human antibody CDR-H1 region
ggattcactgtcagtgacgcctac

SEQ ID NO: 1038 - DNA, 24 bp, Artificial Sequence
  Synthetic polynucleotide encoding artificial human antibody CDR-H1 region
ggatacaccttcaccgactactat

SEQ ID NO: 1039 - DNA, 24 bp, Artificial Sequence
  Synthetic polynucleotide encoding artificial human antibody CDR-H1 region
ggatacaactttaacaattttgac

SEQ ID NO: 1040 - DNA, 24 bp, Artificial Sequence
  Synthetic polynucleotide encoding artificial human antibody CDR-H1 region
ggattcactttcagtgatacctac

SEQ ID NO: 1041 - DNA, 24 bp, Artificial Sequence
  Synthetic polynucleotide encoding artificial human antibody CDR-H1 region
ggattcagcttcagtaactctgtc

SEQ ID NO: 1042 - DNA, 24 bp, Artificial Sequence
  Synthetic polynucleotide encoding artificial human antibody CDR-H1 region
ggatttcgtttcagagacgcctgg

SEQ ID NO: 1043 - DNA, 24 bp, Artificial Sequence
  Synthetic polynucleotide encoding artificial human antibody CDR-H1 region
ggattcaccttcagtgtcttcagc

SEQ ID NO: 1044 - DNA, 24 bp, Artificial Sequence
  Synthetic polynucleotide encoding artificial human antibody CDR-H1 region
gggttgaccgtcagtaacagctac

SEQ ID NO: 1045 - DNA, 24 bp, Artificial Sequence
  Synthetic polynucleotide encoding artificial human antibody CDR-H1 region
ggatacaccttcaccggctactat

SEQ ID NO: 1046 - DNA, 24 bp, Artificial Sequence
  Synthetic polynucleotide encoding artificial human antibody CDR-H1 region
ggattctactttacgaactacgcc

SEQ ID NO: 1047 - DNA, 24 bp, Artificial Sequence
  Synthetic polynucleotide encoding artificial human antibody CDR-H1 region
ggattcacctttagtgactttgcc

SEQ ID NO: 1048 - DNA, 24 bp, Artificial Sequence
  Synthetic polynucleotide encoding artificial human antibody CDR-H1 region
gcattcaccttcagaaactttggc

SEQ ID NO: 1049 - DNA, 24 bp, Artificial Sequence
  Synthetic polynucleotide encoding artificial human antibody CDR-H1 region
ggtgactccatgactggttactac

SEQ ID NO: 1050 - DNA, 24 bp, Artificial Sequence
  Synthetic polynucleotide encoding artificial human antibody CDR-H1 region
ggatacaccttcaccggctactat

SEQ ID NO: 1051 - DNA, 24 bp, Artificial Sequence
  Synthetic polynucleotide encoding artificial human antibody CDR-H1 region
ggtgggtccttcagtggttactac

SEQ ID NO: 1052 - DNA, 30 bp, Artificial Sequence
  Synthetic polynucleotide encoding artificial human antibody CDR-H1 region
ggtgactccgtcagcaatactaattactac

SEQ ID NO: 1053 - DNA, 24 bp, Artificial Sequence
  Synthetic polynucleotide encoding artificial human antibody CDR-H1 region
ggttacacctttagtgcttccggc

SEQ ID NO: 1054 - DNA, 24 bp, Artificial Sequence
  Synthetic polynucleotide encoding artificial human antibody CDR-H1 region
ggtgggtccttcagtggttattac

SEQ ID NO: 1055 - DNA, 24 bp, Artificial Sequence
  Synthetic polynucleotide encoding artificial human antibody CDR-H1 region
ggaggcaccttcagcagctatgct

SEQ ID NO: 1056 - DNA, 24 bp, Artificial Sequence
  Synthetic polynucleotide encoding artificial human antibody CDR-H1 region
ggattcaccttcagtaactatgcc

SEQ ID NO: 1057 - DNA, 24 bp, Artificial Sequence
  Synthetic polynucleotide encoding artificial human antibody CDR-H1 region
gaatccagctttagcattaaagcc

SEQ ID NO: 1058 - DNA, 24 bp, Artificial Sequence
  Synthetic polynucleotide encoding artificial human antibody CDR-H1 region
ggatttcccttcagtgagtactat

SEQ ID NO: 1059 - DNA, 24 bp, Artificial Sequence
  Synthetic polynucleotide encoding artificial human antibody CDR-H1 region
ggattcaccgtcagtagcaactac

SEQ ID NO: 1060 - DNA, 24 bp, Artificial Sequence
  Synthetic polynucleotide encoding artificial human antibody CDR-H1 region
ggttacacctttaccagctatggt

SEQ ID NO: 1061 - DNA, 24 bp, Artificial Sequence
  Synthetic polynucleotide encoding artificial human antibody CDR-H1 region
ggattcaccttcagtacttctaac

SEQ ID NO: 1062 - DNA, 24 bp, Artificial Sequence
  Synthetic polynucleotide encoding artificial human antibody CDR-H1 region
ggattcaactttggtgaatatgct

SEQ ID NO: 1063 - DNA, 24 bp, Artificial Sequence
  Synthetic polynucleotide encoding artificial human antibody CDR-H1 region
ggatacaggttcagcgactatttt

SEQ ID NO: 1064 - DNA, 24 bp, Artificial Sequence
  Synthetic polynucleotide encoding artificial human antibody CDR-H1 region
ggttacacctttaccagctatggt

SEQ ID NO: 1065 - DNA, 30 bp, Artificial Sequence; identical to SEQ ID NO: 114
  Synthetic polynucleotide encoding artificial human antibody CDR-H1 region

SEQ ID NO: 1066 - DNA, 24 bp, Artificial Sequence
  Synthetic polynucleotide encoding artificial human antibody CDR-H1 region
ggattcaccctcacaacgttctgg

SEQ ID NO: 1067 - DNA, 24 bp, Artificial Sequence
  Synthetic polynucleotide encoding artificial human antibody CDR-H1 region
ggaggcaccttcagcaactatgct

SEQ ID NO: 1068 - DNA, 24 bp, Artificial Sequence
  Synthetic polynucleotide encoding artificial human antibody CDR-H1 region
ggattcaccttcagtagctatagc

SEQ ID NO: 1069 - DNA, 30 bp, Artificial Sequence
  Synthetic polynucleotide encoding artificial human antibody CDR-H1 region
gggttctcactcagcactagtgaaatgtgt

SEQ ID NO: 1070 - DNA, 24 bp, Artificial Sequence
  Synthetic polynucleotide encoding artificial human antibody CDR-H1 region
ggattcaccttcagtagctatggc

SEQ ID NO: 1071 - DNA, 24 bp, Artificial Sequence
  Synthetic polynucleotide encoding artificial human antibody CDR-H1 region
ggttacatttttagtaactatgtt

SEQ ID NO: 1072 - DNA, 24 bp, Artificial Sequence
  Synthetic polynucleotide encoding artificial human antibody CDR-H1 region
ggattcaccttcagtagctatagc

SEQ ID NO: 1073 - DNA, 24 bp, Artificial Sequence
  Synthetic polynucleotide encoding artificial human antibody CDR-H1 region
ggattcacatatagtagtcacgcc

SEQ ID NO: 1074 - DNA, 24 bp, Artificial Sequence
  Synthetic polynucleotide encoding artificial human antibody CDR-H1 region
ggtgggtccttcagtggttactac

SEQ ID NO: 1075 - DNA, 24 bp, Artificial Sequence
  Synthetic polynucleotide encoding artificial human antibody CDR-H1 region
ggatacaccttcaccagttttgat

SEQ ID NO: 1076 - DNA, 30 bp, Artificial Sequence
  Synthetic polynucleotide encoding artificial human antibody CDR-H1 region
ggtggctccatcagcagtaggagttactac

SEQ ID NO: 1077 - DNA, 24 bp, Artificial Sequence
  Synthetic polynucleotide encoding artificial human antibody CDR-H1 region
gaattcacatttgcgaactctgcc

SEQ ID NO: 1078 - DNA, 24 bp, Artificial Sequence
  Synthetic polynucleotide encoding artificial human antibody CDR-H1 region
ggattcagcttcaataactatgcc

SEQ ID NO: 1079 - DNA, 24 bp, Artificial Sequence
  Synthetic polynucleotide encoding artificial human antibody CDR-H1 region
ggtggctccttcagtagttactac

SEQ ID NO: 1080 - DNA, 24 bp, Artificial Sequence
  Synthetic polynucleotide encoding artificial human antibody CDR-H1 region
ggattcaggtttactggttattgg

SEQ ID NO: 1081 - DNA, 30 bp, Artificial Sequence; identical to SEQ ID NO: 45
  Synthetic polynucleotide encoding artificial human antibody CDR-H1 region

SEQ ID NO: 1082 - DNA, 24 bp, Artificial Sequence
  Synthetic polynucleotide encoding artificial human antibody CDR-H1 region
ggattcaccttcagtagctatggc

SEQ ID NO: 1083 - DNA, 24 bp, Artificial Sequence
  Synthetic polynucleotide encoding artificial human antibody CDR-H1 region
ggatacaccttcacgggctaccat

SEQ ID NO: 1084 - DNA, 24 bp, Artificial Sequence
  Synthetic polynucleotide encoding artificial human antibody CDR-H1 region
ggattcaccttcagtagctatggc

SEQ ID NO: 1085 - DNA, 24 bp, Artificial Sequence
  Synthetic polynucleotide encoding artificial human antibody CDR-H1 region
ggattcaccttcagtagctatagc

SEQ ID NO: 1086 - DNA, 24 bp, Artificial Sequence
  Synthetic polynucleotide encoding artificial human antibody CDR-H1 region
ggattcatcttcagtgactactac

SEQ ID NO: 1087 - DNA, 24 bp, Artificial Sequence
  Synthetic polynucleotide encoding artificial human antibody CDR-H1 region
ggattcatgttcagtatctatgct

SEQ ID NO: 1088 - DNA, 30 bp, Artificial Sequence
  Synthetic polynucleotide encoding artificial human antibody CDR-H1 region
ggtggctccatcagcggtggtgattactac

SEQ ID NO: 1089 - DNA, 24 bp, Artificial Sequence
  Synthetic polynucleotide encoding artificial human antibody CDR-H1 region
ggattcactttcagtaacacctgg

SEQ ID NO: 1090 - DNA, 24 bp, Artificial Sequence
  Synthetic polynucleotide encoding artificial human antibody CDR-H1 region
ggtgggtccttcagtggttactcc

SEQ ID NO: 1091 - DNA, 24 bp, Artificial Sequence
  Synthetic polynucleotide encoding artificial human antibody CDR-H1 region
ggtgggtccttcagtggttactac

SEQ ID NO: 1092 - DNA, 30 bp, Artificial Sequence
  Synthetic polynucleotide encoding artificial human antibody CDR-H1 region
ggtggctccatcatcagcggaagcaagtac

SEQ ID NO: 1093 - DNA, 24 bp, Artificial Sequence
  Synthetic polynucleotide encoding artificial human antibody CDR-H1 region
ggatacaccctcagtgaattatcc

SEQ ID NO: 1094 - DNA, 24 bp, Artificial Sequence
  Synthetic polynucleotide encoding artificial human antibody CDR-H1 region
agtggctccgtcatctctttctac

SEQ ID NO: 1095 - DNA, 24 bp, Artificial Sequence
  Synthetic polynucleotide encoding artificial human antibody CDR-H1 region
ggattcaactttattaactattgg

SEQ ID NO: 1096 - DNA, 24 bp, Artificial Sequence
  Synthetic polynucleotide encoding artificial human antibody CDR-H1 region
ggattcacctttagcagctatgcc

SEQ ID NO: 1097 - DNA, 24 bp, Artificial Sequence
  Synthetic polynucleotide encoding artificial human antibody CDR-H1 region
ggattcactttcagcaattatggc

SEQ ID NO: 1098 - DNA, 24 bp, Artificial Sequence
  Synthetic polynucleotide encoding artificial human antibody CDR-H1 region
ggattcaccttcagtagctatggc

SEQ ID NO: 1099 - DNA, 24 bp, Artificial Sequence
  Synthetic polynucleotide encoding artificial human antibody CDR-H1 region
ggtggctccatcaatggttactac

SEQ ID NO: 1100 - DNA, 24 bp, Artificial Sequence
  Synthetic polynucleotide encoding artificial human antibody CDR-H1 region
ggatacaccttcaccaacttcttt

SEQ ID NO: 1101 - DNA, 24 bp, Artificial Sequence
  Synthetic polynucleotide encoding artificial human antibody CDR-H1 region
ggtagttccttcagtttttactac

SEQ ID NO: 1102 - DNA, 24 bp, Artificial Sequence
  Synthetic polynucleotide encoding artificial human antibody CDR-H1 region
ggattcatgtttagcaactatgcc

SEQ ID NO: 1103 - DNA, 30 bp, Artificial Sequence
  Synthetic polynucleotide encoding artificial human antibody CDR-H1 region
ggcttctcactcagcaacattggagtcggt

SEQ ID NO: 1104 - DNA, 24 bp, Artificial Sequence
  Synthetic polynucleotide encoding artificial human antibody CDR-H1 region
ggatacaccttcaccggcaactat

SEQ ID NO: 1105 - DNA, 24 bp, Artificial Sequence
  Synthetic polynucleotide encoding artificial human antibody CDR-H1 region
ggattcaccttcagtagctatggc

SEQ ID NO: 1106 - DNA, 24 bp, Artificial Sequence
  Synthetic polynucleotide encoding artificial human antibody CDR-H1 region
ggattcaccttcagtgatcattac

SEQ ID NO: 1107 - DNA, 30 bp, Artificial Sequence; identical to SEQ ID NO: 798
  Synthetic polynucleotide encoding artificial human antibody CDR-H1 region

SEQ ID NO: 1108 - DNA, 30 bp, Artificial Sequence; identical to SEQ ID NO: 1076
  Synthetic polynucleotide encoding artificial human antibody CDR-H1 region

SEQ ID NO: 1109 - DNA, 24 bp, Artificial Sequence
  Synthetic polynucleotide encoding artificial human antibody CDR-H1 region
ggatacaccttcaccagctatgat

SEQ ID NO: 1110 - DNA, 24 bp, Artificial Sequence
  Synthetic polynucleotide encoding artificial human antibody CDR-H1 region
ggattcacctttgatgattatgcc

SEQ ID NO: 1111 - DNA, 24 bp, Artificial Sequence
  Synthetic polynucleotide encoding artificial human antibody CDR-H1 region
ggattcaccttcaatacctctggc

SEQ ID NO: 1112 - DNA, 24 bp, Artificial Sequence
  Synthetic polynucleotide encoding artificial human antibody CDR-H1 region
ggattcaccttcagtagctatggc

SEQ ID NO: 1113 - DNA, 30 bp, Artificial Sequence
  Synthetic polynucleotide encoding artificial human antibody CDR-H1 region
ggtgcctccatcaacactgggccttattac

SEQ ID NO: 1114 - DNA, 24 bp, Artificial Sequence
  Synthetic polynucleotide encoding artificial human antibody CDR-H1 region
ggattcaccttcagtagctatgct

SEQ ID NO: 1115 - DNA, 24 bp, Artificial Sequence
  Synthetic polynucleotide encoding artificial human antibody CDR-H1 region
caattcacttttagtttgtattgg

SEQ ID NO: 1116 - DNA, 21 bp, Artificial Sequence
  Synthetic polynucleotide encoding artificial human antibody CDR-H1 region
ggaggcaaccccacttacacc

SEQ ID NO: 1117 - DNA, 24 bp, Artificial Sequence
  Synthetic polynucleotide encoding artificial human antibody CDR-H1 region
ggattcaccttcaataactatgcc

SEQ ID NO: 1118 - DNA, 24 bp, Artificial Sequence
  Synthetic polynucleotide encoding artificial human antibody CDR-H1 region
ggattcaactttaaagactcttgg

SEQ ID NO: 1119 - DNA, 24 bp, Artificial Sequence
  Synthetic polynucleotide encoding artificial human antibody CDR-H1 region
ggatacactttcgccgcctactat

SEQ ID NO: 1120 - DNA, 24 bp, Artificial Sequence
  Synthetic polynucleotide encoding artificial human antibody CDR-H1 region
ggattcaccttcagtgactactac

SEQ ID NO: 1121 - DNA, 24 bp, Artificial Sequence
  Synthetic polynucleotide encoding artificial human antibody CDR-H1 region
ggattcactttcggtaactatggc

SEQ ID NO: 1122 - DNA, 30 bp, Artificial Sequence
  Synthetic polynucleotide encoding artificial human antibody CDR-H1 region
ggtgactccgccagcaatcataattatttc

SEQ ID NO: 1123 - DNA, 24 bp, Artificial Sequence
  Synthetic polynucleotide encoding artificial human antibody CDR-H1 region
ggtgcctccatcgatagttattac

SEQ ID NO: 1124 - DNA, 27 bp, Artificial Sequence
  Synthetic polynucleotide encoding artificial human antibody CDR-H1 region
ggtggctccatggacagtcataattgg

SEQ ID NO: 1125 - DNA, 24 bp, Artificial Sequence
  Synthetic polynucleotide encoding artificial human antibody CDR-H1 region
ggattcaccttcagtagttactgg

SEQ ID NO: 1126 - DNA, 27 bp, Artificial Sequence
  Synthetic polynucleotide encoding artificial human antibody CDR-H1 region
agtttctccatcagcagtggttactac

SEQ ID NO: 1127 - DNA, 24 bp, Artificial Sequence
  Synthetic polynucleotide encoding artificial human antibody CDR-H1 region
ggattcacctttggcagctttgcc

SEQ ID NO: 1128 - DNA, 30 bp, Artificial Sequence; identical to SEQ ID NO: 45
  Synthetic polynucleotide encoding artificial human antibody CDR-H1 region

SEQ ID NO: 1129 - DNA, 24 bp, Artificial Sequence
  Synthetic polynucleotide encoding artificial human antibody CDR-H1 region
ggattcacctatagcacctatgcc

SEQ ID NO: 1130 - DNA, 24 bp, Artificial Sequence
  Synthetic polynucleotide encoding artificial human antibody CDR-H1 region
ggattcaccttcagtacctcctgg

SEQ ID NO: 1131 - DNA, 30 bp, Artificial Sequence
  Synthetic polynucleotide encoding artificial human antibody CDR-H1 region
ggtgactccatcaccactaccggtttcttc

SEQ ID NO: 1132 - DNA, 24 bp, Artificial Sequence
  Synthetic polynucleotide encoding artificial human antibody CDR-H1 region
gggttcaccttcactagtttctca

SEQ ID NO: 1133 - DNA, 24 bp, Artificial Sequence
  Synthetic polynucleotide encoding artificial human antibody CDR-H1 region
ggattcagttttggtcgctatggc

SEQ ID NO: 1134 - DNA, 24 bp, Artificial Sequence
  Synthetic polynucleotide encoding artificial human antibody CDR-H1 region
ggttacacctttaccagctatggt

SEQ ID NO: 1135 - DNA, 24 bp, Artificial Sequence
  Synthetic polynucleotide encoding artificial human antibody CDR-H1 region
ggattcacctttaacaactttgcc

SEQ ID NO: 1136 - DNA, 30 bp, Artificial Sequence
  Synthetic polynucleotide encoding artificial human antibody CDR-H1 region
ggtgactcccttagtagtacaagttattcc

SEQ ID NO: 1137 - DNA, 24 bp, Artificial Sequence
  Synthetic polynucleotide encoding artificial human antibody CDR-H1 region
ggattcacctttagcacctatgcc

SEQ ID NO: 1138 - DNA, 24 bp, Artificial Sequence
  Synthetic polynucleotide encoding artificial human antibody CDR-H1 region
ggatacagctttaccaaccactgg

SEQ ID NO: 1139 - DNA, 24 bp, Artificial Sequence
  Synthetic polynucleotide encoding artificial human antibody CDR-H1 region
ggattcacctttaacaactatgcc

SEQ ID NO: 1140 - DNA, 24 bp, Artificial Sequence
  Synthetic polynucleotide encoding artificial human antibody CDR-H1 region
ggattcaccttcttcacctataca

SEQ ID NO: 1141 - DNA, 24 bp, Artificial Sequence
  Synthetic polynucleotide encoding artificial human antibody CDR-H1 region
ggattcacctttaaaaactatgcc

SEQ ID NO: 1142 - DNA, 24 bp, Artificial Sequence
  Synthetic polynucleotide encoding artificial human antibody CDR-H1 region
gggttcaccgtcagtagcagctac

SEQ ID NO: 1143 - DNA, 24 bp, Artificial Sequence
  Synthetic polynucleotide encoding artificial human antibody CDR-H1 region
ggatacaccttcaccaactatgat

SEQ ID NO: 1144 - DNA, 24 bp, Artificial Sequence
  Synthetic polynucleotide encoding artificial human antibody CDR-H1 region
ggatacagctttaccagctactgg

SEQ ID NO: 1145 - DNA, 24 bp, Artificial Sequence
  Synthetic polynucleotide encoding artificial human antibody CDR-H1 region
ggattcacctttaacaattatgcc

SEQ ID NO: 1146 - DNA, 24 bp, Artificial Sequence
  Synthetic polynucleotide encoding artificial human antibody CDR-H1 region
ggatttagttttagtaactattgg

SEQ ID NO: 1147 - DNA, 24 bp, Artificial Sequence
  Synthetic polynucleotide encoding artificial human antibody CDR-H1 region
ggatttatcttcagtgactatgcc

SEQ ID NO: 1148 - DNA, 24 bp, Artificial Sequence
  Synthetic polynucleotide encoding artificial human antibody CDR-H1 region
ggcttcaggttcagtgactctagc

SEQ ID NO: 1149 - DNA, 24 bp, Artificial Sequence
  Synthetic polynucleotide encoding artificial human antibody CDR-H1 region
ggattcacgttcagtaccaaccac

SEQ ID NO: 1150 - DNA, 24 bp, Artificial Sequence
  Synthetic polynucleotide encoding artificial human antibody CDR-H1 region
ggattcacctttagcaactacgcc

SEQ ID NO: 1151 - DNA, 24 bp, Artificial Sequence
  Synthetic polynucleotide encoding artificial human antibody CDR-H1 region
gggttcaccttcagtggctctgct

SEQ ID NO: 1152 - DNA, 30 bp, Artificial Sequence
  Synthetic polynucleotide encoding artificial human antibody CDR-H1 region
ggtgtctccgtcaccagtattggctactat

SEQ ID NO: 1153 - DNA, 30 bp, Artificial Sequence
  Synthetic polynucleotide encoding artificial human antibody CDR-H1 region
ggtgcctccgtcagcagtgttgattcccac

SEQ ID NO: 1154 - DNA, 24 bp, Artificial Sequence
  Synthetic polynucleotide encoding artificial human antibody CDR-H1 region
ggcttcacattcactacatatccc

SEQ ID NO: 1155 - DNA, 24 bp, Artificial Sequence
  Synthetic polynucleotide encoding artificial human antibody CDR-H1 region
ggattcagtgtcagtagtgcctgg

SEQ ID NO: 1156 - DNA, 27 bp, Artificial Sequence
  Synthetic polynucleotide encoding artificial human antibody CDR-H1 region
ggtgtctccatcagcagtagtaactgg

SEQ ID NO: 1157 - DNA, 24 bp, Artificial Sequence
  Synthetic polynucleotide encoding artificial human antibody CDR-H1 region
ggattcagttttaatagccattgg

SEQ ID NO: 1158 - DNA, 24 bp, Artificial Sequence
  Synthetic polynucleotide encoding artificial human antibody CDR-H1 region
ggatacagatttaccagtttctgg

SEQ ID NO: 1159 - DNA, 24 bp, Artificial Sequence
  Synthetic polynucleotide encoding artificial human antibody CDR-H1 region
ggatacagcttcaccggccaccta

SEQ ID NO: 1160 - DNA, 24 bp, Artificial Sequence
  Synthetic polynucleotide encoding artificial human antibody CDR-H1 region
ggttacacctttaccagctatggt

SEQ ID NO: 1161 - DNA, 24 bp, Artificial Sequence
  Synthetic polynucleotide encoding artificial human antibody CDR-H1 region
ggattcattttcagcaaatatgcc

SEQ ID NO: 1162 - DNA, 24 bp, Artificial Sequence
  Synthetic polynucleotide encoding artificial human antibody CDR-H1 region
ggattcaccttcagtaccaatact

SEQ ID NO: 1163 - DNA, 27 bp, Artificial Sequence
  Synthetic polynucleotide encoding artificial human antibody CDR-H1 region
ggtggctccatcaccagtacttactgg

SEQ ID NO: 1164 - DNA, 24 bp, Artificial Sequence
  Synthetic polynucleotide encoding artificial human antibody CDR-H1 region
ggattcacattcagttcctatgct

SEQ ID NO: 1165 - DNA, 24 bp, Artificial Sequence
  Synthetic polynucleotide encoding artificial human antibody CDR-H1 region
ggattcacctttagcagctatgcc

SEQ ID NO: 1166 - DNA, 24 bp, Artificial Sequence
  Synthetic polynucleotide encoding artificial human antibody CDR-H1 region
ggatacacctttactacctactgg

SEQ ID NO: 1167 - DNA, 30 bp, Artificial Sequence
  Synthetic polynucleotide encoding artificial human antibody CDR-H1 region
ggtggctccattagtagtagtggttactcc

SEQ ID NO: 1168 - DNA, 24 bp, Artificial Sequence
  Synthetic polynucleotide encoding artificial human antibody CDR-H1 region
ggattcactttaggaaatgcctgg

SEQ ID NO: 1169 - DNA, 24 bp, Artificial Sequence
  Synthetic polynucleotide encoding artificial human antibody CDR-H1 region
ggagacaccctcagaaattatgct

SEQ ID NO: 1170 - DNA, 30 bp, Artificial Sequence; identical to SEQ ID NO: 1076
  Synthetic polynucleotide encoding artificial human antibody CDR-H1 region

SEQ ID NO: 1171 - DNA, 24 bp, Artificial Sequence
  Synthetic polynucleotide encoding artificial human antibody CDR-H1 region
ggattcaccttcagtgatttcgaa

SEQ ID NO: 1172 - DNA, 30 bp, Artificial Sequence
  Synthetic polynucleotide encoding artificial human antibody CDR-H1 region
ggcttctcactagacacacctaaaatgtct

SEQ ID NO: 1173 - DNA, 24 bp, Artificial Sequence
  Synthetic polynucleotide encoding artificial human antibody CDR-H1 region
ggaggcaccttcagcagctatgct

SEQ ID NO: 1174 - DNA, 24 bp, Artificial Sequence
  Synthetic polynucleotide encoding artificial human antibody CDR-H1 region
ggattcaccttcagtaaatatggc

SEQ ID NO: 1175 - DNA, 24 bp, Artificial Sequence
  Synthetic polynucleotide encoding artificial human antibody CDR-H1 region
ggattcacctttgataattatgcc

SEQ ID NO: 1176 - DNA, 24 bp, Artificial Sequence
  Synthetic polynucleotide encoding artificial human antibody CDR-H1 region
ggattcacctttggtgattatgct

SEQ ID NO: 1177 - DNA, 24 bp, Artificial Sequence
  Synthetic polynucleotide encoding artificial human antibody CDR-H1 region
ggattcaccgtcagtagtaactac

SEQ ID NO: 1178 - DNA, 24 bp, Artificial Sequence
  Synthetic polynucleotide encoding artificial human antibody CDR-H1 region
ggagtcagcgtcagtgctaactac

SEQ ID NO: 1179 - DNA, 24 bp, Artificial Sequence
  Synthetic polynucleotide encoding artificial human antibody CDR-H1 region
gggtacagatttcacacctattgt

SEQ ID NO: 1180 - DNA, 24 bp, Artificial Sequence
  Synthetic polynucleotide encoding artificial human antibody CDR-H1 region
ggattcagctttagcatctacggc

SEQ ID NO: 1181 - DNA, 24 bp, Artificial Sequence
  Synthetic polynucleotide encoding artificial human antibody CDR-H1 region
aaattcacgtttagcgactatgcc

SEQ ID NO: 1182 - DNA, 24 bp, Artificial Sequence
  Synthetic polynucleotide encoding artificial human antibody CDR-H1 region
ggattcaccttcagtagctatagc

SEQ ID NO: 1183 - DNA, 30 bp, Artificial Sequence; identical to SEQ ID NO: 299
  Synthetic polynucleotide encoding artificial human antibody CDR-H1 region

SEQ ID NO: 1184 - DNA, 24 bp, Artificial Sequence
  Synthetic polynucleotide encoding artificial human antibody CDR-H1 region
ggattcacttttagtgcccatgcc

SEQ ID NO: 1185 - DNA, 24 bp, Artificial Sequence
  Synthetic polynucleotide encoding artificial human antibody CDR-H1 region
ggattcacctttagtaatttttac

SEQ ID NO: 1186 - DNA, 24 bp, Artificial Sequence
  Synthetic polynucleotide encoding artificial human antibody CDR-H1 region
ggaatcaccgtcagtctgaactac

SEQ ID NO: 1187 - DNA, 24 bp, Artificial Sequence
  Synthetic polynucleotide encoding artificial human antibody CDR-H1 region
ggattcacctttagcaactatgcc

SEQ ID NO: 1188 - DNA, 24 bp, Artificial Sequence
  Synthetic polynucleotide encoding artificial human antibody CDR-H1 region
ggattcaccttcaatgattacgct

SEQ ID NO: 1189 - DNA, 30 bp, Artificial Sequence
  Synthetic polynucleotide encoding artificial human antibody CDR-H1 region
ggtggctccatcaccagtgatggttactac

SEQ ID NO: 1190 - DNA, 24 bp, Artificial Sequence
  Synthetic polynucleotide encoding artificial human antibody CDR-H1 region
ggatacaccttcagcgactactac

SEQ ID NO: 1191 - DNA, 27 bp, Artificial Sequence
  Synthetic polynucleotide encoding artificial human antibody CDR-H1 region
aatggctctgttagcaataataattgg

SEQ ID NO: 1192 - DNA, 24 bp, Artificial Sequence
  Synthetic polynucleotide encoding artificial human antibody CDR-H1 region
ggattcaccttcagtagctacgac

SEQ ID NO: 1193 - DNA, 24 bp, Artificial Sequence
  Synthetic polynucleotide encoding artificial human antibody CDR-H1 region
ggattcaccttcagtagctactgg

SEQ ID NO: 1194 - DNA, 24 bp, Artificial Sequence
  Synthetic polynucleotide encoding artificial human antibody CDR-H1 region
gggttcaccgtcagttcctactac

SEQ ID NO: 1195 - DNA, 30 bp, Artificial Sequence; identical to SEQ ID NO: 299
  Synthetic polynucleotide encoding artificial human antibody CDR-H1 region

SEQ ID NO: 1196 - DNA, 24 bp, Artificial Sequence
  Synthetic polynucleotide encoding artificial human antibody CDR-H1 region
ggttacacctttaccagctatggt

SEQ ID NO: 1197 - DNA, 24 bp, Artificial Sequence
  Synthetic polynucleotide encoding artificial human antibody CDR-H1 region
ggtggctccatcagtcattactac

SEQ ID NO: 1198 - DNA, 30 bp, Artificial Sequence; identical to SEQ ID NO: 45
  Synthetic polynucleotide encoding artificial human antibody CDR-H1 region

SEQ ID NO: 1199 - DNA, 24 bp, Artificial Sequence
  Synthetic polynucleotide encoding artificial human antibody CDR-H1 region
ggatacatcttcaatcgttatgct

SEQ ID NO: 1200 - DNA, 24 bp, Artificial Sequence
  Synthetic polynucleotide encoding artificial human antibody CDR-H1 region
ggattcagttttagcagctatgcc

SEQ ID NO: 1201 - DNA, 24 bp, Artificial Sequence
  Synthetic polynucleotide encoding artificial human antibody CDR-H1 region
ggattcagcttcaatatttatgct

SEQ ID NO: 1202 - DNA, 24 bp, Artificial Sequence
  Synthetic polynucleotide encoding artificial human antibody CDR-H1 region
ggattcaccttcagtcgctatggt

SEQ ID NO: 1203 - DNA, 24 bp, Artificial Sequence
  Synthetic polynucleotide encoding artificial human antibody CDR-H1 region
ggattcaccttcgtcgactactac

SEQ ID NO: 1204 - DNA, 24 bp, Artificial Sequence
  Synthetic polynucleotide encoding artificial human antibody CDR-H1 region
ggattcaccttcagtagctactgg

SEQ ID NO: 1205 - DNA, 24 bp, Artificial Sequence
  Synthetic polynucleotide encoding artificial human antibody CDR-H1 region
ggatacacgttcactagatatgct

SEQ ID NO: 1206 - DNA, 24 bp, Artificial Sequence
  Synthetic polynucleotide encoding artificial human antibody CDR-H1 region
ggactcaccctcaatgatttatcc

SEQ ID NO: 1207 - DNA, 24 bp, Artificial Sequence
  Synthetic polynucleotide encoding artificial human antibody CDR-H1 region
ggatacaccttcaccagttatgat

SEQ ID NO: 1208 - DNA, 24 bp, Artificial Sequence
  Synthetic polynucleotide encoding artificial human antibody CDR-H1 region
ggattcaccttcagtagctatgct

SEQ ID NO: 1209 - DNA, 24 bp, Artificial Sequence
  Synthetic polynucleotide encoding artificial human antibody CDR-H1 region
ggattcactttcagttacgcctgg

SEQ ID NO: 1210 - DNA, 24 bp, Artificial Sequence
  Synthetic polynucleotide encoding artificial human antibody CDR-H1 region
ggatttacctttagcaactttggc

SEQ ID NO: 1211 - DNA, 30 bp, Artificial Sequence
  Synthetic polynucleotide encoding artificial human antibody CDR-H1 region
ggcgactccatcatcagtgacgatgactac

SEQ ID NO: 1212 - DNA, 24 bp, Artificial Sequence
  Synthetic polynucleotide encoding artificial human antibody CDR-H1 region
ggatacaccttcaacagttactat

SEQ ID NO: 1213 - DNA, 24 bp, Artificial Sequence
  Synthetic polynucleotide encoding artificial human antibody CDR-H1 region
ggattcatattcagtgatgtctgg

SEQ ID NO: 1214 - DNA, 30 bp, Artificial Sequence
  Synthetic polynucleotide encoding artificial human antibody CDR-H1 region
ggtgtctccatcaccagtggaagttactcc

SEQ ID NO: 1215 - DNA, 24 bp, Artificial Sequence
  Synthetic polynucleotide encoding artificial human antibody CDR-H1 region
ggattcatgtccagtagttatgct

SEQ ID NO: 1216 - DNA, 24 bp, Artificial Sequence
  Synthetic polynucleotide encoding artificial human antibody CDR-H1 region
ggattcaccttcagtagctatggc

SEQ ID NO: 1217 - DNA, 24 bp, Artificial Sequence
  Synthetic polynucleotide encoding artificial human antibody CDR-H1 region
ggattcagtttcgttgattctgct

SEQ ID NO: 1218 - DNA, 24 bp, Artificial Sequence
  Synthetic polynucleotide encoding artificial human antibody CDR-H1 region
ggattaaccgtcagttctaactac

SEQ ID NO: 1219 - DNA, 24 bp, Artificial Sequence
  Synthetic polynucleotide encoding artificial human antibody CDR-H1 region
ggatacaccttcactagccatgct

SEQ ID NO: 1220 - DNA, 30 bp, Artificial Sequence
  Synthetic polynucleotide encoding artificial human antibody CDR-H1 region
gggttctcactcacctctagtggagtgtgt

SEQ ID NO: 1221 - DNA, 24 bp, Artificial Sequence
  Synthetic polynucleotide encoding artificial human antibody CDR-H1 region
ggattcagcttcagtagctatgcc

SEQ ID NO: 1222 - DNA, 24 bp, Artificial Sequence
  Synthetic polynucleotide encoding artificial human antibody CDR-H1 region
gaatataacttcaacacctactat

SEQ ID NO: 1223 - DNA, 30 bp, Artificial Sequence
  Synthetic polynucleotide encoding artificial human antibody CDR-H1 region
ggtggctccgtcagcagtagtgattactac

SEQ ID NO: 1224 - DNA, 24 bp, Artificial Sequence
  Synthetic polynucleotide encoding artificial human antibody CDR-H1 region
ggattcacctttagcagctatgcc

SEQ ID NO: 1225 - DNA, 24 bp, Artificial Sequence
  Synthetic polynucleotide encoding artificial human antibody CDR-H1 region
ggattcaccttcagtagctatgct

SEQ ID NO: 1226 - DNA, 24 bp, Artificial Sequence
  Synthetic polynucleotide encoding artificial human antibody CDR-H1 region
ggtggctccatcagtagttactac

SEQ ID NO: 1227 - DNA, 24 bp, Artificial Sequence
  Synthetic polynucleotide encoding artificial human antibody CDR-H1 region
ggattcaccttcaggacccatgct

SEQ ID NO: 1228 - DNA, 24 bp, Artificial Sequence
  Synthetic polynucleotide encoding artificial human antibody CDR-H1 region
ggatacacattcaccaattactat

SEQ ID NO: 1229 - DNA, 24 bp, Artificial Sequence
  Synthetic polynucleotide encoding artificial human antibody CDR-H1 region
acattcaagtttcgtgtttatggg

SEQ ID NO: 1230 - DNA, 24 bp, Artificial Sequence
  Synthetic polynucleotide encoding artificial human antibody CDR-H1 region
ggattcacctttagcagctatgcc

SEQ ID NO: 1231 - DNA, 24 bp, Artificial Sequence
  Synthetic polynucleotide encoding artificial human antibody CDR-H1 region
ggattcacctttcatgattatgcc

SEQ ID NO: 1232 - DNA, 30 bp, Artificial Sequence
  Synthetic polynucleotide encoding artificial human antibody CDR-H1 region
ggtggctccatcagcaataatagtttccac

SEQ ID NO: 1233 - DNA, 24 bp, Artificial Sequence
  Synthetic polynucleotide encoding artificial human antibody CDR-H1 region
ggcttcaacttcgctacccatggc

SEQ ID NO: 1234 - DNA, 24 bp, Artificial Sequence
  Synthetic polynucleotide encoding artificial human antibody CDR-H1 region
ggattcaccttcagtgactactac

SEQ ID NO: 1235 - DNA, 24 bp, Artificial Sequence
  Synthetic polynucleotide encoding artificial human antibody CDR-H1 region
ggattcagtctcagtacctactgg

SEQ ID NO: 1236 - DNA, 24 bp, Artificial Sequence
  Synthetic polynucleotide encoding artificial human antibody CDR-H1 region
ggattcacctttagagactatgcc

SEQ ID NO: 1237 - DNA, 30 bp, Artificial Sequence; identical to SEQ ID NO: 84
  Synthetic polynucleotide encoding artificial human antibody CDR-H1 region

SEQ ID NO: 1238 - DNA, 24 bp, Artificial Sequence
  Synthetic polynucleotide encoding artificial human antibody CDR-H1 region
ggattcaccttcagtagctatacc

SEQ ID NO: 1239 - DNA, 24 bp, Artificial Sequence
  Synthetic polynucleotide encoding artificial human antibody CDR-H1 region
ggatacaccttcaccggctactat

SEQ ID NO: 1240 - DNA, 24 bp, Artificial Sequence
  Synthetic polynucleotide encoding artificial human antibody CDR-H1 region
ggattcacctttagcagctatgcc

SEQ ID NO: 1241 - DNA, 24 bp, Artificial Sequence
  Synthetic polynucleotide encoding artificial human antibody CDR-H1 region
gggggctccatcggtaactcttac

SEQ ID NO: 1242 - DNA, 27 bp, Artificial Sequence
  Synthetic polynucleotide encoding artificial human antibody CDR-H1 region
aatggctccattagcagtagtaactgg

SEQ ID NO: 1243 - DNA, 24 bp, Artificial Sequence
  Synthetic polynucleotide encoding artificial human antibody CDR-H1 region
ggtgactccatcagtagattctac

SEQ ID NO: 1244 - DNA, 24 bp, Artificial Sequence
  Synthetic polynucleotide encoding artificial human antibody CDR-H1 region
tatttcgccttcgagacctattac

SEQ ID NO: 1245 - DNA, 24 bp, Artificial Sequence
  Synthetic polynucleotide encoding artificial human antibody CDR-H1 region
ggatacactttcaccaactacttt

SEQ ID NO: 1246 - DNA, 24 bp, Artificial Sequence
  Synthetic polynucleotide encoding artificial human antibody CDR-H1 region
ggaggcaccttcagcagctatgct

SEQ ID NO: 1247 - DNA, 24 bp, Artificial Sequence
  Synthetic polynucleotide encoding artificial human antibody CDR-H1 region
ggattcaccttcagtgagtattgg

SEQ ID NO: 1248 - DNA, 24 bp, Artificial Sequence
  Synthetic polynucleotide encoding artificial human antibody CDR-H1 region
ggattcaccttcagtgactactac

SEQ ID NO: 1249 - DNA, 24 bp, Artificial Sequence
  Synthetic polynucleotide encoding artificial human antibody CDR-H1 region
ggattcaccttcagtagctatgct

SEQ ID NO: 1250 - DNA, 24 bp, Artificial Sequence
  Synthetic polynucleotide encoding artificial human antibody CDR-H1 region
ggattcacctttggtgattatgct

SEQ ID NO: 1251 - DNA, 24 bp, Artificial Sequence
  Synthetic polynucleotide encoding artificial human antibody CDR-L1 region
agctccaacatcggaagtaatact

SEQ ID NO: 1252 - DNA, 18 bp, Artificial Sequence
  Synthetic polynucleotide encoding artificial human antibody CDR-L1 region
cagagtgttcggagccac

SEQ ID NO: 1253 - DNA, 18 bp, Artificial Sequence
  Synthetic polynucleotide encoding artificial human antibody CDR-L1 region
cagactattattgactgg

SEQ ID NO: 1254 - DNA, 18 bp, Artificial Sequence
  Synthetic polynucleotide encoding artificial human antibody CDR-L1 region
cagactattattgactgg

SEQ ID NO: 1255 - DNA, 18 bp, Artificial Sequence
  Synthetic polynucleotide encoding artificial human antibody CDR-L1 region
cagactattattgactgg

SEQ ID NO: 1256 - DNA, 18 bp, Artificial Sequence
  Synthetic polynucleotide encoding artificial human antibody CDR-L1 region
cagactattattgactgg

SEQ ID NO: 1257 - DNA, 18 bp, Artificial Sequence
  Synthetic polynucleotide encoding artificial human antibody CDR-L1 region
cagactattattgactgg

SEQ ID NO: 1258 - DNA, 24 bp, Artificial Sequence
  Synthetic polynucleotide encoding artificial human antibody CDR-L1 region
agctccaacatcggaagtaatact

SEQ ID NO: 1259 - DNA, 18 bp, Artificial Sequence
  Synthetic polynucleotide encoding artificial human antibody CDR-L1 region
cagagtgtcagcagccac

SEQ ID NO: 1260 - DNA, 21 bp, Artificial Sequence
  Synthetic polynucleotide encoding artificial human antibody CDR-L1 region
cagagtcttagcagcagctac

SEQ ID NO: 1261 - DNA, 27 bp, Artificial Sequence
  Synthetic polynucleotide encoding artificial human antibody CDR-L1 region
agcagtgacattggtggttatgactat

SEQ ID NO: 1262 - DNA, 27 bp, Artificial Sequence
  Synthetic polynucleotide encoding artificial human antibody CDR-L1 region
agcagtgacgttggtggttataattat

SEQ ID NO: 1263 - DNA, 33 bp, Artificial Sequence
  Synthetic polynucleotide encoding artificial human antibody CDR-L1 region
cagagcctcctgcatagtaatggatacaactat

SEQ ID NO: 1264 - DNA, 33 bp, Artificial Sequence
  Synthetic polynucleotide encoding artificial human antibody CDR-L1 region
caaagcctcgtacacagtgatggaaacacctac

SEQ ID NO: 1265 - DNA, 18 bp, Artificial Sequence
  Synthetic polynucleotide encoding artificial human antibody CDR-L1 region
cagagcattagcagctat

SEQ ID NO: 1266 - DNA, 18 bp, Artificial Sequence
  Synthetic polynucleotide encoding artificial human antibody CDR-L1 region
cagagtgttagcagctac

SEQ ID NO: 1267 - DNA, 27 bp, Artificial Sequence
  Synthetic polynucleotide encoding artificial human antibody CDR-L1 region
agcagtgacgttggtggttataactat

SEQ ID NO: 1268 - DNA, 21 bp, Artificial Sequence
  Synthetic polynucleotide encoding artificial human antibody CDR-L1 region
agtgggcacagtaactacatc

SEQ ID NO: 1269 - DNA, 27 bp, Artificial Sequence
  Synthetic polynucleotide encoding artificial human antibody CDR-L1 region
ggcagtgatgttgggagttatagcctt

SEQ ID NO: 1270 - DNA, 18 bp, Artificial Sequence
  Synthetic polynucleotide encoding artificial human antibody CDR-L1 region
aatattggaagtaaaagt

SEQ ID NO: 1271 - DNA, 27 bp, Artificial Sequence
  Synthetic polynucleotide encoding artificial human antibody CDR-L1 region
agcagagacattggtggttatatgtct

SEQ ID NO: 1272 - DNA, 27 bp, Artificial Sequence
  Synthetic polynucleotide encoding artificial human antibody CDR-L1 region
agcagtgacattggtagttctaacttt

SEQ ID NO: 1273 - DNA, 21 bp, Artificial Sequence
  Synthetic polynucleotide encoding artificial human antibody CDR-L1 region
cagagtgttagcagcagctac

SEQ ID NO: 1274 - DNA, 27 bp, Artificial Sequence
  Synthetic polynucleotide encoding artificial human antibody CDR-L1 region
agcagtgacgttggtggttataactat

SEQ ID NO: 1275 - DNA, 27 bp, Artificial Sequence
  Synthetic polynucleotide encoding artificial human antibody CDR-L1 region
agcagtgatgttgggagttataacctt

SEQ ID NO: 1276 - DNA, 21 bp, Artificial Sequence
  Synthetic polynucleotide encoding artificial human antibody CDR-L1 region
cagagtgttagcagcagctac

SEQ ID NO: 1277 - DNA, 18 bp, Artificial Sequence
  Synthetic polynucleotide encoding artificial human antibody CDR-L1 region
cagagcattgacttttac

SEQ ID NO: 1278 - DNA, 21 bp, Artificial Sequence
  Synthetic polynucleotide encoding artificial human antibody CDR-L1 region
agcggctacagtaattataaa

SEQ ID NO: 1279 - DNA, 18 bp, Artificial Sequence
  Synthetic polynucleotide encoding artificial human antibody CDR-L1 region
cagggtattagcagttat

SEQ ID NO: 1280 - DNA, 21 bp, Artificial Sequence
  Synthetic polynucleotide encoding artificial human antibody CDR-L1 region
agtaggcacggcaactacgcc

SEQ ID NO: 1281 - DNA, 21 bp, Artificial Sequence
  Synthetic polynucleotide encoding artificial human antibody CDR-L1 region
cagagtgttagcagcagctac

SEQ ID NO: 1282 - DNA, 18 bp, Artificial Sequence
  Synthetic polynucleotide encoding artificial human antibody CDR-L1 region
cagggcattagaaatgat

SEQ ID NO: 1283 - DNA, 18 bp, Artificial Sequence
  Synthetic polynucleotide encoding artificial human antibody CDR-L1 region
cagagtgttagcagctac

SEQ ID NO: 1284 - DNA, 18 bp, Artificial Sequence
  Synthetic polynucleotide encoding artificial human antibody CDR-L1 region
gcattgccaaagcaatat

SEQ ID NO: 1285 - DNA, 18 bp, Artificial Sequence
  Synthetic polynucleotide encoding artificial human antibody CDR-L1 region
cagggcattagcgatttt

SEQ ID NO: 1286 - DNA, 18 bp, Artificial Sequence
  Synthetic polynucleotide encoding artificial human antibody CDR-L1 region
cagggcattagcactgct

SEQ ID NO: 1287 - DNA, 18 bp, Artificial Sequence
  Synthetic polynucleotide encoding artificial human antibody CDR-L1 region
cagagtgttagcagcaac

SEQ ID NO: 1288 - DNA, 18 bp, Artificial Sequence
  Synthetic polynucleotide encoding artificial human antibody CDR-L1 region
cagggcattagaaatgat

SEQ ID NO: 1289 - DNA, 18 bp, Artificial Sequence
  Synthetic polynucleotide encoding artificial human antibody CDR-L1 region
aacattggaagtaaaagt

SEQ ID NO: 1290 - DNA, 36 bp, Artificial Sequence
  Synthetic polynucleotide encoding artificial human antibody CDR-L1 region
cagagtgttttatacagctccaacaataagaactac

SEQ ID NO: 1291 - DNA, 27 bp, Artificial Sequence
  Synthetic polynucleotide encoding artificial human antibody CDR-L1 region
agcagtgacgttggtggttataactat

SEQ ID NO: 1292 - DNA, 27 bp, Artificial Sequence
  Synthetic polynucleotide encoding artificial human antibody CDR-L1 region
cgcagtgacattggtgcatataattat

SEQ ID NO: 1293 - DNA, 27 bp, Artificial Sequence
  Synthetic polynucleotide encoding artificial human antibody CDR-L1 region
agcagtgatgttgggagttataacctt

SEQ ID NO: 1294 - DNA, 18 bp, Artificial Sequence
  Synthetic polynucleotide encoding artificial human antibody CDR-L1 region
cagagtgttagcagcaac

SEQ ID NO: 1295 - DNA, 18 bp, Artificial Sequence
  Synthetic polynucleotide encoding artificial human antibody CDR-L1 region
agcctcagaagctattat

SEQ ID NO: 1296 - DNA, 33 bp, Artificial Sequence
  Synthetic polynucleotide encoding artificial human antibody CDR-L1 region
cagagcctcctgcatagtgatggaaagacctat

SEQ ID NO: 1297 - DNA, 21 bp, Artificial Sequence
  Synthetic polynucleotide encoding artificial human antibody CDR-L1 region
cagagtgttagtagcagctac

SEQ ID NO: 1298 - DNA, 18 bp, Artificial Sequence
  Synthetic polynucleotide encoding artificial human antibody CDR-L1 region
caaagtcttaggaacacc

SEQ ID NO: 1299 - DNA, 27 bp, Artificial Sequence
  Synthetic polynucleotide encoding artificial human antibody CDR-L1 region
acctccaacatcggggcagattatgat

SEQ ID NO: 1300 - DNA, 36 bp, Artificial Sequence
  Synthetic polynucleotide encoding artificial human antibody CDR-L1 region
cagagtctctcatacagctccaagtataagaactac

SEQ ID NO: 1301 - DNA, 27 bp, Artificial Sequence
  Synthetic polynucleotide encoding artificial human antibody CDR-L1 region
agcagtgacattggtggttatgaccgt

SEQ ID NO: 1302 - DNA, 24 bp, Artificial Sequence
  Synthetic polynucleotide encoding artificial human antibody CDR-L1 region
agctccaacatcggaagtaattat

SEQ ID NO: 1303 - DNA, 24 bp, Artificial Sequence
  Synthetic polynucleotide encoding artificial human antibody CDR-L1 region
aggtccaacatcggaagtaatgct

SEQ ID NO: 1304 - DNA, 24 bp, Artificial Sequence
  Synthetic polynucleotide encoding artificial human antibody CDR-L1 region
agctccaacattgggaataattat

SEQ ID NO: 1305 - DNA, 18 bp, Artificial Sequence
  Synthetic polynucleotide encoding artificial human antibody CDR-L1 region
agcctcagaagctattat

SEQ ID NO: 1306 - DNA, 21 bp, Artificial Sequence
  Synthetic polynucleotide encoding artificial human antibody CDR-L1 region
cagagtattaacaggaacttc

SEQ ID NO: 1307 - DNA, 18 bp, Artificial Sequence
  Synthetic polynucleotide encoding artificial human antibody CDR-L1 region
cagagcattagcagctat

SEQ ID NO: 1308 - DNA, 18 bp, Artificial Sequence
  Synthetic polynucleotide encoding artificial human antibody CDR-L1 region
gcattgccaaagcaatat

SEQ ID NO: 1309 - DNA, 33 bp, Artificial Sequence; identical to SEQ ID NO: 1296
  Synthetic polynucleotide encoding artificial human antibody CDR-L1 region

SEQ ID NO: 1310 - DNA, 18 bp, Artificial Sequence
  Synthetic polynucleotide encoding artificial human antibody CDR-L1 region
cagggcattaccaatcat

SEQ ID NO: 1311 - DNA, 18 bp, Artificial Sequence
  Synthetic polynucleotide encoding artificial human antibody CDR-L1 region
aaattgggggataaatat

SEQ ID NO: 1312 - DNA, 18 bp, Artificial Sequence
  Synthetic polynucleotide encoding artificial human antibody CDR-L1 region
gcattgccaaaaaaatat

SEQ ID NO: 1313 - DNA, 33 bp, Artificial Sequence; identical to SEQ ID NO: 1263
  Synthetic polynucleotide encoding artificial human antibody CDR-L1 region

SEQ ID NO: 1314 - DNA, 36 bp, Artificial Sequence
  Synthetic polynucleotide encoding artificial human antibody CDR-L1 region
cagagcctcttggatagtgatgatggaaacacctat

SEQ ID NO: 1315 - DNA, 33 bp, Artificial Sequence; identical to SEQ ID NO: 1263
  Synthetic polynucleotide encoding artificial human antibody CDR-L1 region

SEQ ID NO: 1316 - DNA, 27 bp, Artificial Sequence
  Synthetic polynucleotide encoding artificial human antibody CDR-L1 region
agcagtgacattggtgcttataactat

SEQ ID NO: 1317 - DNA, 21 bp, Artificial Sequence
  Synthetic polynucleotide encoding artificial human antibody CDR-L1 region
cagagtgttagcagcagctac

SEQ ID NO: 1318 - DNA, 24 bp, Artificial Sequence
  Synthetic polynucleotide encoding artificial human antibody CDR-L1 region
agcaacaatgttggcaaccaagga

SEQ ID NO: 1319 - DNA, 36 bp, Artificial Sequence
  Synthetic polynucleotide encoding artificial human antibody CDR-L1 region
cagagtgtcttatacacccccaacaataagaactac

SEQ ID NO: 1320 - DNA, 18 bp, Artificial Sequence
  Synthetic polynucleotide encoding artificial human antibody CDR-L1 region
cagagtgttagcagcaac

SEQ ID NO: 1321 - DNA, 24 bp, Artificial Sequence
  Synthetic polynucleotide encoding artificial human antibody CDR-L1 region
agctccaacatcggaggtaatact

SEQ ID NO: 1322 - DNA, 18 bp, Artificial Sequence
  Synthetic polynucleotide encoding artificial human antibody CDR-L1 region
cagactattaataacaac

SEQ ID NO: 1323 - DNA, 27 bp, Artificial Sequence
  Synthetic polynucleotide encoding artificial human antibody CDR-L1 region
agcagtgatgttgggagttataacctt

SEQ ID NO: 1324 - DNA, 24 bp, Artificial Sequence
  Synthetic polynucleotide encoding artificial human antibody CDR-L1 region
agctccaacatcggaagtaattat

SEQ ID NO: 1325 - DNA, 18 bp, Artificial Sequence
  Synthetic polynucleotide encoding artificial human antibody CDR-L1 region
caaggcattggcaacaag

SEQ ID NO: 1326 - DNA, 27 bp, Artificial Sequence
  Synthetic polynucleotide encoding artificial human antibody CDR-L1 region
actggagctgtcaccagtggtcattat

SEQ ID NO: 1327 - DNA, 18 bp, Artificial Sequence
  Synthetic polynucleotide encoding artificial human antibody CDR-L1 region
cagggcattagcactgct

SEQ ID NO: 1328 - DNA, 33 bp, Artificial Sequence; identical to SEQ ID NO: 1263
  Synthetic polynucleotide encoding artificial human antibody CDR-L1 region

SEQ ID NO: 1329 - DNA, 21 bp, Artificial Sequence
  Synthetic polynucleotide encoding artificial human antibody CDR-L1 region
agtgggcacagcagctacgcc

SEQ ID NO: 1330 - DNA, 18 bp, Artificial Sequence
  Synthetic polynucleotide encoding artificial human antibody CDR-L1 region
cagggcattagaaatgat

SEQ ID NO: 1331 - DNA, 33 bp, Artificial Sequence; identical to SEQ ID NO: 1263
  Synthetic polynucleotide encoding artificial human antibody CDR-L1 region

SEQ ID NO: 1332 - DNA, 18 bp, Artificial Sequence
  Synthetic polynucleotide encoding artificial human antibody CDR-L1 region
cagagcattagcagctat

SEQ ID NO: 1333 - DNA, 18 bp, Artificial Sequence
  Synthetic polynucleotide encoding artificial human antibody CDR-L1 region
cagagtattagtagctgg

SEQ ID NO: 1334 - DNA, 18 bp, Artificial Sequence
  Synthetic polynucleotide encoding artificial human antibody CDR-L1 region
cagagcattagcagctat

SEQ ID NO: 1335 - DNA, 33 bp, Artificial Sequence; identical to SEQ ID NO: 1263
  Synthetic polynucleotide encoding artificial human antibody CDR-L1 region

SEQ ID NO: 1336 - DNA, 18 bp, Artificial Sequence
  Synthetic polynucleotide encoding artificial human antibody CDR-L1 region
cagagtgttagcagctac

SEQ ID NO: 1337 - DNA, 27 bp, Artificial Sequence
  Synthetic polynucleotide encoding artificial human antibody CDR-L1 region
cgcagtgacattggtagttataattat

SEQ ID NO: 1338 - DNA, 18 bp, Artificial Sequence
  Synthetic polynucleotide encoding artificial human antibody CDR-L1 region
gcattgccaaagcaatat

SEQ ID NO: 1339 - DNA, 33 bp, Artificial Sequence
  Synthetic polynucleotide encoding artificial human antibody CDR-L1 region
caaagcctcgtatacagtgatggaaacacctac

SEQ ID NO: 1340 - DNA, 18 bp, Artificial Sequence
  Synthetic polynucleotide encoding artificial human antibody CDR-L1 region
aacattggaagtaaaagt

SEQ ID NO: 1341 - DNA, 18 bp, Artificial Sequence
  Synthetic polynucleotide encoding artificial human antibody CDR-L1 region
caagatgttggcgcctac

SEQ ID NO: 1342 - DNA, 27 bp, Artificial Sequence
  Synthetic polynucleotide encoding artificial human antibody CDR-L1 region
agcggtaatgttgggcgttataacctt

SEQ ID NO: 1343 - DNA, 33 bp, Artificial Sequence
  Synthetic polynucleotide encoding artificial human antibody CDR-L1 region
cagagcctcgtacacagagatggaaacacccac

SEQ ID NO: 1344 - DNA, 18 bp, Artificial Sequence
  Synthetic polynucleotide encoding artificial human antibody CDR-L1 region
cagagcattagcagctat

SEQ ID NO: 1345 - DNA, 18 bp, Artificial Sequence
  Synthetic polynucleotide encoding artificial human antibody CDR-L1 region
cagggtattagcagctgg

SEQ ID NO: 1346 - DNA, 36 bp, Artificial Sequence
  Synthetic polynucleotide encoding artificial human antibody CDR-L1 region
cagagtgttttatacacctccaataataaggactac

SEQ ID NO: 1347 - DNA, 18 bp, Artificial Sequence
  Synthetic polynucleotide encoding artificial human antibody CDR-L1 region
caggacattagcaactat

SEQ ID NO: 1348 - DNA, 21 bp, Artificial Sequence
  Synthetic polynucleotide encoding artificial human antibody CDR-L1 region
cagagtgttagcagcagctac

SEQ ID NO: 1349 - DNA, 21 bp, Artificial Sequence
  Synthetic polynucleotide encoding artificial human antibody CDR-L1 region
cagagtgttagcagcagctac

SEQ ID NO: 1350 - DNA, 33 bp, Artificial Sequence
  Synthetic polynucleotide encoding artificial human antibody CDR-L1 region
cagagcctcctacatagtaatggatacaactat

SEQ ID NO: 1351 - DNA, 24 bp, Artificial Sequence
  Synthetic polynucleotide encoding artificial human antibody CDR-L1 region
agctccaacatcggaagtaattat

SEQ ID NO: 1352 - DNA, 27 bp, Artificial Sequence
  Synthetic polynucleotide encoding artificial human antibody CDR-L1 region
agcagtgatgttggtggttataactat

SEQ ID NO: 1353 - DNA, 18 bp, Artificial Sequence
  Synthetic polynucleotide encoding artificial human antibody CDR-L1 region
caggccattcgagatgaa

SEQ ID NO: 1354 - DNA, 18 bp, Artificial Sequence
  Synthetic polynucleotide encoding artificial human antibody CDR-L1 region
cagagcattagtatgtat

SEQ ID NO: 1355 - DNA, 18 bp, Artificial Sequence
  Synthetic polynucleotide encoding artificial human antibody CDR-L1 region
cagagtattagtggcttt

SEQ ID NO: 1356 - DNA, 27 bp, Artificial Sequence
  Synthetic polynucleotide encoding artificial human antibody CDR-L1 region
agcagtgacgttggtggttataactat

SEQ ID NO: 1357 - DNA, 18 bp, Artificial Sequence
  Synthetic polynucleotide encoding artificial human antibody CDR-L1 region
cagagtgttagcagctac

SEQ ID NO: 1358 - DNA, 18 bp, Artificial Sequence
  Synthetic polynucleotide encoding artificial human antibody CDR-L1 region
cagggcattagaaatgat

SEQ ID NO: 1359 - DNA, 18 bp, Artificial Sequence
  Synthetic polynucleotide encoding artificial human antibody CDR-L1 region
cagagtgttggcagcttc

SEQ ID NO: 1360 - DNA, 33 bp, Artificial Sequence; identical to SEQ ID NO: 1339
  Synthetic polynucleotide encoding artificial human antibody CDR-L1 region

SEQ ID NO: 1361 - DNA, 18 bp, Artificial Sequence
  Synthetic polynucleotide encoding artificial human antibody CDR-L1 region
agcctcagaagctattat

SEQ ID NO: 1362 - DNA, 27 bp, Artificial Sequence
  Synthetic polynucleotide encoding artificial human antibody CDR-L1 region
agcagtgatgttggtggttataactat

SEQ ID NO: 1363 - DNA, 33 bp, Artificial Sequence; identical to SEQ ID NO: 1339
  Synthetic polynucleotide encoding artificial human antibody CDR-L1 region

SEQ ID NO: 1364 - DNA, 27 bp, Artificial Sequence
  Synthetic polynucleotide encoding artificial human antibody CDR-L1 region
agcagtgatgttggtgcttatatctat

SEQ ID NO: 1365 - DNA, 27 bp, Artificial Sequence
  Synthetic polynucleotide encoding artificial human antibody CDR-L1 region
agctccaatatcggggcacgttatgat

SEQ ID NO: 1366 - DNA, 18 bp, Artificial Sequence
  Synthetic polynucleotide encoding artificial human antibody CDR-L1 region
cagggtattaacaactgg

SEQ ID NO: 1367 - DNA, 24 bp, Artificial Sequence
  Synthetic polynucleotide encoding artificial human antibody CDR-L1 region
agctccaacattggaaagaattat

SEQ ID NO: 1368 - DNA, 27 bp, Artificial Sequence
  Synthetic polynucleotide encoding artificial human antibody CDR-L1 region
agcagtgacgttggtggttataactat

SEQ ID NO: 1369 - DNA, 18 bp, Artificial Sequence
  Synthetic polynucleotide encoding artificial human antibody CDR-L1 region
cagagtattagtagctgg

SEQ ID NO: 1370 - DNA, 18 bp, Artificial Sequence
  Synthetic polynucleotide encoding artificial human antibody CDR-L1 region
cacagtattagcggctac

SEQ ID NO: 1371 - DNA, 27 bp, Artificial Sequence
  Synthetic polynucleotide encoding artificial human antibody CDR-L1 region
agcagtgacgttggtggttataactat

SEQ ID NO: 1372 - DNA, 18 bp, Artificial Sequence
  Synthetic polynucleotide encoding artificial human antibody CDR-L1 region
cagaatattaataactgg

SEQ ID NO: 1373 - DNA, 27 bp, Artificial Sequence
  Synthetic polynucleotide encoding artificial human antibody CDR-L1 region
agcagtgacgttggtggttataactat

SEQ ID NO: 1374 - DNA, 24 bp, Artificial Sequence
  Synthetic polynucleotide encoding artificial human antibody CDR-L1 region
gcctccaacatcggaagtaatctt

SEQ ID NO: 1375 - DNA, 27 bp, Artificial Sequence
  Synthetic polynucleotide encoding artificial human antibody CDR-L1 region
agctccaacatcggggcaggttatgat

SEQ ID NO: 1376 - DNA, 36 bp, Artificial Sequence; identical to SEQ ID NO: 1290
  Synthetic polynucleotide encoding artificial human antibody CDR-L1 region

SEQ ID NO: 1377 - DNA, 24 bp, Artificial Sequence
  Synthetic polynucleotide encoding artificial human antibody CDR-L1 region
agctccaacatcggaagtaatact

SEQ ID NO: 1378 - DNA, 18 bp, Artificial Sequence
  Synthetic polynucleotide encoding artificial human antibody CDR-L1 region
cggagtgttaacagaaac

SEQ ID NO: 1379 - DNA, 18 bp, Artificial Sequence
  Synthetic polynucleotide encoding artificial human antibody CDR-L1 region
agcctcagaagctattat

SEQ ID NO: 1380 - DNA, 18 bp, Artificial Sequence
  Synthetic polynucleotide encoding artificial human antibody CDR-L1 region
cagggcattagcacttct

SEQ ID NO: 1381 - DNA, 18 bp, Artificial Sequence
  Synthetic polynucleotide encoding artificial human antibody CDR-L1 region
gcattgccaaagcaatat

SEQ ID NO: 1382 - DNA, 18 bp, Artificial Sequence
  Synthetic polynucleotide encoding artificial human antibody CDR-L1 region
aaattgggggataaatat

SEQ ID NO: 1383 - DNA, 24 bp, Artificial Sequence
  Synthetic polynucleotide encoding artificial human antibody CDR-L1 region
agctccaacattgggaataattat

SEQ ID NO: 1384 - DNA, 18 bp, Artificial Sequence
  Synthetic polynucleotide encoding artificial human antibody CDR-L1 region
aacctcaaactcttttat

SEQ ID NO: 1385 - DNA, 18 bp, Artificial Sequence
  Synthetic polynucleotide encoding artificial human antibody CDR-L1 region
cagagtattagcacgtat

SEQ ID NO: 1386 - DNA, 24 bp, Artificial Sequence
  Synthetic polynucleotide encoding artificial human antibody CDR-L1 region
agctccaacatcggaagtaattat

SEQ ID NO: 1387 - DNA, 27 bp, Artificial Sequence
  Synthetic polynucleotide encoding artificial human antibody CDR-L1 region
tggactgacattggtctttttaaccat

SEQ ID NO: 1388 - DNA, 18 bp, Artificial Sequence
  Synthetic polynucleotide encoding artificial human antibody CDR-L1 region
gcattgccaaagcaatat

SEQ ID NO: 1389 - DNA, 18 bp, Artificial Sequence
  Synthetic polynucleotide encoding artificial human antibody CDR-L1 region
agcctcagaatctattat

SEQ ID NO: 1390 - DNA, 18 bp, Artificial Sequence
  Synthetic polynucleotide encoding artificial human antibody CDR-L1 region
cagagtgttagcagctac

SEQ ID NO: 1391 - DNA, 18 bp, Artificial Sequence
  Synthetic polynucleotide encoding artificial human antibody CDR-L1 region
agcctcaaactcttctat

SEQ ID NO: 1392 - DNA, 18 bp, Artificial Sequence
  Synthetic polynucleotide encoding artificial human antibody CDR-L1 region
gcattgccaaaacaatat

SEQ ID NO: 1393 - DNA, 36 bp, Artificial Sequence; identical to SEQ ID NO: 1290
  Synthetic polynucleotide encoding artificial human antibody CDR-L1 region

SEQ ID NO: 1394 - DNA, 18 bp, Artificial Sequence
  Synthetic polynucleotide encoding artificial human antibody CDR-L1 region
gtattgccaaagcaacat

SEQ ID NO: 1395 - DNA, 18 bp, Artificial Sequence
  Synthetic polynucleotide encoding artificial human antibody CDR-L1 region
cagagcattaacaggtat

SEQ ID NO: 1396 - DNA, 18 bp, Artificial Sequence
  Synthetic polynucleotide encoding artificial human antibody CDR-L1 region
aaattgggggataaatat

SEQ ID NO: 1397 - DNA, 18 bp, Artificial Sequence
  Synthetic polynucleotide encoding artificial human antibody CDR-L1 region
cagagtgttagcacctac

SEQ ID NO: 1398 - DNA, 18 bp, Artificial Sequence
  Synthetic polynucleotide encoding artificial human antibody CDR-L1 region
cagaagattgccacgtat

SEQ ID NO: 1399 - DNA, 21 bp, Artificial Sequence
  Synthetic polynucleotide encoding artificial human antibody CDR-L1 region
cagagtgttaacagcgattac

SEQ ID NO: 1400 - DNA, 18 bp, Artificial Sequence
  Synthetic polynucleotide encoding artificial human antibody CDR-L1 region
agcctcaggatctattat

SEQ ID NO: 1401 - DNA, 18 bp, Artificial Sequence
  Synthetic polynucleotide encoding artificial human antibody CDR-L1 region
agcctcagaagctattat

SEQ ID NO: 1402 - DNA, 18 bp, Artificial Sequence
  Synthetic polynucleotide encoding artificial human antibody CDR-L1 region
agcctcacactcttttat

SEQ ID NO: 1403 - DNA, 27 bp, Artificial Sequence
  Synthetic polynucleotide encoding artificial human antibody CDR-L1 region
tctggctcagtctctactagttactac

SEQ ID NO: 1404 - DNA, 18 bp, Artificial Sequence
  Synthetic polynucleotide encoding artificial human antibody CDR-L1 region
aacctcaaactcttttat

SEQ ID NO: 1405 - DNA, 36 bp, Artificial Sequence
  Synthetic polynucleotide encoding artificial human antibody CDR-L1 region
cagagcattttatataactccaacagtaagaactac

SEQ ID NO: 1406 - DNA, 27 bp, Artificial Sequence
  Synthetic polynucleotide encoding artificial human antibody CDR-L1 region
aacagtgacgttggtacttataacttt

SEQ ID NO: 1407 - DNA, 27 bp, Artificial Sequence
  Synthetic polynucleotide encoding artificial human antibody CDR-L1 region
agctccaacatcggggcaggttatgat

SEQ ID NO: 1408 - DNA, 18 bp, Artificial Sequence
  Synthetic polynucleotide encoding artificial human antibody CDR-L1 region
gcattgccaaagcaatat

SEQ ID NO: 1409 - DNA, 27 bp, Artificial Sequence
  Synthetic polynucleotide encoding artificial human antibody CDR-L1 region
ggctccaacatcggggcaacttatgat

SEQ ID NO: 1410 - DNA, 27 bp, Artificial Sequence
  Synthetic polynucleotide encoding artificial human antibody CDR-L1 region
agcgattcggttggtggttataattat

SEQ ID NO: 1411 - DNA, 27 bp, Artificial Sequence
  Synthetic polynucleotide encoding artificial human antibody CDR-L1 region
agcagtgacgttggtggttataactat

SEQ ID NO: 1412 - DNA, 18 bp, Artificial Sequence
  Synthetic polynucleotide encoding artificial human antibody CDR-L1 region
cagagcattgccacctat

SEQ ID NO: 1413 - DNA, 18 bp, Artificial Sequence
  Synthetic polynucleotide encoding artificial human antibody CDR-L1 region
cagagtattagcagcaac

SEQ ID NO: 1414 - DNA, 33 bp, Artificial Sequence; identical to SEQ ID NO: 1263
  Synthetic polynucleotide encoding artificial human antibody CDR-L1 region

SEQ ID NO: 1415 - DNA, 18 bp, Artificial Sequence
  Synthetic polynucleotide encoding artificial human antibody CDR-L1 region
agcctcagactcttctat

SEQ ID NO: 1416 - DNA, 18 bp, Artificial Sequence
  Synthetic polynucleotide encoding artificial human antibody CDR-L1 region
ggcttgggcgcaaagtat

SEQ ID NO: 1417 - DNA, 18 bp, Artificial Sequence
  Synthetic polynucleotide encoding artificial human antibody CDR-L1 region
agcctcaaactcttttat

SEQ ID NO: 1418 - DNA, 18 bp, Artificial Sequence
  Synthetic polynucleotide encoding artificial human antibody CDR-L1 region
accctcacactctattat

SEQ ID NO: 1419 - DNA, 21 bp, Artificial Sequence
  Synthetic polynucleotide encoding artificial human antibody CDR-L1 region
cagagtgttagcagcggctac

SEQ ID NO: 1420 - DNA, 18 bp, Artificial Sequence
  Synthetic polynucleotide encoding artificial human antibody CDR-L1 region
agcctcaaactcttctat

SEQ ID NO: 1421 - DNA, 27 bp, Artificial Sequence
  Synthetic polynucleotide encoding artificial human antibody CDR-L1 region
agcagtgacgttggtggttataactat

SEQ ID NO: 1422 - DNA, 24 bp, Artificial Sequence
  Synthetic polynucleotide encoding artificial human antibody CDR-L1 region
aatggcggcattgccagcaactat

SEQ ID NO: 1423 - DNA, 18 bp, Artificial Sequence
  Synthetic polynucleotide encoding artificial human antibody CDR-L1 region
aaattggggaataaatat

SEQ ID NO: 1424 - DNA, 24 bp, Artificial Sequence
  Synthetic polynucleotide encoding artificial human antibody CDR-L1 region
agctccaacattgggaataattat

SEQ ID NO: 1425 - DNA, 27 bp, Artificial Sequence
  Synthetic polynucleotide encoding artificial human antibody CDR-L1 region
agcagtgatgttgggagttataacctt

SEQ ID NO: 1426 - DNA, 21 bp, Artificial Sequence
  Synthetic polynucleotide encoding artificial human antibody CDR-L1 region
cagagtgttagcagcagctac

SEQ ID NO: 1427 - DNA, 18 bp, Artificial Sequence
  Synthetic polynucleotide encoding artificial human antibody CDR-L1 region
aacctcaaactcttttat

SEQ ID NO: 1428 - DNA, 18 bp, Artificial Sequence
  Synthetic polynucleotide encoding artificial human antibody CDR-L1 region
cagcacatgagcggttat

SEQ ID NO: 1429 - DNA, 36 bp, Artificial Sequence
  Synthetic polynucleotide encoding artificial human antibody CDR-L1 region
cagagtcttttgtacaggtccaacaataagaactac

SEQ ID NO: 1430 - DNA, 18 bp, Artificial Sequence
  Synthetic polynucleotide encoding artificial human antibody CDR-L1 region
caggacattagcaactat

SEQ ID NO: 1431 - DNA, 18 bp, Artificial Sequence
  Synthetic polynucleotide encoding artificial human antibody CDR-L1 region
cagaagattgccacgtat

SEQ ID NO: 1432 - DNA, 18 bp, Artificial Sequence
  Synthetic polynucleotide encoding artificial human antibody CDR-L1 region
aaattgggggataaatat

SEQ ID NO: 1433 - DNA, 24 bp, Artificial Sequence
  Synthetic polynucleotide encoding artificial human antibody CDR-L1 region
agtggcagcattgccagcaactat

SEQ ID NO: 1434 - DNA, 24 bp, Artificial Sequence
  Synthetic polynucleotide encoding artificial human antibody CDR-L1 region
agctccaacattgggaataattat

SEQ ID NO: 1435 - DNA, 27 bp, Artificial Sequence
  Synthetic polynucleotide encoding artificial human antibody CDR-L1 region
agcagtgacgttggtggttataactat

SEQ ID NO: 1436 - DNA, 27 bp, Artificial Sequence
  Synthetic polynucleotide encoding artificial human antibody CDR-L1 region
agctccagcatcggggcaggttatgat

SEQ ID NO: 1437 - DNA, 27 bp, Artificial Sequence
  Synthetic polynucleotide encoding artificial human antibody CDR-L1 region
agcagtgacgttggtggttataactat

SEQ ID NO: 1438 - DNA, 21 bp, Artificial Sequence
  Synthetic polynucleotide encoding artificial human antibody CDR-L1 region
cagagtgttagcatcacctcc

SEQ ID NO: 1439 - DNA, 24 bp, Artificial Sequence
  Synthetic polynucleotide encoding artificial human antibody CDR-L1 region
agctccaacatcggaagtcattat

SEQ ID NO: 1440 - DNA, 21 bp, Artificial Sequence
  Synthetic polynucleotide encoding artificial human antibody CDR-L1 region
cagagtgttagcagcagctac

SEQ ID NO: 1441 - DNA, 36 bp, Artificial Sequence
  Synthetic polynucleotide encoding artificial human antibody CDR-L1 region
cagagtgttttgtacaggtccaacaataagaactac

SEQ ID NO: 1442 - DNA, 18 bp, Artificial Sequence
  Synthetic polynucleotide encoding artificial human antibody CDR-L1 region
cagggtattagcagctgg

SEQ ID NO: 1443 - DNA, 24 bp, Artificial Sequence
  Synthetic polynucleotide encoding artificial human antibody CDR-L1 region
agctccaacattgggaataattat

SEQ ID NO: 1444 - DNA, 18 bp, Artificial Sequence
  Synthetic polynucleotide encoding artificial human antibody CDR-L1 region
cagagtgttagcagctac

SEQ ID NO: 1445 - DNA, 18 bp, Artificial Sequence
  Synthetic polynucleotide encoding artificial human antibody CDR-L1 region
cagggcattagcaattat

SEQ ID NO: 1446 - DNA, 24 bp, Artificial Sequence
  Synthetic polynucleotide encoding artificial human antibody CDR-L1 region
agctccaacattgggaataattat

SEQ ID NO: 1447 - DNA, 36 bp, Artificial Sequence
  Synthetic polynucleotide encoding artificial human antibody CDR-L1 region
cggagtgttttttacagctccggaaataagaattac

SEQ ID NO: 1448 - DNA, 24 bp, Artificial Sequence
  Synthetic polynucleotide encoding artificial human antibody CDR-L1 region
agctccaacatcggaagtaatact

SEQ ID NO: 1449 - DNA, 27 bp, Artificial Sequence
  Synthetic polynucleotide encoding artificial human antibody CDR-L1 region
agcagtgctattggtggttataacctt

SEQ ID NO: 1450 - DNA, 18 bp, Artificial Sequence
  Synthetic polynucleotide encoding artificial human antibody CDR-L1 region
aaattgggggagaaattt

SEQ ID NO: 1451 - DNA, 18 bp, Artificial Sequence
  Synthetic polynucleotide encoding artificial human antibody CDR-L1 region
gcattgccaaagcaatat

SEQ ID NO: 1452 - DNA, 36 bp, Artificial Sequence; identical to SEQ ID NO: 1290
  Synthetic polynucleotide encoding artificial human antibody CDR-L1 region

SEQ ID NO: 1453 - DNA, 33 bp, Artificial Sequence
  Synthetic polynucleotide encoding artificial human antibody CDR-L1 region
cagagcctcctgcatagtaatggatacacactt

SEQ ID NO: 1454 - DNA, 18 bp, Artificial Sequence
  Synthetic polynucleotide encoding artificial human antibody CDR-L1 region
agcctcagaatctattat

SEQ ID NO: 1455 - DNA, 27 bp, Artificial Sequence
  Synthetic polynucleotide encoding artificial human antibody CDR-L1 region
agcagtgacgttggtggttataactat

SEQ ID NO: 1456 - DNA, 33 bp, Artificial Sequence
  Synthetic polynucleotide encoding artificial human antibody CDR-L1 region
caaagcctcgtatacagtgatggaaacacttac

SEQ ID NO: 1457 - DNA, 18 bp, Artificial Sequence
  Synthetic polynucleotide encoding artificial human antibody CDR-L1 region
aacattggaagtaaaagt

SEQ ID NO: 1458 - DNA, 18 bp, Artificial Sequence
  Synthetic polynucleotide encoding artificial human antibody CDR-L1 region
cagagtgttggcagcaac

SEQ ID NO: 1459 - DNA, 18 bp, Artificial Sequence
  Synthetic polynucleotide encoding artificial human antibody CDR-L1 region
agcctcagaagctattat

SEQ ID NO: 1460 - DNA, 33 bp, Artificial Sequence; identical to SEQ ID NO: 1263
  Synthetic polynucleotide encoding artificial human antibody CDR-L1 region

SEQ ID NO: 1461 - DNA, 33 bp, Artificial Sequence
  Synthetic polynucleotide encoding artificial human antibody CDR-L1 region
cagagcctcctgcatagtaatggatacaactgt

SEQ ID NO: 1462 - DNA, 21 bp, Artificial Sequence
  Synthetic polynucleotide encoding artificial human antibody CDR-L1 region
cagagtgtcagcagcacctac

SEQ ID NO: 1463 - DNA, 24 bp, Artificial Sequence
  Synthetic polynucleotide encoding artificial human antibody CDR-L1 region
agctccaacatcggaagtaatcct

SEQ ID NO: 1464 - DNA, 21 bp, Artificial Sequence
  Synthetic polynucleotide encoding artificial human antibody CDR-L1 region
cagagtcttagcagtcgttac

SEQ ID NO: 1465 - DNA, 27 bp, Artificial Sequence
  Synthetic polynucleotide encoding artificial human antibody CDR-L1 region
tctggctcagtctctactagtcactac

SEQ ID NO: 1466 - DNA, 24 bp, Artificial Sequence
  Synthetic polynucleotide encoding artificial human antibody CDR-L1 region
agctccaacatcggaagtaatact

SEQ ID NO: 1467 - DNA, 18 bp, Artificial Sequence
  Synthetic polynucleotide encoding artificial human antibody CDR-L1 region
aacttggacgaaaagtat

SEQ ID NO: 1468 - DNA, 27 bp, Artificial Sequence
  Synthetic polynucleotide encoding artificial human antibody CDR-L1 region
agcagtgacgttggtgcttataactat

SEQ ID NO: 1469 - DNA, 24 bp, Artificial Sequence
  Synthetic polynucleotide encoding artificial human antibody CDR-L1 region
agctccaacatcggaagtaattat

SEQ ID NO: 1470 - DNA, 18 bp, Artificial Sequence
  Synthetic polynucleotide encoding artificial human antibody CDR-L1 region
cagaacttttacagttat

SEQ ID NO: 1471 - DNA, 18 bp, Artificial Sequence
  Synthetic polynucleotide encoding artificial human antibody CDR-L1 region
agcctcagaagatattat

SEQ ID NO: 1472 - DNA, 27 bp, Artificial Sequence
  Synthetic polynucleotide encoding artificial human antibody CDR-L1 region
agcagtgacgttggtgcttataactat

SEQ ID NO: 1473 - DNA, 18 bp, Artificial Sequence
  Synthetic polynucleotide encoding artificial human antibody CDR-L1 region
caaaatattgacagttac

SEQ ID NO: 1474 - DNA, 24 bp, Artificial Sequence
  Synthetic polynucleotide encoding artificial human antibody CDR-L1 region
agctccaacatcggaagtaatact

SEQ ID NO: 1475 - DNA, 18 bp, Artificial Sequence
  Synthetic polynucleotide encoding artificial human antibody CDR-L1 region
accctcagaatgtattat

SEQ ID NO: 1476 - DNA, 18 bp, Artificial Sequence
  Synthetic polynucleotide encoding artificial human antibody CDR-L1 region
cagactgtcaacatcaac

SEQ ID NO: 1477 - DNA, 18 bp, Artificial Sequence
  Synthetic polynucleotide encoding artificial human antibody CDR-L1 region
caggacattagcaactat

SEQ ID NO: 1478 - DNA, 18 bp, Artificial Sequence
  Synthetic polynucleotide encoding artificial human antibody CDR-L1 region
cagggcattagcagatat

SEQ ID NO: 1479 - DNA, 24 bp, Artificial Sequence
  Synthetic polynucleotide encoding artificial human antibody CDR-L1 region
agttccaacatcggaagtaatttt

SEQ ID NO: 1480 - DNA, 33 bp, Artificial Sequence
  Synthetic polynucleotide encoding artificial human antibody CDR-L1 region
caaagcctcgttcacagtgatggaaacacctac

SEQ ID NO: 1481 - DNA, 18 bp, Artificial Sequence
  Synthetic polynucleotide encoding artificial human antibody CDR-L1 region
aaattgggggataaatat

SEQ ID NO: 1482 - DNA, 18 bp, Artificial Sequence
  Synthetic polynucleotide encoding artificial human antibody CDR-L1 region
agtctcagaagctattat

SEQ ID NO: 1483 - DNA, 33 bp, Artificial Sequence
  Synthetic polynucleotide encoding artificial human antibody CDR-L1 region
cagagcctccttcacagtgatggaaagacctac

SEQ ID NO: 1484 - DNA, 18 bp, Artificial Sequence
  Synthetic polynucleotide encoding artificial human antibody CDR-L1 region
caggccatctcctcttat

SEQ ID NO: 1485 - DNA, 33 bp, Artificial Sequence; identical to SEQ ID NO: 1264
  Synthetic polynucleotide encoding artificial human antibody CDR-L1 region

SEQ ID NO: 1486 - DNA, 18 bp, Artificial Sequence
  Synthetic polynucleotide encoding artificial human antibody CDR-L1 region
aagttgggggatttactt

SEQ ID NO: 1487 - DNA, 18 bp, Artificial Sequence
  Synthetic polynucleotide encoding artificial human antibody CDR-L1 region
cagatttttaacaacaac

SEQ ID NO: 1488 - DNA, 33 bp, Artificial Sequence; identical to SEQ ID NO: 1264
  Synthetic polynucleotide encoding artificial human antibody CDR-L1 region

SEQ ID NO: 1489 - DNA, 24 bp, Artificial Sequence
  Synthetic polynucleotide encoding artificial human antibody CDR-L1 region
agctcgaatattgggaacaatcat

SEQ ID NO: 1490 - DNA, 18 bp, Artificial Sequence
  Synthetic polynucleotide encoding artificial human antibody CDR-L1 region
cagagcattagcaactat

SEQ ID NO: 1491 - DNA, 33 bp, Artificial Sequence; identical to SEQ ID NO: 1263
  Synthetic polynucleotide encoding artificial human antibody CDR-L1 region

SEQ ID NO: 1492 - DNA, 24 bp, Artificial Sequence
  Synthetic polynucleotide encoding artificial human antibody CDR-L1 region
agctccaacatcggaagtaattat

SEQ ID NO: 1493 - DNA, 24 bp, Artificial Sequence
  Synthetic polynucleotide encoding artificial human antibody CDR-L1 region
agctccaacattggaggtaattat

SEQ ID NO: 1494 - DNA, 27 bp, Artificial Sequence
  Synthetic polynucleotide encoding artificial human antibody CDR-L1 region
agctccaacatcgggtcaggttatgat

SEQ ID NO: 1495 - DNA, 33 bp, Artificial Sequence; identical to SEQ ID NO: 1264
  Synthetic polynucleotide encoding artificial human antibody CDR-L1 region

SEQ ID NO: 1496 - DNA, 18 bp, Artificial Sequence
  Synthetic polynucleotide encoding artificial human antibody CDR-L1 region
gcattgccaaagcaatat

SEQ ID NO: 1497 - DNA, 24 bp, Artificial Sequence
  Synthetic polynucleotide encoding artificial human antibody CDR-L1 region
agctccaacatcggaagtaatagt

SEQ ID NO: 1498 - DNA, 18 bp, Artificial Sequence
  Synthetic polynucleotide encoding artificial human antibody CDR-L1 region
cagttggcagataaatat

SEQ ID NO: 1499 - DNA, 36 bp, Artificial Sequence
  Synthetic polynucleotide encoding artificial human antibody CDR-L1 region
cagagtgttttatccagctccaacaataagaactac

SEQ ID NO: 1500 - DNA, 18 bp, Artificial Sequence
  Synthetic polynucleotide encoding artificial human antibody CDR-L1 region
cagagcatcgatatcttt

SEQ ID NO: 1501 - DNA, 21 bp, Artificial Sequence
  Synthetic polynucleotide encoding artificial human antibody CDR-L1 region
cagagtgttagcagcagctac

SEQ ID NO: 1502 - DNA, 18 bp, Artificial Sequence
  Synthetic polynucleotide encoding artificial human antibody CDR-L1 region
cagagtattagtagctgg

SEQ ID NO: 1503 - DNA, 33 bp, Artificial Sequence
  Synthetic polynucleotide encoding artificial human antibody CDR-L1 region
cagagcctcctgcatagtgatggaaggacctat

SEQ ID NO: 1504 - DNA, 18 bp, Artificial Sequence
  Synthetic polynucleotide encoding artificial human antibody CDR-L1 region
cagagtgttggcagcgac

SEQ ID NO: 1505 - DNA, 18 bp, Artificial Sequence
  Synthetic polynucleotide encoding artificial human antibody CDR-L1 region
gagaacattaacaacttt

SEQ ID NO: 1506 - DNA, 24 bp, Artificial Sequence
  Synthetic polynucleotide encoding artificial human antibody CDR-L1 region
agctccaacatcggaagtaatact

SEQ ID NO: 1507 - DNA, 18 bp, Artificial Sequence
  Synthetic polynucleotide encoding artificial human antibody CDR-L1 region
gcattgacaaagcaatat

SEQ ID NO: 1508 - DNA, 18 bp, Artificial Sequence
  Synthetic polynucleotide encoding artificial human antibody CDR-L1 region
cagggcattagagatgat

SEQ ID NO: 1509 - DNA, 18 bp, Artificial Sequence
  Synthetic polynucleotide encoding artificial human antibody CDR-L1 region
gcattgccaaagcaatat

SEQ ID NO: 1510 - DNA, 27 bp, Artificial Sequence
  Synthetic polynucleotide encoding artificial human antibody CDR-L1 region
agctccaacatcggggcaggttatgat

SEQ ID NO: 1511 - DNA, 21 bp, Artificial Sequence
  Synthetic polynucleotide encoding artificial human antibody CDR-L1 region
cagagtgttagcagcagctac

SEQ ID NO: 1512 - DNA, 18 bp, Artificial Sequence
  Synthetic polynucleotide encoding artificial human antibody CDR-L1 region
agtattggcagcaaaaat

SEQ ID NO: 1513 - DNA, 18 bp, Artificial Sequence
  Synthetic polynucleotide encoding artificial human antibody CDR-L1 region
cagggcattagcagttat

SEQ ID NO: 1514 - DNA, 18 bp, Artificial Sequence
  Synthetic polynucleotide encoding artificial human antibody CDR-L1 region
caaactgtgaggagtaaa

SEQ ID NO: 1515 - DNA, 21 bp, Artificial Sequence
  Synthetic polynucleotide encoding artificial human antibody CDR-L1 region
gagagtgttagcaggagctac

SEQ ID NO: 1516 - DNA, 33 bp, Artificial Sequence
  Synthetic polynucleotide encoding artificial human antibody CDR-L1 region
caaagcctcgtgcacagtgatggaaacacctac

SEQ ID NO: 1517 - DNA, 27 bp, Artificial Sequence
  Synthetic polynucleotide encoding artificial human antibody CDR-L1 region
tctggctcagtctctactagtcactac

SEQ ID NO: 1518 - DNA, 18 bp, Artificial Sequence
  Synthetic polynucleotide encoding artificial human antibody CDR-L1 region
tcattgccaaaaaaatat

SEQ ID NO: 1519 - DNA, 18 bp, Artificial Sequence
  Synthetic polynucleotide encoding artificial human antibody CDR-L1 region
cagagcattagcacctat

SEQ ID NO: 1520 - DNA, 18 bp, Artificial Sequence
  Synthetic polynucleotide encoding artificial human antibody CDR-L1 region
gggctgacaagaaaatat

SEQ ID NO: 1521 - DNA, 18 bp, Artificial Sequence
  Synthetic polynucleotide encoding artificial human antibody CDR-L1 region
caggccatctcctcttat

SEQ ID NO: 1522 - DNA, 27 bp, Artificial Sequence
  Synthetic polynucleotide encoding artificial human antibody CDR-L1 region
agcagtgacgttggtggttataacttt

SEQ ID NO: 1523 - DNA, 27 bp, Artificial Sequence
  Synthetic polynucleotide encoding artificial human antibody CDR-L1 region
agctccgacctcggggcaggttatgat

SEQ ID NO: 1524 - DNA, 27 bp, Artificial Sequence
  Synthetic polynucleotide encoding artificial human antibody CDR-L1 region
atgggaccagtcaccacttcttactat

SEQ ID NO: 1525 - DNA, 33 bp, Artificial Sequence; identical to SEQ ID NO: 1263
  Synthetic polynucleotide encoding artificial human antibody CDR-L1 region

SEQ ID NO: 1526 - DNA, 18 bp, Artificial Sequence
  Synthetic polynucleotide encoding artificial human antibody CDR-L1 region
agcctcagaagctattat

SEQ ID NO: 1527 - DNA, 27 bp, Artificial Sequence
  Synthetic polynucleotide encoding artificial human antibody CDR-L1 region
agcagtgatgttgggagttataacctt

SEQ ID NO: 1528 - DNA, 18 bp, Artificial Sequence
  Synthetic polynucleotide encoding artificial human antibody CDR-L1 region
cggagtgttagcagctcc

SEQ ID NO: 1529 - DNA, 18 bp, Artificial Sequence
  Synthetic polynucleotide encoding artificial human antibody CDR-L1 region
cagggtattagcggctgg

SEQ ID NO: 1530 - DNA, 12 bp, Artificial Sequence
  Synthetic polynucleotide encoding artificial human antibody CDR-L1 region
aggggtgacgat

SEQ ID NO: 1531 - DNA, 18 bp, Artificial Sequence
  Synthetic polynucleotide encoding artificial human antibody CDR-L1 region
gaagtgggaaatgcaaat

SEQ ID NO: 1532 - DNA, 18 bp, Artificial Sequence
  Synthetic polynucleotide encoding artificial human antibody CDR-L1 region
caggacattagcaattat

SEQ ID NO: 1533 - DNA, 18 bp, Artificial Sequence
  Synthetic polynucleotide encoding artificial human antibody CDR-L1 region
cagagtgttagtaggtgg

SEQ ID NO: 1534 - DNA, 21 bp, Artificial Sequence
  Synthetic polynucleotide encoding artificial human antibody CDR-L1 region
cagagtgttagcagcaattac

SEQ ID NO: 1535 - DNA, 27 bp, Artificial Sequence
  Synthetic polynucleotide encoding artificial human antibody CDR-L1 region
aatagcgacatttatggttatgcccgt

SEQ ID NO: 1536 - DNA, 24 bp, Artificial Sequence
  Synthetic polynucleotide encoding artificial human antibody CDR-L1 region
agctccaacatcggaagtaattat

SEQ ID NO: 1537 - DNA, 21 bp, Artificial Sequence
  Synthetic polynucleotide encoding artificial human antibody CDR-L1 region
cagagtgttagcagcagctac

SEQ ID NO: 1538 - DNA, 27 bp, Artificial Sequence
  Synthetic polynucleotide encoding artificial human antibody CDR-L1 region
agctccaacatcggggcaggttatgat

SEQ ID NO: 1539 - DNA, 27 bp, Artificial Sequence
  Synthetic polynucleotide encoding artificial human antibody CDR-L1 region
agcagtgatgttgggagttataacctt

SEQ ID NO: 1540 - DNA, 27 bp, Artificial Sequence
  Synthetic polynucleotide encoding artificial human antibody CDR-L1 region
actggaacaatcaccagtctgtactat

SEQ ID NO: 1541 - DNA, 18 bp, Artificial Sequence
  Synthetic polynucleotide encoding artificial human antibody CDR-L1 region
cagactattagcagctac

SEQ ID NO: 1542 - DNA, 24 bp, Artificial Sequence
  Synthetic polynucleotide encoding artificial human antibody CDR-L1 region
agctccaacattgggaataattat

SEQ ID NO: 1543 - DNA, 33 bp, Artificial Sequence
  Synthetic polynucleotide encoding artificial human antibody CDR-L1 region
cagagcctcttggatagaaatggccacaactgt

SEQ ID NO: 1544 - DNA, 27 bp, Artificial Sequence
  Synthetic polynucleotide encoding artificial human antibody CDR-L1 region
agcagtgatgttgggagttataacctt

SEQ ID NO: 1545 - DNA, 18 bp, Artificial Sequence
  Synthetic polynucleotide encoding artificial human antibody CDR-L1 region
cagagtattagtagctgg

SEQ ID NO: 1546 - DNA, 18 bp, Artificial Sequence
  Synthetic polynucleotide encoding artificial human antibody CDR-L1 region
aacattggaagtaaaagt

SEQ ID NO: 1547 - DNA, 18 bp, Artificial Sequence
  Synthetic polynucleotide encoding artificial human antibody CDR-L1 region
cagagtattagtagctgg

SEQ ID NO: 1548 - DNA, 18 bp, Artificial Sequence
  Synthetic polynucleotide encoding artificial human antibody CDR-L1 region
cagagtgttagcagctac

SEQ ID NO: 1549 - DNA, 18 bp, Artificial Sequence
  Synthetic polynucleotide encoding artificial human antibody CDR-L1 region
cagagcattagcagctat

SEQ ID NO: 1550 - DNA, 27 bp, Artificial Sequence
  Synthetic polynucleotide encoding artificial human antibody CDR-L1 region
actggaactgtcaccagtggtcattat

SEQ ID NO: 1551 - DNA, 33 bp, Artificial Sequence; identical to SEQ ID NO: 1264
  Synthetic polynucleotide encoding artificial human antibody CDR-L1 region

SEQ ID NO: 1552 - DNA, 18 bp, Artificial Sequence
  Synthetic polynucleotide encoding artificial human antibody CDR-L1 region
caggacattaggagatat

SEQ ID NO: 1553 - DNA, 27 bp, Artificial Sequence
  Synthetic polynucleotide encoding artificial human antibody CDR-L1 region
agcagtgacgttggtggttataactat

SEQ ID NO: 1554 - DNA, 27 bp, Artificial Sequence
  Synthetic polynucleotide encoding artificial human antibody CDR-L1 region
agcagtgatgttggtggttataactat

SEQ ID NO: 1555 - DNA, 18 bp, Artificial Sequence
  Synthetic polynucleotide encoding artificial human antibody CDR-L1 region
aaattgggggataaatat

SEQ ID NO: 1556 - DNA, 27 bp, Artificial Sequence
  Synthetic polynucleotide encoding artificial human antibody CDR-L1 region
agcagtgatgttgggagttataacctt

SEQ ID NO: 1557 - DNA, 21 bp, Artificial Sequence
  Synthetic polynucleotide encoding artificial human antibody CDR-L1 region
gaagttgtgactaataattac

SEQ ID NO: 1558 - DNA, 27 bp, Artificial Sequence
  Synthetic polynucleotide encoding artificial human antibody CDR-L1 region
aacagtgacattggtgcttatgactat

SEQ ID NO: 1559 - DNA, 36 bp, Artificial Sequence; identical to SEQ ID NO: 1290
  Synthetic polynucleotide encoding artificial human antibody CDR-L1 region

SEQ ID NO: 1560 - DNA, 24 bp, Artificial Sequence
  Synthetic polynucleotide encoding artificial human antibody CDR-L1 region
agctccaacattgggaataattat

SEQ ID NO: 1561 - DNA, 27 bp, Artificial Sequence
  Synthetic polynucleotide encoding artificial human antibody CDR-L1 region
agcagtgatgttggtggttataactat

SEQ ID NO: 1562 - DNA, 36 bp, Artificial Sequence
  Synthetic polynucleotide encoding artificial human antibody CDR-L1 region
cagagtgttgtatacagctccaacaataagaactac

SEQ ID NO: 1563 - DNA, 27 bp, Artificial Sequence
  Synthetic polynucleotide encoding artificial human antibody CDR-L1 region
agcagtgatgttgggagttataacctt

SEQ ID NO: 1564 - DNA, 27 bp, Artificial Sequence
  Synthetic polynucleotide encoding artificial human antibody CDR-L1 region
agcagtgacgttggtggttataactat

SEQ ID NO: 1565 - DNA, 18 bp, Artificial Sequence
  Synthetic polynucleotide encoding artificial human antibody CDR-L1 region
cagagtattagtagctgg

SEQ ID NO: 1566 - DNA, 18 bp, Artificial Sequence
  Synthetic polynucleotide encoding artificial human antibody CDR-L1 region
cagagcattagcaggtat

SEQ ID NO: 1567 - DNA, 18 bp, Artificial Sequence
  Synthetic polynucleotide encoding artificial human antibody CDR-L1 region
cagcacattagacatgat

SEQ ID NO: 1568 - DNA, 18 bp, Artificial Sequence
  Synthetic polynucleotide encoding artificial human antibody CDR-L1 region
cagagtattagtagctgg

SEQ ID NO: 1569 - DNA, 30 bp, Artificial Sequence
  Synthetic polynucleotide encoding artificial human antibody CDR-L1 region
cagagtgttttagacggctccaacaataac

SEQ ID NO: 1570 - DNA, 21 bp, Artificial Sequence
  Synthetic polynucleotide encoding artificial human antibody CDR-L1 region
cagagtgttagcagcagctac

SEQ ID NO: 1571 - DNA, 18 bp, Artificial Sequence
  Synthetic polynucleotide encoding artificial human antibody CDR-L1 region
cagagtattagcagctac

SEQ ID NO: 1572 - DNA, 21 bp, Artificial Sequence
  Synthetic polynucleotide encoding artificial human antibody CDR-L1 region
cagagtgttaacaggaactac

SEQ ID NO: 1573 - DNA, 36 bp, Artificial Sequence; identical to SEQ ID NO: 1290
  Synthetic polynucleotide encoding artificial human antibody CDR-L1 region

SEQ ID NO: 1574 - DNA, 27 bp, Artificial Sequence
  Synthetic polynucleotide encoding artificial human antibody CDR-L1 region
agcagtgacgttggtggttataagtat

SEQ ID NO: 1575 - DNA, 24 bp, Artificial Sequence
  Synthetic polynucleotide encoding artificial human antibody CDR-L1 region
aactccaacattgggagtaattat

SEQ ID NO: 1576 - DNA, 18 bp, Artificial Sequence
  Synthetic polynucleotide encoding artificial human antibody CDR-L1 region
gcattgccaaaaaaatat

SEQ ID NO: 1577 - DNA, 18 bp, Artificial Sequence
  Synthetic polynucleotide encoding artificial human antibody CDR-L1 region
cagagtgttagcagctac

SEQ ID NO: 1578 - DNA, 21 bp, Artificial Sequence
  Synthetic polynucleotide encoding artificial human antibody CDR-L1 region
cagagtgttagcagcagctac

SEQ ID NO: 1579 - DNA, 36 bp, Artificial Sequence
  Synthetic polynucleotide encoding artificial human antibody CDR-L1 region
cagagtgtcttaaacagctccaacaataagaactac

SEQ ID NO: 1580 - DNA, 33 bp, Artificial Sequence; identical to SEQ ID NO: 1296
  Synthetic polynucleotide encoding artificial human antibody CDR-L1 region

SEQ ID NO: 1581 - DNA, 33 bp, Artificial Sequence; identical to SEQ ID NO: 1264
  Synthetic polynucleotide encoding artificial human antibody CDR-L1 region

SEQ ID NO: 1582 - DNA, 18 bp, Artificial Sequence
  Synthetic polynucleotide encoding artificial human antibody CDR-L1 region
agcctcagaagctattat

SEQ ID NO: 1583 - DNA, 18 bp, Artificial Sequence
  Synthetic polynucleotide encoding artificial human antibody CDR-L1 region
cagggcattagaaatgac

SEQ ID NO: 1584 - DNA, 18 bp, Artificial Sequence
  Synthetic polynucleotide encoding artificial human antibody CDR-L1 region
aagttggggcataaaaat

SEQ ID NO: 1585 - DNA, 18 bp, Artificial Sequence
  Synthetic polynucleotide encoding artificial human antibody CDR-L1 region
cagagtgttagcagctac

SEQ ID NO: 1586 - DNA, 27 bp, Artificial Sequence
  Synthetic polynucleotide encoding artificial human antibody CDR-L1 region
agcggagacattggtgcctataacttt

SEQ ID NO: 1587 - DNA, 18 bp, Artificial Sequence
  Synthetic polynucleotide encoding artificial human antibody CDR-L1 region
cagagtattagtagttgg

SEQ ID NO: 1588 - DNA, 18 bp, Artificial Sequence
  Synthetic polynucleotide encoding artificial human antibody CDR-L1 region
caggacattagcaactat

SEQ ID NO: 1589 - DNA, 27 bp, Artificial Sequence
  Synthetic polynucleotide encoding artificial human antibody CDR-L1 region
agctccaacatcggggcaggttatgat

SEQ ID NO: 1590 - DNA, 36 bp, Artificial Sequence
  Synthetic polynucleotide encoding artificial human antibody CDR-L1 region
cagactattttacacagttccactaagaagactcac

SEQ ID NO: 1591 - DNA, 27 bp, Artificial Sequence
  Synthetic polynucleotide encoding artificial human antibody CDR-L1 region
agcagtgacgttggtggttataactgt

SEQ ID NO: 1592 - DNA, 33 bp, Artificial Sequence; identical to SEQ ID NO: 1264
  Synthetic polynucleotide encoding artificial human antibody CDR-L1 region

SEQ ID NO: 1593 - DNA, 18 bp, Artificial Sequence
  Synthetic polynucleotide encoding artificial human antibody CDR-L1 region
aacattggaagtaaaagt

SEQ ID NO: 1594 - DNA, 21 bp, Artificial Sequence
  Synthetic polynucleotide encoding artificial human antibody CDR-L1 region
cagagtgttagcagcagctac

SEQ ID NO: 1595 - DNA, 18 bp, Artificial Sequence
  Synthetic polynucleotide encoding artificial human antibody CDR-L1 region
cagggcattagaaatgat

SEQ ID NO: 1596 - DNA, 18 bp, Artificial Sequence
  Synthetic polynucleotide encoding artificial human antibody CDR-L1 region
cagagtattagtagctgg

SEQ ID NO: 1597 - DNA, 18 bp, Artificial Sequence
  Synthetic polynucleotide encoding artificial human antibody CDR-L1 region
agcctcagaagctattat

SEQ ID NO: 1598 - DNA, 21 bp, Artificial Sequence
  Synthetic polynucleotide encoding artificial human antibody CDR-L1 region
cagagtgttagcagcagctac

SEQ ID NO: 1599 - DNA, 18 bp, Artificial Sequence
  Synthetic polynucleotide encoding artificial human antibody CDR-L1 region
caggacattagcaactat

SEQ ID NO: 1600 - DNA, 24 bp, Artificial Sequence
  Synthetic polynucleotide encoding artificial human antibody CDR-L1 region
agtggcagcattgccagcaactat

SEQ ID NO: 1601 - DNA, 18 bp, Artificial Sequence
  Synthetic polynucleotide encoding artificial human antibody CDR-L1 region
cagagcattagcagctat

SEQ ID NO: 1602 - DNA, 33 bp, Artificial Sequence; identical to SEQ ID NO: 1264
  Synthetic polynucleotide encoding artificial human antibody CDR-L1 region

SEQ ID NO: 1603 - DNA, 18 bp, Artificial Sequence
  Synthetic polynucleotide encoding artificial human antibody CDR-L1 region
cagagtgttagcagctac

SEQ ID NO: 1604 - DNA, 18 bp, Artificial Sequence
  Synthetic polynucleotide encoding artificial human antibody CDR-L1 region
agcctcagaagctattat

SEQ ID NO: 1605 - DNA, 24 bp, Artificial Sequence
  Synthetic polynucleotide encoding artificial human antibody CDR-L1 region
agctccaacattggcagtaatgat

SEQ ID NO: 1606 - DNA, 24 bp, Artificial Sequence
  Synthetic polynucleotide encoding artificial human antibody CDR-L1 region
agctccaacatcggaagtaattat

SEQ ID NO: 1607 - DNA, 24 bp, Artificial Sequence
  Synthetic polynucleotide encoding artificial human antibody CDR-L1 region
agctccaacattgggaataattat

SEQ ID NO: 1608 - DNA, 21 bp, Artificial Sequence
  Synthetic polynucleotide encoding artificial human antibody CDR-L1 region
cagagtgttagcagcagctac

SEQ ID NO: 1609 - DNA, 18 bp, Artificial Sequence
  Synthetic polynucleotide encoding artificial human antibody CDR-L1 region
cagggcattagaaatgat

SEQ ID NO: 1610 - DNA, 27 bp, Artificial Sequence
  Synthetic polynucleotide encoding artificial human antibody CDR-L1 region
agctccaacatcggggcaggttatgag

SEQ ID NO: 1611 - DNA, 18 bp, Artificial Sequence
  Synthetic polynucleotide encoding artificial human antibody CDR-L1 region
cagggcattagcagttat

SEQ ID NO: 1612 - DNA, 18 bp, Artificial Sequence
  Synthetic polynucleotide encoding artificial human antibody CDR-L1 region
cagggtattgacagctgg

SEQ ID NO: 1613 - DNA, 27 bp, Artificial Sequence
  Synthetic polynucleotide encoding artificial human antibody CDR-L1 region
agcagtgacgttggtggttataactat

SEQ ID NO: 1614 - DNA, 18 bp, Artificial Sequence
  Synthetic polynucleotide encoding artificial human antibody CDR-L1 region
aaattgggggataaatat

SEQ ID NO: 1615 - DNA, 27 bp, Artificial Sequence
  Synthetic polynucleotide encoding artificial human antibody CDR-L1 region
agctccaacatcggggcaggttatgat

SEQ ID NO: 1616 - DNA, 21 bp, Artificial Sequence
  Synthetic polynucleotide encoding artificial human antibody CDR-L1 region
cagagtgttagcagaaactac

SEQ ID NO: 1617 - DNA, 33 bp, Artificial Sequence; identical to SEQ ID NO: 1264
  Synthetic polynucleotide encoding artificial human antibody CDR-L1 region

SEQ ID NO: 1618 - DNA, 18 bp, Artificial Sequence
  Synthetic polynucleotide encoding artificial human antibody CDR-L1 region
cagggtattagcagctgg

SEQ ID NO: 1619 - DNA, 27 bp, Artificial Sequence
  Synthetic polynucleotide encoding artificial human antibody CDR-L1 region
actggagcagtcaccagtggttactat

SEQ ID NO: 1620 - DNA, 15 bp, Artificial Sequence
  Synthetic polynucleotide encoding artificial human antibody CDR-L1 region
cagagtgttagcagg

SEQ ID NO: 1621 - DNA, 36 bp, Artificial Sequence; identical to SEQ ID NO: 1290
  Synthetic polynucleotide encoding artificial human antibody CDR-L1 region

SEQ ID NO: 1622 - DNA, 18 bp, Artificial Sequence
  Synthetic polynucleotide encoding artificial human antibody CDR-L1 region
gagagtattggtggttgg

SEQ ID NO: 1623 - DNA, 18 bp, Artificial Sequence
  Synthetic polynucleotide encoding artificial human antibody CDR-L1 region
cagagtgttagcagcaac

SEQ ID NO: 1624 - DNA, 18 bp, Artificial Sequence
  Synthetic polynucleotide encoding artificial human antibody CDR-L1 region
gcattgccaaaaaaatat

SEQ ID NO: 1625 - DNA, 18 bp, Artificial Sequence
  Synthetic polynucleotide encoding artificial human antibody CDR-L1 region
aaattgggggataaatat

SEQ ID NO: 1626 - DNA, 18 bp, Artificial Sequence
  Synthetic polynucleotide encoding artificial human antibody CDR-L1 region
gcattgccaaagcaatat

SEQ ID NO: 1627 - DNA, 27 bp, Artificial Sequence
  Synthetic polynucleotide encoding artificial human antibody CDR-L1 region
agcggtgatgttgggaggtatgacctt

SEQ ID NO: 1628 - DNA, 21 bp, Artificial Sequence
  Synthetic polynucleotide encoding artificial human antibody CDR-L1 region
cagagtgttagcagcagctac

SEQ ID NO: 1629 - DNA, 18 bp, Artificial Sequence
  Synthetic polynucleotide encoding artificial human antibody CDR-L1 region
cagagtgttagcagcaac

SEQ ID NO: 1630 - DNA, 18 bp, Artificial Sequence
  Synthetic polynucleotide encoding artificial human antibody CDR-L1 region
aacatcggaagtaaaagt

SEQ ID NO: 1631 - DNA, 33 bp, Artificial Sequence
  Synthetic polynucleotide encoding artificial human antibody CDR-L1 region
cagagcctcctgcatagtaaaggatacaactat

SEQ ID NO: 1632 - DNA, 24 bp, Artificial Sequence
  Synthetic polynucleotide encoding artificial human antibody CDR-L1 region
agctccaacattgggaataattat

SEQ ID NO: 1633 - DNA, 24 bp, Artificial Sequence
  Synthetic polynucleotide encoding artificial human antibody CDR-L1 region
agtggcagcattgccagcaactat

SEQ ID NO: 1634 - DNA, 18 bp, Artificial Sequence
  Synthetic polynucleotide encoding artificial human antibody CDR-L1 region
aaattgggggataaatat

SEQ ID NO: 1635 - DNA, 24 bp, Artificial Sequence
  Synthetic polynucleotide encoding artificial human antibody CDR-L1 region
agctccaacatcggaagtaattat

SEQ ID NO: 1636 - DNA, 24 bp, Artificial Sequence
  Synthetic polynucleotide encoding artificial human antibody CDR-L1 region
agtggcagcattgccagcaactat

SEQ ID NO: 1637 - DNA, 18 bp, Artificial Sequence
  Synthetic polynucleotide encoding artificial human antibody CDR-L1 region
gtactggcaaaaaaatat

SEQ ID NO: 1638 - DNA, 18 bp, Artificial Sequence
  Synthetic polynucleotide encoding artificial human antibody CDR-L1 region
agcctcagaagctattat

SEQ ID NO: 1639 - DNA, 18 bp, Artificial Sequence
  Synthetic polynucleotide encoding artificial human antibody CDR-L1 region
aaattgggggataaatat

SEQ ID NO: 1640 - DNA, 18 bp, Artificial Sequence
  Synthetic polynucleotide encoding artificial human antibody CDR-L1 region
cagggtattggcagctgg

SEQ ID NO: 1641 - DNA, 24 bp, Artificial Sequence
  Synthetic polynucleotide encoding artificial human antibody CDR-L1 region
agctccaacattgggaataattat

SEQ ID NO: 1642 - DNA, 24 bp, Artificial Sequence
  Synthetic polynucleotide encoding artificial human antibody CDR-L1 region
agtggcagcattgccagcgacttt

SEQ ID NO: 1643 - DNA, 33 bp, Artificial Sequence; identical to SEQ ID NO: 1263
  Synthetic polynucleotide encoding artificial human antibody CDR-L1 region

SEQ ID NO: 1644 - DNA, 21 bp, Artificial Sequence
  Synthetic polynucleotide encoding artificial human antibody CDR-L1 region
cagagtgttagcagcaggcac

SEQ ID NO: 1645 - DNA, 27 bp, Artificial Sequence
  Synthetic polynucleotide encoding artificial human antibody CDR-L1 region
agcagtgacgttggtggttataactat

SEQ ID NO: 1646 - DNA, 18 bp, Artificial Sequence
  Synthetic polynucleotide encoding artificial human antibody CDR-L1 region
cgggccattagaaatgat

SEQ ID NO: 1647 - DNA, 24 bp, Artificial Sequence
  Synthetic polynucleotide encoding artificial human antibody CDR-L1 region
agctccaacattgggaataattat

SEQ ID NO: 1648 - DNA, 18 bp, Artificial Sequence
  Synthetic polynucleotide encoding artificial human antibody CDR-L1 region
agcctcagaagctattat

SEQ ID NO: 1649 - DNA, 18 bp, Artificial Sequence
  Synthetic polynucleotide encoding artificial human antibody CDR-L1 region
gcattgccaaagcaatat

SEQ ID NO: 1650 - DNA, 18 bp, Artificial Sequence
  Synthetic polynucleotide encoding artificial human antibody CDR-L1 region
cagggcattagaaatgat

SEQ ID NO: 1651 - DNA, 18 bp, Artificial Sequence
  Synthetic polynucleotide encoding artificial human antibody CDR-L1 region
cagagtattagtagctgg

SEQ ID NO: 1652 - DNA, 27 bp, Artificial Sequence
  Synthetic polynucleotide encoding artificial human antibody CDR-L1 region
agctccaacatcggggcaggttatgat

SEQ ID NO: 1653 - DNA, 33 bp, Artificial Sequence; identical to SEQ ID NO: 1264
  Synthetic polynucleotide encoding artificial human antibody CDR-L1 region

SEQ ID NO: 1654 - DNA, 27 bp, Artificial Sequence
  Synthetic polynucleotide encoding artificial human antibody CDR-L1 region
agcagtgacgttggtggttataactat

SEQ ID NO: 1655 - DNA, 18 bp, Artificial Sequence
  Synthetic polynucleotide encoding artificial human antibody CDR-L1 region
cagagtgttagcagcaac

SEQ ID NO: 1656 - DNA, 18 bp, Artificial Sequence
  Synthetic polynucleotide encoding artificial human antibody CDR-L1 region
cagagtgttagcagcaac

SEQ ID NO: 1657 - DNA, 18 bp, Artificial Sequence
  Synthetic polynucleotide encoding artificial human antibody CDR-L1 region
caggacattagcaactat

SEQ ID NO: 1658 - DNA, 24 bp, Artificial Sequence
  Synthetic polynucleotide encoding artificial human antibody CDR-L1 region
agctccaacattgggaataattat

SEQ ID NO: 1659 - DNA, 18 bp, Artificial Sequence
  Synthetic polynucleotide encoding artificial human antibody CDR-L1 region
cagagtattagtagctgg

SEQ ID NO: 1660 - DNA, 27 bp, Artificial Sequence
  Synthetic polynucleotide encoding artificial human antibody CDR-L1 region
actggagctgtcaccagtggtcattat

SEQ ID NO: 1661 - DNA, 33 bp, Artificial Sequence; identical to SEQ ID NO: 1263
  Synthetic polynucleotide encoding artificial human antibody CDR-L1 region

SEQ ID NO: 1662 - DNA, 18 bp, Artificial Sequence
  Synthetic polynucleotide encoding artificial human antibody CDR-L1 region
cagagtgttaacagcaac

SEQ ID NO: 1663 - DNA, 36 bp, Artificial Sequence; identical to SEQ ID NO: 1290
  Synthetic polynucleotide encoding artificial human antibody CDR-L1 region

SEQ ID NO: 1664 - DNA, 36 bp, Artificial Sequence; identical to SEQ ID NO: 1290
  Synthetic polynucleotide encoding artificial human antibody CDR-L1 region

SEQ ID NO: 1665 - DNA, 21 bp, Artificial Sequence
  Synthetic polynucleotide encoding artificial human antibody CDR-L1 region
agtgggcacagcagctacgcc

SEQ ID NO: 1666 - DNA, 27 bp, Artificial Sequence
  Synthetic polynucleotide encoding artificial human antibody CDR-L1 region
agcagtgacgttggtggttataactat

SEQ ID NO: 1667 - DNA, 18 bp, Artificial Sequence
  Synthetic polynucleotide encoding artificial human antibody CDR-L1 region
gcattgccaaagcaatat

SEQ ID NO: 1668 - DNA, 18 bp, Artificial Sequence
  Synthetic polynucleotide encoding artificial human antibody CDR-L1 region
caggacatttacgtttat

SEQ ID NO: 1669 - DNA, 18 bp, Artificial Sequence
  Synthetic polynucleotide encoding artificial human antibody CDR-L1 region
aacattggaagtaaaagt

SEQ ID NO: 1670 - DNA, 27 bp, Artificial Sequence
  Synthetic polynucleotide encoding artificial human antibody CDR-L1 region
agcagtgacgttggtggttataactat

SEQ ID NO: 1671 - DNA, 33 bp, Artificial Sequence; identical to SEQ ID NO: 1264
  Synthetic polynucleotide encoding artificial human antibody CDR-L1 region

SEQ ID NO: 1672 - DNA, 24 bp, Artificial Sequence
  Synthetic polynucleotide encoding artificial human antibody CDR-L1 region
agctccaacattgggaataattat

SEQ ID NO: 1673 - DNA, 18 bp, Artificial Sequence
  Synthetic polynucleotide encoding artificial human antibody CDR-L1 region
cagagtgttagcagcaac

SEQ ID NO: 1674 - DNA, 18 bp, Artificial Sequence
  Synthetic polynucleotide encoding artificial human antibody CDR-L1 region
cagagcattagcagctat

SEQ ID NO: 1675 - DNA, 18 bp, Artificial Sequence
  Synthetic polynucleotide encoding artificial human antibody CDR-L1 region
accattggaagtaaaatt

SEQ ID NO: 1676 - DNA, 18 bp, Artificial Sequence
  Synthetic polynucleotide encoding artificial human antibody CDR-L1 region
cagggtattagcagttat

SEQ ID NO: 1677 - DNA, 18 bp, Artificial Sequence
  Synthetic polynucleotide encoding artificial human antibody CDR-L1 region
gcattgccaaagcaatat

SEQ ID NO: 1678 - DNA, 24 bp, Artificial Sequence
  Synthetic polynucleotide encoding artificial human antibody CDR-L1 region
agctccaacatcggaagtaattat

SEQ ID NO: 1679 - DNA, 18 bp, Artificial Sequence
  Synthetic polynucleotide encoding artificial human antibody CDR-L1 region
cagagtgttagcagcaac

SEQ ID NO: 1680 - DNA, 33 bp, Artificial Sequence; identical to SEQ ID NO: 1339
  Synthetic polynucleotide encoding artificial human antibody CDR-L1 region

SEQ ID NO: 1681 - DNA, 33 bp, Artificial Sequence; identical to SEQ ID NO: 1264
  Synthetic polynucleotide encoding artificial human antibody CDR-L1 region

SEQ ID NO: 1682 - DNA, 18 bp, Artificial Sequence
  Synthetic polynucleotide encoding artificial human antibody CDR-L1 region
cagagcattagcagctat

SEQ ID NO: 1683 - DNA, 33 bp, Artificial Sequence; identical to SEQ ID NO: 1263
  Synthetic polynucleotide encoding artificial human antibody CDR-L1 region

SEQ ID NO: 1684 - DNA, 27 bp, Artificial Sequence
  Synthetic polynucleotide encoding artificial human antibody CDR-L1 region
agctccaacatcggggcgggttctgat

SEQ ID NO: 1685 - DNA, 24 bp, Artificial Sequence
  Synthetic polynucleotide encoding artificial human antibody CDR-L1 region
agctccaacatcggaagtaatact

SEQ ID NO: 1686 - DNA, 18 bp, Artificial Sequence
  Synthetic polynucleotide encoding artificial human antibody CDR-L1 region
aaattgggggataaatat

SEQ ID NO: 1687 - DNA, 24 bp, Artificial Sequence
  Synthetic polynucleotide encoding artificial human antibody CDR-L1 region
agctccaacatcggaagtaattat

SEQ ID NO: 1688 - DNA, 24 bp, Artificial Sequence
  Synthetic polynucleotide encoding artificial human antibody CDR-L1 region
agctccaacattgggaataattat

SEQ ID NO: 1689 - DNA, 18 bp, Artificial Sequence
  Synthetic polynucleotide encoding artificial human antibody CDR-L1 region
cagagtattagtagctgg

SEQ ID NO: 1690 - DNA, 24 bp, Artificial Sequence
  Synthetic polynucleotide encoding artificial human antibody CDR-L1 region
agctccaacatcggaagtaatact

SEQ ID NO: 1691 - DNA, 18 bp, Artificial Sequence
  Synthetic polynucleotide encoding artificial human antibody CDR-L1 region
cagggcattagcacttac

SEQ ID NO: 1692 - DNA, 18 bp, Artificial Sequence
  Synthetic polynucleotide encoding artificial human antibody CDR-L1 region
cagagtgttagtaacaac

SEQ ID NO: 1693 - DNA, 21 bp, Artificial Sequence
  Synthetic polynucleotide encoding artificial human antibody CDR-L1 region
cagagtgttagcagcagctac

SEQ ID NO: 1694 - DNA, 24 bp, Artificial Sequence
  Synthetic polynucleotide encoding artificial human antibody CDR-L1 region
agctccaacattgggaataattat

SEQ ID NO: 1695 - DNA, 24 bp, Artificial Sequence
  Synthetic polynucleotide encoding artificial human antibody CDR-L1 region
agctccaacatcggaagtaatact

SEQ ID NO: 1696 - DNA, 36 bp, Artificial Sequence; identical to SEQ ID NO: 1290
  Synthetic polynucleotide encoding artificial human antibody CDR-L1 region

SEQ ID NO: 1697 - DNA, 24 bp, Artificial Sequence
  Synthetic polynucleotide encoding artificial human antibody CDR-L1 region
agctccaacattgggaataattat

SEQ ID NO: 1698 - DNA, 27 bp, Artificial Sequence
  Synthetic polynucleotide encoding artificial human antibody CDR-L1 region
agcagtgacgttggtggttataactat

SEQ ID NO: 1699 - DNA, 18 bp, Artificial Sequence
  Synthetic polynucleotide encoding artificial human antibody CDR-L1 region
cagagcattagcagctat

SEQ ID NO: 1700 - DNA, 24 bp, Artificial Sequence
  Synthetic polynucleotide encoding artificial human antibody CDR-L1 region
agctccaacatcggaagtaatact

SEQ ID NO: 1701 - DNA, 18 bp, Artificial Sequence
  Synthetic polynucleotide encoding artificial human antibody CDR-L1 region
cagaatattggcaacttc

SEQ ID NO: 1702 - DNA, 27 bp, Artificial Sequence
  Synthetic polynucleotide encoding artificial human antibody CDR-L1 region
agcagtgacgttggtggttataactat

SEQ ID NO: 1703 - DNA, 24 bp, Artificial Sequence
  Synthetic polynucleotide encoding artificial human antibody CDR-L1 region
agctccaacatcggaagtaatact

SEQ ID NO: 1704 - DNA, 27 bp, Artificial Sequence
  Synthetic polynucleotide encoding artificial human antibody CDR-L1 region
agcagtgacgttggtggttataactat

SEQ ID NO: 1705 - DNA, 18 bp, Artificial Sequence
  Synthetic polynucleotide encoding artificial human antibody CDR-L1 region
cagagtattagtagctgg

SEQ ID NO: 1706 - DNA, 24 bp, Artificial Sequence
  Synthetic polynucleotide encoding artificial human antibody CDR-L1 region
cgctccaacatcggaagtaatttt

SEQ ID NO: 1707 - DNA, 18 bp, Artificial Sequence
  Synthetic polynucleotide encoding artificial human antibody CDR-L1 region
cagagtgttagcagctac

SEQ ID NO: 1708 - DNA, 27 bp, Artificial Sequence
  Synthetic polynucleotide encoding artificial human antibody CDR-L1 region
agcagtgatgttggtggttataactat

SEQ ID NO: 1709 - DNA, 18 bp, Artificial Sequence
  Synthetic polynucleotide encoding artificial human antibody CDR-L1 region
agcctcagaagctattat

SEQ ID NO: 1710 - DNA, 27 bp, Artificial Sequence
  Synthetic polynucleotide encoding artificial human antibody CDR-L1 region
agcagtgacgttggtggttataactat

SEQ ID NO: 1711 - DNA, 18 bp, Artificial Sequence
  Synthetic polynucleotide encoding artificial human antibody CDR-L1 region
aacattggaagtaaaagt

SEQ ID NO: 1712 - DNA, 21 bp, Artificial Sequence
  Synthetic polynucleotide encoding artificial human antibody CDR-L1 region
cagagtgttagcagcagcttc

SEQ ID NO: 1713 - DNA, 18 bp, Artificial Sequence
  Synthetic polynucleotide encoding artificial human antibody CDR-L1 region
aaattgggggataaatat

SEQ ID NO: 1714 - DNA, 18 bp, Artificial Sequence
  Synthetic polynucleotide encoding artificial human antibody CDR-L1 region
agcctcaaattctctttt

SEQ ID NO: 1715 - DNA, 18 bp, Artificial Sequence
  Synthetic polynucleotide encoding artificial human antibody CDR-L1 region
gagatcattggtaacacc

SEQ ID NO: 1716 - DNA, 21 bp, Artificial Sequence
  Synthetic polynucleotide encoding artificial human antibody CDR-L1 region
cagagtgttagcagcagctac

SEQ ID NO: 1717 - DNA, 18 bp, Artificial Sequence
  Synthetic polynucleotide encoding artificial human antibody CDR-L1 region
aacattggaagtaaaagt

SEQ ID NO: 1718 - DNA, 27 bp, Artificial Sequence
  Synthetic polynucleotide encoding artificial human antibody CDR-L1 region
agctccaacatcggggcaggttatgat

SEQ ID NO: 1719 - DNA, 24 bp, Artificial Sequence
  Synthetic polynucleotide encoding artificial human antibody CDR-L1 region
agctccaacatcggcagtagagct

SEQ ID NO: 1720 - DNA, 24 bp, Artificial Sequence
  Synthetic polynucleotide encoding artificial human antibody CDR-L1 region
agctccaccattggggataattat

SEQ ID NO: 1721 - DNA, 18 bp, Artificial Sequence
  Synthetic polynucleotide encoding artificial human antibody CDR-L1 region
acattggcgaagaaatat

SEQ ID NO: 1722 - DNA, 24 bp, Artificial Sequence
  Synthetic polynucleotide encoding artificial human antibody CDR-L1 region
agctccaacatcggaagtaatact

SEQ ID NO: 1723 - DNA, 18 bp, Artificial Sequence
  Synthetic polynucleotide encoding artificial human antibody CDR-L1 region
gcattgccaaagcaatat

SEQ ID NO: 1724 - DNA, 21 bp, Artificial Sequence
  Synthetic polynucleotide encoding artificial human antibody CDR-L1 region
cagagtgttagcagcagctac

SEQ ID NO: 1725 - DNA, 36 bp, Artificial Sequence
  Synthetic polynucleotide encoding artificial human antibody CDR-L1 region
cagagtattttatacacctccaacaataagaactac

SEQ ID NO: 1726 - DNA, 24 bp, Artificial Sequence
  Synthetic polynucleotide encoding artificial human antibody CDR-L1 region
agctccaacattgggaataattat

SEQ ID NO: 1727 - DNA, 21 bp, Artificial Sequence
  Synthetic polynucleotide encoding artificial human antibody CDR-L1 region
cagagtattagcagcagctac

SEQ ID NO: 1728 - DNA, 18 bp, Artificial Sequence
  Synthetic polynucleotide encoding artificial human antibody CDR-L1 region
cagagcattagcagctat

SEQ ID NO: 1729 - DNA, 18 bp, Artificial Sequence
  Synthetic polynucleotide encoding artificial human antibody CDR-L1 region
aacattggaagtaaaagt

SEQ ID NO: 1730 - DNA, 27 bp, Artificial Sequence
  Synthetic polynucleotide encoding artificial human antibody CDR-L1 region
tttggagctgtcaccagtggtcattat

SEQ ID NO: 1731 - DNA, 21 bp, Artificial Sequence
  Synthetic polynucleotide encoding artificial human antibody CDR-L1 region
cagagtgttagcagcagctac

SEQ ID NO: 1732 - DNA, 18 bp, Artificial Sequence
  Synthetic polynucleotide encoding artificial human antibody CDR-L1 region
cagagtgttagaagcaac

SEQ ID NO: 1733 - DNA, 18 bp, Artificial Sequence
  Synthetic polynucleotide encoding artificial human antibody CDR-L1 region
cagggcattagcaattat

SEQ ID NO: 1734 - DNA, 18 bp, Artificial Sequence
  Synthetic polynucleotide encoding artificial human antibody CDR-L1 region
cagagtattagtagctgg

SEQ ID NO: 1735 - DNA, 33 bp, Artificial Sequence; identical to SEQ ID NO: 1296
  Synthetic polynucleotide encoding artificial human antibody CDR-L1 region

SEQ ID NO: 1736 - DNA, 18 bp, Artificial Sequence
  Synthetic polynucleotide encoding artificial human antibody CDR-L1 region
aacattggaagtaaaagt

SEQ ID NO: 1737 - DNA, 18 bp, Artificial Sequence
  Synthetic polynucleotide encoding artificial human antibody CDR-L1 region
cagagcattagcagctat

SEQ ID NO: 1738 - DNA, 27 bp, Artificial Sequence
  Synthetic polynucleotide encoding artificial human antibody CDR-L1 region
agcagtgacgttggtggttataactat

SEQ ID NO: 1739 - DNA, 18 bp, Artificial Sequence
  Synthetic polynucleotide encoding artificial human antibody CDR-L1 region
cagagtgttagcagctac

SEQ ID NO: 1740 - DNA, 21 bp, Artificial Sequence
  Synthetic polynucleotide encoding artificial human antibody CDR-L1 region
cagactgttaatagcaactac

SEQ ID NO: 1741 - DNA, 33 bp, Artificial Sequence; identical to SEQ ID NO: 1263
  Synthetic polynucleotide encoding artificial human antibody CDR-L1 region

SEQ ID NO: 1742 - DNA, 24 bp, Artificial Sequence
  Synthetic polynucleotide encoding artificial human antibody CDR-L1 region
agtggcagcattgccagcaactat

SEQ ID NO: 1743 - DNA, 21 bp, Artificial Sequence
  Synthetic polynucleotide encoding artificial human antibody CDR-L1 region
cagagtgttagcagcagtttc

SEQ ID NO: 1744 - DNA, 33 bp, Artificial Sequence; identical to SEQ ID NO: 1263
  Synthetic polynucleotide encoding artificial human antibody CDR-L1 region

SEQ ID NO: 1745 - DNA, 18 bp, Artificial Sequence
  Synthetic polynucleotide encoding artificial human antibody CDR-L1 region
aaattgggggataaatat

SEQ ID NO: 1746 - DNA, 33 bp, Artificial Sequence; identical to SEQ ID NO: 1264
  Synthetic polynucleotide encoding artificial human antibody CDR-L1 region

SEQ ID NO: 1747 - DNA, 18 bp, Artificial Sequence
  Synthetic polynucleotide encoding artificial human antibody CDR-L1 region
aaattgggggataaatat

SEQ ID NO: 1748 - DNA, 18 bp, Artificial Sequence
  Synthetic polynucleotide encoding artificial human antibody CDR-L1 region
gacactggaagtcaaagt

SEQ ID NO: 1749 - DNA, 18 bp, Artificial Sequence
  Synthetic polynucleotide encoding artificial human antibody CDR-L1 region
cagagtgttaacagcaac

SEQ ID NO: 1750 - DNA, 21 bp, Artificial Sequence
  Synthetic polynucleotide encoding artificial human antibody CDR-L1 region
cagagtgttagcagcagctac

SEQ ID NO: 1751 - DNA, 18 bp, Artificial Sequence
  Synthetic polynucleotide encoding artificial human antibody CDR-L1 region
cagggcattagcaattat

SEQ ID NO: 1752 - DNA, 18 bp, Artificial Sequence
  Synthetic polynucleotide encoding artificial human antibody CDR-L1 region
cagagtgttagcagcaac

SEQ ID NO: 1753 - DNA, 18 bp, Artificial Sequence
  Synthetic polynucleotide encoding artificial human antibody CDR-L1 region
gcattgccaaagcaatat

SEQ ID NO: 1754 - DNA, 18 bp, Artificial Sequence
  Synthetic polynucleotide encoding artificial human antibody CDR-L1 region
cagagtgttagcagcaac

SEQ ID NO: 1755 - DNA, 18 bp, Artificial Sequence
  Synthetic polynucleotide encoding artificial human antibody CDR-L1 region
aacattggaagtaaaagt

SEQ ID NO: 1756 - DNA, 18 bp, Artificial Sequence
  Synthetic polynucleotide encoding artificial human antibody CDR-L1 region
cagagcattagcagctat

SEQ ID NO: 1757 - DNA, 24 bp, Artificial Sequence
  Synthetic polynucleotide encoding artificial human antibody CDR-L1 region
agtggcagcattgccagcaactat

SEQ ID NO: 1758 - DNA, 18 bp, Artificial Sequence
  Synthetic polynucleotide encoding artificial human antibody CDR-L1 region
gaggacatcggagaccat

SEQ ID NO: 1759 - DNA, 18 bp, Artificial Sequence
  Synthetic polynucleotide encoding artificial human antibody CDR-L1 region
gcattgccaaaaaaatat

SEQ ID NO: 1760 - DNA, 18 bp, Artificial Sequence
  Synthetic polynucleotide encoding artificial human antibody CDR-L1 region
cagagtattagaaactgg

SEQ ID NO: 1761 - DNA, 27 bp, Artificial Sequence
  Synthetic polynucleotide encoding artificial human antibody CDR-L1 region
accgatgacattcgtgattctaacttt

SEQ ID NO: 1762 - DNA, 18 bp, Artificial Sequence
  Synthetic polynucleotide encoding artificial human antibody CDR-L1 region
cagagtgttagcagcaac

SEQ ID NO: 1763 - DNA, 27 bp, Artificial Sequence
  Synthetic polynucleotide encoding artificial human antibody CDR-L1 region
agcagtgacgttggtggttataactat

SEQ ID NO: 1764 - DNA, 18 bp, Artificial Sequence
  Synthetic polynucleotide encoding artificial human antibody CDR-L1 region
cagggcattagcagtgct

SEQ ID NO: 1765 - DNA, 24 bp, Artificial Sequence
  Synthetic polynucleotide encoding artificial human antibody CDR-L1 region
agctccaacatcggaaggaattat

SEQ ID NO: 1766 - DNA, 24 bp, Artificial Sequence
  Synthetic polynucleotide encoding artificial human antibody CDR-L1 region
agctccaacatcggaagtaattat

SEQ ID NO: 1767 - DNA, 24 bp, Artificial Sequence
  Synthetic polynucleotide encoding artificial human antibody CDR-L1 region
agctccaacatcggaagtaattat

SEQ ID NO: 1768 - DNA, 24 bp, Artificial Sequence
  Synthetic polynucleotide encoding artificial human antibody CDR-L1 region
agctccaacatcggaagtaattat

SEQ ID NO: 1769 - DNA, 21 bp, Artificial Sequence
  Synthetic polynucleotide encoding artificial human antibody CDR-L1 region
cagagtgttagcagcagctac

SEQ ID NO: 1770 - DNA, 18 bp, Artificial Sequence
  Synthetic polynucleotide encoding artificial human antibody CDR-L1 region
cagggcattagcagttat

SEQ ID NO: 1771 - DNA, 27 bp, Artificial Sequence
  Synthetic polynucleotide encoding artificial human antibody CDR-L1 region
agcagtgacgttggtggttataactat

SEQ ID NO: 1772 - DNA, 18 bp, Artificial Sequence
  Synthetic polynucleotide encoding artificial human antibody CDR-L1 region
cagggcattagcaattat

SEQ ID NO: 1773 - DNA, 18 bp, Artificial Sequence
  Synthetic polynucleotide encoding artificial human antibody CDR-L1 region
caggacattagcaactat

SEQ ID NO: 1774 - DNA, 18 bp, Artificial Sequence
  Synthetic polynucleotide encoding artificial human antibody CDR-L1 region
gcattgccaaagcaatat

SEQ ID NO: 1775 - DNA, 33 bp, Artificial Sequence; identical to SEQ ID NO: 1263
  Synthetic polynucleotide encoding artificial human antibody CDR-L1 region

SEQ ID NO: 1776 - DNA, 18 bp, Artificial Sequence
  Synthetic polynucleotide encoding artificial human antibody CDR-L1 region
aacattggaagtaaaagt

SEQ ID NO: 1777 - DNA, 18 bp, Artificial Sequence
  Synthetic polynucleotide encoding artificial human antibody CDR-L1 region
cagagtgttagcagctac

SEQ ID NO: 1778 - DNA, 18 bp, Artificial Sequence
  Synthetic polynucleotide encoding artificial human antibody CDR-L1 region
cagagtattagtagctgg

SEQ ID NO: 1779 - DNA, 18 bp, Artificial Sequence
  Synthetic polynucleotide encoding artificial human antibody CDR-L1 region
aacattggaagtaaaagt

SEQ ID NO: 1780 - DNA, 18 bp, Artificial Sequence
  Synthetic polynucleotide encoding artificial human antibody CDR-L1 region
cagtacattaggaactat

SEQ ID NO: 1781 - DNA, 18 bp, Artificial Sequence
  Synthetic polynucleotide encoding artificial human antibody CDR-L1 region
cagagtgttagcagctac

SEQ ID NO: 1782 - DNA, 33 bp, Artificial Sequence; identical to SEQ ID NO: 1339
  Synthetic polynucleotide encoding artificial human antibody CDR-L1 region

SEQ ID NO: 1783 - DNA, 33 bp, Artificial Sequence; identical to SEQ ID NO: 1263
  Synthetic polynucleotide encoding artificial human antibody CDR-L1 region

SEQ ID NO: 1784 - DNA, 18 bp, Artificial Sequence
  Synthetic polynucleotide encoding artificial human antibody CDR-L1 region
cagagcattagcagctat

SEQ ID NO: 1785 - DNA, 18 bp, Artificial Sequence
  Synthetic polynucleotide encoding artificial human antibody CDR-L1 region
aaattgggggataaatat

SEQ ID NO: 1786 - DNA, 18 bp, Artificial Sequence
  Synthetic polynucleotide encoding artificial human antibody CDR-L1 region
aacattggaagtaaaagt

SEQ ID NO: 1787 - DNA, 24 bp, Artificial Sequence
  Synthetic polynucleotide encoding artificial human antibody CDR-L1 region
agctccaacatcggaagtaattat

SEQ ID NO: 1788 - DNA, 18 bp, Artificial Sequence
  Synthetic polynucleotide encoding artificial human antibody CDR-L1 region
cagggcattagcaattat

SEQ ID NO: 1789 - DNA, 18 bp, Artificial Sequence
  Synthetic polynucleotide encoding artificial human antibody CDR-L1 region
caggacattagcaactat

SEQ ID NO: 1790 - DNA, 18 bp, Artificial Sequence
  Synthetic polynucleotide encoding artificial human antibody CDR-L1 region
cagagtgttagcagcaac

SEQ ID NO: 1791 - DNA, 18 bp, Artificial Sequence
  Synthetic polynucleotide encoding artificial human antibody CDR-L1 region
cagggtattagcagctgg

SEQ ID NO: 1792 - DNA, 21 bp, Artificial Sequence
  Synthetic polynucleotide encoding artificial human antibody CDR-L1 region
cagagtgttagcagcagctac

SEQ ID NO: 1793 - DNA, 18 bp, Artificial Sequence
  Synthetic polynucleotide encoding artificial human antibody CDR-L1 region
gcattgccaaagcaatat

SEQ ID NO: 1794 - DNA, 18 bp, Artificial Sequence
  Synthetic polynucleotide encoding artificial human antibody CDR-L1 region
caggacattagcaactat

SEQ ID NO: 1795 - DNA, 27 bp, Artificial Sequence
  Synthetic polynucleotide encoding artificial human antibody CDR-L1 region
agcagtgatgttgggagttataacctt

SEQ ID NO: 1796 - DNA, 24 bp, Artificial Sequence
  Synthetic polynucleotide encoding artificial human antibody CDR-L1 region
agtggcagcattgccagcaactat

SEQ ID NO: 1797 - DNA, 18 bp, Artificial Sequence
  Synthetic polynucleotide encoding artificial human antibody CDR-L1 region
caggacattagcaaccat

SEQ ID NO: 1798 - DNA, 18 bp, Artificial Sequence
  Synthetic polynucleotide encoding artificial human antibody CDR-L1 region
cagggcattagaaatgat

SEQ ID NO: 1799 - DNA, 33 bp, Artificial Sequence; identical to SEQ ID NO: 1263
  Synthetic polynucleotide encoding artificial human antibody CDR-L1 region

SEQ ID NO: 1800 - DNA, 18 bp, Artificial Sequence
  Synthetic polynucleotide encoding artificial human antibody CDR-L1 region
caggacattgacaaccat

SEQ ID NO: 1801 - DNA, 18 bp, Artificial Sequence
  Synthetic polynucleotide encoding artificial human antibody CDR-L1 region
cagagcattagtaggtct

SEQ ID NO: 1802 - DNA, 21 bp, Artificial Sequence
  Synthetic polynucleotide encoding artificial human antibody CDR-L1 region
cagagtcttaccggaaactac

SEQ ID NO: 1803 - DNA, 18 bp, Artificial Sequence
  Synthetic polynucleotide encoding artificial human antibody CDR-L1 region
aacattggaagtaaaagt

SEQ ID NO: 1804 - DNA, 18 bp, Artificial Sequence
  Synthetic polynucleotide encoding artificial human antibody CDR-L1 region
aaattgggggataaatat

SEQ ID NO: 1805 - DNA, 18 bp, Artificial Sequence
  Synthetic polynucleotide encoding artificial human antibody CDR-L1 region
caggacattaagaactat

SEQ ID NO: 1806 - DNA, 18 bp, Artificial Sequence
  Synthetic polynucleotide encoding artificial human antibody CDR-L1 region
agcctcagaagctattat

SEQ ID NO: 1807 - DNA, 18 bp, Artificial Sequence
  Synthetic polynucleotide encoding artificial human antibody CDR-L1 region
cagagtgttagaagcaac

SEQ ID NO: 1808 - DNA, 33 bp, Artificial Sequence; identical to SEQ ID NO: 1339
  Synthetic polynucleotide encoding artificial human antibody CDR-L1 region

SEQ ID NO: 1809 - DNA, 18 bp, Artificial Sequence
  Synthetic polynucleotide encoding artificial human antibody CDR-L1 region
aaattgggggataaatat

SEQ ID NO: 1810 - DNA, 24 bp, Artificial Sequence
  Synthetic polynucleotide encoding artificial human antibody CDR-L1 region
agatccaacatcggaaacagtttt

SEQ ID NO: 1811 - DNA, 21 bp, Artificial Sequence
  Synthetic polynucleotide encoding artificial human antibody CDR-L1 region
cagagtgttcccaacaacgac

SEQ ID NO: 1812 - DNA, 18 bp, Artificial Sequence
  Synthetic polynucleotide encoding artificial human antibody CDR-L1 region
cagggtattagcacctgg

SEQ ID NO: 1813 - DNA, 21 bp, Artificial Sequence
  Synthetic polynucleotide encoding artificial human antibody CDR-L1 region
cagagtgttaccaccacctac

SEQ ID NO: 1814 - DNA, 21 bp, Artificial Sequence
  Synthetic polynucleotide encoding artificial human antibody CDR-L1 region
cagagtgttagcagcagctac

SEQ ID NO: 1815 - DNA, 21 bp, Artificial Sequence
  Synthetic polynucleotide encoding artificial human antibody CDR-L1 region
cagagtgttagcagcagctac

SEQ ID NO: 1816 - DNA, 18 bp, Artificial Sequence
  Synthetic polynucleotide encoding artificial human antibody CDR-L1 region
cagagtattactacttgg

SEQ ID NO: 1817 - DNA, 24 bp, Artificial Sequence
  Synthetic polynucleotide encoding artificial human antibody CDR-L1 region
agctccaacatcggaagtggtact

SEQ ID NO: 1818 - DNA, 18 bp, Artificial Sequence
  Synthetic polynucleotide encoding artificial human antibody CDR-L1 region
cagggcatcagcagtact

SEQ ID NO: 1819 - DNA, 18 bp, Artificial Sequence
  Synthetic polynucleotide encoding artificial human antibody CDR-L1 region
cagggtattgccacccac

SEQ ID NO: 1820 - DNA, 18 bp, Artificial Sequence
  Synthetic polynucleotide encoding artificial human antibody CDR-L1 region
cagagtgttggccactac

SEQ ID NO: 1821 - DNA, 18 bp, Artificial Sequence
  Synthetic polynucleotide encoding artificial human antibody CDR-L1 region
agcctcagaagtggttat

SEQ ID NO: 1822 - DNA, 33 bp, Artificial Sequence
  Synthetic polynucleotide encoding artificial human antibody CDR-L1 region
cgcagcctcgtgtacagtgatggaaatacccac

SEQ ID NO: 1823 - DNA, 21 bp, Artificial Sequence
  Synthetic polynucleotide encoding artificial human antibody CDR-L1 region
cagagtgttaacatcaggttt

SEQ ID NO: 1824 - DNA, 18 bp, Artificial Sequence
  Synthetic polynucleotide encoding artificial human antibody CDR-L1 region
cggaccattagcaattat

SEQ ID NO: 1825 - DNA, 33 bp, Artificial Sequence; identical to SEQ ID NO: 1296
  Synthetic polynucleotide encoding artificial human antibody CDR-L1 region

SEQ ID NO: 1826 - DNA, 18 bp, Artificial Sequence
  Synthetic polynucleotide encoding artificial human antibody CDR-L1 region
cagggcatttccaagtat

SEQ ID NO: 1827 - DNA, 27 bp, Artificial Sequence
  Synthetic polynucleotide encoding artificial human antibody CDR-L1 region
agaagtgacgtgggtggttataagtat

SEQ ID NO: 1828 - DNA, 18 bp, Artificial Sequence
  Synthetic polynucleotide encoding artificial human antibody CDR-L1 region
caggatattaggaattat

SEQ ID NO: 1829 - DNA, 18 bp, Artificial Sequence
  Synthetic polynucleotide encoding artificial human antibody CDR-L1 region
cagagtgttaacagacac

SEQ ID NO: 1830 - DNA, 33 bp, Artificial Sequence
  Synthetic polynucleotide encoding artificial human antibody CDR-L1 region
cagagtctcctaaaaagtgatggataccactat

SEQ ID NO: 1831 - DNA, 27 bp, Artificial Sequence
  Synthetic polynucleotide encoding artificial human antibody CDR-L1 region
actggaggtgtcaccagtggtcatatt

SEQ ID NO: 1832 - DNA, 18 bp, Artificial Sequence
  Synthetic polynucleotide encoding artificial human antibody CDR-L1 region
cagagtattgctaattat

SEQ ID NO: 1833 - DNA, 27 bp, Artificial Sequence
  Synthetic polynucleotide encoding artificial human antibody CDR-L1 region
tctggctcagtctctactaataacttc

SEQ ID NO: 1834 - DNA, 27 bp, Artificial Sequence
  Synthetic polynucleotide encoding artificial human antibody CDR-L1 region
agcagtgacgttggtggttacaattat

SEQ ID NO: 1835 - DNA, 18 bp, Artificial Sequence
  Synthetic polynucleotide encoding artificial human antibody CDR-L1 region
cagagcattagcagctat

SEQ ID NO: 1836 - DNA, 33 bp, Artificial Sequence
  Synthetic polynucleotide encoding artificial human antibody CDR-L1 region
cagagtctcctgcacagtaatggatacaacttt

SEQ ID NO: 1837 - DNA, 18 bp, Artificial Sequence
  Synthetic polynucleotide encoding artificial human antibody CDR-L1 region
gagaatgttatcaacaac

SEQ ID NO: 1838 - DNA, 18 bp, Artificial Sequence
  Synthetic polynucleotide encoding artificial human antibody CDR-L1 region
agcctcagaagctattat

SEQ ID NO: 1839 - DNA, 18 bp, Artificial Sequence
  Synthetic polynucleotide encoding artificial human antibody CDR-L1 region
aacattggaaggaaaagt

SEQ ID NO: 1840 - DNA, 33 bp, Artificial Sequence; identical to SEQ ID NO: 1264
  Synthetic polynucleotide encoding artificial human antibody CDR-L1 region

SEQ ID NO: 1841 - DNA, 24 bp, Artificial Sequence
  Synthetic polynucleotide encoding artificial human antibody CDR-L1 region
agttccaatattgggaataattat

SEQ ID NO: 1842 - DNA, 18 bp, Artificial Sequence
  Synthetic polynucleotide encoding artificial human antibody CDR-L1 region
cagagtattaacaccgac

SEQ ID NO: 1843 - DNA, 18 bp, Artificial Sequence
  Synthetic polynucleotide encoding artificial human antibody CDR-L1 region
aaattgggggataaatat

SEQ ID NO: 1844 - DNA, 21 bp, Artificial Sequence
  Synthetic polynucleotide encoding artificial human antibody CDR-L1 region
cagagtgttagcagcagctac

SEQ ID NO: 1845 - DNA, 18 bp, Artificial Sequence
  Synthetic polynucleotide encoding artificial human antibody CDR-L1 region
cagagtgttagcagctac

SEQ ID NO: 1846 - DNA, 33 bp, Artificial Sequence
  Synthetic polynucleotide encoding artificial human antibody CDR-L1 region
cagagcctcctgcatagaaatggatacaactat

SEQ ID NO: 1847 - DNA, 18 bp, Artificial Sequence
  Synthetic polynucleotide encoding artificial human antibody CDR-L1 region
cagagtgttagcagcaac

SEQ ID NO: 1848 - DNA, 18 bp, Artificial Sequence
  Synthetic polynucleotide encoding artificial human antibody CDR-L1 region
cagagtgttagcagcaac

SEQ ID NO: 1849 - DNA, 24 bp, Artificial Sequence
  Synthetic polynucleotide encoding artificial human antibody CDR-L1 region
agctccaacatcgaaaatcataat

SEQ ID NO: 1850 - DNA, 18 bp, Artificial Sequence
  Synthetic polynucleotide encoding artificial human antibody CDR-L1 region
gcattgtcaaagcaatat

SEQ ID NO: 1851 - DNA, 24 bp, Artificial Sequence
  Synthetic polynucleotide encoding artificial human antibody CDR-L1 region
agtggcagcattgccagcaactat

SEQ ID NO: 1852 - DNA, 27 bp, Artificial Sequence
  Synthetic polynucleotide encoding artificial human antibody CDR-L1 region
agctccaacatcggggcaggttatgat

SEQ ID NO: 1853 - DNA, 21 bp, Artificial Sequence
  Synthetic polynucleotide encoding artificial human antibody CDR-L1 region
agtgggcgctggaactacgcc

SEQ ID NO: 1854 - DNA, 33 bp, Artificial Sequence; identical to SEQ ID NO: 1264
  Synthetic polynucleotide encoding artificial human antibody CDR-L1 region

SEQ ID NO: 1855 - DNA, 18 bp, Artificial Sequence
  Synthetic polynucleotide encoding artificial human antibody CDR-L1 region
cagggcattgccgattct

SEQ ID NO: 1856 - DNA, 18 bp, Artificial Sequence
  Synthetic polynucleotide encoding artificial human antibody CDR-L1 region
cagggcattggaactgat

SEQ ID NO: 1857 - DNA, 21 bp, Artificial Sequence
  Synthetic polynucleotide encoding artificial human antibody CDR-L1 region
cagactgttagaaccagctac

SEQ ID NO: 1858 - DNA, 18 bp, Artificial Sequence
  Synthetic polynucleotide encoding artificial human antibody CDR-L1 region
cagagcattagcagctat

SEQ ID NO: 1859 - DNA, 21 bp, Artificial Sequence
  Synthetic polynucleotide encoding artificial human antibody CDR-L1 region
cagagtgttggcagttccttc

SEQ ID NO: 1860 - DNA, 21 bp, Artificial Sequence
  Synthetic polynucleotide encoding artificial human antibody CDR-L1 region
cagagtgttagcagcaactac

SEQ ID NO: 1861 - DNA, 18 bp, Artificial Sequence
  Synthetic polynucleotide encoding artificial human antibody CDR-L1 region
cagagtgttagcagcaac

SEQ ID NO: 1862 - DNA, 18 bp, Artificial Sequence
  Synthetic polynucleotide encoding artificial human antibody CDR-L1 region
cagagcattagctactct

SEQ ID NO: 1863 - DNA, 18 bp, Artificial Sequence
  Synthetic polynucleotide encoding artificial human antibody CDR-L1 region
cagagtattagtagctgg

SEQ ID NO: 1864 - DNA, 18 bp, Artificial Sequence
  Synthetic polynucleotide encoding artificial human antibody CDR-L1 region
cagagtattagtaagtgg

SEQ ID NO: 1865 - DNA, 18 bp, Artificial Sequence
  Synthetic polynucleotide encoding artificial human antibody CDR-L1 region
cagaccattaactcctat

SEQ ID NO: 1866 - DNA, 18 bp, Artificial Sequence
  Synthetic polynucleotide encoding artificial human antibody CDR-L1 region
aacattggaagtaaaagt

SEQ ID NO: 1867 - DNA, 27 bp, Artificial Sequence
  Synthetic polynucleotide encoding artificial human antibody CDR-L1 region
agcagtgacgttggtggttataactat

SEQ ID NO: 1868 - DNA, 18 bp, Artificial Sequence
  Synthetic polynucleotide encoding artificial human antibody CDR-L1 region
aaattgggggataaatat

SEQ ID NO: 1869 - DNA, 18 bp, Artificial Sequence
  Synthetic polynucleotide encoding artificial human antibody CDR-L1 region
accctcagaacttcttat

SEQ ID NO: 1870 - DNA, 18 bp, Artificial Sequence
  Synthetic polynucleotide encoding artificial human antibody CDR-L1 region
gcattgccaaagcaatat

SEQ ID NO: 1871 - DNA, 36 bp, Artificial Sequence
  Synthetic polynucleotide encoding artificial human antibody CDR-L1 region
cagagtattttatacagctccaacaataagaactac

SEQ ID NO: 1872 - DNA, 24 bp, Artificial Sequence
  Synthetic polynucleotide encoding artificial human antibody CDR-L1 region
agctccaacattgggaatgattat

SEQ ID NO: 1873 - DNA, 27 bp, Artificial Sequence
  Synthetic polynucleotide encoding artificial human antibody CDR-L1 region
tctggctcagtctctactagttactac

SEQ ID NO: 1874 - DNA, 18 bp, Artificial Sequence
  Synthetic polynucleotide encoding artificial human antibody CDR-L1 region
aaattggggattaaatat

SEQ ID NO: 1875 - DNA, 21 bp, Artificial Sequence
  Synthetic polynucleotide encoding artificial human antibody CDR-L1 region
agcggctatagtaattataaa

SEQ ID NO: 1876 - DNA, 18 bp, Artificial Sequence
  Synthetic polynucleotide encoding artificial human antibody CDR-L1 region
cagagtgttggtttctgg

SEQ ID NO: 1877 - DNA, 27 bp, Artificial Sequence
  Synthetic polynucleotide encoding artificial human antibody CDR-L1 region
agaagtgacgttggtgcttataactct

SEQ ID NO: 1878 - DNA, 27 bp, Artificial Sequence
  Synthetic polynucleotide encoding artificial human antibody CDR-L1 region
agctccaacatcggggcaccttatgat

SEQ ID NO: 1879 - DNA, 27 bp, Artificial Sequence
  Synthetic polynucleotide encoding artificial human antibody CDR-L1 region
agcttcaacatcggggcaggttatgat

SEQ ID NO: 1880 - DNA, 27 bp, Artificial Sequence
  Synthetic polynucleotide encoding artificial human antibody CDR-L1 region
actggacctgtcacctttggtcattac

SEQ ID NO: 1881 - DNA, 33 bp, Artificial Sequence; identical to SEQ ID NO: 1264
  Synthetic polynucleotide encoding artificial human antibody CDR-L1 region

SEQ ID NO: 1882 - DNA, 18 bp, Artificial Sequence
  Synthetic polynucleotide encoding artificial human antibody CDR-L1 region
caaagtgttagaagccac

SEQ ID NO: 1883 - DNA, 18 bp, Artificial Sequence
  Synthetic polynucleotide encoding artificial human antibody CDR-L1 region
aagttggcgactaaatat

SEQ ID NO: 1884 - DNA, 18 bp, Artificial Sequence
  Synthetic polynucleotide encoding artificial human antibody CDR-L1 region
ctgagcattagcagccat

SEQ ID NO: 1885 - DNA, 18 bp, Artificial Sequence
  Synthetic polynucleotide encoding artificial human antibody CDR-L1 region
agcctcagaagttattat

SEQ ID NO: 1886 - DNA, 18 bp, Artificial Sequence
  Synthetic polynucleotide encoding artificial human antibody CDR-L1 region
agcctcagaagttattat

SEQ ID NO: 1887 - DNA, 18 bp, Artificial Sequence
  Synthetic polynucleotide encoding artificial human antibody CDR-L1 region
cagactattagcagcacc

SEQ ID NO: 1888 - DNA, 18 bp, Artificial Sequence
  Synthetic polynucleotide encoding artificial human antibody CDR-L1 region
caattgggagataaattt

SEQ ID NO: 1889 - DNA, 18 bp, Artificial Sequence
  Synthetic polynucleotide encoding artificial human antibody CDR-L1 region
cagggcattagaaatggt

SEQ ID NO: 1890 - DNA, 18 bp, Artificial Sequence
  Synthetic polynucleotide encoding artificial human antibody CDR-L1 region
cagggcattagaaatgct

SEQ ID NO: 1891 - DNA, 18 bp, Artificial Sequence
  Synthetic polynucleotide encoding artificial human antibody CDR-L1 region
aatttggggaataggtat

SEQ ID NO: 1892 - DNA, 27 bp, Artificial Sequence
  Synthetic polynucleotide encoding artificial human antibody CDR-L1 region
agcagtgatgttgggagttataacctt

SEQ ID NO: 1893 - DNA, 21 bp, Artificial Sequence
  Synthetic polynucleotide encoding artificial human antibody CDR-L1 region
agtagacactttaattacgcc

SEQ ID NO: 1894 - DNA, 18 bp, Artificial Sequence
  Synthetic polynucleotide encoding artificial human antibody CDR-L1 region
cagagtgttggcgacaac

SEQ ID NO: 1895 - DNA, 36 bp, Artificial Sequence
  Synthetic polynucleotide encoding artificial human antibody CDR-L1 region
cagagtgttttatacaggtccaacaataagaactac

SEQ ID NO: 1896 - DNA, 18 bp, Artificial Sequence
  Synthetic polynucleotide encoding artificial human antibody CDR-L1 region
cagagcattagcagctat

SEQ ID NO: 1897 - DNA, 18 bp, Artificial Sequence
  Synthetic polynucleotide encoding artificial human antibody CDR-L1 region
cagagtgttagcagcaac

SEQ ID NO: 1898 - DNA, 27 bp, Artificial Sequence
  Synthetic polynucleotide encoding artificial human antibody CDR-L1 region
agctccaacatcggggcaggttatgat

SEQ ID NO: 1899 - DNA, 21 bp, Artificial Sequence
  Synthetic polynucleotide encoding artificial human antibody CDR-L1 region
cagtttgttcgcggcaactac

SEQ ID NO: 1900 - DNA, 24 bp, Artificial Sequence
  Synthetic polynucleotide encoding artificial human antibody CDR-L1 region
agtttcaacattgggaataattat

SEQ ID NO: 1901 - DNA, 27 bp, Artificial Sequence
  Synthetic polynucleotide encoding artificial human antibody CDR-L1 region
agcagtgacgttggtgtttttgactat

SEQ ID NO: 1902 - DNA, 18 bp, Artificial Sequence
  Synthetic polynucleotide encoding artificial human antibody CDR-L1 region
cagactataagcaacttt

SEQ ID NO: 1903 - DNA, 36 bp, Artificial Sequence
  Synthetic polynucleotide encoding artificial human antibody CDR-L1 region
cagagtgtgttctacagtcccaataataagaacttc

SEQ ID NO: 1904 - DNA, 36 bp, Artificial Sequence; identical to SEQ ID NO: 1290
  Synthetic polynucleotide encoding artificial human antibody CDR-L1 region

SEQ ID NO: 1905 - DNA, 21 bp, Artificial Sequence
  Synthetic polynucleotide encoding artificial human antibody CDR-L1 region
cagaatgtcggcagcagctcc

SEQ ID NO: 1906 - DNA, 18 bp, Artificial Sequence
  Synthetic polynucleotide encoding artificial human antibody CDR-L1 region
aacattggaaatacagct

SEQ ID NO: 1907 - DNA, 24 bp, Artificial Sequence
  Synthetic polynucleotide encoding artificial human antibody CDR-L1 region
agttccaacatcggaagtcatgct

SEQ ID NO: 1908 - DNA, 27 bp, Artificial Sequence
  Synthetic polynucleotide encoding artificial human antibody CDR-L1 region
tctggctcagtctctagtagacactac

SEQ ID NO: 1909 - DNA, 18 bp, Artificial Sequence
  Synthetic polynucleotide encoding artificial human antibody CDR-L1 region
caggacattggcaagtat

SEQ ID NO: 1910 - DNA, 18 bp, Artificial Sequence
  Synthetic polynucleotide encoding artificial human antibody CDR-L1 region
aaattgggggataaatat

SEQ ID NO: 1911 - DNA, 18 bp, Artificial Sequence
  Synthetic polynucleotide encoding artificial human antibody CDR-L1 region
aaattggaagattcatat

SEQ ID NO: 1912 - DNA, 27 bp, Artificial Sequence
  Synthetic polynucleotide encoding artificial human antibody CDR-L1 region
agcagtgacgttggtgattataagtat

SEQ ID NO: 1913 - DNA, 18 bp, Artificial Sequence
  Synthetic polynucleotide encoding artificial human antibody CDR-L1 region
caaagaattaataggaac

SEQ ID NO: 1914 - DNA, 18 bp, Artificial Sequence
  Synthetic polynucleotide encoding artificial human antibody CDR-L1 region
cagaacattgagacctat

SEQ ID NO: 1915 - DNA, 18 bp, Artificial Sequence
  Synthetic polynucleotide encoding artificial human antibody CDR-L1 region
gagggtcttggcaactgg

SEQ ID NO: 1916 - DNA, 27 bp, Artificial Sequence
  Synthetic polynucleotide encoding artificial human antibody CDR-L1 region
agcagtgacgttggtggttataactat

SEQ ID NO: 1917 - DNA, 36 bp, Artificial Sequence
  Synthetic polynucleotide encoding artificial human antibody CDR-L1 region
cagagtgttttgtacagccccaacaataagaactac

SEQ ID NO: 1918 - DNA, 18 bp, Artificial Sequence
  Synthetic polynucleotide encoding artificial human antibody CDR-L1 region
gactttgaaagtcaaccc

SEQ ID NO: 1919 - DNA, 18 bp, Artificial Sequence
  Synthetic polynucleotide encoding artificial human antibody CDR-L1 region
cagagtattagtagctgg

SEQ ID NO: 1920 - DNA, 18 bp, Artificial Sequence
  Synthetic polynucleotide encoding artificial human antibody CDR-L1 region
aacattggaactcacagt

SEQ ID NO: 1921 - DNA, 24 bp, Artificial Sequence
  Synthetic polynucleotide encoding artificial human antibody CDR-L1 region
agtgactacattggcaacttctat

SEQ ID NO: 1922 - DNA, 18 bp, Artificial Sequence
  Synthetic polynucleotide encoding artificial human antibody CDR-L1 region
cagagtgttaccaccaat

SEQ ID NO: 1923 - DNA, 18 bp, Artificial Sequence
  Synthetic polynucleotide encoding artificial human antibody CDR-L1 region
cagagtgttaccacggag

SEQ ID NO: 1924 - DNA, 27 bp, Artificial Sequence
  Synthetic polynucleotide encoding artificial human antibody CDR-L1 region
agcagtgacgttggtggttataattat

SEQ ID NO: 1925 - DNA, 18 bp, Artificial Sequence
  Synthetic polynucleotide encoding artificial human antibody CDR-L1 region
cagcgcgttattggcagt

SEQ ID NO: 1926 - DNA, 18 bp, Artificial Sequence
  Synthetic polynucleotide encoding artificial human antibody CDR-L1 region
gcattgccaaaaaaatat

SEQ ID NO: 1927 - DNA, 21 bp, Artificial Sequence
  Synthetic polynucleotide encoding artificial human antibody CDR-L1 region
agtgggcacagtgtctacagc

SEQ ID NO: 1928 - DNA, 21 bp, Artificial Sequence
  Synthetic polynucleotide encoding artificial human antibody CDR-L1 region
cagagtattgccagcaactgg

SEQ ID NO: 1929 - DNA, 27 bp, Artificial Sequence
  Synthetic polynucleotide encoding artificial human antibody CDR-L1 region
agcagtgatgttggcaattatgacctt

SEQ ID NO: 1930 - DNA, 18 bp, Artificial Sequence
  Synthetic polynucleotide encoding artificial human antibody CDR-L1 region
cagagtattagtagctgg

SEQ ID NO: 1931 - DNA, 18 bp, Artificial Sequence
  Synthetic polynucleotide encoding artificial human antibody CDR-L1 region
cagagtgttggcaactac

SEQ ID NO: 1932 - DNA, 18 bp, Artificial Sequence
  Synthetic polynucleotide encoding artificial human antibody CDR-L1 region
cagagtgttagccgcaac

SEQ ID NO: 1933 - DNA, 33 bp, Artificial Sequence
  Synthetic polynucleotide encoding artificial human antibody CDR-L1 region
cagagcctcctgaatactgatgggaagacttat

SEQ ID NO: 1934 - DNA, 18 bp, Artificial Sequence
  Synthetic polynucleotide encoding artificial human antibody CDR-L1 region
gaggacattgacgatcgt

SEQ ID NO: 1935 - DNA, 21 bp, Artificial Sequence
  Synthetic polynucleotide encoding artificial human antibody CDR-L1 region
cagagtgttagcagcagctac

SEQ ID NO: 1936 - DNA, 18 bp, Artificial Sequence
  Synthetic polynucleotide encoding artificial human antibody CDR-L1 region
cagagtgttagcagctac

SEQ ID NO: 1937 - DNA, 18 bp, Artificial Sequence
  Synthetic polynucleotide encoding artificial human antibody CDR-L1 region
cagagtgttagcagcaac

SEQ ID NO: 1938 - DNA, 18 bp, Artificial Sequence
  Synthetic polynucleotide encoding artificial human antibody CDR-L1 region
aacattgcaagtaaaagt

SEQ ID NO: 1939 - DNA, 18 bp, Artificial Sequence
  Synthetic polynucleotide encoding artificial human antibody CDR-L1 region
cacagtgttgacaattat

SEQ ID NO: 1940 - DNA, 21 bp, Artificial Sequence
  Synthetic polynucleotide encoding artificial human antibody CDR-L1 region
cagtttgttcgcggcaactac

SEQ ID NO: 1941 - DNA, 18 bp, Artificial Sequence
  Synthetic polynucleotide encoding artificial human antibody CDR-L1 region
gagaacatcttcgagcta

SEQ ID NO: 1942 - DNA, 24 bp, Artificial Sequence
  Synthetic polynucleotide encoding artificial human antibody CDR-L1 region
aggtccaacatcgcgatcaatgct

SEQ ID NO: 1943 - DNA, 21 bp, Artificial Sequence
  Synthetic polynucleotide encoding artificial human antibody CDR-L1 region
cagaatattagcagcagatat

SEQ ID NO: 1944 - DNA, 18 bp, Artificial Sequence
  Synthetic polynucleotide encoding artificial human antibody CDR-L1 region
cagggcattagcagttat

SEQ ID NO: 1945 - DNA, 21 bp, Artificial Sequence
  Synthetic polynucleotide encoding artificial human antibody CDR-L1 region
cacagtgtttacggcaattat

SEQ ID NO: 1946 - DNA, 27 bp, Artificial Sequence
  Synthetic polynucleotide encoding artificial human antibody CDR-L1 region
agcaatgacgttggtcgttctaacttt

SEQ ID NO: 1947 - DNA, 18 bp, Artificial Sequence
  Synthetic polynucleotide encoding artificial human antibody CDR-L1 region
aaattggagaataaacat

SEQ ID NO: 1948 - DNA, 18 bp, Artificial Sequence
  Synthetic polynucleotide encoding artificial human antibody CDR-L1 region
aacattggaactcacagt

SEQ ID NO: 1949 - DNA, 18 bp, Artificial Sequence
  Synthetic polynucleotide encoding artificial human antibody CDR-L1 region
gcattgccaaagcaatat

SEQ ID NO: 1950 - DNA, 36 bp, Artificial Sequence
  Synthetic polynucleotide encoding artificial human antibody CDR-L1 region
cagagtgttttatacagctccaacaataacaactac

SEQ ID NO: 1951 - DNA, 21 bp, Artificial Sequence
  Synthetic polynucleotide encoding artificial human antibody CDR-L1 region
cagactgttcccagtaactac

SEQ ID NO: 1952 - DNA, 24 bp, Artificial Sequence
  Synthetic polynucleotide encoding artificial human antibody CDR-L1 region
acctccagcatcgggagtaatact

SEQ ID NO: 1953 - DNA, 18 bp, Artificial Sequence
  Synthetic polynucleotide encoding artificial human antibody CDR-L1 region
cagggcattagcagttat

SEQ ID NO: 1954 - DNA, 18 bp, Artificial Sequence
  Synthetic polynucleotide encoding artificial human antibody CDR-L1 region
cagagtgttactaactac

SEQ ID NO: 1955 - DNA, 27 bp, Artificial Sequence
  Synthetic polynucleotide encoding artificial human antibody CDR-L1 region
acttccaacatcgggtcagggtatgga

SEQ ID NO: 1956 - DNA, 27 bp, Artificial Sequence
  Synthetic polynucleotide encoding artificial human antibody CDR-L1 region
agcagtgatgttggtggttataactat

SEQ ID NO: 1957 - DNA, 36 bp, Artificial Sequence; identical to SEQ ID NO: 1290
  Synthetic polynucleotide encoding artificial human antibody CDR-L1 region

SEQ ID NO: 1958 - DNA, 18 bp, Artificial Sequence
  Synthetic polynucleotide encoding artificial human antibody CDR-L1 region
cagagtgttagcagcaac

SEQ ID NO: 1959 - DNA, 18 bp, Artificial Sequence
  Synthetic polynucleotide encoding artificial human antibody CDR-L1 region
cagagtgttagcagcaac

SEQ ID NO: 1960 - DNA, 18 bp, Artificial Sequence
  Synthetic polynucleotide encoding artificial human antibody CDR-L1 region
cagggcattagcagttat

SEQ ID NO: 1961 - DNA, 18 bp, Artificial Sequence
  Synthetic polynucleotide encoding artificial human antibody CDR-L1 region
cagggcattagcaattat

SEQ ID NO: 1962 - DNA, 18 bp, Artificial Sequence
  Synthetic polynucleotide encoding artificial human antibody CDR-L1 region
cagggcataagcacttac

SEQ ID NO: 1963 - DNA, 18 bp, Artificial Sequence
  Synthetic polynucleotide encoding artificial human antibody CDR-L1 region
cagggcattagcaattat

SEQ ID NO: 1964 - DNA, 27 bp, Artificial Sequence
  Synthetic polynucleotide encoding artificial human antibody CDR-L1 region
agcagtgatgttggtggttataactat

SEQ ID NO: 1965 - DNA, 27 bp, Artificial Sequence
  Synthetic polynucleotide encoding artificial human antibody CDR-L1 region
agcagtggttttcgtggttataatttt

SEQ ID NO: 1966 - DNA, 18 bp, Artificial Sequence
  Synthetic polynucleotide encoding artificial human antibody CDR-L1 region
gcattgccaaagcaatat

SEQ ID NO: 1967 - DNA, 18 bp, Artificial Sequence
  Synthetic polynucleotide encoding artificial human antibody CDR-L1 region
cagggcattagaaatgat

SEQ ID NO: 1968 - DNA, 18 bp, Artificial Sequence
  Synthetic polynucleotide encoding artificial human antibody CDR-L1 region
aacattggaagtaaagtt

SEQ ID NO: 1969 - DNA, 21 bp, Artificial Sequence
  Synthetic polynucleotide encoding artificial human antibody CDR-L1 region
cagagtgttagcagcagctac

SEQ ID NO: 1970 - DNA, 24 bp, Artificial Sequence
  Synthetic polynucleotide encoding artificial human antibody CDR-L1 region
agctccaacattgggaataattat

SEQ ID NO: 1971 - DNA, 36 bp, Artificial Sequence
  Synthetic polynucleotide encoding artificial human antibody CDR-L1 region
ctgagtgttttctacgagttcaacaatctgaactac

SEQ ID NO: 1972 - DNA, 18 bp, Artificial Sequence
  Synthetic polynucleotide encoding artificial human antibody CDR-L1 region
cagagcattagcagctat

SEQ ID NO: 1973 - DNA, 18 bp, Artificial Sequence
  Synthetic polynucleotide encoding artificial human antibody CDR-L1 region
cagggcattagtaattat

SEQ ID NO: 1974 - DNA, 18 bp, Artificial Sequence
  Synthetic polynucleotide encoding artificial human antibody CDR-L1 region
cagagtgttagtagaaac

SEQ ID NO: 1975 - DNA, 18 bp, Artificial Sequence
  Synthetic polynucleotide encoding artificial human antibody CDR-L1 region
cagggcattagcagttat

SEQ ID NO: 1976 - DNA, 18 bp, Artificial Sequence
  Synthetic polynucleotide encoding artificial human antibody CDR-L1 region
cagggcattagtcattat

SEQ ID NO: 1977 - DNA, 21 bp, Artificial Sequence
  Synthetic polynucleotide encoding artificial human antibody CDR-L1 region
cagagtgttagcagcagctac

SEQ ID NO: 1978 - DNA, 33 bp, Artificial Sequence; identical to SEQ ID NO: 1296
  Synthetic polynucleotide encoding artificial human antibody CDR-L1 region

SEQ ID NO: 1979 - DNA, 18 bp, Artificial Sequence
  Synthetic polynucleotide encoding artificial human antibody CDR-L1 region
gcattgccaaagcaatat

SEQ ID NO: 1980 - DNA, 18 bp, Artificial Sequence
  Synthetic polynucleotide encoding artificial human antibody CDR-L1 region
aaattgggggataaatat

SEQ ID NO: 1981 - DNA, 18 bp, Artificial Sequence
  Synthetic polynucleotide encoding artificial human antibody CDR-L1 region
cagagcattagcagctat

SEQ ID NO: 1982 - DNA, 18 bp, Artificial Sequence
  Synthetic polynucleotide encoding artificial human antibody CDR-L1 region
agcctcagaaattattat

SEQ ID NO: 1983 - DNA, 27 bp, Artificial Sequence
  Synthetic polynucleotide encoding artificial human antibody CDR-L1 region
agcagtgatgttgggagttataacctt

SEQ ID NO: 1984 - DNA, 18 bp, Artificial Sequence
  Synthetic polynucleotide encoding artificial human antibody CDR-L1 region
cagagtgttagcagctac

SEQ ID NO: 1985 - DNA, 36 bp, Artificial Sequence
  Synthetic polynucleotide encoding artificial human antibody CDR-L1 region
cagaatcttttatacggctacaacaataagaattat

SEQ ID NO: 1986 - DNA, 21 bp, Artificial Sequence
  Synthetic polynucleotide encoding artificial human antibody CDR-L1 region
agcggctacagtaattataaa

SEQ ID NO: 1987 - DNA, 18 bp, Artificial Sequence
  Synthetic polynucleotide encoding artificial human antibody CDR-L1 region
gcattgccaaataaatat

SEQ ID NO: 1988 - DNA, 18 bp, Artificial Sequence
  Synthetic polynucleotide encoding artificial human antibody CDR-L1 region
gcattgccaaagcaatat

SEQ ID NO: 1989 - DNA, 18 bp, Artificial Sequence
  Synthetic polynucleotide encoding artificial human antibody CDR-L1 region
aaattgggggataaatat

SEQ ID NO: 1990 - DNA, 27 bp, Artificial Sequence
  Synthetic polynucleotide encoding artificial human antibody CDR-L1 region
agcagtgatgttggtggttataactat

SEQ ID NO: 1991 - DNA, 27 bp, Artificial Sequence
  Synthetic polynucleotide encoding artificial human antibody CDR-L1 region
agcagtgatgttgggacttatgacctt

SEQ ID NO: 1992 - DNA, 27 bp, Artificial Sequence
  Synthetic polynucleotide encoding artificial human antibody CDR-L1 region
agctccaacatcggggcaggttatgat

SEQ ID NO: 1993 - DNA, 18 bp, Artificial Sequence
  Synthetic polynucleotide encoding artificial human antibody CDR-L1 region
cagacccttagtggtcac

SEQ ID NO: 1994 - DNA, 18 bp, Artificial Sequence
  Synthetic polynucleotide encoding artificial human antibody CDR-L1 region
cagagcattagcagctat

SEQ ID NO: 1995 - DNA, 18 bp, Artificial Sequence
  Synthetic polynucleotide encoding artificial human antibody CDR-L1 region
aaattgggggataaatat

SEQ ID NO: 1996 - DNA, 24 bp, Artificial Sequence
  Synthetic polynucleotide encoding artificial human antibody CDR-L1 region
agctccaacatcggaagtaattat

SEQ ID NO: 1997 - DNA, 33 bp, Artificial Sequence; identical to SEQ ID NO: 1296
  Synthetic polynucleotide encoding artificial human antibody CDR-L1 region

SEQ ID NO: 1998 - DNA, 18 bp, Artificial Sequence
  Synthetic polynucleotide encoding artificial human antibody CDR-L1 region
cagagtattgatacctgg

SEQ ID NO: 1999 - DNA, 18 bp, Artificial Sequence
  Synthetic polynucleotide encoding artificial human antibody CDR-L1 region
aaattgggggataaatat

SEQ ID NO: 2000 - DNA, 21 bp, Artificial Sequence
  Synthetic polynucleotide encoding artificial human antibody CDR-L1 region
agcggctacagtaattataaa

SEQ ID NO: 2001 - DNA, 27 bp, Artificial Sequence
  Synthetic polynucleotide encoding artificial human antibody CDR-L1 region
agctccaacatcggggcaggttatgat

SEQ ID NO: 2002 - DNA, 18 bp, Artificial Sequence
  Synthetic polynucleotide encoding artificial human antibody CDR-L1 region
cagagtattagtaactta

SEQ ID NO: 2003 - DNA, 18 bp, Artificial Sequence
  Synthetic polynucleotide encoding artificial human antibody CDR-L1 region
cacagcgtgagcacctcc

SEQ ID NO: 2004 - DNA, 18 bp, Artificial Sequence
  Synthetic polynucleotide encoding artificial human antibody CDR-L1 region
caggacactagcatttat

SEQ ID NO: 2005 - DNA, 18 bp, Artificial Sequence
  Synthetic polynucleotide encoding artificial human antibody CDR-L1 region
cagagtgttagcagcaac

SEQ ID NO: 2006 - DNA, 18 bp, Artificial Sequence
  Synthetic polynucleotide encoding artificial human antibody CDR-L1 region
cagagtgttagcagctac

SEQ ID NO: 2007 - DNA, 18 bp, Artificial Sequence
  Synthetic polynucleotide encoding artificial human antibody CDR-L1 region
cagggtattagcagctgg

SEQ ID NO: 2008 - DNA, 18 bp, Artificial Sequence
  Synthetic polynucleotide encoding artificial human antibody CDR-L1 region
aaattgggggataaatat

SEQ ID NO: 2009 - DNA, 18 bp, Artificial Sequence
  Synthetic polynucleotide encoding artificial human antibody CDR-L1 region
gcattgccaaagcaatat

SEQ ID NO: 2010 - DNA, 18 bp, Artificial Sequence
  Synthetic polynucleotide encoding artificial human antibody CDR-L1 region
cagggtattagcagctgg

SEQ ID NO: 2011 - DNA, 18 bp, Artificial Sequence
  Synthetic polynucleotide encoding artificial human antibody CDR-L1 region
cagggcattagcagttat

SEQ ID NO: 2012 - DNA, 27 bp, Artificial Sequence
  Synthetic polynucleotide encoding artificial human antibody CDR-L1 region
agcagtgatgttgggagttataacctt

SEQ ID NO: 2013 - DNA, 27 bp, Artificial Sequence
  Synthetic polynucleotide encoding artificial human antibody CDR-L1 region
aacagtgacgttggtggttatgactct

SEQ ID NO: 2014 - DNA, 18 bp, Artificial Sequence
  Synthetic polynucleotide encoding artificial human antibody CDR-L1 region
gcattgccaaagcaatat

SEQ ID NO: 2015 - DNA, 27 bp, Artificial Sequence
  Synthetic polynucleotide encoding artificial human antibody CDR-L1 region
agcagtgatgttgggagttataacctt

SEQ ID NO: 2016 - DNA, 27 bp, Artificial Sequence
  Synthetic polynucleotide encoding artificial human antibody CDR-L1 region
agcagtgacgttggtggttataactat

SEQ ID NO: 2017 - DNA, 18 bp, Artificial Sequence
  Synthetic polynucleotide encoding artificial human antibody CDR-L1 region
gcattgccaaagcaatat

SEQ ID NO: 2018 - DNA, 18 bp, Artificial Sequence
  Synthetic polynucleotide encoding artificial human antibody CDR-L1 region
gcattgccaaagcaatat

SEQ ID NO: 2019 - DNA, 18 bp, Artificial Sequence
  Synthetic polynucleotide encoding artificial human antibody CDR-L1 region
cagagcattagcagctat

SEQ ID NO: 2020 - DNA, 21 bp, Artificial Sequence
  Synthetic polynucleotide encoding artificial human antibody CDR-L1 region
agcggctacagtaattataaa

SEQ ID NO: 2021 - DNA, 21 bp, Artificial Sequence
  Synthetic polynucleotide encoding artificial human antibody CDR-L1 region
cagagtgtttacaggaacttc

SEQ ID NO: 2022 - DNA, 33 bp, Artificial Sequence
  Synthetic polynucleotide encoding artificial human antibody CDR-L1 region
caaagcctcgtatacagtgatggaaacacatac

SEQ ID NO: 2023 - DNA, 27 bp, Artificial Sequence
  Synthetic polynucleotide encoding artificial human antibody CDR-L1 region
actggagttgtcaccaatggtcatttt

SEQ ID NO: 2024 - DNA, 18 bp, Artificial Sequence
  Synthetic polynucleotide encoding artificial human antibody CDR-L1 region
gcattgtcaaaaaaatat

SEQ ID NO: 2025 - DNA, 36 bp, Artificial Sequence; identical to SEQ ID NO: 1290
  Synthetic polynucleotide encoding artificial human antibody CDR-L1 region

SEQ ID NO: 2026 - DNA, 27 bp, Artificial Sequence
  Synthetic polynucleotide encoding artificial human antibody CDR-L1 region
agcagtgacgttggtggttataactct

SEQ ID NO: 2027 - DNA, 18 bp, Artificial Sequence
  Synthetic polynucleotide encoding artificial human antibody CDR-L1 region
caggccattagttattct

SEQ ID NO: 2028 - DNA, 18 bp, Artificial Sequence
  Synthetic polynucleotide encoding artificial human antibody CDR-L1 region
cagggtattagcagttat

SEQ ID NO: 2029 - DNA, 27 bp, Artificial Sequence
  Synthetic polynucleotide encoding artificial human antibody CDR-L1 region
agcagtgatgttggtggttataactat

SEQ ID NO: 2030 - DNA, 18 bp, Artificial Sequence
  Synthetic polynucleotide encoding artificial human antibody CDR-L1 region
gcattgccaaagcaatat

SEQ ID NO: 2031 - DNA, 24 bp, Artificial Sequence
  Synthetic polynucleotide encoding artificial human antibody CDR-L1 region
agctccaacatcggaagtaatact

SEQ ID NO: 2032 - DNA, 27 bp, Artificial Sequence
  Synthetic polynucleotide encoding artificial human antibody CDR-L1 region
agttccaatatcgtggcagcttatggt

SEQ ID NO: 2033 - DNA, 18 bp, Artificial Sequence
  Synthetic polynucleotide encoding artificial human antibody CDR-L1 region
acattgccaaagcaatat

SEQ ID NO: 2034 - DNA, 18 bp, Artificial Sequence
  Synthetic polynucleotide encoding artificial human antibody CDR-L1 region
cagagtgttagcagctac

SEQ ID NO: 2035 - DNA, 18 bp, Artificial Sequence
  Synthetic polynucleotide encoding artificial human antibody CDR-L1 region
cagaatgttatcacctct

SEQ ID NO: 2036 - DNA, 18 bp, Artificial Sequence
  Synthetic polynucleotide encoding artificial human antibody CDR-L1 region
cagggcattagaaatgat

SEQ ID NO: 2037 - DNA, 33 bp, Artificial Sequence
  Synthetic polynucleotide encoding artificial human antibody CDR-L1 region
caaagcctcctttacaatgctggaaacacctac

SEQ ID NO: 2038 - DNA, 24 bp, Artificial Sequence
  Synthetic polynucleotide encoding artificial human antibody CDR-L1 region
agctccaacatcggaagtaattat

SEQ ID NO: 2039 - DNA, 24 bp, Artificial Sequence
  Synthetic polynucleotide encoding artificial human antibody CDR-L1 region
agtggcagcattgccagcaactat

SEQ ID NO: 2040 - DNA, 18 bp, Artificial Sequence
  Synthetic polynucleotide encoding artificial human antibody CDR-L1 region
caatccatcagcgtctat

SEQ ID NO: 2041 - DNA, 24 bp, Artificial Sequence
  Synthetic polynucleotide encoding artificial human antibody CDR-L1 region
agctccaacattgggaataattat

SEQ ID NO: 2042 - DNA, 18 bp, Artificial Sequence
  Synthetic polynucleotide encoding artificial human antibody CDR-L1 region
aaattgggggataaatat

SEQ ID NO: 2043 - DNA, 24 bp, Artificial Sequence
  Synthetic polynucleotide encoding artificial human antibody CDR-L1 region
agctccaacatcggaagtaattat

SEQ ID NO: 2044 - DNA, 24 bp, Artificial Sequence
  Synthetic polynucleotide encoding artificial human antibody CDR-L1 region
agctccaacatcggaagtaatact

SEQ ID NO: 2045 - DNA, 36 bp, Artificial Sequence
  Synthetic polynucleotide encoding artificial human antibody CDR-L1 region
cagagtctttttaacaggtccaataataagaattgt

SEQ ID NO: 2046 - DNA, 21 bp, Artificial Sequence
  Synthetic polynucleotide encoding artificial human antibody CDR-L1 region
agcggctacagtaattataaa

SEQ ID NO: 2047 - DNA, 24 bp, Artificial Sequence
  Synthetic polynucleotide encoding artificial human antibody CDR-L1 region
agctccaacatcggaagtaattat

SEQ ID NO: 2048 - DNA, 18 bp, Artificial Sequence
  Synthetic polynucleotide encoding artificial human antibody CDR-L1 region
acattgccaaagcaattt

SEQ ID NO: 2049 - DNA, 18 bp, Artificial Sequence
  Synthetic polynucleotide encoding artificial human antibody CDR-L1 region
cagagcattggccactat

SEQ ID NO: 2050 - DNA, 24 bp, Artificial Sequence
  Synthetic polynucleotide encoding artificial human antibody CDR-L1 region
agctccaacatcggaagtaatact

SEQ ID NO: 2051 - DNA, 18 bp, Artificial Sequence
  Synthetic polynucleotide encoding artificial human antibody CDR-L1 region
cagagcattagcagctat

SEQ ID NO: 2052 - DNA, 18 bp, Artificial Sequence
  Synthetic polynucleotide encoding artificial human antibody CDR-L1 region
gcattgccaaaaaaatat

SEQ ID NO: 2053 - DNA, 18 bp, Artificial Sequence
  Synthetic polynucleotide encoding artificial human antibody CDR-L1 region
gcattgccaaagcaatat

SEQ ID NO: 2054 - DNA, 27 bp, Artificial Sequence
  Synthetic polynucleotide encoding artificial human antibody CDR-L1 region
agctccaacatcggggcaggttatgat

SEQ ID NO: 2055 - DNA, 18 bp, Artificial Sequence
  Synthetic polynucleotide encoding artificial human antibody CDR-L1 region
gcattgccaaagcaatat

SEQ ID NO: 2056 - DNA, 36 bp, Artificial Sequence
  Synthetic polynucleotide encoding artificial human antibody CDR-L1 region
cggactcttttgtatacctccaacaataagaactac

SEQ ID NO: 2057 - DNA, 18 bp, Artificial Sequence
  Synthetic polynucleotide encoding artificial human antibody CDR-L1 region
agcctcagaaattattat

SEQ ID NO: 2058 - DNA, 24 bp, Artificial Sequence
  Synthetic polynucleotide encoding artificial human antibody CDR-L1 region
agctccaacattgggaataattat

SEQ ID NO: 2059 - DNA, 18 bp, Artificial Sequence
  Synthetic polynucleotide encoding artificial human antibody CDR-L1 region
aaattgggggataaatat

SEQ ID NO: 2060 - DNA, 18 bp, Artificial Sequence
  Synthetic polynucleotide encoding artificial human antibody CDR-L1 region
gcattgccaaagcaatat

SEQ ID NO: 2061 - DNA, 18 bp, Artificial Sequence
  Synthetic polynucleotide encoding artificial human antibody CDR-L1 region
cagggtattggtagtaac

SEQ ID NO: 2062 - DNA, 18 bp, Artificial Sequence
  Synthetic polynucleotide encoding artificial human antibody CDR-L1 region
aaattgggggataaatat

SEQ ID NO: 2063 - DNA, 18 bp, Artificial Sequence
  Synthetic polynucleotide encoding artificial human antibody CDR-L1 region
aaattgggggataaatat

SEQ ID NO: 2064 - DNA, 21 bp, Artificial Sequence
  Synthetic polynucleotide encoding artificial human antibody CDR-L1 region
cagagtgttagcagcagctac

SEQ ID NO: 2065 - DNA, 18 bp, Artificial Sequence
  Synthetic polynucleotide encoding artificial human antibody CDR-L1 region
gcattgccaaagcaatat

SEQ ID NO: 2066 - DNA, 36 bp, Artificial Sequence
  Synthetic polynucleotide encoding artificial human antibody CDR-L1 region
cggactattttatacagctccaacaataagaactac

SEQ ID NO: 2067 - DNA, 33 bp, Artificial Sequence
  Synthetic polynucleotide encoding artificial human antibody CDR-L1 region
cagagtctcctgcatagtgatggaaagacctat

SEQ ID NO: 2068 - DNA, 18 bp, Artificial Sequence
  Synthetic polynucleotide encoding artificial human antibody CDR-L1 region
gaaagtgtcagcagcagt

SEQ ID NO: 2069 - DNA, 18 bp, Artificial Sequence
  Synthetic polynucleotide encoding artificial human antibody CDR-L1 region
gcattgccaaagcaatat

SEQ ID NO: 2070 - DNA, 18 bp, Artificial Sequence
  Synthetic polynucleotide encoding artificial human antibody CDR-L1 region
gcattgccaaagcaatat

SEQ ID NO: 2071 - DNA, 27 bp, Artificial Sequence
  Synthetic polynucleotide encoding artificial human antibody CDR-L1 region
ggcagtgactttggtgattataactat

SEQ ID NO: 2072 - DNA, 18 bp, Artificial Sequence
  Synthetic polynucleotide encoding artificial human antibody CDR-L1 region
aacattggaagtaaaagt

SEQ ID NO: 2073 - DNA, 33 bp, Artificial Sequence
  Synthetic polynucleotide encoding artificial human antibody CDR-L1 region
caaagcctcgtacacagggatggaaacacctac

SEQ ID NO: 2074 - DNA, 27 bp, Artificial Sequence
  Synthetic polynucleotide encoding artificial human antibody CDR-L1 region
agtggcatcaatgttgcttcccacagg

SEQ ID NO: 2075 - DNA, 24 bp, Artificial Sequence
  Synthetic polynucleotide encoding artificial human antibody CDR-L1 region
agcgacaatgttggtaaccaagga

SEQ ID NO: 2076 - DNA, 21 bp, Artificial Sequence
  Synthetic polynucleotide encoding artificial human antibody CDR-L1 region
cagagtgttagcagcagctac

SEQ ID NO: 2077 - DNA, 18 bp, Artificial Sequence
  Synthetic polynucleotide encoding artificial human antibody CDR-L1 region
ccgggcattggcaagtgg

SEQ ID NO: 2078 - DNA, 24 bp, Artificial Sequence
  Synthetic polynucleotide encoding artificial human antibody CDR-L1 region
agctccaagattgggaataattat

SEQ ID NO: 2079 - DNA, 18 bp, Artificial Sequence
  Synthetic polynucleotide encoding artificial human antibody CDR-L1 region
agcctcagaagtttttat

SEQ ID NO: 2080 - DNA, 18 bp, Artificial Sequence
  Synthetic polynucleotide encoding artificial human antibody CDR-L1 region
caggatctcaccagctcc

SEQ ID NO: 2081 - DNA, 27 bp, Artificial Sequence
  Synthetic polynucleotide encoding artificial human antibody CDR-L1 region
agtggcatcgatgttggcacgtactgg

SEQ ID NO: 2082 - DNA, 33 bp, Artificial Sequence
  Synthetic polynucleotide encoding artificial human antibody CDR-L1 region
aaaagcctcgttcacgctgatggaaacacctac

SEQ ID NO: 2083 - DNA, 24 bp, Artificial Sequence
  Synthetic polynucleotide encoding artificial human antibody CDR-L1 region
agctccaacattggaaataattat

SEQ ID NO: 2084 - DNA, 27 bp, Artificial Sequence
  Synthetic polynucleotide encoding artificial human antibody CDR-L1 region
agcagtgacattggtggttatgacttt

SEQ ID NO: 2085 - DNA, 18 bp, Artificial Sequence
  Synthetic polynucleotide encoding artificial human antibody CDR-L1 region
cagagtgttagcagcaac

SEQ ID NO: 2086 - DNA, 27 bp, Artificial Sequence
  Synthetic polynucleotide encoding artificial human antibody CDR-L1 region
tctggttcagtctctgataattactgg

SEQ ID NO: 2087 - DNA, 24 bp, Artificial Sequence
  Synthetic polynucleotide encoding artificial human antibody CDR-L1 region
agctccaacatcggaagtaattat

SEQ ID NO: 2088 - DNA, 18 bp, Artificial Sequence
  Synthetic polynucleotide encoding artificial human antibody CDR-L1 region
cagactgttggcaactcc

SEQ ID NO: 2089 - DNA, 18 bp, Artificial Sequence
  Synthetic polynucleotide encoding artificial human antibody CDR-L1 region
cagggcattagcagttat

SEQ ID NO: 2090 - DNA, 18 bp, Artificial Sequence
  Synthetic polynucleotide encoding artificial human antibody CDR-L1 region
aagtttggaatttacact

SEQ ID NO: 2091 - DNA, 18 bp, Artificial Sequence
  Synthetic polynucleotide encoding artificial human antibody CDR-L1 region
cagagtgttggaagtcag

SEQ ID NO: 2092 - DNA, 18 bp, Artificial Sequence
  Synthetic polynucleotide encoding artificial human antibody CDR-L1 region
cagagtgttagtacgcac

SEQ ID NO: 2093 - DNA, 18 bp, Artificial Sequence
  Synthetic polynucleotide encoding artificial human antibody CDR-L1 region
cagagtgttagcaattac

SEQ ID NO: 2094 - DNA, 18 bp, Artificial Sequence
  Synthetic polynucleotide encoding artificial human antibody CDR-L1 region
cagagcattagcagctat

SEQ ID NO: 2095 - DNA, 18 bp, Artificial Sequence
  Synthetic polynucleotide encoding artificial human antibody CDR-L1 region
cagagtattgatagttgg

SEQ ID NO: 2096 - DNA, 24 bp, Artificial Sequence
  Synthetic polynucleotide encoding artificial human antibody CDR-L1 region
agcaacaatgttggctaccaagga

SEQ ID NO: 2097 - DNA, 18 bp, Artificial Sequence
  Synthetic polynucleotide encoding artificial human antibody CDR-L1 region
cagggcattagcaattat

SEQ ID NO: 2098 - DNA, 27 bp, Artificial Sequence
  Synthetic polynucleotide encoding artificial human antibody CDR-L1 region
agcagtgacgttggtgattataactat

SEQ ID NO: 2099 - DNA, 18 bp, Artificial Sequence
  Synthetic polynucleotide encoding artificial human antibody CDR-L1 region
caaggcattgcgaagtct

SEQ ID NO: 2100 - DNA, 24 bp, Artificial Sequence
  Synthetic polynucleotide encoding artificial human antibody CDR-L1 region
agctccaacattggaaataattat

SEQ ID NO: 2101 - DNA, 18 bp, Artificial Sequence
  Synthetic polynucleotide encoding artificial human antibody CDR-L1 region
cagagtgtaggcagcgcc

SEQ ID NO: 2102 - DNA, 27 bp, Artificial Sequence
  Synthetic polynucleotide encoding artificial human antibody CDR-L1 region
agcagtgatgttggcaattataaccgt

SEQ ID NO: 2103 - DNA, 18 bp, Artificial Sequence
  Synthetic polynucleotide encoding artificial human antibody CDR-L1 region
agcctccgaaccttttac

SEQ ID NO: 2104 - DNA, 18 bp, Artificial Sequence
  Synthetic polynucleotide encoding artificial human antibody CDR-L1 region
cagagtgttggcaattac

SEQ ID NO: 2105 - DNA, 27 bp, Artificial Sequence
  Synthetic polynucleotide encoding artificial human antibody CDR-L1 region
agcagtgacgttggtggttataacttt

SEQ ID NO: 2106 - DNA, 18 bp, Artificial Sequence
  Synthetic polynucleotide encoding artificial human antibody CDR-L1 region
cagagtgttgacaccaac

SEQ ID NO: 2107 - DNA, 27 bp, Artificial Sequence
  Synthetic polynucleotide encoding artificial human antibody CDR-L1 region
agtagtgacgttggtggttctactttt

SEQ ID NO: 2108 - DNA, 18 bp, Artificial Sequence
  Synthetic polynucleotide encoding artificial human antibody CDR-L1 region
atcctcagaagttattat

SEQ ID NO: 2109 - DNA, 18 bp, Artificial Sequence
  Synthetic polynucleotide encoding artificial human antibody CDR-L1 region
gcattgccaaacctttct

SEQ ID NO: 2110 - DNA, 21 bp, Artificial Sequence
  Synthetic polynucleotide encoding artificial human antibody CDR-L1 region
cagagtgtgaatagcaactac

SEQ ID NO: 2111 - DNA, 36 bp, Artificial Sequence
  Synthetic polynucleotide encoding artificial human antibody CDR-L1 region
cggagcgttttatccaggtccaataatcagaattac

SEQ ID NO: 2112 - DNA, 18 bp, Artificial Sequence
  Synthetic polynucleotide encoding artificial human antibody CDR-L1 region
cagagcattagcagctat

SEQ ID NO: 2113 - DNA, 27 bp, Artificial Sequence
  Synthetic polynucleotide encoding artificial human antibody CDR-L1 region
agcagtgacgttggtggttataactat

SEQ ID NO: 2114 - DNA, 18 bp, Artificial Sequence
  Synthetic polynucleotide encoding artificial human antibody CDR-L1 region
cagggctttggaaatcgt

SEQ ID NO: 2115 - DNA, 33 bp, Artificial Sequence
  Synthetic polynucleotide encoding artificial human antibody CDR-L1 region
cagagcctcctgcatagtaatgggcacaactat

SEQ ID NO: 2116 - DNA, 27 bp, Artificial Sequence
  Synthetic polynucleotide encoding artificial human antibody CDR-L1 region
accgccaatctcggtattggttatggt

SEQ ID NO: 2117 - DNA, 33 bp, Artificial Sequence
  Synthetic polynucleotide encoding artificial human antibody CDR-L1 region
cagagcctcctgtacagtaatggatacaactat

SEQ ID NO: 2118 - DNA, 18 bp, Artificial Sequence
  Synthetic polynucleotide encoding artificial human antibody CDR-L1 region
cagagtgtgagcagcaag

SEQ ID NO: 2119 - DNA, 27 bp, Artificial Sequence
  Synthetic polynucleotide encoding artificial human antibody CDR-L1 region
agcagtgacgttggtggttataactat

SEQ ID NO: 2120 - DNA, 24 bp, Artificial Sequence
  Synthetic polynucleotide encoding artificial human antibody CDR-L1 region
agctccaacatcggaagtaatact

SEQ ID NO: 2121 - DNA, 24 bp, Artificial Sequence
  Synthetic polynucleotide encoding artificial human antibody CDR-L1 region
agtggcagcattggcaacaacttt

SEQ ID NO: 2122 - DNA, 18 bp, Artificial Sequence
  Synthetic polynucleotide encoding artificial human antibody CDR-L1 region
cagagtgttaacaccaac

SEQ ID NO: 2123 - DNA, 27 bp, Artificial Sequence
  Synthetic polynucleotide encoding artificial human antibody CDR-L1 region
agcagtgacgtcggtgcttatgactat

SEQ ID NO: 2124 - DNA, 27 bp, Artificial Sequence
  Synthetic polynucleotide encoding artificial human antibody CDR-L1 region
agcagtgacattggtggttatgaccgt

SEQ ID NO: 2125 - DNA, 18 bp, Artificial Sequence
  Synthetic polynucleotide encoding artificial human antibody CDR-L1 region
cgggacataagcaacgat

SEQ ID NO: 2126 - DNA, 18 bp, Artificial Sequence
  Synthetic polynucleotide encoding artificial human antibody CDR-L1 region
cagggcattaccaatttt

SEQ ID NO: 2127 - DNA, 18 bp, Artificial Sequence
  Synthetic polynucleotide encoding artificial human antibody CDR-L1 region
cagagtattagtagctgg

SEQ ID NO: 2128 - DNA, 27 bp, Artificial Sequence
  Synthetic polynucleotide encoding artificial human antibody CDR-L1 region
agcagtgatgttggggcttataacctt

SEQ ID NO: 2129 - DNA, 18 bp, Artificial Sequence
  Synthetic polynucleotide encoding artificial human antibody CDR-L1 region
cagaacattaactacttt

SEQ ID NO: 2130 - DNA, 27 bp, Artificial Sequence
  Synthetic polynucleotide encoding artificial human antibody CDR-L1 region
actggagcagtcaccagtggttactat

SEQ ID NO: 2131 - DNA, 18 bp, Artificial Sequence
  Synthetic polynucleotide encoding artificial human antibody CDR-L1 region
cagggcattagcagttat

SEQ ID NO: 2132 - DNA, 18 bp, Artificial Sequence
  Synthetic polynucleotide encoding artificial human antibody CDR-L1 region
aacctcagaagctattat

SEQ ID NO: 2133 - DNA, 21 bp, Artificial Sequence
  Synthetic polynucleotide encoding artificial human antibody CDR-L1 region
cagagtgttagcagcagctac

SEQ ID NO: 2134 - DNA, 18 bp, Artificial Sequence
  Synthetic polynucleotide encoding artificial human antibody CDR-L1 region
cagagtattaacaccaac

SEQ ID NO: 2135 - DNA, 18 bp, Artificial Sequence
  Synthetic polynucleotide encoding artificial human antibody CDR-L1 region
cagaggattagcacctat

SEQ ID NO: 2136 - DNA, 24 bp, Artificial Sequence
  Synthetic polynucleotide encoding artificial human antibody CDR-L1 region
agctccaacatcggaagcgatgct

SEQ ID NO: 2137 - DNA, 18 bp, Artificial Sequence
  Synthetic polynucleotide encoding artificial human antibody CDR-L1 region
aacattggaggtaaaggt

SEQ ID NO: 2138 - DNA, 18 bp, Artificial Sequence
  Synthetic polynucleotide encoding artificial human antibody CDR-L1 region
caggtcattagcggttat

SEQ ID NO: 2139 - DNA, 24 bp, Artificial Sequence
  Synthetic polynucleotide encoding artificial human antibody CDR-L1 region
acctccaacatcggacctaataat

SEQ ID NO: 2140 - DNA, 24 bp, Artificial Sequence
  Synthetic polynucleotide encoding artificial human antibody CDR-L1 region
agcaacaatgttggtaacgaagga

SEQ ID NO: 2141 - DNA, 27 bp, Artificial Sequence
  Synthetic polynucleotide encoding artificial human antibody CDR-L1 region
agcaatgacattggtggttataactta

SEQ ID NO: 2142 - DNA, 36 bp, Artificial Sequence
  Synthetic polynucleotide encoding artificial human antibody CDR-L1 region
cacagtctcttacacagttccaacagtaagaactac

SEQ ID NO: 2143 - DNA, 33 bp, Artificial Sequence
  Synthetic polynucleotide encoding artificial human antibody CDR-L1 region
cagagcctcctccaccataatggcaacacctac

SEQ ID NO: 2144 - DNA, 24 bp, Artificial Sequence
  Synthetic polynucleotide encoding artificial human antibody CDR-L1 region
agtggaagtattggcagcaaccat

SEQ ID NO: 2145 - DNA, 24 bp, Artificial Sequence
  Synthetic polynucleotide encoding artificial human antibody CDR-L1 region
agtggcagcattgccaacaacttt

SEQ ID NO: 2146 - DNA, 18 bp, Artificial Sequence
  Synthetic polynucleotide encoding artificial human antibody CDR-L1 region
cagagtgtcagccgcgcc

SEQ ID NO: 2147 - DNA, 21 bp, Artificial Sequence
  Synthetic polynucleotide encoding artificial human antibody CDR-L1 region
cagagtgttagcagcagctac

SEQ ID NO: 2148 - DNA, 27 bp, Artificial Sequence
  Synthetic polynucleotide encoding artificial human antibody CDR-L1 region
ggctccaacatcggggcaaattttgat

SEQ ID NO: 2149 - DNA, 27 bp, Artificial Sequence
  Synthetic polynucleotide encoding artificial human antibody CDR-L1 region
agcagtgacattggtggttatgattct

SEQ ID NO: 2150 - DNA, 24 bp, Artificial Sequence
  Synthetic polynucleotide encoding artificial human antibody CDR-L1 region
agctccaacatcggaagtaattat

SEQ ID NO: 2151 - DNA, 33 bp, Artificial Sequence; identical to SEQ ID NO: 1264
  Synthetic polynucleotide encoding artificial human antibody CDR-L1 region

SEQ ID NO: 2152 - DNA, 18 bp, Artificial Sequence
  Synthetic polynucleotide encoding artificial human antibody CDR-L1 region
cgggatattcataactgg

SEQ ID NO: 2153 - DNA, 24 bp, Artificial Sequence
  Synthetic polynucleotide encoding artificial human antibody CDR-L1 region
gcctccaatgttgccatcaattat

SEQ ID NO: 2154 - DNA, 18 bp, Artificial Sequence
  Synthetic polynucleotide encoding artificial human antibody CDR-L1 region
cagagtgttagcagcaac

SEQ ID NO: 2155 - DNA, 24 bp, Artificial Sequence
  Synthetic polynucleotide encoding artificial human antibody CDR-L1 region
agctccaacatcggaaggtatgct

SEQ ID NO: 2156 - DNA, 21 bp, Artificial Sequence
  Synthetic polynucleotide encoding artificial human antibody CDR-L1 region
cagagtgttaggaaaaactac

SEQ ID NO: 2157 - DNA, 18 bp, Artificial Sequence
  Synthetic polynucleotide encoding artificial human antibody CDR-L1 region
cagagtattagtatctgg

SEQ ID NO: 2158 - DNA, 33 bp, Artificial Sequence
  Synthetic polynucleotide encoding artificial human antibody CDR-L1 region
cagagcctcctgaattttaatggatatacccat

SEQ ID NO: 2159 - DNA, 24 bp, Artificial Sequence
  Synthetic polynucleotide encoding artificial human antibody CDR-L1 region
tggtccaacatcgctactaattat

SEQ ID NO: 2160 - DNA, 24 bp, Artificial Sequence
  Synthetic polynucleotide encoding artificial human antibody CDR-L1 region
agctccaacatcggaacttatact

SEQ ID NO: 2161 - DNA, 21 bp, Artificial Sequence
  Synthetic polynucleotide encoding artificial human antibody CDR-L1 region
agtgggcacagcagctacgcc

SEQ ID NO: 2162 - DNA, 18 bp, Artificial Sequence
  Synthetic polynucleotide encoding artificial human antibody CDR-L1 region
cagactgttcacaataag

SEQ ID NO: 2163 - DNA, 24 bp, Artificial Sequence
  Synthetic polynucleotide encoding artificial human antibody CDR-L1 region
agttccaacttcggaagtaatact

SEQ ID NO: 2164 - DNA, 21 bp, Artificial Sequence
  Synthetic polynucleotide encoding artificial human antibody CDR-L1 region
cagagtgttagcagcacctac

SEQ ID NO: 2165 - DNA, 24 bp, Artificial Sequence
  Synthetic polynucleotide encoding artificial human antibody CDR-L1 region
agctccaacattgagaataatttt

SEQ ID NO: 2166 - DNA, 24 bp, Artificial Sequence
  Synthetic polynucleotide encoding artificial human antibody CDR-L1 region
ttctccaatattgggaagaatttt

SEQ ID NO: 2167 - DNA, 24 bp, Artificial Sequence
  Synthetic polynucleotide encoding artificial human antibody CDR-L1 region
agctccaacatcggaaggtatgct

SEQ ID NO: 2168 - DNA, 24 bp, Artificial Sequence
  Synthetic polynucleotide encoding artificial human antibody CDR-L1 region
accaccaacatcggaggcacttat

SEQ ID NO: 2169 - DNA, 33 bp, Artificial Sequence
  Synthetic polynucleotide encoding artificial human antibody CDR-L1 region
cagagcctcctccatagtaatggatacaactat

SEQ ID NO: 2170 - DNA, 24 bp, Artificial Sequence
  Synthetic polynucleotide encoding artificial human antibody CDR-L1 region
agctccaacatcggaacttatact

SEQ ID NO: 2171 - DNA, 24 bp, Artificial Sequence
  Synthetic polynucleotide encoding artificial human antibody CDR-L1 region
agctccaacatcggaagttatact

SEQ ID NO: 2172 - DNA, 27 bp, Artificial Sequence
  Synthetic polynucleotide encoding artificial human antibody CDR-L1 region
agctccaacatcggggcagattataat

SEQ ID NO: 2173 - DNA, 33 bp, Artificial Sequence
  Synthetic polynucleotide encoding artificial human antibody CDR-L1 region
caaagcctcgtacacagtaatggaaacacctac

SEQ ID NO: 2174 - DNA, 18 bp, Artificial Sequence
  Synthetic polynucleotide encoding artificial human antibody CDR-L1 region
caagacgttcgaaataat

SEQ ID NO: 2175 - DNA, 18 bp, Artificial Sequence
  Synthetic polynucleotide encoding artificial human antibody CDR-L1 region
cagggcattgacagtgct

SEQ ID NO: 2176 - DNA, 18 bp, Artificial Sequence
  Synthetic polynucleotide encoding artificial human antibody CDR-L1 region
cagagtattagtatctgg

SEQ ID NO: 2177 - DNA, 18 bp, Artificial Sequence
  Synthetic polynucleotide encoding artificial human antibody CDR-L1 region
gcattgccaaaaaaatat

SEQ ID NO: 2178 - DNA, 27 bp, Artificial Sequence
  Synthetic polynucleotide encoding artificial human antibody CDR-L1 region
aacagtgatgttggtggttacaattct

SEQ ID NO: 2179 - DNA, 24 bp, Artificial Sequence
  Synthetic polynucleotide encoding artificial human antibody CDR-L1 region
agctccaacattgggaataattat

SEQ ID NO: 2180 - DNA, 18 bp, Artificial Sequence
  Synthetic polynucleotide encoding artificial human antibody CDR-L1 region
cagggcattagcaattat

SEQ ID NO: 2181 - DNA, 18 bp, Artificial Sequence
  Synthetic polynucleotide encoding artificial human antibody CDR-L1 region
cagggcattagcacttat

SEQ ID NO: 2182 - DNA, 24 bp, Artificial Sequence
  Synthetic polynucleotide encoding artificial human antibody CDR-L1 region
agctccaacatcggaacttatact

SEQ ID NO: 2183 - DNA, 24 bp, Artificial Sequence
  Synthetic polynucleotide encoding artificial human antibody CDR-L1 region
agctccaatatcggacgttatggt

SEQ ID NO: 2184 - DNA, 33 bp, Artificial Sequence
  Synthetic polynucleotide encoding artificial human antibody CDR-L1 region
caaagtctccgacacagtgatggaaacacctac

SEQ ID NO: 2185 - DNA, 18 bp, Artificial Sequence
  Synthetic polynucleotide encoding artificial human antibody CDR-L1 region
cagaacattagaagctat

SEQ ID NO: 2186 - DNA, 27 bp, Artificial Sequence
  Synthetic polynucleotide encoding artificial human antibody CDR-L1 region
accagagatgttgggaattataacctt

SEQ ID NO: 2187 - DNA, 27 bp, Artificial Sequence
  Synthetic polynucleotide encoding artificial human antibody CDR-L1 region
agcagtgacgttggtggttataactat

SEQ ID NO: 2188 - DNA, 18 bp, Artificial Sequence
  Synthetic polynucleotide encoding artificial human antibody CDR-L1 region
cagagtattaatatctgg

SEQ ID NO: 2189 - DNA, 36 bp, Artificial Sequence
  Synthetic polynucleotide encoding artificial human antibody CDR-L1 region
cagagtgttttatacagctccaacaataagaaccag

SEQ ID NO: 2190 - DNA, 24 bp, Artificial Sequence
  Synthetic polynucleotide encoding artificial human antibody CDR-L1 region
agctccaacatcggcagtaatact

SEQ ID NO: 2191 - DNA, 18 bp, Artificial Sequence
  Synthetic polynucleotide encoding artificial human antibody CDR-L1 region
cagagcattagcagctat

SEQ ID NO: 2192 - DNA, 18 bp, Artificial Sequence
  Synthetic polynucleotide encoding artificial human antibody CDR-L1 region
cagggcattagcaattat

SEQ ID NO: 2193 - DNA, 27 bp, Artificial Sequence
  Synthetic polynucleotide encoding artificial human antibody CDR-L1 region
agcaatgacgttggttattataattat

SEQ ID NO: 2194 - DNA, 27 bp, Artificial Sequence
  Synthetic polynucleotide encoding artificial human antibody CDR-L1 region
agctccaacatcggggcaggttatgct

SEQ ID NO: 2195 - DNA, 18 bp, Artificial Sequence
  Synthetic polynucleotide encoding artificial human antibody CDR-L1 region
cagagtattagcacctac

SEQ ID NO: 2196 - DNA, 36 bp, Artificial Sequence
  Synthetic polynucleotide encoding artificial human antibody CDR-L1 region
cagaccgttttacacaactccaacgataaggactgc

SEQ ID NO: 2197 - DNA, 27 bp, Artificial Sequence
  Synthetic polynucleotide encoding artificial human antibody CDR-L1 region
agcagtgatatttatacttatgacctt

SEQ ID NO: 2198 - DNA, 24 bp, Artificial Sequence
  Synthetic polynucleotide encoding artificial human antibody CDR-L1 region
agctccaacattgggaataatttt

SEQ ID NO: 2199 - DNA, 27 bp, Artificial Sequence
  Synthetic polynucleotide encoding artificial human antibody CDR-L1 region
agcagtgatgttggtgcttataactat

SEQ ID NO: 2200 - DNA, 27 bp, Artificial Sequence
  Synthetic polynucleotide encoding artificial human antibody CDR-L1 region
agcgatgacgttggtggttataattat

SEQ ID NO: 2201 - DNA, 24 bp, Artificial Sequence
  Synthetic polynucleotide encoding artificial human antibody CDR-L1 region
acctccaatatcggaactaatact

SEQ ID NO: 2202 - DNA, 18 bp, Artificial Sequence
  Synthetic polynucleotide encoding artificial human antibody CDR-L1 region
cagactgttagcaccttc

SEQ ID NO: 2203 - DNA, 24 bp, Artificial Sequence
  Synthetic polynucleotide encoding artificial human antibody CDR-L1 region
agctccaacatcggacgtaataat

SEQ ID NO: 2204 - DNA, 27 bp, Artificial Sequence
  Synthetic polynucleotide encoding artificial human antibody CDR-L1 region
agtaatgacgttggtggttatgaccgt

SEQ ID NO: 2205 - DNA, 21 bp, Artificial Sequence
  Synthetic polynucleotide encoding artificial human antibody CDR-L1 region
cagagtgttgccaacagcttc

SEQ ID NO: 2206 - DNA, 27 bp, Artificial Sequence
  Synthetic polynucleotide encoding artificial human antibody CDR-L1 region
agcagtgatgttggtggttataactat

SEQ ID NO: 2207 - DNA, 33 bp, Artificial Sequence
  Synthetic polynucleotide encoding artificial human antibody CDR-L1 region
caaagcctcgtagacagtgatcgaaacacctac

SEQ ID NO: 2208 - DNA, 18 bp, Artificial Sequence
  Synthetic polynucleotide encoding artificial human antibody CDR-L1 region
cagagtattagtagctgg

SEQ ID NO: 2209 - DNA, 27 bp, Artificial Sequence
  Synthetic polynucleotide encoding artificial human antibody CDR-L1 region
agcagtgatgttggtggttataactat

SEQ ID NO: 2210 - DNA, 24 bp, Artificial Sequence
  Synthetic polynucleotide encoding artificial human antibody CDR-L1 region
acctccaatatcggaagtaatact

SEQ ID NO: 2211 - DNA, 33 bp, Artificial Sequence
  Synthetic polynucleotide encoding artificial human antibody CDR-L1 region
caaagcctcgtacacagtgacggaaacacctac

SEQ ID NO: 2212 - DNA, 27 bp, Artificial Sequence
  Synthetic polynucleotide encoding artificial human antibody CDR-L1 region
agcggtgacgttggtggttataagttt

SEQ ID NO: 2213 - DNA, 18 bp, Artificial Sequence
  Synthetic polynucleotide encoding artificial human antibody CDR-L1 region
cagaacattaaaaattat

SEQ ID NO: 2214 - DNA, 27 bp, Artificial Sequence
  Synthetic polynucleotide encoding artificial human antibody CDR-L1 region
agcaatgacattggtagtcatgaccgt

SEQ ID NO: 2215 - DNA, 21 bp, Artificial Sequence
  Synthetic polynucleotide encoding artificial human antibody CDR-L1 region
cagagtattagcagtagctat

SEQ ID NO: 2216 - DNA, 21 bp, Artificial Sequence
  Synthetic polynucleotide encoding artificial human antibody CDR-L1 region
cagagtgtgaccagcagccac

SEQ ID NO: 2217 - DNA, 21 bp, Artificial Sequence
  Synthetic polynucleotide encoding artificial human antibody CDR-L1 region
cagagtcttagcggcgcctac

SEQ ID NO: 2218 - DNA, 27 bp, Artificial Sequence
  Synthetic polynucleotide encoding artificial human antibody CDR-L1 region
aacagtgatgttggtgcttataactat

SEQ ID NO: 2219 - DNA, 27 bp, Artificial Sequence
  Synthetic polynucleotide encoding artificial human antibody CDR-L1 region
agcagtgacgttggtggttataactat

SEQ ID NO: 2220 - DNA, 18 bp, Artificial Sequence
  Synthetic polynucleotide encoding artificial human antibody CDR-L1 region
cagagtattggtgactgg

SEQ ID NO: 2221 - DNA, 18 bp, Artificial Sequence
  Synthetic polynucleotide encoding artificial human antibody CDR-L1 region
aaattgggggatagatat

SEQ ID NO: 2222 - DNA, 18 bp, Artificial Sequence
  Synthetic polynucleotide encoding artificial human antibody CDR-L1 region
cagggcattagcagttat

SEQ ID NO: 2223 - DNA, 18 bp, Artificial Sequence
  Synthetic polynucleotide encoding artificial human antibody CDR-L1 region
cagggcattagcaattat

SEQ ID NO: 2224 - DNA, 27 bp, Artificial Sequence
  Synthetic polynucleotide encoding artificial human antibody CDR-L1 region
aacagtgacattggtacttatgaccgt

SEQ ID NO: 2225 - DNA, 24 bp, Artificial Sequence
  Synthetic polynucleotide encoding artificial human antibody CDR-L1 region
agctccaacatcggaagtcatact

SEQ ID NO: 2226 - DNA, 18 bp, Artificial Sequence
  Synthetic polynucleotide encoding artificial human antibody CDR-L1 region
cagagtattagtacctcg

SEQ ID NO: 2227 - DNA, 33 bp, Artificial Sequence; identical to SEQ ID NO: 1264
  Synthetic polynucleotide encoding artificial human antibody CDR-L1 region

SEQ ID NO: 2228 - DNA, 27 bp, Artificial Sequence
  Synthetic polynucleotide encoding artificial human antibody CDR-L1 region
agctccaacatcggggcaggttatcct

SEQ ID NO: 2229 - DNA, 36 bp, Artificial Sequence; identical to SEQ ID NO: 1290
  Synthetic polynucleotide encoding artificial human antibody CDR-L1 region

SEQ ID NO: 2230 - DNA, 24 bp, Artificial Sequence
  Synthetic polynucleotide encoding artificial human antibody CDR-L1 region
agtttcaacatcggcagaaacaat

SEQ ID NO: 2231 - DNA, 18 bp, Artificial Sequence
  Synthetic polynucleotide encoding artificial human antibody CDR-L1 region
cagagtgttagcacctac

SEQ ID NO: 2232 - DNA, 36 bp, Artificial Sequence
  Synthetic polynucleotide encoding artificial human antibody CDR-L1 region
cagagtattttacacagcggcaccaataagaatcgc

SEQ ID NO: 2233 - DNA, 27 bp, Artificial Sequence
  Synthetic polynucleotide encoding artificial human antibody CDR-L1 region
agcagtgatgttgggagttatgacctt

SEQ ID NO: 2234 - DNA, 18 bp, Artificial Sequence
  Synthetic polynucleotide encoding artificial human antibody CDR-L1 region
cagagtgttagcagctac

SEQ ID NO: 2235 - DNA, 18 bp, Artificial Sequence
  Synthetic polynucleotide encoding artificial human antibody CDR-L1 region
gcattgccaaaaaaatat

SEQ ID NO: 2236 - DNA, 21 bp, Artificial Sequence
  Synthetic polynucleotide encoding artificial human antibody CDR-L1 region
actgaacacagcggcaacgcc

SEQ ID NO: 2237 - DNA, 27 bp, Artificial Sequence
  Synthetic polynucleotide encoding artificial human antibody CDR-L1 region
agcagtgacgttggtagttataaccgt

SEQ ID NO: 2238 - DNA, 27 bp, Artificial Sequence
  Synthetic polynucleotide encoding artificial human antibody CDR-L1 region
agccgtgatattgggacttataaccgt

SEQ ID NO: 2239 - DNA, 36 bp, Artificial Sequence
  Synthetic polynucleotide encoding artificial human antibody CDR-L1 region
cagagtattttacacagccccaccaataagaaccgt

SEQ ID NO: 2240 - DNA, 18 bp, Artificial Sequence
  Synthetic polynucleotide encoding artificial human antibody CDR-L1 region
cagagtgttggcaactcc

SEQ ID NO: 2241 - DNA, 27 bp, Artificial Sequence
  Synthetic polynucleotide encoding artificial human antibody CDR-L1 region
agcagtgatgttggtggttataactat

SEQ ID NO: 2242 - DNA, 18 bp, Artificial Sequence
  Synthetic polynucleotide encoding artificial human antibody CDR-L1 region
cagggcattgccaatttt

SEQ ID NO: 2243 - DNA, 18 bp, Artificial Sequence
  Synthetic polynucleotide encoding artificial human antibody CDR-L1 region
aatttggtggatagattt

SEQ ID NO: 2244 - DNA, 27 bp, Artificial Sequence
  Synthetic polynucleotide encoding artificial human antibody CDR-L1 region
actggagttgtcaccagtggtcattat

SEQ ID NO: 2245 - DNA, 18 bp, Artificial Sequence
  Synthetic polynucleotide encoding artificial human antibody CDR-L1 region
cagagtgttgggagcaag

SEQ ID NO: 2246 - DNA, 24 bp, Artificial Sequence
  Synthetic polynucleotide encoding artificial human antibody CDR-L1 region
agctccaacatcggaagtaatact

SEQ ID NO: 2247 - DNA, 27 bp, Artificial Sequence
  Synthetic polynucleotide encoding artificial human antibody CDR-L1 region
agcagtgacgttggtatttataaccgt

SEQ ID NO: 2248 - DNA, 36 bp, Artificial Sequence
  Synthetic polynucleotide encoding artificial human antibody CDR-L1 region
cggagtgttttatataactccaacaataagaactac

SEQ ID NO: 2249 - DNA, 21 bp, Artificial Sequence
  Synthetic polynucleotide encoding artificial human antibody CDR-L1 region
cagagtcttagtggcggccag

SEQ ID NO: 2250 - DNA, 27 bp, Artificial Sequence
  Synthetic polynucleotide encoding artificial human antibody CDR-L1 region
agcagtgatgttggtgcttataactat

SEQ ID NO: 2251 - DNA, 18 bp, Artificial Sequence
  Synthetic polynucleotide encoding artificial human antibody CDR-L1 region
cgggatattcgtacttgg

SEQ ID NO: 2252 - DNA, 18 bp, Artificial Sequence
  Synthetic polynucleotide encoding artificial human antibody CDR-L1 region
cagagtgttagtagctgg

SEQ ID NO: 2253 - DNA, 18 bp, Artificial Sequence
  Synthetic polynucleotide encoding artificial human antibody CDR-L1 region
cagggtattaacatctgg

SEQ ID NO: 2254 - DNA, 27 bp, Artificial Sequence
  Synthetic polynucleotide encoding artificial human antibody CDR-L1 region
agtaatgacgttggtggttatgaccgt

SEQ ID NO: 2255 - DNA, 27 bp, Artificial Sequence
  Synthetic polynucleotide encoding artificial human antibody CDR-L1 region
agctccaacatcgggccaggttatggt

SEQ ID NO: 2256 - DNA, 18 bp, Artificial Sequence
  Synthetic polynucleotide encoding artificial human antibody CDR-L1 region
cagggtattagcagctgg

SEQ ID NO: 2257 - DNA, 36 bp, Artificial Sequence
  Synthetic polynucleotide encoding artificial human antibody CDR-L1 region
cagagtgttttccagagcaccaccaataagaattac

SEQ ID NO: 2258 - DNA, 18 bp, Artificial Sequence
  Synthetic polynucleotide encoding artificial human antibody CDR-L1 region
cagacttttggcaactac

SEQ ID NO: 2259 - DNA, 18 bp, Artificial Sequence
  Synthetic polynucleotide encoding artificial human antibody CDR-L1 region
cagagtgttactaccaac

SEQ ID NO: 2260 - DNA, 21 bp, Artificial Sequence
  Synthetic polynucleotide encoding artificial human antibody CDR-L1 region
cagagtgttagcagcatctac

SEQ ID NO: 2261 - DNA, 18 bp, Artificial Sequence
  Synthetic polynucleotide encoding artificial human antibody CDR-L1 region
cagagtattagtagctgg

SEQ ID NO: 2262 - DNA, 27 bp, Artificial Sequence
  Synthetic polynucleotide encoding artificial human antibody CDR-L1 region
acctccaatatcggggcaggttatgat

SEQ ID NO: 2263 - DNA, 18 bp, Artificial Sequence
  Synthetic polynucleotide encoding artificial human antibody CDR-L1 region
aaattgggggataaatat

SEQ ID NO: 2264 - DNA, 18 bp, Artificial Sequence
  Synthetic polynucleotide encoding artificial human antibody CDR-L1 region
cagactgttggtgcctcc

SEQ ID NO: 2265 - DNA, 18 bp, Artificial Sequence
  Synthetic polynucleotide encoding artificial human antibody CDR-L1 region
cggggcattaatatctgg

SEQ ID NO: 2266 - DNA, 24 bp, Artificial Sequence
  Synthetic polynucleotide encoding artificial human antibody CDR-L1 region
acctccaatatcggaagtaacact

SEQ ID NO: 2267 - DNA, 21 bp, Artificial Sequence
  Synthetic polynucleotide encoding artificial human antibody CDR-L1 region
cagagtgttagcaacaggtac

SEQ ID NO: 2268 - DNA, 18 bp, Artificial Sequence
  Synthetic polynucleotide encoding artificial human antibody CDR-L1 region
cagagcattagcagctat

SEQ ID NO: 2269 - DNA, 18 bp, Artificial Sequence
  Synthetic polynucleotide encoding artificial human antibody CDR-L1 region
gtactggcaaaaaaatat

SEQ ID NO: 2270 - DNA, 27 bp, Artificial Sequence
  Synthetic polynucleotide encoding artificial human antibody CDR-L1 region
agcaatgacattggtagtcatgaccgt

SEQ ID NO: 2271 - DNA, 18 bp, Artificial Sequence
  Synthetic polynucleotide encoding artificial human antibody CDR-L1 region
cagggtgttagcagtttg

SEQ ID NO: 2272 - DNA, 36 bp, Artificial Sequence
  Synthetic polynucleotide encoding artificial human antibody CDR-L1 region
cagaatgttttatccagctccaacaataagaactac

SEQ ID NO: 2273 - DNA, 18 bp, Artificial Sequence
  Synthetic polynucleotide encoding artificial human antibody CDR-L1 region
cagagtgttgttacttgg

SEQ ID NO: 2274 - DNA, 36 bp, Artificial Sequence
  Synthetic polynucleotide encoding artificial human antibody CDR-L1 region
cagagtgttttacacagccccaccgataagaaccgc

SEQ ID NO: 2275 - DNA, 24 bp, Artificial Sequence
  Synthetic polynucleotide encoding artificial human antibody CDR-L1 region
agctccaacatcggaagtaatcct

SEQ ID NO: 2276 - DNA, 18 bp, Artificial Sequence
  Synthetic polynucleotide encoding artificial human antibody CDR-L1 region
cagagtattagtgattgg

SEQ ID NO: 2277 - DNA, 36 bp, Artificial Sequence
  Synthetic polynucleotide encoding artificial human antibody CDR-L1 region
cacagtgttttctacagctcccacaataagagcttc

SEQ ID NO: 2278 - DNA, 24 bp, Artificial Sequence
  Synthetic polynucleotide encoding artificial human antibody CDR-L1 region
agctccaacatcggaagtaattat

SEQ ID NO: 2279 - DNA, 18 bp, Artificial Sequence
  Synthetic polynucleotide encoding artificial human antibody CDR-L1 region
cagagtgttagcacctac

SEQ ID NO: 2280 - DNA, 18 bp, Artificial Sequence
  Synthetic polynucleotide encoding artificial human antibody CDR-L1 region
cagggcattagaaatgat

SEQ ID NO: 2281 - DNA, 36 bp, Artificial Sequence
  Synthetic polynucleotide encoding artificial human antibody CDR-L1 region
cagagtgttttgtccaccgccgacaataagaattac

SEQ ID NO: 2282 - DNA, 33 bp, Artificial Sequence; identical to SEQ ID NO: 1264
  Synthetic polynucleotide encoding artificial human antibody CDR-L1 region

SEQ ID NO: 2283 - DNA, 27 bp, Artificial Sequence
  Synthetic polynucleotide encoding artificial human antibody CDR-L1 region
agcagtgatgttgggggttataacctt

SEQ ID NO: 2284 - DNA, 33 bp, Artificial Sequence
  Synthetic polynucleotide encoding artificial human antibody CDR-L1 region
caaagcctcgtacacagtgatcgtaacacctac

SEQ ID NO: 2285 - DNA, 27 bp, Artificial Sequence
  Synthetic polynucleotide encoding artificial human antibody CDR-L1 region
agcagtgacattggtggttataactat

SEQ ID NO: 2286 - DNA, 21 bp, Artificial Sequence
  Synthetic polynucleotide encoding artificial human antibody CDR-L1 region
cagactgttagcagcagctac

SEQ ID NO: 2287 - DNA, 18 bp, Artificial Sequence
  Synthetic polynucleotide encoding artificial human antibody CDR-L1 region
cagagtgttggcagcaac

SEQ ID NO: 2288 - DNA, 18 bp, Artificial Sequence
  Synthetic polynucleotide encoding artificial human antibody CDR-L1 region
cagcccatgggcaattat

SEQ ID NO: 2289 - DNA, 18 bp, Artificial Sequence
  Synthetic polynucleotide encoding artificial human antibody CDR-L1 region
agtctcaaaaccttttat

SEQ ID NO: 2290 - DNA, 18 bp, Artificial Sequence
  Synthetic polynucleotide encoding artificial human antibody CDR-L1 region
gcattgccaagaaaattt

SEQ ID NO: 2291 - DNA, 24 bp, Artificial Sequence
  Synthetic polynucleotide encoding artificial human antibody CDR-L1 region
agctccaacatcggacgtaatctt

SEQ ID NO: 2292 - DNA, 24 bp, Artificial Sequence
  Synthetic polynucleotide encoding artificial human antibody CDR-L1 region
acctccaacatcggaagcaatact

SEQ ID NO: 2293 - DNA, 18 bp, Artificial Sequence
  Synthetic polynucleotide encoding artificial human antibody CDR-L1 region
cagagtgttagcaactcc

SEQ ID NO: 2294 - DNA, 21 bp, Artificial Sequence
  Synthetic polynucleotide encoding artificial human antibody CDR-L1 region
cgggctgttaccggcaactac

SEQ ID NO: 2295 - DNA, 27 bp, Artificial Sequence
  Synthetic polynucleotide encoding artificial human antibody CDR-L1 region
agcagtgacgttggtggttataactat

SEQ ID NO: 2296 - DNA, 18 bp, Artificial Sequence
  Synthetic polynucleotide encoding artificial human antibody CDR-L1 region
cagactattgataggtgg

SEQ ID NO: 2297 - DNA, 18 bp, Artificial Sequence
  Synthetic polynucleotide encoding artificial human antibody CDR-L1 region
cagggcattggaacttat

SEQ ID NO: 2298 - DNA, 36 bp, Artificial Sequence
  Synthetic polynucleotide encoding artificial human antibody CDR-L1 region
cagagtgttttatggacctccaatgataagaattac

SEQ ID NO: 2299 - DNA, 27 bp, Artificial Sequence
  Synthetic polynucleotide encoding artificial human antibody CDR-L1 region
agcactgacattggtctttctaatcat

SEQ ID NO: 2300 - DNA, 36 bp, Artificial Sequence; identical to SEQ ID NO: 1290
  Synthetic polynucleotide encoding artificial human antibody CDR-L1 region

SEQ ID NO: 2301 - DNA, 21 bp, Artificial Sequence
  Synthetic polynucleotide encoding artificial human antibody CDR-L1 region
cagagtgttagcagcagctac

SEQ ID NO: 2302 - DNA, 21 bp, Artificial Sequence
  Synthetic polynucleotide encoding artificial human antibody CDR-L1 region
agtggccagagtaggtacccc

SEQ ID NO: 2303 - DNA, 18 bp, Artificial Sequence
  Synthetic polynucleotide encoding artificial human antibody CDR-L1 region
aatttgggggataagtat

SEQ ID NO: 2304 - DNA, 27 bp, Artificial Sequence
  Synthetic polynucleotide encoding artificial human antibody CDR-L1 region
agcagtgatgttggtggttataactat

SEQ ID NO: 2305 - DNA, 27 bp, Artificial Sequence
  Synthetic polynucleotide encoding artificial human antibody CDR-L1 region
agcagtgatgttggcggatataactat

SEQ ID NO: 2306 - DNA, 21 bp, Artificial Sequence
  Synthetic polynucleotide encoding artificial human antibody CDR-L1 region
cagagtgttagcggcaactac

SEQ ID NO: 2307 - DNA, 24 bp, Artificial Sequence
  Synthetic polynucleotide encoding artificial human antibody CDR-L1 region
ggctccaacattggcagtagtttt

SEQ ID NO: 2308 - DNA, 24 bp, Artificial Sequence
  Synthetic polynucleotide encoding artificial human antibody CDR-L1 region
atctccaacgtcagaagtaatcct

SEQ ID NO: 2309 - DNA, 18 bp, Artificial Sequence
  Synthetic polynucleotide encoding artificial human antibody CDR-L1 region
cagggtattagcagctgg

SEQ ID NO: 2310 - DNA, 21 bp, Artificial Sequence
  Synthetic polynucleotide encoding artificial human antibody CDR-L1 region
cagagtgttagcagcagctac

SEQ ID NO: 2311 - DNA, 18 bp, Artificial Sequence
  Synthetic polynucleotide encoding artificial human antibody CDR-L1 region
cagagtattaggatatat

SEQ ID NO: 2312 - DNA, 18 bp, Artificial Sequence
  Synthetic polynucleotide encoding artificial human antibody CDR-L1 region
cagggtgttaacagaaac

SEQ ID NO: 2313 - DNA, 18 bp, Artificial Sequence
  Synthetic polynucleotide encoding artificial human antibody CDR-L1 region
cagggcattagcaattat

SEQ ID NO: 2314 - DNA, 33 bp, Artificial Sequence; identical to SEQ ID NO: 1264
  Synthetic polynucleotide encoding artificial human antibody CDR-L1 region

SEQ ID NO: 2315 - DNA, 27 bp, Artificial Sequence
  Synthetic polynucleotide encoding artificial human antibody CDR-L1 region
agcagtgacgttggtggttataactat

SEQ ID NO: 2316 - DNA, 24 bp, Artificial Sequence
  Synthetic polynucleotide encoding artificial human antibody CDR-L1 region
agcaccaatattgggcataatttt

SEQ ID NO: 2317 - DNA, 33 bp, Artificial Sequence; identical to SEQ ID NO: 1263
  Synthetic polynucleotide encoding artificial human antibody CDR-L1 region

SEQ ID NO: 2318 - DNA, 18 bp, Artificial Sequence
  Synthetic polynucleotide encoding artificial human antibody CDR-L1 region
aaattgggggataaatat

SEQ ID NO: 2319 - DNA, 24 bp, Artificial Sequence
  Synthetic polynucleotide encoding artificial human antibody CDR-L1 region
aactccaacatcggaagtaattat

SEQ ID NO: 2320 - DNA, 18 bp, Artificial Sequence
  Synthetic polynucleotide encoding artificial human antibody CDR-L1 region
cagagtgttagcagctac

SEQ ID NO: 2321 - DNA, 36 bp, Artificial Sequence
  Synthetic polynucleotide encoding artificial human antibody CDR-L1 region
cagactattttatacagctccatcaataagaactgc

SEQ ID NO: 2322 - DNA, 24 bp, Artificial Sequence
  Synthetic polynucleotide encoding artificial human antibody CDR-L1 region
agctccaacatcggaagtaattat

SEQ ID NO: 2323 - DNA, 18 bp, Artificial Sequence
  Synthetic polynucleotide encoding artificial human antibody CDR-L1 region
caagacattagcgattat

SEQ ID NO: 2324 - DNA, 27 bp, Artificial Sequence
  Synthetic polynucleotide encoding artificial human antibody CDR-L1 region
agcagtgatgttgggagttataacctt

SEQ ID NO: 2325 - DNA, 24 bp, Artificial Sequence
  Synthetic polynucleotide encoding artificial human antibody CDR-L1 region
agctccaacatcggaagtaatact

SEQ ID NO: 2326 - DNA, 24 bp, Artificial Sequence
  Synthetic polynucleotide encoding artificial human antibody CDR-L1 region
agctccaacatcggaagtaatact

SEQ ID NO: 2327 - DNA, 21 bp, Artificial Sequence
  Synthetic polynucleotide encoding artificial human antibody CDR-L1 region
cagcagattatcagagcctac

SEQ ID NO: 2328 - DNA, 24 bp, Artificial Sequence
  Synthetic polynucleotide encoding artificial human antibody CDR-L1 region
agctccaacattgggaataattac

SEQ ID NO: 2329 - DNA, 27 bp, Artificial Sequence
  Synthetic polynucleotide encoding artificial human antibody CDR-L1 region
tctggctcagtctctactacttactac

SEQ ID NO: 2330 - DNA, 33 bp, Artificial Sequence
  Synthetic polynucleotide encoding artificial human antibody CDR-L1 region
caaagcctcgtacacagtgatggaaacacccac

SEQ ID NO: 2331 - DNA, 33 bp, Artificial Sequence; identical to SEQ ID NO: 1263
  Synthetic polynucleotide encoding artificial human antibody CDR-L1 region

SEQ ID NO: 2332 - DNA, 27 bp, Artificial Sequence
  Synthetic polynucleotide encoding artificial human antibody CDR-L1 region
agcagtgacgttggtggttataactat

SEQ ID NO: 2333 - DNA, 24 bp, Artificial Sequence
  Synthetic polynucleotide encoding artificial human antibody CDR-L1 region
agctccaacatcggaagcaatacc

SEQ ID NO: 2334 - DNA, 33 bp, Artificial Sequence; identical to SEQ ID NO: 1264
  Synthetic polynucleotide encoding artificial human antibody CDR-L1 region

SEQ ID NO: 2335 - DNA, 24 bp, Artificial Sequence
  Synthetic polynucleotide encoding artificial human antibody CDR-L1 region
agctccaacatcgggagtaatact

SEQ ID NO: 2336 - DNA, 18 bp, Artificial Sequence
  Synthetic polynucleotide encoding artificial human antibody CDR-L1 region
cagagtgttgatgactgg

SEQ ID NO: 2337 - DNA, 27 bp, Artificial Sequence
  Synthetic polynucleotide encoding artificial human antibody CDR-L1 region
aacagtgacattggtgcttataattat

SEQ ID NO: 2338 - DNA, 27 bp, Artificial Sequence
  Synthetic polynucleotide encoding artificial human antibody CDR-L1 region
agcagtgacgttggtggttataactat

SEQ ID NO: 2339 - DNA, 21 bp, Artificial Sequence
  Synthetic polynucleotide encoding artificial human antibody CDR-L1 region
agtgggcacagcagttacgcc

SEQ ID NO: 2340 - DNA, 27 bp, Artificial Sequence
  Synthetic polynucleotide encoding artificial human antibody CDR-L1 region
agctccaacatcggggcaggttatgat

SEQ ID NO: 2341 - DNA, 18 bp, Artificial Sequence
  Synthetic polynucleotide encoding artificial human antibody CDR-L1 region
agcctcagaagctattat

SEQ ID NO: 2342 - DNA, 27 bp, Artificial Sequence
  Synthetic polynucleotide encoding artificial human antibody CDR-L1 region
ggcagtgatgttgagacttatcacctt

SEQ ID NO: 2343 - DNA, 21 bp, Artificial Sequence
  Synthetic polynucleotide encoding artificial human antibody CDR-L1 region
cagagtgttaggaacaatttc

SEQ ID NO: 2344 - DNA, 21 bp, Artificial Sequence
  Synthetic polynucleotide encoding artificial human antibody CDR-L1 region
cagactgttagcggcggctcc

SEQ ID NO: 2345 - DNA, 33 bp, Artificial Sequence
  Synthetic polynucleotide encoding artificial human antibody CDR-L1 region
caaagcctcgtacacagtgatggaagcacccac

SEQ ID NO: 2346 - DNA, 27 bp, Artificial Sequence
  Synthetic polynucleotide encoding artificial human antibody CDR-L1 region
agcagtgacgttggtggttataactat

SEQ ID NO: 2347 - DNA, 27 bp, Artificial Sequence
  Synthetic polynucleotide encoding artificial human antibody CDR-L1 region
agcagtgatgttggtggttatgactat

SEQ ID NO: 2348 - DNA, 18 bp, Artificial Sequence
  Synthetic polynucleotide encoding artificial human antibody CDR-L1 region
gtactggcaaaaaaatat

SEQ ID NO: 2349 - DNA, 36 bp, Artificial Sequence
  Synthetic polynucleotide encoding artificial human antibody CDR-L1 region
cagcctattttatacagccccaacaatcagaactcc

SEQ ID NO: 2350 - DNA, 24 bp, Artificial Sequence
  Synthetic polynucleotide encoding artificial human antibody CDR-L1 region
agctccaacatcggaagtaaaatt

SEQ ID NO: 2351 - DNA, 18 bp, Artificial Sequence
  Synthetic polynucleotide encoding artificial human antibody CDR-L1 region
cagggcattagaaataat

SEQ ID NO: 2352 - DNA, 18 bp, Artificial Sequence
  Synthetic polynucleotide encoding artificial human antibody CDR-L1 region
cagggcattaacatttat

SEQ ID NO: 2353 - DNA, 24 bp, Artificial Sequence
  Synthetic polynucleotide encoding artificial human antibody CDR-L1 region
agctccaacattgggagcacttat

SEQ ID NO: 2354 - DNA, 24 bp, Artificial Sequence
  Synthetic polynucleotide encoding artificial human antibody CDR-L1 region
agctccaacatcggaagtcattat

SEQ ID NO: 2355 - DNA, 21 bp, Artificial Sequence
  Synthetic polynucleotide encoding artificial human antibody CDR-L1 region
agtgggcacagcaactacgcc

SEQ ID NO: 2356 - DNA, 18 bp, Artificial Sequence
  Synthetic polynucleotide encoding artificial human antibody CDR-L1 region
cgcgacattaacacttat

SEQ ID NO: 2357 - DNA, 24 bp, Artificial Sequence
  Synthetic polynucleotide encoding artificial human antibody CDR-L1 region
agctccaacatcggaagtaatact

SEQ ID NO: 2358 - DNA, 18 bp, Artificial Sequence
  Synthetic polynucleotide encoding artificial human antibody CDR-L1 region
cagggtattagcagctgg

SEQ ID NO: 2359 - DNA, 18 bp, Artificial Sequence
  Synthetic polynucleotide encoding artificial human antibody CDR-L1 region
cagagtattagtagctgg

SEQ ID NO: 2360 - DNA, 18 bp, Artificial Sequence
  Synthetic polynucleotide encoding artificial human antibody CDR-L1 region
cagagtgttagcagctac

SEQ ID NO: 2361 - DNA, 21 bp, Artificial Sequence
  Synthetic polynucleotide encoding artificial human antibody CDR-L1 region
agtgggcacagcagttacgcc

SEQ ID NO: 2362 - DNA, 21 bp, Artificial Sequence
  Synthetic polynucleotide encoding artificial human antibody CDR-L1 region
agtgggcacagcagctacgcc

SEQ ID NO: 2363 - DNA, 33 bp, Artificial Sequence
  Synthetic polynucleotide encoding artificial human antibody CDR-L1 region
cagagcctcctgcacagtaatggaaagaccttt

SEQ ID NO: 2364 - DNA, 18 bp, Artificial Sequence
  Synthetic polynucleotide encoding artificial human antibody CDR-L1 region
cagagcattagcagctat

SEQ ID NO: 2365 - DNA, 18 bp, Artificial Sequence
  Synthetic polynucleotide encoding artificial human antibody CDR-L1 region
cagagtattgttaccttc

SEQ ID NO: 2366 - DNA, 24 bp, Artificial Sequence
  Synthetic polynucleotide encoding artificial human antibody CDR-L1 region
agctccaatgtcgggaggaattat

SEQ ID NO: 2367 - DNA, 21 bp, Artificial Sequence
  Synthetic polynucleotide encoding artificial human antibody CDR-L1 region
cagagtgtcagcaccagccag

SEQ ID NO: 2368 - DNA, 33 bp, Artificial Sequence; identical to SEQ ID NO: 1480
  Synthetic polynucleotide encoding artificial human antibody CDR-L1 region

SEQ ID NO: 2369 - DNA, 33 bp, Artificial Sequence
  Synthetic polynucleotide encoding artificial human antibody CDR-L1 region
cagagcctcctgcataggaatggacacacctat

SEQ ID NO: 2370 - DNA, 21 bp, Artificial Sequence
  Synthetic polynucleotide encoding artificial human antibody CDR-L1 region
agtgggcacagcaactacgcc

SEQ ID NO: 2371 - DNA, 18 bp, Artificial Sequence
  Synthetic polynucleotide encoding artificial human antibody CDR-L1 region
cagaatgttggcaactgg

SEQ ID NO: 2372 - DNA, 24 bp, Artificial Sequence
  Synthetic polynucleotide encoding artificial human antibody CDR-L1 region
aggtccaacatccgatataatgct

SEQ ID NO: 2373 - DNA, 27 bp, Artificial Sequence
  Synthetic polynucleotide encoding artificial human antibody CDR-L1 region
agctccaacatcggggcaggttatgat

SEQ ID NO: 2374 - DNA, 18 bp, Artificial Sequence
  Synthetic polynucleotide encoding artificial human antibody CDR-L1 region
cagaccattagtacctat

SEQ ID NO: 2375 - DNA, 27 bp, Artificial Sequence
  Synthetic polynucleotide encoding artificial human antibody CDR-L1 region
agcagtgacgttggtggttataactat

SEQ ID NO: 2376 - DNA, 18 bp, Artificial Sequence
  Synthetic polynucleotide encoding artificial human antibody CDR-L1 region
cagactataagcaccaac

SEQ ID NO: 2377 - DNA, 18 bp, Artificial Sequence
  Synthetic polynucleotide encoding artificial human antibody CDR-L1 region
aagagtattagtaactcc

SEQ ID NO: 2378 - DNA, 21 bp, Artificial Sequence
  Synthetic polynucleotide encoding artificial human antibody CDR-L1 region
cagagtgttagcagcagctac

SEQ ID NO: 2379 - DNA, 18 bp, Artificial Sequence
  Synthetic polynucleotide encoding artificial human antibody CDR-L1 region
gagagaattagtggctgg

SEQ ID NO: 2380 - DNA, 27 bp, Artificial Sequence
  Synthetic polynucleotide encoding artificial human antibody CDR-L1 region
agcagtgacgttggtggttataactat

SEQ ID NO: 2381 - DNA, 27 bp, Artificial Sequence
  Synthetic polynucleotide encoding artificial human antibody CDR-L1 region
acctccaacctcggggcaggtcacggt

SEQ ID NO: 2382 - DNA, 27 bp, Artificial Sequence
  Synthetic polynucleotide encoding artificial human antibody CDR-L1 region
agttccaacatcggggcaggttatgtt

SEQ ID NO: 2383 - DNA, 27 bp, Artificial Sequence
  Synthetic polynucleotide encoding artificial human antibody CDR-L1 region
actagtgacgttaacttttacaaatat

SEQ ID NO: 2384 - DNA, 24 bp, Artificial Sequence
  Synthetic polynucleotide encoding artificial human antibody CDR-L1 region
agtggcagcattgccgacaactat

SEQ ID NO: 2385 - DNA, 18 bp, Artificial Sequence
  Synthetic polynucleotide encoding artificial human antibody CDR-L1 region
cagagtgtagccaggaac

SEQ ID NO: 2386 - DNA, 27 bp, Artificial Sequence
  Synthetic polynucleotide encoding artificial human antibody CDR-L1 region
agcagtgatgttgggagttataacctt

SEQ ID NO: 2387 - DNA, 18 bp, Artificial Sequence
  Synthetic polynucleotide encoding artificial human antibody CDR-L1 region
cagagtgttagcagcaac

SEQ ID NO: 2388 - DNA, 18 bp, Artificial Sequence
  Synthetic polynucleotide encoding artificial human antibody CDR-L1 region
caatatattgccggttcc

SEQ ID NO: 2389 - DNA, 18 bp, Artificial Sequence
  Synthetic polynucleotide encoding artificial human antibody CDR-L1 region
cagagtgttatcagcaac

SEQ ID NO: 2390 - DNA, 18 bp, Artificial Sequence
  Synthetic polynucleotide encoding artificial human antibody CDR-L1 region
cagagttttacttcctgg

SEQ ID NO: 2391 - DNA, 21 bp, Artificial Sequence
  Synthetic polynucleotide encoding artificial human antibody CDR-L1 region
cagagtgttagcagcagctac

SEQ ID NO: 2392 - DNA, 21 bp, Artificial Sequence
  Synthetic polynucleotide encoding artificial human antibody CDR-L1 region
cagagtgttagcagcagttat

SEQ ID NO: 2393 - DNA, 36 bp, Artificial Sequence
  Synthetic polynucleotide encoding artificial human antibody CDR-L1 region
cagagtattttatatagctccaacgataagaactac

SEQ ID NO: 2394 - DNA, 18 bp, Artificial Sequence
  Synthetic polynucleotide encoding artificial human antibody CDR-L1 region
agcctcagaagctattat

SEQ ID NO: 2395 - DNA, 24 bp, Artificial Sequence
  Synthetic polynucleotide encoding artificial human antibody CDR-L1 region
agctccaacatcggagacaatttt

SEQ ID NO: 2396 - DNA, 33 bp, Artificial Sequence
  Synthetic polynucleotide encoding artificial human antibody CDR-L1 region
caaagcctcgttttcagtaatggaaacacctac

SEQ ID NO: 2397 - DNA, 36 bp, Artificial Sequence
  Synthetic polynucleotide encoding artificial human antibody CDR-L1 region
cagagtcttttatccagctacagcaataagaactac

SEQ ID NO: 2398 - DNA, 27 bp, Artificial Sequence
  Synthetic polynucleotide encoding artificial human antibody CDR-L1 region
agcagtgacgttggtggttataactat

SEQ ID NO: 2399 - DNA, 18 bp, Artificial Sequence
  Synthetic polynucleotide encoding artificial human antibody CDR-L1 region
cagaacattaatattgac

SEQ ID NO: 2400 - DNA, 18 bp, Artificial Sequence
  Synthetic polynucleotide encoding artificial human antibody CDR-L1 region
cagagtattagtaccttg

SEQ ID NO: 2401 - DNA, 18 bp, Artificial Sequence
  Synthetic polynucleotide encoding artificial human antibody CDR-L1 region
cagggcattagcaattat

SEQ ID NO: 2402 - DNA, 18 bp, Artificial Sequence
  Synthetic polynucleotide encoding artificial human antibody CDR-L1 region
gagagtgttggcaggtac

SEQ ID NO: 2403 - DNA, 27 bp, Artificial Sequence
  Synthetic polynucleotide encoding artificial human antibody CDR-L1 region
agtagtgacgttggcggttataagtat

SEQ ID NO: 2404 - DNA, 27 bp, Artificial Sequence
  Synthetic polynucleotide encoding artificial human antibody CDR-L1 region
agcagtgatgttgggagatatgaccgt

SEQ ID NO: 2405 - DNA, 18 bp, Artificial Sequence
  Synthetic polynucleotide encoding artificial human antibody CDR-L1 region
caggatactgataacagg

SEQ ID NO: 2406 - DNA, 27 bp, Artificial Sequence
  Synthetic polynucleotide encoding artificial human antibody CDR-L1 region
agcagtgactttggtggttataacctt

SEQ ID NO: 2407 - DNA, 18 bp, Artificial Sequence
  Synthetic polynucleotide encoding artificial human antibody CDR-L1 region
cagtacattagaaatgat

SEQ ID NO: 2408 - DNA, 27 bp, Artificial Sequence
  Synthetic polynucleotide encoding artificial human antibody CDR-L1 region
agcagtgccgttggtggttataagtat

SEQ ID NO: 2409 - DNA, 27 bp, Artificial Sequence
  Synthetic polynucleotide encoding artificial human antibody CDR-L1 region
agctccaacatcggggcaggttatgat

SEQ ID NO: 2410 - DNA, 24 bp, Artificial Sequence
  Synthetic polynucleotide encoding artificial human antibody CDR-L1 region
agtggcagcattgccagcaacttt

SEQ ID NO: 2411 - DNA, 18 bp, Artificial Sequence
  Synthetic polynucleotide encoding artificial human antibody CDR-L1 region
cagggcattaggaattat

SEQ ID NO: 2412 - DNA, 18 bp, Artificial Sequence
  Synthetic polynucleotide encoding artificial human antibody CDR-L1 region
cagagtgttagcaactcc

SEQ ID NO: 2413 - DNA, 27 bp, Artificial Sequence
  Synthetic polynucleotide encoding artificial human antibody CDR-L1 region
agctccgacatcggggcaggttatgat

SEQ ID NO: 2414 - DNA, 18 bp, Artificial Sequence
  Synthetic polynucleotide encoding artificial human antibody CDR-L1 region
cagagtattagtaactgg

SEQ ID NO: 2415 - DNA, 18 bp, Artificial Sequence
  Synthetic polynucleotide encoding artificial human antibody CDR-L1 region
cagggtattagcagctgg

SEQ ID NO: 2416 - DNA, 21 bp, Artificial Sequence
  Synthetic polynucleotide encoding artificial human antibody CDR-L1 region
cacagtattagatatacctac

SEQ ID NO: 2417 - DNA, 18 bp, Artificial Sequence
  Synthetic polynucleotide encoding artificial human antibody CDR-L1 region
caagatattagcaggtgg

SEQ ID NO: 2418 - DNA, 18 bp, Artificial Sequence
  Synthetic polynucleotide encoding artificial human antibody CDR-L1 region
cacagtgttggcgtctac

SEQ ID NO: 2419 - DNA, 18 bp, Artificial Sequence
  Synthetic polynucleotide encoding artificial human antibody CDR-L1 region
cagagtgttggcatcaac

SEQ ID NO: 2420 - DNA, 21 bp, Artificial Sequence
  Synthetic polynucleotide encoding artificial human antibody CDR-L1 region
cagagtgttagcagcagccag

SEQ ID NO: 2421 - DNA, 27 bp, Artificial Sequence
  Synthetic polynucleotide encoding artificial human antibody CDR-L1 region
agctccaacatcggggcaggttatgat

SEQ ID NO: 2422 - DNA, 21 bp, Artificial Sequence
  Synthetic polynucleotide encoding artificial human antibody CDR-L1 region
tatgaccacagggccttcatc

SEQ ID NO: 2423 - DNA, 18 bp, Artificial Sequence
  Synthetic polynucleotide encoding artificial human antibody CDR-L1 region
aaattgggggataaatat

SEQ ID NO: 2424 - DNA, 27 bp, Artificial Sequence
  Synthetic polynucleotide encoding artificial human antibody CDR-L1 region
tctggctcagtctcttctagtcactac

SEQ ID NO: 2425 - DNA, 18 bp, Artificial Sequence
  Synthetic polynucleotide encoding artificial human antibody CDR-L1 region
aaattgggggataaacat

SEQ ID NO: 2426 - DNA, 18 bp, Artificial Sequence
  Synthetic polynucleotide encoding artificial human antibody CDR-L1 region
cagggcattagcagttat

SEQ ID NO: 2427 - DNA, 21 bp, Artificial Sequence
  Synthetic polynucleotide encoding artificial human antibody CDR-L1 region
agtggacacagtaggtacgcc

SEQ ID NO: 2428 - DNA, 21 bp, Artificial Sequence
  Synthetic polynucleotide encoding artificial human antibody CDR-L1 region
agtgggcacagcaggtacgcc

SEQ ID NO: 2429 - DNA, 18 bp, Artificial Sequence
  Synthetic polynucleotide encoding artificial human antibody CDR-L1 region
cagagtgttagtaactgg

SEQ ID NO: 2430 - DNA, 18 bp, Artificial Sequence
  Synthetic polynucleotide encoding artificial human antibody CDR-L1 region
cagagtgtggacaactac

SEQ ID NO: 2431 - DNA, 18 bp, Artificial Sequence
  Synthetic polynucleotide encoding artificial human antibody CDR-L1 region
cagggcattagtacttat

SEQ ID NO: 2432 - DNA, 36 bp, Artificial Sequence; identical to SEQ ID NO: 1871
  Synthetic polynucleotide encoding artificial human antibody CDR-L1 region

SEQ ID NO: 2433 - DNA, 18 bp, Artificial Sequence
  Synthetic polynucleotide encoding artificial human antibody CDR-L1 region
cagagcattagcagctat

SEQ ID NO: 2434 - DNA, 21 bp, Artificial Sequence
  Synthetic polynucleotide encoding artificial human antibody CDR-L1 region
aatgggcacgatttttacgcc

SEQ ID NO: 2435 - DNA, 18 bp, Artificial Sequence
  Synthetic polynucleotide encoding artificial human antibody CDR-L1 region
caggacattagaagtgat

SEQ ID NO: 2436 - DNA, 21 bp, Artificial Sequence
  Synthetic polynucleotide encoding artificial human antibody CDR-L1 region
agtgggcgcaccaggtacgcc

SEQ ID NO: 2437 - DNA, 18 bp, Artificial Sequence
  Synthetic polynucleotide encoding artificial human antibody CDR-L1 region
cagagtgttagcagctac

SEQ ID NO: 2438 - DNA, 18 bp, Artificial Sequence
  Synthetic polynucleotide encoding artificial human antibody CDR-L1 region
cagagtgttagtagcaag

SEQ ID NO: 2439 - DNA, 21 bp, Artificial Sequence
  Synthetic polynucleotide encoding artificial human antibody CDR-L1 region
agtgggcacagcggctacgac

SEQ ID NO: 2440 - DNA, 18 bp, Artificial Sequence
  Synthetic polynucleotide encoding artificial human antibody CDR-L1 region
aacattggaaataaagat

SEQ ID NO: 2441 - DNA, 24 bp, Artificial Sequence
  Synthetic polynucleotide encoding artificial human antibody CDR-L1 region
acctccaagatcggacgtaatcat

SEQ ID NO: 2442 - DNA, 36 bp, Artificial Sequence; identical to SEQ ID NO: 1290
  Synthetic polynucleotide encoding artificial human antibody CDR-L1 region

SEQ ID NO: 2443 - DNA, 18 bp, Artificial Sequence
  Synthetic polynucleotide encoding artificial human antibody CDR-L1 region
cagagtattagcagcacc

SEQ ID NO: 2444 - DNA, 33 bp, Artificial Sequence
  Synthetic polynucleotide encoding artificial human antibody CDR-L1 region
caaagcctcgtatacagagatggagacacctac

SEQ ID NO: 2445 - DNA, 21 bp, Artificial Sequence
  Synthetic polynucleotide encoding artificial human antibody CDR-L1 region
cagagtgttagcagcagctac

SEQ ID NO: 2446 - DNA, 21 bp, Artificial Sequence
  Synthetic polynucleotide encoding artificial human antibody CDR-L1 region
cagagtgttagcagcaactac

SEQ ID NO: 2447 - DNA, 18 bp, Artificial Sequence
  Synthetic polynucleotide encoding artificial human antibody CDR-L1 region
cagagcattagcaacaat

SEQ ID NO: 2448 - DNA, 27 bp, Artificial Sequence
  Synthetic polynucleotide encoding artificial human antibody CDR-L1 region
agcagtgacgttggtggttataactat

SEQ ID NO: 2449 - DNA, 33 bp, Artificial Sequence; identical to SEQ ID NO: 1263
  Synthetic polynucleotide encoding artificial human antibody CDR-L1 region

SEQ ID NO: 2450 - DNA, 18 bp, Artificial Sequence
  Synthetic polynucleotide encoding artificial human antibody CDR-L1 region
cagagtgttaacagtaac

SEQ ID NO: 2451 - DNA, 36 bp, Artificial Sequence
  Synthetic polynucleotide encoding artificial human antibody CDR-L1 region
cagaatgtttttttccagtccaacaataagaactac

SEQ ID NO: 2452 - DNA, 24 bp, Artificial Sequence
  Synthetic polynucleotide encoding artificial human antibody CDR-L1 region
aacaacaatgttggcaaccaagga

SEQ ID NO: 2453 - DNA, 24 bp, Artificial Sequence
  Synthetic polynucleotide encoding artificial human antibody CDR-L1 region
agttccagtattgggaataattat

SEQ ID NO: 2454 - DNA, 18 bp, Artificial Sequence
  Synthetic polynucleotide encoding artificial human antibody CDR-L1 region
gtactggcaaaaaaatat

SEQ ID NO: 2455 - DNA, 18 bp, Artificial Sequence
  Synthetic polynucleotide encoding artificial human antibody CDR-L1 region
gcattgccaaagcaatat

SEQ ID NO: 2456 - DNA, 18 bp, Artificial Sequence
  Synthetic polynucleotide encoding artificial human antibody CDR-L1 region
cagagtgtccgatccaat

SEQ ID NO: 2457 - DNA, 36 bp, Artificial Sequence
  Synthetic polynucleotide encoding artificial human antibody CDR-L1 region
cacagtcttttttatacctccgagaataccaactac

SEQ ID NO: 2458 - DNA, 18 bp, Artificial Sequence
  Synthetic polynucleotide encoding artificial human antibody CDR-L1 region
aacattggaagtaaaagt

SEQ ID NO: 2459 - DNA, 18 bp, Artificial Sequence
  Synthetic polynucleotide encoding artificial human antibody CDR-L1 region
cagagtattagtagctgg

SEQ ID NO: 2460 - DNA, 18 bp, Artificial Sequence
  Synthetic polynucleotide encoding artificial human antibody CDR-L1 region
caggatattagtagttgg

SEQ ID NO: 2461 - DNA, 27 bp, Artificial Sequence
  Synthetic polynucleotide encoding artificial human antibody CDR-L1 region
tcctccaatctcggggaaggatatgat

SEQ ID NO: 2462 - DNA, 27 bp, Artificial Sequence
  Synthetic polynucleotide encoding artificial human antibody CDR-L1 region
agcagtgacgttggtggttataactat

SEQ ID NO: 2463 - DNA, 27 bp, Artificial Sequence
  Synthetic polynucleotide encoding artificial human antibody CDR-L1 region
actggagatgtcaccattggtcattac

SEQ ID NO: 2464 - DNA, 27 bp, Artificial Sequence
  Synthetic polynucleotide encoding artificial human antibody CDR-L1 region
agctccaacatcggggcaggttatgat

SEQ ID NO: 2465 - DNA, 27 bp, Artificial Sequence
  Synthetic polynucleotide encoding artificial human antibody CDR-L1 region
agctccaacatcgggggaggttatgat

SEQ ID NO: 2466 - DNA, 27 bp, Artificial Sequence
  Synthetic polynucleotide encoding artificial human antibody CDR-L1 region
tctggctcagtctctactagttactac

SEQ ID NO: 2467 - DNA, 18 bp, Artificial Sequence
  Synthetic polynucleotide encoding artificial human antibody CDR-L1 region
aaattggaggataaatat

SEQ ID NO: 2468 - DNA, 21 bp, Artificial Sequence
  Synthetic polynucleotide encoding artificial human antibody CDR-L1 region
agtgggcacagcaggtacgcc

SEQ ID NO: 2469 - DNA, 18 bp, Artificial Sequence
  Synthetic polynucleotide encoding artificial human antibody CDR-L1 region
cagaacattgccgtctat

SEQ ID NO: 2470 - DNA, 18 bp, Artificial Sequence
  Synthetic polynucleotide encoding artificial human antibody CDR-L1 region
gcattgccaaaacaatat

SEQ ID NO: 2471 - DNA, 21 bp, Artificial Sequence
  Synthetic polynucleotide encoding artificial human antibody CDR-L1 region
gagaccattgacaggggcttc

SEQ ID NO: 2472 - DNA, 27 bp, Artificial Sequence
  Synthetic polynucleotide encoding artificial human antibody CDR-L1 region
actggaagtgtcaccaggtggcgttat

SEQ ID NO: 2473 - DNA, 21 bp, Artificial Sequence
  Synthetic polynucleotide encoding artificial human antibody CDR-L1 region
cagagtgttagcagcagctac

SEQ ID NO: 2474 - DNA, 18 bp, Artificial Sequence
  Synthetic polynucleotide encoding artificial human antibody CDR-L1 region
cagagtattagtagctgg

SEQ ID NO: 2475 - DNA, 36 bp, Artificial Sequence; identical to SEQ ID NO: 1290
  Synthetic polynucleotide encoding artificial human antibody CDR-L1 region

SEQ ID NO: 2476 - DNA, 24 bp, Artificial Sequence
  Synthetic polynucleotide encoding artificial human antibody CDR-L1 region
agctccaacatcggaagtaattat

SEQ ID NO: 2477 - DNA, 18 bp, Artificial Sequence
  Synthetic polynucleotide encoding artificial human antibody CDR-L1 region
cgaaatattaatagttat

SEQ ID NO: 2478 - DNA, 18 bp, Artificial Sequence
  Synthetic polynucleotide encoding artificial human antibody CDR-L1 region
ggtattggagccaaaagg

SEQ ID NO: 2479 - DNA, 27 bp, Artificial Sequence
  Synthetic polynucleotide encoding artificial human antibody CDR-L1 region
agctccaacatcgggtcaaattatgat

SEQ ID NO: 2480 - DNA, 18 bp, Artificial Sequence
  Synthetic polynucleotide encoding artificial human antibody CDR-L1 region
cagggcattagcagttat

SEQ ID NO: 2481 - DNA, 36 bp, Artificial Sequence
  Synthetic polynucleotide encoding artificial human antibody CDR-L1 region
cagactatcttatccccctcctacaataagtattat

SEQ ID NO: 2482 - DNA, 27 bp, Artificial Sequence
  Synthetic polynucleotide encoding artificial human antibody CDR-L1 region
agcggtgacgttggtacttataactat

SEQ ID NO: 2483 - DNA, 24 bp, Artificial Sequence
  Synthetic polynucleotide encoding artificial human antibody CDR-L1 region
acctccaacatcgggagtaatact

SEQ ID NO: 2484 - DNA, 18 bp, Artificial Sequence
  Synthetic polynucleotide encoding artificial human antibody CDR-L1 region
cagagtgttaggagcttc

SEQ ID NO: 2485 - DNA, 27 bp, Artificial Sequence
  Synthetic polynucleotide encoding artificial human antibody CDR-L1 region
agctccaacatcggggcaccttatgat

SEQ ID NO: 2486 - DNA, 27 bp, Artificial Sequence
  Synthetic polynucleotide encoding artificial human antibody CDR-L1 region
actggagctgtcaccagtggtcattat

SEQ ID NO: 2487 - DNA, 24 bp, Artificial Sequence
  Synthetic polynucleotide encoding artificial human antibody CDR-L1 region
agctccaacatcggaagtaattat

SEQ ID NO: 2488 - DNA, 27 bp, Artificial Sequence
  Synthetic polynucleotide encoding artificial human antibody CDR-L1 region
agcagtgacgttggtggttataactat

SEQ ID NO: 2489 - DNA, 18 bp, Artificial Sequence
  Synthetic polynucleotide encoding artificial human antibody CDR-L1 region
aaattgggggataaatat

SEQ ID NO: 2490 - DNA, 18 bp, Artificial Sequence
  Synthetic polynucleotide encoding artificial human antibody CDR-L1 region
cagagtgttagcagcaac

SEQ ID NO: 2491 - DNA, 24 bp, Artificial Sequence
  Synthetic polynucleotide encoding artificial human antibody CDR-L1 region
acctccaatattggcgataattgg

SEQ ID NO: 2492 - DNA, 24 bp, Artificial Sequence
  Synthetic polynucleotide encoding artificial human antibody CDR-L1 region
acgtccaagatcggacgtaatcat

SEQ ID NO: 2493 - DNA, 21 bp, Artificial Sequence
  Synthetic polynucleotide encoding artificial human antibody CDR-L1 region
cagactgtttatttcaggtac

SEQ ID NO: 2494 - DNA, 24 bp, Artificial Sequence
  Synthetic polynucleotide encoding artificial human antibody CDR-L1 region
gggtccaacatcggaggtcataag

SEQ ID NO: 2495 - DNA, 18 bp, Artificial Sequence
  Synthetic polynucleotide encoding artificial human antibody CDR-L1 region
gatttgtcaaagaactat

SEQ ID NO: 2496 - DNA, 24 bp, Artificial Sequence
  Synthetic polynucleotide encoding artificial human antibody CDR-L1 region
agctccaacatcggaagtaattat

SEQ ID NO: 2497 - DNA, 18 bp, Artificial Sequence
  Synthetic polynucleotide encoding artificial human antibody CDR-L1 region
cagagtgttagcagtaac

SEQ ID NO: 2498 - DNA, 18 bp, Artificial Sequence
  Synthetic polynucleotide encoding artificial human antibody CDR-L1 region
cagagtattagtagctgg

SEQ ID NO: 2499 - DNA, 18 bp, Artificial Sequence
  Synthetic polynucleotide encoding artificial human antibody CDR-L1 region
cagagcattagcagctat

SEQ ID NO: 2500 - DNA, 18 bp, Artificial Sequence
  Synthetic polynucleotide encoding artificial human antibody CDR-L1 region
cagggcattagcagttat

SEQ ID NO: 2501 - DNA, 24 bp, Artificial Sequence
  Synthetic polynucleotide encoding artificial human antibody CDR-H2 region
attaatactgatgggagtgccaca

SEQ ID NO: 2502 - DNA, 21 bp, Artificial Sequence
  Synthetic polynucleotide encoding artificial human antibody CDR-H2 region
attttttcgaatgacgaaaaa

SEQ ID NO: 2503 - DNA, 21 bp, Artificial Sequence
  Synthetic polynucleotide encoding artificial human antibody CDR-H2 region
attttttcgaatgacgaaaaa

SEQ ID NO: 2504 - DNA, 21 bp, Artificial Sequence
  Synthetic polynucleotide encoding artificial human antibody CDR-H2 region
attttttcgaatgacgaaaaa

SEQ ID NO: 2505 - DNA, 21 bp, Artificial Sequence
  Synthetic polynucleotide encoding artificial human antibody CDR-H2 region
attttttcgaatgacgaaaaa

SEQ ID NO: 2506 - DNA, 21 bp, Artificial Sequence
  Synthetic polynucleotide encoding artificial human antibody CDR-H2 region
attttttcgaatgacgaaaaa

SEQ ID NO: 2507 - DNA, 21 bp, Artificial Sequence
  Synthetic polynucleotide encoding artificial human antibody CDR-H2 region
attttttcgaatgacgaaaaa

SEQ ID NO: 2508 - DNA, 30 bp, Artificial Sequence
  Synthetic polynucleotide encoding artificial human antibody CDR-H2 region
attaaaagaaaaagtgatggtgggacaaca

SEQ ID NO: 2509 - DNA, 30 bp, Artificial Sequence; identical to SEQ ID NO: 2508
  Synthetic polynucleotide encoding artificial human antibody CDR-H2 region

SEQ ID NO: 2510 - DNA, 21 bp, Artificial Sequence
  Synthetic polynucleotide encoding artificial human antibody CDR-H2 region
atctattatactgggagcacc

SEQ ID NO: 2511 - DNA, 21 bp, Artificial Sequence
  Synthetic polynucleotide encoding artificial human antibody CDR-H2 region
atctacagcggtggaggcaca

SEQ ID NO: 2512 - DNA, 24 bp, Artificial Sequence
  Synthetic polynucleotide encoding artificial human antibody CDR-H2 region
attagtagtagtagtagttacata

SEQ ID NO: 2513 - DNA, 24 bp, Artificial Sequence
  Synthetic polynucleotide encoding artificial human antibody CDR-H2 region
attagtggtagtggtggtagcaca

SEQ ID NO: 2514 - DNA, 21 bp, Artificial Sequence
  Synthetic polynucleotide encoding artificial human antibody CDR-H2 region
atcaatcatagtggaagcacc

SEQ ID NO: 2515 - DNA, 21 bp, Artificial Sequence
  Synthetic polynucleotide encoding artificial human antibody CDR-H2 region
atttattgggatgatgataag

SEQ ID NO: 2516 - DNA, 24 bp, Artificial Sequence
  Synthetic polynucleotide encoding artificial human antibody CDR-H2 region
atttggcatgatggaagtcagcaa

SEQ ID NO: 2517 - DNA, 24 bp, Artificial Sequence
  Synthetic polynucleotide encoding artificial human antibody CDR-H2 region
atcaaccctaacagtggtggcaca

SEQ ID NO: 2518 - DNA, 24 bp, Artificial Sequence
  Synthetic polynucleotide encoding artificial human antibody CDR-H2 region
atcaacaccaacactgggagccca

SEQ ID NO: 2519 - DNA, 24 bp, Artificial Sequence
  Synthetic polynucleotide encoding artificial human antibody CDR-H2 region
atcaaccctaacagtggtggcaca

SEQ ID NO: 2520 - DNA, 24 bp, Artificial Sequence
  Synthetic polynucleotide encoding artificial human antibody CDR-H2 region
attagttacaacagtcgtagcata

SEQ ID NO: 2521 - DNA, 24 bp, Artificial Sequence
  Synthetic polynucleotide encoding artificial human antibody CDR-H2 region
atcatccctatctttgatacaaga

SEQ ID NO: 2522 - DNA, 24 bp, Artificial Sequence
  Synthetic polynucleotide encoding artificial human antibody CDR-H2 region
atacatcacgatgaaaacgacaaa

SEQ ID NO: 2523 - DNA, 24 bp, Artificial Sequence
  Synthetic polynucleotide encoding artificial human antibody CDR-H2 region
tttgatcctgaagatggtgaaaca

SEQ ID NO: 2524 - DNA, 24 bp, Artificial Sequence
  Synthetic polynucleotide encoding artificial human antibody CDR-H2 region
atcaacgctggcaatggtaacaca

SEQ ID NO: 2525 - DNA, 24 bp, Artificial Sequence
  Synthetic polynucleotide encoding artificial human antibody CDR-H2 region
tttgatcctgaagatggtgaaaca

SEQ ID NO: 2526 - DNA, 24 bp, Artificial Sequence
  Synthetic polynucleotide encoding artificial human antibody CDR-H2 region
ctatcatatgatggaagttttaaa

SEQ ID NO: 2527 - DNA, 24 bp, Artificial Sequence
  Synthetic polynucleotide encoding artificial human antibody CDR-H2 region
attcatggcggaggcactacgaca

SEQ ID NO: 2528 - DNA, 24 bp, Artificial Sequence
  Synthetic polynucleotide encoding artificial human antibody CDR-H2 region
atatcatatgatggaagcaataaa

SEQ ID NO: 2529 - DNA, 24 bp, Artificial Sequence
  Synthetic polynucleotide encoding artificial human antibody CDR-H2 region
atatggtatgatggaagtaataaa

SEQ ID NO: 2530 - DNA, 24 bp, Artificial Sequence
  Synthetic polynucleotide encoding artificial human antibody CDR-H2 region
gtttcatatgctggaaatactgaa

SEQ ID NO: 2531 - DNA, 24 bp, Artificial Sequence
  Synthetic polynucleotide encoding artificial human antibody CDR-H2 region
atgaaccctaacagtggtaacaca

SEQ ID NO: 2532 - DNA, 24 bp, Artificial Sequence
  Synthetic polynucleotide encoding artificial human antibody CDR-H2 region
atcagcgcatacaatcgtaacaca

SEQ ID NO: 2533 - DNA, 30 bp, Artificial Sequence
  Synthetic polynucleotide encoding artificial human antibody CDR-H2 region
attagaagcaaagtttacggtgcgacaaca

SEQ ID NO: 2534 - DNA, 21 bp, Artificial Sequence
  Synthetic polynucleotide encoding artificial human antibody CDR-H2 region
gtacattacagtgggagcacc

SEQ ID NO: 2535 - DNA, 24 bp, Artificial Sequence
  Synthetic polynucleotide encoding artificial human antibody CDR-H2 region
attgatagcggtggtgaaaaaaca

SEQ ID NO: 2536 - DNA, 24 bp, Artificial Sequence
  Synthetic polynucleotide encoding artificial human antibody CDR-H2 region
attagttggaatagtgatgacata

SEQ ID NO: 2537 - DNA, 24 bp, Artificial Sequence
  Synthetic polynucleotide encoding artificial human antibody CDR-H2 region
attagtagtaatgggggtagcaca

SEQ ID NO: 2538 - DNA, 24 bp, Artificial Sequence
  Synthetic polynucleotide encoding artificial human antibody CDR-H2 region
atcatccctatccttggtatagca

SEQ ID NO: 2539 - DNA, 24 bp, Artificial Sequence
  Synthetic polynucleotide encoding artificial human antibody CDR-H2 region
atgaaccctaacagtggtaacaca

SEQ ID NO: 2540 - DNA, 24 bp, Artificial Sequence
  Synthetic polynucleotide encoding artificial human antibody CDR-H2 region
atttacaacgatggtattggcacg

SEQ ID NO: 2541 - DNA, 24 bp, Artificial Sequence
  Synthetic polynucleotide encoding artificial human antibody CDR-H2 region
attagttggaatagtggtagcata

SEQ ID NO: 2542 - DNA, 24 bp, Artificial Sequence
  Synthetic polynucleotide encoding artificial human antibody CDR-H2 region
ataaagcaggatggacgtgaacaa

SEQ ID NO: 2543 - DNA, 24 bp, Artificial Sequence
  Synthetic polynucleotide encoding artificial human antibody CDR-H2 region
atcaacgctgtcaatggaaacaca

SEQ ID NO: 2544 - DNA, 21 bp, Artificial Sequence
  Synthetic polynucleotide encoding artificial human antibody CDR-H2 region
atctattacagtgggagcacc

SEQ ID NO: 2545 - DNA, 21 bp, Artificial Sequence
  Synthetic polynucleotide encoding artificial human antibody CDR-H2 region
atctattatagtgggagcacc

SEQ ID NO: 2546 - DNA, 24 bp, Artificial Sequence
  Synthetic polynucleotide encoding artificial human antibody CDR-H2 region
atatcatatgatggaagtaataaa

SEQ ID NO: 2547 - DNA, 24 bp, Artificial Sequence
  Synthetic polynucleotide encoding artificial human antibody CDR-H2 region
tttgatcctcaagatgaagagcca

SEQ ID NO: 2548 - DNA, 24 bp, Artificial Sequence
  Synthetic polynucleotide encoding artificial human antibody CDR-H2 region
ataagtggcagtggtaatggcgca

SEQ ID NO: 2549 - DNA, 24 bp, Artificial Sequence
  Synthetic polynucleotide encoding artificial human antibody CDR-H2 region
atatcatttgatggaagtattaaa

SEQ ID NO: 2550 - DNA, 24 bp, Artificial Sequence
  Synthetic polynucleotide encoding artificial human antibody CDR-H2 region
ataaagcacgatggaagtgagaaa

SEQ ID NO: 2551 - DNA, 24 bp, Artificial Sequence
  Synthetic polynucleotide encoding artificial human antibody CDR-H2 region
ataaatcaaggtggaaatgagaga

SEQ ID NO: 2552 - DNA, 24 bp, Artificial Sequence
  Synthetic polynucleotide encoding artificial human antibody CDR-H2 region
atcgtcgttggcagtggtaacaca

SEQ ID NO: 2553 - DNA, 24 bp, Artificial Sequence
  Synthetic polynucleotide encoding artificial human antibody CDR-H2 region
atcagcgctttcaacggtttcaca

SEQ ID NO: 2554 - DNA, 24 bp, Artificial Sequence
  Synthetic polynucleotide encoding artificial human antibody CDR-H2 region
attagtagtagtagtagttacata

SEQ ID NO: 2555 - DNA, 27 bp, Artificial Sequence
  Synthetic polynucleotide encoding artificial human antibody CDR-H2 region
acatactacaggtccaagtggtataat

SEQ ID NO: 2556 - DNA, 21 bp, Artificial Sequence
  Synthetic polynucleotide encoding artificial human antibody CDR-H2 region
gtttattgggatgatgataag

SEQ ID NO: 2557 - DNA, 24 bp, Artificial Sequence
  Synthetic polynucleotide encoding artificial human antibody CDR-H2 region
attagtagtagtagtagttacata

SEQ ID NO: 2558 - DNA, 24 bp, Artificial Sequence
  Synthetic polynucleotide encoding artificial human antibody CDR-H2 region
atcaaccctaacagtggtggcaca

SEQ ID NO: 2559 - DNA, 24 bp, Artificial Sequence
  Synthetic polynucleotide encoding artificial human antibody CDR-H2 region
atatcatatgatggaagtaataaa

SEQ ID NO: 2560 - DNA, 21 bp, Artificial Sequence
  Synthetic polynucleotide encoding artificial human antibody CDR-H2 region
acttatagcggtggtgacaca

SEQ ID NO: 2561 - DNA, 21 bp, Artificial Sequence
  Synthetic polynucleotide encoding artificial human antibody CDR-H2 region
atttattgggatgatgataag

SEQ ID NO: 2562 - DNA, 24 bp, Artificial Sequence
  Synthetic polynucleotide encoding artificial human antibody CDR-H2 region
atatggtatgatggaagtaataaa

SEQ ID NO: 2563 - DNA, 24 bp, Artificial Sequence
  Synthetic polynucleotide encoding artificial human antibody CDR-H2 region
atatggtatgatggaagtaataaa

SEQ ID NO: 2564 - DNA, 24 bp, Artificial Sequence
  Synthetic polynucleotide encoding artificial human antibody CDR-H2 region
attagtagtagtagtagttacata

SEQ ID NO: 2565 - DNA, 21 bp, Artificial Sequence
  Synthetic polynucleotide encoding artificial human antibody CDR-H2 region
atttattgggatgatgataag

SEQ ID NO: 2566 - DNA, 24 bp, Artificial Sequence
  Synthetic polynucleotide encoding artificial human antibody CDR-H2 region
gtttataccagtggtgataacaca

SEQ ID NO: 2567 - DNA, 21 bp, Artificial Sequence
  Synthetic polynucleotide encoding artificial human antibody CDR-H2 region
atctattacagtgggaacacc

SEQ ID NO: 2568 - DNA, 24 bp, Artificial Sequence
  Synthetic polynucleotide encoding artificial human antibody CDR-H2 region
attaatagtgataatagtaggata

SEQ ID NO: 2569 - DNA, 30 bp, Artificial Sequence
  Synthetic polynucleotide encoding artificial human antibody CDR-H2 region
atttttggcggtggcggtcccatgaccaca

SEQ ID NO: 2570 - DNA, 24 bp, Artificial Sequence
  Synthetic polynucleotide encoding artificial human antibody CDR-H2 region
attagtggtagtggtggtagcaca

SEQ ID NO: 2571 - DNA, 30 bp, Artificial Sequence
  Synthetic polynucleotide encoding artificial human antibody CDR-H2 region
attagaagcaaaactaacacttacgcgaca

SEQ ID NO: 2572 - DNA, 21 bp, Artificial Sequence
  Synthetic polynucleotide encoding artificial human antibody CDR-H2 region
gtctcctatagaggggaaacc

SEQ ID NO: 2573 - DNA, 24 bp, Artificial Sequence
  Synthetic polynucleotide encoding artificial human antibody CDR-H2 region
attagttggaatagtggtagcata

SEQ ID NO: 2574 - DNA, 24 bp, Artificial Sequence
  Synthetic polynucleotide encoding artificial human antibody CDR-H2 region
atcaacaccaacactgggaaccca

SEQ ID NO: 2575 - DNA, 21 bp, Artificial Sequence
  Synthetic polynucleotide encoding artificial human antibody CDR-H2 region
atttatgatgttggtcacacg

SEQ ID NO: 2576 - DNA, 24 bp, Artificial Sequence
  Synthetic polynucleotide encoding artificial human antibody CDR-H2 region
attagtagtagtagtagttacata

SEQ ID NO: 2577 - DNA, 24 bp, Artificial Sequence
  Synthetic polynucleotide encoding artificial human antibody CDR-H2 region
attagttggaatggtgatgacata

SEQ ID NO: 2578 - DNA, 24 bp, Artificial Sequence
  Synthetic polynucleotide encoding artificial human antibody CDR-H2 region
attagttggaatagtggtagcata

SEQ ID NO: 2579 - DNA, 24 bp, Artificial Sequence
  Synthetic polynucleotide encoding artificial human antibody CDR-H2 region
attagtagtagtagtagttacata

SEQ ID NO: 2580 - DNA, 24 bp, Artificial Sequence
  Synthetic polynucleotide encoding artificial human antibody CDR-H2 region
attagtggtagtggtggtagcaca

SEQ ID NO: 2581 - DNA, 24 bp, Artificial Sequence
  Synthetic polynucleotide encoding artificial human antibody CDR-H2 region
attaatagtgatgggagtagcaca

SEQ ID NO: 2582 - DNA, 24 bp, Artificial Sequence
  Synthetic polynucleotide encoding artificial human antibody CDR-H2 region
atgaaccctaacagtggtaacaca

SEQ ID NO: 2583 - DNA, 24 bp, Artificial Sequence
  Synthetic polynucleotide encoding artificial human antibody CDR-H2 region
atatcatatgatggaagcaataaa

SEQ ID NO: 2584 - DNA, 21 bp, Artificial Sequence
  Synthetic polynucleotide encoding artificial human antibody CDR-H2 region
attgattgggatgatgataaa

SEQ ID NO: 2585 - DNA, 24 bp, Artificial Sequence
  Synthetic polynucleotide encoding artificial human antibody CDR-H2 region
atatcatatgatggaagtaataaa

SEQ ID NO: 2586 - DNA, 24 bp, Artificial Sequence
  Synthetic polynucleotide encoding artificial human antibody CDR-H2 region
atcaaccctagtggtggtagcaca

SEQ ID NO: 2587 - DNA, 24 bp, Artificial Sequence
  Synthetic polynucleotide encoding artificial human antibody CDR-H2 region
ataaaacaagatggacgtgaacaa

SEQ ID NO: 2588 - DNA, 24 bp, Artificial Sequence
  Synthetic polynucleotide encoding artificial human antibody CDR-H2 region
atcatccctatccttggtatagca

SEQ ID NO: 2589 - DNA, 24 bp, Artificial Sequence
  Synthetic polynucleotide encoding artificial human antibody CDR-H2 region
attagttggaatagtggtagcata

SEQ ID NO: 2590 - DNA, 21 bp, Artificial Sequence
  Synthetic polynucleotide encoding artificial human antibody CDR-H2 region
atttatagcggtggtagcaca

SEQ ID NO: 2591 - DNA, 24 bp, Artificial Sequence
  Synthetic polynucleotide encoding artificial human antibody CDR-H2 region
attactggcagtggcggtaccaca

SEQ ID NO: 2592 - DNA, 24 bp, Artificial Sequence
  Synthetic polynucleotide encoding artificial human antibody CDR-H2 region
atccaccctggcaatggtcgcaca

SEQ ID NO: 2593 - DNA, 24 bp, Artificial Sequence
  Synthetic polynucleotide encoding artificial human antibody CDR-H2 region
atccacgctggcaatggaaagaca

SEQ ID NO: 2594 - DNA, 24 bp, Artificial Sequence
  Synthetic polynucleotide encoding artificial human antibody CDR-H2 region
atcacacctttcaatggtaacacc

SEQ ID NO: 2595 - DNA, 24 bp, Artificial Sequence
  Synthetic polynucleotide encoding artificial human antibody CDR-H2 region
atcaaccctagtggtggtagcaca

SEQ ID NO: 2596 - DNA, 24 bp, Artificial Sequence
  Synthetic polynucleotide encoding artificial human antibody CDR-H2 region
atttcaaatgatgcaaataatcat

SEQ ID NO: 2597 - DNA, 24 bp, Artificial Sequence
  Synthetic polynucleotide encoding artificial human antibody CDR-H2 region
atcatccctatccttggtatagca

SEQ ID NO: 2598 - DNA, 24 bp, Artificial Sequence
  Synthetic polynucleotide encoding artificial human antibody CDR-H2 region
atatcatatgatggaagcaataaa

SEQ ID NO: 2599 - DNA, 24 bp, Artificial Sequence
  Synthetic polynucleotide encoding artificial human antibody CDR-H2 region
attaatagtgatgggagtagcaca

SEQ ID NO: 2600 - DNA, 24 bp, Artificial Sequence
  Synthetic polynucleotide encoding artificial human antibody CDR-H2 region
attgttgggagtggtggaaccacg

SEQ ID NO: 2601 - DNA, 24 bp, Artificial Sequence
  Synthetic polynucleotide encoding artificial human antibody CDR-H2 region
atgaaccctaacagtggtaacaca

SEQ ID NO: 2602 - DNA, 24 bp, Artificial Sequence
  Synthetic polynucleotide encoding artificial human antibody CDR-H2 region
atatcatatgatggaagcaataaa

SEQ ID NO: 2603 - DNA, 21 bp, Artificial Sequence
  Synthetic polynucleotide encoding artificial human antibody CDR-H2 region
gttttttattctgggagtacc

SEQ ID NO: 2604 - DNA, 21 bp, Artificial Sequence
  Synthetic polynucleotide encoding artificial human antibody CDR-H2 region
atctattacagtgagagcagt

SEQ ID NO: 2605 - DNA, 24 bp, Artificial Sequence
  Synthetic polynucleotide encoding artificial human antibody CDR-H2 region
atcatccctgtccttggtaaatca

SEQ ID NO: 2606 - DNA, 21 bp, Artificial Sequence
  Synthetic polynucleotide encoding artificial human antibody CDR-H2 region
atctattatagtgggagcacc

SEQ ID NO: 2607 - DNA, 24 bp, Artificial Sequence
  Synthetic polynucleotide encoding artificial human antibody CDR-H2 region
atatcatatgatggaagtaataaa

SEQ ID NO: 2608 - DNA, 24 bp, Artificial Sequence
  Synthetic polynucleotide encoding artificial human antibody CDR-H2 region
attagttggaatagtggtagcata

SEQ ID NO: 2609 - DNA, 21 bp, Artificial Sequence
  Synthetic polynucleotide encoding artificial human antibody CDR-H2 region
atcaagtatagtgggagcacc

SEQ ID NO: 2610 - DNA, 24 bp, Artificial Sequence
  Synthetic polynucleotide encoding artificial human antibody CDR-H2 region
ataaagcaagatggaagtgagaaa

SEQ ID NO: 2611 - DNA, 24 bp, Artificial Sequence
  Synthetic polynucleotide encoding artificial human antibody CDR-H2 region
atatcatatgatggaagtaataaa

SEQ ID NO: 2612 - DNA, 24 bp, Artificial Sequence
  Synthetic polynucleotide encoding artificial human antibody CDR-H2 region
atcaaccctagtggtggtagcaca

SEQ ID NO: 2613 - DNA, 24 bp, Artificial Sequence
  Synthetic polynucleotide encoding artificial human antibody CDR-H2 region
atatcatatgatggaagtaataaa

SEQ ID NO: 2614 - DNA, 21 bp, Artificial Sequence
  Synthetic polynucleotide encoding artificial human antibody CDR-H2 region
atctatactagtgggagcacc

SEQ ID NO: 2615 - DNA, 24 bp, Artificial Sequence
  Synthetic polynucleotide encoding artificial human antibody CDR-H2 region
atcaaccctaaaagtggtgacaca

SEQ ID NO: 2616 - DNA, 24 bp, Artificial Sequence
  Synthetic polynucleotide encoding artificial human antibody CDR-H2 region
atcagcgtttacaatggcaacaca

SEQ ID NO: 2617 - DNA, 24 bp, Artificial Sequence
  Synthetic polynucleotide encoding artificial human antibody CDR-H2 region
atcaaccctagcaatggtgccaga

SEQ ID NO: 2618 - DNA, 21 bp, Artificial Sequence
  Synthetic polynucleotide encoding artificial human antibody CDR-H2 region
atcaatcatactggaaccatc

SEQ ID NO: 2619 - DNA, 21 bp, Artificial Sequence
  Synthetic polynucleotide encoding artificial human antibody CDR-H2 region
atgcatcatagcggaacgacc

SEQ ID NO: 2620 - DNA, 24 bp, Artificial Sequence
  Synthetic polynucleotide encoding artificial human antibody CDR-H2 region
attagtggtaatggggctagcgca

SEQ ID NO: 2621 - DNA, 21 bp, Artificial Sequence
  Synthetic polynucleotide encoding artificial human antibody CDR-H2 region
atcaatcatactggaaccatc

SEQ ID NO: 2622 - DNA, 21 bp, Artificial Sequence
  Synthetic polynucleotide encoding artificial human antibody CDR-H2 region
atcaatcatagtggaagcacc

SEQ ID NO: 2623 - DNA, 24 bp, Artificial Sequence
  Synthetic polynucleotide encoding artificial human antibody CDR-H2 region
atatcatatgatggaagcaataaa

SEQ ID NO: 2624 - DNA, 21 bp, Artificial Sequence
  Synthetic polynucleotide encoding artificial human antibody CDR-H2 region
attttttgggatgatgataag

SEQ ID NO: 2625 - DNA, 24 bp, Artificial Sequence
  Synthetic polynucleotide encoding artificial human antibody CDR-H2 region
attgatcctagtgactcttatacc

SEQ ID NO: 2626 - DNA, 27 bp, Artificial Sequence
  Synthetic polynucleotide encoding artificial human antibody CDR-H2 region
acatactacaggtccaagtggtataat

SEQ ID NO: 2627 - DNA, 24 bp, Artificial Sequence
  Synthetic polynucleotide encoding artificial human antibody CDR-H2 region
attgatcctagtgactcttatacc

SEQ ID NO: 2628 - DNA, 21 bp, Artificial Sequence
  Synthetic polynucleotide encoding artificial human antibody CDR-H2 region
atctattatagtgggaacacc

SEQ ID NO: 2629 - DNA, 21 bp, Artificial Sequence
  Synthetic polynucleotide encoding artificial human antibody CDR-H2 region
atcaatcacagtggaagcacc

SEQ ID NO: 2630 - DNA, 24 bp, Artificial Sequence
  Synthetic polynucleotide encoding artificial human antibody CDR-H2 region
atcactaatgatgggggtactgca

SEQ ID NO: 2631 - DNA, 24 bp, Artificial Sequence
  Synthetic polynucleotide encoding artificial human antibody CDR-H2 region
atcaaccctagtggtggtagcaca

SEQ ID NO: 2632 - DNA, 24 bp, Artificial Sequence
  Synthetic polynucleotide encoding artificial human antibody CDR-H2 region
attgatcctagtgactcttatacc

SEQ ID NO: 2633 - DNA, 21 bp, Artificial Sequence
  Synthetic polynucleotide encoding artificial human antibody CDR-H2 region
attgattgggatgatgataaa

SEQ ID NO: 2634 - DNA, 21 bp, Artificial Sequence
  Synthetic polynucleotide encoding artificial human antibody CDR-H2 region
atcactcatagtggaagcacc

SEQ ID NO: 2635 - DNA, 24 bp, Artificial Sequence
  Synthetic polynucleotide encoding artificial human antibody CDR-H2 region
atttcatatgagggaagtattaaa

SEQ ID NO: 2636 - DNA, 24 bp, Artificial Sequence
  Synthetic polynucleotide encoding artificial human antibody CDR-H2 region
tttgatcctgaagatggtgaaaca

SEQ ID NO: 2637 - DNA, 24 bp, Artificial Sequence
  Synthetic polynucleotide encoding artificial human antibody CDR-H2 region
actaattctgatggaacgactaca

SEQ ID NO: 2638 - DNA, 21 bp, Artificial Sequence
  Synthetic polynucleotide encoding artificial human antibody CDR-H2 region
atcactcatagtggaagcacc

SEQ ID NO: 2639 - DNA, 21 bp, Artificial Sequence
  Synthetic polynucleotide encoding artificial human antibody CDR-H2 region
atcagtcagggtggaagcacc

SEQ ID NO: 2640 - DNA, 24 bp, Artificial Sequence
  Synthetic polynucleotide encoding artificial human antibody CDR-H2 region
attagttggaatagtggtagcata

SEQ ID NO: 2641 - DNA, 21 bp, Artificial Sequence
  Synthetic polynucleotide encoding artificial human antibody CDR-H2 region
atcactcatagtggaagcgcc

SEQ ID NO: 2642 - DNA, 24 bp, Artificial Sequence
  Synthetic polynucleotide encoding artificial human antibody CDR-H2 region
atctatcctggtgactctgatacc

SEQ ID NO: 2643 - DNA, 21 bp, Artificial Sequence
  Synthetic polynucleotide encoding artificial human antibody CDR-H2 region
attggtactgctggtgacaca

SEQ ID NO: 2644 - DNA, 24 bp, Artificial Sequence
  Synthetic polynucleotide encoding artificial human antibody CDR-H2 region
attagtagtagtactcattttata

SEQ ID NO: 2645 - DNA, 21 bp, Artificial Sequence
  Synthetic polynucleotide encoding artificial human antibody CDR-H2 region
atttattgggatgataatgag

SEQ ID NO: 2646 - DNA, 21 bp, Artificial Sequence
  Synthetic polynucleotide encoding artificial human antibody CDR-H2 region
atttataacactgggactacc

SEQ ID NO: 2647 - DNA, 24 bp, Artificial Sequence
  Synthetic polynucleotide encoding artificial human antibody CDR-H2 region
atatcatatgatggaagcaatata

SEQ ID NO: 2648 - DNA, 24 bp, Artificial Sequence
  Synthetic polynucleotide encoding artificial human antibody CDR-H2 region
ataaaggaggatggaagtgagaca

SEQ ID NO: 2649 - DNA, 21 bp, Artificial Sequence
  Synthetic polynucleotide encoding artificial human antibody CDR-H2 region
atctatcagagtgggagcacc

SEQ ID NO: 2650 - DNA, 21 bp, Artificial Sequence
  Synthetic polynucleotide encoding artificial human antibody CDR-H2 region
atcagtcatggtggaagcacc

SEQ ID NO: 2651 - DNA, 21 bp, Artificial Sequence
  Synthetic polynucleotide encoding artificial human antibody CDR-H2 region
atctattatagtgggagcacc

SEQ ID NO: 2652 - DNA, 21 bp, Artificial Sequence
  Synthetic polynucleotide encoding artificial human antibody CDR-H2 region
atcactcatagcggaagcacc

SEQ ID NO: 2653 - DNA, 24 bp, Artificial Sequence
  Synthetic polynucleotide encoding artificial human antibody CDR-H2 region
atatcatatgatggaagtaataaa

SEQ ID NO: 2654 - DNA, 21 bp, Artificial Sequence
  Synthetic polynucleotide encoding artificial human antibody CDR-H2 region
atcactcatggtggaagcacc

SEQ ID NO: 2655 - DNA, 24 bp, Artificial Sequence
  Synthetic polynucleotide encoding artificial human antibody CDR-H2 region
attggtggaagtggtgaaaacaaa

SEQ ID NO: 2656 - DNA, 24 bp, Artificial Sequence
  Synthetic polynucleotide encoding artificial human antibody CDR-H2 region
atttcatatgatggaaggagtaaa

SEQ ID NO: 2657 - DNA, 24 bp, Artificial Sequence
  Synthetic polynucleotide encoding artificial human antibody CDR-H2 region
atcaacgctggcaatggtaacaca

SEQ ID NO: 2658 - DNA, 24 bp, Artificial Sequence
  Synthetic polynucleotide encoding artificial human antibody CDR-H2 region
attagtagtagtagtagtaccata

SEQ ID NO: 2659 - DNA, 24 bp, Artificial Sequence
  Synthetic polynucleotide encoding artificial human antibody CDR-H2 region
atcagcgcttacaatggtaaaaca

SEQ ID NO: 2660 - DNA, 30 bp, Artificial Sequence
  Synthetic polynucleotide encoding artificial human antibody CDR-H2 region
atttatagcactggtgccggtggtagagtg

SEQ ID NO: 2661 - DNA, 24 bp, Artificial Sequence
  Synthetic polynucleotide encoding artificial human antibody CDR-H2 region
tttgatcctgaagatggtgaaaca

SEQ ID NO: 2662 - DNA, 24 bp, Artificial Sequence
  Synthetic polynucleotide encoding artificial human antibody CDR-H2 region
ataaaggaggatggaagtgagaag

SEQ ID NO: 2663 - DNA, 24 bp, Artificial Sequence
  Synthetic polynucleotide encoding artificial human antibody CDR-H2 region
attagcggaagtactagttacaga

SEQ ID NO: 2664 - DNA, 21 bp, Artificial Sequence
  Synthetic polynucleotide encoding artificial human antibody CDR-H2 region
atttattgggatgatgataag

SEQ ID NO: 2665 - DNA, 21 bp, Artificial Sequence
  Synthetic polynucleotide encoding artificial human antibody CDR-H2 region
atcactcatagtggaagcgcc

SEQ ID NO: 2666 - DNA, 21 bp, Artificial Sequence
  Synthetic polynucleotide encoding artificial human antibody CDR-H2 region
atctcttacagtgggagcacc

SEQ ID NO: 2667 - DNA, 21 bp, Artificial Sequence
  Synthetic polynucleotide encoding artificial human antibody CDR-H2 region
atcagtcaaaccggaagcacc

SEQ ID NO: 2668 - DNA, 21 bp, Artificial Sequence
  Synthetic polynucleotide encoding artificial human antibody CDR-H2 region
atcactcatagtggaagcacc

SEQ ID NO: 2669 - DNA, 21 bp, Artificial Sequence
  Synthetic polynucleotide encoding artificial human antibody CDR-H2 region
atccactacagtggaaatacc

SEQ ID NO: 2670 - DNA, 21 bp, Artificial Sequence
  Synthetic polynucleotide encoding artificial human antibody CDR-H2 region
atcactcatagtggaagcgcc

SEQ ID NO: 2671 - DNA, 24 bp, Artificial Sequence
  Synthetic polynucleotide encoding artificial human antibody CDR-H2 region
atatcatatgatggaagcaataaa

SEQ ID NO: 2672 - DNA, 24 bp, Artificial Sequence
  Synthetic polynucleotide encoding artificial human antibody CDR-H2 region
atgtcatatgatgaaactgagcaa

SEQ ID NO: 2673 - DNA, 24 bp, Artificial Sequence
  Synthetic polynucleotide encoding artificial human antibody CDR-H2 region
atggaccccaacagtggtctcaca

SEQ ID NO: 2674 - DNA, 24 bp, Artificial Sequence
  Synthetic polynucleotide encoding artificial human antibody CDR-H2 region
tttgatcctgaagatggtgaaaca

SEQ ID NO: 2675 - DNA, 24 bp, Artificial Sequence
  Synthetic polynucleotide encoding artificial human antibody CDR-H2 region
attagttggaatagtggtagcata

SEQ ID NO: 2676 - DNA, 24 bp, Artificial Sequence
  Synthetic polynucleotide encoding artificial human antibody CDR-H2 region
atatcatatgatggaagcaataaa

SEQ ID NO: 2677 - DNA, 21 bp, Artificial Sequence
  Synthetic polynucleotide encoding artificial human antibody CDR-H2 region
atcactcatagtggaagcgcc

SEQ ID NO: 2678 - DNA, 24 bp, Artificial Sequence
  Synthetic polynucleotide encoding artificial human antibody CDR-H2 region
atatcatatgaaggaagcaaaaaa

SEQ ID NO: 2679 - DNA, 24 bp, Artificial Sequence
  Synthetic polynucleotide encoding artificial human antibody CDR-H2 region
atatcagatgatggaagcaataaa

SEQ ID NO: 2680 - DNA, 24 bp, Artificial Sequence
  Synthetic polynucleotide encoding artificial human antibody CDR-H2 region
atctatcctggtgactctgatacc

SEQ ID NO: 2681 - DNA, 24 bp, Artificial Sequence
  Synthetic polynucleotide encoding artificial human antibody CDR-H2 region
ataaaggaggatggaagtgagaca

SEQ ID NO: 2682 - DNA, 21 bp, Artificial Sequence
  Synthetic polynucleotide encoding artificial human antibody CDR-H2 region
atttattgggatgatgataag

SEQ ID NO: 2683 - DNA, 24 bp, Artificial Sequence
  Synthetic polynucleotide encoding artificial human antibody CDR-H2 region
attgatcctagtgactcttatacc

SEQ ID NO: 2684 - DNA, 24 bp, Artificial Sequence
  Synthetic polynucleotide encoding artificial human antibody CDR-H2 region
tttgatcctgaagatggtgaaaca

SEQ ID NO: 2685 - DNA, 21 bp, Artificial Sequence
  Synthetic polynucleotide encoding artificial human antibody CDR-H2 region
attggtactgctggtgacaca

SEQ ID NO: 2686 - DNA, 24 bp, Artificial Sequence
  Synthetic polynucleotide encoding artificial human antibody CDR-H2 region
ctatcatctggtggaagcaataaa

SEQ ID NO: 2687 - DNA, 24 bp, Artificial Sequence
  Synthetic polynucleotide encoding artificial human antibody CDR-H2 region
attaattggaatggtggtagcaca

SEQ ID NO: 2688 - DNA, 24 bp, Artificial Sequence
  Synthetic polynucleotide encoding artificial human antibody CDR-H2 region
attaattggaatggtgggagcaca

SEQ ID NO: 2689 - DNA, 24 bp, Artificial Sequence
  Synthetic polynucleotide encoding artificial human antibody CDR-H2 region
atctatcctggtgactctgatacc

SEQ ID NO: 2690 - DNA, 24 bp, Artificial Sequence
  Synthetic polynucleotide encoding artificial human antibody CDR-H2 region
atatcatatgatggaagtaataaa

SEQ ID NO: 2691 - DNA, 24 bp, Artificial Sequence
  Synthetic polynucleotide encoding artificial human antibody CDR-H2 region
atatcagatgatggaagcaataaa

SEQ ID NO: 2692 - DNA, 24 bp, Artificial Sequence
  Synthetic polynucleotide encoding artificial human antibody CDR-H2 region
atctatcctggtgactctgatacc

SEQ ID NO: 2693 - DNA, 21 bp, Artificial Sequence
  Synthetic polynucleotide encoding artificial human antibody CDR-H2 region
atctattatagtgggaacacc

SEQ ID NO: 2694 - DNA, 24 bp, Artificial Sequence
  Synthetic polynucleotide encoding artificial human antibody CDR-H2 region
atcaaccctagtggtggtagcaca

SEQ ID NO: 2695 - DNA, 24 bp, Artificial Sequence
  Synthetic polynucleotide encoding artificial human antibody CDR-H2 region
attactggtggtggtggtaccaca

SEQ ID NO: 2696 - DNA, 21 bp, Artificial Sequence
  Synthetic polynucleotide encoding artificial human antibody CDR-H2 region
atcaatcatagtggaagcacc

SEQ ID NO: 2697 - DNA, 24 bp, Artificial Sequence
  Synthetic polynucleotide encoding artificial human antibody CDR-H2 region
attggtagaggtggagatatcaca

SEQ ID NO: 2698 - DNA, 24 bp, Artificial Sequence
  Synthetic polynucleotide encoding artificial human antibody CDR-H2 region
attgatcctagtgactcttatacc

SEQ ID NO: 2699 - DNA, 24 bp, Artificial Sequence
  Synthetic polynucleotide encoding artificial human antibody CDR-H2 region
atcagtagtggcggtggcagtaca

SEQ ID NO: 2700 - DNA, 24 bp, Artificial Sequence
  Synthetic polynucleotide encoding artificial human antibody CDR-H2 region
attaagagtgatgggagtagtgca

SEQ ID NO: 2701 - DNA, 24 bp, Artificial Sequence
  Synthetic polynucleotide encoding artificial human antibody CDR-H2 region
ataaagcaagatggaagtgagaaa

SEQ ID NO: 2702 - DNA, 24 bp, Artificial Sequence
  Synthetic polynucleotide encoding artificial human antibody CDR-H2 region
atatcagatgacggaagcaacaaa

SEQ ID NO: 2703 - DNA, 24 bp, Artificial Sequence
  Synthetic polynucleotide encoding artificial human antibody CDR-H2 region
attgattttactagcacttacata

SEQ ID NO: 2704 - DNA, 21 bp, Artificial Sequence
  Synthetic polynucleotide encoding artificial human antibody CDR-H2 region
atcagtcatggtggaagcacc

SEQ ID NO: 2705 - DNA, 24 bp, Artificial Sequence
  Synthetic polynucleotide encoding artificial human antibody CDR-H2 region
attagttggaatagtggtagcata

SEQ ID NO: 2706 - DNA, 24 bp, Artificial Sequence
  Synthetic polynucleotide encoding artificial human antibody CDR-H2 region
attagtggtagtagtggtgacaga

SEQ ID NO: 2707 - DNA, 21 bp, Artificial Sequence
  Synthetic polynucleotide encoding artificial human antibody CDR-H2 region
atctattacagtgggagcacc

SEQ ID NO: 2708 - DNA, 24 bp, Artificial Sequence
  Synthetic polynucleotide encoding artificial human antibody CDR-H2 region
attacttggaatggtaattacata

SEQ ID NO: 2709 - DNA, 24 bp, Artificial Sequence
  Synthetic polynucleotide encoding artificial human antibody CDR-H2 region
atcaacaccaacactgggaaccca

SEQ ID NO: 2710 - DNA, 24 bp, Artificial Sequence
  Synthetic polynucleotide encoding artificial human antibody CDR-H2 region
atcatccctatctttggtacagca

SEQ ID NO: 2711 - DNA, 24 bp, Artificial Sequence
  Synthetic polynucleotide encoding artificial human antibody CDR-H2 region
attattggtagtgatggtagcaca

SEQ ID NO: 2712 - DNA, 24 bp, Artificial Sequence
  Synthetic polynucleotide encoding artificial human antibody CDR-H2 region
tttgatcctcaagatgcagagcca

SEQ ID NO: 2713 - DNA, 21 bp, Artificial Sequence
  Synthetic polynucleotide encoding artificial human antibody CDR-H2 region
gtacatgacagtgggagcacc

SEQ ID NO: 2714 - DNA, 21 bp, Artificial Sequence
  Synthetic polynucleotide encoding artificial human antibody CDR-H2 region
atccattacaatgcgaacacc

SEQ ID NO: 2715 - DNA, 21 bp, Artificial Sequence
  Synthetic polynucleotide encoding artificial human antibody CDR-H2 region
atctattacagtgggagcacc

SEQ ID NO: 2716 - DNA, 21 bp, Artificial Sequence
  Synthetic polynucleotide encoding artificial human antibody CDR-H2 region
atctattacagtgggagcgcc

SEQ ID NO: 2717 - DNA, 24 bp, Artificial Sequence
  Synthetic polynucleotide encoding artificial human antibody CDR-H2 region
atcaacgctgccagcggtcacaca

SEQ ID NO: 2718 - DNA, 24 bp, Artificial Sequence
  Synthetic polynucleotide encoding artificial human antibody CDR-H2 region
attaatttgaatggtggtagcaca

SEQ ID NO: 2719 - DNA, 24 bp, Artificial Sequence
  Synthetic polynucleotide encoding artificial human antibody CDR-H2 region
atcaaccctaacagtggtggcaca

SEQ ID NO: 2720 - DNA, 30 bp, Artificial Sequence
  Synthetic polynucleotide encoding artificial human antibody CDR-H2 region
attaaaagcaactatgatggtggggcaacg

SEQ ID NO: 2721 - DNA, 27 bp, Artificial Sequence
  Synthetic polynucleotide encoding artificial human antibody CDR-H2 region
acatactacaggtccaagtggtataat

SEQ ID NO: 2722 - DNA, 24 bp, Artificial Sequence
  Synthetic polynucleotide encoding artificial human antibody CDR-H2 region
attaattacagtggtggtagttca

SEQ ID NO: 2723 - DNA, 24 bp, Artificial Sequence
  Synthetic polynucleotide encoding artificial human antibody CDR-H2 region
atcgttcctctcgttggaagaaca

SEQ ID NO: 2724 - DNA, 24 bp, Artificial Sequence
  Synthetic polynucleotide encoding artificial human antibody CDR-H2 region
atcagcgcttacaatggtaacaca

SEQ ID NO: 2725 - DNA, 21 bp, Artificial Sequence
  Synthetic polynucleotide encoding artificial human antibody CDR-H2 region
atcaatcaaagtggaaacacc

SEQ ID NO: 2726 - DNA, 24 bp, Artificial Sequence
  Synthetic polynucleotide encoding artificial human antibody CDR-H2 region
atgaaccctagaagcggtggcaca

SEQ ID NO: 2727 - DNA, 24 bp, Artificial Sequence
  Synthetic polynucleotide encoding artificial human antibody CDR-H2 region
atatggtatgatggaagtaataaa

SEQ ID NO: 2728 - DNA, 24 bp, Artificial Sequence
  Synthetic polynucleotide encoding artificial human antibody CDR-H2 region
ataaaggaagatggaagtgagaaa

SEQ ID NO: 2729 - DNA, 21 bp, Artificial Sequence
  Synthetic polynucleotide encoding artificial human antibody CDR-H2 region
atgtatatcagtggcagttcc

SEQ ID NO: 2730 - DNA, 24 bp, Artificial Sequence
  Synthetic polynucleotide encoding artificial human antibody CDR-H2 region
attaaccctaacaatggtaacaca

SEQ ID NO: 2731 - DNA, 24 bp, Artificial Sequence
  Synthetic polynucleotide encoding artificial human antibody CDR-H2 region
atcatccctatccttggtatagca

SEQ ID NO: 2732 - DNA, 21 bp, Artificial Sequence
  Synthetic polynucleotide encoding artificial human antibody CDR-H2 region
atcaatcatagcggaaacacc

SEQ ID NO: 2733 - DNA, 24 bp, Artificial Sequence
  Synthetic polynucleotide encoding artificial human antibody CDR-H2 region
atatcaggtgatggatataatcaa

SEQ ID NO: 2734 - DNA, 24 bp, Artificial Sequence
  Synthetic polynucleotide encoding artificial human antibody CDR-H2 region
attagcgcaagtggtaccagcaca

SEQ ID NO: 2735 - DNA, 24 bp, Artificial Sequence
  Synthetic polynucleotide encoding artificial human antibody CDR-H2 region
gttagcgggagtggtgggagcaca

SEQ ID NO: 2736 - DNA, 24 bp, Artificial Sequence
  Synthetic polynucleotide encoding artificial human antibody CDR-H2 region
ataaagcgagatggaggtgagaaa

SEQ ID NO: 2737 - DNA, 21 bp, Artificial Sequence
  Synthetic polynucleotide encoding artificial human antibody CDR-H2 region
atctacaccagtgggaccacc

SEQ ID NO: 2738 - DNA, 24 bp, Artificial Sequence
  Synthetic polynucleotide encoding artificial human antibody CDR-H2 region
ataaagtacgatggaagtgagaaa

SEQ ID NO: 2739 - DNA, 24 bp, Artificial Sequence
  Synthetic polynucleotide encoding artificial human antibody CDR-H2 region
attgatcgcagtggtccgagcatc

SEQ ID NO: 2740 - DNA, 21 bp, Artificial Sequence
  Synthetic polynucleotide encoding artificial human antibody CDR-H2 region
atctattacagtgggagcacc

SEQ ID NO: 2741 - DNA, 24 bp, Artificial Sequence
  Synthetic polynucleotide encoding artificial human antibody CDR-H2 region
attagtggtagtggtggtaccata

SEQ ID NO: 2742 - DNA, 21 bp, Artificial Sequence
  Synthetic polynucleotide encoding artificial human antibody CDR-H2 region
atctattatagtgggagcacc

SEQ ID NO: 2743 - DNA, 24 bp, Artificial Sequence
  Synthetic polynucleotide encoding artificial human antibody CDR-H2 region
atcggtgggagtggttccgccaca

SEQ ID NO: 2744 - DNA, 24 bp, Artificial Sequence
  Synthetic polynucleotide encoding artificial human antibody CDR-H2 region
attagtgggactgggagtgtcaca

SEQ ID NO: 2745 - DNA, 24 bp, Artificial Sequence
  Synthetic polynucleotide encoding artificial human antibody CDR-H2 region
ataaagcaggatggaagtgcgaaa

SEQ ID NO: 2746 - DNA, 24 bp, Artificial Sequence
  Synthetic polynucleotide encoding artificial human antibody CDR-H2 region
atcaaccctagtggtggtagcaca

SEQ ID NO: 2747 - DNA, 24 bp, Artificial Sequence
  Synthetic polynucleotide encoding artificial human antibody CDR-H2 region
atgagtagtactggtagtcccata

SEQ ID NO: 2748 - DNA, 24 bp, Artificial Sequence
  Synthetic polynucleotide encoding artificial human antibody CDR-H2 region
atctcatatgaaggaagtattaaa

SEQ ID NO: 2749 - DNA, 24 bp, Artificial Sequence
  Synthetic polynucleotide encoding artificial human antibody CDR-H2 region
atttggtttgatggaagtaataga

SEQ ID NO: 2750 - DNA, 21 bp, Artificial Sequence
  Synthetic polynucleotide encoding artificial human antibody CDR-H2 region
atcaatcatgttggaagtacc

SEQ ID NO: 2751 - DNA, 24 bp, Artificial Sequence
  Synthetic polynucleotide encoding artificial human antibody CDR-H2 region
atatcatatgatggaagcaataaa

SEQ ID NO: 2752 - DNA, 24 bp, Artificial Sequence
  Synthetic polynucleotide encoding artificial human antibody CDR-H2 region
atcaacgctggcaatggtaacaca

SEQ ID NO: 2753 - DNA, 24 bp, Artificial Sequence
  Synthetic polynucleotide encoding artificial human antibody CDR-H2 region
ataaagcatgatggaagtgagaca

SEQ ID NO: 2754 - DNA, 24 bp, Artificial Sequence
  Synthetic polynucleotide encoding artificial human antibody CDR-H2 region
attacgtgggatagcggtgtctta

SEQ ID NO: 2755 - DNA, 24 bp, Artificial Sequence
  Synthetic polynucleotide encoding artificial human antibody CDR-H2 region
atatcttacgatggaagcgataag

SEQ ID NO: 2756 - DNA, 24 bp, Artificial Sequence
  Synthetic polynucleotide encoding artificial human antibody CDR-H2 region
attagtagtagtggtagtaccata

SEQ ID NO: 2757 - DNA, 21 bp, Artificial Sequence
  Synthetic polynucleotide encoding artificial human antibody CDR-H2 region
atctatcacagtgggactacc

SEQ ID NO: 2758 - DNA, 24 bp, Artificial Sequence
  Synthetic polynucleotide encoding artificial human antibody CDR-H2 region
atatcatatgatggaagcaataaa

SEQ ID NO: 2759 - DNA, 24 bp, Artificial Sequence
  Synthetic polynucleotide encoding artificial human antibody CDR-H2 region
atatcatatgatggaagcagtaaa

SEQ ID NO: 2760 - DNA, 27 bp, Artificial Sequence
  Synthetic polynucleotide encoding artificial human antibody CDR-H2 region
acatactacaggtccaagtggtataat

SEQ ID NO: 2761 - DNA, 21 bp, Artificial Sequence
  Synthetic polynucleotide encoding artificial human antibody CDR-H2 region
atctattacagtgggagcacc

SEQ ID NO: 2762 - DNA, 24 bp, Artificial Sequence
  Synthetic polynucleotide encoding artificial human antibody CDR-H2 region
atcaaggttggcgatggcgacaca

SEQ ID NO: 2763 - DNA, 24 bp, Artificial Sequence
  Synthetic polynucleotide encoding artificial human antibody CDR-H2 region
attagttggaatagtggtagcata

SEQ ID NO: 2764 - DNA, 21 bp, Artificial Sequence
  Synthetic polynucleotide encoding artificial human antibody CDR-H2 region
ttccactccagtggagtttcg

SEQ ID NO: 2765 - DNA, 21 bp, Artificial Sequence
  Synthetic polynucleotide encoding artificial human antibody CDR-H2 region
atatatcatactggcattacg

SEQ ID NO: 2766 - DNA, 21 bp, Artificial Sequence
  Synthetic polynucleotide encoding artificial human antibody CDR-H2 region
atctattccagtgggagcacc

SEQ ID NO: 2767 - DNA, 24 bp, Artificial Sequence
  Synthetic polynucleotide encoding artificial human antibody CDR-H2 region
attagttacagtggtagtaccata

SEQ ID NO: 2768 - DNA, 30 bp, Artificial Sequence
  Synthetic polynucleotide encoding artificial human antibody CDR-H2 region
attaaaagcaaaactgatggtgagacaaca

SEQ ID NO: 2769 - DNA, 21 bp, Artificial Sequence
  Synthetic polynucleotide encoding artificial human antibody CDR-H2 region
atcaatcatagtggaagcacc

SEQ ID NO: 2770 - DNA, 24 bp, Artificial Sequence
  Synthetic polynucleotide encoding artificial human antibody CDR-H2 region
atctttcctcatgactctgatgtc

SEQ ID NO: 2771 - DNA, 24 bp, Artificial Sequence
  Synthetic polynucleotide encoding artificial human antibody CDR-H2 region
attagcgcaagtggtaccagcaca

SEQ ID NO: 2772 - DNA, 24 bp, Artificial Sequence
  Synthetic polynucleotide encoding artificial human antibody CDR-H2 region
atcagcacttacactggtaacaca

SEQ ID NO: 2773 - DNA, 21 bp, Artificial Sequence
  Synthetic polynucleotide encoding artificial human antibody CDR-H2 region
atctattatagtggatacacc

SEQ ID NO: 2774 - DNA, 24 bp, Artificial Sequence
  Synthetic polynucleotide encoding artificial human antibody CDR-H2 region
atatattatgacggaagtgatcaa

SEQ ID NO: 2775 - DNA, 24 bp, Artificial Sequence
  Synthetic polynucleotide encoding artificial human antibody CDR-H2 region
attagttgggatggtggtagcaca

SEQ ID NO: 2776 - DNA, 24 bp, Artificial Sequence
  Synthetic polynucleotide encoding artificial human antibody CDR-H2 region
atatcatatgatggaagtaataaa

SEQ ID NO: 2777 - DNA, 24 bp, Artificial Sequence
  Synthetic polynucleotide encoding artificial human antibody CDR-H2 region
atctatcctggtgactctgatacc

SEQ ID NO: 2778 - DNA, 21 bp, Artificial Sequence
  Synthetic polynucleotide encoding artificial human antibody CDR-H2 region
atctattatagtgggagtacc

SEQ ID NO: 2779 - DNA, 24 bp, Artificial Sequence
  Synthetic polynucleotide encoding artificial human antibody CDR-H2 region
atcaacgttggcaatggttacaca

SEQ ID NO: 2780 - DNA, 30 bp, Artificial Sequence
  Synthetic polynucleotide encoding artificial human antibody CDR-H2 region
attagcaacatcatttatggtgcgacaaca

SEQ ID NO: 2781 - DNA, 24 bp, Artificial Sequence
  Synthetic polynucleotide encoding artificial human antibody CDR-H2 region
atcaacaccgacactggggacccc

SEQ ID NO: 2782 - DNA, 24 bp, Artificial Sequence
  Synthetic polynucleotide encoding artificial human antibody CDR-H2 region
gttgattggaatggagataacaca

SEQ ID NO: 2783 - DNA, 21 bp, Artificial Sequence
  Synthetic polynucleotide encoding artificial human antibody CDR-H2 region
atttcttgggatgatgataag

SEQ ID NO: 2784 - DNA, 24 bp, Artificial Sequence
  Synthetic polynucleotide encoding artificial human antibody CDR-H2 region
attagtggtagcggtggtagcaca

SEQ ID NO: 2785 - DNA, 24 bp, Artificial Sequence
  Synthetic polynucleotide encoding artificial human antibody CDR-H2 region
attagttgggatggtcatcagacc

SEQ ID NO: 2786 - DNA, 21 bp, Artificial Sequence
  Synthetic polynucleotide encoding artificial human antibody CDR-H2 region
atctattacagtgggagcacc

SEQ ID NO: 2787 - DNA, 21 bp, Artificial Sequence
  Synthetic polynucleotide encoding artificial human antibody CDR-H2 region
atctattatagtgggagcacc

SEQ ID NO: 2788 - DNA, 24 bp, Artificial Sequence
  Synthetic polynucleotide encoding artificial human antibody CDR-H2 region
atatggtatgatggaagtaataaa

SEQ ID NO: 2789 - DNA, 24 bp, Artificial Sequence
  Synthetic polynucleotide encoding artificial human antibody CDR-H2 region
tttgatcctgaagatggtgaaaca

SEQ ID NO: 2790 - DNA, 21 bp, Artificial Sequence
  Synthetic polynucleotide encoding artificial human antibody CDR-H2 region
atctatcccagtgggagcacc

SEQ ID NO: 2791 - DNA, 24 bp, Artificial Sequence
  Synthetic polynucleotide encoding artificial human antibody CDR-H2 region
attagtgatactggtgttagcaca

SEQ ID NO: 2792 - DNA, 21 bp, Artificial Sequence
  Synthetic polynucleotide encoding artificial human antibody CDR-H2 region
atctattacagtgggagcacc

SEQ ID NO: 2793 - DNA, 21 bp, Artificial Sequence
  Synthetic polynucleotide encoding artificial human antibody CDR-H2 region
atctttcccagtgggagcacc

SEQ ID NO: 2794 - DNA, 24 bp, Artificial Sequence
  Synthetic polynucleotide encoding artificial human antibody CDR-H2 region
atcaaccctaacagtggtggcaca

SEQ ID NO: 2795 - DNA, 21 bp, Artificial Sequence
  Synthetic polynucleotide encoding artificial human antibody CDR-H2 region
atctattatagtgggagcacc

SEQ ID NO: 2796 - DNA, 24 bp, Artificial Sequence
  Synthetic polynucleotide encoding artificial human antibody CDR-H2 region
atatggtatgatggaagtaataaa

SEQ ID NO: 2797 - DNA, 30 bp, Artificial Sequence
  Synthetic polynucleotide encoding artificial human antibody CDR-H2 region
attagaagcaaagcttatggtgggacaaca

SEQ ID NO: 2798 - DNA, 24 bp, Artificial Sequence
  Synthetic polynucleotide encoding artificial human antibody CDR-H2 region
atcaaccctaacagtggtggcaca

SEQ ID NO: 2799 - DNA, 21 bp, Artificial Sequence
  Synthetic polynucleotide encoding artificial human antibody CDR-H2 region
atctattacagtgggagcacc

SEQ ID NO: 2800 - DNA, 24 bp, Artificial Sequence
  Synthetic polynucleotide encoding artificial human antibody CDR-H2 region
atttatggaaataccggtaacacg

SEQ ID NO: 2801 - DNA, 24 bp, Artificial Sequence
  Synthetic polynucleotide encoding artificial human antibody CDR-H2 region
tttgatcctgaagatggtgaaaca

SEQ ID NO: 2802 - DNA, 21 bp, Artificial Sequence
  Synthetic polynucleotide encoding artificial human antibody CDR-H2 region
attagtagtggtggcaggaca

SEQ ID NO: 2803 - DNA, 24 bp, Artificial Sequence
  Synthetic polynucleotide encoding artificial human antibody CDR-H2 region
tttgatcctgaagatggtgaaaca

SEQ ID NO: 2804 - DNA, 21 bp, Artificial Sequence
  Synthetic polynucleotide encoding artificial human antibody CDR-H2 region
atctattacagtgggagcacc

SEQ ID NO: 2805 - DNA, 21 bp, Artificial Sequence
  Synthetic polynucleotide encoding artificial human antibody CDR-H2 region
atttattgggatgatgataag

SEQ ID NO: 2806 - DNA, 24 bp, Artificial Sequence
  Synthetic polynucleotide encoding artificial human antibody CDR-H2 region
atcaaccctaacagtggtggcaca

SEQ ID NO: 2807 - DNA, 24 bp, Artificial Sequence
  Synthetic polynucleotide encoding artificial human antibody CDR-H2 region
ttcgatcccactggcggccccaca

SEQ ID NO: 2808 - DNA, 21 bp, Artificial Sequence
  Synthetic polynucleotide encoding artificial human antibody CDR-H2 region
atctattccagtgggagcacc

SEQ ID NO: 2809 - DNA, 24 bp, Artificial Sequence
  Synthetic polynucleotide encoding artificial human antibody CDR-H2 region
atctatcctggtgactctgatacc

SEQ ID NO: 2810 - DNA, 24 bp, Artificial Sequence
  Synthetic polynucleotide encoding artificial human antibody CDR-H2 region
tttgatcctgaagatggtgaaaca

SEQ ID NO: 2811 - DNA, 21 bp, Artificial Sequence
  Synthetic polynucleotide encoding artificial human antibody CDR-H2 region
atttatagcggtggtagcaca

SEQ ID NO: 2812 - DNA, 24 bp, Artificial Sequence
  Synthetic polynucleotide encoding artificial human antibody CDR-H2 region
attggtcttcatggtactaccctg

SEQ ID NO: 2813 - DNA, 24 bp, Artificial Sequence
  Synthetic polynucleotide encoding artificial human antibody CDR-H2 region
tttgatcctgaagatggtgaaaca

SEQ ID NO: 2814 - DNA, 24 bp, Artificial Sequence
  Synthetic polynucleotide encoding artificial human antibody CDR-H2 region
gtaaagcaagatggaagtgagaaa

SEQ ID NO: 2815 - DNA, 24 bp, Artificial Sequence
  Synthetic polynucleotide encoding artificial human antibody CDR-H2 region
tttgatcctgaagatggtgaaaca

SEQ ID NO: 2816 - DNA, 24 bp, Artificial Sequence
  Synthetic polynucleotide encoding artificial human antibody CDR-H2 region
attagtggaagtggcgatcgcaca

SEQ ID NO: 2817 - DNA, 21 bp, Artificial Sequence
  Synthetic polynucleotide encoding artificial human antibody CDR-H2 region
atctcttacagtgggagcact

SEQ ID NO: 2818 - DNA, 21 bp, Artificial Sequence
  Synthetic polynucleotide encoding artificial human antibody CDR-H2 region
attttttcgaatgacgaaaaa

SEQ ID NO: 2819 - DNA, 24 bp, Artificial Sequence
  Synthetic polynucleotide encoding artificial human antibody CDR-H2 region
ataagcggtagtggccgaaataca

SEQ ID NO: 2820 - DNA, 21 bp, Artificial Sequence
  Synthetic polynucleotide encoding artificial human antibody CDR-H2 region
atctataccagtgggagcacc

SEQ ID NO: 2821 - DNA, 24 bp, Artificial Sequence
  Synthetic polynucleotide encoding artificial human antibody CDR-H2 region
attactagtgatgggagtagcgca

SEQ ID NO: 2822 - DNA, 24 bp, Artificial Sequence
  Synthetic polynucleotide encoding artificial human antibody CDR-H2 region
atcagtaggagtagtcgcaacata

SEQ ID NO: 2823 - DNA, 24 bp, Artificial Sequence
  Synthetic polynucleotide encoding artificial human antibody CDR-H2 region
atatcatatgatggaagcaataaa

SEQ ID NO: 2824 - DNA, 24 bp, Artificial Sequence
  Synthetic polynucleotide encoding artificial human antibody CDR-H2 region
atttctgttagtggtgatacccca

SEQ ID NO: 2825 - DNA, 24 bp, Artificial Sequence
  Synthetic polynucleotide encoding artificial human antibody CDR-H2 region
atctatcctggtgactccgatacc

SEQ ID NO: 2826 - DNA, 24 bp, Artificial Sequence
  Synthetic polynucleotide encoding artificial human antibody CDR-H2 region
attagtagtagtggtagtaccata

SEQ ID NO: 2827 - DNA, 24 bp, Artificial Sequence
  Synthetic polynucleotide encoding artificial human antibody CDR-H2 region
atcatccctatccttggtatagca

SEQ ID NO: 2828 - DNA, 21 bp, Artificial Sequence
  Synthetic polynucleotide encoding artificial human antibody CDR-H2 region
atcaatcatagtggaagcacc

SEQ ID NO: 2829 - DNA, 21 bp, Artificial Sequence
  Synthetic polynucleotide encoding artificial human antibody CDR-H2 region
atctattatagtgggagcacc

SEQ ID NO: 2830 - DNA, 30 bp, Artificial Sequence
  Synthetic polynucleotide encoding artificial human antibody CDR-H2 region
attaaaagcaaaactgatggtgggacaaca

SEQ ID NO: 2831 - DNA, 24 bp, Artificial Sequence
  Synthetic polynucleotide encoding artificial human antibody CDR-H2 region
atatcatatgatggaagtaataaa

SEQ ID NO: 2832 - DNA, 24 bp, Artificial Sequence
  Synthetic polynucleotide encoding artificial human antibody CDR-H2 region
atcagcgcttacaatggtaacaca

SEQ ID NO: 2833 - DNA, 30 bp, Artificial Sequence
  Synthetic polynucleotide encoding artificial human antibody CDR-H2 region
attagaaacaaaccgaacagttacaccatg

SEQ ID NO: 2834 - DNA, 24 bp, Artificial Sequence
  Synthetic polynucleotide encoding artificial human antibody CDR-H2 region
atcaaccctaacagtggtggcaca

SEQ ID NO: 2835 - DNA, 21 bp, Artificial Sequence
  Synthetic polynucleotide encoding artificial human antibody CDR-H2 region
atttattgggatgatgataag

SEQ ID NO: 2836 - DNA, 21 bp, Artificial Sequence
  Synthetic polynucleotide encoding artificial human antibody CDR-H2 region
atccactccagtggggacacc

SEQ ID NO: 2837 - DNA, 24 bp, Artificial Sequence
  Synthetic polynucleotide encoding artificial human antibody CDR-H2 region
ataaagcaagatggaagtgagaaa

SEQ ID NO: 2838 - DNA, 24 bp, Artificial Sequence
  Synthetic polynucleotide encoding artificial human antibody CDR-H2 region
attagtggggatggtggtagcaca

SEQ ID NO: 2839 - DNA, 21 bp, Artificial Sequence
  Synthetic polynucleotide encoding artificial human antibody CDR-H2 region
atctttacccgtgggagcacc

SEQ ID NO: 2840 - DNA, 24 bp, Artificial Sequence
  Synthetic polynucleotide encoding artificial human antibody CDR-H2 region
ataaagaacgatggaagtgaggaa

SEQ ID NO: 2841 - DNA, 21 bp, Artificial Sequence
  Synthetic polynucleotide encoding artificial human antibody CDR-H2 region
atctattacagtgggagcacc

SEQ ID NO: 2842 - DNA, 24 bp, Artificial Sequence
  Synthetic polynucleotide encoding artificial human antibody CDR-H2 region
tttgatcctgaagatggtgaaaca

SEQ ID NO: 2843 - DNA, 21 bp, Artificial Sequence
  Synthetic polynucleotide encoding artificial human antibody CDR-H2 region
atttattgggatgatgataag

SEQ ID NO: 2844 - DNA, 24 bp, Artificial Sequence
  Synthetic polynucleotide encoding artificial human antibody CDR-H2 region
tttgatcctgaagatggtgaaaca

SEQ ID NO: 2845 - DNA, 21 bp, Artificial Sequence
  Synthetic polynucleotide encoding artificial human antibody CDR-H2 region
atctattacagtgggagcacc

SEQ ID NO: 2846 - DNA, 21 bp, Artificial Sequence
  Synthetic polynucleotide encoding artificial human antibody CDR-H2 region
atcaatcatagtggaagcacc

SEQ ID NO: 2847 - DNA, 21 bp, Artificial Sequence
  Synthetic polynucleotide encoding artificial human antibody CDR-H2 region
atcaatcatagtggaagcacc

SEQ ID NO: 2848 - DNA, 24 bp, Artificial Sequence
  Synthetic polynucleotide encoding artificial human antibody CDR-H2 region
atcaaccctaacagtggtggcaca

SEQ ID NO: 2849 - DNA, 27 bp, Artificial Sequence
  Synthetic polynucleotide encoding artificial human antibody CDR-H2 region
acatactacaggtccaagtggtataat

SEQ ID NO: 2850 - DNA, 21 bp, Artificial Sequence
  Synthetic polynucleotide encoding artificial human antibody CDR-H2 region
atctattacagtgggagcacc

SEQ ID NO: 2851 - DNA, 21 bp, Artificial Sequence
  Synthetic polynucleotide encoding artificial human antibody CDR-H2 region
atctataccagtgggagcacc

SEQ ID NO: 2852 - DNA, 24 bp, Artificial Sequence
  Synthetic polynucleotide encoding artificial human antibody CDR-H2 region
attagtggtcgtggtgatgacacc

SEQ ID NO: 2853 - DNA, 24 bp, Artificial Sequence
  Synthetic polynucleotide encoding artificial human antibody CDR-H2 region
atatggtatgatggaagtaataaa

SEQ ID NO: 2854 - DNA, 24 bp, Artificial Sequence
  Synthetic polynucleotide encoding artificial human antibody CDR-H2 region
atatcatatgatggaagtaataaa

SEQ ID NO: 2855 - DNA, 24 bp, Artificial Sequence
  Synthetic polynucleotide encoding artificial human antibody CDR-H2 region
atcatccctattcttggtgtaatc

SEQ ID NO: 2856 - DNA, 24 bp, Artificial Sequence
  Synthetic polynucleotide encoding artificial human antibody CDR-H2 region
atatggtatgatggaagtaataaa

SEQ ID NO: 2857 - DNA, 21 bp, Artificial Sequence
  Synthetic polynucleotide encoding artificial human antibody CDR-H2 region
atttatagcggtggtagcaca

SEQ ID NO: 2858 - DNA, 27 bp, Artificial Sequence
  Synthetic polynucleotide encoding artificial human antibody CDR-H2 region
acatactacaggtccaagtggtataat

SEQ ID NO: 2859 - DNA, 24 bp, Artificial Sequence
  Synthetic polynucleotide encoding artificial human antibody CDR-H2 region
tttgatcctttagatggtgaatca

SEQ ID NO: 2860 - DNA, 24 bp, Artificial Sequence
  Synthetic polynucleotide encoding artificial human antibody CDR-H2 region
atgaaccctaaaagtggaagcaca

SEQ ID NO: 2861 - DNA, 24 bp, Artificial Sequence
  Synthetic polynucleotide encoding artificial human antibody CDR-H2 region
atatggtatgatggaagtattaaa

SEQ ID NO: 2862 - DNA, 24 bp, Artificial Sequence
  Synthetic polynucleotide encoding artificial human antibody CDR-H2 region
attaatgctcgtggtaatagtaaa

SEQ ID NO: 2863 - DNA, 24 bp, Artificial Sequence
  Synthetic polynucleotide encoding artificial human antibody CDR-H2 region
attagtggtagtggtggtagcaca

SEQ ID NO: 2864 - DNA, 21 bp, Artificial Sequence
  Synthetic polynucleotide encoding artificial human antibody CDR-H2 region
atctattatagtgggagcacc

SEQ ID NO: 2865 - DNA, 21 bp, Artificial Sequence
  Synthetic polynucleotide encoding artificial human antibody CDR-H2 region
atctataccagtgggagcacc

SEQ ID NO: 2866 - DNA, 24 bp, Artificial Sequence
  Synthetic polynucleotide encoding artificial human antibody CDR-H2 region
atgaaccctaacagtggtgacaca

SEQ ID NO: 2867 - DNA, 24 bp, Artificial Sequence
  Synthetic polynucleotide encoding artificial human antibody CDR-H2 region
attagtggtgatggcaaaagtact

SEQ ID NO: 2868 - DNA, 24 bp, Artificial Sequence
  Synthetic polynucleotide encoding artificial human antibody CDR-H2 region
attagaagtagcaggagtgccata

SEQ ID NO: 2869 - DNA, 24 bp, Artificial Sequence
  Synthetic polynucleotide encoding artificial human antibody CDR-H2 region
atatcatatgatggaagtaataaa

SEQ ID NO: 2870 - DNA, 21 bp, Artificial Sequence
  Synthetic polynucleotide encoding artificial human antibody CDR-H2 region
atttatagcggtgggagtaca

SEQ ID NO: 2871 - DNA, 21 bp, Artificial Sequence
  Synthetic polynucleotide encoding artificial human antibody CDR-H2 region
attgattgggatgatgataaa

SEQ ID NO: 2872 - DNA, 21 bp, Artificial Sequence
  Synthetic polynucleotide encoding artificial human antibody CDR-H2 region
atcagtcctagtggagacacc

SEQ ID NO: 2873 - DNA, 21 bp, Artificial Sequence
  Synthetic polynucleotide encoding artificial human antibody CDR-H2 region
atctattatagtgggagcacc

SEQ ID NO: 2874 - DNA, 24 bp, Artificial Sequence
  Synthetic polynucleotide encoding artificial human antibody CDR-H2 region
atatggtatgatggaagtaataaa

SEQ ID NO: 2875 - DNA, 24 bp, Artificial Sequence
  Synthetic polynucleotide encoding artificial human antibody CDR-H2 region
attagtagtagtggtagtgccata

SEQ ID NO: 2876 - DNA, 24 bp, Artificial Sequence
  Synthetic polynucleotide encoding artificial human antibody CDR-H2 region
atcaaccctagtggtggtagcaca

SEQ ID NO: 2877 - DNA, 21 bp, Artificial Sequence
  Synthetic polynucleotide encoding artificial human antibody CDR-H2 region
atttattgggatggagataag

SEQ ID NO: 2878 - DNA, 24 bp, Artificial Sequence
  Synthetic polynucleotide encoding artificial human antibody CDR-H2 region
atatcatatgatggaagcaataaa

SEQ ID NO: 2879 - DNA, 24 bp, Artificial Sequence
  Synthetic polynucleotide encoding artificial human antibody CDR-H2 region
atatataatgatggaagtaacaaa

SEQ ID NO: 2880 - DNA, 21 bp, Artificial Sequence
  Synthetic polynucleotide encoding artificial human antibody CDR-H2 region
atcttttacagtgggagcacc

SEQ ID NO: 2881 - DNA, 24 bp, Artificial Sequence
  Synthetic polynucleotide encoding artificial human antibody CDR-H2 region
atatggtatgatggaagtaataaa

SEQ ID NO: 2882 - DNA, 24 bp, Artificial Sequence
  Synthetic polynucleotide encoding artificial human antibody CDR-H2 region
tttgatcctgaagatggtgaaaca

SEQ ID NO: 2883 - DNA, 24 bp, Artificial Sequence
  Synthetic polynucleotide encoding artificial human antibody CDR-H2 region
attagtagtagtggtagtaccata

SEQ ID NO: 2884 - DNA, 21 bp, Artificial Sequence
  Synthetic polynucleotide encoding artificial human antibody CDR-H2 region
atctattacagtgggagcacc

SEQ ID NO: 2885 - DNA, 21 bp, Artificial Sequence
  Synthetic polynucleotide encoding artificial human antibody CDR-H2 region
attgattgggatgatgataaa

SEQ ID NO: 2886 - DNA, 21 bp, Artificial Sequence
  Synthetic polynucleotide encoding artificial human antibody CDR-H2 region
atttattgggatgatgataag

SEQ ID NO: 2887 - DNA, 24 bp, Artificial Sequence
  Synthetic polynucleotide encoding artificial human antibody CDR-H2 region
atatcatatgatggaagtaataaa

SEQ ID NO: 2888 - DNA, 21 bp, Artificial Sequence
  Synthetic polynucleotide encoding artificial human antibody CDR-H2 region
atctataccagtgggagcacc

SEQ ID NO: 2889 - DNA, 21 bp, Artificial Sequence
  Synthetic polynucleotide encoding artificial human antibody CDR-H2 region
atctatcatagtgggagcacc

SEQ ID NO: 2890 - DNA, 24 bp, Artificial Sequence
  Synthetic polynucleotide encoding artificial human antibody CDR-H2 region
atcaaccctagtggtggtagcaca

SEQ ID NO: 2891 - DNA, 24 bp, Artificial Sequence
  Synthetic polynucleotide encoding artificial human antibody CDR-H2 region
tttgatcctgaagatggtgaaaca

SEQ ID NO: 2892 - DNA, 30 bp, Artificial Sequence
  Synthetic polynucleotide encoding artificial human antibody CDR-H2 region
attcgaatcaaagccaacgcttacgcgaca

SEQ ID NO: 2893 - DNA, 24 bp, Artificial Sequence
  Synthetic polynucleotide encoding artificial human antibody CDR-H2 region
attagtagtagtggtagtaccata

SEQ ID NO: 2894 - DNA, 24 bp, Artificial Sequence
  Synthetic polynucleotide encoding artificial human antibody CDR-H2 region
atctatcctgacgactctgatact

SEQ ID NO: 2895 - DNA, 24 bp, Artificial Sequence
  Synthetic polynucleotide encoding artificial human antibody CDR-H2 region
atcaaccctaacagtggtggcaca

SEQ ID NO: 2896 - DNA, 24 bp, Artificial Sequence
  Synthetic polynucleotide encoding artificial human antibody CDR-H2 region
atctcttttgacggaagtaccaga

SEQ ID NO: 2897 - DNA, 24 bp, Artificial Sequence
  Synthetic polynucleotide encoding artificial human antibody CDR-H2 region
tttgatcctgaagatggtgaaaca

SEQ ID NO: 2898 - DNA, 24 bp, Artificial Sequence
  Synthetic polynucleotide encoding artificial human antibody CDR-H2 region
atatcatatgatggaagcaataaa

SEQ ID NO: 2899 - DNA, 24 bp, Artificial Sequence
  Synthetic polynucleotide encoding artificial human antibody CDR-H2 region
atatcatatgatggaagtaataaa

SEQ ID NO: 2900 - DNA, 24 bp, Artificial Sequence
  Synthetic polynucleotide encoding artificial human antibody CDR-H2 region
ataaagcaagatggaagtgagaaa

SEQ ID NO: 2901 - DNA, 21 bp, Artificial Sequence
  Synthetic polynucleotide encoding artificial human antibody CDR-H2 region
atctattatagtgggagcacc

SEQ ID NO: 2902 - DNA, 24 bp, Artificial Sequence
  Synthetic polynucleotide encoding artificial human antibody CDR-H2 region
attagtagtagtggtagtaccata

SEQ ID NO: 2903 - DNA, 24 bp, Artificial Sequence
  Synthetic polynucleotide encoding artificial human antibody CDR-H2 region
tttgatcctgaagatggtgaaaca

SEQ ID NO: 2904 - DNA, 21 bp, Artificial Sequence
  Synthetic polynucleotide encoding artificial human antibody CDR-H2 region
atctatcatagtgggagcacc

SEQ ID NO: 2905 - DNA, 21 bp, Artificial Sequence
  Synthetic polynucleotide encoding artificial human antibody CDR-H2 region
atttatagcggtggtagcaca

SEQ ID NO: 2906 - DNA, 21 bp, Artificial Sequence
  Synthetic polynucleotide encoding artificial human antibody CDR-H2 region
atctattatagtgggagcacc

SEQ ID NO: 2907 - DNA, 24 bp, Artificial Sequence
  Synthetic polynucleotide encoding artificial human antibody CDR-H2 region
attagtggtagtggtggtagcaca

SEQ ID NO: 2908 - DNA, 24 bp, Artificial Sequence
  Synthetic polynucleotide encoding artificial human antibody CDR-H2 region
tttgatcctgaagatggtgaaaca

SEQ ID NO: 2909 - DNA, 21 bp, Artificial Sequence
  Synthetic polynucleotide encoding artificial human antibody CDR-H2 region
attttttcgaatgacgaaaaa

SEQ ID NO: 2910 - DNA, 30 bp, Artificial Sequence; identical to SEQ ID NO: 2797
  Synthetic polynucleotide encoding artificial human antibody CDR-H2 region

SEQ ID NO: 2911 - DNA, 21 bp, Artificial Sequence
  Synthetic polynucleotide encoding artificial human antibody CDR-H2 region
atttattgggatgatgataag

SEQ ID NO: 2912 - DNA, 21 bp, Artificial Sequence
  Synthetic polynucleotide encoding artificial human antibody CDR-H2 region
atctctcgcagtgcgagtacc

SEQ ID NO: 2913 - DNA, 24 bp, Artificial Sequence
  Synthetic polynucleotide encoding artificial human antibody CDR-H2 region
attaatagtgatgggagtagcaca

SEQ ID NO: 2914 - DNA, 21 bp, Artificial Sequence
  Synthetic polynucleotide encoding artificial human antibody CDR-H2 region
atctataccagtgggagcacc

SEQ ID NO: 2915 - DNA, 21 bp, Artificial Sequence
  Synthetic polynucleotide encoding artificial human antibody CDR-H2 region
atctattatagtgggagcacc

SEQ ID NO: 2916 - DNA, 21 bp, Artificial Sequence
  Synthetic polynucleotide encoding artificial human antibody CDR-H2 region
atctattacagtgggagcacc

SEQ ID NO: 2917 - DNA, 21 bp, Artificial Sequence
  Synthetic polynucleotide encoding artificial human antibody CDR-H2 region
atctattacagtgggagcacc

SEQ ID NO: 2918 - DNA, 24 bp, Artificial Sequence
  Synthetic polynucleotide encoding artificial human antibody CDR-H2 region
attagtccttctagtacctccaaa

SEQ ID NO: 2919 - DNA, 24 bp, Artificial Sequence
  Synthetic polynucleotide encoding artificial human antibody CDR-H2 region
atcagcgcttacaatggtaacaca

SEQ ID NO: 2920 - DNA, 24 bp, Artificial Sequence
  Synthetic polynucleotide encoding artificial human antibody CDR-H2 region
tttgatcctgaagatggtgaaaca

SEQ ID NO: 2921 - DNA, 24 bp, Artificial Sequence
  Synthetic polynucleotide encoding artificial human antibody CDR-H2 region
tttgatcctgaagatggtgaaaca

SEQ ID NO: 2922 - DNA, 24 bp, Artificial Sequence
  Synthetic polynucleotide encoding artificial human antibody CDR-H2 region
tttgatcctgaagatggtgaaaca

SEQ ID NO: 2923 - DNA, 21 bp, Artificial Sequence
  Synthetic polynucleotide encoding artificial human antibody CDR-H2 region
atctattatagtgggagcacc

SEQ ID NO: 2924 - DNA, 21 bp, Artificial Sequence
  Synthetic polynucleotide encoding artificial human antibody CDR-H2 region
atctataccagtgggagcacc

SEQ ID NO: 2925 - DNA, 24 bp, Artificial Sequence
  Synthetic polynucleotide encoding artificial human antibody CDR-H2 region
attagtgatactggaggtaaaaca

SEQ ID NO: 2926 - DNA, 24 bp, Artificial Sequence
  Synthetic polynucleotide encoding artificial human antibody CDR-H2 region
attagtggtagtggtggtagcaca

SEQ ID NO: 2927 - DNA, 24 bp, Artificial Sequence
  Synthetic polynucleotide encoding artificial human antibody CDR-H2 region
atatggtatgatggaagtaataaa

SEQ ID NO: 2928 - DNA, 21 bp, Artificial Sequence
  Synthetic polynucleotide encoding artificial human antibody CDR-H2 region
atctattatagtgggagcacc

SEQ ID NO: 2929 - DNA, 21 bp, Artificial Sequence
  Synthetic polynucleotide encoding artificial human antibody CDR-H2 region
atctataccagtgggagcacc

SEQ ID NO: 2930 - DNA, 24 bp, Artificial Sequence
  Synthetic polynucleotide encoding artificial human antibody CDR-H2 region
atcatccctattcttggtggtcca

SEQ ID NO: 2931 - DNA, 24 bp, Artificial Sequence
  Synthetic polynucleotide encoding artificial human antibody CDR-H2 region
attagtggtgatggcaaaagtact

SEQ ID NO: 2932 - DNA, 21 bp, Artificial Sequence
  Synthetic polynucleotide encoding artificial human antibody CDR-H2 region
attttttcgaatgacgaaaaa

SEQ ID NO: 2933 - DNA, 21 bp, Artificial Sequence
  Synthetic polynucleotide encoding artificial human antibody CDR-H2 region
atttattgggatgatgataag

SEQ ID NO: 2934 - DNA, 24 bp, Artificial Sequence
  Synthetic polynucleotide encoding artificial human antibody CDR-H2 region
gtgtcatatgatggaagtcgtaga

SEQ ID NO: 2935 - DNA, 24 bp, Artificial Sequence
  Synthetic polynucleotide encoding artificial human antibody CDR-H2 region
attaatagtgatgggagtaccaca

SEQ ID NO: 2936 - DNA, 24 bp, Artificial Sequence
  Synthetic polynucleotide encoding artificial human antibody CDR-H2 region
atcaaccctaacagtggtggcaca

SEQ ID NO: 2937 - DNA, 21 bp, Artificial Sequence
  Synthetic polynucleotide encoding artificial human antibody CDR-H2 region
attgattgggatgatgataaa

SEQ ID NO: 2938 - DNA, 24 bp, Artificial Sequence
  Synthetic polynucleotide encoding artificial human antibody CDR-H2 region
tttgatcctgaagatggtgaaaca

SEQ ID NO: 2939 - DNA, 24 bp, Artificial Sequence
  Synthetic polynucleotide encoding artificial human antibody CDR-H2 region
ataaagcaagatggaagtgagaaa

SEQ ID NO: 2940 - DNA, 24 bp, Artificial Sequence
  Synthetic polynucleotide encoding artificial human antibody CDR-H2 region
attagttggaatagtggtagcata

SEQ ID NO: 2941 - DNA, 24 bp, Artificial Sequence
  Synthetic polynucleotide encoding artificial human antibody CDR-H2 region
gtcatccctatccttggtatagca

SEQ ID NO: 2942 - DNA, 24 bp, Artificial Sequence
  Synthetic polynucleotide encoding artificial human antibody CDR-H2 region
attactagtactagtagttacaca

SEQ ID NO: 2943 - DNA, 21 bp, Artificial Sequence
  Synthetic polynucleotide encoding artificial human antibody CDR-H2 region
atctattacagtgggagcacc

SEQ ID NO: 2944 - DNA, 24 bp, Artificial Sequence
  Synthetic polynucleotide encoding artificial human antibody CDR-H2 region
atgaaccctaacagtggtaacaca

SEQ ID NO: 2945 - DNA, 24 bp, Artificial Sequence
  Synthetic polynucleotide encoding artificial human antibody CDR-H2 region
attagtagtagtagtagttacata

SEQ ID NO: 2946 - DNA, 21 bp, Artificial Sequence
  Synthetic polynucleotide encoding artificial human antibody CDR-H2 region
atcaatcatagtggaagcacc

SEQ ID NO: 2947 - DNA, 24 bp, Artificial Sequence
  Synthetic polynucleotide encoding artificial human antibody CDR-H2 region
tttgatcctgaagatggtgaaaca

SEQ ID NO: 2948 - DNA, 21 bp, Artificial Sequence
  Synthetic polynucleotide encoding artificial human antibody CDR-H2 region
atctattatagtgggagcacc

SEQ ID NO: 2949 - DNA, 21 bp, Artificial Sequence
  Synthetic polynucleotide encoding artificial human antibody CDR-H2 region
atctataccagtgggagcacc

SEQ ID NO: 2950 - DNA, 24 bp, Artificial Sequence
  Synthetic polynucleotide encoding artificial human antibody CDR-H2 region
atcagcgcttacaatggtaacaca

SEQ ID NO: 2951 - DNA, 24 bp, Artificial Sequence
  Synthetic polynucleotide encoding artificial human antibody CDR-H2 region
attactggtagtagtgataacacg

SEQ ID NO: 2952 - DNA, 24 bp, Artificial Sequence
  Synthetic polynucleotide encoding artificial human antibody CDR-H2 region
tttgatcctgaagatggtgaaaca

SEQ ID NO: 2953 - DNA, 24 bp, Artificial Sequence
  Synthetic polynucleotide encoding artificial human antibody CDR-H2 region
gtgacccctaacagtggtaacaca

SEQ ID NO: 2954 - DNA, 21 bp, Artificial Sequence
  Synthetic polynucleotide encoding artificial human antibody CDR-H2 region
atctataccagtgggagcacc

SEQ ID NO: 2955 - DNA, 21 bp, Artificial Sequence
  Synthetic polynucleotide encoding artificial human antibody CDR-H2 region
attttttcgaatgacgaaaaa

SEQ ID NO: 2956 - DNA, 24 bp, Artificial Sequence
  Synthetic polynucleotide encoding artificial human antibody CDR-H2 region
atcagcccctataatggtcaaaca

SEQ ID NO: 2957 - DNA, 24 bp, Artificial Sequence
  Synthetic polynucleotide encoding artificial human antibody CDR-H2 region
attagttggaatagtggtagcata

SEQ ID NO: 2958 - DNA, 21 bp, Artificial Sequence
  Synthetic polynucleotide encoding artificial human antibody CDR-H2 region
attttttcgaatgacgaaaaa

SEQ ID NO: 2959 - DNA, 21 bp, Artificial Sequence
  Synthetic polynucleotide encoding artificial human antibody CDR-H2 region
atctattatagtgggagcacc

SEQ ID NO: 2960 - DNA, 21 bp, Artificial Sequence
  Synthetic polynucleotide encoding artificial human antibody CDR-H2 region
atctataccagtgggagcacc

SEQ ID NO: 2961 - DNA, 24 bp, Artificial Sequence
  Synthetic polynucleotide encoding artificial human antibody CDR-H2 region
atcaaccctagtggtggtagcaca

SEQ ID NO: 2962 - DNA, 27 bp, Artificial Sequence
  Synthetic polynucleotide encoding artificial human antibody CDR-H2 region
acatactacaggtccaagtggtataat

SEQ ID NO: 2963 - DNA, 24 bp, Artificial Sequence
  Synthetic polynucleotide encoding artificial human antibody CDR-H2 region
atcaaccctaacagtggtggcaca

SEQ ID NO: 2964 - DNA, 24 bp, Artificial Sequence
  Synthetic polynucleotide encoding artificial human antibody CDR-H2 region
gtctcatatgacggcagaaaagaa

SEQ ID NO: 2965 - DNA, 24 bp, Artificial Sequence
  Synthetic polynucleotide encoding artificial human antibody CDR-H2 region
atcagtagtgatgggggtgccaca

SEQ ID NO: 2966 - DNA, 21 bp, Artificial Sequence
  Synthetic polynucleotide encoding artificial human antibody CDR-H2 region
atctattacagtgggagcacc

SEQ ID NO: 2967 - DNA, 24 bp, Artificial Sequence
  Synthetic polynucleotide encoding artificial human antibody CDR-H2 region
tttgatcctgaagatggtgaaaca

SEQ ID NO: 2968 - DNA, 21 bp, Artificial Sequence
  Synthetic polynucleotide encoding artificial human antibody CDR-H2 region
atctataccagtgggagcacc

SEQ ID NO: 2969 - DNA, 30 bp, Artificial Sequence; identical to SEQ ID NO: 2830
  Synthetic polynucleotide encoding artificial human antibody CDR-H2 region

SEQ ID NO: 2970 - DNA, 24 bp, Artificial Sequence
  Synthetic polynucleotide encoding artificial human antibody CDR-H2 region
atcagcgcttatactggaatcgca

SEQ ID NO: 2971 - DNA, 24 bp, Artificial Sequence
  Synthetic polynucleotide encoding artificial human antibody CDR-H2 region
gttgaccctgaagacgatgaaata

SEQ ID NO: 2972 - DNA, 24 bp, Artificial Sequence
  Synthetic polynucleotide encoding artificial human antibody CDR-H2 region
tttgatcctgaagatggtgaaaca

SEQ ID NO: 2973 - DNA, 24 bp, Artificial Sequence
  Synthetic polynucleotide encoding artificial human antibody CDR-H2 region
atatggtatgatggaagtaataaa

SEQ ID NO: 2974 - DNA, 21 bp, Artificial Sequence
  Synthetic polynucleotide encoding artificial human antibody CDR-H2 region
atctattacagtgggagcacc

SEQ ID NO: 2975 - DNA, 24 bp, Artificial Sequence
  Synthetic polynucleotide encoding artificial human antibody CDR-H2 region
attagtggcagtggtggtgccaca

SEQ ID NO: 2976 - DNA, 24 bp, Artificial Sequence
  Synthetic polynucleotide encoding artificial human antibody CDR-H2 region
atatggtatgatggaagtaataaa

SEQ ID NO: 2977 - DNA, 21 bp, Artificial Sequence
  Synthetic polynucleotide encoding artificial human antibody CDR-H2 region
atttatagcggtggtagcact

SEQ ID NO: 2978 - DNA, 24 bp, Artificial Sequence
  Synthetic polynucleotide encoding artificial human antibody CDR-H2 region
atcaaccctaacagtggtggcaca

SEQ ID NO: 2979 - DNA, 21 bp, Artificial Sequence
  Synthetic polynucleotide encoding artificial human antibody CDR-H2 region
atttatagcggtggtagcaca

SEQ ID NO: 2980 - DNA, 30 bp, Artificial Sequence
  Synthetic polynucleotide encoding artificial human antibody CDR-H2 region
attaaaagcaaaactgatggtgggacaata

SEQ ID NO: 2981 - DNA, 24 bp, Artificial Sequence
  Synthetic polynucleotide encoding artificial human antibody CDR-H2 region
attagtagtagtagtagttacata

SEQ ID NO: 2982 - DNA, 24 bp, Artificial Sequence
  Synthetic polynucleotide encoding artificial human antibody CDR-H2 region
attagtggtagtggtggtagcaca

SEQ ID NO: 2983 - DNA, 24 bp, Artificial Sequence
  Synthetic polynucleotide encoding artificial human antibody CDR-H2 region
atcaaccctaacagtggtggcaca

SEQ ID NO: 2984 - DNA, 24 bp, Artificial Sequence
  Synthetic polynucleotide encoding artificial human antibody CDR-H2 region
atcagcgcttacaatggtaacaca

SEQ ID NO: 2985 - DNA, 24 bp, Artificial Sequence
  Synthetic polynucleotide encoding artificial human antibody CDR-H2 region
atatcatatgatggaagtaataaa

SEQ ID NO: 2986 - DNA, 24 bp, Artificial Sequence
  Synthetic polynucleotide encoding artificial human antibody CDR-H2 region
atatcatatgatggaagcaataaa

SEQ ID NO: 2987 - DNA, 24 bp, Artificial Sequence
  Synthetic polynucleotide encoding artificial human antibody CDR-H2 region
tttgatcctgaagatggtgaaaca

SEQ ID NO: 2988 - DNA, 24 bp, Artificial Sequence
  Synthetic polynucleotide encoding artificial human antibody CDR-H2 region
atatcatatgatggaagtaataaa

SEQ ID NO: 2989 - DNA, 21 bp, Artificial Sequence
  Synthetic polynucleotide encoding artificial human antibody CDR-H2 region
attgattgggatgatgataaa

SEQ ID NO: 2990 - DNA, 21 bp, Artificial Sequence
  Synthetic polynucleotide encoding artificial human antibody CDR-H2 region
atccatcacagcgggaacaca

SEQ ID NO: 2991 - DNA, 24 bp, Artificial Sequence
  Synthetic polynucleotide encoding artificial human antibody CDR-H2 region
atatcatatgatggaagtaataaa

SEQ ID NO: 2992 - DNA, 24 bp, Artificial Sequence
  Synthetic polynucleotide encoding artificial human antibody CDR-H2 region
attgatcctagtgactcttatacc

SEQ ID NO: 2993 - DNA, 21 bp, Artificial Sequence
  Synthetic polynucleotide encoding artificial human antibody CDR-H2 region
gtttattcaactgggacaacc

SEQ ID NO: 2994 - DNA, 30 bp, Artificial Sequence; identical to SEQ ID NO: 2797
  Synthetic polynucleotide encoding artificial human antibody CDR-H2 region

SEQ ID NO: 2995 - DNA, 24 bp, Artificial Sequence
  Synthetic polynucleotide encoding artificial human antibody CDR-H2 region
atcatccctatccttggtatagca

SEQ ID NO: 2996 - DNA, 24 bp, Artificial Sequence
  Synthetic polynucleotide encoding artificial human antibody CDR-H2 region
atatggtatgatggaagtaataaa

SEQ ID NO: 2997 - DNA, 24 bp, Artificial Sequence
  Synthetic polynucleotide encoding artificial human antibody CDR-H2 region
atgaaccctaacagtggtaacaca

SEQ ID NO: 2998 - DNA, 24 bp, Artificial Sequence
  Synthetic polynucleotide encoding artificial human antibody CDR-H2 region
atcatccccatcattggtacagga

SEQ ID NO: 2999 - DNA, 24 bp, Artificial Sequence
  Synthetic polynucleotide encoding artificial human antibody CDR-H2 region
attagtagtaccagtaataccatc

SEQ ID NO: 3000 - DNA, 24 bp, Artificial Sequence
  Synthetic polynucleotide encoding artificial human antibody CDR-H2 region
atatcatatgatggaagcaataaa

SEQ ID NO: 3001 - DNA, 24 bp, Artificial Sequence
  Synthetic polynucleotide encoding artificial human antibody CDR-H2 region
attagtggtagtggtggtagcaca

SEQ ID NO: 3002 - DNA, 30 bp, Artificial Sequence; identical to SEQ ID NO: 2830
  Synthetic polynucleotide encoding artificial human antibody CDR-H2 region

SEQ ID NO: 3003 - DNA, 21 bp, Artificial Sequence
  Synthetic polynucleotide encoding artificial human antibody CDR-H2 region
atctattacagtgggagcacc

SEQ ID NO: 3004 - DNA, 24 bp, Artificial Sequence
  Synthetic polynucleotide encoding artificial human antibody CDR-H2 region
atatcatatgatggaagtaataaa

SEQ ID NO: 3005 - DNA, 24 bp, Artificial Sequence
  Synthetic polynucleotide encoding artificial human antibody CDR-H2 region
atatcatatgatggaagcaataaa

SEQ ID NO: 3006 - DNA, 21 bp, Artificial Sequence
  Synthetic polynucleotide encoding artificial human antibody CDR-H2 region
attggtactgctggtgacaca

SEQ ID NO: 3007 - DNA, 24 bp, Artificial Sequence
  Synthetic polynucleotide encoding artificial human antibody CDR-H2 region
attagtggtagtggtggtagcaca

SEQ ID NO: 3008 - DNA, 18 bp, Artificial Sequence
  Synthetic polynucleotide encoding artificial human antibody CDR-H2 region
atctatccgcccgcaagt

SEQ ID NO: 3009 - DNA, 24 bp, Artificial Sequence
  Synthetic polynucleotide encoding artificial human antibody CDR-H2 region
attagtagtagtagtagttacata

SEQ ID NO: 3010 - DNA, 21 bp, Artificial Sequence
  Synthetic polynucleotide encoding artificial human antibody CDR-H2 region
ttttatagcgatggagccaca

SEQ ID NO: 3011 - DNA, 24 bp, Artificial Sequence
  Synthetic polynucleotide encoding artificial human antibody CDR-H2 region
attagtcagagtggtagtaccctt

SEQ ID NO: 3012 - DNA, 24 bp, Artificial Sequence
  Synthetic polynucleotide encoding artificial human antibody CDR-H2 region
attagtggggatggtggtagcaca

SEQ ID NO: 3013 - DNA, 21 bp, Artificial Sequence
  Synthetic polynucleotide encoding artificial human antibody CDR-H2 region
attgattgggatgatgataaa

SEQ ID NO: 3014 - DNA, 24 bp, Artificial Sequence
  Synthetic polynucleotide encoding artificial human antibody CDR-H2 region
gtttatcatggtggtgctaggacg

SEQ ID NO: 3015 - DNA, 27 bp, Artificial Sequence
  Synthetic polynucleotide encoding artificial human antibody CDR-H2 region
acctactacaattccaagtggtttcag

SEQ ID NO: 3016 - DNA, 24 bp, Artificial Sequence
  Synthetic polynucleotide encoding artificial human antibody CDR-H2 region
atatggtatgatggaagtaataaa

SEQ ID NO: 3017 - DNA, 21 bp, Artificial Sequence
  Synthetic polynucleotide encoding artificial human antibody CDR-H2 region
attgattgggatgatgataaa

SEQ ID NO: 3018 - DNA, 24 bp, Artificial Sequence
  Synthetic polynucleotide encoding artificial human antibody CDR-H2 region
atcagcgcttacaatggtaacaca

SEQ ID NO: 3019 - DNA, 24 bp, Artificial Sequence
  Synthetic polynucleotide encoding artificial human antibody CDR-H2 region
atatcatatgatggaagcaataaa

SEQ ID NO: 3020 - DNA, 24 bp, Artificial Sequence
  Synthetic polynucleotide encoding artificial human antibody CDR-H2 region
atatcatatgatggaagcaataaa

SEQ ID NO: 3021 - DNA, 24 bp, Artificial Sequence
  Synthetic polynucleotide encoding artificial human antibody CDR-H2 region
atctatcctggtgactctgatacc

SEQ ID NO: 3022 - DNA, 24 bp, Artificial Sequence
  Synthetic polynucleotide encoding artificial human antibody CDR-H2 region
atatcatatgatggaagcaataaa

SEQ ID NO: 3023 - DNA, 24 bp, Artificial Sequence
  Synthetic polynucleotide encoding artificial human antibody CDR-H2 region
attgatcctagtgactcttatacc

SEQ ID NO: 3024 - DNA, 21 bp, Artificial Sequence
  Synthetic polynucleotide encoding artificial human antibody CDR-H2 region
atctattacagtgggagcacc

SEQ ID NO: 3025 - DNA, 24 bp, Artificial Sequence
  Synthetic polynucleotide encoding artificial human antibody CDR-H2 region
attagtagtagtagtagttacata

SEQ ID NO: 3026 - DNA, 24 bp, Artificial Sequence
  Synthetic polynucleotide encoding artificial human antibody CDR-H2 region
tttgatcctgaagatggtgaaaca

SEQ ID NO: 3027 - DNA, 24 bp, Artificial Sequence
  Synthetic polynucleotide encoding artificial human antibody CDR-H2 region
ataaatgaagacggaaatgtgatt

SEQ ID NO: 3028 - DNA, 21 bp, Artificial Sequence
  Synthetic polynucleotide encoding artificial human antibody CDR-H2 region
atctattacagtgggagcacc

SEQ ID NO: 3029 - DNA, 24 bp, Artificial Sequence
  Synthetic polynucleotide encoding artificial human antibody CDR-H2 region
tttgatcctgaagatggtgaaaca

SEQ ID NO: 3030 - DNA, 24 bp, Artificial Sequence
  Synthetic polynucleotide encoding artificial human antibody CDR-H2 region
atctatcctggtgactctaatccc

SEQ ID NO: 3031 - DNA, 24 bp, Artificial Sequence
  Synthetic polynucleotide encoding artificial human antibody CDR-H2 region
atatcatatgatggaagtaataaa

SEQ ID NO: 3032 - DNA, 21 bp, Artificial Sequence
  Synthetic polynucleotide encoding artificial human antibody CDR-H2 region
atctattacagtgggagcacc

SEQ ID NO: 3033 - DNA, 24 bp, Artificial Sequence
  Synthetic polynucleotide encoding artificial human antibody CDR-H2 region
atatcatatgatggaagtaataaa

SEQ ID NO: 3034 - DNA, 24 bp, Artificial Sequence
  Synthetic polynucleotide encoding artificial human antibody CDR-H2 region
attagtggtagtggtggtagcaca

SEQ ID NO: 3035 - DNA, 30 bp, Artificial Sequence; identical to SEQ ID NO: 2830
  Synthetic polynucleotide encoding artificial human antibody CDR-H2 region

SEQ ID NO: 3036 - DNA, 24 bp, Artificial Sequence
  Synthetic polynucleotide encoding artificial human antibody CDR-H2 region
tttgatcctgaagatggtgaaaca

SEQ ID NO: 3037 - DNA, 24 bp, Artificial Sequence
  Synthetic polynucleotide encoding artificial human antibody CDR-H2 region
tttgatcctgaagatggtgaaaca

SEQ ID NO: 3038 - DNA, 24 bp, Artificial Sequence
  Synthetic polynucleotide encoding artificial human antibody CDR-H2 region
atcagcgcttacaatggtaacaca

SEQ ID NO: 3039 - DNA, 24 bp, Artificial Sequence
  Synthetic polynucleotide encoding artificial human antibody CDR-H2 region
attagtggtagtggtggtggcaca

SEQ ID NO: 3040 - DNA, 21 bp, Artificial Sequence
  Synthetic polynucleotide encoding artificial human antibody CDR-H2 region
atctattacagtgggagcacc

SEQ ID NO: 3041 - DNA, 24 bp, Artificial Sequence
  Synthetic polynucleotide encoding artificial human antibody CDR-H2 region
atcaacgctggcaatggtaacaca

SEQ ID NO: 3042 - DNA, 24 bp, Artificial Sequence
  Synthetic polynucleotide encoding artificial human antibody CDR-H2 region
atatcatatgatggaagcaataaa

SEQ ID NO: 3043 - DNA, 24 bp, Artificial Sequence
  Synthetic polynucleotide encoding artificial human antibody CDR-H2 region
atatcatatgatggaagtaataaa

SEQ ID NO: 3044 - DNA, 24 bp, Artificial Sequence
  Synthetic polynucleotide encoding artificial human antibody CDR-H2 region
atcaaccctagtggtggtagcaca

SEQ ID NO: 3045 - DNA, 24 bp, Artificial Sequence
  Synthetic polynucleotide encoding artificial human antibody CDR-H2 region
atatcatatgatggaagcaataaa

SEQ ID NO: 3046 - DNA, 24 bp, Artificial Sequence
  Synthetic polynucleotide encoding artificial human antibody CDR-H2 region
atcaaccctagtggtggtagcaca

SEQ ID NO: 3047 - DNA, 21 bp, Artificial Sequence
  Synthetic polynucleotide encoding artificial human antibody CDR-H2 region
atctctcatagtgggaacacc

SEQ ID NO: 3048 - DNA, 21 bp, Artificial Sequence
  Synthetic polynucleotide encoding artificial human antibody CDR-H2 region
atctattatagtgggagcacc

SEQ ID NO: 3049 - DNA, 24 bp, Artificial Sequence
  Synthetic polynucleotide encoding artificial human antibody CDR-H2 region
atctatcctggtgactctgacact

SEQ ID NO: 3050 - DNA, 24 bp, Artificial Sequence
  Synthetic polynucleotide encoding artificial human antibody CDR-H2 region
atcacagatgatggagacattgct

SEQ ID NO: 3051 - DNA, 21 bp, Artificial Sequence
  Synthetic polynucleotide encoding artificial human antibody CDR-H2 region
atctataacactgggatcacc

SEQ ID NO: 3052 - DNA, 21 bp, Artificial Sequence
  Synthetic polynucleotide encoding artificial human antibody CDR-H2 region
gtgtctgacaatgggagaatt

SEQ ID NO: 3053 - DNA, 24 bp, Artificial Sequence
  Synthetic polynucleotide encoding artificial human antibody CDR-H2 region
attagtggggatggtggtagcaca

SEQ ID NO: 3054 - DNA, 21 bp, Artificial Sequence
  Synthetic polynucleotide encoding artificial human antibody CDR-H2 region
atctattacagtgggagcacc

SEQ ID NO: 3055 - DNA, 21 bp, Artificial Sequence
  Synthetic polynucleotide encoding artificial human antibody CDR-H2 region
atctatgacagtgggatcacc

SEQ ID NO: 3056 - DNA, 24 bp, Artificial Sequence
  Synthetic polynucleotide encoding artificial human antibody CDR-H2 region
atatcatatgatggaagcaataaa

SEQ ID NO: 3057 - DNA, 24 bp, Artificial Sequence
  Synthetic polynucleotide encoding artificial human antibody CDR-H2 region
attagtggtagtggtggtagcaca

SEQ ID NO: 3058 - DNA, 21 bp, Artificial Sequence
  Synthetic polynucleotide encoding artificial human antibody CDR-H2 region
atctattacagtgggagcacc

SEQ ID NO: 3059 - DNA, 21 bp, Artificial Sequence
  Synthetic polynucleotide encoding artificial human antibody CDR-H2 region
atttatagcggtggtagcaca

SEQ ID NO: 3060 - DNA, 30 bp, Artificial Sequence
  Synthetic polynucleotide encoding artificial human antibody CDR-H2 region
gttatgaccaaggctgacggtgggactacg

SEQ ID NO: 3061 - DNA, 24 bp, Artificial Sequence
  Synthetic polynucleotide encoding artificial human antibody CDR-H2 region
attagtggtagtggtagtagcata

SEQ ID NO: 3062 - DNA, 24 bp, Artificial Sequence
  Synthetic polynucleotide encoding artificial human antibody CDR-H2 region
ataaagcaaaatggaggagagaaa

SEQ ID NO: 3063 - DNA, 24 bp, Artificial Sequence
  Synthetic polynucleotide encoding artificial human antibody CDR-H2 region
atcgtcgttggcagtggtaacaga

SEQ ID NO: 3064 - DNA, 24 bp, Artificial Sequence
  Synthetic polynucleotide encoding artificial human antibody CDR-H2 region
atcatccctatccttggtatagca

SEQ ID NO: 3065 - DNA, 21 bp, Artificial Sequence
  Synthetic polynucleotide encoding artificial human antibody CDR-H2 region
atctattacagtgggagcacc

SEQ ID NO: 3066 - DNA, 24 bp, Artificial Sequence
  Synthetic polynucleotide encoding artificial human antibody CDR-H2 region
atgaaccctaacagtggtggctca

SEQ ID NO: 3067 - DNA, 27 bp, Artificial Sequence
  Synthetic polynucleotide encoding artificial human antibody CDR-H2 region
acatactacaggtccaactggtataat

SEQ ID NO: 3068 - DNA, 21 bp, Artificial Sequence
  Synthetic polynucleotide encoding artificial human antibody CDR-H2 region
atctatcccggtgggagcacc

SEQ ID NO: 3069 - DNA, 24 bp, Artificial Sequence
  Synthetic polynucleotide encoding artificial human antibody CDR-H2 region
gttactggtagtggcaaagggaca

SEQ ID NO: 3070 - DNA, 24 bp, Artificial Sequence
  Synthetic polynucleotide encoding artificial human antibody CDR-H2 region
cttgatcctgaaaatggtgaaaaa

SEQ ID NO: 3071 - DNA, 30 bp, Artificial Sequence
  Synthetic polynucleotide encoding artificial human antibody CDR-H2 region
actagaaacagagttgaaggtttcaccaca

SEQ ID NO: 3072 - DNA, 24 bp, Artificial Sequence
  Synthetic polynucleotide encoding artificial human antibody CDR-H2 region
ataaggcaagatggagctgaaaag

SEQ ID NO: 3073 - DNA, 21 bp, Artificial Sequence
  Synthetic polynucleotide encoding artificial human antibody CDR-H2 region
gtccatgacagtggggacaac

SEQ ID NO: 3074 - DNA, 21 bp, Artificial Sequence
  Synthetic polynucleotide encoding artificial human antibody CDR-H2 region
atttatcgtgggggcagtata

SEQ ID NO: 3075 - DNA, 24 bp, Artificial Sequence
  Synthetic polynucleotide encoding artificial human antibody CDR-H2 region
atatcatatgatggaagtaataaa

SEQ ID NO: 3076 - DNA, 24 bp, Artificial Sequence
  Synthetic polynucleotide encoding artificial human antibody CDR-H2 region
tttagttatgacggtggtagcaca

SEQ ID NO: 3077 - DNA, 24 bp, Artificial Sequence
  Synthetic polynucleotide encoding artificial human antibody CDR-H2 region
attaggagtagaagtgattacaca

SEQ ID NO: 3078 - DNA, 21 bp, Artificial Sequence
  Synthetic polynucleotide encoding artificial human antibody CDR-H2 region
gtcaatcgtgatggcaccact

SEQ ID NO: 3079 - DNA, 21 bp, Artificial Sequence
  Synthetic polynucleotide encoding artificial human antibody CDR-H2 region
atctattacactgggagcacc

SEQ ID NO: 3080 - DNA, 24 bp, Artificial Sequence
  Synthetic polynucleotide encoding artificial human antibody CDR-H2 region
ataaagaaggatggaagtacttat

SEQ ID NO: 3081 - DNA, 24 bp, Artificial Sequence
  Synthetic polynucleotide encoding artificial human antibody CDR-H2 region
attaacgaagatggaagtcacaaa

SEQ ID NO: 3082 - DNA, 24 bp, Artificial Sequence
  Synthetic polynucleotide encoding artificial human antibody CDR-H2 region
atttcatacgatggaaccattaaa

SEQ ID NO: 3083 - DNA, 30 bp, Artificial Sequence
  Synthetic polynucleotide encoding artificial human antibody CDR-H2 region
agtggaaataagggtttgaattacaggtca

SEQ ID NO: 3084 - DNA, 21 bp, Artificial Sequence
  Synthetic polynucleotide encoding artificial human antibody CDR-H2 region
gtctacaccagtgggaccacc

SEQ ID NO: 3085 - DNA, 24 bp, Artificial Sequence
  Synthetic polynucleotide encoding artificial human antibody CDR-H2 region
atcaacaccaacactgggaaccca

SEQ ID NO: 3086 - DNA, 24 bp, Artificial Sequence
  Synthetic polynucleotide encoding artificial human antibody CDR-H2 region
ataaagaaggatggaagtacttat

SEQ ID NO: 3087 - DNA, 24 bp, Artificial Sequence
  Synthetic polynucleotide encoding artificial human antibody CDR-H2 region
atcatccctatccttaatacacca

SEQ ID NO: 3088 - DNA, 24 bp, Artificial Sequence
  Synthetic polynucleotide encoding artificial human antibody CDR-H2 region
atctatcctggtgactctgatacc

SEQ ID NO: 3089 - DNA, 24 bp, Artificial Sequence
  Synthetic polynucleotide encoding artificial human antibody CDR-H2 region
atgtggtctgagggaagtaagaag

SEQ ID NO: 3090 - DNA, 24 bp, Artificial Sequence
  Synthetic polynucleotide encoding artificial human antibody CDR-H2 region
gttagtaagaccagtgttggcaca

SEQ ID NO: 3091 - DNA, 21 bp, Artificial Sequence
  Synthetic polynucleotide encoding artificial human antibody CDR-H2 region
atctcttacggtggcagtggc

SEQ ID NO: 3092 - DNA, 24 bp, Artificial Sequence
  Synthetic polynucleotide encoding artificial human antibody CDR-H2 region
attaacggcattagtggagccata

SEQ ID NO: 3093 - DNA, 24 bp, Artificial Sequence
  Synthetic polynucleotide encoding artificial human antibody CDR-H2 region
atatggtatgatggaagtaataaa

SEQ ID NO: 3094 - DNA, 21 bp, Artificial Sequence
  Synthetic polynucleotide encoding artificial human antibody CDR-H2 region
atctattacagtgggagcacc

SEQ ID NO: 3095 - DNA, 24 bp, Artificial Sequence
  Synthetic polynucleotide encoding artificial human antibody CDR-H2 region
atcaaccctagtggtggtagcaca

SEQ ID NO: 3096 - DNA, 21 bp, Artificial Sequence
  Synthetic polynucleotide encoding artificial human antibody CDR-H2 region
atctatatcaatggtgacaca

SEQ ID NO: 3097 - DNA, 24 bp, Artificial Sequence
  Synthetic polynucleotide encoding artificial human antibody CDR-H2 region
attagtagtagtggtagtaccata

SEQ ID NO: 3098 - DNA, 21 bp, Artificial Sequence
  Synthetic polynucleotide encoding artificial human antibody CDR-H2 region
atctattacagtgggagcacc

SEQ ID NO: 3099 - DNA, 30 bp, Artificial Sequence
  Synthetic polynucleotide encoding artificial human antibody CDR-H2 region
agtagaaacaaagctaagaggtacagcaca

SEQ ID NO: 3100 - DNA, 24 bp, Artificial Sequence
  Synthetic polynucleotide encoding artificial human antibody CDR-H2 region
atctatcctggtgactctgatacc

SEQ ID NO: 3101 - DNA, 24 bp, Artificial Sequence
  Synthetic polynucleotide encoding artificial human antibody CDR-H2 region
attagtagtagtagtagttacaca

SEQ ID NO: 3102 - DNA, 21 bp, Artificial Sequence
  Synthetic polynucleotide encoding artificial human antibody CDR-H2 region
attgattgggatgatgataaa

SEQ ID NO: 3103 - DNA, 24 bp, Artificial Sequence
  Synthetic polynucleotide encoding artificial human antibody CDR-H2 region
atatcgtatgatggcaccacttta

SEQ ID NO: 3104 - DNA, 24 bp, Artificial Sequence
  Synthetic polynucleotide encoding artificial human antibody CDR-H2 region
atatcatatgatggaagtaataaa

SEQ ID NO: 3105 - DNA, 21 bp, Artificial Sequence
  Synthetic polynucleotide encoding artificial human antibody CDR-H2 region
ttcttttatggtgggagcacc

SEQ ID NO: 3106 - DNA, 24 bp, Artificial Sequence
  Synthetic polynucleotide encoding artificial human antibody CDR-H2 region
attaatagaactgggagtaccctg

SEQ ID NO: 3107 - DNA, 24 bp, Artificial Sequence
  Synthetic polynucleotide encoding artificial human antibody CDR-H2 region
tttgttcctgaagatggtgccaca

SEQ ID NO: 3108 - DNA, 21 bp, Artificial Sequence
  Synthetic polynucleotide encoding artificial human antibody CDR-H2 region
atctataccagtgggagcacc

SEQ ID NO: 3109 - DNA, 24 bp, Artificial Sequence
  Synthetic polynucleotide encoding artificial human antibody CDR-H2 region
atcattcctgtatttgttatacct

SEQ ID NO: 3110 - DNA, 24 bp, Artificial Sequence
  Synthetic polynucleotide encoding artificial human antibody CDR-H2 region
tttgatcctcaaaacggtgaaaca

SEQ ID NO: 3111 - DNA, 24 bp, Artificial Sequence
  Synthetic polynucleotide encoding artificial human antibody CDR-H2 region
attagttggaatagtggtagcata

SEQ ID NO: 3112 - DNA, 21 bp, Artificial Sequence
  Synthetic polynucleotide encoding artificial human antibody CDR-H2 region
atctattacagggggagcacc

SEQ ID NO: 3113 - DNA, 24 bp, Artificial Sequence
  Synthetic polynucleotide encoding artificial human antibody CDR-H2 region
atatcatatgatggaagtaataaa

SEQ ID NO: 3114 - DNA, 24 bp, Artificial Sequence
  Synthetic polynucleotide encoding artificial human antibody CDR-H2 region
atctatcctggtgattatgatacc

SEQ ID NO: 3115 - DNA, 24 bp, Artificial Sequence
  Synthetic polynucleotide encoding artificial human antibody CDR-H2 region
atcaaccctggtggtggtaggcca

SEQ ID NO: 3116 - DNA, 24 bp, Artificial Sequence
  Synthetic polynucleotide encoding artificial human antibody CDR-H2 region
atcaaccctagtggtggtagcaca

SEQ ID NO: 3117 - DNA, 24 bp, Artificial Sequence
  Synthetic polynucleotide encoding artificial human antibody CDR-H2 region
atcagcgcttacaatggtaacaca

SEQ ID NO: 3118 - DNA, 24 bp, Artificial Sequence
  Synthetic polynucleotide encoding artificial human antibody CDR-H2 region
ataaagcaagatggaagtgagaaa

SEQ ID NO: 3119 - DNA, 30 bp, Artificial Sequence
  Synthetic polynucleotide encoding artificial human antibody CDR-H2 region
gtcaaaagcagagttgatggtgggacaaca

SEQ ID NO: 3120 - DNA, 24 bp, Artificial Sequence
  Synthetic polynucleotide encoding artificial human antibody CDR-H2 region
atatggtatgatggaagtaataaa

SEQ ID NO: 3121 - DNA, 21 bp, Artificial Sequence
  Synthetic polynucleotide encoding artificial human antibody CDR-H2 region
atcttttatagtgggagcacc

SEQ ID NO: 3122 - DNA, 21 bp, Artificial Sequence
  Synthetic polynucleotide encoding artificial human antibody CDR-H2 region
attgattgggatgatgataaa

SEQ ID NO: 3123 - DNA, 24 bp, Artificial Sequence
  Synthetic polynucleotide encoding artificial human antibody CDR-H2 region
atcagcgcttacaatggtaacaca

SEQ ID NO: 3124 - DNA, 24 bp, Artificial Sequence
  Synthetic polynucleotide encoding artificial human antibody CDR-H2 region
atatggtatgatggaagtgataaa

SEQ ID NO: 3125 - DNA, 24 bp, Artificial Sequence
  Synthetic polynucleotide encoding artificial human antibody CDR-H2 region
atcatccctatgcttgatatagca

SEQ ID NO: 3126 - DNA, 21 bp, Artificial Sequence
  Synthetic polynucleotide encoding artificial human antibody CDR-H2 region
atttattgggatgatgatgag

SEQ ID NO: 3127 - DNA, 24 bp, Artificial Sequence
  Synthetic polynucleotide encoding artificial human antibody CDR-H2 region
atcagtcttagtggtggtaaaaca

SEQ ID NO: 3128 - DNA, 21 bp, Artificial Sequence
  Synthetic polynucleotide encoding artificial human antibody CDR-H2 region
gtctattacagtaggaacacc

SEQ ID NO: 3129 - DNA, 21 bp, Artificial Sequence
  Synthetic polynucleotide encoding artificial human antibody CDR-H2 region
atttatcccggtgaaagtaca

SEQ ID NO: 3130 - DNA, 24 bp, Artificial Sequence
  Synthetic polynucleotide encoding artificial human antibody CDR-H2 region
atcgatcctcgtgactctgaaacc

SEQ ID NO: 3131 - DNA, 21 bp, Artificial Sequence
  Synthetic polynucleotide encoding artificial human antibody CDR-H2 region
attagtagtgggggtaccacg

SEQ ID NO: 3132 - DNA, 21 bp, Artificial Sequence
  Synthetic polynucleotide encoding artificial human antibody CDR-H2 region
ttctattataccagggaaaac

SEQ ID NO: 3133 - DNA, 24 bp, Artificial Sequence
  Synthetic polynucleotide encoding artificial human antibody CDR-H2 region
attagtagtgatggaagagacaca

SEQ ID NO: 3134 - DNA, 27 bp, Artificial Sequence
  Synthetic polynucleotide encoding artificial human antibody CDR-H2 region
acatactacaggtccaggtggaatttt

SEQ ID NO: 3135 - DNA, 24 bp, Artificial Sequence
  Synthetic polynucleotide encoding artificial human antibody CDR-H2 region
atcagcggtcacaatggtaagaca

SEQ ID NO: 3136 - DNA, 24 bp, Artificial Sequence
  Synthetic polynucleotide encoding artificial human antibody CDR-H2 region
atcagcggtcacaatggtaagaca

SEQ ID NO: 3137 - DNA, 24 bp, Artificial Sequence
  Synthetic polynucleotide encoding artificial human antibody CDR-H2 region
attcacggctgggaagattccacg

SEQ ID NO: 3138 - DNA, 21 bp, Artificial Sequence
  Synthetic polynucleotide encoding artificial human antibody CDR-H2 region
attttttgggatgatgataag

SEQ ID NO: 3139 - DNA, 24 bp, Artificial Sequence
  Synthetic polynucleotide encoding artificial human antibody CDR-H2 region
attattggtcatgatggtaccaca

SEQ ID NO: 3140 - DNA, 24 bp, Artificial Sequence
  Synthetic polynucleotide encoding artificial human antibody CDR-H2 region
attattggtcatgatggtaccaca

SEQ ID NO: 3141 - DNA, 21 bp, Artificial Sequence
  Synthetic polynucleotide encoding artificial human antibody CDR-H2 region
atctattatagtgcgaccacc

SEQ ID NO: 3142 - DNA, 21 bp, Artificial Sequence
  Synthetic polynucleotide encoding artificial human antibody CDR-H2 region
atctattatagtgggaccacc

SEQ ID NO: 3143 - DNA, 24 bp, Artificial Sequence
  Synthetic polynucleotide encoding artificial human antibody CDR-H2 region
atttcctatgctggaactactaaa

SEQ ID NO: 3144 - DNA, 21 bp, Artificial Sequence
  Synthetic polynucleotide encoding artificial human antibody CDR-H2 region
atttataccggtggtgataca

SEQ ID NO: 3145 - DNA, 21 bp, Artificial Sequence
  Synthetic polynucleotide encoding artificial human antibody CDR-H2 region
gtctattacagtgggagcacc

SEQ ID NO: 3146 - DNA, 24 bp, Artificial Sequence
  Synthetic polynucleotide encoding artificial human antibody CDR-H2 region
gttgatcctgaagatggtgaaaca

SEQ ID NO: 3147 - DNA, 21 bp, Artificial Sequence
  Synthetic polynucleotide encoding artificial human antibody CDR-H2 region
atctattatagtgggagcacc

SEQ ID NO: 3148 - DNA, 24 bp, Artificial Sequence
  Synthetic polynucleotide encoding artificial human antibody CDR-H2 region
attagtggtagtggtgttagcaca

SEQ ID NO: 3149 - DNA, 21 bp, Artificial Sequence
  Synthetic polynucleotide encoding artificial human antibody CDR-H2 region
atccatcatgatggaggcatc

SEQ ID NO: 3150 - DNA, 24 bp, Artificial Sequence
  Synthetic polynucleotide encoding artificial human antibody CDR-H2 region
atacatcaaaatggaaatgagaaa

SEQ ID NO: 3151 - DNA, 24 bp, Artificial Sequence
  Synthetic polynucleotide encoding artificial human antibody CDR-H2 region
attggtggtggtggtgctggcaca

SEQ ID NO: 3152 - DNA, 24 bp, Artificial Sequence
  Synthetic polynucleotide encoding artificial human antibody CDR-H2 region
atcagtgctagtgggaccaccaca

SEQ ID NO: 3153 - DNA, 24 bp, Artificial Sequence
  Synthetic polynucleotide encoding artificial human antibody CDR-H2 region
attaaccctactagtggtagcaca

SEQ ID NO: 3154 - DNA, 24 bp, Artificial Sequence
  Synthetic polynucleotide encoding artificial human antibody CDR-H2 region
attagtgctagtggtgataataca

SEQ ID NO: 3155 - DNA, 21 bp, Artificial Sequence
  Synthetic polynucleotide encoding artificial human antibody CDR-H2 region
atatataatggtggggtcacc

SEQ ID NO: 3156 - DNA, 24 bp, Artificial Sequence
  Synthetic polynucleotide encoding artificial human antibody CDR-H2 region
attagtggtagcggcagtagagtc

SEQ ID NO: 3157 - DNA, 21 bp, Artificial Sequence
  Synthetic polynucleotide encoding artificial human antibody CDR-H2 region
gtgtctgacagtgggcgctcc

SEQ ID NO: 3158 - DNA, 21 bp, Artificial Sequence
  Synthetic polynucleotide encoding artificial human antibody CDR-H2 region
atccattccagtggggtcacc

SEQ ID NO: 3159 - DNA, 30 bp, Artificial Sequence
  Synthetic polynucleotide encoding artificial human antibody CDR-H2 region
atcagaagtttagcctatggtggaacaact

SEQ ID NO: 3160 - DNA, 24 bp, Artificial Sequence
  Synthetic polynucleotide encoding artificial human antibody CDR-H2 region
atatcatatgatggaagtaataaa

SEQ ID NO: 3161 - DNA, 24 bp, Artificial Sequence
  Synthetic polynucleotide encoding artificial human antibody CDR-H2 region
attagcaggactggtaggaccata

SEQ ID NO: 3162 - DNA, 24 bp, Artificial Sequence
  Synthetic polynucleotide encoding artificial human antibody CDR-H2 region
attaataaagatgggagtaccaca

SEQ ID NO: 3163 - DNA, 21 bp, Artificial Sequence
  Synthetic polynucleotide encoding artificial human antibody CDR-H2 region
atcactgaaagaggcagaacc

SEQ ID NO: 3164 - DNA, 24 bp, Artificial Sequence
  Synthetic polynucleotide encoding artificial human antibody CDR-H2 region
attgatagtgctggaactacccag

SEQ ID NO: 3165 - DNA, 24 bp, Artificial Sequence
  Synthetic polynucleotide encoding artificial human antibody CDR-H2 region
attcgaggcagtggtggaggcaca

SEQ ID NO: 3166 - DNA, 24 bp, Artificial Sequence
  Synthetic polynucleotide encoding artificial human antibody CDR-H2 region
atcaaccctactggtggtggcgca

SEQ ID NO: 3167 - DNA, 24 bp, Artificial Sequence
  Synthetic polynucleotide encoding artificial human antibody CDR-H2 region
atctcaaaagatggaaggaatgaa

SEQ ID NO: 3168 - DNA, 21 bp, Artificial Sequence
  Synthetic polynucleotide encoding artificial human antibody CDR-H2 region
atctctgattctgagaacacc

SEQ ID NO: 3169 - DNA, 24 bp, Artificial Sequence
  Synthetic polynucleotide encoding artificial human antibody CDR-H2 region
attgatcccagtgactcttatacc

SEQ ID NO: 3170 - DNA, 29 bp, Artificial Sequence
  Synthetic polynucleotide encoding artificial human antibody CDR-H2 region
atttcatggatgaatggtgatgcatctaa

SEQ ID NO: 3171 - DNA, 30 bp, Artificial Sequence
  Synthetic polynucleotide encoding artificial human antibody CDR-H2 region
attagagacaaaactaacacttacgcgaca

SEQ ID NO: 3172 - DNA, 24 bp, Artificial Sequence
  Synthetic polynucleotide encoding artificial human antibody CDR-H2 region
atatcatctgatggcactaatgaa

SEQ ID NO: 3173 - DNA, 30 bp, Artificial Sequence
  Synthetic polynucleotide encoding artificial human antibody CDR-H2 region
atctactacactgggttcaccgagagcacc

SEQ ID NO: 3174 - DNA, 21 bp, Artificial Sequence
  Synthetic polynucleotide encoding artificial human antibody CDR-H2 region
atctattatagtgggagcacc

SEQ ID NO: 3175 - DNA, 21 bp, Artificial Sequence
  Synthetic polynucleotide encoding artificial human antibody CDR-H2 region
atttatagtgctgatagaaca

SEQ ID NO: 3176 - DNA, 24 bp, Artificial Sequence
  Synthetic polynucleotide encoding artificial human antibody CDR-H2 region
atatggtatgatggaagtaataaa

SEQ ID NO: 3177 - DNA, 24 bp, Artificial Sequence
  Synthetic polynucleotide encoding artificial human antibody CDR-H2 region
attagtagtaggagtacttacaag

SEQ ID NO: 3178 - DNA, 24 bp, Artificial Sequence
  Synthetic polynucleotide encoding artificial human antibody CDR-H2 region
atcaacattgccaatggtcacaca

SEQ ID NO: 3179 - DNA, 24 bp, Artificial Sequence
  Synthetic polynucleotide encoding artificial human antibody CDR-H2 region
ttgtggtctgatggaagaaatcat

SEQ ID NO: 3180 - DNA, 24 bp, Artificial Sequence
  Synthetic polynucleotide encoding artificial human antibody CDR-H2 region
atgaaaccttatagtggtaacaca

SEQ ID NO: 3181 - DNA, 24 bp, Artificial Sequence
  Synthetic polynucleotide encoding artificial human antibody CDR-H2 region
atcggtggtaccggtagtagcact

SEQ ID NO: 3182 - DNA, 21 bp, Artificial Sequence
  Synthetic polynucleotide encoding artificial human antibody CDR-H2 region
atctactatagtgggagtacc

SEQ ID NO: 3183 - DNA, 24 bp, Artificial Sequence
  Synthetic polynucleotide encoding artificial human antibody CDR-H2 region
atatggtatgatggacggaataaa

SEQ ID NO: 3184 - DNA, 24 bp, Artificial Sequence
  Synthetic polynucleotide encoding artificial human antibody CDR-H2 region
atgaactctaacagtggtgggatc

SEQ ID NO: 3185 - DNA, 21 bp, Artificial Sequence
  Synthetic polynucleotide encoding artificial human antibody CDR-H2 region
atcaatcatagtggaagcacc

SEQ ID NO: 3186 - DNA, 21 bp, Artificial Sequence
  Synthetic polynucleotide encoding artificial human antibody CDR-H2 region
gttgatactgctggtgacaca

SEQ ID NO: 3187 - DNA, 21 bp, Artificial Sequence
  Synthetic polynucleotide encoding artificial human antibody CDR-H2 region
atctattatagtgggagcacc

SEQ ID NO: 3188 - DNA, 24 bp, Artificial Sequence
  Synthetic polynucleotide encoding artificial human antibody CDR-H2 region
atctatcctggtgactctgatacc

SEQ ID NO: 3189 - DNA, 21 bp, Artificial Sequence
  Synthetic polynucleotide encoding artificial human antibody CDR-H2 region
atcgcatatagtggggccacc

SEQ ID NO: 3190 - DNA, 21 bp, Artificial Sequence
  Synthetic polynucleotide encoding artificial human antibody CDR-H2 region
atccatcatgatggaggcatc

SEQ ID NO: 3191 - DNA, 24 bp, Artificial Sequence
  Synthetic polynucleotide encoding artificial human antibody CDR-H2 region
ataaatgctgatgggacgagtttc

SEQ ID NO: 3192 - DNA, 21 bp, Artificial Sequence
  Synthetic polynucleotide encoding artificial human antibody CDR-H2 region
atctatcacactgggaccagt

SEQ ID NO: 3193 - DNA, 24 bp, Artificial Sequence
  Synthetic polynucleotide encoding artificial human antibody CDR-H2 region
atcaactctaacagcggtgaaaca

SEQ ID NO: 3194 - DNA, 24 bp, Artificial Sequence
  Synthetic polynucleotide encoding artificial human antibody CDR-H2 region
atcaaccctaacagtggtggcaca

SEQ ID NO: 3195 - DNA, 21 bp, Artificial Sequence
  Synthetic polynucleotide encoding artificial human antibody CDR-H2 region
attcattatgaaggccgtgtc

SEQ ID NO: 3196 - DNA, 24 bp, Artificial Sequence
  Synthetic polynucleotide encoding artificial human antibody CDR-H2 region
attagtgattctggttattacatc

SEQ ID NO: 3197 - DNA, 21 bp, Artificial Sequence
  Synthetic polynucleotide encoding artificial human antibody CDR-H2 region
atctactatagtgggactacc

SEQ ID NO: 3198 - DNA, 29 bp, Artificial Sequence
  Synthetic polynucleotide encoding artificial human antibody CDR-H2 region
atttcatggataaatggtgatgcagctaa

SEQ ID NO: 3199 - DNA, 21 bp, Artificial Sequence
  Synthetic polynucleotide encoding artificial human antibody CDR-H2 region
attttttcgaatgacgaaaaa

SEQ ID NO: 3200 - DNA, 24 bp, Artificial Sequence
  Synthetic polynucleotide encoding artificial human antibody CDR-H2 region
ataaagactgatggaagtgaggaa

SEQ ID NO: 3201 - DNA, 24 bp, Artificial Sequence
  Synthetic polynucleotide encoding artificial human antibody CDR-H2 region
atcgccccccgcaacgggtggact

SEQ ID NO: 3202 - DNA, 24 bp, Artificial Sequence
  Synthetic polynucleotide encoding artificial human antibody CDR-H2 region
attagtggtggtggtgatgccacg

SEQ ID NO: 3203 - DNA, 24 bp, Artificial Sequence
  Synthetic polynucleotide encoding artificial human antibody CDR-H2 region
attagtagtagtggtagtaccata

SEQ ID NO: 3204 - DNA, 24 bp, Artificial Sequence
  Synthetic polynucleotide encoding artificial human antibody CDR-H2 region
attagtagtagtagtgataacata

SEQ ID NO: 3205 - DNA, 21 bp, Artificial Sequence
  Synthetic polynucleotide encoding artificial human antibody CDR-H2 region
gtcaaccagaatggaaacacc

SEQ ID NO: 3206 - DNA, 21 bp, Artificial Sequence
  Synthetic polynucleotide encoding artificial human antibody CDR-H2 region
atctattacagtgggagcacc

SEQ ID NO: 3207 - DNA, 21 bp, Artificial Sequence
  Synthetic polynucleotide encoding artificial human antibody CDR-H2 region
atctattacagtgggagcacc

SEQ ID NO: 3208 - DNA, 21 bp, Artificial Sequence
  Synthetic polynucleotide encoding artificial human antibody CDR-H2 region
atctattacagtgggagcacc

SEQ ID NO: 3209 - DNA, 21 bp, Artificial Sequence
  Synthetic polynucleotide encoding artificial human antibody CDR-H2 region
atctattacagtgggagcacc

SEQ ID NO: 3210 - DNA, 24 bp, Artificial Sequence
  Synthetic polynucleotide encoding artificial human antibody CDR-H2 region
atatcatatgatggaagcaataaa

SEQ ID NO: 3211 - DNA, 30 bp, Artificial Sequence; identical to SEQ ID NO: 2830
  Synthetic polynucleotide encoding artificial human antibody CDR-H2 region

SEQ ID NO: 3212 - DNA, 21 bp, Artificial Sequence
  Synthetic polynucleotide encoding artificial human antibody CDR-H2 region
atcaatcatagtggatacacc

SEQ ID NO: 3213 - DNA, 21 bp, Artificial Sequence
  Synthetic polynucleotide encoding artificial human antibody CDR-H2 region
atttatagcggtggtagcaca

SEQ ID NO: 3214 - DNA, 24 bp, Artificial Sequence
  Synthetic polynucleotide encoding artificial human antibody CDR-H2 region
atcatccctatctttggtacagca

SEQ ID NO: 3215 - DNA, 24 bp, Artificial Sequence
  Synthetic polynucleotide encoding artificial human antibody CDR-H2 region
attactggtcgttctactttcatg

SEQ ID NO: 3216 - DNA, 24 bp, Artificial Sequence
  Synthetic polynucleotide encoding artificial human antibody CDR-H2 region
atcagcgcttacaatggtaacaca

SEQ ID NO: 3217 - DNA, 21 bp, Artificial Sequence
  Synthetic polynucleotide encoding artificial human antibody CDR-H2 region
atctattatagtgggagcacc

SEQ ID NO: 3218 - DNA, 21 bp, Artificial Sequence
  Synthetic polynucleotide encoding artificial human antibody CDR-H2 region
attttctcgaatgacgaaaaa

SEQ ID NO: 3219 - DNA, 24 bp, Artificial Sequence
  Synthetic polynucleotide encoding artificial human antibody CDR-H2 region
atctatcctggtgactctgatacc

SEQ ID NO: 3220 - DNA, 21 bp, Artificial Sequence
  Synthetic polynucleotide encoding artificial human antibody CDR-H2 region
atctattatagtgggagcacc

SEQ ID NO: 3221 - DNA, 21 bp, Artificial Sequence
  Synthetic polynucleotide encoding artificial human antibody CDR-H2 region
attgcttacagtgggaggtcc

SEQ ID NO: 3222 - DNA, 21 bp, Artificial Sequence
  Synthetic polynucleotide encoding artificial human antibody CDR-H2 region
atttattgggatgatgataag

SEQ ID NO: 3223 - DNA, 24 bp, Artificial Sequence
  Synthetic polynucleotide encoding artificial human antibody CDR-H2 region
atatcatttgatggagataagaga

SEQ ID NO: 3224 - DNA, 33 bp, Artificial Sequence
  Synthetic polynucleotide encoding artificial human antibody CDR-H2 region
attagtggtacaagtggtactcgtggtaggaca

SEQ ID NO: 3225 - DNA, 24 bp, Artificial Sequence
  Synthetic polynucleotide encoding artificial human antibody CDR-H2 region
atatcatatgatggaagtaataaa

SEQ ID NO: 3226 - DNA, 21 bp, Artificial Sequence
  Synthetic polynucleotide encoding artificial human antibody CDR-H2 region
atcaatcatagtgggggcacc

SEQ ID NO: 3227 - DNA, 21 bp, Artificial Sequence
  Synthetic polynucleotide encoding artificial human antibody CDR-H2 region
atctattacagtgggagcacc

SEQ ID NO: 3228 - DNA, 24 bp, Artificial Sequence
  Synthetic polynucleotide encoding artificial human antibody CDR-H2 region
atatcatatgatggaagtaataaa

SEQ ID NO: 3229 - DNA, 24 bp, Artificial Sequence
  Synthetic polynucleotide encoding artificial human antibody CDR-H2 region
attagtagtagtagtagttacata

SEQ ID NO: 3230 - DNA, 24 bp, Artificial Sequence
  Synthetic polynucleotide encoding artificial human antibody CDR-H2 region
atctatcctggtgactctgatacc

SEQ ID NO: 3231 - DNA, 24 bp, Artificial Sequence
  Synthetic polynucleotide encoding artificial human antibody CDR-H2 region
atcatccctatctttggtacagca

SEQ ID NO: 3232 - DNA, 24 bp, Artificial Sequence
  Synthetic polynucleotide encoding artificial human antibody CDR-H2 region
agcatgcctatgtatggtgcaaca

SEQ ID NO: 3233 - DNA, 24 bp, Artificial Sequence
  Synthetic polynucleotide encoding artificial human antibody CDR-H2 region
atcatccctatctttggtacagca

SEQ ID NO: 3234 - DNA, 24 bp, Artificial Sequence
  Synthetic polynucleotide encoding artificial human antibody CDR-H2 region
atcatccctatctttggtacagca

SEQ ID NO: 3235 - DNA, 24 bp, Artificial Sequence
  Synthetic polynucleotide encoding artificial human antibody CDR-H2 region
atctattatgatggaagtcgtgaa

SEQ ID NO: 3236 - DNA, 24 bp, Artificial Sequence
  Synthetic polynucleotide encoding artificial human antibody CDR-H2 region
atctatcctggtgactctgatacc

SEQ ID NO: 3237 - DNA, 24 bp, Artificial Sequence
  Synthetic polynucleotide encoding artificial human antibody CDR-H2 region
attagcggtcgtggtgaaaacacg

SEQ ID NO: 3238 - DNA, 21 bp, Artificial Sequence
  Synthetic polynucleotide encoding artificial human antibody CDR-H2 region
atctattatagtgggagcacc

SEQ ID NO: 3239 - DNA, 24 bp, Artificial Sequence
  Synthetic polynucleotide encoding artificial human antibody CDR-H2 region
attagtggtagtggtggtagcaca

SEQ ID NO: 3240 - DNA, 24 bp, Artificial Sequence
  Synthetic polynucleotide encoding artificial human antibody CDR-H2 region
atcaacaccaacactgggaaccca

SEQ ID NO: 3241 - DNA, 19 bp, Artificial Sequence
  Synthetic polynucleotide encoding artificial human antibody CDR-H2 region
tagtgatgggtctaagaga

SEQ ID NO: 3242 - DNA, 24 bp, Artificial Sequence
  Synthetic polynucleotide encoding artificial human antibody CDR-H2 region
tttgatcctgaagatggtgaaaca

SEQ ID NO: 3243 - DNA, 21 bp, Artificial Sequence
  Synthetic polynucleotide encoding artificial human antibody CDR-H2 region
atctatgatactgggaacacc

SEQ ID NO: 3244 - DNA, 21 bp, Artificial Sequence
  Synthetic polynucleotide encoding artificial human antibody CDR-H2 region
atttatagcggtggtagcaca

SEQ ID NO: 3245 - DNA, 21 bp, Artificial Sequence
  Synthetic polynucleotide encoding artificial human antibody CDR-H2 region
atttattgggatgatgataag

SEQ ID NO: 3246 - DNA, 21 bp, Artificial Sequence
  Synthetic polynucleotide encoding artificial human antibody CDR-H2 region
attgattgggatgatgataaa

SEQ ID NO: 3247 - DNA, 24 bp, Artificial Sequence
  Synthetic polynucleotide encoding artificial human antibody CDR-H2 region
atcatccctctctttggtaaacca

SEQ ID NO: 3248 - DNA, 21 bp, Artificial Sequence
  Synthetic polynucleotide encoding artificial human antibody CDR-H2 region
atcaaccatggtggagctacc

SEQ ID NO: 3249 - DNA, 24 bp, Artificial Sequence
  Synthetic polynucleotide encoding artificial human antibody CDR-H2 region
attagtggtagtggtggtagcaca

SEQ ID NO: 3250 - DNA, 24 bp, Artificial Sequence
  Synthetic polynucleotide encoding artificial human antibody CDR-H2 region
atatggtatgatggaagtaataaa

SEQ ID NO: 3251 - DNA, 24 bp, Artificial Sequence
  Synthetic polynucleotide encoding artificial human antibody CDR-H2 region
atcaacaccaacactgggaaccca

SEQ ID NO: 3252 - DNA, 24 bp, Artificial Sequence
  Synthetic polynucleotide encoding artificial human antibody CDR-H2 region
attaattctattagtactaacata

SEQ ID NO: 3253 - DNA, 24 bp, Artificial Sequence
  Synthetic polynucleotide encoding artificial human antibody CDR-H2 region
agtagcagacgagatgacaccaga

SEQ ID NO: 3254 - DNA, 24 bp, Artificial Sequence
  Synthetic polynucleotide encoding artificial human antibody CDR-H2 region
attagtagtagagattccaccaca

SEQ ID NO: 3255 - DNA, 24 bp, Artificial Sequence
  Synthetic polynucleotide encoding artificial human antibody CDR-H2 region
attagtagtagtagtagtaccata

SEQ ID NO: 3256 - DNA, 24 bp, Artificial Sequence
  Synthetic polynucleotide encoding artificial human antibody CDR-H2 region
atcaaccctagtggtggtagcaca

SEQ ID NO: 3257 - DNA, 24 bp, Artificial Sequence
  Synthetic polynucleotide encoding artificial human antibody CDR-H2 region
attagttggaatagtggtagcata

SEQ ID NO: 3258 - DNA, 24 bp, Artificial Sequence
  Synthetic polynucleotide encoding artificial human antibody CDR-H2 region
attagtggtagtggtggtagcaca

SEQ ID NO: 3259 - DNA, 24 bp, Artificial Sequence
  Synthetic polynucleotide encoding artificial human antibody CDR-H2 region
attagtggtagtggtggtagcaca

SEQ ID NO: 3260 - DNA, 24 bp, Artificial Sequence
  Synthetic polynucleotide encoding artificial human antibody CDR-H2 region
attagtagtagtagtagtaccata

SEQ ID NO: 3261 - DNA, 24 bp, Artificial Sequence
  Synthetic polynucleotide encoding artificial human antibody CDR-H2 region
atcaaccctaacagtggtggcaca

SEQ ID NO: 3262 - DNA, 24 bp, Artificial Sequence
  Synthetic polynucleotide encoding artificial human antibody CDR-H2 region
atatggtatgatggaagtaataaa

SEQ ID NO: 3263 - DNA, 24 bp, Artificial Sequence
  Synthetic polynucleotide encoding artificial human antibody CDR-H2 region
acccaccccaacagtagaggcgca

SEQ ID NO: 3264 - DNA, 24 bp, Artificial Sequence
  Synthetic polynucleotide encoding artificial human antibody CDR-H2 region
attagtggtagtggtggtagcaca

SEQ ID NO: 3265 - DNA, 24 bp, Artificial Sequence
  Synthetic polynucleotide encoding artificial human antibody CDR-H2 region
attagtagtagtagtagttacata

SEQ ID NO: 3266 - DNA, 21 bp, Artificial Sequence
  Synthetic polynucleotide encoding artificial human antibody CDR-H2 region
atctattacagtgggagcacc

SEQ ID NO: 3267 - DNA, 21 bp, Artificial Sequence
  Synthetic polynucleotide encoding artificial human antibody CDR-H2 region
gtctattatagtggaagcacc

SEQ ID NO: 3268 - DNA, 21 bp, Artificial Sequence
  Synthetic polynucleotide encoding artificial human antibody CDR-H2 region
atctattacagtgggagcacc

SEQ ID NO: 3269 - DNA, 24 bp, Artificial Sequence
  Synthetic polynucleotide encoding artificial human antibody CDR-H2 region
atatcatatgatggaagcaataaa

SEQ ID NO: 3270 - DNA, 24 bp, Artificial Sequence
  Synthetic polynucleotide encoding artificial human antibody CDR-H2 region
atatcatatgatggaagcaataaa

SEQ ID NO: 3271 - DNA, 24 bp, Artificial Sequence
  Synthetic polynucleotide encoding artificial human antibody CDR-H2 region
atcagtgacagtagtaatttcatc

SEQ ID NO: 3272 - DNA, 24 bp, Artificial Sequence
  Synthetic polynucleotide encoding artificial human antibody CDR-H2 region
atatcatatgagggaagcactaaa

SEQ ID NO: 3273 - DNA, 24 bp, Artificial Sequence
  Synthetic polynucleotide encoding artificial human antibody CDR-H2 region
attagttctactggtgataacaca

SEQ ID NO: 3274 - DNA, 30 bp, Artificial Sequence
  Synthetic polynucleotide encoding artificial human antibody CDR-H2 region
attgaaaccgaagctgatggtgggacaaca

SEQ ID NO: 3275 - DNA, 24 bp, Artificial Sequence
  Synthetic polynucleotide encoding artificial human antibody CDR-H2 region
atcatccctatctttggtacagca

SEQ ID NO: 3276 - DNA, 24 bp, Artificial Sequence
  Synthetic polynucleotide encoding artificial human antibody CDR-H2 region
acccaccctaatagtggaggcgca

SEQ ID NO: 3277 - DNA, 24 bp, Artificial Sequence
  Synthetic polynucleotide encoding artificial human antibody CDR-H2 region
attagcagtggtggtggtagtaca

SEQ ID NO: 3278 - DNA, 24 bp, Artificial Sequence
  Synthetic polynucleotide encoding artificial human antibody CDR-H2 region
attagtagtagtagtagttacata

SEQ ID NO: 3279 - DNA, 21 bp, Artificial Sequence
  Synthetic polynucleotide encoding artificial human antibody CDR-H2 region
atctattacagtgggagcacc

SEQ ID NO: 3280 - DNA, 24 bp, Artificial Sequence
  Synthetic polynucleotide encoding artificial human antibody CDR-H2 region
attagtagtagtagtagtaccata

SEQ ID NO: 3281 - DNA, 21 bp, Artificial Sequence
  Synthetic polynucleotide encoding artificial human antibody CDR-H2 region
atctctaacagtgggagcacc

SEQ ID NO: 3282 - DNA, 24 bp, Artificial Sequence
  Synthetic polynucleotide encoding artificial human antibody CDR-H2 region
atcagcccttacagtggtgtcaca

SEQ ID NO: 3283 - DNA, 21 bp, Artificial Sequence
  Synthetic polynucleotide encoding artificial human antibody CDR-H2 region
atctattatagtgggagcacc

SEQ ID NO: 3284 - DNA, 21 bp, Artificial Sequence
  Synthetic polynucleotide encoding artificial human antibody CDR-H2 region
atctattatagtgggagcacc

SEQ ID NO: 3285 - DNA, 24 bp, Artificial Sequence
  Synthetic polynucleotide encoding artificial human antibody CDR-H2 region
attacttggaatggtggtagcaca

SEQ ID NO: 3286 - DNA, 21 bp, Artificial Sequence
  Synthetic polynucleotide encoding artificial human antibody CDR-H2 region
atctattacagtgggagcacc

SEQ ID NO: 3287 - DNA, 24 bp, Artificial Sequence
  Synthetic polynucleotide encoding artificial human antibody CDR-H2 region
attagtgggagtggaagtcatgtg

SEQ ID NO: 3288 - DNA, 24 bp, Artificial Sequence
  Synthetic polynucleotide encoding artificial human antibody CDR-H2 region
atcaaccctagtggtggtagcaca

SEQ ID NO: 3289 - DNA, 30 bp, Artificial Sequence; identical to SEQ ID NO: 2830
  Synthetic polynucleotide encoding artificial human antibody CDR-H2 region

SEQ ID NO: 3290 - DNA, 21 bp, Artificial Sequence
  Synthetic polynucleotide encoding artificial human antibody CDR-H2 region
tcccattacagtgggagcagc

SEQ ID NO: 3291 - DNA, 24 bp, Artificial Sequence
  Synthetic polynucleotide encoding artificial human antibody CDR-H2 region
atatcatatgatggaagcaataaa

SEQ ID NO: 3292 - DNA, 24 bp, Artificial Sequence
  Synthetic polynucleotide encoding artificial human antibody CDR-H2 region
atatcatatgatggaagcaataaa

SEQ ID NO: 3293 - DNA, 24 bp, Artificial Sequence
  Synthetic polynucleotide encoding artificial human antibody CDR-H2 region
atatcatatgatggaagtaataaa

SEQ ID NO: 3294 - DNA, 24 bp, Artificial Sequence
  Synthetic polynucleotide encoding artificial human antibody CDR-H2 region
atcaacaccaacagtgggaaccca

SEQ ID NO: 3295 - DNA, 24 bp, Artificial Sequence
  Synthetic polynucleotide encoding artificial human antibody CDR-H2 region
atttcctttgatggcaagaagata

SEQ ID NO: 3296 - DNA, 24 bp, Artificial Sequence
  Synthetic polynucleotide encoding artificial human antibody CDR-H2 region
atatcatatgatggaagcaataaa

SEQ ID NO: 3297 - DNA, 21 bp, Artificial Sequence
  Synthetic polynucleotide encoding artificial human antibody CDR-H2 region
atcaatcatagtggaagcacc

SEQ ID NO: 3298 - DNA, 21 bp, Artificial Sequence
  Synthetic polynucleotide encoding artificial human antibody CDR-H2 region
atctcttatagtgggagcacc

SEQ ID NO: 3299 - DNA, 24 bp, Artificial Sequence
  Synthetic polynucleotide encoding artificial human antibody CDR-H2 region
attagtagtgatgggagaagcaca

SEQ ID NO: 3300 - DNA, 24 bp, Artificial Sequence
  Synthetic polynucleotide encoding artificial human antibody CDR-H2 region
atcatccctatctttggtacagca

SEQ ID NO: 3301 - DNA, 24 bp, Artificial Sequence
  Synthetic polynucleotide encoding artificial human antibody CDR-H2 region
atcaacaccaacactgggaaccca

SEQ ID NO: 3302 - DNA, 24 bp, Artificial Sequence
  Synthetic polynucleotide encoding artificial human antibody CDR-H2 region
atatggtatgatggaagtaataaa

SEQ ID NO: 3303 - DNA, 21 bp, Artificial Sequence
  Synthetic polynucleotide encoding artificial human antibody CDR-H2 region
gtctattatagtggaagcacg

SEQ ID NO: 3304 - DNA, 24 bp, Artificial Sequence
  Synthetic polynucleotide encoding artificial human antibody CDR-H2 region
atattatatgatggaagaaataaa

SEQ ID NO: 3305 - DNA, 24 bp, Artificial Sequence
  Synthetic polynucleotide encoding artificial human antibody CDR-H2 region
atcaacaccaacactgggaaccca

SEQ ID NO: 3306 - DNA, 24 bp, Artificial Sequence
  Synthetic polynucleotide encoding artificial human antibody CDR-H2 region
atttggtttgacggaactaataga

SEQ ID NO: 3307 - DNA, 24 bp, Artificial Sequence
  Synthetic polynucleotide encoding artificial human antibody CDR-H2 region
atcatccccatcgtacacattacc

SEQ ID NO: 3308 - DNA, 24 bp, Artificial Sequence
  Synthetic polynucleotide encoding artificial human antibody CDR-H2 region
atcagcgcttacaatggtaacaca

SEQ ID NO: 3309 - DNA, 21 bp, Artificial Sequence
  Synthetic polynucleotide encoding artificial human antibody CDR-H2 region
atctattatagtgggagcacc

SEQ ID NO: 3310 - DNA, 21 bp, Artificial Sequence
  Synthetic polynucleotide encoding artificial human antibody CDR-H2 region
gtctattatagtggaagcacc

SEQ ID NO: 3311 - DNA, 24 bp, Artificial Sequence
  Synthetic polynucleotide encoding artificial human antibody CDR-H2 region
atcatccctatgtttggtactcca

SEQ ID NO: 3312 - DNA, 30 bp, Artificial Sequence; identical to SEQ ID NO: 2830
  Synthetic polynucleotide encoding artificial human antibody CDR-H2 region

SEQ ID NO: 3313 - DNA, 24 bp, Artificial Sequence
  Synthetic polynucleotide encoding artificial human antibody CDR-H2 region
atatcatatgatggaagcaataaa

SEQ ID NO: 3314 - DNA, 24 bp, Artificial Sequence
  Synthetic polynucleotide encoding artificial human antibody CDR-H2 region
atatcatatgatggaagtaataaa

SEQ ID NO: 3315 - DNA, 24 bp, Artificial Sequence
  Synthetic polynucleotide encoding artificial human antibody CDR-H2 region
atctatcctggtgactctgatacc

SEQ ID NO: 3316 - DNA, 24 bp, Artificial Sequence
  Synthetic polynucleotide encoding artificial human antibody CDR-H2 region
atatggtatgatggaagtcatgaa

SEQ ID NO: 3317 - DNA, 24 bp, Artificial Sequence
  Synthetic polynucleotide encoding artificial human antibody CDR-H2 region
attcgtgacagtggtggcagcaca

SEQ ID NO: 3318 - DNA, 24 bp, Artificial Sequence
  Synthetic polynucleotide encoding artificial human antibody CDR-H2 region
atagatcaacatggaactgagatg

SEQ ID NO: 3319 - DNA, 24 bp, Artificial Sequence
  Synthetic polynucleotide encoding artificial human antibody CDR-H2 region
attagtagtagtagtagttacata

SEQ ID NO: 3320 - DNA, 24 bp, Artificial Sequence
  Synthetic polynucleotide encoding artificial human antibody CDR-H2 region
atcaaccctaacagtggtggcaca

SEQ ID NO: 3321 - DNA, 24 bp, Artificial Sequence
  Synthetic polynucleotide encoding artificial human antibody CDR-H2 region
atatcatatgagggaagtaagaaa

SEQ ID NO: 3322 - DNA, 24 bp, Artificial Sequence
  Synthetic polynucleotide encoding artificial human antibody CDR-H2 region
attagtagtagtagtagttacata

SEQ ID NO: 3323 - DNA, 24 bp, Artificial Sequence
  Synthetic polynucleotide encoding artificial human antibody CDR-H2 region
attgataaggatgtctctcgaaca

SEQ ID NO: 3324 - DNA, 24 bp, Artificial Sequence
  Synthetic polynucleotide encoding artificial human antibody CDR-H2 region
attaacgatgatgggagttctcca

SEQ ID NO: 3325 - DNA, 24 bp, Artificial Sequence
  Synthetic polynucleotide encoding artificial human antibody CDR-H2 region
attagtggtagtagtaagaatata

SEQ ID NO: 3326 - DNA, 21 bp, Artificial Sequence
  Synthetic polynucleotide encoding artificial human antibody CDR-H2 region
attagtagtttttatagcaca

SEQ ID NO: 3327 - DNA, 24 bp, Artificial Sequence
  Synthetic polynucleotide encoding artificial human antibody CDR-H2 region
ctgagtgatattagtaccaccata

SEQ ID NO: 3328 - DNA, 30 bp, Artificial Sequence
  Synthetic polynucleotide encoding artificial human antibody CDR-H2 region
attaaaagcaaagctagtggcgggacaata

SEQ ID NO: 3329 - DNA, 24 bp, Artificial Sequence
  Synthetic polynucleotide encoding artificial human antibody CDR-H2 region
attagctggaatagtgtaaatgta

SEQ ID NO: 3330 - DNA, 24 bp, Artificial Sequence
  Synthetic polynucleotide encoding artificial human antibody CDR-H2 region
attaatgctgatggtgctggcaca

SEQ ID NO: 3331 - DNA, 24 bp, Artificial Sequence
  Synthetic polynucleotide encoding artificial human antibody CDR-H2 region
attaatgatgacggaactggtcca

SEQ ID NO: 3332 - DNA, 24 bp, Artificial Sequence
  Synthetic polynucleotide encoding artificial human antibody CDR-H2 region
gtaagtgccagcggtgctctcaca

SEQ ID NO: 3333 - DNA, 24 bp, Artificial Sequence
  Synthetic polynucleotide encoding artificial human antibody CDR-H2 region
atttatactagtcctgtttccata

SEQ ID NO: 3334 - DNA, 24 bp, Artificial Sequence
  Synthetic polynucleotide encoding artificial human antibody CDR-H2 region
ataaaggaaagtggaagtgagaaa

SEQ ID NO: 3335 - DNA, 24 bp, Artificial Sequence
  Synthetic polynucleotide encoding artificial human antibody CDR-H2 region
atctatcctgatgactctgatacc

SEQ ID NO: 3336 - DNA, 24 bp, Artificial Sequence
  Synthetic polynucleotide encoding artificial human antibody CDR-H2 region
ataaatggagatggaagtgaggaa

SEQ ID NO: 3337 - DNA, 24 bp, Artificial Sequence
  Synthetic polynucleotide encoding artificial human antibody CDR-H2 region
atgaaccctaatagtggtaacaca

SEQ ID NO: 3338 - DNA, 30 bp, Artificial Sequence
  Synthetic polynucleotide encoding artificial human antibody CDR-H2 region
attagagccaagacatttggttcgacaaca

SEQ ID NO: 3339 - DNA, 21 bp, Artificial Sequence
  Synthetic polynucleotide encoding artificial human antibody CDR-H2 region
atctattatagtgggagcacc

SEQ ID NO: 3340 - DNA, 21 bp, Artificial Sequence
  Synthetic polynucleotide encoding artificial human antibody CDR-H2 region
atctattatagtgggagcacc

SEQ ID NO: 3341 - DNA, 24 bp, Artificial Sequence
  Synthetic polynucleotide encoding artificial human antibody CDR-H2 region
attactggtagtggtactgccaca

SEQ ID NO: 3342 - DNA, 21 bp, Artificial Sequence
  Synthetic polynucleotide encoding artificial human antibody CDR-H2 region
atcttttatcgtgggaccacc

SEQ ID NO: 3343 - DNA, 21 bp, Artificial Sequence
  Synthetic polynucleotide encoding artificial human antibody CDR-H2 region
gtctattatagtgggagcacc

SEQ ID NO: 3344 - DNA, 24 bp, Artificial Sequence
  Synthetic polynucleotide encoding artificial human antibody CDR-H2 region
atatcatatgatggaagtaataaa

SEQ ID NO: 3345 - DNA, 30 bp, Artificial Sequence
  Synthetic polynucleotide encoding artificial human antibody CDR-H2 region
atcaaaagaaaaagtgacggtgggacatca

SEQ ID NO: 3346 - DNA, 24 bp, Artificial Sequence
  Synthetic polynucleotide encoding artificial human antibody CDR-H2 region
cttagtggtagtgctattagcaca

SEQ ID NO: 3347 - DNA, 24 bp, Artificial Sequence
  Synthetic polynucleotide encoding artificial human antibody CDR-H2 region
atcaaccctaacactggtgccaca

SEQ ID NO: 3348 - DNA, 21 bp, Artificial Sequence
  Synthetic polynucleotide encoding artificial human antibody CDR-H2 region
atttattgggatgatgataag

SEQ ID NO: 3349 - DNA, 24 bp, Artificial Sequence
  Synthetic polynucleotide encoding artificial human antibody CDR-H2 region
atcagtggtagtggtggcagtaca

SEQ ID NO: 3350 - DNA, 24 bp, Artificial Sequence
  Synthetic polynucleotide encoding artificial human antibody CDR-H2 region
atttttactagtggtgtttccgtg

SEQ ID NO: 3351 - DNA, 24 bp, Artificial Sequence
  Synthetic polynucleotide encoding artificial human antibody CDR-H2 region
attactggtaatggtgatggcaca

SEQ ID NO: 3352 - DNA, 24 bp, Artificial Sequence
  Synthetic polynucleotide encoding artificial human antibody CDR-H2 region
atttatagtgctactgattccata

SEQ ID NO: 3353 - DNA, 24 bp, Artificial Sequence
  Synthetic polynucleotide encoding artificial human antibody CDR-H2 region
attagtggaggaagaggaaccaca

SEQ ID NO: 3354 - DNA, 24 bp, Artificial Sequence
  Synthetic polynucleotide encoding artificial human antibody CDR-H2 region
attagtagtcgtagtcgttccaca

SEQ ID NO: 3355 - DNA, 24 bp, Artificial Sequence
  Synthetic polynucleotide encoding artificial human antibody CDR-H2 region
attagtagaagtagtagttacatc

SEQ ID NO: 3356 - DNA, 24 bp, Artificial Sequence
  Synthetic polynucleotide encoding artificial human antibody CDR-H2 region
attagtgggaatggttttaccaca

SEQ ID NO: 3357 - DNA, 24 bp, Artificial Sequence
  Synthetic polynucleotide encoding artificial human antibody CDR-H2 region
atcaacgttgacaatggtaacaca

SEQ ID NO: 3358 - DNA, 21 bp, Artificial Sequence
  Synthetic polynucleotide encoding artificial human antibody CDR-H2 region
atctccaaaactgggaggacc

SEQ ID NO: 3359 - DNA, 24 bp, Artificial Sequence
  Synthetic polynucleotide encoding artificial human antibody CDR-H2 region
attagtggaagtggtggtcgcaca

SEQ ID NO: 3360 - DNA, 24 bp, Artificial Sequence
  Synthetic polynucleotide encoding artificial human antibody CDR-H2 region
attactactactgggcgtaccaca

SEQ ID NO: 3361 - DNA, 30 bp, Artificial Sequence
  Synthetic polynucleotide encoding artificial human antibody CDR-H2 region
actagaaataaatttagcagtgacaccaca

SEQ ID NO: 3362 - DNA, 24 bp, Artificial Sequence
  Synthetic polynucleotide encoding artificial human antibody CDR-H2 region
attagtagtagtagtagtaccata

SEQ ID NO: 3363 - DNA, 21 bp, Artificial Sequence
  Synthetic polynucleotide encoding artificial human antibody CDR-H2 region
gtccatcatactggagctacc

SEQ ID NO: 3364 - DNA, 30 bp, Artificial Sequence
  Synthetic polynucleotide encoding artificial human antibody CDR-H2 region
attaaaagcgaaagagatggtgcgacagcg

SEQ ID NO: 3365 - DNA, 24 bp, Artificial Sequence
  Synthetic polynucleotide encoding artificial human antibody CDR-H2 region
atcatccctgcccttggtacaaca

SEQ ID NO: 3366 - DNA, 21 bp, Artificial Sequence
  Synthetic polynucleotide encoding artificial human antibody CDR-H2 region
atcaatcgtcgatcagagttc

SEQ ID NO: 3367 - DNA, 24 bp, Artificial Sequence
  Synthetic polynucleotide encoding artificial human antibody CDR-H2 region
atctatcctggtgactctaaaacc

SEQ ID NO: 3368 - DNA, 24 bp, Artificial Sequence
  Synthetic polynucleotide encoding artificial human antibody CDR-H2 region
atatggtatgatggaagtgaaaaa

SEQ ID NO: 3369 - DNA, 21 bp, Artificial Sequence
  Synthetic polynucleotide encoding artificial human antibody CDR-H2 region
atctattatagtgggagcacc

SEQ ID NO: 3370 - DNA, 24 bp, Artificial Sequence
  Synthetic polynucleotide encoding artificial human antibody CDR-H2 region
ataaagcaagatggaagtgagaaa

SEQ ID NO: 3371 - DNA, 24 bp, Artificial Sequence
  Synthetic polynucleotide encoding artificial human antibody CDR-H2 region
attagttggaatagtggtaccata

SEQ ID NO: 3372 - DNA, 24 bp, Artificial Sequence
  Synthetic polynucleotide encoding artificial human antibody CDR-H2 region
atcagtgggagtggtttgaccacg

SEQ ID NO: 3373 - DNA, 30 bp, Artificial Sequence
  Synthetic polynucleotide encoding artificial human antibody CDR-H2 region
actacaaaccaaattgacacctacaccaca

SEQ ID NO: 3374 - DNA, 21 bp, Artificial Sequence
  Synthetic polynucleotide encoding artificial human antibody CDR-H2 region
atcagtcatcctggacgcgcc

SEQ ID NO: 3375 - DNA, 30 bp, Artificial Sequence
  Synthetic polynucleotide encoding artificial human antibody CDR-H2 region
attagacacaaagtccacagttacaccaca

SEQ ID NO: 3376 - DNA, 24 bp, Artificial Sequence
  Synthetic polynucleotide encoding artificial human antibody CDR-H2 region
atcaacaccaacactgggaaatca

SEQ ID NO: 3377 - DNA, 24 bp, Artificial Sequence
  Synthetic polynucleotide encoding artificial human antibody CDR-H2 region
atatcatatgatggaagtaataaa

SEQ ID NO: 3378 - DNA, 24 bp, Artificial Sequence
  Synthetic polynucleotide encoding artificial human antibody CDR-H2 region
atctatccgcataagtctgatacg

SEQ ID NO: 3379 - DNA, 24 bp, Artificial Sequence
  Synthetic polynucleotide encoding artificial human antibody CDR-H2 region
atttaccctaaaggtggtagcaca

SEQ ID NO: 3380 - DNA, 24 bp, Artificial Sequence
  Synthetic polynucleotide encoding artificial human antibody CDR-H2 region
attgatagtgatggcagtacgaca

SEQ ID NO: 3381 - DNA, 24 bp, Artificial Sequence
  Synthetic polynucleotide encoding artificial human antibody CDR-H2 region
atatggtatgatggaagtaataaa

SEQ ID NO: 3382 - DNA, 24 bp, Artificial Sequence
  Synthetic polynucleotide encoding artificial human antibody CDR-H2 region
atcagttatactggtactatcaca

SEQ ID NO: 3383 - DNA, 21 bp, Artificial Sequence
  Synthetic polynucleotide encoding artificial human antibody CDR-H2 region
atctattacagtgggagcacc

SEQ ID NO: 3384 - DNA, 24 bp, Artificial Sequence
  Synthetic polynucleotide encoding artificial human antibody CDR-H2 region
attagtgcttctggttttaataca

SEQ ID NO: 3385 - DNA, 21 bp, Artificial Sequence
  Synthetic polynucleotide encoding artificial human antibody CDR-H2 region
atgtattacagtgggagcacc

SEQ ID NO: 3386 - DNA, 21 bp, Artificial Sequence
  Synthetic polynucleotide encoding artificial human antibody CDR-H2 region
atgtataacactgggagaacg

SEQ ID NO: 3387 - DNA, 24 bp, Artificial Sequence
  Synthetic polynucleotide encoding artificial human antibody CDR-H2 region
attaaccccagtgactcttacatc

SEQ ID NO: 3388 - DNA, 30 bp, Artificial Sequence
  Synthetic polynucleotide encoding artificial human antibody CDR-H2 region
gttagaatgaaagctttcaattacgcgacg

SEQ ID NO: 3389 - DNA, 21 bp, Artificial Sequence
  Synthetic polynucleotide encoding artificial human antibody CDR-H2 region
gtctttcacggtgggatcgcc

SEQ ID NO: 3390 - DNA, 24 bp, Artificial Sequence
  Synthetic polynucleotide encoding artificial human antibody CDR-H2 region
attagtggcagtggtaagaacata

SEQ ID NO: 3391 - DNA, 24 bp, Artificial Sequence
  Synthetic polynucleotide encoding artificial human antibody CDR-H2 region
atttcatacgaaggaagaaataaa

SEQ ID NO: 3392 - DNA, 24 bp, Artificial Sequence
  Synthetic polynucleotide encoding artificial human antibody CDR-H2 region
atcgtcgttggcagcggtaacaca

SEQ ID NO: 3393 - DNA, 24 bp, Artificial Sequence
  Synthetic polynucleotide encoding artificial human antibody CDR-H2 region
cttattgagaatggtgtcgacaga

SEQ ID NO: 3394 - DNA, 24 bp, Artificial Sequence
  Synthetic polynucleotide encoding artificial human antibody CDR-H2 region
attagttggaatagtggtaccaaa

SEQ ID NO: 3395 - DNA, 24 bp, Artificial Sequence
  Synthetic polynucleotide encoding artificial human antibody CDR-H2 region
attaggtggaataatggtcccata

SEQ ID NO: 3396 - DNA, 24 bp, Artificial Sequence
  Synthetic polynucleotide encoding artificial human antibody CDR-H2 region
attactggtgacggaattggtaca

SEQ ID NO: 3397 - DNA, 21 bp, Artificial Sequence
  Synthetic polynucleotide encoding artificial human antibody CDR-H2 region
atcaatcatagtggaagcacc

SEQ ID NO: 3398 - DNA, 24 bp, Artificial Sequence
  Synthetic polynucleotide encoding artificial human antibody CDR-H2 region
attagtggtagtggtactaccata

SEQ ID NO: 3399 - DNA, 24 bp, Artificial Sequence
  Synthetic polynucleotide encoding artificial human antibody CDR-H2 region
atcagtatttataatggtaacaca

SEQ ID NO: 3400 - DNA, 21 bp, Artificial Sequence
  Synthetic polynucleotide encoding artificial human antibody CDR-H2 region
atctattacagtgggagcacc

SEQ ID NO: 3401 - DNA, 24 bp, Artificial Sequence
  Synthetic polynucleotide encoding artificial human antibody CDR-H2 region
attgatggccctaccaccaacaca

SEQ ID NO: 3402 - DNA, 24 bp, Artificial Sequence
  Synthetic polynucleotide encoding artificial human antibody CDR-H2 region
atcacgagtaatagtaagtacata

SEQ ID NO: 3403 - DNA, 33 bp, Artificial Sequence
  Synthetic polynucleotide encoding artificial human antibody CDR-H2 region
atctcatatgctggatctggtggaagtgatgag

SEQ ID NO: 3404 - DNA, 24 bp, Artificial Sequence
  Synthetic polynucleotide encoding artificial human antibody CDR-H2 region
attagtagtagtggtagtaccata

SEQ ID NO: 3405 - DNA, 24 bp, Artificial Sequence
  Synthetic polynucleotide encoding artificial human antibody CDR-H2 region
atttacagcggtggtggtggcaca

SEQ ID NO: 3406 - DNA, 24 bp, Artificial Sequence
  Synthetic polynucleotide encoding artificial human antibody CDR-H2 region
attaacagtggtgctgataagata

SEQ ID NO: 3407 - DNA, 24 bp, Artificial Sequence
  Synthetic polynucleotide encoding artificial human antibody CDR-H2 region
atgtcacatgatggtttcagtaaa

SEQ ID NO: 3408 - DNA, 21 bp, Artificial Sequence
  Synthetic polynucleotide encoding artificial human antibody CDR-H2 region
atcaatcatagtggaagcacc

SEQ ID NO: 3409 - DNA, 24 bp, Artificial Sequence
  Synthetic polynucleotide encoding artificial human antibody CDR-H2 region
gccggttttagcaatgacgacaga

SEQ ID NO: 3410 - DNA, 24 bp, Artificial Sequence
  Synthetic polynucleotide encoding artificial human antibody CDR-H2 region
atttatagcagtgatggtagcaca

SEQ ID NO: 3411 - DNA, 24 bp, Artificial Sequence
  Synthetic polynucleotide encoding artificial human antibody CDR-H2 region
attagtagtagtagtagttacata

SEQ ID NO: 3412 - DNA, 24 bp, Artificial Sequence
  Synthetic polynucleotide encoding artificial human antibody CDR-H2 region
atcttctatgatggaactgatgga

SEQ ID NO: 3413 - DNA, 24 bp, Artificial Sequence
  Synthetic polynucleotide encoding artificial human antibody CDR-H2 region
gtcagtagtaatggtgataccatc

SEQ ID NO: 3414 - DNA, 24 bp, Artificial Sequence
  Synthetic polynucleotide encoding artificial human antibody CDR-H2 region
atcaaccctggtgatggtagaacc

SEQ ID NO: 3415 - DNA, 24 bp, Artificial Sequence
  Synthetic polynucleotide encoding artificial human antibody CDR-H2 region
attagtgctagtagtacttacgtc

SEQ ID NO: 3416 - DNA, 24 bp, Artificial Sequence
  Synthetic polynucleotide encoding artificial human antibody CDR-H2 region
gttagtcccagtggtgtgaccaaa

SEQ ID NO: 3417 - DNA, 24 bp, Artificial Sequence
  Synthetic polynucleotide encoding artificial human antibody CDR-H2 region
atttacagcggtggtggtggcaca

SEQ ID NO: 3418 - DNA, 30 bp, Artificial Sequence
  Synthetic polynucleotide encoding artificial human antibody CDR-H2 region
gttaaaaggagaactgatggtgggacaata

SEQ ID NO: 3419 - DNA, 24 bp, Artificial Sequence
  Synthetic polynucleotide encoding artificial human antibody CDR-H2 region
attagtagtagtggtagtatcata

SEQ ID NO: 3420 - DNA, 24 bp, Artificial Sequence
  Synthetic polynucleotide encoding artificial human antibody CDR-H2 region
ttatatagcgatgatagtagcaca

SEQ ID NO: 3421 - DNA, 24 bp, Artificial Sequence
  Synthetic polynucleotide encoding artificial human antibody CDR-H2 region
atttatagcggtgatagtagcaca

SEQ ID NO: 3422 - DNA, 21 bp, Artificial Sequence
  Synthetic polynucleotide encoding artificial human antibody CDR-H2 region
attgattgggatgatgataaa

SEQ ID NO: 3423 - DNA, 24 bp, Artificial Sequence
  Synthetic polynucleotide encoding artificial human antibody CDR-H2 region
accagctcctatactgggaaccca

SEQ ID NO: 3424 - DNA, 21 bp, Artificial Sequence
  Synthetic polynucleotide encoding artificial human antibody CDR-H2 region
ttttataatagtgggagcacc

SEQ ID NO: 3425 - DNA, 24 bp, Artificial Sequence
  Synthetic polynucleotide encoding artificial human antibody CDR-H2 region
attagtggtagtggttatacgtca

SEQ ID NO: 3426 - DNA, 21 bp, Artificial Sequence
  Synthetic polynucleotide encoding artificial human antibody CDR-H2 region
atatcacacgatgatagtaaa

SEQ ID NO: 3427 - DNA, 24 bp, Artificial Sequence
  Synthetic polynucleotide encoding artificial human antibody CDR-H2 region
atatcatatgatggaagcaataaa

SEQ ID NO: 3428 - DNA, 24 bp, Artificial Sequence
  Synthetic polynucleotide encoding artificial human antibody CDR-H2 region
atcacaccttacaatggtaacacc

SEQ ID NO: 3429 - DNA, 21 bp, Artificial Sequence
  Synthetic polynucleotide encoding artificial human antibody CDR-H2 region
atctattacagtgggagcacc

SEQ ID NO: 3430 - DNA, 30 bp, Artificial Sequence
  Synthetic polynucleotide encoding artificial human antibody CDR-H2 region
tcaagaaacaaaggtaggagttacaccaca

SEQ ID NO: 3431 - DNA, 24 bp, Artificial Sequence
  Synthetic polynucleotide encoding artificial human antibody CDR-H2 region
attagttggaatagtaatatcata

SEQ ID NO: 3432 - DNA, 24 bp, Artificial Sequence
  Synthetic polynucleotide encoding artificial human antibody CDR-H2 region
atttatagcggtgatagtagtaca

SEQ ID NO: 3433 - DNA, 24 bp, Artificial Sequence
  Synthetic polynucleotide encoding artificial human antibody CDR-H2 region
ctctatagcgatgatggtgcgaca

SEQ ID NO: 3434 - DNA, 30 bp, Artificial Sequence
  Synthetic polynucleotide encoding artificial human antibody CDR-H2 region
attaggagcaaagcttttgattggacaaca

SEQ ID NO: 3435 - DNA, 21 bp, Artificial Sequence
  Synthetic polynucleotide encoding artificial human antibody CDR-H2 region
atctattacagtgggagcacc

SEQ ID NO: 3436 - DNA, 24 bp, Artificial Sequence
  Synthetic polynucleotide encoding artificial human antibody CDR-H2 region
attacttggaacagtggtaatata

SEQ ID NO: 3437 - DNA, 21 bp, Artificial Sequence
  Synthetic polynucleotide encoding artificial human antibody CDR-H2 region
atctattatagtgggagcacc

SEQ ID NO: 3438 - DNA, 24 bp, Artificial Sequence
  Synthetic polynucleotide encoding artificial human antibody CDR-H2 region
atgtcacatgatggcatcagtaaa

SEQ ID NO: 3439 - DNA, 21 bp, Artificial Sequence
  Synthetic polynucleotide encoding artificial human antibody CDR-H2 region
atctattatagtgggaccacc

SEQ ID NO: 3440 - DNA, 24 bp, Artificial Sequence
  Synthetic polynucleotide encoding artificial human antibody CDR-H2 region
atcaaccctaatggtggtgacaca

SEQ ID NO: 3441 - DNA, 24 bp, Artificial Sequence
  Synthetic polynucleotide encoding artificial human antibody CDR-H2 region
atatcatatgatggaagtaataaa

SEQ ID NO: 3442 - DNA, 24 bp, Artificial Sequence
  Synthetic polynucleotide encoding artificial human antibody CDR-H2 region
cttagtcttagtagtgggaccccc

SEQ ID NO: 3443 - DNA, 21 bp, Artificial Sequence
  Synthetic polynucleotide encoding artificial human antibody CDR-H2 region
ttcgattatactgggagcccc

SEQ ID NO: 3444 - DNA, 21 bp, Artificial Sequence
  Synthetic polynucleotide encoding artificial human antibody CDR-H2 region
atttatagcggtggtagtaca

SEQ ID NO: 3445 - DNA, 21 bp, Artificial Sequence
  Synthetic polynucleotide encoding artificial human antibody CDR-H2 region
attagtggaggcggtgtcaca

SEQ ID NO: 3446 - DNA, 24 bp, Artificial Sequence
  Synthetic polynucleotide encoding artificial human antibody CDR-H2 region
atcatgcctatctttgggacaaca

SEQ ID NO: 3447 - DNA, 24 bp, Artificial Sequence
  Synthetic polynucleotide encoding artificial human antibody CDR-H2 region
attgatgcaacttccacttacaca

SEQ ID NO: 3448 - DNA, 24 bp, Artificial Sequence
  Synthetic polynucleotide encoding artificial human antibody CDR-H2 region
atatcatatgatggaagtaaaaaa

SEQ ID NO: 3449 - DNA, 24 bp, Artificial Sequence
  Synthetic polynucleotide encoding artificial human antibody CDR-H2 region
atcatcactgacagtggtaacaca

SEQ ID NO: 3450 - DNA, 24 bp, Artificial Sequence
  Synthetic polynucleotide encoding artificial human antibody CDR-H2 region
attgcacatgatggacatcaaata

SEQ ID NO: 3451 - DNA, 24 bp, Artificial Sequence
  Synthetic polynucleotide encoding artificial human antibody CDR-H2 region
atcaaccccgacactgggtacgca

SEQ ID NO: 3452 - DNA, 21 bp, Artificial Sequence
  Synthetic polynucleotide encoding artificial human antibody CDR-H2 region
attagtggaagcggtgtcaca

SEQ ID NO: 3453 - DNA, 21 bp, Artificial Sequence
  Synthetic polynucleotide encoding artificial human antibody CDR-H2 region
atctacagcagtggtcccaca

SEQ ID NO: 3454 - DNA, 24 bp, Artificial Sequence
  Synthetic polynucleotide encoding artificial human antibody CDR-H2 region
atcaacgctggcgatggtcacaca

SEQ ID NO: 3455 - DNA, 24 bp, Artificial Sequence
  Synthetic polynucleotide encoding artificial human antibody CDR-H2 region
atcaaccctagagatggcgacacc

SEQ ID NO: 3456 - DNA, 24 bp, Artificial Sequence
  Synthetic polynucleotide encoding artificial human antibody CDR-H2 region
atcatcactggcaatggtgagaca

SEQ ID NO: 3457 - DNA, 30 bp, Artificial Sequence
  Synthetic polynucleotide encoding artificial human antibody CDR-H2 region
attagaagtaaatctgatggtgagaaagtg

SEQ ID NO: 3458 - DNA, 21 bp, Artificial Sequence
  Synthetic polynucleotide encoding artificial human antibody CDR-H2 region
atttatagcggtggtaccaca

SEQ ID NO: 3459 - DNA, 21 bp, Artificial Sequence
  Synthetic polynucleotide encoding artificial human antibody CDR-H2 region
atttattgggatgatgataag

SEQ ID NO: 3460 - DNA, 24 bp, Artificial Sequence
  Synthetic polynucleotide encoding artificial human antibody CDR-H2 region
atcaaccccgacactgggtacaca

SEQ ID NO: 3461 - DNA, 24 bp, Artificial Sequence
  Synthetic polynucleotide encoding artificial human antibody CDR-H2 region
attactgctagtagtgcttatata

SEQ ID NO: 3462 - DNA, 24 bp, Artificial Sequence
  Synthetic polynucleotide encoding artificial human antibody CDR-H2 region
atccatggtggtgactctgatacc

SEQ ID NO: 3463 - DNA, 24 bp, Artificial Sequence
  Synthetic polynucleotide encoding artificial human antibody CDR-H2 region
atcgaccctagtggtgggagcaca

SEQ ID NO: 3464 - DNA, 19 bp, Artificial Sequence
  Synthetic polynucleotide encoding artificial human antibody CDR-H2 region
tagtgatgggagtagaacg

SEQ ID NO: 3465 - DNA, 24 bp, Artificial Sequence
  Synthetic polynucleotide encoding artificial human antibody CDR-H2 region
attactaatagtggagatttgaca

SEQ ID NO: 3466 - DNA, 33 bp, Artificial Sequence
  Synthetic polynucleotide encoding artificial human antibody CDR-H2 region
attagaattgttagtcctattggtggaagcaca

SEQ ID NO: 3467 - DNA, 24 bp, Artificial Sequence
  Synthetic polynucleotide encoding artificial human antibody CDR-H2 region
attagtgatagtggtgtcggcaca

SEQ ID NO: 3468 - DNA, 24 bp, Artificial Sequence
  Synthetic polynucleotide encoding artificial human antibody CDR-H2 region
atcatcattgacagtggtgaaaca

SEQ ID NO: 3469 - DNA, 24 bp, Artificial Sequence
  Synthetic polynucleotide encoding artificial human antibody CDR-H2 region
ataaagcaagatggaagtgagaaa

SEQ ID NO: 3470 - DNA, 24 bp, Artificial Sequence
  Synthetic polynucleotide encoding artificial human antibody CDR-H2 region
attagtggaagtggtcttatgaca

SEQ ID NO: 3471 - DNA, 24 bp, Artificial Sequence
  Synthetic polynucleotide encoding artificial human antibody CDR-H2 region
attaatagtgatgggactaccaca

SEQ ID NO: 3472 - DNA, 24 bp, Artificial Sequence
  Synthetic polynucleotide encoding artificial human antibody CDR-H2 region
attagtagtagtagtagttacata

SEQ ID NO: 3473 - DNA, 24 bp, Artificial Sequence
  Synthetic polynucleotide encoding artificial human antibody CDR-H2 region
tttagtggtagtggtggtaacaca

SEQ ID NO: 3474 - DNA, 24 bp, Artificial Sequence
  Synthetic polynucleotide encoding artificial human antibody CDR-H2 region
attaatcgtggtgggaccagaata

SEQ ID NO: 3475 - DNA, 24 bp, Artificial Sequence
  Synthetic polynucleotide encoding artificial human antibody CDR-H2 region
atcagcgcttataatggtaagaca

SEQ ID NO: 3476 - DNA, 24 bp, Artificial Sequence
  Synthetic polynucleotide encoding artificial human antibody CDR-H2 region
atcagtcctattggtgattacata

SEQ ID NO: 3477 - DNA, 30 bp, Artificial Sequence
  Synthetic polynucleotide encoding artificial human antibody CDR-H2 region
atcaagatcacccctcacagtggtgacaca

SEQ ID NO: 3478 - DNA, 24 bp, Artificial Sequence
  Synthetic polynucleotide encoding artificial human antibody CDR-H2 region
ataagttctactggttctactacc

SEQ ID NO: 3479 - DNA, 24 bp, Artificial Sequence
  Synthetic polynucleotide encoding artificial human antibody CDR-H2 region
attgttggtagtggtgatatcaca

SEQ ID NO: 3480 - DNA, 30 bp, Artificial Sequence
  Synthetic polynucleotide encoding artificial human antibody CDR-H2 region
attaaaaggaaaagtgatggtgagacaaca

SEQ ID NO: 3481 - DNA, 21 bp, Artificial Sequence
  Synthetic polynucleotide encoding artificial human antibody CDR-H2 region
atcagtggaggcggtgtcaca

SEQ ID NO: 3482 - DNA, 24 bp, Artificial Sequence
  Synthetic polynucleotide encoding artificial human antibody CDR-H2 region
gtcaacgctggcgatggtgccaca

SEQ ID NO: 3483 - DNA, 24 bp, Artificial Sequence
  Synthetic polynucleotide encoding artificial human antibody CDR-H2 region
attactcagagtagtagtttcaca

SEQ ID NO: 3484 - DNA, 21 bp, Artificial Sequence
  Synthetic polynucleotide encoding artificial human antibody CDR-H2 region
atttattgggatgatgataag

SEQ ID NO: 3485 - DNA, 24 bp, Artificial Sequence
  Synthetic polynucleotide encoding artificial human antibody CDR-H2 region
atatggtatgatggaagtaataaa

SEQ ID NO: 3486 - DNA, 24 bp, Artificial Sequence
  Synthetic polynucleotide encoding artificial human antibody CDR-H2 region
atcaacaccaacaccgggaaccca

SEQ ID NO: 3487 - DNA, 24 bp, Artificial Sequence
  Synthetic polynucleotide encoding artificial human antibody CDR-H2 region
attagaagtgatgtgggtatcaca

SEQ ID NO: 3488 - DNA, 24 bp, Artificial Sequence
  Synthetic polynucleotide encoding artificial human antibody CDR-H2 region
gtcacccccagtggtgaaaactca

SEQ ID NO: 3489 - DNA, 24 bp, Artificial Sequence
  Synthetic polynucleotide encoding artificial human antibody CDR-H2 region
atcaaccctggcgctggtgacata

SEQ ID NO: 3490 - DNA, 24 bp, Artificial Sequence
  Synthetic polynucleotide encoding artificial human antibody CDR-H2 region
atttttggtagtggcagtggtaca

SEQ ID NO: 3491 - DNA, 24 bp, Artificial Sequence
  Synthetic polynucleotide encoding artificial human antibody CDR-H2 region
atcatcactggcaatggtgagaca

SEQ ID NO: 3492 - DNA, 30 bp, Artificial Sequence
  Synthetic polynucleotide encoding artificial human antibody CDR-H2 region
atcaaaagtaaaagtgatggtggaacaaca

SEQ ID NO: 3493 - DNA, 24 bp, Artificial Sequence
  Synthetic polynucleotide encoding artificial human antibody CDR-H2 region
atctggtttgatggaagtaataca

SEQ ID NO: 3494 - DNA, 24 bp, Artificial Sequence
  Synthetic polynucleotide encoding artificial human antibody CDR-H2 region
atcaacgctgccaatggtaacaca

SEQ ID NO: 3495 - DNA, 18 bp, Artificial Sequence
  Synthetic polynucleotide encoding artificial human antibody CDR-H2 region
atatggtatcgtggaatt

SEQ ID NO: 3496 - DNA, 24 bp, Artificial Sequence
  Synthetic polynucleotide encoding artificial human antibody CDR-H2 region
atctttgcttatgactctgatacc

SEQ ID NO: 3497 - DNA, 30 bp, Artificial Sequence
  Synthetic polynucleotide encoding artificial human antibody CDR-H2 region
attgatggtgatggtgatgggagcagaacc

SEQ ID NO: 3498 - DNA, 21 bp, Artificial Sequence
  Synthetic polynucleotide encoding artificial human antibody CDR-H2 region
atcaatcagagtggaaccacc

SEQ ID NO: 3499 - DNA, 24 bp, Artificial Sequence
  Synthetic polynucleotide encoding artificial human antibody CDR-H2 region
attagtcctactggtggtagcaca

SEQ ID NO: 3500 - DNA, 24 bp, Artificial Sequence
  Synthetic polynucleotide encoding artificial human antibody CDR-H2 region
atcatcactgacagtggtcgcaca

SEQ ID NO: 3501 - DNA, 24 bp, Artificial Sequence
  Synthetic polynucleotide encoding artificial human antibody CDR-H2 region
attaatgatgacgccacggacaca

SEQ ID NO: 3502 - DNA, 21 bp, Artificial Sequence
  Synthetic polynucleotide encoding artificial human antibody CDR-H2 region
atctggtacagtgggagtacc

SEQ ID NO: 3503 - DNA, 15 bp, Artificial Sequence
  Synthetic polynucleotide encoding artificial human antibody CDR-H2 region
attggaggtcccaca

SEQ ID NO: 3504 - DNA, 24 bp, Artificial Sequence
  Synthetic polynucleotide encoding artificial human antibody CDR-H2 region
atgacgagtgatgtgagtcgcgca

SEQ ID NO: 3505 - DNA, 21 bp, Artificial Sequence
  Synthetic polynucleotide encoding artificial human antibody CDR-H2 region
atctattatagtgggagcacc

SEQ ID NO: 3506 - DNA, 21 bp, Artificial Sequence
  Synthetic polynucleotide encoding artificial human antibody CDR-H2 region
atctattacagtgggagcacc

SEQ ID NO: 3507 - DNA, 30 bp, Artificial Sequence
  Synthetic polynucleotide encoding artificial human antibody CDR-H2 region
attaaaaccaaacctgaaggtgggacccta

SEQ ID NO: 3508 - DNA, 24 bp, Artificial Sequence
  Synthetic polynucleotide encoding artificial human antibody CDR-H2 region
attagtgatcgcggttttgacaca

SEQ ID NO: 3509 - DNA, 24 bp, Artificial Sequence
  Synthetic polynucleotide encoding artificial human antibody CDR-H2 region
attagtggaagtggtactagtaca

SEQ ID NO: 3510 - DNA, 24 bp, Artificial Sequence
  Synthetic polynucleotide encoding artificial human antibody CDR-H2 region
tttagtggtagtggtggtaacaca

SEQ ID NO: 3511 - DNA, 24 bp, Artificial Sequence
  Synthetic polynucleotide encoding artificial human antibody CDR-H2 region
atcaacgctggcaatggtaacaca

SEQ ID NO: 3512 - DNA, 21 bp, Artificial Sequence
  Synthetic polynucleotide encoding artificial human antibody CDR-H2 region
gtctattacagtggaagaacc

SEQ ID NO: 3513 - DNA, 24 bp, Artificial Sequence
  Synthetic polynucleotide encoding artificial human antibody CDR-H2 region
atcaaccctaacagtggtggcaca

SEQ ID NO: 3514 - DNA, 21 bp, Artificial Sequence
  Synthetic polynucleotide encoding artificial human antibody CDR-H2 region
ctctactttaatgggggcacc

SEQ ID NO: 3515 - DNA, 15 bp, Artificial Sequence
  Synthetic polynucleotide encoding artificial human antibody CDR-H2 region
attggtggtgccgaa

SEQ ID NO: 3516 - DNA, 24 bp, Artificial Sequence
  Synthetic polynucleotide encoding artificial human antibody CDR-H2 region
atcaaccccgacactgggtacgca

SEQ ID NO: 3517 - DNA, 24 bp, Artificial Sequence
  Synthetic polynucleotide encoding artificial human antibody CDR-H2 region
atcgctcaaagtaatatcaatatt

SEQ ID NO: 3518 - DNA, 24 bp, Artificial Sequence
  Synthetic polynucleotide encoding artificial human antibody CDR-H2 region
attagtagtagtagtatttacata

SEQ ID NO: 3519 - DNA, 21 bp, Artificial Sequence
  Synthetic polynucleotide encoding artificial human antibody CDR-H2 region
atcaatcatagtggaagcacc

SEQ ID NO: 3520 - DNA, 19 bp, Artificial Sequence
  Synthetic polynucleotide encoding artificial human antibody CDR-H2 region
tagtgatgggagtagaacg

SEQ ID NO: 3521 - DNA, 24 bp, Artificial Sequence
  Synthetic polynucleotide encoding artificial human antibody CDR-H2 region
attagtgctaataccaagaacacc

SEQ ID NO: 3522 - DNA, 24 bp, Artificial Sequence
  Synthetic polynucleotide encoding artificial human antibody CDR-H2 region
atatcaaatgatggaaatactaaa

SEQ ID NO: 3523 - DNA, 33 bp, Artificial Sequence
  Synthetic polynucleotide encoding artificial human antibody CDR-H2 region
attagtggcagtggtgatagcactttcagcaca

SEQ ID NO: 3524 - DNA, 24 bp, Artificial Sequence
  Synthetic polynucleotide encoding artificial human antibody CDR-H2 region
atcaacgctggcgatggtcacaca

SEQ ID NO: 3525 - DNA, 21 bp, Artificial Sequence
  Synthetic polynucleotide encoding artificial human antibody CDR-H2 region
ttccattccagtgggaccacc

SEQ ID NO: 3526 - DNA, 21 bp, Artificial Sequence
  Synthetic polynucleotide encoding artificial human antibody CDR-H2 region
ttggctcctagtggtggcaca

SEQ ID NO: 3527 - DNA, 30 bp, Artificial Sequence
  Synthetic polynucleotide encoding artificial human antibody CDR-H2 region
attaaaagcaacagtgaaggtgggacaaca

SEQ ID NO: 3528 - DNA, 21 bp, Artificial Sequence
  Synthetic polynucleotide encoding artificial human antibody CDR-H2 region
atctatcatagtgggagcacc

SEQ ID NO: 3529 - DNA, 21 bp, Artificial Sequence
  Synthetic polynucleotide encoding artificial human antibody CDR-H2 region
attagtggaggcggtgtcaca

SEQ ID NO: 3530 - DNA, 24 bp, Artificial Sequence
  Synthetic polynucleotide encoding artificial human antibody CDR-H2 region
atatcatatgatggaagtaaaaaa

SEQ ID NO: 3531 - DNA, 24 bp, Artificial Sequence
  Synthetic polynucleotide encoding artificial human antibody CDR-H2 region
atagcatatgacggaaatactata

SEQ ID NO: 3532 - DNA, 24 bp, Artificial Sequence
  Synthetic polynucleotide encoding artificial human antibody CDR-H2 region
attagtggtagtggtggtagcaca

SEQ ID NO: 3533 - DNA, 21 bp, Artificial Sequence
  Synthetic polynucleotide encoding artificial human antibody CDR-H2 region
gtgtattacagtgggatcacc

SEQ ID NO: 3534 - DNA, 30 bp, Artificial Sequence
  Synthetic polynucleotide encoding artificial human antibody CDR-H2 region
attagaagtgaatctgatggtgagaaagtg

SEQ ID NO: 3535 - DNA, 21 bp, Artificial Sequence
  Synthetic polynucleotide encoding artificial human antibody CDR-H2 region
agccgttacaacgggaacacc

SEQ ID NO: 3536 - DNA, 21 bp, Artificial Sequence
  Synthetic polynucleotide encoding artificial human antibody CDR-H2 region
atctattatagtgggaacacc

SEQ ID NO: 3537 - DNA, 30 bp, Artificial Sequence
  Synthetic polynucleotide encoding artificial human antibody CDR-H2 region
gttaaaagtatagctgatactggggcgaga

SEQ ID NO: 3538 - DNA, 24 bp, Artificial Sequence
  Synthetic polynucleotide encoding artificial human antibody CDR-H2 region
atcaacccttacagtggtggcaca

SEQ ID NO: 3539 - DNA, 24 bp, Artificial Sequence
  Synthetic polynucleotide encoding artificial human antibody CDR-H2 region
ttgaaccctcttaatggtaaggca

SEQ ID NO: 3540 - DNA, 30 bp, Artificial Sequence
  Synthetic polynucleotide encoding artificial human antibody CDR-H2 region
attaagagcaagtctgagggtgagacaata

SEQ ID NO: 3541 - DNA, 24 bp, Artificial Sequence
  Synthetic polynucleotide encoding artificial human antibody CDR-H2 region
atatggtatgatggcaaaaatgaa

SEQ ID NO: 3542 - DNA, 30 bp, Artificial Sequence
  Synthetic polynucleotide encoding artificial human antibody CDR-H2 region
attaaaagtgatattaacggcgggacaacc

SEQ ID NO: 3543 - DNA, 24 bp, Artificial Sequence
  Synthetic polynucleotide encoding artificial human antibody CDR-H2 region
attactggtaatagtaaaaccata

SEQ ID NO: 3544 - DNA, 21 bp, Artificial Sequence
  Synthetic polynucleotide encoding artificial human antibody CDR-H2 region
ctttacagcgatggtagagca

SEQ ID NO: 3545 - DNA, 24 bp, Artificial Sequence
  Synthetic polynucleotide encoding artificial human antibody CDR-H2 region
atcaaccctaacagtggtggcaca

SEQ ID NO: 3546 - DNA, 24 bp, Artificial Sequence
  Synthetic polynucleotide encoding artificial human antibody CDR-H2 region
attagtggtggtggcgataacaca

SEQ ID NO: 3547 - DNA, 24 bp, Artificial Sequence
  Synthetic polynucleotide encoding artificial human antibody CDR-H2 region
gttaatcctcgtggtgaccgtacg

SEQ ID NO: 3548 - DNA, 24 bp, Artificial Sequence
  Synthetic polynucleotide encoding artificial human antibody CDR-H2 region
atatcatatgatggagaaaataaa

SEQ ID NO: 3549 - DNA, 21 bp, Artificial Sequence
  Synthetic polynucleotide encoding artificial human antibody CDR-H2 region
atgcattccggtgagaatata

SEQ ID NO: 3550 - DNA, 24 bp, Artificial Sequence
  Synthetic polynucleotide encoding artificial human antibody CDR-H2 region
atcaaccctaacagtggtggcaca

SEQ ID NO: 3551 - DNA, 21 bp, Artificial Sequence
  Synthetic polynucleotide encoding artificial human antibody CDR-H2 region
atcaatcatagtggaagcacc

SEQ ID NO: 3552 - DNA, 21 bp, Artificial Sequence
  Synthetic polynucleotide encoding artificial human antibody CDR-H2 region
agttattatgatgatgccacc

SEQ ID NO: 3553 - DNA, 24 bp, Artificial Sequence
  Synthetic polynucleotide encoding artificial human antibody CDR-H2 region
atcagcgctcacaacggtgacaca

SEQ ID NO: 3554 - DNA, 21 bp, Artificial Sequence
  Synthetic polynucleotide encoding artificial human antibody CDR-H2 region
atcaatcatagtggaagcacc

SEQ ID NO: 3555 - DNA, 24 bp, Artificial Sequence
  Synthetic polynucleotide encoding artificial human antibody CDR-H2 region
atcatccctatctttgatacagca

SEQ ID NO: 3556 - DNA, 24 bp, Artificial Sequence
  Synthetic polynucleotide encoding artificial human antibody CDR-H2 region
attagtgttagaggtggtgatata

SEQ ID NO: 3557 - DNA, 24 bp, Artificial Sequence
  Synthetic polynucleotide encoding artificial human antibody CDR-H2 region
atttgtagtactggggattgcaca

SEQ ID NO: 3558 - DNA, 24 bp, Artificial Sequence
  Synthetic polynucleotide encoding artificial human antibody CDR-H2 region
atcactagtagaggagaatataca

SEQ ID NO: 3559 - DNA, 21 bp, Artificial Sequence
  Synthetic polynucleotide encoding artificial human antibody CDR-H2 region
atttatagcggtggtagtaca

SEQ ID NO: 3560 - DNA, 24 bp, Artificial Sequence
  Synthetic polynucleotide encoding artificial human antibody CDR-H2 region
atcagcgcttacaatggtaacaca

SEQ ID NO: 3561 - DNA, 24 bp, Artificial Sequence
  Synthetic polynucleotide encoding artificial human antibody CDR-H2 region
attggccctagtagtactcccata

SEQ ID NO: 3562 - DNA, 30 bp, Artificial Sequence
  Synthetic polynucleotide encoding artificial human antibody CDR-H2 region
attagaagccaaccttatggtgagacaaca

SEQ ID NO: 3563 - DNA, 24 bp, Artificial Sequence
  Synthetic polynucleotide encoding artificial human antibody CDR-H2 region
atcagcggtaacaacggtggccca

SEQ ID NO: 3564 - DNA, 24 bp, Artificial Sequence
  Synthetic polynucleotide encoding artificial human antibody CDR-H2 region
atcagcgcttacaatggtaacaca

SEQ ID NO: 3565 - DNA, 21 bp, Artificial Sequence
  Synthetic polynucleotide encoding artificial human antibody CDR-H2 region
atctataccagtgggagaacc

SEQ ID NO: 3566 - DNA, 24 bp, Artificial Sequence
  Synthetic polynucleotide encoding artificial human antibody CDR-H2 region
attaacagtgatgggactgtcgtg

SEQ ID NO: 3567 - DNA, 24 bp, Artificial Sequence
  Synthetic polynucleotide encoding artificial human antibody CDR-H2 region
atcatccctatctttggtacaaca

SEQ ID NO: 3568 - DNA, 24 bp, Artificial Sequence
  Synthetic polynucleotide encoding artificial human antibody CDR-H2 region
attagtagtagtagtagttacata

SEQ ID NO: 3569 - DNA, 21 bp, Artificial Sequence
  Synthetic polynucleotide encoding artificial human antibody CDR-H2 region
attgattgggatgatgataaa

SEQ ID NO: 3570 - DNA, 24 bp, Artificial Sequence
  Synthetic polynucleotide encoding artificial human antibody CDR-H2 region
atatcatatgatggaagtaataaa

SEQ ID NO: 3571 - DNA, 24 bp, Artificial Sequence
  Synthetic polynucleotide encoding artificial human antibody CDR-H2 region
atcagcggtgacaagggtaacacg

SEQ ID NO: 3572 - DNA, 24 bp, Artificial Sequence
  Synthetic polynucleotide encoding artificial human antibody CDR-H2 region
attagtagtagttttaattacata

SEQ ID NO: 3573 - DNA, 24 bp, Artificial Sequence
  Synthetic polynucleotide encoding artificial human antibody CDR-H2 region
gtaagtggtagtggtggtggcaaa

SEQ ID NO: 3574 - DNA, 21 bp, Artificial Sequence
  Synthetic polynucleotide encoding artificial human antibody CDR-H2 region
atcaatcatagtggaagcacc

SEQ ID NO: 3575 - DNA, 24 bp, Artificial Sequence
  Synthetic polynucleotide encoding artificial human antibody CDR-H2 region
atgaaccctaacagtggtaacaca

SEQ ID NO: 3576 - DNA, 21 bp, Artificial Sequence
  Synthetic polynucleotide encoding artificial human antibody CDR-H2 region
atcttttatagtgggagcacc

SEQ ID NO: 3577 - DNA, 24 bp, Artificial Sequence
  Synthetic polynucleotide encoding artificial human antibody CDR-H2 region
atcagtgggaatggtggcaacata

SEQ ID NO: 3578 - DNA, 24 bp, Artificial Sequence
  Synthetic polynucleotide encoding artificial human antibody CDR-H2 region
atatcatatgaaggaagtattaaa

SEQ ID NO: 3579 - DNA, 24 bp, Artificial Sequence
  Synthetic polynucleotide encoding artificial human antibody CDR-H2 region
atctattacagtagtgggggcacc

SEQ ID NO: 3580 - DNA, 24 bp, Artificial Sequence
  Synthetic polynucleotide encoding artificial human antibody CDR-H2 region
gtcaagactgatggaagtgacaaa

SEQ ID NO: 3581 - DNA, 21 bp, Artificial Sequence
  Synthetic polynucleotide encoding artificial human antibody CDR-H2 region
atctattatagtgggagcacc

SEQ ID NO: 3582 - DNA, 24 bp, Artificial Sequence
  Synthetic polynucleotide encoding artificial human antibody CDR-H2 region
atatcatatgatggaagtaataaa

SEQ ID NO: 3583 - DNA, 24 bp, Artificial Sequence
  Synthetic polynucleotide encoding artificial human antibody CDR-H2 region
atcaaccctaatagtggtggcaca

SEQ ID NO: 3584 - DNA, 24 bp, Artificial Sequence
  Synthetic polynucleotide encoding artificial human antibody CDR-H2 region
atatcatatgatggaagtaataaa

SEQ ID NO: 3585 - DNA, 24 bp, Artificial Sequence
  Synthetic polynucleotide encoding artificial human antibody CDR-H2 region
attagtagtaggagtagttacata

SEQ ID NO: 3586 - DNA, 24 bp, Artificial Sequence
  Synthetic polynucleotide encoding artificial human antibody CDR-H2 region
atcggcagtgccagtcgccatata

SEQ ID NO: 3587 - DNA, 24 bp, Artificial Sequence
  Synthetic polynucleotide encoding artificial human antibody CDR-H2 region
atttcatatgatggaagctatgaa

SEQ ID NO: 3588 - DNA, 21 bp, Artificial Sequence
  Synthetic polynucleotide encoding artificial human antibody CDR-H2 region
atctattacagtggggacacc

SEQ ID NO: 3589 - DNA, 30 bp, Artificial Sequence
  Synthetic polynucleotide encoding artificial human antibody CDR-H2 region
attaaaaggaaagttgacggtgggtcaaca

SEQ ID NO: 3590 - DNA, 21 bp, Artificial Sequence
  Synthetic polynucleotide encoding artificial human antibody CDR-H2 region
atcaatcatagtggaagcacc

SEQ ID NO: 3591 - DNA, 21 bp, Artificial Sequence
  Synthetic polynucleotide encoding artificial human antibody CDR-H2 region
atcaatcatagtggaagcacc

SEQ ID NO: 3592 - DNA, 21 bp, Artificial Sequence
  Synthetic polynucleotide encoding artificial human antibody CDR-H2 region
atccacaccagtggacccacc

SEQ ID NO: 3593 - DNA, 24 bp, Artificial Sequence
  Synthetic polynucleotide encoding artificial human antibody CDR-H2 region
tttcatcctgaagacggtgaaaga

SEQ ID NO: 3594 - DNA, 21 bp, Artificial Sequence
  Synthetic polynucleotide encoding artificial human antibody CDR-H2 region
atgtatttcactgggaccgcc

SEQ ID NO: 3595 - DNA, 24 bp, Artificial Sequence
  Synthetic polynucleotide encoding artificial human antibody CDR-H2 region
atgaagccagatggaagtgagaaa

SEQ ID NO: 3596 - DNA, 24 bp, Artificial Sequence
  Synthetic polynucleotide encoding artificial human antibody CDR-H2 region
attagtggtggtggtggtagcaca

SEQ ID NO: 3597 - DNA, 24 bp, Artificial Sequence
  Synthetic polynucleotide encoding artificial human antibody CDR-H2 region
atatggtttgatggaagtcatcaa

SEQ ID NO: 3598 - DNA, 24 bp, Artificial Sequence
  Synthetic polynucleotide encoding artificial human antibody CDR-H2 region
attagtagtagtagtagttacata

SEQ ID NO: 3599 - DNA, 21 bp, Artificial Sequence
  Synthetic polynucleotide encoding artificial human antibody CDR-H2 region
atctattacagtgggagcacc

SEQ ID NO: 3600 - DNA, 24 bp, Artificial Sequence
  Synthetic polynucleotide encoding artificial human antibody CDR-H2 region
atcaaccctggtgttggtagcaca

SEQ ID NO: 3601 - DNA, 21 bp, Artificial Sequence
  Synthetic polynucleotide encoding artificial human antibody CDR-H2 region
atcaatcatagtggaagcacc

SEQ ID NO: 3602 - DNA, 18 bp, Artificial Sequence
  Synthetic polynucleotide encoding artificial human antibody CDR-H2 region
attagtggtagtatcaca

SEQ ID NO: 3603 - DNA, 21 bp, Artificial Sequence
  Synthetic polynucleotide encoding artificial human antibody CDR-H2 region
atttattgggatgatgataag

SEQ ID NO: 3604 - DNA, 24 bp, Artificial Sequence
  Synthetic polynucleotide encoding artificial human antibody CDR-H2 region
atcaaccctaacagtggtgccaca

SEQ ID NO: 3605 - DNA, 24 bp, Artificial Sequence
  Synthetic polynucleotide encoding artificial human antibody CDR-H2 region
atatcatatgatggaagtaagaaa

SEQ ID NO: 3606 - DNA, 24 bp, Artificial Sequence
  Synthetic polynucleotide encoding artificial human antibody CDR-H2 region
gtcagttcttttggtagttacaca

SEQ ID NO: 3607 - DNA, 21 bp, Artificial Sequence
  Synthetic polynucleotide encoding artificial human antibody CDR-H2 region
atctcttatagtgggagcacc

SEQ ID NO: 3608 - DNA, 21 bp, Artificial Sequence
  Synthetic polynucleotide encoding artificial human antibody CDR-H2 region
atctattatagtgggagcacc

SEQ ID NO: 3609 - DNA, 24 bp, Artificial Sequence
  Synthetic polynucleotide encoding artificial human antibody CDR-H2 region
atgaaccctaacagtggtaacaca

SEQ ID NO: 3610 - DNA, 24 bp, Artificial Sequence
  Synthetic polynucleotide encoding artificial human antibody CDR-H2 region
attagtggggatggtggtagcaca

SEQ ID NO: 3611 - DNA, 24 bp, Artificial Sequence
  Synthetic polynucleotide encoding artificial human antibody CDR-H2 region
atgtggtctgatgtaaataacaaa

SEQ ID NO: 3612 - DNA, 24 bp, Artificial Sequence
  Synthetic polynucleotide encoding artificial human antibody CDR-H2 region
atatcatatgatggaagtaataaa

SEQ ID NO: 3613 - DNA, 21 bp, Artificial Sequence
  Synthetic polynucleotide encoding artificial human antibody CDR-H2 region
acctataccactgggagcacc

SEQ ID NO: 3614 - DNA, 24 bp, Artificial Sequence
  Synthetic polynucleotide encoding artificial human antibody CDR-H2 region
attagtagtagtgggggtagcaca

SEQ ID NO: 3615 - DNA, 24 bp, Artificial Sequence
  Synthetic polynucleotide encoding artificial human antibody CDR-H2 region
ataaggccagatggagctgttcaa

SEQ ID NO: 3616 - DNA, 24 bp, Artificial Sequence
  Synthetic polynucleotide encoding artificial human antibody CDR-H2 region
atcgtccctatcgttggcttagcg

SEQ ID NO: 3617 - DNA, 24 bp, Artificial Sequence
  Synthetic polynucleotide encoding artificial human antibody CDR-H2 region
ataacacatgatggaggtgttcaa

SEQ ID NO: 3618 - DNA, 24 bp, Artificial Sequence
  Synthetic polynucleotide encoding artificial human antibody CDR-H2 region
atgaaccaggatggaagtgtgaga

SEQ ID NO: 3619 - DNA, 24 bp, Artificial Sequence
  Synthetic polynucleotide encoding artificial human antibody CDR-H2 region
atgaaccctaacaatggtggcaca

SEQ ID NO: 3620 - DNA, 24 bp, Artificial Sequence
  Synthetic polynucleotide encoding artificial human antibody CDR-H2 region
gttagtcgtggcggtgattacaca

SEQ ID NO: 3621 - DNA, 24 bp, Artificial Sequence
  Synthetic polynucleotide encoding artificial human antibody CDR-H2 region
atatcatatgatggaagtcgaaca

SEQ ID NO: 3622 - DNA, 21 bp, Artificial Sequence
  Synthetic polynucleotide encoding artificial human antibody CDR-H2 region
aggacttatactgggaacatc

SEQ ID NO: 3623 - DNA, 21 bp, Artificial Sequence
  Synthetic polynucleotide encoding artificial human antibody CDR-H2 region
atctattacagagggggcacc

SEQ ID NO: 3624 - DNA, 21 bp, Artificial Sequence
  Synthetic polynucleotide encoding artificial human antibody CDR-H2 region
atctatcagagtgggcgcacc

SEQ ID NO: 3625 - DNA, 24 bp, Artificial Sequence
  Synthetic polynucleotide encoding artificial human antibody CDR-H2 region
attaatagtgatgggagaactaca

SEQ ID NO: 3626 - DNA, 21 bp, Artificial Sequence
  Synthetic polynucleotide encoding artificial human antibody CDR-H2 region
atctttcataatggaaacacc

SEQ ID NO: 3627 - DNA, 24 bp, Artificial Sequence
  Synthetic polynucleotide encoding artificial human antibody CDR-H2 region
attagtggcagtggaggtagtaca

SEQ ID NO: 3628 - DNA, 21 bp, Artificial Sequence
  Synthetic polynucleotide encoding artificial human antibody CDR-H2 region
atctattatagtgggagcacc

SEQ ID NO: 3629 - DNA, 24 bp, Artificial Sequence
  Synthetic polynucleotide encoding artificial human antibody CDR-H2 region
cttgaccgtactggtagtttaacg

SEQ ID NO: 3630 - DNA, 24 bp, Artificial Sequence
  Synthetic polynucleotide encoding artificial human antibody CDR-H2 region
cttaagagtgatgggagtagcaca

SEQ ID NO: 3631 - DNA, 21 bp, Artificial Sequence
  Synthetic polynucleotide encoding artificial human antibody CDR-H2 region
gtctattatactggaagtact

SEQ ID NO: 3632 - DNA, 24 bp, Artificial Sequence
  Synthetic polynucleotide encoding artificial human antibody CDR-H2 region
atcaacgttggcactggtgagaca

SEQ ID NO: 3633 - DNA, 24 bp, Artificial Sequence
  Synthetic polynucleotide encoding artificial human antibody CDR-H2 region
atcagtagcatctctgacacgtca

SEQ ID NO: 3634 - DNA, 24 bp, Artificial Sequence
  Synthetic polynucleotide encoding artificial human antibody CDR-H2 region
atcagcgctttcaatggtaacaca

SEQ ID NO: 3635 - DNA, 24 bp, Artificial Sequence
  Synthetic polynucleotide encoding artificial human antibody CDR-H2 region
atcagtggtagtggcggtgattcc

SEQ ID NO: 3636 - DNA, 21 bp, Artificial Sequence
  Synthetic polynucleotide encoding artificial human antibody CDR-H2 region
atgtattatcgtgggagcacc

SEQ ID NO: 3637 - DNA, 24 bp, Artificial Sequence
  Synthetic polynucleotide encoding artificial human antibody CDR-H2 region
attagtggtagtagtggtagcaca

SEQ ID NO: 3638 - DNA, 24 bp, Artificial Sequence
  Synthetic polynucleotide encoding artificial human antibody CDR-H2 region
atccatcctagtgactctgaaacc

SEQ ID NO: 3639 - DNA, 24 bp, Artificial Sequence
  Synthetic polynucleotide encoding artificial human antibody CDR-H2 region
attagtgggagtggtggtgacaca

SEQ ID NO: 3640 - DNA, 24 bp, Artificial Sequence
  Synthetic polynucleotide encoding artificial human antibody CDR-H2 region
attacctccggtagcacttatcta

SEQ ID NO: 3641 - DNA, 24 bp, Artificial Sequence
  Synthetic polynucleotide encoding artificial human antibody CDR-H2 region
attagtggtagtggtggtagcaca

SEQ ID NO: 3642 - DNA, 21 bp, Artificial Sequence
  Synthetic polynucleotide encoding artificial human antibody CDR-H2 region
atttatggcggtggtagcaca

SEQ ID NO: 3643 - DNA, 24 bp, Artificial Sequence
  Synthetic polynucleotide encoding artificial human antibody CDR-H2 region
atgaaccctagcagtggtaacaga

SEQ ID NO: 3644 - DNA, 24 bp, Artificial Sequence
  Synthetic polynucleotide encoding artificial human antibody CDR-H2 region
attgatcctagtgactcttatacc

SEQ ID NO: 3645 - DNA, 21 bp, Artificial Sequence
  Synthetic polynucleotide encoding artificial human antibody CDR-H2 region
gttactaatactggctccaca

SEQ ID NO: 3646 - DNA, 24 bp, Artificial Sequence
  Synthetic polynucleotide encoding artificial human antibody CDR-H2 region
ataaaggaagatggaagtgacaaa

SEQ ID NO: 3647 - DNA, 24 bp, Artificial Sequence
  Synthetic polynucleotide encoding artificial human antibody CDR-H2 region
ataagaaatgatggaagtgataat

SEQ ID NO: 3648 - DNA, 24 bp, Artificial Sequence
  Synthetic polynucleotide encoding artificial human antibody CDR-H2 region
atttggattagtagcagcaccaca

SEQ ID NO: 3649 - DNA, 21 bp, Artificial Sequence
  Synthetic polynucleotide encoding artificial human antibody CDR-H2 region
atctataacgatggtggcaca

SEQ ID NO: 3650 - DNA, 24 bp, Artificial Sequence
  Synthetic polynucleotide encoding artificial human antibody CDR-H2 region
gtgagtggtagtggtggtagtaca

SEQ ID NO: 3651 - DNA, 30 bp, Artificial Sequence
  Synthetic polynucleotide encoding artificial human antibody CDR-H2 region
attagaagcaaagctaacagttacgcgaca

SEQ ID NO: 3652 - DNA, 21 bp, Artificial Sequence
  Synthetic polynucleotide encoding artificial human antibody CDR-H2 region
acgttttatactgggaatacc

SEQ ID NO: 3653 - DNA, 21 bp, Artificial Sequence
  Synthetic polynucleotide encoding artificial human antibody CDR-H2 region
atctcttacactgcgggcacc

SEQ ID NO: 3654 - DNA, 27 bp, Artificial Sequence
  Synthetic polynucleotide encoding artificial human antibody CDR-H2 region
atcagaactactcgtgaaagcggcaca

SEQ ID NO: 3655 - DNA, 30 bp, Artificial Sequence
  Synthetic polynucleotide encoding artificial human antibody CDR-H2 region
attaaaaagaagagtgatggttcgacaatt

SEQ ID NO: 3656 - DNA, 21 bp, Artificial Sequence
  Synthetic polynucleotide encoding artificial human antibody CDR-H2 region
atctttcatagtgggaccacc

SEQ ID NO: 3657 - DNA, 24 bp, Artificial Sequence
  Synthetic polynucleotide encoding artificial human antibody CDR-H2 region
ataaagtatgatggaagtgtccaa

SEQ ID NO: 3658 - DNA, 24 bp, Artificial Sequence
  Synthetic polynucleotide encoding artificial human antibody CDR-H2 region
atctatcccagtgactctgatacc

SEQ ID NO: 3659 - DNA, 24 bp, Artificial Sequence
  Synthetic polynucleotide encoding artificial human antibody CDR-H2 region
atcgaccctaggagtgacgccacg

SEQ ID NO: 3660 - DNA, 24 bp, Artificial Sequence
  Synthetic polynucleotide encoding artificial human antibody CDR-H2 region
atcagcgcttacaatggaaacaca

SEQ ID NO: 3661 - DNA, 24 bp, Artificial Sequence
  Synthetic polynucleotide encoding artificial human antibody CDR-H2 region
atcagttatagtagtaatcagata

SEQ ID NO: 3662 - DNA, 24 bp, Artificial Sequence
  Synthetic polynucleotide encoding artificial human antibody CDR-H2 region
attagtagtagtgggggcaccaca

SEQ ID NO: 3663 - DNA, 21 bp, Artificial Sequence
  Synthetic polynucleotide encoding artificial human antibody CDR-H2 region
atctatcatagtgggagcacc

SEQ ID NO: 3664 - DNA, 24 bp, Artificial Sequence
  Synthetic polynucleotide encoding artificial human antibody CDR-H2 region
acttcatatgatggaaccattaaa

SEQ ID NO: 3665 - DNA, 24 bp, Artificial Sequence
  Synthetic polynucleotide encoding artificial human antibody CDR-H2 region
attagtcctagtgctgttagcaca

SEQ ID NO: 3666 - DNA, 24 bp, Artificial Sequence
  Synthetic polynucleotide encoding artificial human antibody CDR-H2 region
attgatcctaatgactctaaaacc

SEQ ID NO: 3667 - DNA, 21 bp, Artificial Sequence
  Synthetic polynucleotide encoding artificial human antibody CDR-H2 region
atctataacagtgggaacacc

SEQ ID NO: 3668 - DNA, 30 bp, Artificial Sequence
  Synthetic polynucleotide encoding artificial human antibody CDR-H2 region
attaaaagagaagatgatggtgggacaata

SEQ ID NO: 3669 - DNA, 24 bp, Artificial Sequence
  Synthetic polynucleotide encoding artificial human antibody CDR-H2 region
aacatccctatgtacggtacagga

SEQ ID NO: 3670 - DNA, 21 bp, Artificial Sequence
  Synthetic polynucleotide encoding artificial human antibody CDR-H2 region
atctattatagtgggagcacc

SEQ ID NO: 3671 - DNA, 21 bp, Artificial Sequence
  Synthetic polynucleotide encoding artificial human antibody CDR-H2 region
tttagtcgtgatggtaccgtg

SEQ ID NO: 3672 - DNA, 21 bp, Artificial Sequence
  Synthetic polynucleotide encoding artificial human antibody CDR-H2 region
attgattgggataatgaaaag

SEQ ID NO: 3673 - DNA, 24 bp, Artificial Sequence
  Synthetic polynucleotide encoding artificial human antibody CDR-H2 region
atcatccctatctttggtacagca

SEQ ID NO: 3674 - DNA, 24 bp, Artificial Sequence
  Synthetic polynucleotide encoding artificial human antibody CDR-H2 region
atatggtatgatggaagtaacaaa

SEQ ID NO: 3675 - DNA, 24 bp, Artificial Sequence
  Synthetic polynucleotide encoding artificial human antibody CDR-H2 region
attggtgggggtggtgatgacaaa

SEQ ID NO: 3676 - DNA, 30 bp, Artificial Sequence; identical to SEQ ID NO: 2797
  Synthetic polynucleotide encoding artificial human antibody CDR-H2 region

SEQ ID NO: 3677 - DNA, 21 bp, Artificial Sequence
  Synthetic polynucleotide encoding artificial human antibody CDR-H2 region
ctttatagcgatggttccacc

SEQ ID NO: 3678 - DNA, 21 bp, Artificial Sequence
  Synthetic polynucleotide encoding artificial human antibody CDR-H2 region
atttatagcgatggcagcaca

SEQ ID NO: 3679 - DNA, 24 bp, Artificial Sequence
  Synthetic polynucleotide encoding artificial human antibody CDR-H2 region
atctgtcctgggacctctgatccc

SEQ ID NO: 3680 - DNA, 24 bp, Artificial Sequence
  Synthetic polynucleotide encoding artificial human antibody CDR-H2 region
attgatggtgttactggtcattta

SEQ ID NO: 3681 - DNA, 24 bp, Artificial Sequence
  Synthetic polynucleotide encoding artificial human antibody CDR-H2 region
gttagtggtaatggtgacaacacc

SEQ ID NO: 3682 - DNA, 24 bp, Artificial Sequence
  Synthetic polynucleotide encoding artificial human antibody CDR-H2 region
attagtagtactagtatttacata

SEQ ID NO: 3683 - DNA, 21 bp, Artificial Sequence
  Synthetic polynucleotide encoding artificial human antibody CDR-H2 region
atctattacagtgggagcacc

SEQ ID NO: 3684 - DNA, 27 bp, Artificial Sequence
  Synthetic polynucleotide encoding artificial human antibody CDR-H2 region
tttactggttccagtgctggtaccaca

SEQ ID NO: 3685 - DNA, 24 bp, Artificial Sequence
  Synthetic polynucleotide encoding artificial human antibody CDR-H2 region
ataaagggagatggaagcgacagc

SEQ ID NO: 3686 - DNA, 21 bp, Artificial Sequence
  Synthetic polynucleotide encoding artificial human antibody CDR-H2 region
atgtatagcgacgggagcaca

SEQ ID NO: 3687 - DNA, 24 bp, Artificial Sequence
  Synthetic polynucleotide encoding artificial human antibody CDR-H2 region
attagtggtggtggtgataggaca

SEQ ID NO: 3688 - DNA, 24 bp, Artificial Sequence
  Synthetic polynucleotide encoding artificial human antibody CDR-H2 region
attagtcatactggacatgagaca

SEQ ID NO: 3689 - DNA, 21 bp, Artificial Sequence
  Synthetic polynucleotide encoding artificial human antibody CDR-H2 region
atgtattacactgggagcacc

SEQ ID NO: 3690 - DNA, 24 bp, Artificial Sequence
  Synthetic polynucleotide encoding artificial human antibody CDR-H2 region
gtcaaccctaacaatggtgacaca

SEQ ID NO: 3691 - DNA, 21 bp, Artificial Sequence
  Synthetic polynucleotide encoding artificial human antibody CDR-H2 region
atctaccatagtgggaccacc

SEQ ID NO: 3692 - DNA, 21 bp, Artificial Sequence
  Synthetic polynucleotide encoding artificial human antibody CDR-H2 region
attggtactgctggtgacaca

SEQ ID NO: 3693 - DNA, 24 bp, Artificial Sequence
  Synthetic polynucleotide encoding artificial human antibody CDR-H2 region
attagtgatgatgggattatcaca

SEQ ID NO: 3694 - DNA, 21 bp, Artificial Sequence
  Synthetic polynucleotide encoding artificial human antibody CDR-H2 region
atgtacatcgatggtaggaca

SEQ ID NO: 3695 - DNA, 21 bp, Artificial Sequence
  Synthetic polynucleotide encoding artificial human antibody CDR-H2 region
atctattacagtgggagcacc

SEQ ID NO: 3696 - DNA, 24 bp, Artificial Sequence
  Synthetic polynucleotide encoding artificial human antibody CDR-H2 region
atcagcggttacaatggtaacaca

SEQ ID NO: 3697 - DNA, 21 bp, Artificial Sequence
  Synthetic polynucleotide encoding artificial human antibody CDR-H2 region
atctattacagcgggaagacc

SEQ ID NO: 3698 - DNA, 21 bp, Artificial Sequence
  Synthetic polynucleotide encoding artificial human antibody CDR-H2 region
atctattatagtgggagcacc

SEQ ID NO: 3699 - DNA, 24 bp, Artificial Sequence
  Synthetic polynucleotide encoding artificial human antibody CDR-H2 region
atcatccccagcgctcacacagaa

SEQ ID NO: 3700 - DNA, 24 bp, Artificial Sequence
  Synthetic polynucleotide encoding artificial human antibody CDR-H2 region
attagtgatagtggttataataca

SEQ ID NO: 3701 - DNA, 24 bp, Artificial Sequence
  Synthetic polynucleotide encoding artificial human antibody CDR-H2 region
ttgtcatatgatggaatcaataaa

SEQ ID NO: 3702 - DNA, 24 bp, Artificial Sequence
  Synthetic polynucleotide encoding artificial human antibody CDR-H2 region
atctcatctgatggaagcaataaa

SEQ ID NO: 3703 - DNA, 24 bp, Artificial Sequence
  Synthetic polynucleotide encoding artificial human antibody CDR-H2 region
attaatcctaagagtggtggcgca

SEQ ID NO: 3704 - DNA, 24 bp, Artificial Sequence
  Synthetic polynucleotide encoding artificial human antibody CDR-H2 region
attaatagtgatgggagtagcaca

SEQ ID NO: 3705 - DNA, 24 bp, Artificial Sequence
  Synthetic polynucleotide encoding artificial human antibody CDR-H2 region
atcaacaccaacactgggaaccca

SEQ ID NO: 3706 - DNA, 24 bp, Artificial Sequence
  Synthetic polynucleotide encoding artificial human antibody CDR-H2 region
tttgatcttgaagaaggtgtgaca

SEQ ID NO: 3707 - DNA, 24 bp, Artificial Sequence
  Synthetic polynucleotide encoding artificial human antibody CDR-H2 region
gtgaggcctaccactggtgacact

SEQ ID NO: 3708 - DNA, 24 bp, Artificial Sequence
  Synthetic polynucleotide encoding artificial human antibody CDR-H2 region
atatcatatgatggaagtaataaa

SEQ ID NO: 3709 - DNA, 30 bp, Artificial Sequence; identical to SEQ ID NO: 2830
  Synthetic polynucleotide encoding artificial human antibody CDR-H2 region

SEQ ID NO: 3710 - DNA, 24 bp, Artificial Sequence
  Synthetic polynucleotide encoding artificial human antibody CDR-H2 region
attgatagtgtaggtcgaagaaca

SEQ ID NO: 3711 - DNA, 21 bp, Artificial Sequence
  Synthetic polynucleotide encoding artificial human antibody CDR-H2 region
atccactacggtggggccaca

SEQ ID NO: 3712 - DNA, 24 bp, Artificial Sequence
  Synthetic polynucleotide encoding artificial human antibody CDR-H2 region
atcaatcctggtgttggtagcaca

SEQ ID NO: 3713 - DNA, 30 bp, Artificial Sequence
  Synthetic polynucleotide encoding artificial human antibody CDR-H2 region
ctcaaaaggaaggttgatggtgggacaaca

SEQ ID NO: 3714 - DNA, 21 bp, Artificial Sequence
  Synthetic polynucleotide encoding artificial human antibody CDR-H2 region
atctattatactgggagcacc

SEQ ID NO: 3715 - DNA, 24 bp, Artificial Sequence
  Synthetic polynucleotide encoding artificial human antibody CDR-H2 region
atatcacaggatggaagtcatgag

SEQ ID NO: 3716 - DNA, 24 bp, Artificial Sequence
  Synthetic polynucleotide encoding artificial human antibody CDR-H2 region
atgtcatatgatggaagtaataaa

SEQ ID NO: 3717 - DNA, 30 bp, Artificial Sequence
  Synthetic polynucleotide encoding artificial human antibody CDR-H2 region
attagaagcaaggctaatacttacgcgaca

SEQ ID NO: 3718 - DNA, 21 bp, Artificial Sequence
  Synthetic polynucleotide encoding artificial human antibody CDR-H2 region
atttatagcgatgggagcaca

SEQ ID NO: 3719 - DNA, 24 bp, Artificial Sequence
  Synthetic polynucleotide encoding artificial human antibody CDR-H2 region
atcaaccccagcactgggatccca

SEQ ID NO: 3720 - DNA, 21 bp, Artificial Sequence
  Synthetic polynucleotide encoding artificial human antibody CDR-H2 region
attgattgggatgatgataaa

SEQ ID NO: 3721 - DNA, 24 bp, Artificial Sequence
  Synthetic polynucleotide encoding artificial human antibody CDR-H2 region
atcagtaagaatggggataacaca

SEQ ID NO: 3722 - DNA, 24 bp, Artificial Sequence
  Synthetic polynucleotide encoding artificial human antibody CDR-H2 region
atccagcctggtggagatgacaca

SEQ ID NO: 3723 - DNA, 21 bp, Artificial Sequence
  Synthetic polynucleotide encoding artificial human antibody CDR-H2 region
atctattatagtgggcgcacc

SEQ ID NO: 3724 - DNA, 24 bp, Artificial Sequence
  Synthetic polynucleotide encoding artificial human antibody CDR-H2 region
attagtggtagtggtggtagcaca

SEQ ID NO: 3725 - DNA, 24 bp, Artificial Sequence
  Synthetic polynucleotide encoding artificial human antibody CDR-H2 region
atatcatatgatggaagtaataaa

SEQ ID NO: 3726 - DNA, 21 bp, Artificial Sequence
  Synthetic polynucleotide encoding artificial human antibody CDR-H2 region
atctattacagtgggagcacc

SEQ ID NO: 3727 - DNA, 24 bp, Artificial Sequence
  Synthetic polynucleotide encoding artificial human antibody CDR-H2 region
atcactagtagtgggagtggaaca

SEQ ID NO: 3728 - DNA, 24 bp, Artificial Sequence
  Synthetic polynucleotide encoding artificial human antibody CDR-H2 region
atcaatcctagtggtggtagcaca

SEQ ID NO: 3729 - DNA, 24 bp, Artificial Sequence
  Synthetic polynucleotide encoding artificial human antibody CDR-H2 region
attagttgggatagtggctcaatt

SEQ ID NO: 3730 - DNA, 24 bp, Artificial Sequence
  Synthetic polynucleotide encoding artificial human antibody CDR-H2 region
attagtggtagtggtggtcgcaca

SEQ ID NO: 3731 - DNA, 24 bp, Artificial Sequence
  Synthetic polynucleotide encoding artificial human antibody CDR-H2 region
atttcttcgaatagtcttaatata

SEQ ID NO: 3732 - DNA, 21 bp, Artificial Sequence
  Synthetic polynucleotide encoding artificial human antibody CDR-H2 region
atgtattatagtgggagcacc

SEQ ID NO: 3733 - DNA, 24 bp, Artificial Sequence
  Synthetic polynucleotide encoding artificial human antibody CDR-H2 region
atatggtatgatggagtcactaag

SEQ ID NO: 3734 - DNA, 24 bp, Artificial Sequence
  Synthetic polynucleotide encoding artificial human antibody CDR-H2 region
atcggcagtagtagtagtgacaca

SEQ ID NO: 3735 - DNA, 24 bp, Artificial Sequence
  Synthetic polynucleotide encoding artificial human antibody CDR-H2 region
tttaacactggtgggactgtcaca

SEQ ID NO: 3736 - DNA, 24 bp, Artificial Sequence
  Synthetic polynucleotide encoding artificial human antibody CDR-H2 region
attagtcctagcgctggtgcctca

SEQ ID NO: 3737 - DNA, 21 bp, Artificial Sequence
  Synthetic polynucleotide encoding artificial human antibody CDR-H2 region
attgattgggatgatgataaa

SEQ ID NO: 3738 - DNA, 24 bp, Artificial Sequence
  Synthetic polynucleotide encoding artificial human antibody CDR-H2 region
attagtagtagtagtagttacata

SEQ ID NO: 3739 - DNA, 24 bp, Artificial Sequence
  Synthetic polynucleotide encoding artificial human antibody CDR-H2 region
atcaaccctaacagtggtggcaca

SEQ ID NO: 3740 - DNA, 24 bp, Artificial Sequence
  Synthetic polynucleotide encoding artificial human antibody CDR-H2 region
attagtggtagtggtggtagcaca

SEQ ID NO: 3741 - DNA, 21 bp, Artificial Sequence
  Synthetic polynucleotide encoding artificial human antibody CDR-H2 region
atcttttacactgggagcgcc

SEQ ID NO: 3742 - DNA, 21 bp, Artificial Sequence
  Synthetic polynucleotide encoding artificial human antibody CDR-H2 region
atctatcatagtgggaccacc

SEQ ID NO: 3743 - DNA, 21 bp, Artificial Sequence
  Synthetic polynucleotide encoding artificial human antibody CDR-H2 region
atcgtatacagtgggaacacc

SEQ ID NO: 3744 - DNA, 24 bp, Artificial Sequence
  Synthetic polynucleotide encoding artificial human antibody CDR-H2 region
attagtcatgatggtgttcagacg

SEQ ID NO: 3745 - DNA, 24 bp, Artificial Sequence
  Synthetic polynucleotide encoding artificial human antibody CDR-H2 region
atccagccttctgctgggaagaca

SEQ ID NO: 3746 - DNA, 24 bp, Artificial Sequence
  Synthetic polynucleotide encoding artificial human antibody CDR-H2 region
atcatccctatctttggtacagca

SEQ ID NO: 3747 - DNA, 24 bp, Artificial Sequence
  Synthetic polynucleotide encoding artificial human antibody CDR-H2 region
attgatagagatgggagtacgaca

SEQ ID NO: 3748 - DNA, 24 bp, Artificial Sequence
  Synthetic polynucleotide encoding artificial human antibody CDR-H2 region
attagtagtagtggtagtaccata

SEQ ID NO: 3749 - DNA, 24 bp, Artificial Sequence
  Synthetic polynucleotide encoding artificial human antibody CDR-H2 region
atatcatatgatggaagcaataaa

SEQ ID NO: 3750 - DNA, 30 bp, Artificial Sequence; identical to SEQ ID NO: 2797
  Synthetic polynucleotide encoding artificial human antibody CDR-H2 region

SEQ ID NO: 3751 - DNA, 9 bp, Artificial Sequence
  Synthetic polynucleotide encoding artificial human antibody CDR-L2 region
agtaataat

SEQ ID NO: 3752 - DNA, 9 bp, Artificial Sequence
  Synthetic polynucleotide encoding artificial human antibody CDR-L2 region
ggtgcatcc

SEQ ID NO: 3753 - DNA, 9 bp, Artificial Sequence
  Synthetic polynucleotide encoding artificial human antibody CDR-L2 region
gatgcctcc

SEQ ID NO: 3754 - DNA, 9 bp, Artificial Sequence
  Synthetic polynucleotide encoding artificial human antibody CDR-L2 region
actgcatcc

SEQ ID NO: 3755 - DNA, 9 bp, Artificial Sequence
  Synthetic polynucleotide encoding artificial human antibody CDR-L2 region
gatgcctcc

SEQ ID NO: 3756 - DNA, 9 bp, Artificial Sequence
  Synthetic polynucleotide encoding artificial human antibody CDR-L2 region
actgcatcc

SEQ ID NO: 3757 - DNA, 9 bp, Artificial Sequence
  Synthetic polynucleotide encoding artificial human antibody CDR-L2 region
gatgcctcc

SEQ ID NO: 3758 - DNA, 9 bp, Artificial Sequence
  Synthetic polynucleotide encoding artificial human antibody CDR-L2 region
agtaataat

SEQ ID NO: 3759 - DNA, 9 bp, Artificial Sequence
  Synthetic polynucleotide encoding artificial human antibody CDR-L2 region
gatgcatcc

SEQ ID NO: 3760 - DNA, 9 bp, Artificial Sequence
  Synthetic polynucleotide encoding artificial human antibody CDR-L2 region
gatgcatcc

SEQ ID NO: 3761 - DNA, 9 bp, Artificial Sequence
  Synthetic polynucleotide encoding artificial human antibody CDR-L2 region
gatgtcact

SEQ ID NO: 3762 - DNA, 9 bp, Artificial Sequence
  Synthetic polynucleotide encoding artificial human antibody CDR-L2 region
gatgtcact

SEQ ID NO: 3763 - DNA, 9 bp, Artificial Sequence
  Synthetic polynucleotide encoding artificial human antibody CDR-L2 region
ttgggttct

SEQ ID NO: 3764 - DNA, 9 bp, Artificial Sequence
  Synthetic polynucleotide encoding artificial human antibody CDR-L2 region
aaggtttct

SEQ ID NO: 3765 - DNA, 9 bp, Artificial Sequence
  Synthetic polynucleotide encoding artificial human antibody CDR-L2 region
gctgcatcc

SEQ ID NO: 3766 - DNA, 9 bp, Artificial Sequence
  Synthetic polynucleotide encoding artificial human antibody CDR-L2 region
gatgcatcc

SEQ ID NO: 3767 - DNA, 9 bp, Artificial Sequence
  Synthetic polynucleotide encoding artificial human antibody CDR-L2 region
gatgtcact

SEQ ID NO: 3768 - DNA, 21 bp, Artificial Sequence
  Synthetic polynucleotide encoding artificial human antibody CDR-L2 region
cttgaaggtagtggaacctac

SEQ ID NO: 3769 - DNA, 9 bp, Artificial Sequence
  Synthetic polynucleotide encoding artificial human antibody CDR-L2 region
gaagacagc

SEQ ID NO: 3770 - DNA, 9 bp, Artificial Sequence
  Synthetic polynucleotide encoding artificial human antibody CDR-L2 region
gatgatagc

SEQ ID NO: 3771 - DNA, 9 bp, Artificial Sequence
  Synthetic polynucleotide encoding artificial human antibody CDR-L2 region
gatgtcaat

SEQ ID NO: 3772 - DNA, 9 bp, Artificial Sequence
  Synthetic polynucleotide encoding artificial human antibody CDR-L2 region
gatgtcagc

SEQ ID NO: 3773 - DNA, 9 bp, Artificial Sequence
  Synthetic polynucleotide encoding artificial human antibody CDR-L2 region
ggtgcatcc

SEQ ID NO: 3774 - DNA, 9 bp, Artificial Sequence
  Synthetic polynucleotide encoding artificial human antibody CDR-L2 region
gatgtcagt

SEQ ID NO: 3775 - DNA, 9 bp, Artificial Sequence
  Synthetic polynucleotide encoding artificial human antibody CDR-L2 region
gaggtcagt

SEQ ID NO: 3776 - DNA, 9 bp, Artificial Sequence
  Synthetic polynucleotide encoding artificial human antibody CDR-L2 region
ggtgcatcc

SEQ ID NO: 3777 - DNA, 9 bp, Artificial Sequence
  Synthetic polynucleotide encoding artificial human antibody CDR-L2 region
cctccatcc

SEQ ID NO: 3778 - DNA, 24 bp, Artificial Sequence
  Synthetic polynucleotide encoding artificial human antibody CDR-L2 region
gtgggcactggtgggattgtggga

SEQ ID NO: 3779 - DNA, 9 bp, Artificial Sequence
  Synthetic polynucleotide encoding artificial human antibody CDR-L2 region
gctgcatcc

SEQ ID NO: 3780 - DNA, 21 bp, Artificial Sequence
  Synthetic polynucleotide encoding artificial human antibody CDR-L2 region
gttaacagtgatggcagccac

SEQ ID NO: 3781 - DNA, 9 bp, Artificial Sequence
  Synthetic polynucleotide encoding artificial human antibody CDR-L2 region
ggtgcatcc

SEQ ID NO: 3782 - DNA, 9 bp, Artificial Sequence
  Synthetic polynucleotide encoding artificial human antibody CDR-L2 region
ggtgcatcc

SEQ ID NO: 3783 - DNA, 9 bp, Artificial Sequence
  Synthetic polynucleotide encoding artificial human antibody CDR-L2 region
gatgcatcc

SEQ ID NO: 3784 - DNA, 9 bp, Artificial Sequence
  Synthetic polynucleotide encoding artificial human antibody CDR-L2 region
gcagacatt

SEQ ID NO: 3785 - DNA, 9 bp, Artificial Sequence
  Synthetic polynucleotide encoding artificial human antibody CDR-L2 region
gcagcatcc

SEQ ID NO: 3786 - DNA, 9 bp, Artificial Sequence
  Synthetic polynucleotide encoding artificial human antibody CDR-L2 region
gatgtctcc

SEQ ID NO: 3787 - DNA, 9 bp, Artificial Sequence
  Synthetic polynucleotide encoding artificial human antibody CDR-L2 region
ggtgcatcc

SEQ ID NO: 3788 - DNA, 9 bp, Artificial Sequence
  Synthetic polynucleotide encoding artificial human antibody CDR-L2 region
gctgcatcc

SEQ ID NO: 3789 - DNA, 9 bp, Artificial Sequence
  Synthetic polynucleotide encoding artificial human antibody CDR-L2 region
tatgatagc

SEQ ID NO: 3790 - DNA, 9 bp, Artificial Sequence
  Synthetic polynucleotide encoding artificial human antibody CDR-L2 region
tgggcatct

SEQ ID NO: 3791 - DNA, 9 bp, Artificial Sequence
  Synthetic polynucleotide encoding artificial human antibody CDR-L2 region
gatgtcagt

SEQ ID NO: 3792 - DNA, 9 bp, Artificial Sequence
  Synthetic polynucleotide encoding artificial human antibody CDR-L2 region
gatgtaagt

SEQ ID NO: 3793 - DNA, 9 bp, Artificial Sequence
  Synthetic polynucleotide encoding artificial human antibody CDR-L2 region
gaggtcact

SEQ ID NO: 3794 - DNA, 9 bp, Artificial Sequence
  Synthetic polynucleotide encoding artificial human antibody CDR-L2 region
ggtgcatcc

SEQ ID NO: 3795 - DNA, 9 bp, Artificial Sequence
  Synthetic polynucleotide encoding artificial human antibody CDR-L2 region
ggtaaaaac

SEQ ID NO: 3796 - DNA, 9 bp, Artificial Sequence
  Synthetic polynucleotide encoding artificial human antibody CDR-L2 region
gaagtttcc

SEQ ID NO: 3797 - DNA, 9 bp, Artificial Sequence
  Synthetic polynucleotide encoding artificial human antibody CDR-L2 region
ggtgcatcc

SEQ ID NO: 3798 - DNA, 9 bp, Artificial Sequence
  Synthetic polynucleotide encoding artificial human antibody CDR-L2 region
ggtgtatcc

SEQ ID NO: 3799 - DNA, 9 bp, Artificial Sequence
  Synthetic polynucleotide encoding artificial human antibody CDR-L2 region
cgtaacaac

SEQ ID NO: 3800 - DNA, 9 bp, Artificial Sequence
  Synthetic polynucleotide encoding artificial human antibody CDR-L2 region
tgggcatct

SEQ ID NO: 3801 - DNA, 9 bp, Artificial Sequence
  Synthetic polynucleotide encoding artificial human antibody CDR-L2 region
gaggtcact

SEQ ID NO: 3802 - DNA, 9 bp, Artificial Sequence
  Synthetic polynucleotide encoding artificial human antibody CDR-L2 region
aggaataat

SEQ ID NO: 3803 - DNA, 9 bp, Artificial Sequence
  Synthetic polynucleotide encoding artificial human antibody CDR-L2 region
agtaataat

SEQ ID NO: 3804 - DNA, 9 bp, Artificial Sequence
  Synthetic polynucleotide encoding artificial human antibody CDR-L2 region
gacaataat

SEQ ID NO: 3805 - DNA, 9 bp, Artificial Sequence
  Synthetic polynucleotide encoding artificial human antibody CDR-L2 region
ggtaaaaac

SEQ ID NO: 3806 - DNA, 9 bp, Artificial Sequence
  Synthetic polynucleotide encoding artificial human antibody CDR-L2 region
ggtacatcc

SEQ ID NO: 3807 - DNA, 9 bp, Artificial Sequence
  Synthetic polynucleotide encoding artificial human antibody CDR-L2 region
gctgcatcc

SEQ ID NO: 3808 - DNA, 9 bp, Artificial Sequence
  Synthetic polynucleotide encoding artificial human antibody CDR-L2 region
aaagacagt

SEQ ID NO: 3809 - DNA, 9 bp, Artificial Sequence
  Synthetic polynucleotide encoding artificial human antibody CDR-L2 region
gaagtttcc

SEQ ID NO: 3810 - DNA, 9 bp, Artificial Sequence
  Synthetic polynucleotide encoding artificial human antibody CDR-L2 region
gctgcatcc

SEQ ID NO: 3811 - DNA, 9 bp, Artificial Sequence
  Synthetic polynucleotide encoding artificial human antibody CDR-L2 region
caagatagc

SEQ ID NO: 3812 - DNA, 9 bp, Artificial Sequence
  Synthetic polynucleotide encoding artificial human antibody CDR-L2 region
gaggacagc

SEQ ID NO: 3813 - DNA, 9 bp, Artificial Sequence
  Synthetic polynucleotide encoding artificial human antibody CDR-L2 region
ttgggttct

SEQ ID NO: 3814 - DNA, 9 bp, Artificial Sequence
  Synthetic polynucleotide encoding artificial human antibody CDR-L2 region
acgctttcc

SEQ ID NO: 3815 - DNA, 9 bp, Artificial Sequence
  Synthetic polynucleotide encoding artificial human antibody CDR-L2 region
ttgggttct

SEQ ID NO: 3816 - DNA, 9 bp, Artificial Sequence
  Synthetic polynucleotide encoding artificial human antibody CDR-L2 region
gatgtcaat

SEQ ID NO: 3817 - DNA, 9 bp, Artificial Sequence
  Synthetic polynucleotide encoding artificial human antibody CDR-L2 region
ggtgcatcc

SEQ ID NO: 3818 - DNA, 9 bp, Artificial Sequence
  Synthetic polynucleotide encoding artificial human antibody CDR-L2 region
aggaatcac

SEQ ID NO: 3819 - DNA, 9 bp, Artificial Sequence
  Synthetic polynucleotide encoding artificial human antibody CDR-L2 region
tgggcatct

SEQ ID NO: 3820 - DNA, 9 bp, Artificial Sequence
  Synthetic polynucleotide encoding artificial human antibody CDR-L2 region
ggtgcatcc

SEQ ID NO: 3821 - DNA, 9 bp, Artificial Sequence
  Synthetic polynucleotide encoding artificial human antibody CDR-L2 region
agtgataat

SEQ ID NO: 3822 - DNA, 9 bp, Artificial Sequence
  Synthetic polynucleotide encoding artificial human antibody CDR-L2 region
ggtgcatcg

SEQ ID NO: 3823 - DNA, 9 bp, Artificial Sequence
  Synthetic polynucleotide encoding artificial human antibody CDR-L2 region
gaggtcagt

SEQ ID NO: 3824 - DNA, 9 bp, Artificial Sequence
  Synthetic polynucleotide encoding artificial human antibody CDR-L2 region
aggaataat

SEQ ID NO: 3825 - DNA, 9 bp, Artificial Sequence
  Synthetic polynucleotide encoding artificial human antibody CDR-L2 region
gatgcatcc

SEQ ID NO: 3826 - DNA, 9 bp, Artificial Sequence
  Synthetic polynucleotide encoding artificial human antibody CDR-L2 region
gatacaagc

SEQ ID NO: 3827 - DNA, 9 bp, Artificial Sequence
  Synthetic polynucleotide encoding artificial human antibody CDR-L2 region
gatgtctcc

SEQ ID NO: 3828 - DNA, 9 bp, Artificial Sequence
  Synthetic polynucleotide encoding artificial human antibody CDR-L2 region
ttgggttct

SEQ ID NO: 3829 - DNA, 21 bp, Artificial Sequence
  Synthetic polynucleotide encoding artificial human antibody CDR-L2 region
cttaacagtgatggcagccac

SEQ ID NO: 3830 - DNA, 9 bp, Artificial Sequence
  Synthetic polynucleotide encoding artificial human antibody CDR-L2 region
gctgcatcc

SEQ ID NO: 3831 - DNA, 9 bp, Artificial Sequence
  Synthetic polynucleotide encoding artificial human antibody CDR-L2 region
ttgggttct

SEQ ID NO: 3832 - DNA, 9 bp, Artificial Sequence
  Synthetic polynucleotide encoding artificial human antibody CDR-L2 region
gctgcatcc

SEQ ID NO: 3833 - DNA, 9 bp, Artificial Sequence
  Synthetic polynucleotide encoding artificial human antibody CDR-L2 region
aaggcgtct

SEQ ID NO: 3834 - DNA, 9 bp, Artificial Sequence
  Synthetic polynucleotide encoding artificial human antibody CDR-L2 region
gctgcatcc

SEQ ID NO: 3835 - DNA, 9 bp, Artificial Sequence
  Synthetic polynucleotide encoding artificial human antibody CDR-L2 region
ttgggttct

SEQ ID NO: 3836 - DNA, 9 bp, Artificial Sequence
  Synthetic polynucleotide encoding artificial human antibody CDR-L2 region
gatgcatcc

SEQ ID NO: 3837 - DNA, 9 bp, Artificial Sequence
  Synthetic polynucleotide encoding artificial human antibody CDR-L2 region
gatgtaagt

SEQ ID NO: 3838 - DNA, 9 bp, Artificial Sequence
  Synthetic polynucleotide encoding artificial human antibody CDR-L2 region
aaagacagt

SEQ ID NO: 3839 - DNA, 9 bp, Artificial Sequence
  Synthetic polynucleotide encoding artificial human antibody CDR-L2 region
aaggtttct

SEQ ID NO: 3840 - DNA, 9 bp, Artificial Sequence
  Synthetic polynucleotide encoding artificial human antibody CDR-L2 region
tatgatagc

SEQ ID NO: 3841 - DNA, 9 bp, Artificial Sequence
  Synthetic polynucleotide encoding artificial human antibody CDR-L2 region
gctgcatcc

SEQ ID NO: 3842 - DNA, 9 bp, Artificial Sequence
  Synthetic polynucleotide encoding artificial human antibody CDR-L2 region
gaggtcagt

SEQ ID NO: 3843 - DNA, 9 bp, Artificial Sequence
  Synthetic polynucleotide encoding artificial human antibody CDR-L2 region
aagatttct

SEQ ID NO: 3844 - DNA, 9 bp, Artificial Sequence
  Synthetic polynucleotide encoding artificial human antibody CDR-L2 region
gctgcatcc

SEQ ID NO: 3845 - DNA, 9 bp, Artificial Sequence
  Synthetic polynucleotide encoding artificial human antibody CDR-L2 region
gctgcatcc

SEQ ID NO: 3846 - DNA, 9 bp, Artificial Sequence
  Synthetic polynucleotide encoding artificial human antibody CDR-L2 region
tgggcatct

SEQ ID NO: 3847 - DNA, 9 bp, Artificial Sequence
  Synthetic polynucleotide encoding artificial human antibody CDR-L2 region
gatgcatcc

SEQ ID NO: 3848 - DNA, 9 bp, Artificial Sequence
  Synthetic polynucleotide encoding artificial human antibody CDR-L2 region
ggtgcatcc

SEQ ID NO: 3849 - DNA, 9 bp, Artificial Sequence
  Synthetic polynucleotide encoding artificial human antibody CDR-L2 region
ggtgcatcc

SEQ ID NO: 3850 - DNA, 9 bp, Artificial Sequence
  Synthetic polynucleotide encoding artificial human antibody CDR-L2 region
ttggggtcc

SEQ ID NO: 3851 - DNA, 9 bp, Artificial Sequence
  Synthetic polynucleotide encoding artificial human antibody CDR-L2 region
aggaataat

SEQ ID NO: 3852 - DNA, 9 bp, Artificial Sequence
  Synthetic polynucleotide encoding artificial human antibody CDR-L2 region
gatgtcagt

SEQ ID NO: 3853 - DNA, 9 bp, Artificial Sequence
  Synthetic polynucleotide encoding artificial human antibody CDR-L2 region
gctacatcc

SEQ ID NO: 3854 - DNA, 9 bp, Artificial Sequence
  Synthetic polynucleotide encoding artificial human antibody CDR-L2 region
gctgcatcc

SEQ ID NO: 3855 - DNA, 9 bp, Artificial Sequence
  Synthetic polynucleotide encoding artificial human antibody CDR-L2 region
ggtgcaacc

SEQ ID NO: 3856 - DNA, 9 bp, Artificial Sequence
  Synthetic polynucleotide encoding artificial human antibody CDR-L2 region
gatgtcagt

SEQ ID NO: 3857 - DNA, 9 bp, Artificial Sequence
  Synthetic polynucleotide encoding artificial human antibody CDR-L2 region
gatgcatcc

SEQ ID NO: 3858 - DNA, 9 bp, Artificial Sequence
  Synthetic polynucleotide encoding artificial human antibody CDR-L2 region
gctgcatcc

SEQ ID NO: 3859 - DNA, 9 bp, Artificial Sequence
  Synthetic polynucleotide encoding artificial human antibody CDR-L2 region
gatgcatcc

SEQ ID NO: 3860 - DNA, 9 bp, Artificial Sequence
  Synthetic polynucleotide encoding artificial human antibody CDR-L2 region
aaggtttct

SEQ ID NO: 3861 - DNA, 9 bp, Artificial Sequence
  Synthetic polynucleotide encoding artificial human antibody CDR-L2 region
ggtaaaaac

SEQ ID NO: 3862 - DNA, 9 bp, Artificial Sequence
  Synthetic polynucleotide encoding artificial human antibody CDR-L2 region
gatgtcagt

SEQ ID NO: 3863 - DNA, 9 bp, Artificial Sequence
  Synthetic polynucleotide encoding artificial human antibody CDR-L2 region
aaggtttct

SEQ ID NO: 3864 - DNA, 9 bp, Artificial Sequence
  Synthetic polynucleotide encoding artificial human antibody CDR-L2 region
gatgtcaat

SEQ ID NO: 3865 - DNA, 9 bp, Artificial Sequence
  Synthetic polynucleotide encoding artificial human antibody CDR-L2 region
ggtaacaac

SEQ ID NO: 3866 - DNA, 9 bp, Artificial Sequence
  Synthetic polynucleotide encoding artificial human antibody CDR-L2 region
gctgcatcc

SEQ ID NO: 3867 - DNA, 9 bp, Artificial Sequence
  Synthetic polynucleotide encoding artificial human antibody CDR-L2 region
gacaattat

SEQ ID NO: 3868 - DNA, 9 bp, Artificial Sequence
  Synthetic polynucleotide encoding artificial human antibody CDR-L2 region
gaggtcact

SEQ ID NO: 3869 - DNA, 9 bp, Artificial Sequence
  Synthetic polynucleotide encoding artificial human antibody CDR-L2 region
aaggcgtct

SEQ ID NO: 3870 - DNA, 9 bp, Artificial Sequence
  Synthetic polynucleotide encoding artificial human antibody CDR-L2 region
gacacatcc

SEQ ID NO: 3871 - DNA, 9 bp, Artificial Sequence
  Synthetic polynucleotide encoding artificial human antibody CDR-L2 region
gaggtcact

SEQ ID NO: 3872 - DNA, 9 bp, Artificial Sequence
  Synthetic polynucleotide encoding artificial human antibody CDR-L2 region
aaggcatct

SEQ ID NO: 3873 - DNA, 9 bp, Artificial Sequence
  Synthetic polynucleotide encoding artificial human antibody CDR-L2 region
gatgtcagt

SEQ ID NO: 3874 - DNA, 9 bp, Artificial Sequence
  Synthetic polynucleotide encoding artificial human antibody CDR-L2 region
tatactgac

SEQ ID NO: 3875 - DNA, 9 bp, Artificial Sequence
  Synthetic polynucleotide encoding artificial human antibody CDR-L2 region
ggtaacagc

SEQ ID NO: 3876 - DNA, 9 bp, Artificial Sequence
  Synthetic polynucleotide encoding artificial human antibody CDR-L2 region
tgggcatct

SEQ ID NO: 3877 - DNA, 9 bp, Artificial Sequence
  Synthetic polynucleotide encoding artificial human antibody CDR-L2 region
agtaataat

SEQ ID NO: 3878 - DNA, 9 bp, Artificial Sequence
  Synthetic polynucleotide encoding artificial human antibody CDR-L2 region
gaggcatcg

SEQ ID NO: 3879 - DNA, 9 bp, Artificial Sequence
  Synthetic polynucleotide encoding artificial human antibody CDR-L2 region
ggtaaaaac

SEQ ID NO: 3880 - DNA, 9 bp, Artificial Sequence
  Synthetic polynucleotide encoding artificial human antibody CDR-L2 region
acttcttcc

SEQ ID NO: 3881 - DNA, 9 bp, Artificial Sequence
  Synthetic polynucleotide encoding artificial human antibody CDR-L2 region
aaagacagt

SEQ ID NO: 3882 - DNA, 9 bp, Artificial Sequence
  Synthetic polynucleotide encoding artificial human antibody CDR-L2 region
caagatagc

SEQ ID NO: 3883 - DNA, 9 bp, Artificial Sequence
  Synthetic polynucleotide encoding artificial human antibody CDR-L2 region
gacaataat

SEQ ID NO: 3884 - DNA, 9 bp, Artificial Sequence
  Synthetic polynucleotide encoding artificial human antibody CDR-L2 region
ggtaaaaac

SEQ ID NO: 3885 - DNA, 9 bp, Artificial Sequence
  Synthetic polynucleotide encoding artificial human antibody CDR-L2 region
gctgcatcc

SEQ ID NO: 3886 - DNA, 9 bp, Artificial Sequence
  Synthetic polynucleotide encoding artificial human antibody CDR-L2 region
aggaataat

SEQ ID NO: 3887 - DNA, 9 bp, Artificial Sequence
  Synthetic polynucleotide encoding artificial human antibody CDR-L2 region
gatgtcact

SEQ ID NO: 3888 - DNA, 9 bp, Artificial Sequence
  Synthetic polynucleotide encoding artificial human antibody CDR-L2 region
aaagacagt

SEQ ID NO: 3889 - DNA, 9 bp, Artificial Sequence
  Synthetic polynucleotide encoding artificial human antibody CDR-L2 region
ggtaaaaac

SEQ ID NO: 3890 - DNA, 9 bp, Artificial Sequence
  Synthetic polynucleotide encoding artificial human antibody CDR-L2 region
gatgcatcc

SEQ ID NO: 3891 - DNA, 9 bp, Artificial Sequence
  Synthetic polynucleotide encoding artificial human antibody CDR-L2 region
ggtaaaaac

SEQ ID NO: 3892 - DNA, 9 bp, Artificial Sequence
  Synthetic polynucleotide encoding artificial human antibody CDR-L2 region
aaagacagt

SEQ ID NO: 3893 - DNA, 9 bp, Artificial Sequence
  Synthetic polynucleotide encoding artificial human antibody CDR-L2 region
tgggcatct

SEQ ID NO: 3894 - DNA, 9 bp, Artificial Sequence
  Synthetic polynucleotide encoding artificial human antibody CDR-L2 region
agagacact

SEQ ID NO: 3895 - DNA, 9 bp, Artificial Sequence
  Synthetic polynucleotide encoding artificial human antibody CDR-L2 region
tctgcatcc

SEQ ID NO: 3896 - DNA, 9 bp, Artificial Sequence
  Synthetic polynucleotide encoding artificial human antibody CDR-L2 region
cacaatacc

SEQ ID NO: 3897 - DNA, 9 bp, Artificial Sequence
  Synthetic polynucleotide encoding artificial human antibody CDR-L2 region
gatgcatcc

SEQ ID NO: 3898 - DNA, 9 bp, Artificial Sequence
  Synthetic polynucleotide encoding artificial human antibody CDR-L2 region
gaagcatcc

SEQ ID NO: 3899 - DNA, 9 bp, Artificial Sequence
  Synthetic polynucleotide encoding artificial human antibody CDR-L2 region
ggtgcatcc

SEQ ID NO: 3900 - DNA, 9 bp, Artificial Sequence
  Synthetic polynucleotide encoding artificial human antibody CDR-L2 region
ggtaaaaat

SEQ ID NO: 3901 - DNA, 9 bp, Artificial Sequence
  Synthetic polynucleotide encoding artificial human antibody CDR-L2 region
ggtaaaaac

SEQ ID NO: 3902 - DNA, 9 bp, Artificial Sequence
  Synthetic polynucleotide encoding artificial human antibody CDR-L2 region
ggtaaaaac

SEQ ID NO: 3903 - DNA, 9 bp, Artificial Sequence
  Synthetic polynucleotide encoding artificial human antibody CDR-L2 region
agcacaaac

SEQ ID NO: 3904 - DNA, 9 bp, Artificial Sequence
  Synthetic polynucleotide encoding artificial human antibody CDR-L2 region
ggtaaaaac

SEQ ID NO: 3905 - DNA, 9 bp, Artificial Sequence
  Synthetic polynucleotide encoding artificial human antibody CDR-L2 region
tgggcatct

SEQ ID NO: 3906 - DNA, 9 bp, Artificial Sequence
  Synthetic polynucleotide encoding artificial human antibody CDR-L2 region
gatgtcagt

SEQ ID NO: 3907 - DNA, 9 bp, Artificial Sequence
  Synthetic polynucleotide encoding artificial human antibody CDR-L2 region
ggtaacagc

SEQ ID NO: 3908 - DNA, 9 bp, Artificial Sequence
  Synthetic polynucleotide encoding artificial human antibody CDR-L2 region
aaagacagt

SEQ ID NO: 3909 - DNA, 9 bp, Artificial Sequence
  Synthetic polynucleotide encoding artificial human antibody CDR-L2 region
ggtaatacc

SEQ ID NO: 3910 - DNA, 9 bp, Artificial Sequence
  Synthetic polynucleotide encoding artificial human antibody CDR-L2 region
gatgtcagt

SEQ ID NO: 3911 - DNA, 9 bp, Artificial Sequence
  Synthetic polynucleotide encoding artificial human antibody CDR-L2 region
gatgtcagt

SEQ ID NO: 3912 - DNA, 9 bp, Artificial Sequence
  Synthetic polynucleotide encoding artificial human antibody CDR-L2 region
gaagcatct

SEQ ID NO: 3913 - DNA, 9 bp, Artificial Sequence
  Synthetic polynucleotide encoding artificial human antibody CDR-L2 region
gatgcctct

SEQ ID NO: 3914 - DNA, 9 bp, Artificial Sequence
  Synthetic polynucleotide encoding artificial human antibody CDR-L2 region
ttgggttct

SEQ ID NO: 3915 - DNA, 9 bp, Artificial Sequence
  Synthetic polynucleotide encoding artificial human antibody CDR-L2 region
ggtaaaaac

SEQ ID NO: 3916 - DNA, 9 bp, Artificial Sequence
  Synthetic polynucleotide encoding artificial human antibody CDR-L2 region
caagatacc

SEQ ID NO: 3917 - DNA, 9 bp, Artificial Sequence
  Synthetic polynucleotide encoding artificial human antibody CDR-L2 region
ggtaaaaac

SEQ ID NO: 3918 - DNA, 9 bp, Artificial Sequence
  Synthetic polynucleotide encoding artificial human antibody CDR-L2 region
ggtaaaaac

SEQ ID NO: 3919 - DNA, 9 bp, Artificial Sequence
  Synthetic polynucleotide encoding artificial human antibody CDR-L2 region
gctgcatcc

SEQ ID NO: 3920 - DNA, 9 bp, Artificial Sequence
  Synthetic polynucleotide encoding artificial human antibody CDR-L2 region
ggtaaaaac

SEQ ID NO: 3921 - DNA, 9 bp, Artificial Sequence
  Synthetic polynucleotide encoding artificial human antibody CDR-L2 region
gaggtcagt

SEQ ID NO: 3922 - DNA, 9 bp, Artificial Sequence
  Synthetic polynucleotide encoding artificial human antibody CDR-L2 region
gaagatagt

SEQ ID NO: 3923 - DNA, 9 bp, Artificial Sequence
  Synthetic polynucleotide encoding artificial human antibody CDR-L2 region
caagatacc

SEQ ID NO: 3924 - DNA, 9 bp, Artificial Sequence
  Synthetic polynucleotide encoding artificial human antibody CDR-L2 region
gacaataat

SEQ ID NO: 3925 - DNA, 9 bp, Artificial Sequence
  Synthetic polynucleotide encoding artificial human antibody CDR-L2 region
gaggtcagt

SEQ ID NO: 3926 - DNA, 9 bp, Artificial Sequence
  Synthetic polynucleotide encoding artificial human antibody CDR-L2 region
ggtgcatcc

SEQ ID NO: 3927 - DNA, 9 bp, Artificial Sequence
  Synthetic polynucleotide encoding artificial human antibody CDR-L2 region
ggtaaaaac

SEQ ID NO: 3928 - DNA, 9 bp, Artificial Sequence
  Synthetic polynucleotide encoding artificial human antibody CDR-L2 region
gctgcatcc

SEQ ID NO: 3929 - DNA, 9 bp, Artificial Sequence
  Synthetic polynucleotide encoding artificial human antibody CDR-L2 region
tgggcatct

SEQ ID NO: 3930 - DNA, 9 bp, Artificial Sequence
  Synthetic polynucleotide encoding artificial human antibody CDR-L2 region
gatgcatcc

SEQ ID NO: 3931 - DNA, 9 bp, Artificial Sequence
  Synthetic polynucleotide encoding artificial human antibody CDR-L2 region
gaagcatcc

SEQ ID NO: 3932 - DNA, 9 bp, Artificial Sequence
  Synthetic polynucleotide encoding artificial human antibody CDR-L2 region
caagataac

SEQ ID NO: 3933 - DNA, 9 bp, Artificial Sequence
  Synthetic polynucleotide encoding artificial human antibody CDR-L2 region
gaggataac

SEQ ID NO: 3934 - DNA, 9 bp, Artificial Sequence
  Synthetic polynucleotide encoding artificial human antibody CDR-L2 region
gacaataat

SEQ ID NO: 3935 - DNA, 9 bp, Artificial Sequence
  Synthetic polynucleotide encoding artificial human antibody CDR-L2 region
gatgtcagt

SEQ ID NO: 3936 - DNA, 9 bp, Artificial Sequence
  Synthetic polynucleotide encoding artificial human antibody CDR-L2 region
gctaacagc

SEQ ID NO: 3937 - DNA, 9 bp, Artificial Sequence
  Synthetic polynucleotide encoding artificial human antibody CDR-L2 region
gatgtcagt

SEQ ID NO: 3938 - DNA, 9 bp, Artificial Sequence
  Synthetic polynucleotide encoding artificial human antibody CDR-L2 region
ggtgcatcc

SEQ ID NO: 3939 - DNA, 9 bp, Artificial Sequence
  Synthetic polynucleotide encoding artificial human antibody CDR-L2 region
aggaataat

SEQ ID NO: 3940 - DNA, 9 bp, Artificial Sequence
  Synthetic polynucleotide encoding artificial human antibody CDR-L2 region
ggtgcatcc

SEQ ID NO: 3941 - DNA, 9 bp, Artificial Sequence
  Synthetic polynucleotide encoding artificial human antibody CDR-L2 region
tgggcatct

SEQ ID NO: 3942 - DNA, 9 bp, Artificial Sequence
  Synthetic polynucleotide encoding artificial human antibody CDR-L2 region
gctgcatcc

SEQ ID NO: 3943 - DNA, 9 bp, Artificial Sequence
  Synthetic polynucleotide encoding artificial human antibody CDR-L2 region
gacaataat

SEQ ID NO: 3944 - DNA, 9 bp, Artificial Sequence
  Synthetic polynucleotide encoding artificial human antibody CDR-L2 region
gatgcatcc

SEQ ID NO: 3945 - DNA, 9 bp, Artificial Sequence
  Synthetic polynucleotide encoding artificial human antibody CDR-L2 region
gctgcatcc

SEQ ID NO: 3946 - DNA, 9 bp, Artificial Sequence
  Synthetic polynucleotide encoding artificial human antibody CDR-L2 region
gacaataat

SEQ ID NO: 3947 - DNA, 9 bp, Artificial Sequence
  Synthetic polynucleotide encoding artificial human antibody CDR-L2 region
tgggcatct

SEQ ID NO: 3948 - DNA, 9 bp, Artificial Sequence
  Synthetic polynucleotide encoding artificial human antibody CDR-L2 region
agtaataat

SEQ ID NO: 3949 - DNA, 9 bp, Artificial Sequence
  Synthetic polynucleotide encoding artificial human antibody CDR-L2 region
actgtcgat

SEQ ID NO: 3950 - DNA, 9 bp, Artificial Sequence
  Synthetic polynucleotide encoding artificial human antibody CDR-L2 region
caagatacg

SEQ ID NO: 3951 - DNA, 9 bp, Artificial Sequence
  Synthetic polynucleotide encoding artificial human antibody CDR-L2 region
aaagacagt

SEQ ID NO: 3952 - DNA, 9 bp, Artificial Sequence
  Synthetic polynucleotide encoding artificial human antibody CDR-L2 region
tgggcatct

SEQ ID NO: 3953 - DNA, 9 bp, Artificial Sequence
  Synthetic polynucleotide encoding artificial human antibody CDR-L2 region
atggcttct

SEQ ID NO: 3954 - DNA, 9 bp, Artificial Sequence
  Synthetic polynucleotide encoding artificial human antibody CDR-L2 region
ggtaaaaac

SEQ ID NO: 3955 - DNA, 9 bp, Artificial Sequence
  Synthetic polynucleotide encoding artificial human antibody CDR-L2 region
gatgtcagt

SEQ ID NO: 3956 - DNA, 9 bp, Artificial Sequence
  Synthetic polynucleotide encoding artificial human antibody CDR-L2 region
aaggtttct

SEQ ID NO: 3957 - DNA, 9 bp, Artificial Sequence
  Synthetic polynucleotide encoding artificial human antibody CDR-L2 region
tatgatagc

SEQ ID NO: 3958 - DNA, 9 bp, Artificial Sequence
  Synthetic polynucleotide encoding artificial human antibody CDR-L2 region
gaaacatcg

SEQ ID NO: 3959 - DNA, 9 bp, Artificial Sequence
  Synthetic polynucleotide encoding artificial human antibody CDR-L2 region
ggtaaaaac

SEQ ID NO: 3960 - DNA, 9 bp, Artificial Sequence
  Synthetic polynucleotide encoding artificial human antibody CDR-L2 region
ttgggttct

SEQ ID NO: 3961 - DNA, 9 bp, Artificial Sequence
  Synthetic polynucleotide encoding artificial human antibody CDR-L2 region
ttgggttct

SEQ ID NO: 3962 - DNA, 9 bp, Artificial Sequence
  Synthetic polynucleotide encoding artificial human antibody CDR-L2 region
ggtgcatcc

SEQ ID NO: 3963 - DNA, 9 bp, Artificial Sequence
  Synthetic polynucleotide encoding artificial human antibody CDR-L2 region
aataataat

SEQ ID NO: 3964 - DNA, 9 bp, Artificial Sequence
  Synthetic polynucleotide encoding artificial human antibody CDR-L2 region
ggtgcatcc

SEQ ID NO: 3965 - DNA, 9 bp, Artificial Sequence
  Synthetic polynucleotide encoding artificial human antibody CDR-L2 region
agcacaaac

SEQ ID NO: 3966 - DNA, 9 bp, Artificial Sequence
  Synthetic polynucleotide encoding artificial human antibody CDR-L2 region
agaaataat

SEQ ID NO: 3967 - DNA, 9 bp, Artificial Sequence
  Synthetic polynucleotide encoding artificial human antibody CDR-L2 region
gaagataag

SEQ ID NO: 3968 - DNA, 9 bp, Artificial Sequence
  Synthetic polynucleotide encoding artificial human antibody CDR-L2 region
gatgtcaat

SEQ ID NO: 3969 - DNA, 9 bp, Artificial Sequence
  Synthetic polynucleotide encoding artificial human antibody CDR-L2 region
aggaataat

SEQ ID NO: 3970 - DNA, 9 bp, Artificial Sequence
  Synthetic polynucleotide encoding artificial human antibody CDR-L2 region
gctgcttct

SEQ ID NO: 3971 - DNA, 9 bp, Artificial Sequence
  Synthetic polynucleotide encoding artificial human antibody CDR-L2 region
ggtaaaaac

SEQ ID NO: 3972 - DNA, 9 bp, Artificial Sequence
  Synthetic polynucleotide encoding artificial human antibody CDR-L2 region
gatgtcaat

SEQ ID NO: 3973 - DNA, 9 bp, Artificial Sequence
  Synthetic polynucleotide encoding artificial human antibody CDR-L2 region
cctgcatcc

SEQ ID NO: 3974 - DNA, 9 bp, Artificial Sequence
  Synthetic polynucleotide encoding artificial human antibody CDR-L2 region
agtaataat

SEQ ID NO: 3975 - DNA, 9 bp, Artificial Sequence
  Synthetic polynucleotide encoding artificial human antibody CDR-L2 region
ggcaacaac

SEQ ID NO: 3976 - DNA, 9 bp, Artificial Sequence
  Synthetic polynucleotide encoding artificial human antibody CDR-L2 region
gatgtttcc

SEQ ID NO: 3977 - DNA, 9 bp, Artificial Sequence
  Synthetic polynucleotide encoding artificial human antibody CDR-L2 region
gatgcatcc

SEQ ID NO: 3978 - DNA, 9 bp, Artificial Sequence
  Synthetic polynucleotide encoding artificial human antibody CDR-L2 region
gctgcatcc

SEQ ID NO: 3979 - DNA, 9 bp, Artificial Sequence
  Synthetic polynucleotide encoding artificial human antibody CDR-L2 region
agcaatagt

SEQ ID NO: 3980 - DNA, 9 bp, Artificial Sequence
  Synthetic polynucleotide encoding artificial human antibody CDR-L2 region
aagatttct

SEQ ID NO: 3981 - DNA, 9 bp, Artificial Sequence
  Synthetic polynucleotide encoding artificial human antibody CDR-L2 region
caagatagt

SEQ ID NO: 3982 - DNA, 9 bp, Artificial Sequence
  Synthetic polynucleotide encoding artificial human antibody CDR-L2 region
ggtaaaaac

SEQ ID NO: 3983 - DNA, 9 bp, Artificial Sequence
  Synthetic polynucleotide encoding artificial human antibody CDR-L2 region
gaagtttcc

SEQ ID NO: 3984 - DNA, 9 bp, Artificial Sequence
  Synthetic polynucleotide encoding artificial human antibody CDR-L2 region
gctgcttcc

SEQ ID NO: 3985 - DNA, 9 bp, Artificial Sequence
  Synthetic polynucleotide encoding artificial human antibody CDR-L2 region
aagatttct

SEQ ID NO: 3986 - DNA, 9 bp, Artificial Sequence
  Synthetic polynucleotide encoding artificial human antibody CDR-L2 region
caagataat

SEQ ID NO: 3987 - DNA, 9 bp, Artificial Sequence
  Synthetic polynucleotide encoding artificial human antibody CDR-L2 region
ggcgcatca

SEQ ID NO: 3988 - DNA, 9 bp, Artificial Sequence
  Synthetic polynucleotide encoding artificial human antibody CDR-L2 region
aaggtttct

SEQ ID NO: 3989 - DNA, 9 bp, Artificial Sequence
  Synthetic polynucleotide encoding artificial human antibody CDR-L2 region
ggcactaat

SEQ ID NO: 3990 - DNA, 9 bp, Artificial Sequence
  Synthetic polynucleotide encoding artificial human antibody CDR-L2 region
gctgcatcc

SEQ ID NO: 3991 - DNA, 9 bp, Artificial Sequence
  Synthetic polynucleotide encoding artificial human antibody CDR-L2 region
ttgggttct

SEQ ID NO: 3992 - DNA, 9 bp, Artificial Sequence
  Synthetic polynucleotide encoding artificial human antibody CDR-L2 region
aggaataat

SEQ ID NO: 3993 - DNA, 9 bp, Artificial Sequence
  Synthetic polynucleotide encoding artificial human antibody CDR-L2 region
gacaataat

SEQ ID NO: 3994 - DNA, 9 bp, Artificial Sequence
  Synthetic polynucleotide encoding artificial human antibody CDR-L2 region
ggtaacagc

SEQ ID NO: 3995 - DNA, 9 bp, Artificial Sequence
  Synthetic polynucleotide encoding artificial human antibody CDR-L2 region
aaggtttct

SEQ ID NO: 3996 - DNA, 9 bp, Artificial Sequence
  Synthetic polynucleotide encoding artificial human antibody CDR-L2 region
aaagacagt

SEQ ID NO: 3997 - DNA, 9 bp, Artificial Sequence
  Synthetic polynucleotide encoding artificial human antibody CDR-L2 region
agtaatgat

SEQ ID NO: 3998 - DNA, 9 bp, Artificial Sequence
  Synthetic polynucleotide encoding artificial human antibody CDR-L2 region
caggattac

SEQ ID NO: 3999 - DNA, 9 bp, Artificial Sequence
  Synthetic polynucleotide encoding artificial human antibody CDR-L2 region
tgggcatct

SEQ ID NO: 4000 - DNA, 9 bp, Artificial Sequence
  Synthetic polynucleotide encoding artificial human antibody CDR-L2 region
gcagcatcc

SEQ ID NO: 4001 - DNA, 9 bp, Artificial Sequence
  Synthetic polynucleotide encoding artificial human antibody CDR-L2 region
gctgcatcc

SEQ ID NO: 4002 - DNA, 9 bp, Artificial Sequence
  Synthetic polynucleotide encoding artificial human antibody CDR-L2 region
aaggcgtct

SEQ ID NO: 4003 - DNA, 9 bp, Artificial Sequence
  Synthetic polynucleotide encoding artificial human antibody CDR-L2 region
gaagtttcc

SEQ ID NO: 4004 - DNA, 9 bp, Artificial Sequence
  Synthetic polynucleotide encoding artificial human antibody CDR-L2 region
ggtgcatcc

SEQ ID NO: 4005 - DNA, 9 bp, Artificial Sequence
  Synthetic polynucleotide encoding artificial human antibody CDR-L2 region
gctgcctcc

SEQ ID NO: 4006 - DNA, 9 bp, Artificial Sequence
  Synthetic polynucleotide encoding artificial human antibody CDR-L2 region
agtaataat

SEQ ID NO: 4007 - DNA, 9 bp, Artificial Sequence
  Synthetic polynucleotide encoding artificial human antibody CDR-L2 region
aaagacact

SEQ ID NO: 4008 - DNA, 9 bp, Artificial Sequence
  Synthetic polynucleotide encoding artificial human antibody CDR-L2 region
actgcatcc

SEQ ID NO: 4009 - DNA, 9 bp, Artificial Sequence
  Synthetic polynucleotide encoding artificial human antibody CDR-L2 region
aaagacagt

SEQ ID NO: 4010 - DNA, 9 bp, Artificial Sequence
  Synthetic polynucleotide encoding artificial human antibody CDR-L2 region
gttaccaac

SEQ ID NO: 4011 - DNA, 9 bp, Artificial Sequence
  Synthetic polynucleotide encoding artificial human antibody CDR-L2 region
ggtgcatcc

SEQ ID NO: 4012 - DNA, 9 bp, Artificial Sequence
  Synthetic polynucleotide encoding artificial human antibody CDR-L2 region
tatgatagt

SEQ ID NO: 4013 - DNA, 9 bp, Artificial Sequence
  Synthetic polynucleotide encoding artificial human antibody CDR-L2 region
gctgcatcc

SEQ ID NO: 4014 - DNA, 9 bp, Artificial Sequence
  Synthetic polynucleotide encoding artificial human antibody CDR-L2 region
gatgtttcc

SEQ ID NO: 4015 - DNA, 9 bp, Artificial Sequence
  Synthetic polynucleotide encoding artificial human antibody CDR-L2 region
ggaggctcc

SEQ ID NO: 4016 - DNA, 9 bp, Artificial Sequence
  Synthetic polynucleotide encoding artificial human antibody CDR-L2 region
aagatttct

SEQ ID NO: 4017 - DNA, 9 bp, Artificial Sequence
  Synthetic polynucleotide encoding artificial human antibody CDR-L2 region
agcacagac

SEQ ID NO: 4018 - DNA, 9 bp, Artificial Sequence
  Synthetic polynucleotide encoding artificial human antibody CDR-L2 region
gaggacaac

SEQ ID NO: 4019 - DNA, 9 bp, Artificial Sequence
  Synthetic polynucleotide encoding artificial human antibody CDR-L2 region
ggtgcatcc

SEQ ID NO: 4020 - DNA, 9 bp, Artificial Sequence
  Synthetic polynucleotide encoding artificial human antibody CDR-L2 region
agagacatt

SEQ ID NO: 4021 - DNA, 9 bp, Artificial Sequence
  Synthetic polynucleotide encoding artificial human antibody CDR-L2 region
gctgcttcc

SEQ ID NO: 4022 - DNA, 9 bp, Artificial Sequence
  Synthetic polynucleotide encoding artificial human antibody CDR-L2 region
gatgtcagt

SEQ ID NO: 4023 - DNA, 9 bp, Artificial Sequence
  Synthetic polynucleotide encoding artificial human antibody CDR-L2 region
gataccaac

SEQ ID NO: 4024 - DNA, 9 bp, Artificial Sequence
  Synthetic polynucleotide encoding artificial human antibody CDR-L2 region
actacgaat

SEQ ID NO: 4025 - DNA, 9 bp, Artificial Sequence
  Synthetic polynucleotide encoding artificial human antibody CDR-L2 region
ttgggttct

SEQ ID NO: 4026 - DNA, 9 bp, Artificial Sequence
  Synthetic polynucleotide encoding artificial human antibody CDR-L2 region
ggtaaaaac

SEQ ID NO: 4027 - DNA, 9 bp, Artificial Sequence
  Synthetic polynucleotide encoding artificial human antibody CDR-L2 region
gagggcagt

SEQ ID NO: 4028 - DNA, 9 bp, Artificial Sequence
  Synthetic polynucleotide encoding artificial human antibody CDR-L2 region
gatgcatcc

SEQ ID NO: 4029 - DNA, 9 bp, Artificial Sequence
  Synthetic polynucleotide encoding artificial human antibody CDR-L2 region
gctgcatcc

SEQ ID NO: 4030 - DNA, 9 bp, Artificial Sequence
  Synthetic polynucleotide encoding artificial human antibody CDR-L2 region
gatgtcagt

SEQ ID NO: 4031 - DNA, 9 bp, Artificial Sequence
  Synthetic polynucleotide encoding artificial human antibody CDR-L2 region
caaaatact

SEQ ID NO: 4032 - DNA, 9 bp, Artificial Sequence
  Synthetic polynucleotide encoding artificial human antibody CDR-L2 region
gttgcatcc

SEQ ID NO: 4033 - DNA, 9 bp, Artificial Sequence
  Synthetic polynucleotide encoding artificial human antibody CDR-L2 region
caggcgtct

SEQ ID NO: 4034 - DNA, 9 bp, Artificial Sequence
  Synthetic polynucleotide encoding artificial human antibody CDR-L2 region
ggtgcatcc

SEQ ID NO: 4035 - DNA, 9 bp, Artificial Sequence
  Synthetic polynucleotide encoding artificial human antibody CDR-L2 region
gaggtcact

SEQ ID NO: 4036 - DNA, 9 bp, Artificial Sequence
  Synthetic polynucleotide encoding artificial human antibody CDR-L2 region
aggaataat

SEQ ID NO: 4037 - DNA, 9 bp, Artificial Sequence
  Synthetic polynucleotide encoding artificial human antibody CDR-L2 region
ggtgcatcc

SEQ ID NO: 4038 - DNA, 9 bp, Artificial Sequence
  Synthetic polynucleotide encoding artificial human antibody CDR-L2 region
ggtaacagc

SEQ ID NO: 4039 - DNA, 9 bp, Artificial Sequence
  Synthetic polynucleotide encoding artificial human antibody CDR-L2 region
gagggcagt

SEQ ID NO: 4040 - DNA, 9 bp, Artificial Sequence
  Synthetic polynucleotide encoding artificial human antibody CDR-L2 region
aacacacaa

SEQ ID NO: 4041 - DNA, 9 bp, Artificial Sequence
  Synthetic polynucleotide encoding artificial human antibody CDR-L2 region
gatgcatcc

SEQ ID NO: 4042 - DNA, 9 bp, Artificial Sequence
  Synthetic polynucleotide encoding artificial human antibody CDR-L2 region
gacaataat

SEQ ID NO: 4043 - DNA, 9 bp, Artificial Sequence
  Synthetic polynucleotide encoding artificial human antibody CDR-L2 region
ttggcctct

SEQ ID NO: 4044 - DNA, 9 bp, Artificial Sequence
  Synthetic polynucleotide encoding artificial human antibody CDR-L2 region
gaggtcagt

SEQ ID NO: 4045 - DNA, 9 bp, Artificial Sequence
  Synthetic polynucleotide encoding artificial human antibody CDR-L2 region
aaggcgtct

SEQ ID NO: 4046 - DNA, 9 bp, Artificial Sequence
  Synthetic polynucleotide encoding artificial human antibody CDR-L2 region
gatgatagc

SEQ ID NO: 4047 - DNA, 9 bp, Artificial Sequence
  Synthetic polynucleotide encoding artificial human antibody CDR-L2 region
aaggcgtct

SEQ ID NO: 4048 - DNA, 9 bp, Artificial Sequence
  Synthetic polynucleotide encoding artificial human antibody CDR-L2 region
gatgcatcc

SEQ ID NO: 4049 - DNA, 9 bp, Artificial Sequence
  Synthetic polynucleotide encoding artificial human antibody CDR-L2 region
gctgcatcc

SEQ ID NO: 4050 - DNA, 9 bp, Artificial Sequence
  Synthetic polynucleotide encoding artificial human antibody CDR-L2 region
gatacaaac

SEQ ID NO: 4051 - DNA, 9 bp, Artificial Sequence
  Synthetic polynucleotide encoding artificial human antibody CDR-L2 region
aagatttct

SEQ ID NO: 4052 - DNA, 9 bp, Artificial Sequence
  Synthetic polynucleotide encoding artificial human antibody CDR-L2 region
gatgtgtct

SEQ ID NO: 4053 - DNA, 9 bp, Artificial Sequence
  Synthetic polynucleotide encoding artificial human antibody CDR-L2 region
gaggtcagt

SEQ ID NO: 4054 - DNA, 9 bp, Artificial Sequence
  Synthetic polynucleotide encoding artificial human antibody CDR-L2 region
gatgtcagt

SEQ ID NO: 4055 - DNA, 9 bp, Artificial Sequence
  Synthetic polynucleotide encoding artificial human antibody CDR-L2 region
caagatagc

SEQ ID NO: 4056 - DNA, 9 bp, Artificial Sequence
  Synthetic polynucleotide encoding artificial human antibody CDR-L2 region
gaggtcagt

SEQ ID NO: 4057 - DNA, 9 bp, Artificial Sequence
  Synthetic polynucleotide encoding artificial human antibody CDR-L2 region
gctacatcc

SEQ ID NO: 4058 - DNA, 9 bp, Artificial Sequence
  Synthetic polynucleotide encoding artificial human antibody CDR-L2 region
gatgtcagt

SEQ ID NO: 4059 - DNA, 9 bp, Artificial Sequence
  Synthetic polynucleotide encoding artificial human antibody CDR-L2 region
tgggcatct

SEQ ID NO: 4060 - DNA, 9 bp, Artificial Sequence
  Synthetic polynucleotide encoding artificial human antibody CDR-L2 region
gacaataat

SEQ ID NO: 4061 - DNA, 9 bp, Artificial Sequence
  Synthetic polynucleotide encoding artificial human antibody CDR-L2 region
gatgtcagt

SEQ ID NO: 4062 - DNA, 9 bp, Artificial Sequence
  Synthetic polynucleotide encoding artificial human antibody CDR-L2 region
ggggcagga

SEQ ID NO: 4063 - DNA, 9 bp, Artificial Sequence
  Synthetic polynucleotide encoding artificial human antibody CDR-L2 region
gaggtcagt

SEQ ID NO: 4064 - DNA, 9 bp, Artificial Sequence
  Synthetic polynucleotide encoding artificial human antibody CDR-L2 region
gatgtcaat

SEQ ID NO: 4065 - DNA, 9 bp, Artificial Sequence
  Synthetic polynucleotide encoding artificial human antibody CDR-L2 region
aaggcgtct

SEQ ID NO: 4066 - DNA, 9 bp, Artificial Sequence
  Synthetic polynucleotide encoding artificial human antibody CDR-L2 region
caaacatcc

SEQ ID NO: 4067 - DNA, 9 bp, Artificial Sequence
  Synthetic polynucleotide encoding artificial human antibody CDR-L2 region
gctgcatcc

SEQ ID NO: 4068 - DNA, 9 bp, Artificial Sequence
  Synthetic polynucleotide encoding artificial human antibody CDR-L2 region
aaggcgtct

SEQ ID NO: 4069 - DNA, 9 bp, Artificial Sequence
  Synthetic polynucleotide encoding artificial human antibody CDR-L2 region
tgggcatct

SEQ ID NO: 4070 - DNA, 9 bp, Artificial Sequence
  Synthetic polynucleotide encoding artificial human antibody CDR-L2 region
ggtgcatcc

SEQ ID NO: 4071 - DNA, 9 bp, Artificial Sequence
  Synthetic polynucleotide encoding artificial human antibody CDR-L2 region
gatgcatcc

SEQ ID NO: 4072 - DNA, 9 bp, Artificial Sequence
  Synthetic polynucleotide encoding artificial human antibody CDR-L2 region
ggtgcatcc

SEQ ID NO: 4073 - DNA, 9 bp, Artificial Sequence
  Synthetic polynucleotide encoding artificial human antibody CDR-L2 region
tgggcatct

SEQ ID NO: 4074 - DNA, 9 bp, Artificial Sequence
  Synthetic polynucleotide encoding artificial human antibody CDR-L2 region
gatgtcagt

SEQ ID NO: 4075 - DNA, 9 bp, Artificial Sequence
  Synthetic polynucleotide encoding artificial human antibody CDR-L2 region
gacacaaat

SEQ ID NO: 4076 - DNA, 9 bp, Artificial Sequence
  Synthetic polynucleotide encoding artificial human antibody CDR-L2 region
gaggacagc

SEQ ID NO: 4077 - DNA, 9 bp, Artificial Sequence
  Synthetic polynucleotide encoding artificial human antibody CDR-L2 region
gatgcatcc

SEQ ID NO: 4078 - DNA, 9 bp, Artificial Sequence
  Synthetic polynucleotide encoding artificial human antibody CDR-L2 region
ggtgcatcc

SEQ ID NO: 4079 - DNA, 9 bp, Artificial Sequence
  Synthetic polynucleotide encoding artificial human antibody CDR-L2 region
tgggcatcc

SEQ ID NO: 4080 - DNA, 9 bp, Artificial Sequence
  Synthetic polynucleotide encoding artificial human antibody CDR-L2 region
ggagtttcc

SEQ ID NO: 4081 - DNA, 9 bp, Artificial Sequence
  Synthetic polynucleotide encoding artificial human antibody CDR-L2 region
aagatttct

SEQ ID NO: 4082 - DNA, 9 bp, Artificial Sequence
  Synthetic polynucleotide encoding artificial human antibody CDR-L2 region
ggtaaaaac

SEQ ID NO: 4083 - DNA, 9 bp, Artificial Sequence
  Synthetic polynucleotide encoding artificial human antibody CDR-L2 region
cttgcatcc

SEQ ID NO: 4084 - DNA, 9 bp, Artificial Sequence
  Synthetic polynucleotide encoding artificial human antibody CDR-L2 region
gaagatacc

SEQ ID NO: 4085 - DNA, 9 bp, Artificial Sequence
  Synthetic polynucleotide encoding artificial human antibody CDR-L2 region
gatgcatcc

SEQ ID NO: 4086 - DNA, 9 bp, Artificial Sequence
  Synthetic polynucleotide encoding artificial human antibody CDR-L2 region
gatgtcagt

SEQ ID NO: 4087 - DNA, 9 bp, Artificial Sequence
  Synthetic polynucleotide encoding artificial human antibody CDR-L2 region
aaggcgtct

SEQ ID NO: 4088 - DNA, 9 bp, Artificial Sequence
  Synthetic polynucleotide encoding artificial human antibody CDR-L2 region
gatgcatcc

SEQ ID NO: 4089 - DNA, 9 bp, Artificial Sequence
  Synthetic polynucleotide encoding artificial human antibody CDR-L2 region
ggtaacaac

SEQ ID NO: 4090 - DNA, 9 bp, Artificial Sequence
  Synthetic polynucleotide encoding artificial human antibody CDR-L2 region
tgggcatct

SEQ ID NO: 4091 - DNA, 9 bp, Artificial Sequence
  Synthetic polynucleotide encoding artificial human antibody CDR-L2 region
gatgtcact

SEQ ID NO: 4092 - DNA, 9 bp, Artificial Sequence
  Synthetic polynucleotide encoding artificial human antibody CDR-L2 region
aagatttct

SEQ ID NO: 4093 - DNA, 9 bp, Artificial Sequence
  Synthetic polynucleotide encoding artificial human antibody CDR-L2 region
gatgatagc

SEQ ID NO: 4094 - DNA, 9 bp, Artificial Sequence
  Synthetic polynucleotide encoding artificial human antibody CDR-L2 region
ggtgcatcc

SEQ ID NO: 4095 - DNA, 9 bp, Artificial Sequence
  Synthetic polynucleotide encoding artificial human antibody CDR-L2 region
gctgcatcc

SEQ ID NO: 4096 - DNA, 9 bp, Artificial Sequence
  Synthetic polynucleotide encoding artificial human antibody CDR-L2 region
aaggcgtct

SEQ ID NO: 4097 - DNA, 9 bp, Artificial Sequence
  Synthetic polynucleotide encoding artificial human antibody CDR-L2 region
ggtaaaaac

SEQ ID NO: 4098 - DNA, 9 bp, Artificial Sequence
  Synthetic polynucleotide encoding artificial human antibody CDR-L2 region
ggtgcatcc

SEQ ID NO: 4099 - DNA, 9 bp, Artificial Sequence
  Synthetic polynucleotide encoding artificial human antibody CDR-L2 region
gatgcatcc

SEQ ID NO: 4100 - DNA, 9 bp, Artificial Sequence
  Synthetic polynucleotide encoding artificial human antibody CDR-L2 region
gaggataac

SEQ ID NO: 4101 - DNA, 9 bp, Artificial Sequence
  Synthetic polynucleotide encoding artificial human antibody CDR-L2 region
gctgcatcc

SEQ ID NO: 4102 - DNA, 9 bp, Artificial Sequence
  Synthetic polynucleotide encoding artificial human antibody CDR-L2 region
aaggtttct

SEQ ID NO: 4103 - DNA, 9 bp, Artificial Sequence
  Synthetic polynucleotide encoding artificial human antibody CDR-L2 region
gatgcatcc

SEQ ID NO: 4104 - DNA, 9 bp, Artificial Sequence
  Synthetic polynucleotide encoding artificial human antibody CDR-L2 region
ggtaaaaac

SEQ ID NO: 4105 - DNA, 9 bp, Artificial Sequence
  Synthetic polynucleotide encoding artificial human antibody CDR-L2 region
gacattaat

SEQ ID NO: 4106 - DNA, 9 bp, Artificial Sequence
  Synthetic polynucleotide encoding artificial human antibody CDR-L2 region
agtaataat

SEQ ID NO: 4107 - DNA, 9 bp, Artificial Sequence
  Synthetic polynucleotide encoding artificial human antibody CDR-L2 region
gacaataat

SEQ ID NO: 4108 - DNA, 9 bp, Artificial Sequence
  Synthetic polynucleotide encoding artificial human antibody CDR-L2 region
ggtgcatcc

SEQ ID NO: 4109 - DNA, 9 bp, Artificial Sequence
  Synthetic polynucleotide encoding artificial human antibody CDR-L2 region
ggtgcatcc

SEQ ID NO: 4110 - DNA, 9 bp, Artificial Sequence
  Synthetic polynucleotide encoding artificial human antibody CDR-L2 region
ggtaccttc

SEQ ID NO: 4111 - DNA, 9 bp, Artificial Sequence
  Synthetic polynucleotide encoding artificial human antibody CDR-L2 region
gctgcctcc

SEQ ID NO: 4112 - DNA, 9 bp, Artificial Sequence
  Synthetic polynucleotide encoding artificial human antibody CDR-L2 region
gctgcatcc

SEQ ID NO: 4113 - DNA, 9 bp, Artificial Sequence
  Synthetic polynucleotide encoding artificial human antibody CDR-L2 region
gatgtcagt

SEQ ID NO: 4114 - DNA, 9 bp, Artificial Sequence
  Synthetic polynucleotide encoding artificial human antibody CDR-L2 region
caagatagc

SEQ ID NO: 4115 - DNA, 9 bp, Artificial Sequence
  Synthetic polynucleotide encoding artificial human antibody CDR-L2 region
ggtaacagc

SEQ ID NO: 4116 - DNA, 9 bp, Artificial Sequence
  Synthetic polynucleotide encoding artificial human antibody CDR-L2 region
ggtgcatcc

SEQ ID NO: 4117 - DNA, 9 bp, Artificial Sequence
  Synthetic polynucleotide encoding artificial human antibody CDR-L2 region
cagatatct

SEQ ID NO: 4118 - DNA, 9 bp, Artificial Sequence
  Synthetic polynucleotide encoding artificial human antibody CDR-L2 region
gctgcatcc

SEQ ID NO: 4119 - DNA, 9 bp, Artificial Sequence
  Synthetic polynucleotide encoding artificial human antibody CDR-L2 region
agtacaagc

SEQ ID NO: 4120 - DNA, 9 bp, Artificial Sequence
  Synthetic polynucleotide encoding artificial human antibody CDR-L2 region
ggtgcatcc

SEQ ID NO: 4121 - DNA, 9 bp, Artificial Sequence
  Synthetic polynucleotide encoding artificial human antibody CDR-L2 region
tgggcatct

SEQ ID NO: 4122 - DNA, 9 bp, Artificial Sequence
  Synthetic polynucleotide encoding artificial human antibody CDR-L2 region
caggcctct

SEQ ID NO: 4123 - DNA, 9 bp, Artificial Sequence
  Synthetic polynucleotide encoding artificial human antibody CDR-L2 region
ggtgcatcc

SEQ ID NO: 4124 - DNA, 9 bp, Artificial Sequence
  Synthetic polynucleotide encoding artificial human antibody CDR-L2 region
gaggacagc

SEQ ID NO: 4125 - DNA, 9 bp, Artificial Sequence
  Synthetic polynucleotide encoding artificial human antibody CDR-L2 region
gaagatacc

SEQ ID NO: 4126 - DNA, 9 bp, Artificial Sequence
  Synthetic polynucleotide encoding artificial human antibody CDR-L2 region
aaagacagt

SEQ ID NO: 4127 - DNA, 9 bp, Artificial Sequence
  Synthetic polynucleotide encoding artificial human antibody CDR-L2 region
gaggtcagg

SEQ ID NO: 4128 - DNA, 9 bp, Artificial Sequence
  Synthetic polynucleotide encoding artificial human antibody CDR-L2 region
ggtgcatcc

SEQ ID NO: 4129 - DNA, 9 bp, Artificial Sequence
  Synthetic polynucleotide encoding artificial human antibody CDR-L2 region
gatgcatcc

SEQ ID NO: 4130 - DNA, 9 bp, Artificial Sequence
  Synthetic polynucleotide encoding artificial human antibody CDR-L2 region
tatgagaac

SEQ ID NO: 4131 - DNA, 9 bp, Artificial Sequence
  Synthetic polynucleotide encoding artificial human antibody CDR-L2 region
ttgggttct

SEQ ID NO: 4132 - DNA, 9 bp, Artificial Sequence
  Synthetic polynucleotide encoding artificial human antibody CDR-L2 region
gacaataat

SEQ ID NO: 4133 - DNA, 9 bp, Artificial Sequence
  Synthetic polynucleotide encoding artificial human antibody CDR-L2 region
gaggataac

SEQ ID NO: 4134 - DNA, 9 bp, Artificial Sequence
  Synthetic polynucleotide encoding artificial human antibody CDR-L2 region
caagatagc

SEQ ID NO: 4135 - DNA, 9 bp, Artificial Sequence
  Synthetic polynucleotide encoding artificial human antibody CDR-L2 region
agtaataat

SEQ ID NO: 4136 - DNA, 9 bp, Artificial Sequence
  Synthetic polynucleotide encoding artificial human antibody CDR-L2 region
gaggataac

SEQ ID NO: 4137 - DNA, 9 bp, Artificial Sequence
  Synthetic polynucleotide encoding artificial human antibody CDR-L2 region
aaagacagt

SEQ ID NO: 4138 - DNA, 9 bp, Artificial Sequence
  Synthetic polynucleotide encoding artificial human antibody CDR-L2 region
ggtaaaaac

SEQ ID NO: 4139 - DNA, 9 bp, Artificial Sequence
  Synthetic polynucleotide encoding artificial human antibody CDR-L2 region
caagatagc

SEQ ID NO: 4140 - DNA, 9 bp, Artificial Sequence
  Synthetic polynucleotide encoding artificial human antibody CDR-L2 region
gctgcatcc

SEQ ID NO: 4141 - DNA, 9 bp, Artificial Sequence
  Synthetic polynucleotide encoding artificial human antibody CDR-L2 region
gacaataat

SEQ ID NO: 4142 - DNA, 9 bp, Artificial Sequence
  Synthetic polynucleotide encoding artificial human antibody CDR-L2 region
gaggataat

SEQ ID NO: 4143 - DNA, 9 bp, Artificial Sequence
  Synthetic polynucleotide encoding artificial human antibody CDR-L2 region
ttgggttct

SEQ ID NO: 4144 - DNA, 9 bp, Artificial Sequence
  Synthetic polynucleotide encoding artificial human antibody CDR-L2 region
ggtgcatcc

SEQ ID NO: 4145 - DNA, 9 bp, Artificial Sequence
  Synthetic polynucleotide encoding artificial human antibody CDR-L2 region
gatgtcagt

SEQ ID NO: 4146 - DNA, 9 bp, Artificial Sequence
  Synthetic polynucleotide encoding artificial human antibody CDR-L2 region
gctgcgtcc

SEQ ID NO: 4147 - DNA, 9 bp, Artificial Sequence
  Synthetic polynucleotide encoding artificial human antibody CDR-L2 region
gacaataat

SEQ ID NO: 4148 - DNA, 9 bp, Artificial Sequence
  Synthetic polynucleotide encoding artificial human antibody CDR-L2 region
ggtaaaaac

SEQ ID NO: 4149 - DNA, 9 bp, Artificial Sequence
  Synthetic polynucleotide encoding artificial human antibody CDR-L2 region
aaagacagt

SEQ ID NO: 4150 - DNA, 9 bp, Artificial Sequence
  Synthetic polynucleotide encoding artificial human antibody CDR-L2 region
gctgcatcc

SEQ ID NO: 4151 - DNA, 9 bp, Artificial Sequence
  Synthetic polynucleotide encoding artificial human antibody CDR-L2 region
aaggcgtct

SEQ ID NO: 4152 - DNA, 9 bp, Artificial Sequence
  Synthetic polynucleotide encoding artificial human antibody CDR-L2 region
ggtaacagc

SEQ ID NO: 4153 - DNA, 9 bp, Artificial Sequence
  Synthetic polynucleotide encoding artificial human antibody CDR-L2 region
aagatttct

SEQ ID NO: 4154 - DNA, 9 bp, Artificial Sequence
  Synthetic polynucleotide encoding artificial human antibody CDR-L2 region
gatgtcagt

SEQ ID NO: 4155 - DNA, 9 bp, Artificial Sequence
  Synthetic polynucleotide encoding artificial human antibody CDR-L2 region
ggtgcatcc

SEQ ID NO: 4156 - DNA, 9 bp, Artificial Sequence
  Synthetic polynucleotide encoding artificial human antibody CDR-L2 region
ggtgcatcc

SEQ ID NO: 4157 - DNA, 9 bp, Artificial Sequence
  Synthetic polynucleotide encoding artificial human antibody CDR-L2 region
gatgcatcc

SEQ ID NO: 4158 - DNA, 9 bp, Artificial Sequence
  Synthetic polynucleotide encoding artificial human antibody CDR-L2 region
gacaataat

SEQ ID NO: 4159 - DNA, 9 bp, Artificial Sequence
  Synthetic polynucleotide encoding artificial human antibody CDR-L2 region
aaggcgtct

SEQ ID NO: 4160 - DNA, 9 bp, Artificial Sequence
  Synthetic polynucleotide encoding artificial human antibody CDR-L2 region
gatacaagc

SEQ ID NO: 4161 - DNA, 9 bp, Artificial Sequence
  Synthetic polynucleotide encoding artificial human antibody CDR-L2 region
ttgggttct

SEQ ID NO: 4162 - DNA, 9 bp, Artificial Sequence
  Synthetic polynucleotide encoding artificial human antibody CDR-L2 region
ggtgcatcc

SEQ ID NO: 4163 - DNA, 9 bp, Artificial Sequence
  Synthetic polynucleotide encoding artificial human antibody CDR-L2 region
tgggcatct

SEQ ID NO: 4164 - DNA, 9 bp, Artificial Sequence
  Synthetic polynucleotide encoding artificial human antibody CDR-L2 region
tgggcgtct

SEQ ID NO: 4165 - DNA, 21 bp, Artificial Sequence
  Synthetic polynucleotide encoding artificial human antibody CDR-L2 region
cttaacagtgatggcagccac

SEQ ID NO: 4166 - DNA, 9 bp, Artificial Sequence
  Synthetic polynucleotide encoding artificial human antibody CDR-L2 region
gatgtcagt

SEQ ID NO: 4167 - DNA, 9 bp, Artificial Sequence
  Synthetic polynucleotide encoding artificial human antibody CDR-L2 region
aaagacagt

SEQ ID NO: 4168 - DNA, 9 bp, Artificial Sequence
  Synthetic polynucleotide encoding artificial human antibody CDR-L2 region
gatgcatcc

SEQ ID NO: 4169 - DNA, 9 bp, Artificial Sequence
  Synthetic polynucleotide encoding artificial human antibody CDR-L2 region
gatgatagc

SEQ ID NO: 4170 - DNA, 9 bp, Artificial Sequence
  Synthetic polynucleotide encoding artificial human antibody CDR-L2 region
gatgtcagt

SEQ ID NO: 4171 - DNA, 9 bp, Artificial Sequence
  Synthetic polynucleotide encoding artificial human antibody CDR-L2 region
aagatttct

SEQ ID NO: 4172 - DNA, 9 bp, Artificial Sequence
  Synthetic polynucleotide encoding artificial human antibody CDR-L2 region
gacaataat

SEQ ID NO: 4173 - DNA, 9 bp, Artificial Sequence
  Synthetic polynucleotide encoding artificial human antibody CDR-L2 region
ggtgcatcc

SEQ ID NO: 4174 - DNA, 9 bp, Artificial Sequence
  Synthetic polynucleotide encoding artificial human antibody CDR-L2 region
gctgcatcc

SEQ ID NO: 4175 - DNA, 9 bp, Artificial Sequence
  Synthetic polynucleotide encoding artificial human antibody CDR-L2 region
agggatagt

SEQ ID NO: 4176 - DNA, 9 bp, Artificial Sequence
  Synthetic polynucleotide encoding artificial human antibody CDR-L2 region
gctgcatcc

SEQ ID NO: 4177 - DNA, 9 bp, Artificial Sequence
  Synthetic polynucleotide encoding artificial human antibody CDR-L2 region
aaagacagt

SEQ ID NO: 4178 - DNA, 9 bp, Artificial Sequence
  Synthetic polynucleotide encoding artificial human antibody CDR-L2 region
agtaataat

SEQ ID NO: 4179 - DNA, 9 bp, Artificial Sequence
  Synthetic polynucleotide encoding artificial human antibody CDR-L2 region
ggtgcatcc

SEQ ID NO: 4180 - DNA, 9 bp, Artificial Sequence
  Synthetic polynucleotide encoding artificial human antibody CDR-L2 region
aaggtttct

SEQ ID NO: 4181 - DNA, 9 bp, Artificial Sequence
  Synthetic polynucleotide encoding artificial human antibody CDR-L2 region
cagatatct

SEQ ID NO: 4182 - DNA, 9 bp, Artificial Sequence
  Synthetic polynucleotide encoding artificial human antibody CDR-L2 region
gctgcatcc

SEQ ID NO: 4183 - DNA, 9 bp, Artificial Sequence
  Synthetic polynucleotide encoding artificial human antibody CDR-L2 region
ttgggttct

SEQ ID NO: 4184 - DNA, 9 bp, Artificial Sequence
  Synthetic polynucleotide encoding artificial human antibody CDR-L2 region
gctaacaac

SEQ ID NO: 4185 - DNA, 9 bp, Artificial Sequence
  Synthetic polynucleotide encoding artificial human antibody CDR-L2 region
agtaataat

SEQ ID NO: 4186 - DNA, 9 bp, Artificial Sequence
  Synthetic polynucleotide encoding artificial human antibody CDR-L2 region
caagatagc

SEQ ID NO: 4187 - DNA, 9 bp, Artificial Sequence
  Synthetic polynucleotide encoding artificial human antibody CDR-L2 region
aggaataat

SEQ ID NO: 4188 - DNA, 9 bp, Artificial Sequence
  Synthetic polynucleotide encoding artificial human antibody CDR-L2 region
gacaataat

SEQ ID NO: 4189 - DNA, 9 bp, Artificial Sequence
  Synthetic polynucleotide encoding artificial human antibody CDR-L2 region
aaggcgtct

SEQ ID NO: 4190 - DNA, 9 bp, Artificial Sequence
  Synthetic polynucleotide encoding artificial human antibody CDR-L2 region
agtaataat

SEQ ID NO: 4191 - DNA, 9 bp, Artificial Sequence
  Synthetic polynucleotide encoding artificial human antibody CDR-L2 region
gctgcgtcc

SEQ ID NO: 4192 - DNA, 9 bp, Artificial Sequence
  Synthetic polynucleotide encoding artificial human antibody CDR-L2 region
ggtgcatcc

SEQ ID NO: 4193 - DNA, 9 bp, Artificial Sequence
  Synthetic polynucleotide encoding artificial human antibody CDR-L2 region
ggtgcatcc

SEQ ID NO: 4194 - DNA, 9 bp, Artificial Sequence
  Synthetic polynucleotide encoding artificial human antibody CDR-L2 region
gacaataat

SEQ ID NO: 4195 - DNA, 9 bp, Artificial Sequence
  Synthetic polynucleotide encoding artificial human antibody CDR-L2 region
agtaataat

SEQ ID NO: 4196 - DNA, 9 bp, Artificial Sequence
  Synthetic polynucleotide encoding artificial human antibody CDR-L2 region
tgggcatct

SEQ ID NO: 4197 - DNA, 9 bp, Artificial Sequence
  Synthetic polynucleotide encoding artificial human antibody CDR-L2 region
gacaataat

SEQ ID NO: 4198 - DNA, 9 bp, Artificial Sequence
  Synthetic polynucleotide encoding artificial human antibody CDR-L2 region
gaggtcagt

SEQ ID NO: 4199 - DNA, 9 bp, Artificial Sequence
  Synthetic polynucleotide encoding artificial human antibody CDR-L2 region
gctgcatcc

SEQ ID NO: 4200 - DNA, 9 bp, Artificial Sequence
  Synthetic polynucleotide encoding artificial human antibody CDR-L2 region
agtaataat

SEQ ID NO: 4201 - DNA, 9 bp, Artificial Sequence
  Synthetic polynucleotide encoding artificial human antibody CDR-L2 region
gatgtgtcc

SEQ ID NO: 4202 - DNA, 9 bp, Artificial Sequence
  Synthetic polynucleotide encoding artificial human antibody CDR-L2 region
gatgtcagt

SEQ ID NO: 4203 - DNA, 9 bp, Artificial Sequence
  Synthetic polynucleotide encoding artificial human antibody CDR-L2 region
agtaataat

SEQ ID NO: 4204 - DNA, 9 bp, Artificial Sequence
  Synthetic polynucleotide encoding artificial human antibody CDR-L2 region
gatgtcagt

SEQ ID NO: 4205 - DNA, 9 bp, Artificial Sequence
  Synthetic polynucleotide encoding artificial human antibody CDR-L2 region
aaggcgtct

SEQ ID NO: 4206 - DNA, 9 bp, Artificial Sequence
  Synthetic polynucleotide encoding artificial human antibody CDR-L2 region
aagaataat

SEQ ID NO: 4207 - DNA, 9 bp, Artificial Sequence
  Synthetic polynucleotide encoding artificial human antibody CDR-L2 region
gatgcatcc

SEQ ID NO: 4208 - DNA, 9 bp, Artificial Sequence
  Synthetic polynucleotide encoding artificial human antibody CDR-L2 region
gatgtcagt

SEQ ID NO: 4209 - DNA, 9 bp, Artificial Sequence
  Synthetic polynucleotide encoding artificial human antibody CDR-L2 region
ggtaaaaac

SEQ ID NO: 4210 - DNA, 9 bp, Artificial Sequence
  Synthetic polynucleotide encoding artificial human antibody CDR-L2 region
gatgtcagt

SEQ ID NO: 4211 - DNA, 9 bp, Artificial Sequence
  Synthetic polynucleotide encoding artificial human antibody CDR-L2 region
gatgatagc

SEQ ID NO: 4212 - DNA, 9 bp, Artificial Sequence
  Synthetic polynucleotide encoding artificial human antibody CDR-L2 region
ggtgcatcc

SEQ ID NO: 4213 - DNA, 9 bp, Artificial Sequence
  Synthetic polynucleotide encoding artificial human antibody CDR-L2 region
caagatagc

SEQ ID NO: 4214 - DNA, 9 bp, Artificial Sequence
  Synthetic polynucleotide encoding artificial human antibody CDR-L2 region
ggtcaaaac

SEQ ID NO: 4215 - DNA, 9 bp, Artificial Sequence
  Synthetic polynucleotide encoding artificial human antibody CDR-L2 region
gctacatca

SEQ ID NO: 4216 - DNA, 9 bp, Artificial Sequence
  Synthetic polynucleotide encoding artificial human antibody CDR-L2 region
ggtgcatcc

SEQ ID NO: 4217 - DNA, 9 bp, Artificial Sequence
  Synthetic polynucleotide encoding artificial human antibody CDR-L2 region
gatgatagc

SEQ ID NO: 4218 - DNA, 9 bp, Artificial Sequence
  Synthetic polynucleotide encoding artificial human antibody CDR-L2 region
ggtaacagc

SEQ ID NO: 4219 - DNA, 9 bp, Artificial Sequence
  Synthetic polynucleotide encoding artificial human antibody CDR-L2 region
cgtaatgat

SEQ ID NO: 4220 - DNA, 9 bp, Artificial Sequence
  Synthetic polynucleotide encoding artificial human antibody CDR-L2 region
gacaataat

SEQ ID NO: 4221 - DNA, 9 bp, Artificial Sequence
  Synthetic polynucleotide encoding artificial human antibody CDR-L2 region
aaggatact

SEQ ID NO: 4222 - DNA, 9 bp, Artificial Sequence
  Synthetic polynucleotide encoding artificial human antibody CDR-L2 region
agtaataat

SEQ ID NO: 4223 - DNA, 9 bp, Artificial Sequence
  Synthetic polynucleotide encoding artificial human antibody CDR-L2 region
aaagacagt

SEQ ID NO: 4224 - DNA, 9 bp, Artificial Sequence
  Synthetic polynucleotide encoding artificial human antibody CDR-L2 region
ggtgcatcc

SEQ ID NO: 4225 - DNA, 9 bp, Artificial Sequence
  Synthetic polynucleotide encoding artificial human antibody CDR-L2 region
tgggcgtct

SEQ ID NO: 4226 - DNA, 9 bp, Artificial Sequence
  Synthetic polynucleotide encoding artificial human antibody CDR-L2 region
gacaataat

SEQ ID NO: 4227 - DNA, 9 bp, Artificial Sequence
  Synthetic polynucleotide encoding artificial human antibody CDR-L2 region
ggtgcatcc

SEQ ID NO: 4228 - DNA, 9 bp, Artificial Sequence
  Synthetic polynucleotide encoding artificial human antibody CDR-L2 region
gctgcatcc

SEQ ID NO: 4229 - DNA, 9 bp, Artificial Sequence
  Synthetic polynucleotide encoding artificial human antibody CDR-L2 region
gatgatagc

SEQ ID NO: 4230 - DNA, 9 bp, Artificial Sequence
  Synthetic polynucleotide encoding artificial human antibody CDR-L2 region
gatacaagc

SEQ ID NO: 4231 - DNA, 9 bp, Artificial Sequence
  Synthetic polynucleotide encoding artificial human antibody CDR-L2 region
ggtgcatcc

SEQ ID NO: 4232 - DNA, 9 bp, Artificial Sequence
  Synthetic polynucleotide encoding artificial human antibody CDR-L2 region
ggtgcatcc

SEQ ID NO: 4233 - DNA, 9 bp, Artificial Sequence
  Synthetic polynucleotide encoding artificial human antibody CDR-L2 region
gctgcatcc

SEQ ID NO: 4234 - DNA, 9 bp, Artificial Sequence
  Synthetic polynucleotide encoding artificial human antibody CDR-L2 region
aaggcgtct

SEQ ID NO: 4235 - DNA, 9 bp, Artificial Sequence
  Synthetic polynucleotide encoding artificial human antibody CDR-L2 region
gaagtttcc

SEQ ID NO: 4236 - DNA, 9 bp, Artificial Sequence
  Synthetic polynucleotide encoding artificial human antibody CDR-L2 region
gatgatagc

SEQ ID NO: 4237 - DNA, 9 bp, Artificial Sequence
  Synthetic polynucleotide encoding artificial human antibody CDR-L2 region
gctgcatcc

SEQ ID NO: 4238 - DNA, 9 bp, Artificial Sequence
  Synthetic polynucleotide encoding artificial human antibody CDR-L2 region
gatgtcagt

SEQ ID NO: 4239 - DNA, 9 bp, Artificial Sequence
  Synthetic polynucleotide encoding artificial human antibody CDR-L2 region
gatgcatcc

SEQ ID NO: 4240 - DNA, 9 bp, Artificial Sequence
  Synthetic polynucleotide encoding artificial human antibody CDR-L2 region
ggtgcatcc

SEQ ID NO: 4241 - DNA, 9 bp, Artificial Sequence
  Synthetic polynucleotide encoding artificial human antibody CDR-L2 region
ttgggttct

SEQ ID NO: 4242 - DNA, 9 bp, Artificial Sequence
  Synthetic polynucleotide encoding artificial human antibody CDR-L2 region
gaggataac

SEQ ID NO: 4243 - DNA, 9 bp, Artificial Sequence
  Synthetic polynucleotide encoding artificial human antibody CDR-L2 region
ggtgcatcc

SEQ ID NO: 4244 - DNA, 9 bp, Artificial Sequence
  Synthetic polynucleotide encoding artificial human antibody CDR-L2 region
ttgggttct

SEQ ID NO: 4245 - DNA, 9 bp, Artificial Sequence
  Synthetic polynucleotide encoding artificial human antibody CDR-L2 region
caagatagc

SEQ ID NO: 4246 - DNA, 9 bp, Artificial Sequence
  Synthetic polynucleotide encoding artificial human antibody CDR-L2 region
aaggtttct

SEQ ID NO: 4247 - DNA, 9 bp, Artificial Sequence
  Synthetic polynucleotide encoding artificial human antibody CDR-L2 region
caagatagc

SEQ ID NO: 4248 - DNA, 9 bp, Artificial Sequence
  Synthetic polynucleotide encoding artificial human antibody CDR-L2 region
gacaatagc

SEQ ID NO: 4249 - DNA, 9 bp, Artificial Sequence
  Synthetic polynucleotide encoding artificial human antibody CDR-L2 region
ggtgcatcc

SEQ ID NO: 4250 - DNA, 9 bp, Artificial Sequence
  Synthetic polynucleotide encoding artificial human antibody CDR-L2 region
ggtgcatcc

SEQ ID NO: 4251 - DNA, 9 bp, Artificial Sequence
  Synthetic polynucleotide encoding artificial human antibody CDR-L2 region
gctgcatcc

SEQ ID NO: 4252 - DNA, 9 bp, Artificial Sequence
  Synthetic polynucleotide encoding artificial human antibody CDR-L2 region
ggtgcatcc

SEQ ID NO: 4253 - DNA, 9 bp, Artificial Sequence
  Synthetic polynucleotide encoding artificial human antibody CDR-L2 region
aaagacagt

SEQ ID NO: 4254 - DNA, 9 bp, Artificial Sequence
  Synthetic polynucleotide encoding artificial human antibody CDR-L2 region
ggtgcatcc

SEQ ID NO: 4255 - DNA, 9 bp, Artificial Sequence
  Synthetic polynucleotide encoding artificial human antibody CDR-L2 region
gatgatagc

SEQ ID NO: 4256 - DNA, 9 bp, Artificial Sequence
  Synthetic polynucleotide encoding artificial human antibody CDR-L2 region
gctgcatcc

SEQ ID NO: 4257 - DNA, 9 bp, Artificial Sequence
  Synthetic polynucleotide encoding artificial human antibody CDR-L2 region
gaggataac

SEQ ID NO: 4258 - DNA, 9 bp, Artificial Sequence
  Synthetic polynucleotide encoding artificial human antibody CDR-L2 region
gatagatct

SEQ ID NO: 4259 - DNA, 9 bp, Artificial Sequence
  Synthetic polynucleotide encoding artificial human antibody CDR-L2 region
gaggacagc

SEQ ID NO: 4260 - DNA, 9 bp, Artificial Sequence
  Synthetic polynucleotide encoding artificial human antibody CDR-L2 region
aaggcgtct

SEQ ID NO: 4261 - DNA, 9 bp, Artificial Sequence
  Synthetic polynucleotide encoding artificial human antibody CDR-L2 region
gatgtccgt

SEQ ID NO: 4262 - DNA, 9 bp, Artificial Sequence
  Synthetic polynucleotide encoding artificial human antibody CDR-L2 region
ggtgcatcc

SEQ ID NO: 4263 - DNA, 9 bp, Artificial Sequence
  Synthetic polynucleotide encoding artificial human antibody CDR-L2 region
gatgtcagt

SEQ ID NO: 4264 - DNA, 9 bp, Artificial Sequence
  Synthetic polynucleotide encoding artificial human antibody CDR-L2 region
gatgcctcc

SEQ ID NO: 4265 - DNA, 9 bp, Artificial Sequence
  Synthetic polynucleotide encoding artificial human antibody CDR-L2 region
aggaattat

SEQ ID NO: 4266 - DNA, 9 bp, Artificial Sequence
  Synthetic polynucleotide encoding artificial human antibody CDR-L2 region
aggaataat

SEQ ID NO: 4267 - DNA, 9 bp, Artificial Sequence
  Synthetic polynucleotide encoding artificial human antibody CDR-L2 region
aggaataat

SEQ ID NO: 4268 - DNA, 9 bp, Artificial Sequence
  Synthetic polynucleotide encoding artificial human antibody CDR-L2 region
aggaataat

SEQ ID NO: 4269 - DNA, 9 bp, Artificial Sequence
  Synthetic polynucleotide encoding artificial human antibody CDR-L2 region
ggtgcatcc

SEQ ID NO: 4270 - DNA, 9 bp, Artificial Sequence
  Synthetic polynucleotide encoding artificial human antibody CDR-L2 region
gctgcatcc

SEQ ID NO: 4271 - DNA, 9 bp, Artificial Sequence
  Synthetic polynucleotide encoding artificial human antibody CDR-L2 region
gatgtcagt

SEQ ID NO: 4272 - DNA, 9 bp, Artificial Sequence
  Synthetic polynucleotide encoding artificial human antibody CDR-L2 region
gctgcatcc

SEQ ID NO: 4273 - DNA, 9 bp, Artificial Sequence
  Synthetic polynucleotide encoding artificial human antibody CDR-L2 region
gatgcatcc

SEQ ID NO: 4274 - DNA, 9 bp, Artificial Sequence
  Synthetic polynucleotide encoding artificial human antibody CDR-L2 region
aaagacagt

SEQ ID NO: 4275 - DNA, 9 bp, Artificial Sequence
  Synthetic polynucleotide encoding artificial human antibody CDR-L2 region
ttgggttct

SEQ ID NO: 4276 - DNA, 9 bp, Artificial Sequence
  Synthetic polynucleotide encoding artificial human antibody CDR-L2 region
tatgatagc

SEQ ID NO: 4277 - DNA, 9 bp, Artificial Sequence
  Synthetic polynucleotide encoding artificial human antibody CDR-L2 region
gatgcatcc

SEQ ID NO: 4278 - DNA, 9 bp, Artificial Sequence
  Synthetic polynucleotide encoding artificial human antibody CDR-L2 region
aaggcatct

SEQ ID NO: 4279 - DNA, 9 bp, Artificial Sequence
  Synthetic polynucleotide encoding artificial human antibody CDR-L2 region
tatgatagc

SEQ ID NO: 4280 - DNA, 9 bp, Artificial Sequence
  Synthetic polynucleotide encoding artificial human antibody CDR-L2 region
aatgcatcc

SEQ ID NO: 4281 - DNA, 9 bp, Artificial Sequence
  Synthetic polynucleotide encoding artificial human antibody CDR-L2 region
gatgcatcc

SEQ ID NO: 4282 - DNA, 9 bp, Artificial Sequence
  Synthetic polynucleotide encoding artificial human antibody CDR-L2 region
aaggtttct

SEQ ID NO: 4283 - DNA, 9 bp, Artificial Sequence
  Synthetic polynucleotide encoding artificial human antibody CDR-L2 region
ttgggttct

SEQ ID NO: 4284 - DNA, 9 bp, Artificial Sequence
  Synthetic polynucleotide encoding artificial human antibody CDR-L2 region
gctgcatcc

SEQ ID NO: 4285 - DNA, 9 bp, Artificial Sequence
  Synthetic polynucleotide encoding artificial human antibody CDR-L2 region
caagatagc

SEQ ID NO: 4286 - DNA, 9 bp, Artificial Sequence
  Synthetic polynucleotide encoding artificial human antibody CDR-L2 region
gatgatagc

SEQ ID NO: 4287 - DNA, 9 bp, Artificial Sequence
  Synthetic polynucleotide encoding artificial human antibody CDR-L2 region
aggaataat

SEQ ID NO: 4288 - DNA, 9 bp, Artificial Sequence
  Synthetic polynucleotide encoding artificial human antibody CDR-L2 region
gctgcatcc

SEQ ID NO: 4289 - DNA, 9 bp, Artificial Sequence
  Synthetic polynucleotide encoding artificial human antibody CDR-L2 region
gatgcatcc

SEQ ID NO: 4290 - DNA, 9 bp, Artificial Sequence
  Synthetic polynucleotide encoding artificial human antibody CDR-L2 region
ggtgcatcc

SEQ ID NO: 4291 - DNA, 9 bp, Artificial Sequence
  Synthetic polynucleotide encoding artificial human antibody CDR-L2 region
gctgcatcc

SEQ ID NO: 4292 - DNA, 9 bp, Artificial Sequence
  Synthetic polynucleotide encoding artificial human antibody CDR-L2 region
ggtgcatcc

SEQ ID NO: 4293 - DNA, 9 bp, Artificial Sequence
  Synthetic polynucleotide encoding artificial human antibody CDR-L2 region
aaagacagt

SEQ ID NO: 4294 - DNA, 9 bp, Artificial Sequence
  Synthetic polynucleotide encoding artificial human antibody CDR-L2 region
gatgcatcc

SEQ ID NO: 4295 - DNA, 9 bp, Artificial Sequence
  Synthetic polynucleotide encoding artificial human antibody CDR-L2 region
gaggtcagt

SEQ ID NO: 4296 - DNA, 9 bp, Artificial Sequence
  Synthetic polynucleotide encoding artificial human antibody CDR-L2 region
gaggataac

SEQ ID NO: 4297 - DNA, 9 bp, Artificial Sequence
  Synthetic polynucleotide encoding artificial human antibody CDR-L2 region
gatgtttcc

SEQ ID NO: 4298 - DNA, 9 bp, Artificial Sequence
  Synthetic polynucleotide encoding artificial human antibody CDR-L2 region
gctgcatcc

SEQ ID NO: 4299 - DNA, 9 bp, Artificial Sequence
  Synthetic polynucleotide encoding artificial human antibody CDR-L2 region
ttgggttct

SEQ ID NO: 4300 - DNA, 9 bp, Artificial Sequence
  Synthetic polynucleotide encoding artificial human antibody CDR-L2 region
gatgcgtcc

SEQ ID NO: 4301 - DNA, 9 bp, Artificial Sequence
  Synthetic polynucleotide encoding artificial human antibody CDR-L2 region
actgcgtcc

SEQ ID NO: 4302 - DNA, 9 bp, Artificial Sequence
  Synthetic polynucleotide encoding artificial human antibody CDR-L2 region
ggtgcatcc

SEQ ID NO: 4303 - DNA, 9 bp, Artificial Sequence
  Synthetic polynucleotide encoding artificial human antibody CDR-L2 region
gatgatagc

SEQ ID NO: 4304 - DNA, 9 bp, Artificial Sequence
  Synthetic polynucleotide encoding artificial human antibody CDR-L2 region
caagatagc

SEQ ID NO: 4305 - DNA, 9 bp, Artificial Sequence
  Synthetic polynucleotide encoding artificial human antibody CDR-L2 region
gatgcaacc

SEQ ID NO: 4306 - DNA, 9 bp, Artificial Sequence
  Synthetic polynucleotide encoding artificial human antibody CDR-L2 region
ggtaaaaac

SEQ ID NO: 4307 - DNA, 9 bp, Artificial Sequence
  Synthetic polynucleotide encoding artificial human antibody CDR-L2 region
ggtgcatcc

SEQ ID NO: 4308 - DNA, 9 bp, Artificial Sequence
  Synthetic polynucleotide encoding artificial human antibody CDR-L2 region
aaggtttct

SEQ ID NO: 4309 - DNA, 9 bp, Artificial Sequence
  Synthetic polynucleotide encoding artificial human antibody CDR-L2 region
caagatagc

SEQ ID NO: 4310 - DNA, 9 bp, Artificial Sequence
  Synthetic polynucleotide encoding artificial human antibody CDR-L2 region
agtaatact

SEQ ID NO: 4311 - DNA, 9 bp, Artificial Sequence
  Synthetic polynucleotide encoding artificial human antibody CDR-L2 region
ggtgcatcc

SEQ ID NO: 4312 - DNA, 9 bp, Artificial Sequence
  Synthetic polynucleotide encoding artificial human antibody CDR-L2 region
gctgcatcc

SEQ ID NO: 4313 - DNA, 9 bp, Artificial Sequence
  Synthetic polynucleotide encoding artificial human antibody CDR-L2 region
ggtgcatcc

SEQ ID NO: 4314 - DNA, 9 bp, Artificial Sequence
  Synthetic polynucleotide encoding artificial human antibody CDR-L2 region
ggtgcatcc

SEQ ID NO: 4315 - DNA, 9 bp, Artificial Sequence
  Synthetic polynucleotide encoding artificial human antibody CDR-L2 region
ggtgcatcc

SEQ ID NO: 4316 - DNA, 9 bp, Artificial Sequence
  Synthetic polynucleotide encoding artificial human antibody CDR-L2 region
agggcgtct

SEQ ID NO: 4317 - DNA, 9 bp, Artificial Sequence
  Synthetic polynucleotide encoding artificial human antibody CDR-L2 region
agtaataat

SEQ ID NO: 4318 - DNA, 9 bp, Artificial Sequence
  Synthetic polynucleotide encoding artificial human antibody CDR-L2 region
gatgcctcc

SEQ ID NO: 4319 - DNA, 9 bp, Artificial Sequence
  Synthetic polynucleotide encoding artificial human antibody CDR-L2 region
gatgcatcc

SEQ ID NO: 4320 - DNA, 9 bp, Artificial Sequence
  Synthetic polynucleotide encoding artificial human antibody CDR-L2 region
gatgcttcc

SEQ ID NO: 4321 - DNA, 9 bp, Artificial Sequence
  Synthetic polynucleotide encoding artificial human antibody CDR-L2 region
ggtaaaaac

SEQ ID NO: 4322 - DNA, 9 bp, Artificial Sequence
  Synthetic polynucleotide encoding artificial human antibody CDR-L2 region
agggtttct

SEQ ID NO: 4323 - DNA, 9 bp, Artificial Sequence
  Synthetic polynucleotide encoding artificial human antibody CDR-L2 region
tctacatcc

SEQ ID NO: 4324 - DNA, 9 bp, Artificial Sequence
  Synthetic polynucleotide encoding artificial human antibody CDR-L2 region
ggtgcatcc

SEQ ID NO: 4325 - DNA, 9 bp, Artificial Sequence
  Synthetic polynucleotide encoding artificial human antibody CDR-L2 region
gaagtttcc

SEQ ID NO: 4326 - DNA, 9 bp, Artificial Sequence
  Synthetic polynucleotide encoding artificial human antibody CDR-L2 region
gctgcgtcc

SEQ ID NO: 4327 - DNA, 9 bp, Artificial Sequence
  Synthetic polynucleotide encoding artificial human antibody CDR-L2 region
gaagtcact

SEQ ID NO: 4328 - DNA, 9 bp, Artificial Sequence
  Synthetic polynucleotide encoding artificial human antibody CDR-L2 region
ggtgcttcc

SEQ ID NO: 4329 - DNA, 9 bp, Artificial Sequence
  Synthetic polynucleotide encoding artificial human antibody CDR-L2 region
gatgcatcc

SEQ ID NO: 4330 - DNA, 9 bp, Artificial Sequence
  Synthetic polynucleotide encoding artificial human antibody CDR-L2 region
aagggtttt

SEQ ID NO: 4331 - DNA, 9 bp, Artificial Sequence
  Synthetic polynucleotide encoding artificial human antibody CDR-L2 region
gatacaagc

SEQ ID NO: 4332 - DNA, 9 bp, Artificial Sequence
  Synthetic polynucleotide encoding artificial human antibody CDR-L2 region
gctgcatcc

SEQ ID NO: 4333 - DNA, 9 bp, Artificial Sequence
  Synthetic polynucleotide encoding artificial human antibody CDR-L2 region
aagacagag

SEQ ID NO: 4334 - DNA, 9 bp, Artificial Sequence
  Synthetic polynucleotide encoding artificial human antibody CDR-L2 region
gacgtcagt

SEQ ID NO: 4335 - DNA, 9 bp, Artificial Sequence
  Synthetic polynucleotide encoding artificial human antibody CDR-L2 region
gctgcatcc

SEQ ID NO: 4336 - DNA, 9 bp, Artificial Sequence
  Synthetic polynucleotide encoding artificial human antibody CDR-L2 region
aagggtttt

SEQ ID NO: 4337 - DNA, 9 bp, Artificial Sequence
  Synthetic polynucleotide encoding artificial human antibody CDR-L2 region
ggtgtgtcc

SEQ ID NO: 4338 - DNA, 9 bp, Artificial Sequence
  Synthetic polynucleotide encoding artificial human antibody CDR-L2 region
ggtaaaaac

SEQ ID NO: 4339 - DNA, 9 bp, Artificial Sequence
  Synthetic polynucleotide encoding artificial human antibody CDR-L2 region
gaagataac

SEQ ID NO: 4340 - DNA, 9 bp, Artificial Sequence
  Synthetic polynucleotide encoding artificial human antibody CDR-L2 region
aagatttct

SEQ ID NO: 4341 - DNA, 9 bp, Artificial Sequence
  Synthetic polynucleotide encoding artificial human antibody CDR-L2 region
gacaatttt

SEQ ID NO: 4342 - DNA, 9 bp, Artificial Sequence
  Synthetic polynucleotide encoding artificial human antibody CDR-L2 region
gatgcatct

SEQ ID NO: 4343 - DNA, 9 bp, Artificial Sequence
  Synthetic polynucleotide encoding artificial human antibody CDR-L2 region
caagatagc

SEQ ID NO: 4344 - DNA, 9 bp, Artificial Sequence
  Synthetic polynucleotide encoding artificial human antibody CDR-L2 region
ggtgcatcc

SEQ ID NO: 4345 - DNA, 9 bp, Artificial Sequence
  Synthetic polynucleotide encoding artificial human antibody CDR-L2 region
gatgcatcc

SEQ ID NO: 4346 - DNA, 9 bp, Artificial Sequence
  Synthetic polynucleotide encoding artificial human antibody CDR-L2 region
tggggatct

SEQ ID NO: 4347 - DNA, 9 bp, Artificial Sequence
  Synthetic polynucleotide encoding artificial human antibody CDR-L2 region
ggtgcatcc

SEQ ID NO: 4348 - DNA, 9 bp, Artificial Sequence
  Synthetic polynucleotide encoding artificial human antibody CDR-L2 region
ggtgcatcc

SEQ ID NO: 4349 - DNA, 9 bp, Artificial Sequence
  Synthetic polynucleotide encoding artificial human antibody CDR-L2 region
aggaataat

SEQ ID NO: 4350 - DNA, 9 bp, Artificial Sequence
  Synthetic polynucleotide encoding artificial human antibody CDR-L2 region
aaggacact

SEQ ID NO: 4351 - DNA, 9 bp, Artificial Sequence
  Synthetic polynucleotide encoding artificial human antibody CDR-L2 region
gaggataac

SEQ ID NO: 4352 - DNA, 9 bp, Artificial Sequence
  Synthetic polynucleotide encoding artificial human antibody CDR-L2 region
ggtaacagc

SEQ ID NO: 4353 - DNA, 21 bp, Artificial Sequence
  Synthetic polynucleotide encoding artificial human antibody CDR-L2 region
attaacagtgatggcagtcat

SEQ ID NO: 4354 - DNA, 9 bp, Artificial Sequence
  Synthetic polynucleotide encoding artificial human antibody CDR-L2 region
aaggtttct

SEQ ID NO: 4355 - DNA, 9 bp, Artificial Sequence
  Synthetic polynucleotide encoding artificial human antibody CDR-L2 region
gctgcatcc

SEQ ID NO: 4356 - DNA, 9 bp, Artificial Sequence
  Synthetic polynucleotide encoding artificial human antibody CDR-L2 region
actacatcc

SEQ ID NO: 4357 - DNA, 9 bp, Artificial Sequence
  Synthetic polynucleotide encoding artificial human antibody CDR-L2 region
ggtgcagcc

SEQ ID NO: 4358 - DNA, 9 bp, Artificial Sequence
  Synthetic polynucleotide encoding artificial human antibody CDR-L2 region
gctgcatcc

SEQ ID NO: 4359 - DNA, 9 bp, Artificial Sequence
  Synthetic polynucleotide encoding artificial human antibody CDR-L2 region
ggtacatcc

SEQ ID NO: 4360 - DNA, 9 bp, Artificial Sequence
  Synthetic polynucleotide encoding artificial human antibody CDR-L2 region
ggtgcatcc

SEQ ID NO: 4361 - DNA, 9 bp, Artificial Sequence
  Synthetic polynucleotide encoding artificial human antibody CDR-L2 region
ggtgcatcc

SEQ ID NO: 4362 - DNA, 9 bp, Artificial Sequence
  Synthetic polynucleotide encoding artificial human antibody CDR-L2 region
gctgcatcc

SEQ ID NO: 4363 - DNA, 9 bp, Artificial Sequence
  Synthetic polynucleotide encoding artificial human antibody CDR-L2 region
aaggcgtct

SEQ ID NO: 4364 - DNA, 9 bp, Artificial Sequence
  Synthetic polynucleotide encoding artificial human antibody CDR-L2 region
gaggcatct

SEQ ID NO: 4365 - DNA, 9 bp, Artificial Sequence
  Synthetic polynucleotide encoding artificial human antibody CDR-L2 region
gctgcctcc

SEQ ID NO: 4366 - DNA, 9 bp, Artificial Sequence
  Synthetic polynucleotide encoding artificial human antibody CDR-L2 region
tatgatagc

SEQ ID NO: 4367 - DNA, 9 bp, Artificial Sequence
  Synthetic polynucleotide encoding artificial human antibody CDR-L2 region
gatgtcagt

SEQ ID NO: 4368 - DNA, 9 bp, Artificial Sequence
  Synthetic polynucleotide encoding artificial human antibody CDR-L2 region
caagatagc

SEQ ID NO: 4369 - DNA, 9 bp, Artificial Sequence
  Synthetic polynucleotide encoding artificial human antibody CDR-L2 region
ggtgaagat

SEQ ID NO: 4370 - DNA, 9 bp, Artificial Sequence
  Synthetic polynucleotide encoding artificial human antibody CDR-L2 region
aaagacagt

SEQ ID NO: 4371 - DNA, 9 bp, Artificial Sequence
  Synthetic polynucleotide encoding artificial human antibody CDR-L2 region
tgggcatct

SEQ ID NO: 4372 - DNA, 9 bp, Artificial Sequence
  Synthetic polynucleotide encoding artificial human antibody CDR-L2 region
gacgttgat

SEQ ID NO: 4373 - DNA, 9 bp, Artificial Sequence
  Synthetic polynucleotide encoding artificial human antibody CDR-L2 region
agcacaaac

SEQ ID NO: 4374 - DNA, 9 bp, Artificial Sequence
  Synthetic polynucleotide encoding artificial human antibody CDR-L2 region
caagatagg

SEQ ID NO: 4375 - DNA, 24 bp, Artificial Sequence
  Synthetic polynucleotide encoding artificial human antibody CDR-L2 region
gtgggcactggtgggattgtggga

SEQ ID NO: 4376 - DNA, 9 bp, Artificial Sequence
  Synthetic polynucleotide encoding artificial human antibody CDR-L2 region
aaggcatct

SEQ ID NO: 4377 - DNA, 9 bp, Artificial Sequence
  Synthetic polynucleotide encoding artificial human antibody CDR-L2 region
aatgtcact

SEQ ID NO: 4378 - DNA, 9 bp, Artificial Sequence
  Synthetic polynucleotide encoding artificial human antibody CDR-L2 region
agtaataat

SEQ ID NO: 4379 - DNA, 9 bp, Artificial Sequence
  Synthetic polynucleotide encoding artificial human antibody CDR-L2 region
ggtgacaac

SEQ ID NO: 4380 - DNA, 9 bp, Artificial Sequence
  Synthetic polynucleotide encoding artificial human antibody CDR-L2 region
gatacatac

SEQ ID NO: 4381 - DNA, 9 bp, Artificial Sequence
  Synthetic polynucleotide encoding artificial human antibody CDR-L2 region
aaggtttct

SEQ ID NO: 4382 - DNA, 9 bp, Artificial Sequence
  Synthetic polynucleotide encoding artificial human antibody CDR-L2 region
gaagcatcc

SEQ ID NO: 4383 - DNA, 9 bp, Artificial Sequence
  Synthetic polynucleotide encoding artificial human antibody CDR-L2 region
cgagataag

SEQ ID NO: 4384 - DNA, 9 bp, Artificial Sequence
  Synthetic polynucleotide encoding artificial human antibody CDR-L2 region
cttgcatcc

SEQ ID NO: 4385 - DNA, 9 bp, Artificial Sequence
  Synthetic polynucleotide encoding artificial human antibody CDR-L2 region
ggtaaaaac

SEQ ID NO: 4386 - DNA, 9 bp, Artificial Sequence
  Synthetic polynucleotide encoding artificial human antibody CDR-L2 region
ggtaaaaac

SEQ ID NO: 4387 - DNA, 9 bp, Artificial Sequence
  Synthetic polynucleotide encoding artificial human antibody CDR-L2 region
gctgcatcc

SEQ ID NO: 4388 - DNA, 9 bp, Artificial Sequence
  Synthetic polynucleotide encoding artificial human antibody CDR-L2 region
caagatgcc

SEQ ID NO: 4389 - DNA, 9 bp, Artificial Sequence
  Synthetic polynucleotide encoding artificial human antibody CDR-L2 region
tctgcatcc

SEQ ID NO: 4390 - DNA, 9 bp, Artificial Sequence
  Synthetic polynucleotide encoding artificial human antibody CDR-L2 region
tctgcatcc

SEQ ID NO: 4391 - DNA, 9 bp, Artificial Sequence
  Synthetic polynucleotide encoding artificial human antibody CDR-L2 region
caagatgcc

SEQ ID NO: 4392 - DNA, 9 bp, Artificial Sequence
  Synthetic polynucleotide encoding artificial human antibody CDR-L2 region
gatgtcagt

SEQ ID NO: 4393 - DNA, 21 bp, Artificial Sequence
  Synthetic polynucleotide encoding artificial human antibody CDR-L2 region
gttaatagtgatggcagtcac

SEQ ID NO: 4394 - DNA, 9 bp, Artificial Sequence
  Synthetic polynucleotide encoding artificial human antibody CDR-L2 region
ggtgcgtcc

SEQ ID NO: 4395 - DNA, 9 bp, Artificial Sequence
  Synthetic polynucleotide encoding artificial human antibody CDR-L2 region
tgggcatct

SEQ ID NO: 4396 - DNA, 9 bp, Artificial Sequence
  Synthetic polynucleotide encoding artificial human antibody CDR-L2 region
gctgcatcc

SEQ ID NO: 4397 - DNA, 9 bp, Artificial Sequence
  Synthetic polynucleotide encoding artificial human antibody CDR-L2 region
ggtgcatcc

SEQ ID NO: 4398 - DNA, 9 bp, Artificial Sequence
  Synthetic polynucleotide encoding artificial human antibody CDR-L2 region
ggtaacagt

SEQ ID NO: 4399 - DNA, 9 bp, Artificial Sequence
  Synthetic polynucleotide encoding artificial human antibody CDR-L2 region
gatgcatcc

SEQ ID NO: 4400 - DNA, 9 bp, Artificial Sequence
  Synthetic polynucleotide encoding artificial human antibody CDR-L2 region
gacactgat

SEQ ID NO: 4401 - DNA, 9 bp, Artificial Sequence
  Synthetic polynucleotide encoding artificial human antibody CDR-L2 region
gaggtcgtt

SEQ ID NO: 4402 - DNA, 9 bp, Artificial Sequence
  Synthetic polynucleotide encoding artificial human antibody CDR-L2 region
ggtgcatcc

SEQ ID NO: 4403 - DNA, 9 bp, Artificial Sequence
  Synthetic polynucleotide encoding artificial human antibody CDR-L2 region
tgggcatct

SEQ ID NO: 4404 - DNA, 9 bp, Artificial Sequence
  Synthetic polynucleotide encoding artificial human antibody CDR-L2 region
tgggcatct

SEQ ID NO: 4405 - DNA, 9 bp, Artificial Sequence
  Synthetic polynucleotide encoding artificial human antibody CDR-L2 region
ggtggatcc

SEQ ID NO: 4406 - DNA, 9 bp, Artificial Sequence
  Synthetic polynucleotide encoding artificial human antibody CDR-L2 region
gatgatagc

SEQ ID NO: 4407 - DNA, 9 bp, Artificial Sequence
  Synthetic polynucleotide encoding artificial human antibody CDR-L2 region
ggactgagt

SEQ ID NO: 4408 - DNA, 9 bp, Artificial Sequence
  Synthetic polynucleotide encoding artificial human antibody CDR-L2 region
aacacaaac

SEQ ID NO: 4409 - DNA, 9 bp, Artificial Sequence
  Synthetic polynucleotide encoding artificial human antibody CDR-L2 region
gatgtttct

SEQ ID NO: 4410 - DNA, 9 bp, Artificial Sequence
  Synthetic polynucleotide encoding artificial human antibody CDR-L2 region
caagatagc

SEQ ID NO: 4411 - DNA, 9 bp, Artificial Sequence
  Synthetic polynucleotide encoding artificial human antibody CDR-L2 region
caagataac

SEQ ID NO: 4412 - DNA, 9 bp, Artificial Sequence
  Synthetic polynucleotide encoding artificial human antibody CDR-L2 region
gatgtcact

SEQ ID NO: 4413 - DNA, 9 bp, Artificial Sequence
  Synthetic polynucleotide encoding artificial human antibody CDR-L2 region
gctacattc

SEQ ID NO: 4414 - DNA, 9 bp, Artificial Sequence
  Synthetic polynucleotide encoding artificial human antibody CDR-L2 region
gctgcatcc

SEQ ID NO: 4415 - DNA, 9 bp, Artificial Sequence
  Synthetic polynucleotide encoding artificial human antibody CDR-L2 region
ggtgcatcc

SEQ ID NO: 4416 - DNA, 9 bp, Artificial Sequence
  Synthetic polynucleotide encoding artificial human antibody CDR-L2 region
gaggtcagt

SEQ ID NO: 4417 - DNA, 9 bp, Artificial Sequence
  Synthetic polynucleotide encoding artificial human antibody CDR-L2 region
tgggcatcc

SEQ ID NO: 4418 - DNA, 9 bp, Artificial Sequence
  Synthetic polynucleotide encoding artificial human antibody CDR-L2 region
gatggcggc

SEQ ID NO: 4419 - DNA, 9 bp, Artificial Sequence
  Synthetic polynucleotide encoding artificial human antibody CDR-L2 region
aaggcgtcg

SEQ ID NO: 4420 - DNA, 9 bp, Artificial Sequence
  Synthetic polynucleotide encoding artificial human antibody CDR-L2 region
gatgatagc

SEQ ID NO: 4421 - DNA, 9 bp, Artificial Sequence
  Synthetic polynucleotide encoding artificial human antibody CDR-L2 region
gaagatagt

SEQ ID NO: 4422 - DNA, 9 bp, Artificial Sequence
  Synthetic polynucleotide encoding artificial human antibody CDR-L2 region
ggtgcctcc

SEQ ID NO: 4423 - DNA, 9 bp, Artificial Sequence
  Synthetic polynucleotide encoding artificial human antibody CDR-L2 region
gatgtatcc

SEQ ID NO: 4424 - DNA, 9 bp, Artificial Sequence
  Synthetic polynucleotide encoding artificial human antibody CDR-L2 region
gaggtcact

SEQ ID NO: 4425 - DNA, 9 bp, Artificial Sequence
  Synthetic polynucleotide encoding artificial human antibody CDR-L2 region
tttacttcc

SEQ ID NO: 4426 - DNA, 9 bp, Artificial Sequence
  Synthetic polynucleotide encoding artificial human antibody CDR-L2 region
gaggacagc

SEQ ID NO: 4427 - DNA, 21 bp, Artificial Sequence
  Synthetic polynucleotide encoding artificial human antibody CDR-L2 region
cttgaaagtactggaacctac

SEQ ID NO: 4428 - DNA, 9 bp, Artificial Sequence
  Synthetic polynucleotide encoding artificial human antibody CDR-L2 region
ggtgcatcc

SEQ ID NO: 4429 - DNA, 9 bp, Artificial Sequence
  Synthetic polynucleotide encoding artificial human antibody CDR-L2 region
gagggcgat

SEQ ID NO: 4430 - DNA, 9 bp, Artificial Sequence
  Synthetic polynucleotide encoding artificial human antibody CDR-L2 region
aaggcgtct

SEQ ID NO: 4431 - DNA, 9 bp, Artificial Sequence
  Synthetic polynucleotide encoding artificial human antibody CDR-L2 region
ggtgcatcc

SEQ ID NO: 4432 - DNA, 9 bp, Artificial Sequence
  Synthetic polynucleotide encoding artificial human antibody CDR-L2 region
ggtgcatcc

SEQ ID NO: 4433 - DNA, 9 bp, Artificial Sequence
  Synthetic polynucleotide encoding artificial human antibody CDR-L2 region
gaggtttcc

SEQ ID NO: 4434 - DNA, 9 bp, Artificial Sequence
  Synthetic polynucleotide encoding artificial human antibody CDR-L2 region
gctgcatcc

SEQ ID NO: 4435 - DNA, 9 bp, Artificial Sequence
  Synthetic polynucleotide encoding artificial human antibody CDR-L2 region
ggtgcatcc

SEQ ID NO: 4436 - DNA, 9 bp, Artificial Sequence
  Synthetic polynucleotide encoding artificial human antibody CDR-L2 region
ggtgcatcc

SEQ ID NO: 4437 - DNA, 9 bp, Artificial Sequence
  Synthetic polynucleotide encoding artificial human antibody CDR-L2 region
ggtgcatcc

SEQ ID NO: 4438 - DNA, 9 bp, Artificial Sequence
  Synthetic polynucleotide encoding artificial human antibody CDR-L2 region
gaagatagt

SEQ ID NO: 4439 - DNA, 9 bp, Artificial Sequence
  Synthetic polynucleotide encoding artificial human antibody CDR-L2 region
ggtgcatcc

SEQ ID NO: 4440 - DNA, 9 bp, Artificial Sequence
  Synthetic polynucleotide encoding artificial human antibody CDR-L2 region
ggtgcatcc

SEQ ID NO: 4441 - DNA, 9 bp, Artificial Sequence
  Synthetic polynucleotide encoding artificial human antibody CDR-L2 region
ggtgcatcc

SEQ ID NO: 4442 - DNA, 9 bp, Artificial Sequence
  Synthetic polynucleotide encoding artificial human antibody CDR-L2 region
aatactgat

SEQ ID NO: 4443 - DNA, 9 bp, Artificial Sequence
  Synthetic polynucleotide encoding artificial human antibody CDR-L2 region
agtacatcc

SEQ ID NO: 4444 - DNA, 9 bp, Artificial Sequence
  Synthetic polynucleotide encoding artificial human antibody CDR-L2 region
gctgcatcc

SEQ ID NO: 4445 - DNA, 9 bp, Artificial Sequence
  Synthetic polynucleotide encoding artificial human antibody CDR-L2 region
gaggtgtcg

SEQ ID NO: 4446 - DNA, 9 bp, Artificial Sequence
  Synthetic polynucleotide encoding artificial human antibody CDR-L2 region
gaactccat

SEQ ID NO: 4447 - DNA, 9 bp, Artificial Sequence
  Synthetic polynucleotide encoding artificial human antibody CDR-L2 region
caagatgac

SEQ ID NO: 4448 - DNA, 9 bp, Artificial Sequence
  Synthetic polynucleotide encoding artificial human antibody CDR-L2 region
gatgatagc

SEQ ID NO: 4449 - DNA, 9 bp, Artificial Sequence
  Synthetic polynucleotide encoding artificial human antibody CDR-L2 region
aaagacagt

SEQ ID NO: 4450 - DNA, 9 bp, Artificial Sequence
  Synthetic polynucleotide encoding artificial human antibody CDR-L2 region
tgggcatct

SEQ ID NO: 4451 - DNA, 9 bp, Artificial Sequence
  Synthetic polynucleotide encoding artificial human antibody CDR-L2 region
ggtgcgtcc

SEQ ID NO: 4452 - DNA, 9 bp, Artificial Sequence
  Synthetic polynucleotide encoding artificial human antibody CDR-L2 region
aatagtaat

SEQ ID NO: 4453 - DNA, 9 bp, Artificial Sequence
  Synthetic polynucleotide encoding artificial human antibody CDR-L2 region
gctgcatcc

SEQ ID NO: 4454 - DNA, 9 bp, Artificial Sequence
  Synthetic polynucleotide encoding artificial human antibody CDR-L2 region
ggtgcattc

SEQ ID NO: 4455 - DNA, 9 bp, Artificial Sequence
  Synthetic polynucleotide encoding artificial human antibody CDR-L2 region
gctgacagc

SEQ ID NO: 4456 - DNA, 9 bp, Artificial Sequence
  Synthetic polynucleotide encoding artificial human antibody CDR-L2 region
gatgtcagt

SEQ ID NO: 4457 - DNA, 9 bp, Artificial Sequence
  Synthetic polynucleotide encoding artificial human antibody CDR-L2 region
tgggcatct

SEQ ID NO: 4458 - DNA, 9 bp, Artificial Sequence
  Synthetic polynucleotide encoding artificial human antibody CDR-L2 region
ggtgcatcc

SEQ ID NO: 4459 - DNA, 9 bp, Artificial Sequence
  Synthetic polynucleotide encoding artificial human antibody CDR-L2 region
ggtgcatcc

SEQ ID NO: 4460 - DNA, 9 bp, Artificial Sequence
  Synthetic polynucleotide encoding artificial human antibody CDR-L2 region
gctgcatcc

SEQ ID NO: 4461 - DNA, 9 bp, Artificial Sequence
  Synthetic polynucleotide encoding artificial human antibody CDR-L2 region
gctgcatcc

SEQ ID NO: 4462 - DNA, 9 bp, Artificial Sequence
  Synthetic polynucleotide encoding artificial human antibody CDR-L2 region
tctgcatcc

SEQ ID NO: 4463 - DNA, 9 bp, Artificial Sequence
  Synthetic polynucleotide encoding artificial human antibody CDR-L2 region
gctgcatcc

SEQ ID NO: 4464 - DNA, 9 bp, Artificial Sequence
  Synthetic polynucleotide encoding artificial human antibody CDR-L2 region
gatgtcagt

SEQ ID NO: 4465 - DNA, 9 bp, Artificial Sequence
  Synthetic polynucleotide encoding artificial human antibody CDR-L2 region
gatgtcaat

SEQ ID NO: 4466 - DNA, 9 bp, Artificial Sequence
  Synthetic polynucleotide encoding artificial human antibody CDR-L2 region
aaagacagt

SEQ ID NO: 4467 - DNA, 9 bp, Artificial Sequence
  Synthetic polynucleotide encoding artificial human antibody CDR-L2 region
gctgcatcc

SEQ ID NO: 4468 - DNA, 9 bp, Artificial Sequence
  Synthetic polynucleotide encoding artificial human antibody CDR-L2 region
tataacacc

SEQ ID NO: 4469 - DNA, 9 bp, Artificial Sequence
  Synthetic polynucleotide encoding artificial human antibody CDR-L2 region
ggtgcatcc

SEQ ID NO: 4470 - DNA, 9 bp, Artificial Sequence
  Synthetic polynucleotide encoding artificial human antibody CDR-L2 region
gacaataat

SEQ ID NO: 4471 - DNA, 9 bp, Artificial Sequence
  Synthetic polynucleotide encoding artificial human antibody CDR-L2 region
tgggcatct

SEQ ID NO: 4472 - DNA, 9 bp, Artificial Sequence
  Synthetic polynucleotide encoding artificial human antibody CDR-L2 region
gctgcatcc

SEQ ID NO: 4473 - DNA, 9 bp, Artificial Sequence
  Synthetic polynucleotide encoding artificial human antibody CDR-L2 region
gctgcatcc

SEQ ID NO: 4474 - DNA, 9 bp, Artificial Sequence
  Synthetic polynucleotide encoding artificial human antibody CDR-L2 region
gctgcatcg

SEQ ID NO: 4475 - DNA, 9 bp, Artificial Sequence
  Synthetic polynucleotide encoding artificial human antibody CDR-L2 region
gctgcatcc

SEQ ID NO: 4476 - DNA, 9 bp, Artificial Sequence
  Synthetic polynucleotide encoding artificial human antibody CDR-L2 region
ggtgcatcc

SEQ ID NO: 4477 - DNA, 9 bp, Artificial Sequence
  Synthetic polynucleotide encoding artificial human antibody CDR-L2 region
ggtgcatcc

SEQ ID NO: 4478 - DNA, 9 bp, Artificial Sequence
  Synthetic polynucleotide encoding artificial human antibody CDR-L2 region
gaagtttcc

SEQ ID NO: 4479 - DNA, 9 bp, Artificial Sequence
  Synthetic polynucleotide encoding artificial human antibody CDR-L2 region
aaagacagt

SEQ ID NO: 4480 - DNA, 9 bp, Artificial Sequence
  Synthetic polynucleotide encoding artificial human antibody CDR-L2 region
caagatagc

SEQ ID NO: 4481 - DNA, 9 bp, Artificial Sequence
  Synthetic polynucleotide encoding artificial human antibody CDR-L2 region
gctgcatcc

SEQ ID NO: 4482 - DNA, 9 bp, Artificial Sequence
  Synthetic polynucleotide encoding artificial human antibody CDR-L2 region
ggcaaaaac

SEQ ID NO: 4483 - DNA, 9 bp, Artificial Sequence
  Synthetic polynucleotide encoding artificial human antibody CDR-L2 region
gaggtcagt

SEQ ID NO: 4484 - DNA, 9 bp, Artificial Sequence
  Synthetic polynucleotide encoding artificial human antibody CDR-L2 region
gatgcatcc

SEQ ID NO: 4485 - DNA, 9 bp, Artificial Sequence
  Synthetic polynucleotide encoding artificial human antibody CDR-L2 region
tgggcatct

SEQ ID NO: 4486 - DNA, 24 bp, Artificial Sequence
  Synthetic polynucleotide encoding artificial human antibody CDR-L2 region
gtgggcactggtgggattgtggga

SEQ ID NO: 4487 - DNA, 9 bp, Artificial Sequence
  Synthetic polynucleotide encoding artificial human antibody CDR-L2 region
gaagacaac

SEQ ID NO: 4488 - DNA, 9 bp, Artificial Sequence
  Synthetic polynucleotide encoding artificial human antibody CDR-L2 region
aaagacagt

SEQ ID NO: 4489 - DNA, 9 bp, Artificial Sequence
  Synthetic polynucleotide encoding artificial human antibody CDR-L2 region
caagatagc

SEQ ID NO: 4490 - DNA, 9 bp, Artificial Sequence
  Synthetic polynucleotide encoding artificial human antibody CDR-L2 region
gatgtcagt

SEQ ID NO: 4491 - DNA, 9 bp, Artificial Sequence
  Synthetic polynucleotide encoding artificial human antibody CDR-L2 region
gaagtcact

SEQ ID NO: 4492 - DNA, 9 bp, Artificial Sequence
  Synthetic polynucleotide encoding artificial human antibody CDR-L2 region
ggtaacagc

SEQ ID NO: 4493 - DNA, 9 bp, Artificial Sequence
  Synthetic polynucleotide encoding artificial human antibody CDR-L2 region
ggtgcatct

SEQ ID NO: 4494 - DNA, 9 bp, Artificial Sequence
  Synthetic polynucleotide encoding artificial human antibody CDR-L2 region
gctgcatcc

SEQ ID NO: 4495 - DNA, 9 bp, Artificial Sequence
  Synthetic polynucleotide encoding artificial human antibody CDR-L2 region
caagatagc

SEQ ID NO: 4496 - DNA, 9 bp, Artificial Sequence
  Synthetic polynucleotide encoding artificial human antibody CDR-L2 region
aggaataat

SEQ ID NO: 4497 - DNA, 9 bp, Artificial Sequence
  Synthetic polynucleotide encoding artificial human antibody CDR-L2 region
gaagtttcc

SEQ ID NO: 4498 - DNA, 9 bp, Artificial Sequence
  Synthetic polynucleotide encoding artificial human antibody CDR-L2 region
aaggcgtct

SEQ ID NO: 4499 - DNA, 9 bp, Artificial Sequence
  Synthetic polynucleotide encoding artificial human antibody CDR-L2 region
caagatagc

SEQ ID NO: 4500 - DNA, 24 bp, Artificial Sequence
  Synthetic polynucleotide encoding artificial human antibody CDR-L2 region
gtgggcactggtgggattgtggga

SEQ ID NO: 4501 - DNA, 9 bp, Artificial Sequence
  Synthetic polynucleotide encoding artificial human antibody CDR-L2 region
ggtaacagc

SEQ ID NO: 4502 - DNA, 9 bp, Artificial Sequence
  Synthetic polynucleotide encoding artificial human antibody CDR-L2 region
aaggcgtct

SEQ ID NO: 4503 - DNA, 9 bp, Artificial Sequence
  Synthetic polynucleotide encoding artificial human antibody CDR-L2 region
gatgcatcc

SEQ ID NO: 4504 - DNA, 9 bp, Artificial Sequence
  Synthetic polynucleotide encoding artificial human antibody CDR-L2 region
gatgcatcc

SEQ ID NO: 4505 - DNA, 9 bp, Artificial Sequence
  Synthetic polynucleotide encoding artificial human antibody CDR-L2 region
ggtgcatcc

SEQ ID NO: 4506 - DNA, 9 bp, Artificial Sequence
  Synthetic polynucleotide encoding artificial human antibody CDR-L2 region
gatgcatcc

SEQ ID NO: 4507 - DNA, 9 bp, Artificial Sequence
  Synthetic polynucleotide encoding artificial human antibody CDR-L2 region
gctgcatcc

SEQ ID NO: 4508 - DNA, 9 bp, Artificial Sequence
  Synthetic polynucleotide encoding artificial human antibody CDR-L2 region
caagatagc

SEQ ID NO: 4509 - DNA, 9 bp, Artificial Sequence
  Synthetic polynucleotide encoding artificial human antibody CDR-L2 region
aaagacagt

SEQ ID NO: 4510 - DNA, 9 bp, Artificial Sequence
  Synthetic polynucleotide encoding artificial human antibody CDR-L2 region
gctgcatcc

SEQ ID NO: 4511 - DNA, 9 bp, Artificial Sequence
  Synthetic polynucleotide encoding artificial human antibody CDR-L2 region
gctgcatcc

SEQ ID NO: 4512 - DNA, 9 bp, Artificial Sequence
  Synthetic polynucleotide encoding artificial human antibody CDR-L2 region
gaggtcagt

SEQ ID NO: 4513 - DNA, 9 bp, Artificial Sequence
  Synthetic polynucleotide encoding artificial human antibody CDR-L2 region
gaggtcaat

SEQ ID NO: 4514 - DNA, 9 bp, Artificial Sequence
  Synthetic polynucleotide encoding artificial human antibody CDR-L2 region
aaagacagt

SEQ ID NO: 4515 - DNA, 9 bp, Artificial Sequence
  Synthetic polynucleotide encoding artificial human antibody CDR-L2 region
gaggtcagt

SEQ ID NO: 4516 - DNA, 9 bp, Artificial Sequence
  Synthetic polynucleotide encoding artificial human antibody CDR-L2 region
gatgtcagt

SEQ ID NO: 4517 - DNA, 9 bp, Artificial Sequence
  Synthetic polynucleotide encoding artificial human antibody CDR-L2 region
aaagacagt

SEQ ID NO: 4518 - DNA, 9 bp, Artificial Sequence
  Synthetic polynucleotide encoding artificial human antibody CDR-L2 region
aaagacagt

SEQ ID NO: 4519 - DNA, 9 bp, Artificial Sequence
  Synthetic polynucleotide encoding artificial human antibody CDR-L2 region
gctgcatcc

SEQ ID NO: 4520 - DNA, 24 bp, Artificial Sequence
  Synthetic polynucleotide encoding artificial human antibody CDR-L2 region
gtgggcactggtgggattgtggga

SEQ ID NO: 4521 - DNA, 9 bp, Artificial Sequence
  Synthetic polynucleotide encoding artificial human antibody CDR-L2 region
gatgcatcc

SEQ ID NO: 4522 - DNA, 9 bp, Artificial Sequence
  Synthetic polynucleotide encoding artificial human antibody CDR-L2 region
aaggtttct

SEQ ID NO: 4523 - DNA, 9 bp, Artificial Sequence
  Synthetic polynucleotide encoding artificial human antibody CDR-L2 region
gatacatcc

SEQ ID NO: 4524 - DNA, 9 bp, Artificial Sequence
  Synthetic polynucleotide encoding artificial human antibody CDR-L2 region
gaggacacc

SEQ ID NO: 4525 - DNA, 9 bp, Artificial Sequence
  Synthetic polynucleotide encoding artificial human antibody CDR-L2 region
tgggcatct

SEQ ID NO: 4526 - DNA, 9 bp, Artificial Sequence
  Synthetic polynucleotide encoding artificial human antibody CDR-L2 region
gaggtcagt

SEQ ID NO: 4527 - DNA, 9 bp, Artificial Sequence
  Synthetic polynucleotide encoding artificial human antibody CDR-L2 region
tctgcatcc

SEQ ID NO: 4528 - DNA, 9 bp, Artificial Sequence
  Synthetic polynucleotide encoding artificial human antibody CDR-L2 region
gctgcatcc

SEQ ID NO: 4529 - DNA, 9 bp, Artificial Sequence
  Synthetic polynucleotide encoding artificial human antibody CDR-L2 region
gatgtcagt

SEQ ID NO: 4530 - DNA, 9 bp, Artificial Sequence
  Synthetic polynucleotide encoding artificial human antibody CDR-L2 region
aaagacagt

SEQ ID NO: 4531 - DNA, 9 bp, Artificial Sequence
  Synthetic polynucleotide encoding artificial human antibody CDR-L2 region
aataataat

SEQ ID NO: 4532 - DNA, 9 bp, Artificial Sequence
  Synthetic polynucleotide encoding artificial human antibody CDR-L2 region
agtaatacc

SEQ ID NO: 4533 - DNA, 9 bp, Artificial Sequence
  Synthetic polynucleotide encoding artificial human antibody CDR-L2 region
aaagacagt

SEQ ID NO: 4534 - DNA, 9 bp, Artificial Sequence
  Synthetic polynucleotide encoding artificial human antibody CDR-L2 region
gatgcatcc

SEQ ID NO: 4535 - DNA, 9 bp, Artificial Sequence
  Synthetic polynucleotide encoding artificial human antibody CDR-L2 region
tctggttcc

SEQ ID NO: 4536 - DNA, 9 bp, Artificial Sequence
  Synthetic polynucleotide encoding artificial human antibody CDR-L2 region
gctgcatcc

SEQ ID NO: 4537 - DNA, 9 bp, Artificial Sequence
  Synthetic polynucleotide encoding artificial human antibody CDR-L2 region
agggtttct

SEQ ID NO: 4538 - DNA, 9 bp, Artificial Sequence
  Synthetic polynucleotide encoding artificial human antibody CDR-L2 region
aggaataat

SEQ ID NO: 4539 - DNA, 9 bp, Artificial Sequence
  Synthetic polynucleotide encoding artificial human antibody CDR-L2 region
gaggataac

SEQ ID NO: 4540 - DNA, 9 bp, Artificial Sequence
  Synthetic polynucleotide encoding artificial human antibody CDR-L2 region
gctgcttcc

SEQ ID NO: 4541 - DNA, 9 bp, Artificial Sequence
  Synthetic polynucleotide encoding artificial human antibody CDR-L2 region
gacaataat

SEQ ID NO: 4542 - DNA, 9 bp, Artificial Sequence
  Synthetic polynucleotide encoding artificial human antibody CDR-L2 region
caagatagc

SEQ ID NO: 4543 - DNA, 9 bp, Artificial Sequence
  Synthetic polynucleotide encoding artificial human antibody CDR-L2 region
aggaataat

SEQ ID NO: 4544 - DNA, 9 bp, Artificial Sequence
  Synthetic polynucleotide encoding artificial human antibody CDR-L2 region
agtaataat

SEQ ID NO: 4545 - DNA, 9 bp, Artificial Sequence
  Synthetic polynucleotide encoding artificial human antibody CDR-L2 region
tgggcatct

SEQ ID NO: 4546 - DNA, 24 bp, Artificial Sequence
  Synthetic polynucleotide encoding artificial human antibody CDR-L2 region
gtgggcactggtgggattgtggga

SEQ ID NO: 4547 - DNA, 9 bp, Artificial Sequence
  Synthetic polynucleotide encoding artificial human antibody CDR-L2 region
aggaataat

SEQ ID NO: 4548 - DNA, 9 bp, Artificial Sequence
  Synthetic polynucleotide encoding artificial human antibody CDR-L2 region
aaagacagt

SEQ ID NO: 4549 - DNA, 9 bp, Artificial Sequence
  Synthetic polynucleotide encoding artificial human antibody CDR-L2 region
gctgcaacc

SEQ ID NO: 4550 - DNA, 9 bp, Artificial Sequence
  Synthetic polynucleotide encoding artificial human antibody CDR-L2 region
agtaataat

SEQ ID NO: 4551 - DNA, 9 bp, Artificial Sequence
  Synthetic polynucleotide encoding artificial human antibody CDR-L2 region
gctgcatcc

SEQ ID NO: 4552 - DNA, 9 bp, Artificial Sequence
  Synthetic polynucleotide encoding artificial human antibody CDR-L2 region
gaggacagc

SEQ ID NO: 4553 - DNA, 9 bp, Artificial Sequence
  Synthetic polynucleotide encoding artificial human antibody CDR-L2 region
agagacagt

SEQ ID NO: 4554 - DNA, 9 bp, Artificial Sequence
  Synthetic polynucleotide encoding artificial human antibody CDR-L2 region
ggtaacaac

SEQ ID NO: 4555 - DNA, 9 bp, Artificial Sequence
  Synthetic polynucleotide encoding artificial human antibody CDR-L2 region
aaagacagt

SEQ ID NO: 4556 - DNA, 9 bp, Artificial Sequence
  Synthetic polynucleotide encoding artificial human antibody CDR-L2 region
tggtcatct

SEQ ID NO: 4557 - DNA, 9 bp, Artificial Sequence
  Synthetic polynucleotide encoding artificial human antibody CDR-L2 region
ggtggcgat

SEQ ID NO: 4558 - DNA, 9 bp, Artificial Sequence
  Synthetic polynucleotide encoding artificial human antibody CDR-L2 region
gacaataat

SEQ ID NO: 4559 - DNA, 9 bp, Artificial Sequence
  Synthetic polynucleotide encoding artificial human antibody CDR-L2 region
caagatagc

SEQ ID NO: 4560 - DNA, 9 bp, Artificial Sequence
  Synthetic polynucleotide encoding artificial human antibody CDR-L2 region
aaagacagt

SEQ ID NO: 4561 - DNA, 9 bp, Artificial Sequence
  Synthetic polynucleotide encoding artificial human antibody CDR-L2 region
ggtgcatcc

SEQ ID NO: 4562 - DNA, 9 bp, Artificial Sequence
  Synthetic polynucleotide encoding artificial human antibody CDR-L2 region
caagatagc

SEQ ID NO: 4563 - DNA, 9 bp, Artificial Sequence
  Synthetic polynucleotide encoding artificial human antibody CDR-L2 region
caagatagc

SEQ ID NO: 4564 - DNA, 9 bp, Artificial Sequence
  Synthetic polynucleotide encoding artificial human antibody CDR-L2 region
ggtgcatcc

SEQ ID NO: 4565 - DNA, 9 bp, Artificial Sequence
  Synthetic polynucleotide encoding artificial human antibody CDR-L2 region
aaagacagt

SEQ ID NO: 4566 - DNA, 9 bp, Artificial Sequence
  Synthetic polynucleotide encoding artificial human antibody CDR-L2 region
tgggcatct

SEQ ID NO: 4567 - DNA, 9 bp, Artificial Sequence
  Synthetic polynucleotide encoding artificial human antibody CDR-L2 region
gaagtttcc

SEQ ID NO: 4568 - DNA, 9 bp, Artificial Sequence
  Synthetic polynucleotide encoding artificial human antibody CDR-L2 region
ggtgcgtcc

SEQ ID NO: 4569 - DNA, 9 bp, Artificial Sequence
  Synthetic polynucleotide encoding artificial human antibody CDR-L2 region
aaagacagt

SEQ ID NO: 4570 - DNA, 9 bp, Artificial Sequence
  Synthetic polynucleotide encoding artificial human antibody CDR-L2 region
aaagacagt

SEQ ID NO: 4571 - DNA, 9 bp, Artificial Sequence
  Synthetic polynucleotide encoding artificial human antibody CDR-L2 region
gaggtcact

SEQ ID NO: 4572 - DNA, 9 bp, Artificial Sequence
  Synthetic polynucleotide encoding artificial human antibody CDR-L2 region
gatgatagc

SEQ ID NO: 4573 - DNA, 9 bp, Artificial Sequence
  Synthetic polynucleotide encoding artificial human antibody CDR-L2 region
aagatttct

SEQ ID NO: 4574 - DNA, 21 bp, Artificial Sequence
  Synthetic polynucleotide encoding artificial human antibody CDR-L2 region
tacacatcagactcagataag

SEQ ID NO: 4575 - DNA, 9 bp, Artificial Sequence
  Synthetic polynucleotide encoding artificial human antibody CDR-L2 region
aagaataac

SEQ ID NO: 4576 - DNA, 9 bp, Artificial Sequence
  Synthetic polynucleotide encoding artificial human antibody CDR-L2 region
ggtgcatcc

SEQ ID NO: 4577 - DNA, 9 bp, Artificial Sequence
  Synthetic polynucleotide encoding artificial human antibody CDR-L2 region
gctgcatcc

SEQ ID NO: 4578 - DNA, 9 bp, Artificial Sequence
  Synthetic polynucleotide encoding artificial human antibody CDR-L2 region
gacaataat

SEQ ID NO: 4579 - DNA, 9 bp, Artificial Sequence
  Synthetic polynucleotide encoding artificial human antibody CDR-L2 region
agtttcaac

SEQ ID NO: 4580 - DNA, 9 bp, Artificial Sequence
  Synthetic polynucleotide encoding artificial human antibody CDR-L2 region
ggtgtatcc

SEQ ID NO: 4581 - DNA, 12 bp, Artificial Sequence
  Synthetic polynucleotide encoding artificial human antibody CDR-L2 region
tataaagatgat

SEQ ID NO: 4582 - DNA, 9 bp, Artificial Sequence
  Synthetic polynucleotide encoding artificial human antibody CDR-L2 region
aagatttct

SEQ ID NO: 4583 - DNA, 9 bp, Artificial Sequence
  Synthetic polynucleotide encoding artificial human antibody CDR-L2 region
gacaataat

SEQ ID NO: 4584 - DNA, 9 bp, Artificial Sequence
  Synthetic polynucleotide encoding artificial human antibody CDR-L2 region
caggtcact

SEQ ID NO: 4585 - DNA, 9 bp, Artificial Sequence
  Synthetic polynucleotide encoding artificial human antibody CDR-L2 region
ggtgcatcc

SEQ ID NO: 4586 - DNA, 9 bp, Artificial Sequence
  Synthetic polynucleotide encoding artificial human antibody CDR-L2 region
aacacaaac

SEQ ID NO: 4587 - DNA, 9 bp, Artificial Sequence
  Synthetic polynucleotide encoding artificial human antibody CDR-L2 region
agtaataat

SEQ ID NO: 4588 - DNA, 9 bp, Artificial Sequence
  Synthetic polynucleotide encoding artificial human antibody CDR-L2 region
ggtacatcc

SEQ ID NO: 4589 - DNA, 9 bp, Artificial Sequence
  Synthetic polynucleotide encoding artificial human antibody CDR-L2 region
gctgcatcc

SEQ ID NO: 4590 - DNA, 9 bp, Artificial Sequence
  Synthetic polynucleotide encoding artificial human antibody CDR-L2 region
tctgatagc

SEQ ID NO: 4591 - DNA, 9 bp, Artificial Sequence
  Synthetic polynucleotide encoding artificial human antibody CDR-L2 region
ggttcattt

SEQ ID NO: 4592 - DNA, 9 bp, Artificial Sequence
  Synthetic polynucleotide encoding artificial human antibody CDR-L2 region
ggtgcatcc

SEQ ID NO: 4593 - DNA, 9 bp, Artificial Sequence
  Synthetic polynucleotide encoding artificial human antibody CDR-L2 region
ggtgcatcc

SEQ ID NO: 4594 - DNA, 9 bp, Artificial Sequence
  Synthetic polynucleotide encoding artificial human antibody CDR-L2 region
gctgcatcc

SEQ ID NO: 4595 - DNA, 9 bp, Artificial Sequence
  Synthetic polynucleotide encoding artificial human antibody CDR-L2 region
aaggcgtct

SEQ ID NO: 4596 - DNA, 9 bp, Artificial Sequence
  Synthetic polynucleotide encoding artificial human antibody CDR-L2 region
aggagcaac

SEQ ID NO: 4597 - DNA, 9 bp, Artificial Sequence
  Synthetic polynucleotide encoding artificial human antibody CDR-L2 region
ggtgcatcc

SEQ ID NO: 4598 - DNA, 9 bp, Artificial Sequence
  Synthetic polynucleotide encoding artificial human antibody CDR-L2 region
gatgtcagt

SEQ ID NO: 4599 - DNA, 9 bp, Artificial Sequence
  Synthetic polynucleotide encoding artificial human antibody CDR-L2 region
gatgcatcc

SEQ ID NO: 4600 - DNA, 9 bp, Artificial Sequence
  Synthetic polynucleotide encoding artificial human antibody CDR-L2 region
gacaataat

SEQ ID NO: 4601 - DNA, 9 bp, Artificial Sequence
  Synthetic polynucleotide encoding artificial human antibody CDR-L2 region
ggtgcatcc

SEQ ID NO: 4602 - DNA, 9 bp, Artificial Sequence
  Synthetic polynucleotide encoding artificial human antibody CDR-L2 region
gaggacact

SEQ ID NO: 4603 - DNA, 9 bp, Artificial Sequence
  Synthetic polynucleotide encoding artificial human antibody CDR-L2 region
ggtaaaaac

SEQ ID NO: 4604 - DNA, 9 bp, Artificial Sequence
  Synthetic polynucleotide encoding artificial human antibody CDR-L2 region
gatgcatcc

SEQ ID NO: 4605 - DNA, 9 bp, Artificial Sequence
  Synthetic polynucleotide encoding artificial human antibody CDR-L2 region
gatgtcagt

SEQ ID NO: 4606 - DNA, 9 bp, Artificial Sequence
  Synthetic polynucleotide encoding artificial human antibody CDR-L2 region
ggctcatcc

SEQ ID NO: 4607 - DNA, 9 bp, Artificial Sequence
  Synthetic polynucleotide encoding artificial human antibody CDR-L2 region
gatgtcttt

SEQ ID NO: 4608 - DNA, 9 bp, Artificial Sequence
  Synthetic polynucleotide encoding artificial human antibody CDR-L2 region
ggtaataac

SEQ ID NO: 4609 - DNA, 9 bp, Artificial Sequence
  Synthetic polynucleotide encoding artificial human antibody CDR-L2 region
aaagacact

SEQ ID NO: 4610 - DNA, 9 bp, Artificial Sequence
  Synthetic polynucleotide encoding artificial human antibody CDR-L2 region
ggtgcatcc

SEQ ID NO: 4611 - DNA, 9 bp, Artificial Sequence
  Synthetic polynucleotide encoding artificial human antibody CDR-L2 region
tgggcatct

SEQ ID NO: 4612 - DNA, 9 bp, Artificial Sequence
  Synthetic polynucleotide encoding artificial human antibody CDR-L2 region
gctgcatcc

SEQ ID NO: 4613 - DNA, 9 bp, Artificial Sequence
  Synthetic polynucleotide encoding artificial human antibody CDR-L2 region
gatgtcggt

SEQ ID NO: 4614 - DNA, 9 bp, Artificial Sequence
  Synthetic polynucleotide encoding artificial human antibody CDR-L2 region
gctacatcc

SEQ ID NO: 4615 - DNA, 9 bp, Artificial Sequence
  Synthetic polynucleotide encoding artificial human antibody CDR-L2 region
ttgggttct

SEQ ID NO: 4616 - DNA, 9 bp, Artificial Sequence
  Synthetic polynucleotide encoding artificial human antibody CDR-L2 region
tcaaacacc

SEQ ID NO: 4617 - DNA, 9 bp, Artificial Sequence
  Synthetic polynucleotide encoding artificial human antibody CDR-L2 region
atggcttct

SEQ ID NO: 4618 - DNA, 9 bp, Artificial Sequence
  Synthetic polynucleotide encoding artificial human antibody CDR-L2 region
ggtacatct

SEQ ID NO: 4619 - DNA, 9 bp, Artificial Sequence
  Synthetic polynucleotide encoding artificial human antibody CDR-L2 region
gatgtcagt

SEQ ID NO: 4620 - DNA, 9 bp, Artificial Sequence
  Synthetic polynucleotide encoding artificial human antibody CDR-L2 region
agtactaat

SEQ ID NO: 4621 - DNA, 9 bp, Artificial Sequence
  Synthetic polynucleotide encoding artificial human antibody CDR-L2 region
gaccatgca

SEQ ID NO: 4622 - DNA, 9 bp, Artificial Sequence
  Synthetic polynucleotide encoding artificial human antibody CDR-L2 region
ggttcatcc

SEQ ID NO: 4623 - DNA, 9 bp, Artificial Sequence
  Synthetic polynucleotide encoding artificial human antibody CDR-L2 region
gagaccact

SEQ ID NO: 4624 - DNA, 9 bp, Artificial Sequence
  Synthetic polynucleotide encoding artificial human antibody CDR-L2 region
gaggtcagt

SEQ ID NO: 4625 - DNA, 9 bp, Artificial Sequence
  Synthetic polynucleotide encoding artificial human antibody CDR-L2 region
gatgcatcc

SEQ ID NO: 4626 - DNA, 9 bp, Artificial Sequence
  Synthetic polynucleotide encoding artificial human antibody CDR-L2 region
gctgcatcc

SEQ ID NO: 4627 - DNA, 9 bp, Artificial Sequence
  Synthetic polynucleotide encoding artificial human antibody CDR-L2 region
aaggcgtct

SEQ ID NO: 4628 - DNA, 9 bp, Artificial Sequence
  Synthetic polynucleotide encoding artificial human antibody CDR-L2 region
gaggtcaat

SEQ ID NO: 4629 - DNA, 9 bp, Artificial Sequence
  Synthetic polynucleotide encoding artificial human antibody CDR-L2 region
actgcatcc

SEQ ID NO: 4630 - DNA, 9 bp, Artificial Sequence
  Synthetic polynucleotide encoding artificial human antibody CDR-L2 region
agtacaatc

SEQ ID NO: 4631 - DNA, 9 bp, Artificial Sequence
  Synthetic polynucleotide encoding artificial human antibody CDR-L2 region
gctgcatcc

SEQ ID NO: 4632 - DNA, 9 bp, Artificial Sequence
  Synthetic polynucleotide encoding artificial human antibody CDR-L2 region
ggtaacaac

SEQ ID NO: 4633 - DNA, 9 bp, Artificial Sequence
  Synthetic polynucleotide encoding artificial human antibody CDR-L2 region
ggtgcatcc

SEQ ID NO: 4634 - DNA, 9 bp, Artificial Sequence
  Synthetic polynucleotide encoding artificial human antibody CDR-L2 region
ggttcatca

SEQ ID NO: 4635 - DNA, 9 bp, Artificial Sequence
  Synthetic polynucleotide encoding artificial human antibody CDR-L2 region
gctgcatcc

SEQ ID NO: 4636 - DNA, 9 bp, Artificial Sequence
  Synthetic polynucleotide encoding artificial human antibody CDR-L2 region
aataataat

SEQ ID NO: 4637 - DNA, 9 bp, Artificial Sequence
  Synthetic polynucleotide encoding artificial human antibody CDR-L2 region
gatgatagc

SEQ ID NO: 4638 - DNA, 9 bp, Artificial Sequence
  Synthetic polynucleotide encoding artificial human antibody CDR-L2 region
gctgcatcc

SEQ ID NO: 4639 - DNA, 9 bp, Artificial Sequence
  Synthetic polynucleotide encoding artificial human antibody CDR-L2 region
acctataat

SEQ ID NO: 4640 - DNA, 9 bp, Artificial Sequence
  Synthetic polynucleotide encoding artificial human antibody CDR-L2 region
aagaataac

SEQ ID NO: 4641 - DNA, 9 bp, Artificial Sequence
  Synthetic polynucleotide encoding artificial human antibody CDR-L2 region
gatgtcact

SEQ ID NO: 4642 - DNA, 9 bp, Artificial Sequence
  Synthetic polynucleotide encoding artificial human antibody CDR-L2 region
tgggcctct

SEQ ID NO: 4643 - DNA, 9 bp, Artificial Sequence
  Synthetic polynucleotide encoding artificial human antibody CDR-L2 region
aagatttct

SEQ ID NO: 4644 - DNA, 9 bp, Artificial Sequence
  Synthetic polynucleotide encoding artificial human antibody CDR-L2 region
gaccataag

SEQ ID NO: 4645 - DNA, 9 bp, Artificial Sequence
  Synthetic polynucleotide encoding artificial human antibody CDR-L2 region
gaaaacgat

SEQ ID NO: 4646 - DNA, 9 bp, Artificial Sequence
  Synthetic polynucleotide encoding artificial human antibody CDR-L2 region
ggtgcatcc

SEQ ID NO: 4647 - DNA, 9 bp, Artificial Sequence
  Synthetic polynucleotide encoding artificial human antibody CDR-L2 region
ggtgcatcc

SEQ ID NO: 4648 - DNA, 9 bp, Artificial Sequence
  Synthetic polynucleotide encoding artificial human antibody CDR-L2 region
ggttactcc

SEQ ID NO: 4649 - DNA, 9 bp, Artificial Sequence
  Synthetic polynucleotide encoding artificial human antibody CDR-L2 region
gacgtcagt

SEQ ID NO: 4650 - DNA, 9 bp, Artificial Sequence
  Synthetic polynucleotide encoding artificial human antibody CDR-L2 region
agtaataat

SEQ ID NO: 4651 - DNA, 9 bp, Artificial Sequence
  Synthetic polynucleotide encoding artificial human antibody CDR-L2 region
aagatttct

SEQ ID NO: 4652 - DNA, 9 bp, Artificial Sequence
  Synthetic polynucleotide encoding artificial human antibody CDR-L2 region
aaggcaaat

SEQ ID NO: 4653 - DNA, 9 bp, Artificial Sequence
  Synthetic polynucleotide encoding artificial human antibody CDR-L2 region
gacaatgat

SEQ ID NO: 4654 - DNA, 9 bp, Artificial Sequence
  Synthetic polynucleotide encoding artificial human antibody CDR-L2 region
ggtgcatcc

SEQ ID NO: 4655 - DNA, 9 bp, Artificial Sequence
  Synthetic polynucleotide encoding artificial human antibody CDR-L2 region
ggtaatagt

SEQ ID NO: 4656 - DNA, 9 bp, Artificial Sequence
  Synthetic polynucleotide encoding artificial human antibody CDR-L2 region
ggagcatcc

SEQ ID NO: 4657 - DNA, 9 bp, Artificial Sequence
  Synthetic polynucleotide encoding artificial human antibody CDR-L2 region
aaggcatct

SEQ ID NO: 4658 - DNA, 9 bp, Artificial Sequence
  Synthetic polynucleotide encoding artificial human antibody CDR-L2 region
ttgggttct

SEQ ID NO: 4659 - DNA, 9 bp, Artificial Sequence
  Synthetic polynucleotide encoding artificial human antibody CDR-L2 region
aataataat

SEQ ID NO: 4660 - DNA, 9 bp, Artificial Sequence
  Synthetic polynucleotide encoding artificial human antibody CDR-L2 region
agtaatgat

SEQ ID NO: 4661 - DNA, 21 bp, Artificial Sequence
  Synthetic polynucleotide encoding artificial human antibody CDR-L2 region
cttaacagtgatggcagccac

SEQ ID NO: 4662 - DNA, 9 bp, Artificial Sequence
  Synthetic polynucleotide encoding artificial human antibody CDR-L2 region
gatgcatcc

SEQ ID NO: 4663 - DNA, 9 bp, Artificial Sequence
  Synthetic polynucleotide encoding artificial human antibody CDR-L2 region
agtagtaat

SEQ ID NO: 4664 - DNA, 9 bp, Artificial Sequence
  Synthetic polynucleotide encoding artificial human antibody CDR-L2 region
ggtgcatcc

SEQ ID NO: 4665 - DNA, 9 bp, Artificial Sequence
  Synthetic polynucleotide encoding artificial human antibody CDR-L2 region
gacaataat

SEQ ID NO: 4666 - DNA, 9 bp, Artificial Sequence
  Synthetic polynucleotide encoding artificial human antibody CDR-L2 region
gacgatgat

SEQ ID NO: 4667 - DNA, 9 bp, Artificial Sequence
  Synthetic polynucleotide encoding artificial human antibody CDR-L2 region
ggtaatagt

SEQ ID NO: 4668 - DNA, 9 bp, Artificial Sequence
  Synthetic polynucleotide encoding artificial human antibody CDR-L2 region
agtaatgat

SEQ ID NO: 4669 - DNA, 9 bp, Artificial Sequence
  Synthetic polynucleotide encoding artificial human antibody CDR-L2 region
ttgggttct

SEQ ID NO: 4670 - DNA, 9 bp, Artificial Sequence
  Synthetic polynucleotide encoding artificial human antibody CDR-L2 region
agtaatgat

SEQ ID NO: 4671 - DNA, 9 bp, Artificial Sequence
  Synthetic polynucleotide encoding artificial human antibody CDR-L2 region
agtaatgat

SEQ ID NO: 4672 - DNA, 9 bp, Artificial Sequence
  Synthetic polynucleotide encoding artificial human antibody CDR-L2 region
ggtaacaac

SEQ ID NO: 4673 - DNA, 9 bp, Artificial Sequence
  Synthetic polynucleotide encoding artificial human antibody CDR-L2 region
caggtttct

SEQ ID NO: 4674 - DNA, 9 bp, Artificial Sequence
  Synthetic polynucleotide encoding artificial human antibody CDR-L2 region
gatgcatcc

SEQ ID NO: 4675 - DNA, 9 bp, Artificial Sequence
  Synthetic polynucleotide encoding artificial human antibody CDR-L2 region
gatgcctcc

SEQ ID NO: 4676 - DNA, 9 bp, Artificial Sequence
  Synthetic polynucleotide encoding artificial human antibody CDR-L2 region
aaggcgtct

SEQ ID NO: 4677 - DNA, 9 bp, Artificial Sequence
  Synthetic polynucleotide encoding artificial human antibody CDR-L2 region
gaggacagc

SEQ ID NO: 4678 - DNA, 9 bp, Artificial Sequence
  Synthetic polynucleotide encoding artificial human antibody CDR-L2 region
gatgtcaat

SEQ ID NO: 4679 - DNA, 9 bp, Artificial Sequence
  Synthetic polynucleotide encoding artificial human antibody CDR-L2 region
gacaataat

SEQ ID NO: 4680 - DNA, 9 bp, Artificial Sequence
  Synthetic polynucleotide encoding artificial human antibody CDR-L2 region
ggtgcatcc

SEQ ID NO: 4681 - DNA, 9 bp, Artificial Sequence
  Synthetic polynucleotide encoding artificial human antibody CDR-L2 region
gctgcatcc

SEQ ID NO: 4682 - DNA, 9 bp, Artificial Sequence
  Synthetic polynucleotide encoding artificial human antibody CDR-L2 region
agtaatgat

SEQ ID NO: 4683 - DNA, 9 bp, Artificial Sequence
  Synthetic polynucleotide encoding artificial human antibody CDR-L2 region
agtagtgat

SEQ ID NO: 4684 - DNA, 9 bp, Artificial Sequence
  Synthetic polynucleotide encoding artificial human antibody CDR-L2 region
tacattttt

SEQ ID NO: 4685 - DNA, 9 bp, Artificial Sequence
  Synthetic polynucleotide encoding artificial human antibody CDR-L2 region
gctgcatcc

SEQ ID NO: 4686 - DNA, 9 bp, Artificial Sequence
  Synthetic polynucleotide encoding artificial human antibody CDR-L2 region
gaggtcagt

SEQ ID NO: 4687 - DNA, 9 bp, Artificial Sequence
  Synthetic polynucleotide encoding artificial human antibody CDR-L2 region
gaggtcagt

SEQ ID NO: 4688 - DNA, 9 bp, Artificial Sequence
  Synthetic polynucleotide encoding artificial human antibody CDR-L2 region
aaggcatct

SEQ ID NO: 4689 - DNA, 9 bp, Artificial Sequence
  Synthetic polynucleotide encoding artificial human antibody CDR-L2 region
tgggcatct

SEQ ID NO: 4690 - DNA, 9 bp, Artificial Sequence
  Synthetic polynucleotide encoding artificial human antibody CDR-L2 region
gttaataat

SEQ ID NO: 4691 - DNA, 9 bp, Artificial Sequence
  Synthetic polynucleotide encoding artificial human antibody CDR-L2 region
gctgcatcc

SEQ ID NO: 4692 - DNA, 9 bp, Artificial Sequence
  Synthetic polynucleotide encoding artificial human antibody CDR-L2 region
gctgcatcc

SEQ ID NO: 4693 - DNA, 9 bp, Artificial Sequence
  Synthetic polynucleotide encoding artificial human antibody CDR-L2 region
gaagtcgtt

SEQ ID NO: 4694 - DNA, 9 bp, Artificial Sequence
  Synthetic polynucleotide encoding artificial human antibody CDR-L2 region
ggtaacaac

SEQ ID NO: 4695 - DNA, 9 bp, Artificial Sequence
  Synthetic polynucleotide encoding artificial human antibody CDR-L2 region
gatgcatcc

SEQ ID NO: 4696 - DNA, 9 bp, Artificial Sequence
  Synthetic polynucleotide encoding artificial human antibody CDR-L2 region
tgggcatct

SEQ ID NO: 4697 - DNA, 9 bp, Artificial Sequence
  Synthetic polynucleotide encoding artificial human antibody CDR-L2 region
caggtgacc

SEQ ID NO: 4698 - DNA, 9 bp, Artificial Sequence
  Synthetic polynucleotide encoding artificial human antibody CDR-L2 region
gacaataat

SEQ ID NO: 4699 - DNA, 9 bp, Artificial Sequence
  Synthetic polynucleotide encoding artificial human antibody CDR-L2 region
gatctcact

SEQ ID NO: 4700 - DNA, 9 bp, Artificial Sequence
  Synthetic polynucleotide encoding artificial human antibody CDR-L2 region
gacgtcagt

SEQ ID NO: 4701 - DNA, 9 bp, Artificial Sequence
  Synthetic polynucleotide encoding artificial human antibody CDR-L2 region
aataataat

SEQ ID NO: 4702 - DNA, 9 bp, Artificial Sequence
  Synthetic polynucleotide encoding artificial human antibody CDR-L2 region
gatacatat

SEQ ID NO: 4703 - DNA, 9 bp, Artificial Sequence
  Synthetic polynucleotide encoding artificial human antibody CDR-L2 region
aacaatgat

SEQ ID NO: 4704 - DNA, 9 bp, Artificial Sequence
  Synthetic polynucleotide encoding artificial human antibody CDR-L2 region
gaggtcact

SEQ ID NO: 4705 - DNA, 9 bp, Artificial Sequence
  Synthetic polynucleotide encoding artificial human antibody CDR-L2 region
gggacgtcc

SEQ ID NO: 4706 - DNA, 9 bp, Artificial Sequence
  Synthetic polynucleotide encoding artificial human antibody CDR-L2 region
gatgtctct

SEQ ID NO: 4707 - DNA, 9 bp, Artificial Sequence
  Synthetic polynucleotide encoding artificial human antibody CDR-L2 region
aaggtttct

SEQ ID NO: 4708 - DNA, 9 bp, Artificial Sequence
  Synthetic polynucleotide encoding artificial human antibody CDR-L2 region
aaggcatct

SEQ ID NO: 4709 - DNA, 9 bp, Artificial Sequence
  Synthetic polynucleotide encoding artificial human antibody CDR-L2 region
gatgtctat

SEQ ID NO: 4710 - DNA, 9 bp, Artificial Sequence
  Synthetic polynucleotide encoding artificial human antibody CDR-L2 region
aataataat

SEQ ID NO: 4711 - DNA, 9 bp, Artificial Sequence
  Synthetic polynucleotide encoding artificial human antibody CDR-L2 region
aaggtttct

SEQ ID NO: 4712 - DNA, 9 bp, Artificial Sequence
  Synthetic polynucleotide encoding artificial human antibody CDR-L2 region
gaggtcagt

SEQ ID NO: 4713 - DNA, 9 bp, Artificial Sequence
  Synthetic polynucleotide encoding artificial human antibody CDR-L2 region
gaagcctcc

SEQ ID NO: 4714 - DNA, 9 bp, Artificial Sequence
  Synthetic polynucleotide encoding artificial human antibody CDR-L2 region
gaggtcagt

SEQ ID NO: 4715 - DNA, 9 bp, Artificial Sequence
  Synthetic polynucleotide encoding artificial human antibody CDR-L2 region
ggtggatcc

SEQ ID NO: 4716 - DNA, 9 bp, Artificial Sequence
  Synthetic polynucleotide encoding artificial human antibody CDR-L2 region
gttgcatcc

SEQ ID NO: 4717 - DNA, 9 bp, Artificial Sequence
  Synthetic polynucleotide encoding artificial human antibody CDR-L2 region
ggtgcatcc

SEQ ID NO: 4718 - DNA, 9 bp, Artificial Sequence
  Synthetic polynucleotide encoding artificial human antibody CDR-L2 region
gatctcact

SEQ ID NO: 4719 - DNA, 9 bp, Artificial Sequence
  Synthetic polynucleotide encoding artificial human antibody CDR-L2 region
gaggtcaat

SEQ ID NO: 4720 - DNA, 9 bp, Artificial Sequence
  Synthetic polynucleotide encoding artificial human antibody CDR-L2 region
aaggcgtct

SEQ ID NO: 4721 - DNA, 9 bp, Artificial Sequence
  Synthetic polynucleotide encoding artificial human antibody CDR-L2 region
gaagatgac

SEQ ID NO: 4722 - DNA, 9 bp, Artificial Sequence
  Synthetic polynucleotide encoding artificial human antibody CDR-L2 region
gctgcatcc

SEQ ID NO: 4723 - DNA, 9 bp, Artificial Sequence
  Synthetic polynucleotide encoding artificial human antibody CDR-L2 region
actgcatcc

SEQ ID NO: 4724 - DNA, 9 bp, Artificial Sequence
  Synthetic polynucleotide encoding artificial human antibody CDR-L2 region
gaggtcact

SEQ ID NO: 4725 - DNA, 9 bp, Artificial Sequence
  Synthetic polynucleotide encoding artificial human antibody CDR-L2 region
aatcatagt

SEQ ID NO: 4726 - DNA, 9 bp, Artificial Sequence
  Synthetic polynucleotide encoding artificial human antibody CDR-L2 region
aaggcatct

SEQ ID NO: 4727 - DNA, 9 bp, Artificial Sequence
  Synthetic polynucleotide encoding artificial human antibody CDR-L2 region
aaggtttct

SEQ ID NO: 4728 - DNA, 9 bp, Artificial Sequence
  Synthetic polynucleotide encoding artificial human antibody CDR-L2 region
gaaaatatg

SEQ ID NO: 4729 - DNA, 9 bp, Artificial Sequence
  Synthetic polynucleotide encoding artificial human antibody CDR-L2 region
tgggcatct

SEQ ID NO: 4730 - DNA, 9 bp, Artificial Sequence
  Synthetic polynucleotide encoding artificial human antibody CDR-L2 region
aagaatgat

SEQ ID NO: 4731 - DNA, 9 bp, Artificial Sequence
  Synthetic polynucleotide encoding artificial human antibody CDR-L2 region
gatgcatcc

SEQ ID NO: 4732 - DNA, 9 bp, Artificial Sequence
  Synthetic polynucleotide encoding artificial human antibody CDR-L2 region
tgggcatct

SEQ ID NO: 4733 - DNA, 9 bp, Artificial Sequence
  Synthetic polynucleotide encoding artificial human antibody CDR-L2 region
caggtcaat

SEQ ID NO: 4734 - DNA, 9 bp, Artificial Sequence
  Synthetic polynucleotide encoding artificial human antibody CDR-L2 region
gatgcatcc

SEQ ID NO: 4735 - DNA, 9 bp, Artificial Sequence
  Synthetic polynucleotide encoding artificial human antibody CDR-L2 region
gaggacagc

SEQ ID NO: 4736 - DNA, 21 bp, Artificial Sequence
  Synthetic polynucleotide encoding artificial human antibody CDR-L2 region
cttaacagtgatggcagtcac

SEQ ID NO: 4737 - DNA, 9 bp, Artificial Sequence
  Synthetic polynucleotide encoding artificial human antibody CDR-L2 region
gaggtcagt

SEQ ID NO: 4738 - DNA, 9 bp, Artificial Sequence
  Synthetic polynucleotide encoding artificial human antibody CDR-L2 region
gaggccact

SEQ ID NO: 4739 - DNA, 9 bp, Artificial Sequence
  Synthetic polynucleotide encoding artificial human antibody CDR-L2 region
tgggcatct

SEQ ID NO: 4740 - DNA, 9 bp, Artificial Sequence
  Synthetic polynucleotide encoding artificial human antibody CDR-L2 region
gatgcatcc

SEQ ID NO: 4741 - DNA, 9 bp, Artificial Sequence
  Synthetic polynucleotide encoding artificial human antibody CDR-L2 region
gatgtcact

SEQ ID NO: 4742 - DNA, 9 bp, Artificial Sequence
  Synthetic polynucleotide encoding artificial human antibody CDR-L2 region
cctgcatcc

SEQ ID NO: 4743 - DNA, 9 bp, Artificial Sequence
  Synthetic polynucleotide encoding artificial human antibody CDR-L2 region
caagacaac

SEQ ID NO: 4744 - DNA, 9 bp, Artificial Sequence
  Synthetic polynucleotide encoding artificial human antibody CDR-L2 region
gatacaagt

SEQ ID NO: 4745 - DNA, 9 bp, Artificial Sequence
  Synthetic polynucleotide encoding artificial human antibody CDR-L2 region
ggtgtatcc

SEQ ID NO: 4746 - DNA, 9 bp, Artificial Sequence
  Synthetic polynucleotide encoding artificial human antibody CDR-L2 region
agtaataat

SEQ ID NO: 4747 - DNA, 9 bp, Artificial Sequence
  Synthetic polynucleotide encoding artificial human antibody CDR-L2 region
gaggtcagt

SEQ ID NO: 4748 - DNA, 9 bp, Artificial Sequence
  Synthetic polynucleotide encoding artificial human antibody CDR-L2 region
ttggcatct

SEQ ID NO: 4749 - DNA, 9 bp, Artificial Sequence
  Synthetic polynucleotide encoding artificial human antibody CDR-L2 region
ggtgcatcc

SEQ ID NO: 4750 - DNA, 9 bp, Artificial Sequence
  Synthetic polynucleotide encoding artificial human antibody CDR-L2 region
gatctcagt

SEQ ID NO: 4751 - DNA, 9 bp, Artificial Sequence
  Synthetic polynucleotide encoding artificial human antibody CDR-L2 region
gctgcatcc

SEQ ID NO: 4752 - DNA, 9 bp, Artificial Sequence
  Synthetic polynucleotide encoding artificial human antibody CDR-L2 region
aaggcatct

SEQ ID NO: 4753 - DNA, 9 bp, Artificial Sequence
  Synthetic polynucleotide encoding artificial human antibody CDR-L2 region
gaaggaact

SEQ ID NO: 4754 - DNA, 9 bp, Artificial Sequence
  Synthetic polynucleotide encoding artificial human antibody CDR-L2 region
gaggtcact

SEQ ID NO: 4755 - DNA, 9 bp, Artificial Sequence
  Synthetic polynucleotide encoding artificial human antibody CDR-L2 region
ggtaacagc

SEQ ID NO: 4756 - DNA, 9 bp, Artificial Sequence
  Synthetic polynucleotide encoding artificial human antibody CDR-L2 region
gctgcatcc

SEQ ID NO: 4757 - DNA, 9 bp, Artificial Sequence
  Synthetic polynucleotide encoding artificial human antibody CDR-L2 region
tgggcgtct

SEQ ID NO: 4758 - DNA, 9 bp, Artificial Sequence
  Synthetic polynucleotide encoding artificial human antibody CDR-L2 region
gatgtgtct

SEQ ID NO: 4759 - DNA, 9 bp, Artificial Sequence
  Synthetic polynucleotide encoding artificial human antibody CDR-L2 region
gattcatcc

SEQ ID NO: 4760 - DNA, 9 bp, Artificial Sequence
  Synthetic polynucleotide encoding artificial human antibody CDR-L2 region
ggtgcatcc

SEQ ID NO: 4761 - DNA, 9 bp, Artificial Sequence
  Synthetic polynucleotide encoding artificial human antibody CDR-L2 region
aaggcgtct

SEQ ID NO: 4762 - DNA, 9 bp, Artificial Sequence
  Synthetic polynucleotide encoding artificial human antibody CDR-L2 region
ggtaacacc

SEQ ID NO: 4763 - DNA, 9 bp, Artificial Sequence
  Synthetic polynucleotide encoding artificial human antibody CDR-L2 region
caagatagc

SEQ ID NO: 4764 - DNA, 9 bp, Artificial Sequence
  Synthetic polynucleotide encoding artificial human antibody CDR-L2 region
agggcctcc

SEQ ID NO: 4765 - DNA, 9 bp, Artificial Sequence
  Synthetic polynucleotide encoding artificial human antibody CDR-L2 region
gaagcaaac

SEQ ID NO: 4766 - DNA, 9 bp, Artificial Sequence
  Synthetic polynucleotide encoding artificial human antibody CDR-L2 region
aataataat

SEQ ID NO: 4767 - DNA, 9 bp, Artificial Sequence
  Synthetic polynucleotide encoding artificial human antibody CDR-L2 region
ggagcatcc

SEQ ID NO: 4768 - DNA, 9 bp, Artificial Sequence
  Synthetic polynucleotide encoding artificial human antibody CDR-L2 region
gctgcatcc

SEQ ID NO: 4769 - DNA, 9 bp, Artificial Sequence
  Synthetic polynucleotide encoding artificial human antibody CDR-L2 region
aaagacagt

SEQ ID NO: 4770 - DNA, 9 bp, Artificial Sequence
  Synthetic polynucleotide encoding artificial human antibody CDR-L2 region
gaggtcagt

SEQ ID NO: 4771 - DNA, 9 bp, Artificial Sequence
  Synthetic polynucleotide encoding artificial human antibody CDR-L2 region
ggtgcatcc

SEQ ID NO: 4772 - DNA, 9 bp, Artificial Sequence
  Synthetic polynucleotide encoding artificial human antibody CDR-L2 region
tgggcatct

SEQ ID NO: 4773 - DNA, 9 bp, Artificial Sequence
  Synthetic polynucleotide encoding artificial human antibody CDR-L2 region
aaggcatct

SEQ ID NO: 4774 - DNA, 9 bp, Artificial Sequence
  Synthetic polynucleotide encoding artificial human antibody CDR-L2 region
tgggcatct

SEQ ID NO: 4775 - DNA, 9 bp, Artificial Sequence
  Synthetic polynucleotide encoding artificial human antibody CDR-L2 region
aatactaat

SEQ ID NO: 4776 - DNA, 9 bp, Artificial Sequence
  Synthetic polynucleotide encoding artificial human antibody CDR-L2 region
aaggcgtct

SEQ ID NO: 4777 - DNA, 9 bp, Artificial Sequence
  Synthetic polynucleotide encoding artificial human antibody CDR-L2 region
tgggcatct

SEQ ID NO: 4778 - DNA, 9 bp, Artificial Sequence
  Synthetic polynucleotide encoding artificial human antibody CDR-L2 region
aggaataat

SEQ ID NO: 4779 - DNA, 9 bp, Artificial Sequence
  Synthetic polynucleotide encoding artificial human antibody CDR-L2 region
gatgcatcc

SEQ ID NO: 4780 - DNA, 9 bp, Artificial Sequence
  Synthetic polynucleotide encoding artificial human antibody CDR-L2 region
ggtgcatcc

SEQ ID NO: 4781 - DNA, 9 bp, Artificial Sequence
  Synthetic polynucleotide encoding artificial human antibody CDR-L2 region
tgggcttct

SEQ ID NO: 4782 - DNA, 9 bp, Artificial Sequence
  Synthetic polynucleotide encoding artificial human antibody CDR-L2 region
aaggtttct

SEQ ID NO: 4783 - DNA, 9 bp, Artificial Sequence
  Synthetic polynucleotide encoding artificial human antibody CDR-L2 region
gaggtcact

SEQ ID NO: 4784 - DNA, 9 bp, Artificial Sequence
  Synthetic polynucleotide encoding artificial human antibody CDR-L2 region
aaggtttct

SEQ ID NO: 4785 - DNA, 9 bp, Artificial Sequence
  Synthetic polynucleotide encoding artificial human antibody CDR-L2 region
gaggtcaat

SEQ ID NO: 4786 - DNA, 9 bp, Artificial Sequence
  Synthetic polynucleotide encoding artificial human antibody CDR-L2 region
gatgcatcc

SEQ ID NO: 4787 - DNA, 9 bp, Artificial Sequence
  Synthetic polynucleotide encoding artificial human antibody CDR-L2 region
ggagcattt

SEQ ID NO: 4788 - DNA, 9 bp, Artificial Sequence
  Synthetic polynucleotide encoding artificial human antibody CDR-L2 region
gctgcatcc

SEQ ID NO: 4789 - DNA, 9 bp, Artificial Sequence
  Synthetic polynucleotide encoding artificial human antibody CDR-L2 region
ggtaaaaat

SEQ ID NO: 4790 - DNA, 9 bp, Artificial Sequence
  Synthetic polynucleotide encoding artificial human antibody CDR-L2 region
gaagactcc

SEQ ID NO: 4791 - DNA, 9 bp, Artificial Sequence
  Synthetic polynucleotide encoding artificial human antibody CDR-L2 region
agtaataat

SEQ ID NO: 4792 - DNA, 9 bp, Artificial Sequence
  Synthetic polynucleotide encoding artificial human antibody CDR-L2 region
aatcatgat

SEQ ID NO: 4793 - DNA, 9 bp, Artificial Sequence
  Synthetic polynucleotide encoding artificial human antibody CDR-L2 region
gaagcatcc

SEQ ID NO: 4794 - DNA, 9 bp, Artificial Sequence
  Synthetic polynucleotide encoding artificial human antibody CDR-L2 region
ggtgcatcc

SEQ ID NO: 4795 - DNA, 9 bp, Artificial Sequence
  Synthetic polynucleotide encoding artificial human antibody CDR-L2 region
gatgtcagt

SEQ ID NO: 4796 - DNA, 9 bp, Artificial Sequence
  Synthetic polynucleotide encoding artificial human antibody CDR-L2 region
gagacgtcc

SEQ ID NO: 4797 - DNA, 9 bp, Artificial Sequence
  Synthetic polynucleotide encoding artificial human antibody CDR-L2 region
gatgcatcc

SEQ ID NO: 4798 - DNA, 9 bp, Artificial Sequence
  Synthetic polynucleotide encoding artificial human antibody CDR-L2 region
tgggcgtct

SEQ ID NO: 4799 - DNA, 9 bp, Artificial Sequence
  Synthetic polynucleotide encoding artificial human antibody CDR-L2 region
ggcgtctct

SEQ ID NO: 4800 - DNA, 9 bp, Artificial Sequence
  Synthetic polynucleotide encoding artificial human antibody CDR-L2 region
tgggcatct

SEQ ID NO: 4801 - DNA, 9 bp, Artificial Sequence
  Synthetic polynucleotide encoding artificial human antibody CDR-L2 region
ggtgcatcc

SEQ ID NO: 4802 - DNA, 21 bp, Artificial Sequence
  Synthetic polynucleotide encoding artificial human antibody CDR-L2 region
gttaacaatgatggcagccac

SEQ ID NO: 4803 - DNA, 9 bp, Artificial Sequence
  Synthetic polynucleotide encoding artificial human antibody CDR-L2 region
cagaataac

SEQ ID NO: 4804 - DNA, 9 bp, Artificial Sequence
  Synthetic polynucleotide encoding artificial human antibody CDR-L2 region
gatgtcagt

SEQ ID NO: 4805 - DNA, 9 bp, Artificial Sequence
  Synthetic polynucleotide encoding artificial human antibody CDR-L2 region
gatgtcagt

SEQ ID NO: 4806 - DNA, 9 bp, Artificial Sequence
  Synthetic polynucleotide encoding artificial human antibody CDR-L2 region
ggtgcatcc

SEQ ID NO: 4807 - DNA, 9 bp, Artificial Sequence
  Synthetic polynucleotide encoding artificial human antibody CDR-L2 region
gacaatgat

SEQ ID NO: 4808 - DNA, 9 bp, Artificial Sequence
  Synthetic polynucleotide encoding artificial human antibody CDR-L2 region
agtgatttt

SEQ ID NO: 4809 - DNA, 9 bp, Artificial Sequence
  Synthetic polynucleotide encoding artificial human antibody CDR-L2 region
gctgcatcc

SEQ ID NO: 4810 - DNA, 9 bp, Artificial Sequence
  Synthetic polynucleotide encoding artificial human antibody CDR-L2 region
ggtgcatcc

SEQ ID NO: 4811 - DNA, 9 bp, Artificial Sequence
  Synthetic polynucleotide encoding artificial human antibody CDR-L2 region
gctgcgtcc

SEQ ID NO: 4812 - DNA, 9 bp, Artificial Sequence
  Synthetic polynucleotide encoding artificial human antibody CDR-L2 region
aatggttcg

SEQ ID NO: 4813 - DNA, 9 bp, Artificial Sequence
  Synthetic polynucleotide encoding artificial human antibody CDR-L2 region
tctgcatcc

SEQ ID NO: 4814 - DNA, 9 bp, Artificial Sequence
  Synthetic polynucleotide encoding artificial human antibody CDR-L2 region
aaggtttct

SEQ ID NO: 4815 - DNA, 9 bp, Artificial Sequence
  Synthetic polynucleotide encoding artificial human antibody CDR-L2 region
gatgtcagt

SEQ ID NO: 4816 - DNA, 9 bp, Artificial Sequence
  Synthetic polynucleotide encoding artificial human antibody CDR-L2 region
gacactagt

SEQ ID NO: 4817 - DNA, 9 bp, Artificial Sequence
  Synthetic polynucleotide encoding artificial human antibody CDR-L2 region
ttgggttct

SEQ ID NO: 4818 - DNA, 9 bp, Artificial Sequence
  Synthetic polynucleotide encoding artificial human antibody CDR-L2 region
caagatagt

SEQ ID NO: 4819 - DNA, 9 bp, Artificial Sequence
  Synthetic polynucleotide encoding artificial human antibody CDR-L2 region
aggaataat

SEQ ID NO: 4820 - DNA, 9 bp, Artificial Sequence
  Synthetic polynucleotide encoding artificial human antibody CDR-L2 region
gatgcatcc

SEQ ID NO: 4821 - DNA, 9 bp, Artificial Sequence
  Synthetic polynucleotide encoding artificial human antibody CDR-L2 region
tgggcatct

SEQ ID NO: 4822 - DNA, 9 bp, Artificial Sequence
  Synthetic polynucleotide encoding artificial human antibody CDR-L2 region
aggaataat

SEQ ID NO: 4823 - DNA, 9 bp, Artificial Sequence
  Synthetic polynucleotide encoding artificial human antibody CDR-L2 region
gcaacctcc

SEQ ID NO: 4824 - DNA, 9 bp, Artificial Sequence
  Synthetic polynucleotide encoding artificial human antibody CDR-L2 region
gagggcagt

SEQ ID NO: 4825 - DNA, 9 bp, Artificial Sequence
  Synthetic polynucleotide encoding artificial human antibody CDR-L2 region
agtgataat

SEQ ID NO: 4826 - DNA, 9 bp, Artificial Sequence
  Synthetic polynucleotide encoding artificial human antibody CDR-L2 region
agtaataat

SEQ ID NO: 4827 - DNA, 9 bp, Artificial Sequence
  Synthetic polynucleotide encoding artificial human antibody CDR-L2 region
ggcacgtcc

SEQ ID NO: 4828 - DNA, 9 bp, Artificial Sequence
  Synthetic polynucleotide encoding artificial human antibody CDR-L2 region
gacaatgat

SEQ ID NO: 4829 - DNA, 9 bp, Artificial Sequence
  Synthetic polynucleotide encoding artificial human antibody CDR-L2 region
agcacaaac

SEQ ID NO: 4830 - DNA, 9 bp, Artificial Sequence
  Synthetic polynucleotide encoding artificial human antibody CDR-L2 region
aaggtttct

SEQ ID NO: 4831 - DNA, 9 bp, Artificial Sequence
  Synthetic polynucleotide encoding artificial human antibody CDR-L2 region
ttgggttct

SEQ ID NO: 4832 - DNA, 9 bp, Artificial Sequence
  Synthetic polynucleotide encoding artificial human antibody CDR-L2 region
gatgtcagt

SEQ ID NO: 4833 - DNA, 9 bp, Artificial Sequence
  Synthetic polynucleotide encoding artificial human antibody CDR-L2 region
agtaatggt

SEQ ID NO: 4834 - DNA, 9 bp, Artificial Sequence
  Synthetic polynucleotide encoding artificial human antibody CDR-L2 region
aagatttct

SEQ ID NO: 4835 - DNA, 9 bp, Artificial Sequence
  Synthetic polynucleotide encoding artificial human antibody CDR-L2 region
agtaataat

SEQ ID NO: 4836 - DNA, 9 bp, Artificial Sequence
  Synthetic polynucleotide encoding artificial human antibody CDR-L2 region
aaggcgtct

SEQ ID NO: 4837 - DNA, 9 bp, Artificial Sequence
  Synthetic polynucleotide encoding artificial human antibody CDR-L2 region
gaggtcagt

SEQ ID NO: 4838 - DNA, 9 bp, Artificial Sequence
  Synthetic polynucleotide encoding artificial human antibody CDR-L2 region
gaggtcact

SEQ ID NO: 4839 - DNA, 21 bp, Artificial Sequence
  Synthetic polynucleotide encoding artificial human antibody CDR-L2 region
gtcaccagtgatggcagccac

SEQ ID NO: 4840 - DNA, 9 bp, Artificial Sequence
  Synthetic polynucleotide encoding artificial human antibody CDR-L2 region
ggtaacagc

SEQ ID NO: 4841 - DNA, 9 bp, Artificial Sequence
  Synthetic polynucleotide encoding artificial human antibody CDR-L2 region
ggtaaaaac

SEQ ID NO: 4842 - DNA, 9 bp, Artificial Sequence
  Synthetic polynucleotide encoding artificial human antibody CDR-L2 region
ggggacaat

SEQ ID NO: 4843 - DNA, 9 bp, Artificial Sequence
  Synthetic polynucleotide encoding artificial human antibody CDR-L2 region
tatgcatcc

SEQ ID NO: 4844 - DNA, 9 bp, Artificial Sequence
  Synthetic polynucleotide encoding artificial human antibody CDR-L2 region
agtccatcc

SEQ ID NO: 4845 - DNA, 9 bp, Artificial Sequence
  Synthetic polynucleotide encoding artificial human antibody CDR-L2 region
atggcttct

SEQ ID NO: 4846 - DNA, 9 bp, Artificial Sequence
  Synthetic polynucleotide encoding artificial human antibody CDR-L2 region
gaggtcagt

SEQ ID NO: 4847 - DNA, 9 bp, Artificial Sequence
  Synthetic polynucleotide encoding artificial human antibody CDR-L2 region
ggtgtcagt

SEQ ID NO: 4848 - DNA, 9 bp, Artificial Sequence
  Synthetic polynucleotide encoding artificial human antibody CDR-L2 region
aaagacact

SEQ ID NO: 4849 - DNA, 9 bp, Artificial Sequence
  Synthetic polynucleotide encoding artificial human antibody CDR-L2 region
tgggcgtct

SEQ ID NO: 4850 - DNA, 9 bp, Artificial Sequence
  Synthetic polynucleotide encoding artificial human antibody CDR-L2 region
agtaataat

SEQ ID NO: 4851 - DNA, 9 bp, Artificial Sequence
  Synthetic polynucleotide encoding artificial human antibody CDR-L2 region
gctgcatcc

SEQ ID NO: 4852 - DNA, 9 bp, Artificial Sequence
  Synthetic polynucleotide encoding artificial human antibody CDR-L2 region
gctgcatcc

SEQ ID NO: 4853 - DNA, 9 bp, Artificial Sequence
  Synthetic polynucleotide encoding artificial human antibody CDR-L2 region
gaaactaag

SEQ ID NO: 4854 - DNA, 9 bp, Artificial Sequence
  Synthetic polynucleotide encoding artificial human antibody CDR-L2 region
aggaataat

SEQ ID NO: 4855 - DNA, 21 bp, Artificial Sequence
  Synthetic polynucleotide encoding artificial human antibody CDR-L2 region
cttaacaatgatggcagccac

SEQ ID NO: 4856 - DNA, 9 bp, Artificial Sequence
  Synthetic polynucleotide encoding artificial human antibody CDR-L2 region
gctgcatcc

SEQ ID NO: 4857 - DNA, 9 bp, Artificial Sequence
  Synthetic polynucleotide encoding artificial human antibody CDR-L2 region
agtaataat

SEQ ID NO: 4858 - DNA, 9 bp, Artificial Sequence
  Synthetic polynucleotide encoding artificial human antibody CDR-L2 region
gctgcatcc

SEQ ID NO: 4859 - DNA, 9 bp, Artificial Sequence
  Synthetic polynucleotide encoding artificial human antibody CDR-L2 region
aaggcgtct

SEQ ID NO: 4860 - DNA, 9 bp, Artificial Sequence
  Synthetic polynucleotide encoding artificial human antibody CDR-L2 region
gatgcatcc

SEQ ID NO: 4861 - DNA, 21 bp, Artificial Sequence
  Synthetic polynucleotide encoding artificial human antibody CDR-L2 region
cttaacagtgatggcagccac

SEQ ID NO: 4862 - DNA, 21 bp, Artificial Sequence
  Synthetic polynucleotide encoding artificial human antibody CDR-L2 region
cttaacagtgatggcagccac

SEQ ID NO: 4863 - DNA, 9 bp, Artificial Sequence
  Synthetic polynucleotide encoding artificial human antibody CDR-L2 region
gaactttac

SEQ ID NO: 4864 - DNA, 9 bp, Artificial Sequence
  Synthetic polynucleotide encoding artificial human antibody CDR-L2 region
gctgcatcc

SEQ ID NO: 4865 - DNA, 9 bp, Artificial Sequence
  Synthetic polynucleotide encoding artificial human antibody CDR-L2 region
ggggcgtct

SEQ ID NO: 4866 - DNA, 9 bp, Artificial Sequence
  Synthetic polynucleotide encoding artificial human antibody CDR-L2 region
atgaataat

SEQ ID NO: 4867 - DNA, 9 bp, Artificial Sequence
  Synthetic polynucleotide encoding artificial human antibody CDR-L2 region
gatgcatcc

SEQ ID NO: 4868 - DNA, 9 bp, Artificial Sequence
  Synthetic polynucleotide encoding artificial human antibody CDR-L2 region
gcggtttct

SEQ ID NO: 4869 - DNA, 9 bp, Artificial Sequence
  Synthetic polynucleotide encoding artificial human antibody CDR-L2 region
ttgtcttct

SEQ ID NO: 4870 - DNA, 21 bp, Artificial Sequence
  Synthetic polynucleotide encoding artificial human antibody CDR-L2 region
gttgaatttgatggccgccac

SEQ ID NO: 4871 - DNA, 9 bp, Artificial Sequence
  Synthetic polynucleotide encoding artificial human antibody CDR-L2 region
gatgtatcc

SEQ ID NO: 4872 - DNA, 9 bp, Artificial Sequence
  Synthetic polynucleotide encoding artificial human antibody CDR-L2 region
actaataat

SEQ ID NO: 4873 - DNA, 9 bp, Artificial Sequence
  Synthetic polynucleotide encoding artificial human antibody CDR-L2 region
gataacacc

SEQ ID NO: 4874 - DNA, 9 bp, Artificial Sequence
  Synthetic polynucleotide encoding artificial human antibody CDR-L2 region
gttgcgtcc

SEQ ID NO: 4875 - DNA, 9 bp, Artificial Sequence
  Synthetic polynucleotide encoding artificial human antibody CDR-L2 region
gatgtcagt

SEQ ID NO: 4876 - DNA, 9 bp, Artificial Sequence
  Synthetic polynucleotide encoding artificial human antibody CDR-L2 region
ggttcatcc

SEQ ID NO: 4877 - DNA, 9 bp, Artificial Sequence
  Synthetic polynucleotide encoding artificial human antibody CDR-L2 region
aaggcgtct

SEQ ID NO: 4878 - DNA, 9 bp, Artificial Sequence
  Synthetic polynucleotide encoding artificial human antibody CDR-L2 region
ggtgcatcc

SEQ ID NO: 4879 - DNA, 9 bp, Artificial Sequence
  Synthetic polynucleotide encoding artificial human antibody CDR-L2 region
aaggcatct

SEQ ID NO: 4880 - DNA, 9 bp, Artificial Sequence
  Synthetic polynucleotide encoding artificial human antibody CDR-L2 region
gatgtcacg

SEQ ID NO: 4881 - DNA, 9 bp, Artificial Sequence
  Synthetic polynucleotide encoding artificial human antibody CDR-L2 region
gcagacaac

SEQ ID NO: 4882 - DNA, 9 bp, Artificial Sequence
  Synthetic polynucleotide encoding artificial human antibody CDR-L2 region
gataccatc

SEQ ID NO: 4883 - DNA, 9 bp, Artificial Sequence
  Synthetic polynucleotide encoding artificial human antibody CDR-L2 region
gatgttggt

SEQ ID NO: 4884 - DNA, 9 bp, Artificial Sequence
  Synthetic polynucleotide encoding artificial human antibody CDR-L2 region
gaagataag

SEQ ID NO: 4885 - DNA, 9 bp, Artificial Sequence
  Synthetic polynucleotide encoding artificial human antibody CDR-L2 region
gatacatcc

SEQ ID NO: 4886 - DNA, 9 bp, Artificial Sequence
  Synthetic polynucleotide encoding artificial human antibody CDR-L2 region
gagggcact

SEQ ID NO: 4887 - DNA, 9 bp, Artificial Sequence
  Synthetic polynucleotide encoding artificial human antibody CDR-L2 region
gatgcatcc

SEQ ID NO: 4888 - DNA, 9 bp, Artificial Sequence
  Synthetic polynucleotide encoding artificial human antibody CDR-L2 region
ggtgcatcc

SEQ ID NO: 4889 - DNA, 9 bp, Artificial Sequence
  Synthetic polynucleotide encoding artificial human antibody CDR-L2 region
ggtgcatcc

SEQ ID NO: 4890 - DNA, 9 bp, Artificial Sequence
  Synthetic polynucleotide encoding artificial human antibody CDR-L2 region
aaggcgtct

SEQ ID NO: 4891 - DNA, 9 bp, Artificial Sequence
  Synthetic polynucleotide encoding artificial human antibody CDR-L2 region
ggtgcatcc

SEQ ID NO: 4892 - DNA, 9 bp, Artificial Sequence
  Synthetic polynucleotide encoding artificial human antibody CDR-L2 region
ggtgcatcc

SEQ ID NO: 4893 - DNA, 9 bp, Artificial Sequence
  Synthetic polynucleotide encoding artificial human antibody CDR-L2 region
tgggcatct

SEQ ID NO: 4894 - DNA, 9 bp, Artificial Sequence
  Synthetic polynucleotide encoding artificial human antibody CDR-L2 region
ggtaaaaac

SEQ ID NO: 4895 - DNA, 9 bp, Artificial Sequence
  Synthetic polynucleotide encoding artificial human antibody CDR-L2 region
aggaatatt

SEQ ID NO: 4896 - DNA, 9 bp, Artificial Sequence
  Synthetic polynucleotide encoding artificial human antibody CDR-L2 region
gaggtttct

SEQ ID NO: 4897 - DNA, 9 bp, Artificial Sequence
  Synthetic polynucleotide encoding artificial human antibody CDR-L2 region
tgggcatct

SEQ ID NO: 4898 - DNA, 9 bp, Artificial Sequence
  Synthetic polynucleotide encoding artificial human antibody CDR-L2 region
gaggtcact

SEQ ID NO: 4899 - DNA, 9 bp, Artificial Sequence
  Synthetic polynucleotide encoding artificial human antibody CDR-L2 region
tatgcttcc

SEQ ID NO: 4900 - DNA, 9 bp, Artificial Sequence
  Synthetic polynucleotide encoding artificial human antibody CDR-L2 region
aaggcatct

SEQ ID NO: 4901 - DNA, 9 bp, Artificial Sequence
  Synthetic polynucleotide encoding artificial human antibody CDR-L2 region
gctgcatcc

SEQ ID NO: 4902 - DNA, 9 bp, Artificial Sequence
  Synthetic polynucleotide encoding artificial human antibody CDR-L2 region
gatgcgtcc

SEQ ID NO: 4903 - DNA, 9 bp, Artificial Sequence
  Synthetic polynucleotide encoding artificial human antibody CDR-L2 region
gatgtcaat

SEQ ID NO: 4904 - DNA, 9 bp, Artificial Sequence
  Synthetic polynucleotide encoding artificial human antibody CDR-L2 region
gaggtcaat

SEQ ID NO: 4905 - DNA, 9 bp, Artificial Sequence
  Synthetic polynucleotide encoding artificial human antibody CDR-L2 region
aaggtatct

SEQ ID NO: 4906 - DNA, 9 bp, Artificial Sequence
  Synthetic polynucleotide encoding artificial human antibody CDR-L2 region
gaggtcagt

SEQ ID NO: 4907 - DNA, 9 bp, Artificial Sequence
  Synthetic polynucleotide encoding artificial human antibody CDR-L2 region
gctgcctct

SEQ ID NO: 4908 - DNA, 9 bp, Artificial Sequence
  Synthetic polynucleotide encoding artificial human antibody CDR-L2 region
gatgtcaat

SEQ ID NO: 4909 - DNA, 9 bp, Artificial Sequence
  Synthetic polynucleotide encoding artificial human antibody CDR-L2 region
gttaacaac

SEQ ID NO: 4910 - DNA, 9 bp, Artificial Sequence
  Synthetic polynucleotide encoding artificial human antibody CDR-L2 region
gaggataac

SEQ ID NO: 4911 - DNA, 9 bp, Artificial Sequence
  Synthetic polynucleotide encoding artificial human antibody CDR-L2 region
gctgcgtcc

SEQ ID NO: 4912 - DNA, 9 bp, Artificial Sequence
  Synthetic polynucleotide encoding artificial human antibody CDR-L2 region
gatgcatcc

SEQ ID NO: 4913 - DNA, 9 bp, Artificial Sequence
  Synthetic polynucleotide encoding artificial human antibody CDR-L2 region
gataacagc

SEQ ID NO: 4914 - DNA, 9 bp, Artificial Sequence
  Synthetic polynucleotide encoding artificial human antibody CDR-L2 region
aaggcatct

SEQ ID NO: 4915 - DNA, 9 bp, Artificial Sequence
  Synthetic polynucleotide encoding artificial human antibody CDR-L2 region
gctgcatcc

SEQ ID NO: 4916 - DNA, 9 bp, Artificial Sequence
  Synthetic polynucleotide encoding artificial human antibody CDR-L2 region
ggtgcatcc

SEQ ID NO: 4917 - DNA, 9 bp, Artificial Sequence
  Synthetic polynucleotide encoding artificial human antibody CDR-L2 region
gctgcatcc

SEQ ID NO: 4918 - DNA, 9 bp, Artificial Sequence
  Synthetic polynucleotide encoding artificial human antibody CDR-L2 region
gattcaacc

SEQ ID NO: 4919 - DNA, 9 bp, Artificial Sequence
  Synthetic polynucleotide encoding artificial human antibody CDR-L2 region
ggtgcctcc

SEQ ID NO: 4920 - DNA, 9 bp, Artificial Sequence
  Synthetic polynucleotide encoding artificial human antibody CDR-L2 region
ggtgcatcc

SEQ ID NO: 4921 - DNA, 9 bp, Artificial Sequence
  Synthetic polynucleotide encoding artificial human antibody CDR-L2 region
gctaacgac

SEQ ID NO: 4922 - DNA, 21 bp, Artificial Sequence
  Synthetic polynucleotide encoding artificial human antibody CDR-L2 region
cttgacggcagaggagtctac

SEQ ID NO: 4923 - DNA, 9 bp, Artificial Sequence
  Synthetic polynucleotide encoding artificial human antibody CDR-L2 region
caagatagc

SEQ ID NO: 4924 - DNA, 9 bp, Artificial Sequence
  Synthetic polynucleotide encoding artificial human antibody CDR-L2 region
agcacaaac

SEQ ID NO: 4925 - DNA, 9 bp, Artificial Sequence
  Synthetic polynucleotide encoding artificial human antibody CDR-L2 region
caagatgcc

SEQ ID NO: 4926 - DNA, 9 bp, Artificial Sequence
  Synthetic polynucleotide encoding artificial human antibody CDR-L2 region
gctgcatcc

SEQ ID NO: 4927 - DNA, 21 bp, Artificial Sequence
  Synthetic polynucleotide encoding artificial human antibody CDR-L2 region
cttaataatgatggccaccac

SEQ ID NO: 4928 - DNA, 21 bp, Artificial Sequence
  Synthetic polynucleotide encoding artificial human antibody CDR-L2 region
cttaacaatgatggccaccac

SEQ ID NO: 4929 - DNA, 9 bp, Artificial Sequence
  Synthetic polynucleotide encoding artificial human antibody CDR-L2 region
aaggcctct

SEQ ID NO: 4930 - DNA, 9 bp, Artificial Sequence
  Synthetic polynucleotide encoding artificial human antibody CDR-L2 region
ggtgcaacc

SEQ ID NO: 4931 - DNA, 9 bp, Artificial Sequence
  Synthetic polynucleotide encoding artificial human antibody CDR-L2 region
gttgcctcc

SEQ ID NO: 4932 - DNA, 9 bp, Artificial Sequence
  Synthetic polynucleotide encoding artificial human antibody CDR-L2 region
tgggcatct

SEQ ID NO: 4933 - DNA, 9 bp, Artificial Sequence
  Synthetic polynucleotide encoding artificial human antibody CDR-L2 region
gctgcatcc

SEQ ID NO: 4934 - DNA, 21 bp, Artificial Sequence
  Synthetic polynucleotide encoding artificial human antibody CDR-L2 region
attaatactgatggcagccac

SEQ ID NO: 4935 - DNA, 9 bp, Artificial Sequence
  Synthetic polynucleotide encoding artificial human antibody CDR-L2 region
gctgcatcc

SEQ ID NO: 4936 - DNA, 21 bp, Artificial Sequence
  Synthetic polynucleotide encoding artificial human antibody CDR-L2 region
cttaacaatgatggccaccac

SEQ ID NO: 4937 - DNA, 9 bp, Artificial Sequence
  Synthetic polynucleotide encoding artificial human antibody CDR-L2 region
gatgcatcc

SEQ ID NO: 4938 - DNA, 9 bp, Artificial Sequence
  Synthetic polynucleotide encoding artificial human antibody CDR-L2 region
ggtgcatcc

SEQ ID NO: 4939 - DNA, 21 bp, Artificial Sequence
  Synthetic polynucleotide encoding artificial human antibody CDR-L2 region
gttacccattataacacccac

SEQ ID NO: 4940 - DNA, 9 bp, Artificial Sequence
  Synthetic polynucleotide encoding artificial human antibody CDR-L2 region
tatgatggc

SEQ ID NO: 4941 - DNA, 9 bp, Artificial Sequence
  Synthetic polynucleotide encoding artificial human antibody CDR-L2 region
aagactatt

SEQ ID NO: 4942 - DNA, 9 bp, Artificial Sequence
  Synthetic polynucleotide encoding artificial human antibody CDR-L2 region
tgggcatct

SEQ ID NO: 4943 - DNA, 9 bp, Artificial Sequence
  Synthetic polynucleotide encoding artificial human antibody CDR-L2 region
ggtgcatcc

SEQ ID NO: 4944 - DNA, 9 bp, Artificial Sequence
  Synthetic polynucleotide encoding artificial human antibody CDR-L2 region
aaggtttct

SEQ ID NO: 4945 - DNA, 9 bp, Artificial Sequence
  Synthetic polynucleotide encoding artificial human antibody CDR-L2 region
ggtgcatcc

SEQ ID NO: 4946 - DNA, 9 bp, Artificial Sequence
  Synthetic polynucleotide encoding artificial human antibody CDR-L2 region
ggtgcatcc

SEQ ID NO: 4947 - DNA, 9 bp, Artificial Sequence
  Synthetic polynucleotide encoding artificial human antibody CDR-L2 region
gctgcatcc

SEQ ID NO: 4948 - DNA, 9 bp, Artificial Sequence
  Synthetic polynucleotide encoding artificial human antibody CDR-L2 region
gatgtcagt

SEQ ID NO: 4949 - DNA, 9 bp, Artificial Sequence
  Synthetic polynucleotide encoding artificial human antibody CDR-L2 region
ttgggttct

SEQ ID NO: 4950 - DNA, 9 bp, Artificial Sequence
  Synthetic polynucleotide encoding artificial human antibody CDR-L2 region
ggtgcatcc

SEQ ID NO: 4951 - DNA, 9 bp, Artificial Sequence
  Synthetic polynucleotide encoding artificial human antibody CDR-L2 region
tcggcatct

SEQ ID NO: 4952 - DNA, 9 bp, Artificial Sequence
  Synthetic polynucleotide encoding artificial human antibody CDR-L2 region
aggaataac

SEQ ID NO: 4953 - DNA, 9 bp, Artificial Sequence
  Synthetic polynucleotide encoding artificial human antibody CDR-L2 region
gacaatgat

SEQ ID NO: 4954 - DNA, 9 bp, Artificial Sequence
  Synthetic polynucleotide encoding artificial human antibody CDR-L2 region
aaagacagt

SEQ ID NO: 4955 - DNA, 9 bp, Artificial Sequence
  Synthetic polynucleotide encoding artificial human antibody CDR-L2 region
aaagacagt

SEQ ID NO: 4956 - DNA, 9 bp, Artificial Sequence
  Synthetic polynucleotide encoding artificial human antibody CDR-L2 region
gatgcatct

SEQ ID NO: 4957 - DNA, 9 bp, Artificial Sequence
  Synthetic polynucleotide encoding artificial human antibody CDR-L2 region
tgggcttct

SEQ ID NO: 4958 - DNA, 9 bp, Artificial Sequence
  Synthetic polynucleotide encoding artificial human antibody CDR-L2 region
gatgatagc

SEQ ID NO: 4959 - DNA, 9 bp, Artificial Sequence
  Synthetic polynucleotide encoding artificial human antibody CDR-L2 region
aaggcgtct

SEQ ID NO: 4960 - DNA, 9 bp, Artificial Sequence
  Synthetic polynucleotide encoding artificial human antibody CDR-L2 region
ggtgcattc

SEQ ID NO: 4961 - DNA, 9 bp, Artificial Sequence
  Synthetic polynucleotide encoding artificial human antibody CDR-L2 region
gcctcccgc

SEQ ID NO: 4962 - DNA, 9 bp, Artificial Sequence
  Synthetic polynucleotide encoding artificial human antibody CDR-L2 region
gatgtcagt

SEQ ID NO: 4963 - DNA, 9 bp, Artificial Sequence
  Synthetic polynucleotide encoding artificial human antibody CDR-L2 region
gatacaaac

SEQ ID NO: 4964 - DNA, 9 bp, Artificial Sequence
  Synthetic polynucleotide encoding artificial human antibody CDR-L2 region
ggtgacacc

SEQ ID NO: 4965 - DNA, 9 bp, Artificial Sequence
  Synthetic polynucleotide encoding artificial human antibody CDR-L2 region
ggtaactcc

SEQ ID NO: 4966 - DNA, 9 bp, Artificial Sequence
  Synthetic polynucleotide encoding artificial human antibody CDR-L2 region
agcacaaac

SEQ ID NO: 4967 - DNA, 9 bp, Artificial Sequence
  Synthetic polynucleotide encoding artificial human antibody CDR-L2 region
gaagataag

SEQ ID NO: 4968 - DNA, 21 bp, Artificial Sequence
  Synthetic polynucleotide encoding artificial human antibody CDR-L2 region
cttaacaatgatggccaccac

SEQ ID NO: 4969 - DNA, 9 bp, Artificial Sequence
  Synthetic polynucleotide encoding artificial human antibody CDR-L2 region
gctgcgtcc

SEQ ID NO: 4970 - DNA, 9 bp, Artificial Sequence
  Synthetic polynucleotide encoding artificial human antibody CDR-L2 region
aaagacact

SEQ ID NO: 4971 - DNA, 9 bp, Artificial Sequence
  Synthetic polynucleotide encoding artificial human antibody CDR-L2 region
gatgcaacg

SEQ ID NO: 4972 - DNA, 9 bp, Artificial Sequence
  Synthetic polynucleotide encoding artificial human antibody CDR-L2 region
gatacagac

SEQ ID NO: 4973 - DNA, 9 bp, Artificial Sequence
  Synthetic polynucleotide encoding artificial human antibody CDR-L2 region
ggtgcatcc

SEQ ID NO: 4974 - DNA, 9 bp, Artificial Sequence
  Synthetic polynucleotide encoding artificial human antibody CDR-L2 region
aaggcgtct

SEQ ID NO: 4975 - DNA, 9 bp, Artificial Sequence
  Synthetic polynucleotide encoding artificial human antibody CDR-L2 region
tgggcatct

SEQ ID NO: 4976 - DNA, 9 bp, Artificial Sequence
  Synthetic polynucleotide encoding artificial human antibody CDR-L2 region
agtaataat

SEQ ID NO: 4977 - DNA, 9 bp, Artificial Sequence
  Synthetic polynucleotide encoding artificial human antibody CDR-L2 region
gctgggtcc

SEQ ID NO: 4978 - DNA, 9 bp, Artificial Sequence
  Synthetic polynucleotide encoding artificial human antibody CDR-L2 region
gatgatagt

SEQ ID NO: 4979 - DNA, 9 bp, Artificial Sequence
  Synthetic polynucleotide encoding artificial human antibody CDR-L2 region
cgtgacgtc

SEQ ID NO: 4980 - DNA, 9 bp, Artificial Sequence
  Synthetic polynucleotide encoding artificial human antibody CDR-L2 region
gctgcatcc

SEQ ID NO: 4981 - DNA, 9 bp, Artificial Sequence
  Synthetic polynucleotide encoding artificial human antibody CDR-L2 region
tgggcgtct

SEQ ID NO: 4982 - DNA, 9 bp, Artificial Sequence
  Synthetic polynucleotide encoding artificial human antibody CDR-L2 region
gaggtcagt

SEQ ID NO: 4983 - DNA, 9 bp, Artificial Sequence
  Synthetic polynucleotide encoding artificial human antibody CDR-L2 region
agtgatgat

SEQ ID NO: 4984 - DNA, 9 bp, Artificial Sequence
  Synthetic polynucleotide encoding artificial human antibody CDR-L2 region
gatgcatcc

SEQ ID NO: 4985 - DNA, 9 bp, Artificial Sequence
  Synthetic polynucleotide encoding artificial human antibody CDR-L2 region
gataactac

SEQ ID NO: 4986 - DNA, 9 bp, Artificial Sequence
  Synthetic polynucleotide encoding artificial human antibody CDR-L2 region
gaaacaagc

SEQ ID NO: 4987 - DNA, 9 bp, Artificial Sequence
  Synthetic polynucleotide encoding artificial human antibody CDR-L2 region
aggaataat

SEQ ID NO: 4988 - DNA, 9 bp, Artificial Sequence
  Synthetic polynucleotide encoding artificial human antibody CDR-L2 region
gatgtcagt

SEQ ID NO: 4989 - DNA, 9 bp, Artificial Sequence
  Synthetic polynucleotide encoding artificial human antibody CDR-L2 region
caagatagc

SEQ ID NO: 4990 - DNA, 9 bp, Artificial Sequence
  Synthetic polynucleotide encoding artificial human antibody CDR-L2 region
ggtgcatcc

SEQ ID NO: 4991 - DNA, 9 bp, Artificial Sequence
  Synthetic polynucleotide encoding artificial human antibody CDR-L2 region
gacgatagc

SEQ ID NO: 4992 - DNA, 9 bp, Artificial Sequence
  Synthetic polynucleotide encoding artificial human antibody CDR-L2 region
aagactatt

SEQ ID NO: 4993 - DNA, 9 bp, Artificial Sequence
  Synthetic polynucleotide encoding artificial human antibody CDR-L2 region
ggaggatcc

SEQ ID NO: 4994 - DNA, 9 bp, Artificial Sequence
  Synthetic polynucleotide encoding artificial human antibody CDR-L2 region
gatgattct

SEQ ID NO: 4995 - DNA, 9 bp, Artificial Sequence
  Synthetic polynucleotide encoding artificial human antibody CDR-L2 region
aaggacagt

SEQ ID NO: 4996 - DNA, 9 bp, Artificial Sequence
  Synthetic polynucleotide encoding artificial human antibody CDR-L2 region
agtaataat

SEQ ID NO: 4997 - DNA, 9 bp, Artificial Sequence
  Synthetic polynucleotide encoding artificial human antibody CDR-L2 region
ggtgcatcc

SEQ ID NO: 4998 - DNA, 9 bp, Artificial Sequence
  Synthetic polynucleotide encoding artificial human antibody CDR-L2 region
aaggcgtct

SEQ ID NO: 4999 - DNA, 9 bp, Artificial Sequence
  Synthetic polynucleotide encoding artificial human antibody CDR-L2 region
gctgcatcc

SEQ ID NO: 5000 - DNA, 9 bp, Artificial Sequence
  Synthetic polynucleotide encoding artificial human antibody CDR-L2 region
gctgcatcc

SEQ ID NO: 5001 - DNA, 63 bp, Artificial Sequence
  Synthetic polynucleotide encoding artificial human antibody CDR-H3 region
gctagagacacagcgaggggaggtcagtgtgagcccggacacaaacctccctgcaggggcgcg

SEQ ID NO: 5002 - DNA, 54 bp, Artificial Sequence
  Synthetic polynucleotide encoding artificial human antibody CDR-H3 region
gtacggatagggaccgaaatgattctatggtatttctactactacatggacgtc

SEQ ID NO: 5003 - DNA, 54 bp, Artificial Sequence; identical to SEQ ID NO: 5002
  Synthetic polynucleotide encoding artificial human antibody CDR-H3 region

SEQ ID NO: 5004 - DNA, 54 bp, Artificial Sequence; identical to SEQ ID NO: 5002
  Synthetic polynucleotide encoding artificial human antibody CDR-H3 region

SEQ ID NO: 5005 - DNA, 54 bp, Artificial Sequence; identical to SEQ ID NO: 5002
  Synthetic polynucleotide encoding artificial human antibody CDR-H3 region

SEQ ID NO: 5006 - DNA, 54 bp, Artificial Sequence; identical to SEQ ID NO: 5002
  Synthetic polynucleotide encoding artificial human antibody CDR-H3 region

SEQ ID NO: 5007 - DNA, 54 bp, Artificial Sequence; identical to SEQ ID NO: 5002
  Synthetic polynucleotide encoding artificial human antibody CDR-H3 region

SEQ ID NO: 5008 - DNA, 36 bp, Artificial Sequence
  Synthetic polynucleotide encoding artificial human antibody CDR-H3 region
accacagacctgcatgactacggtgactccgactac

SEQ ID NO: 5009 - DNA, 36 bp, Artificial Sequence; identical to SEQ ID NO: 5008
  Synthetic polynucleotide encoding artificial human antibody CDR-H3 region

SEQ ID NO: 5010 - DNA, 42 bp, Artificial Sequence
  Synthetic polynucleotide encoding artificial human antibody CDR-H3 region
gcggcctcacccctctatgacagcagtgatttttactattcc

SEQ ID NO: 5011 - DNA, 51 bp, Artificial Sequence
  Synthetic polynucleotide encoding artificial human antibody CDR-H3 region
gctggtcaatcaccgagtgtgtatagtagtggctggtatgtctttgactat

SEQ ID NO: 5012 - DNA, 51 bp, Artificial Sequence
  Synthetic polynucleotide encoding artificial human antibody CDR-H3 region
gcgagagatgcctttttttcactcaaatacggtgcctacggtatggacgtc

SEQ ID NO: 5013 - DNA, 51 bp, Artificial Sequence
  Synthetic polynucleotide encoding artificial human antibody CDR-H3 region
gcgaaagatcccgcgatgtatagcagcagctggctatctccttcggacgtc

SEQ ID NO: 5014 - DNA, 72 bp, Artificial Sequence
  Synthetic polynucleotide encoding artificial human antibody CDR-H3 region
gcaagagtagtccaccgtcggtcgtcctactatgatagtaggaattactactactactactacatggacgtc

SEQ ID NO: 5015 - DNA, 69 bp, Artificial Sequence
  Synthetic polynucleotide encoding artificial human antibody CDR-H3 region
gcacacatcccccccgaaagtcgtatggttctatttggagtggttatccaaaattactactttgactac

SEQ ID NO: 5016 - DNA, 63 bp, Artificial Sequence
  Synthetic polynucleotide encoding artificial human antibody CDR-H3 region
gcgagagaggcggcagggatattacgatttttggagtggtcaaccaaaggatactttgactac

SEQ ID NO: 5017 - DNA, 39 bp, Artificial Sequence
  Synthetic polynucleotide encoding artificial human antibody CDR-H3 region
gcgagaggcccccggactacggtgccaaatcttgactac

SEQ ID NO: 5018 - DNA, 39 bp, Artificial Sequence
  Synthetic polynucleotide encoding artificial human antibody CDR-H3 region
gcgagagatcacggtgactggtacctaagcgttgactac

SEQ ID NO: 5019 - DNA, 48 bp, Artificial Sequence
  Synthetic polynucleotide encoding artificial human antibody CDR-H3 region
gtgagagattttatcggggtctactcgctccatgaagcttttgatctc

SEQ ID NO: 5020 - DNA, 51 bp, Artificial Sequence
  Synthetic polynucleotide encoding artificial human antibody CDR-H3 region
gcaagagataagtcgaggtcatactatgcttcggggagttatcccgactac

SEQ ID NO: 5021 - DNA, 54 bp, Artificial Sequence
  Synthetic polynucleotide encoding artificial human antibody CDR-H3 region
gcgagaggacgggatattgtggtggaaccagcccctcttgatgcttttgatgtc

SEQ ID NO: 5022 - DNA, 36 bp, Artificial Sequence
  Synthetic polynucleotide encoding artificial human antibody CDR-H3 region
gcgagagacttcaccagtgggagctcaggagactgc

SEQ ID NO: 5023 - DNA, 45 bp, Artificial Sequence
  Synthetic polynucleotide encoding artificial human antibody CDR-H3 region
gcaacaggttcggggagttattatagtatgggctggttcgacccc

SEQ ID NO: 5024 - DNA, 72 bp, Artificial Sequence
  Synthetic polynucleotide encoding artificial human antibody CDR-H3 region
gcgattcggggcgctgattgtagtggtggtagctgctacttcgtgtccgcttttggttggattatggacgtc

SEQ ID NO: 5025 - DNA, 66 bp, Artificial Sequence
  Synthetic polynucleotide encoding artificial human antibody CDR-H3 region
gcaacagcgggcccccagtattactatggttcggggagttatgcaccgtacaactggttcgacccc

SEQ ID NO: 5026 - DNA, 57 bp, Artificial Sequence
  Synthetic polynucleotide encoding artificial human antibody CDR-H3 region
gcgagagattccgttttactattcttcgggtatctaccccatggagcttttgatatg

SEQ ID NO: 5027 - DNA, 45 bp, Artificial Sequence
  Synthetic polynucleotide encoding artificial human antibody CDR-H3 region
gcgaaggcttcgactggatccagctatggctttgctcttgatact

SEQ ID NO: 5028 - DNA, 84 bp, Artificial Sequence
  Synthetic polynucleotide encoding artificial human antibody CDR-H3 region
gcgagagatggagggtcgccgggcgagtactatgatagtagtggttattatggatttggctactactactacggtatggacgtc

SEQ ID NO: 5029 - DNA, 54 bp, Artificial Sequence
  Synthetic polynucleotide encoding artificial human antibody CDR-H3 region
gcgagagatggcggggttcggggagttatcatctactactacggtatggacgtc

SEQ ID NO: 5030 - DNA, 42 bp, Artificial Sequence
  Synthetic polynucleotide encoding artificial human antibody CDR-H3 region
gcgagagaatgggaagactatgatagtagtgtctttgactac

SEQ ID NO: 5031 - DNA, 45 bp, Artificial Sequence
  Synthetic polynucleotide encoding artificial human antibody CDR-H3 region
gcgagagactacggtgacgacgaggcctactacggtatggacgtc

SEQ ID NO: 5032 - DNA, 54 bp, Artificial Sequence
  Synthetic polynucleotide encoding artificial human antibody CDR-H3 region
gcgagagatggatcggatcgcagtggctacgattctttttacgatatggacgtc

SEQ ID NO: 5033 - DNA, 45 bp, Artificial Sequence
  Synthetic polynucleotide encoding artificial human antibody CDR-H3 region
attcgttgccgccgaagcagtggcccttattactactttgactac

SEQ ID NO: 5034 - DNA, 45 bp, Artificial Sequence
  Synthetic polynucleotide encoding artificial human antibody CDR-H3 region
gcgagaggccagtacgaaatgttgactggctacttcgttgattac

SEQ ID NO: 5035 - DNA, 18 bp, Artificial Sequence
  Synthetic polynucleotide encoding artificial human antibody CDR-H3 region
gcgcccgttggacttctc

SEQ ID NO: 5036 - DNA, 45 bp, Artificial Sequence
  Synthetic polynucleotide encoding artificial human antibody CDR-H3 region
acaaaggggagtttccataacagtggtcggggtatctttgactcc

SEQ ID NO: 5037 - DNA, 60 bp, Artificial Sequence
  Synthetic polynucleotide encoding artificial human antibody CDR-H3 region
gcgagagatcgggagagattacgatattttgactgggtttactactacggtatggacgtc

SEQ ID NO: 5038 - DNA, 36 bp, Artificial Sequence
  Synthetic polynucleotide encoding artificial human antibody CDR-H3 region
gcgagagatgggggagcagcagctggttttgactac

SEQ ID NO: 5039 - DNA, 54 bp, Artificial Sequence
  Synthetic polynucleotide encoding artificial human antibody CDR-H3 region
gcgagagtagcccactcattacgatattttgactggcccctggcttttgatatc

SEQ ID NO: 5040 - DNA, 48 bp, Artificial Sequence
  Synthetic polynucleotide encoding artificial human antibody CDR-H3 region
gcgaaactccttgggaactccggggagttattattcccctttgactcc

SEQ ID NO: 5041 - DNA, 66 bp, Artificial Sequence
  Synthetic polynucleotide encoding artificial human antibody CDR-H3 region
gcaaaagatatgtcaccattactatggttcggggagttattaggctactactacggtatggacgtc

SEQ ID NO: 5042 - DNA, 51 bp, Artificial Sequence
  Synthetic polynucleotide encoding artificial human antibody CDR-H3 region
gcgagagaattcacgggacggtgggatgacatgggttattatggcgacctc

SEQ ID NO: 5043 - DNA, 45 bp, Artificial Sequence
  Synthetic polynucleotide encoding artificial human antibody CDR-H3 region
acgagagtcggttattactatgatggtagtgtcgtctttgactat

SEQ ID NO: 5044 - DNA, 63 bp, Artificial Sequence
  Synthetic polynucleotide encoding artificial human antibody CDR-H3 region
gcgggagagggactagctaccctttatggttcggggagttatcgcgtagggtactttgaccac

SEQ ID NO: 5045 - DNA, 51 bp, Artificial Sequence
  Synthetic polynucleotide encoding artificial human antibody CDR-H3 region
gcgagacattcccccatatggttaactcaggtttccccgtactttgactac

SEQ ID NO: 5046 - DNA, 66 bp, Artificial Sequence
  Synthetic polynucleotide encoding artificial human antibody CDR-H3 region
gcgaaagattccgcccccccctaccatagcagtggctggtactactactactacggtatggacgtc

SEQ ID NO: 5047 - DNA, 33 bp, Artificial Sequence
  Synthetic polynucleotide encoding artificial human antibody CDR-H3 region
gcaacaagtccgtgggacgtgacgttagagtac

SEQ ID NO: 5048 - DNA, 51 bp, Artificial Sequence
  Synthetic polynucleotide encoding artificial human antibody CDR-H3 region
gcgaaagtaaactacgacgatgatagagttgaactggcttactttgagcac

SEQ ID NO: 5049 - DNA, 42 bp, Artificial Sequence
  Synthetic polynucleotide encoding artificial human antibody CDR-H3 region
gcgaaggggacccatgatagtcgtgattataagttcgacttt

SEQ ID NO: 5050 - DNA, 60 bp, Artificial Sequence
  Synthetic polynucleotide encoding artificial human antibody CDR-H3 region
gcgagagaagcttgtgccagctgctcctgcgcaccgggatgcgcctacggtttggacgtc

SEQ ID NO: 5051 - DNA, 33 bp, Artificial Sequence
  Synthetic polynucleotide encoding artificial human antibody CDR-H3 region
gcgagggatggagtctggtatgcgtctgactcg

SEQ ID NO: 5052 - DNA, 60 bp, Artificial Sequence
  Synthetic polynucleotide encoding artificial human antibody CDR-H3 region
gcggcagcgggtggagaggggtggctacgacagtactactactactacggtatggacgtc

SEQ ID NO: 5053 - DNA, 42 bp, Artificial Sequence
  Synthetic polynucleotide encoding artificial human antibody CDR-H3 region
gcgcgaagggacggtgactacgggtggtcctacttcgactac

SEQ ID NO: 5054 - DNA, 63 bp, Artificial Sequence
  Synthetic polynucleotide encoding artificial human antibody CDR-H3 region
gcgagagtgttgaggagcagctggtacttcccagtcaaacccatgaatgatgcttttgatatc

SEQ ID NO: 5055 - DNA, 42 bp, Artificial Sequence
  Synthetic polynucleotide encoding artificial human antibody CDR-H3 region
gcgagagatcgtactggtggctactacggctactttgactac

SEQ ID NO: 5056 - DNA, 42 bp, Artificial Sequence
  Synthetic polynucleotide encoding artificial human antibody CDR-H3 region
gctcacagcggttactatggttcgggcctggcttttaatatc

SEQ ID NO: 5057 - DNA, 45 bp, Artificial Sequence
  Synthetic polynucleotide encoding artificial human antibody CDR-H3 region
gcgagagacccgcattacgatattttgactggttattatgactac

SEQ ID NO: 5058 - DNA, 54 bp, Artificial Sequence
  Synthetic polynucleotide encoding artificial human antibody CDR-H3 region
gcgagagggatagcagcagctggtacgcggtactactactacggtatggacgtc

SEQ ID NO: 5059 - DNA, 63 bp, Artificial Sequence
  Synthetic polynucleotide encoding artificial human antibody CDR-H3 region
gcgaaagatatcggtcttcgaagcagctggggttttaactactactactacggtatggacgtc

SEQ ID NO: 5060 - DNA, 21 bp, Artificial Sequence
  Synthetic polynucleotide encoding artificial human antibody CDR-H3 region
gcgagagagacttttgatctc

SEQ ID NO: 5061 - DNA, 36 bp, Artificial Sequence
  Synthetic polynucleotide encoding artificial human antibody CDR-H3 region
gcacacacaactggaacgacgcccctctttgactac

SEQ ID NO: 5062 - DNA, 39 bp, Artificial Sequence
  Synthetic polynucleotide encoding artificial human antibody CDR-H3 region
gcgagagatcatggggtagatggctcccctggtggctac

SEQ ID NO: 5063 - DNA, 60 bp, Artificial Sequence
  Synthetic polynucleotide encoding artificial human antibody CDR-H3 region
gcgagagatgaaaacactggcagcagctggccctttagctactactacggtatggacgtc

SEQ ID NO: 5064 - DNA, 42 bp, Artificial Sequence
  Synthetic polynucleotide encoding artificial human antibody CDR-H3 region
gcgagatacaattcctactactactactacggtatggacgtc

SEQ ID NO: 5065 - DNA, 33 bp, Artificial Sequence
  Synthetic polynucleotide encoding artificial human antibody CDR-H3 region
gcacacagacttacgataaacggtatggacgtc

SEQ ID NO: 5066 - DNA, 42 bp, Artificial Sequence
  Synthetic polynucleotide encoding artificial human antibody CDR-H3 region
gcgaaagcccgagcaggcagtggctggcacgtttttgacgac

SEQ ID NO: 5067 - DNA, 30 bp, Artificial Sequence
  Synthetic polynucleotide encoding artificial human antibody CDR-H3 region
gcgagagtaggggctggatcctttgactac

SEQ ID NO: 5068 - DNA, 57 bp, Artificial Sequence
  Synthetic polynucleotide encoding artificial human antibody CDR-H3 region
gtaagagattggacccgaacagctactacggacttctactactacgggatggacgtc

SEQ ID NO: 5069 - DNA, 48 bp, Artificial Sequence
  Synthetic polynucleotide encoding artificial human antibody CDR-H3 region
gcgaaagctaagatggagggcccggggagtccactaggtttggacgtc

SEQ ID NO: 5070 - DNA, 72 bp, Artificial Sequence
  Synthetic polynucleotide encoding artificial human antibody CDR-H3 region
gcgaaactggacaatactatggttcggggagttactcttttagggcactactactactacggtatggacgtc

SEQ ID NO: 5071 - DNA, 54 bp, Artificial Sequence
  Synthetic polynucleotide encoding artificial human antibody CDR-H3 region
actagacatgtggagggcactatgagactggtggacccctacttctttgactac

SEQ ID NO: 5072 - DNA, 45 bp, Artificial Sequence
  Synthetic polynucleotide encoding artificial human antibody CDR-H3 region
gcgacccacttttccacctatcgttccgcctatcagtttgactac

SEQ ID NO: 5073 - DNA, 45 bp, Artificial Sequence
  Synthetic polynucleotide encoding artificial human antibody CDR-H3 region
gcaaaagacttgagcagtggctggtcccctcggggtatggacgtc

SEQ ID NO: 5074 - DNA, 57 bp, Artificial Sequence
  Synthetic polynucleotide encoding artificial human antibody CDR-H3 region
gcgagagctttggtagtaccagctgctatagactactactactacggtatggacgtc

SEQ ID NO: 5075 - DNA, 45 bp, Artificial Sequence
  Synthetic polynucleotide encoding artificial human antibody CDR-H3 region
tatagtgcttatcgatcaaagggcaacgacgacggcatggacgtc

SEQ ID NO: 5076 - DNA, 57 bp, Artificial Sequence
  Synthetic polynucleotide encoding artificial human antibody CDR-H3 region
gcgagaacgaggcagtgggagctattatattactactactactacggtatggacgtc

SEQ ID NO: 5077 - DNA, 45 bp, Artificial Sequence
  Synthetic polynucleotide encoding artificial human antibody CDR-H3 region
acaaaggggaactttcataatagtggtcggggaatctttgactcc

SEQ ID NO: 5078 - DNA, 39 bp, Artificial Sequence
  Synthetic polynucleotide encoding artificial human antibody CDR-H3 region
gcaaaagtagatcactatgatagtagtggggtggactac

SEQ ID NO: 5079 - DNA, 60 bp, Artificial Sequence
  Synthetic polynucleotide encoding artificial human antibody CDR-H3 region
gcgagagcacccgtggacgtattactatggttcggggaggatttttactactttgactac

SEQ ID NO: 5080 - DNA, 51 bp, Artificial Sequence
  Synthetic polynucleotide encoding artificial human antibody CDR-H3 region
gcgaaagaccacttatggttcggggagttattcaaaaactggttcgacccc

SEQ ID NO: 5081 - DNA, 60 bp, Artificial Sequence
  Synthetic polynucleotide encoding artificial human antibody CDR-H3 region
gcaagagatctaagcgggtattacgatattttgactggttattcctactactttgactac

SEQ ID NO: 5082 - DNA, 36 bp, Artificial Sequence
  Synthetic polynucleotide encoding artificial human antibody CDR-H3 region
gcgagaggcggacagagatggctacaattagggtac

SEQ ID NO: 5083 - DNA, 39 bp, Artificial Sequence
  Synthetic polynucleotide encoding artificial human antibody CDR-H3 region
gcgagacccagttcggggagttattatggcgcgattttc

SEQ ID NO: 5084 - DNA, 36 bp, Artificial Sequence
  Synthetic polynucleotide encoding artificial human antibody CDR-H3 region
gcacgctccttagcagtggctgcccttatggacgtc

SEQ ID NO: 5085 - DNA, 66 bp, Artificial Sequence
  Synthetic polynucleotide encoding artificial human antibody CDR-H3 region
gcgaaagattcttactatggttcggggagcaaccgcggttactactactactacggtatggacgtc

SEQ ID NO: 5086 - DNA, 78 bp, Artificial Sequence
  Synthetic polynucleotide encoding artificial human antibody CDR-H3 region
gcgagggaccaaacacccccgaacgcatatgattacgtttgggggagttatcgttatatcgggggggagtttgactac

SEQ ID NO: 5087 - DNA, 51 bp, Artificial Sequence
  Synthetic polynucleotide encoding artificial human antibody CDR-H3 region
acgagagaattcacgggacgatacgacgacatgggctactacggcgacctc

SEQ ID NO: 5088 - DNA, 51 bp, Artificial Sequence
  Synthetic polynucleotide encoding artificial human antibody CDR-H3 region
gcgagagatttccccctttataactggaacgacgtggggtactttgactac

SEQ ID NO: 5089 - DNA, 45 bp, Artificial Sequence
  Synthetic polynucleotide encoding artificial human antibody CDR-H3 region
gctaccttagctgctacgccctactactactacggtatggacgtc

SEQ ID NO: 5090 - DNA, 48 bp, Artificial Sequence
  Synthetic polynucleotide encoding artificial human antibody CDR-H3 region
gcgattttatggttcggggaggggaggctggctgaatacttccagcac

SEQ ID NO: 5091 - DNA, 36 bp, Artificial Sequence
  Synthetic polynucleotide encoding artificial human antibody CDR-H3 region
gtgaggggttcggggagttatttcccctttgaagag

SEQ ID NO: 5092 - DNA, 45 bp, Artificial Sequence
  Synthetic polynucleotide encoding artificial human antibody CDR-H3 region
gcgagagatctgggctttaccaccagttggcgcggccctgactac

SEQ ID NO: 5093 - DNA, 36 bp, Artificial Sequence
  Synthetic polynucleotide encoding artificial human antibody CDR-H3 region
gcgaccgaagtctggggatcgggttactgtgactac

SEQ ID NO: 5094 - DNA, 54 bp, Artificial Sequence
  Synthetic polynucleotide encoding artificial human antibody CDR-H3 region
gcaagatccgatatagcagcagctggtacgggttactactacggtatggacgtc

SEQ ID NO: 5095 - DNA, 57 bp, Artificial Sequence
  Synthetic polynucleotide encoding artificial human antibody CDR-H3 region
gcgagagatctattgtcgtatagcagtggctggtacgcgggaaactggttcgacccc

SEQ ID NO: 5096 - DNA, 57 bp, Artificial Sequence
  Synthetic polynucleotide encoding artificial human antibody CDR-H3 region
gcgaggggggggaagggttctatgctggcgacggatatcttctggtacttcgatctc

SEQ ID NO: 5097 - DNA, 54 bp, Artificial Sequence
  Synthetic polynucleotide encoding artificial human antibody CDR-H3 region
gcgaggaaatattgtagtagtaccagctgctatctcttcgactactttgactac

SEQ ID NO: 5098 - DNA, 42 bp, Artificial Sequence
  Synthetic polynucleotide encoding artificial human antibody CDR-H3 region
gcgagggctcgttcggggagttattataacccgttcgacccc

SEQ ID NO: 5099 - DNA, 57 bp, Artificial Sequence
  Synthetic polynucleotide encoding artificial human antibody CDR-H3 region
gcaagaggggaggtcaattaccgggggatttactactactactacggtatggacgtc

SEQ ID NO: 5100 - DNA, 54 bp, Artificial Sequence
  Synthetic polynucleotide encoding artificial human antibody CDR-H3 region
gcgagactgacccccactagcagttggtaccgcttcttatacggtatggacgtc

SEQ ID NO: 5101 - DNA, 42 bp, Artificial Sequence
  Synthetic polynucleotide encoding artificial human antibody CDR-H3 region
gcgagacggggcagtggctggctcaactacggtatggacgtc

SEQ ID NO: 5102 - DNA, 48 bp, Artificial Sequence
  Synthetic polynucleotide encoding artificial human antibody CDR-H3 region
gcgagagatccggagttcgatattttgactggttaccactttgactac

SEQ ID NO: 5103 - DNA, 45 bp, Artificial Sequence
  Synthetic polynucleotide encoding artificial human antibody CDR-H3 region
gcgagactcaagaatttctatccttcggggagttacccagactac

SEQ ID NO: 5104 - DNA, 42 bp, Artificial Sequence
  Synthetic polynucleotide encoding artificial human antibody CDR-H3 region
gcgaggggtcggtacacctatggaaccaccacctttgactac

SEQ ID NO: 5105 - DNA, 36 bp, Artificial Sequence
  Synthetic polynucleotide encoding artificial human antibody CDR-H3 region
gcgagcgatgctattgcagtggcccagtttgactcc

SEQ ID NO: 5106 - DNA, 48 bp, Artificial Sequence
  Synthetic polynucleotide encoding artificial human antibody CDR-H3 region
gcgagccgacgattctatagtgggagctacctagatccttttgatatc

SEQ ID NO: 5107 - DNA, 42 bp, Artificial Sequence
  Synthetic polynucleotide encoding artificial human antibody CDR-H3 region
gcgagaaccggtagtgggagctacttggatgcttttgatatc

SEQ ID NO: 5108 - DNA, 45 bp, Artificial Sequence
  Synthetic polynucleotide encoding artificial human antibody CDR-H3 region
gcaaaagccaccgggtatagcagcaactggtacccttttgactac

SEQ ID NO: 5109 - DNA, 36 bp, Artificial Sequence
  Synthetic polynucleotide encoding artificial human antibody CDR-H3 region
gcgagacacgggggggcaccagctggactaagtgcc

SEQ ID NO: 5110 - DNA, 66 bp, Artificial Sequence
  Synthetic polynucleotide encoding artificial human antibody CDR-H3 region
gcgagagatcgccccggcggagaacgatattttgactggttattatccctcgatgcttttgatatc

SEQ ID NO: 5111 - DNA, 66 bp, Artificial Sequence
  Synthetic polynucleotide encoding artificial human antibody CDR-H3 region
gcgagagatttgactactatgatagtagtggttattacgccatactactactacggtatggacgtc

SEQ ID NO: 5112 - DNA, 57 bp, Artificial Sequence
  Synthetic polynucleotide encoding artificial human antibody CDR-H3 region
gcgagagaggattactatgatagtagtggttctaggtactactacggtatggacgtc

SEQ ID NO: 5113 - DNA, 45 bp, Artificial Sequence
  Synthetic polynucleotide encoding artificial human antibody CDR-H3 region
gcgagaggtgatagcagcagccgttactactacggtatggacgtc

SEQ ID NO: 5114 - DNA, 54 bp, Artificial Sequence
  Synthetic polynucleotide encoding artificial human antibody CDR-H3 region
gcgagagagaataggaactactgtattggtaataactgctactactttgactcc

SEQ ID NO: 5115 - DNA, 48 bp, Artificial Sequence
  Synthetic polynucleotide encoding artificial human antibody CDR-H3 region
gcgagagatgggggcgaggacgatattttgacgggcccccgagactac

SEQ ID NO: 5116 - DNA, 42 bp, Artificial Sequence
  Synthetic polynucleotide encoding artificial human antibody CDR-H3 region
gtgagagcagtggctggaactccctactacgggatggacgtc

SEQ ID NO: 5117 - DNA, 42 bp, Artificial Sequence
  Synthetic polynucleotide encoding artificial human antibody CDR-H3 region
gcggcacgcgggtgtggtgactgccacccatactttgactac

SEQ ID NO: 5118 - DNA, 60 bp, Artificial Sequence
  Synthetic polynucleotide encoding artificial human antibody CDR-H3 region
gcgagaggccggccagcgaatccactatggatcggtccacgtggatattactttgacaac

SEQ ID NO: 5119 - DNA, 33 bp, Artificial Sequence
  Synthetic polynucleotide encoding artificial human antibody CDR-H3 region
gcgagacaggattcccactatgctttcggggac

SEQ ID NO: 5120 - DNA, 42 bp, Artificial Sequence
  Synthetic polynucleotide encoding artificial human antibody CDR-H3 region
gcgagagggacgacgcagaagctgcccccccactttgactac

SEQ ID NO: 5121 - DNA, 60 bp, Artificial Sequence
  Synthetic polynucleotide encoding artificial human antibody CDR-H3 region
gcgagaggccggccagcgaatccactatggatcgggccacggggatattattttgactac

SEQ ID NO: 5122 - DNA, 45 bp, Artificial Sequence
  Synthetic polynucleotide encoding artificial human antibody CDR-H3 region
gccagatacccgcgtgagtcagcagctggaaaggcgtttgactac

SEQ ID NO: 5123 - DNA, 39 bp, Artificial Sequence
  Synthetic polynucleotide encoding artificial human antibody CDR-H3 region
gcgagagatttctctggtggctacgtccgggtcggctac

SEQ ID NO: 5124 - DNA, 30 bp, Artificial Sequence
  Synthetic polynucleotide encoding artificial human antibody CDR-H3 region
gcactccggggggagtggcaatttgcctcc

SEQ ID NO: 5125 - DNA, 66 bp, Artificial Sequence
  Synthetic polynucleotide encoding artificial human antibody CDR-H3 region
gcgagacatttcgcgggatattgtagtagtaccagctgctatacccctcttaactggttcgacccc

SEQ ID NO: 5126 - DNA, 60 bp, Artificial Sequence
  Synthetic polynucleotide encoding artificial human antibody CDR-H3 region
gcaagagaagcgtcgggcgtacgatattttgactggttattaaattactactttgactac

SEQ ID NO: 5127 - DNA, 42 bp, Artificial Sequence
  Synthetic polynucleotide encoding artificial human antibody CDR-H3 region
gcgagacaagagggctatttctactactactacatggacgtc

SEQ ID NO: 5128 - DNA, 48 bp, Artificial Sequence
  Synthetic polynucleotide encoding artificial human antibody CDR-H3 region
gcgagaaacgggcttaatagcggctggtccatgtactactttgaccag

SEQ ID NO: 5129 - DNA, 78 bp, Artificial Sequence
  Synthetic polynucleotide encoding artificial human antibody CDR-H3 region
gcgagaggccaaaatggagtagtgccagctcctgtattggggatcggacctttctacacctactcctacatggacgtc

SEQ ID NO: 5130 - DNA, 42 bp, Artificial Sequence
  Synthetic polynucleotide encoding artificial human antibody CDR-H3 region
gcaagggatcgacaggagctcgggaacaactggctcgactcc

SEQ ID NO: 5131 - DNA, 63 bp, Artificial Sequence
  Synthetic polynucleotide encoding artificial human antibody CDR-H3 region
gcgagagatcccaccatgactacggtgactacgagttactactactactactacatggacgtc

SEQ ID NO: 5132 - DNA, 54 bp, Artificial Sequence
  Synthetic polynucleotide encoding artificial human antibody CDR-H3 region
gcgagatacgagatgtattgtagtagtaccagctgctatggcgcttttgatatc

SEQ ID NO: 5133 - DNA, 42 bp, Artificial Sequence
  Synthetic polynucleotide encoding artificial human antibody CDR-H3 region
gcacggttcctagtgggaggtactaagaactggttcgacccc

SEQ ID NO: 5134 - DNA, 69 bp, Artificial Sequence
  Synthetic polynucleotide encoding artificial human antibody CDR-H3 region
gcgaggggacgcagtgaggagaccatgatagtgatggttgtcacgggaattgatttctactttgactct

SEQ ID NO: 5135 - DNA, 57 bp, Artificial Sequence
  Synthetic polynucleotide encoding artificial human antibody CDR-H3 region
gcgaaagattcgcgattctttcaccttggatatacctatggaccaatctttgactac

SEQ ID NO: 5136 - DNA, 48 bp, Artificial Sequence
  Synthetic polynucleotide encoding artificial human antibody CDR-H3 region
gcaacaggccccccagtgggagctaccaaccggcactggttcgacccc

SEQ ID NO: 5137 - DNA, 39 bp, Artificial Sequence
  Synthetic polynucleotide encoding artificial human antibody CDR-H3 region
gcgagagttaatggcggactctcttattcctttgatatt

SEQ ID NO: 5138 - DNA, 69 bp, Artificial Sequence; identical to SEQ ID NO: 5134
  Synthetic polynucleotide encoding artificial human antibody CDR-H3 region

SEQ ID NO: 5139 - DNA, 69 bp, Artificial Sequence
  Synthetic polynucleotide encoding artificial human antibody CDR-H3 region
gcgagaggccttaagggacttaccatgatggtagtggtttttactggggcatatgatgcttttgatatg

SEQ ID NO: 5140 - DNA, 27 bp, Artificial Sequence
  Synthetic polynucleotide encoding artificial human antibody CDR-H3 region
gtttgtggagatggcttaattgactac

SEQ ID NO: 5141 - DNA, 69 bp, Artificial Sequence
  Synthetic polynucleotide encoding artificial human antibody CDR-H3 region
gcgagaggacgcagtgaggagactatgatagtggtggttgtcacgggaattgattactactttgactcc

SEQ ID NO: 5142 - DNA, 42 bp, Artificial Sequence
  Synthetic polynucleotide encoding artificial human antibody CDR-H3 region
gcgaatagaaataccgaccgaacgggagatgcttttgatatc

SEQ ID NO: 5143 - DNA, 57 bp, Artificial Sequence
  Synthetic polynucleotide encoding artificial human antibody CDR-H3 region
gcaagaggtctctattgtggtggtgactgctattctatcctcgatgcttttgatatc

SEQ ID NO: 5144 - DNA, 42 bp, Artificial Sequence
  Synthetic polynucleotide encoding artificial human antibody CDR-H3 region
gtgagagatggggtgggaaatactattggctactttgactac

SEQ ID NO: 5145 - DNA, 48 bp, Artificial Sequence
  Synthetic polynucleotide encoding artificial human antibody CDR-H3 region
gcacgtctgggcagctatggttacgatatcaccgaggtccttgactac

SEQ ID NO: 5146 - DNA, 39 bp, Artificial Sequence
  Synthetic polynucleotide encoding artificial human antibody CDR-H3 region
gcgagaggtggagtattcggcgtcggagtttttgatatc

SEQ ID NO: 5147 - DNA, 42 bp, Artificial Sequence
  Synthetic polynucleotide encoding artificial human antibody CDR-H3 region
acgagggtcaccgggggtggctacaataatccttttgactac

SEQ ID NO: 5148 - DNA, 78 bp, Artificial Sequence
  Synthetic polynucleotide encoding artificial human antibody CDR-H3 region
gcgagagaccagtatcggatttctcggggtcggggcatttatataacgaacaccttctactattacggtatggacgtc

SEQ ID NO: 5149 - DNA, 45 bp, Artificial Sequence
  Synthetic polynucleotide encoding artificial human antibody CDR-H3 region
gcgagatattcaccatatggttcggggcacggggcgctggactat

SEQ ID NO: 5150 - DNA, 69 bp, Artificial Sequence
  Synthetic polynucleotide encoding artificial human antibody CDR-H3 region
gcgagaggccttaagggacttaccatgatggtagtggtttttactggggcatatgattcttttgattcc

SEQ ID NO: 5151 - DNA, 48 bp, Artificial Sequence
  Synthetic polynucleotide encoding artificial human antibody CDR-H3 region
gcgagacattcgtggggatggctacaattaggtggtgcttttgatatc

SEQ ID NO: 5152 - DNA, 69 bp, Artificial Sequence
  Synthetic polynucleotide encoding artificial human antibody CDR-H3 region
gcgaggggacgcagtgaggagactatgatagtgatggttgtcacgggaattgataactactttgactcc

SEQ ID NO: 5153 - DNA, 54 bp, Artificial Sequence
  Synthetic polynucleotide encoding artificial human antibody CDR-H3 region
gcgaaagattttccgcagtatagcagtggctggtacgaggggggttttgactac

SEQ ID NO: 5154 - DNA, 69 bp, Artificial Sequence
  Synthetic polynucleotide encoding artificial human antibody CDR-H3 region
gcgaggggacgctatgaggagactatgatagtgatggttgtcacgggaattgattactactttgactcc

SEQ ID NO: 5155 - DNA, 42 bp, Artificial Sequence
  Synthetic polynucleotide encoding artificial human antibody CDR-H3 region
gcgagaccccaggaggttcggggaggtccctacttagcctac

SEQ ID NO: 5156 - DNA, 48 bp, Artificial Sequence
  Synthetic polynucleotide encoding artificial human antibody CDR-H3 region
gcgagggggtattattatggttcggggaggtattataacctttggttc

SEQ ID NO: 5157 - DNA, 51 bp, Artificial Sequence
  Synthetic polynucleotide encoding artificial human antibody CDR-H3 region
gcgagaggggtaatatggttcggggagttcccgaggtactactttgactac

SEQ ID NO: 5158 - DNA, 24 bp, Artificial Sequence
  Synthetic polynucleotide encoding artificial human antibody CDR-H3 region
gcgacgctttacgatatttttctc

SEQ ID NO: 5159 - DNA, 42 bp, Artificial Sequence
  Synthetic polynucleotide encoding artificial human antibody CDR-H3 region
gcgagaggggccacagttatggttaatgtctggttccacccc

SEQ ID NO: 5160 - DNA, 39 bp, Artificial Sequence
  Synthetic polynucleotide encoding artificial human antibody CDR-H3 region
gcgaggggagtcactctgggaaattacggtctggacgtc

SEQ ID NO: 5161 - DNA, 63 bp, Artificial Sequence
  Synthetic polynucleotide encoding artificial human antibody CDR-H3 region
gcaacaggtcccgcagtggctggtaccattggggactcttactactactacggtatggacgtc

SEQ ID NO: 5162 - DNA, 78 bp, Artificial Sequence
  Synthetic polynucleotide encoding artificial human antibody CDR-H3 region
gcgagagaccagtatcggatttctaggggtcggggaatttttataacgaaaacgttcttctactacggtatggacgtc

SEQ ID NO: 5163 - DNA, 48 bp, Artificial Sequence
  Synthetic polynucleotide encoding artificial human antibody CDR-H3 region
gcgagagatcggggggtggctccaattatgtactggcacttcgatctc

SEQ ID NO: 5164 - DNA, 42 bp, Artificial Sequence
  Synthetic polynucleotide encoding artificial human antibody CDR-H3 region
gcacacagactagccgggtttgtacgtaactggttcgacccc

SEQ ID NO: 5165 - DNA, 69 bp, Artificial Sequence
  Synthetic polynucleotide encoding artificial human antibody CDR-H3 region
gcgagaggacgcagtgaggagactatgatagtgttagttgtcacgggtattgattactactttgactcc

SEQ ID NO: 5166 - DNA, 45 bp, Artificial Sequence
  Synthetic polynucleotide encoding artificial human antibody CDR-H3 region
gcgagatccgaaaacgactacggtggtaactgggcctttgactac

SEQ ID NO: 5167 - DNA, 69 bp, Artificial Sequence
  Synthetic polynucleotide encoding artificial human antibody CDR-H3 region
gcgagaggacgcagtgaagagactatgatagtgctggttgtcacgggcattgacttctactttgacgcc

SEQ ID NO: 5168 - DNA, 69 bp, Artificial Sequence
  Synthetic polynucleotide encoding artificial human antibody CDR-H3 region
gcgagaggacgcagtgaggagactatgatagtcgtggttattacggcaatggattactactttgactac

SEQ ID NO: 5169 - DNA, 72 bp, Artificial Sequence
  Synthetic polynucleotide encoding artificial human antibody CDR-H3 region
gcgagaatggtgggaaaaaaccatacctcgggactttttcgaggttactactacttctacggtttggacgtc

SEQ ID NO: 5170 - DNA, 69 bp, Artificial Sequence
  Synthetic polynucleotide encoding artificial human antibody CDR-H3 region
gcgagaggacgcagtgaagagactatgatagttgtggttgtcacgggaattgattacttctttgactcc

SEQ ID NO: 5171 - DNA, 42 bp, Artificial Sequence
  Synthetic polynucleotide encoding artificial human antibody CDR-H3 region
gcgagagccaatggcggcaactactactacggtatggacgtc

SEQ ID NO: 5172 - DNA, 66 bp, Artificial Sequence
  Synthetic polynucleotide encoding artificial human antibody CDR-H3 region
gcgaaagatagtgagaattgtagtggtggtagttgcgacgactactactactacggtatggacgtc

SEQ ID NO: 5173 - DNA, 39 bp, Artificial Sequence
  Synthetic polynucleotide encoding artificial human antibody CDR-H3 region
gcgcgaggactccatagtaatggtttcacctttgactac

SEQ ID NO: 5174 - DNA, 42 bp, Artificial Sequence
  Synthetic polynucleotide encoding artificial human antibody CDR-H3 region
gcaacagccgcagcagctgggcaacccaactggttcgacccc

SEQ ID NO: 5175 - DNA, 51 bp, Artificial Sequence
  Synthetic polynucleotide encoding artificial human antibody CDR-H3 region
gcaactctaggcggggagttatcctactactactactacggtatggacgtc

SEQ ID NO: 5176 - DNA, 54 bp, Artificial Sequence
  Synthetic polynucleotide encoding artificial human antibody CDR-H3 region
gcgagcacttacgatattttgactggttattaccatttatacggtatggacgtc

SEQ ID NO: 5177 - DNA, 69 bp, Artificial Sequence; identical to SEQ ID NO: 5141
  Synthetic polynucleotide encoding artificial human antibody CDR-H3 region

SEQ ID NO: 5178 - DNA, 54 bp, Artificial Sequence
  Synthetic polynucleotide encoding artificial human antibody CDR-H3 region
gcgaaagccgggccaatattttggttcggggaggggaagaactattttgacgac

SEQ ID NO: 5179 - DNA, 39 bp, Artificial Sequence
  Synthetic polynucleotide encoding artificial human antibody CDR-H3 region
tcgagagggggatgggagctactggaggcttttgatatc

SEQ ID NO: 5180 - DNA, 36 bp, Artificial Sequence
  Synthetic polynucleotide encoding artificial human antibody CDR-H3 region
gcgagacagctaccagcagctggcatacttgactac

SEQ ID NO: 5181 - DNA, 78 bp, Artificial Sequence; identical to SEQ ID NO: 5148
  Synthetic polynucleotide encoding artificial human antibody CDR-H3 region

SEQ ID NO: 5182 - DNA, 33 bp, Artificial Sequence
  Synthetic polynucleotide encoding artificial human antibody CDR-H3 region
gcacacagacgggctatagtggggcttgactac

SEQ ID NO: 5183 - DNA, 45 bp, Artificial Sequence
  Synthetic polynucleotide encoding artificial human antibody CDR-H3 region
gcgagacaatggttcggggcctactactactacggtatggacgtc

SEQ ID NO: 5184 - DNA, 60 bp, Artificial Sequence
  Synthetic polynucleotide encoding artificial human antibody CDR-H3 region
gcaacaggtccagcgacgtattactatggttcggggagtcccccggggtggttcgacccc

SEQ ID NO: 5185 - DNA, 51 bp, Artificial Sequence
  Synthetic polynucleotide encoding artificial human antibody CDR-H3 region
gcaagagccgactacggtggtaacttctactactactacggtatggacgtc

SEQ ID NO: 5186 - DNA, 45 bp, Artificial Sequence
  Synthetic polynucleotide encoding artificial human antibody CDR-H3 region
gcgaggcataagggggatctactacggggtgggtatttcgacccc

SEQ ID NO: 5187 - DNA, 45 bp, Artificial Sequence
  Synthetic polynucleotide encoding artificial human antibody CDR-H3 region
gcgagaggcgttatagcagtggctgccccatactactttgactac

SEQ ID NO: 5188 - DNA, 42 bp, Artificial Sequence
  Synthetic polynucleotide encoding artificial human antibody CDR-H3 region
gcgggcggggcagtggctgacaccctgggagcttttgctatc

SEQ ID NO: 5189 - DNA, 63 bp, Artificial Sequence
  Synthetic polynucleotide encoding artificial human antibody CDR-H3 region
gcgagataccctcaacctggggtgggagctagtgaaatctactactactatggtatggacgtc

SEQ ID NO: 5190 - DNA, 42 bp, Artificial Sequence
  Synthetic polynucleotide encoding artificial human antibody CDR-H3 region
gcgaaacctcatagtgggagctactatgatgcttttgatatc

SEQ ID NO: 5191 - DNA, 39 bp, Artificial Sequence
  Synthetic polynucleotide encoding artificial human antibody CDR-H3 region
gcgagagggggatgggagctactggaagcttttgatatc

SEQ ID NO: 5192 - DNA, 51 bp, Artificial Sequence
  Synthetic polynucleotide encoding artificial human antibody CDR-H3 region
gcgagacagactccaactctatggttcggggagtccccatggttcgacccc

SEQ ID NO: 5193 - DNA, 57 bp, Artificial Sequence
  Synthetic polynucleotide encoding artificial human antibody CDR-H3 region
gcgagagggactacggtgactaccctgacatgggactccacccccttttttgactac

SEQ ID NO: 5194 - DNA, 105 bp, Artificial Sequence
  Synthetic polynucleotide encoding artificial human antibody CDR-H3 region
gcgagagaggggcggaccagccgaactcgagccgggtatagcagtggctggtacgttttaaccggggaggaccccgattactactactactacggtatggacgtc

SEQ ID NO: 5195 - DNA, 57 bp, Artificial Sequence
  Synthetic polynucleotide encoding artificial human antibody CDR-H3 region
gggaaagtccgctatggtccggggacttataataacgaaggggcctactttgactac

SEQ ID NO: 5196 - DNA, 42 bp, Artificial Sequence
  Synthetic polynucleotide encoding artificial human antibody CDR-H3 region
gcgagaggcgatggaagcacgattagctactactttgactac

SEQ ID NO: 5197 - DNA, 48 bp, Artificial Sequence
  Synthetic polynucleotide encoding artificial human antibody CDR-H3 region
gcgagtttcaggccaaatatgattcggggagttggcccgtttttctgc

SEQ ID NO: 5198 - DNA, 48 bp, Artificial Sequence
  Synthetic polynucleotide encoding artificial human antibody CDR-H3 region
gcgaggtggatacagctatcgcttttggattactacggtatggacgtc

SEQ ID NO: 5199 - DNA, 45 bp, Artificial Sequence
  Synthetic polynucleotide encoding artificial human antibody CDR-H3 region
gcgaaattcaatggacccaactcctactactacggtttggacgtc

SEQ ID NO: 5200 - DNA, 45 bp, Artificial Sequence
  Synthetic polynucleotide encoding artificial human antibody CDR-H3 region
gtaagagatcagtggatcgagaagaagcgttacggtatggacgtc

SEQ ID NO: 5201 - DNA, 57 bp, Artificial Sequence
  Synthetic polynucleotide encoding artificial human antibody CDR-H3 region
gcgagagattcagcagcagctggtacggtccactactactactacggtatggacgtc

SEQ ID NO: 5202 - DNA, 45 bp, Artificial Sequence
  Synthetic polynucleotide encoding artificial human antibody CDR-H3 region
gcgagaggggggaacggaggggacctactacggtattttgactac

SEQ ID NO: 5203 - DNA, 42 bp, Artificial Sequence
  Synthetic polynucleotide encoding artificial human antibody CDR-H3 region
gcgagagttaggggtagtgggaccttctacgctatggacgtc

SEQ ID NO: 5204 - DNA, 69 bp, Artificial Sequence
  Synthetic polynucleotide encoding artificial human antibody CDR-H3 region
gcgagaggccttaagggacttaccatgatggtagtggtttttactggggcatatgatgcttttgatatc

SEQ ID NO: 5205 - DNA, 39 bp, Artificial Sequence
  Synthetic polynucleotide encoding artificial human antibody CDR-H3 region
gcatgcccgatcggtggctggtacgccaactttgactac

SEQ ID NO: 5206 - DNA, 27 bp, Artificial Sequence
  Synthetic polynucleotide encoding artificial human antibody CDR-H3 region
gcgcttaacgctaggatcccgggctac

SEQ ID NO: 5207 - DNA, 45 bp, Artificial Sequence
  Synthetic polynucleotide encoding artificial human antibody CDR-H3 region
gccagagagacgggaagtatggttcaggggtactactttgactac

SEQ ID NO: 5208 - DNA, 30 bp, Artificial Sequence
  Synthetic polynucleotide encoding artificial human antibody CDR-H3 region
gcaaaagatttcgaacttgacggcggaaac

SEQ ID NO: 5209 - DNA, 63 bp, Artificial Sequence
  Synthetic polynucleotide encoding artificial human antibody CDR-H3 region
gcgagagatcttttacgatattttgactggtcgatcttctactactactacggtatggacgtc

SEQ ID NO: 5210 - DNA, 75 bp, Artificial Sequence
  Synthetic polynucleotide encoding artificial human antibody CDR-H3 region
gcgagaatggggtggaaaaaggggggtatagcagcagctgattggggggactactactactacggtatggacgtc

SEQ ID NO: 5211 - DNA, 42 bp, Artificial Sequence
  Synthetic polynucleotide encoding artificial human antibody CDR-H3 region
gcgaaagatttccggccggatggtcgctggacgattgactac

SEQ ID NO: 5212 - DNA, 33 bp, Artificial Sequence
  Synthetic polynucleotide encoding artificial human antibody CDR-H3 region
gcaacaagtccgtgggacgtgaccttagagtat

SEQ ID NO: 5213 - DNA, 54 bp, Artificial Sequence
  Synthetic polynucleotide encoding artificial human antibody CDR-H3 region
gcgagagagatgccccggatacaactatggttgcggggagggtactttgactac

SEQ ID NO: 5214 - DNA, 42 bp, Artificial Sequence
  Synthetic polynucleotide encoding artificial human antibody CDR-H3 region
gcgagaagcggcggcggatggctccaattttactttgactac

SEQ ID NO: 5215 - DNA, 48 bp, Artificial Sequence
  Synthetic polynucleotide encoding artificial human antibody CDR-H3 region
gcgagagtagagatggctacaattcccaaccgatactactttgactac

SEQ ID NO: 5216 - DNA, 57 bp, Artificial Sequence
  Synthetic polynucleotide encoding artificial human antibody CDR-H3 region
gccagaggggttttttgcagtggtaatagctgctactcgagcccctggttcgacccc

SEQ ID NO: 5217 - DNA, 69 bp, Artificial Sequence
  Synthetic polynucleotide encoding artificial human antibody CDR-H3 region
gcgagagattcaggggtcagaccgagtggctatggcgtcccaaatgactactatttcggcatggacgtc

SEQ ID NO: 5218 - DNA, 39 bp, Artificial Sequence
  Synthetic polynucleotide encoding artificial human antibody CDR-H3 region
gcgagagatttctttcacggtgacccggtgcttgactac

SEQ ID NO: 5219 - DNA, 57 bp, Artificial Sequence
  Synthetic polynucleotide encoding artificial human antibody CDR-H3 region
gcgagagtagtatggtattgtagtagtaccagctgcttccatgatgcttttgatatc

SEQ ID NO: 5220 - DNA, 39 bp, Artificial Sequence
  Synthetic polynucleotide encoding artificial human antibody CDR-H3 region
actaccgatccccccattcggcggtacgccatggacgtc

SEQ ID NO: 5221 - DNA, 66 bp, Artificial Sequence
  Synthetic polynucleotide encoding artificial human antibody CDR-H3 region
gcgagaggcgtcagcgattttactatgatagtagtggttattactggcttctcctactttgactac

SEQ ID NO: 5222 - DNA, 39 bp, Artificial Sequence
  Synthetic polynucleotide encoding artificial human antibody CDR-H3 region
gcgagagatttcttccacggtgacccggtgtttgacttc

SEQ ID NO: 5223 - DNA, 36 bp, Artificial Sequence
  Synthetic polynucleotide encoding artificial human antibody CDR-H3 region
gcgaaatccccgtcagtgaattatgtctttgaaatc

SEQ ID NO: 5224 - DNA, 69 bp, Artificial Sequence
  Synthetic polynucleotide encoding artificial human antibody CDR-H3 region
gcgagagtaggacgcctaggacccctttatagcagcagctggtatggagacgggaactggttcgacccc

SEQ ID NO: 5225 - DNA, 69 bp, Artificial Sequence
  Synthetic polynucleotide encoding artificial human antibody CDR-H3 region
gcgagaggccggggcgacataactatgttccttgttgctattactagtgcaacatactactttgactac

SEQ ID NO: 5226 - DNA, 57 bp, Artificial Sequence
  Synthetic polynucleotide encoding artificial human antibody CDR-H3 region
gcgagggtcccaatagccggcaccacctggtctgttagaggatctcaatttgacttc

SEQ ID NO: 5227 - DNA, 45 bp, Artificial Sequence
  Synthetic polynucleotide encoding artificial human antibody CDR-H3 region
gcgagcgcccgtaattactatgatagtagtggtgtttttgactac

SEQ ID NO: 5228 - DNA, 27 bp, Artificial Sequence
  Synthetic polynucleotide encoding artificial human antibody CDR-H3 region
gcgaccgccaccctatacctccagcac

SEQ ID NO: 5229 - DNA, 45 bp, Artificial Sequence
  Synthetic polynucleotide encoding artificial human antibody CDR-H3 region
gcgagggggtccgatatagaatatagcagtgccttgtacgcctac

SEQ ID NO: 5230 - DNA, 18 bp, Artificial Sequence
  Synthetic polynucleotide encoding artificial human antibody CDR-H3 region
gcgaggaatcacgactac

SEQ ID NO: 5231 - DNA, 51 bp, Artificial Sequence
  Synthetic polynucleotide encoding artificial human antibody CDR-H3 region
gcggccactacattgagtgatagtagtggttattccctaccctgtgactac

SEQ ID NO: 5232 - DNA, 78 bp, Artificial Sequence
  Synthetic polynucleotide encoding artificial human antibody CDR-H3 region
gcgagagtcagggctgtagtagtaccagctcctgtgttagggctaggtccatactactactcctactacatggacgtc

SEQ ID NO: 5233 - DNA, 15 bp, Artificial Sequence
  Synthetic polynucleotide encoding artificial human antibody CDR-H3 region
actcgacttgactac

SEQ ID NO: 5234 - DNA, 66 bp, Artificial Sequence
  Synthetic polynucleotide encoding artificial human antibody CDR-H3 region
gtgaatcccccctgggccgactatgactacatcttccggactgatctgtacaccggtttccagcac

SEQ ID NO: 5235 - DNA, 21 bp, Artificial Sequence
  Synthetic polynucleotide encoding artificial human antibody CDR-H3 region
gcgaaaagggataccaccggt

SEQ ID NO: 5236 - DNA, 45 bp, Artificial Sequence
  Synthetic polynucleotide encoding artificial human antibody CDR-H3 region
gcgagagaagggattatagcggaagctggtttctattttgactcc

SEQ ID NO: 5237 - DNA, 42 bp, Artificial Sequence
  Synthetic polynucleotide encoding artificial human antibody CDR-H3 region
gcgagagatttggggtgggagcaagccaactggttcgacccc

SEQ ID NO: 5238 - DNA, 39 bp, Artificial Sequence
  Synthetic polynucleotide encoding artificial human antibody CDR-H3 region
gcgaaaggcgaccggggagatggtggctacgattcccgc

SEQ ID NO: 5239 - DNA, 51 bp, Artificial Sequence
  Synthetic polynucleotide encoding artificial human antibody CDR-H3 region
acgagagaaaatcgtgaccctccgggatctggtccctactactttgactac

SEQ ID NO: 5240 - DNA, 51 bp, Artificial Sequence
  Synthetic polynucleotide encoding artificial human antibody CDR-H3 region
gcgagactggattactatgatagtagtgggcattgctactactttgactac

SEQ ID NO: 5241 - DNA, 39 bp, Artificial Sequence
  Synthetic polynucleotide encoding artificial human antibody CDR-H3 region
gcgaggggaaataatggctacaattatcgttttgatatc

SEQ ID NO: 5242 - DNA, 54 bp, Artificial Sequence
  Synthetic polynucleotide encoding artificial human antibody CDR-H3 region
gcgagaagtaggaaggattacgtttgggggagttatcgttatctcttcgacccc

SEQ ID NO: 5243 - DNA, 66 bp, Artificial Sequence
  Synthetic polynucleotide encoding artificial human antibody CDR-H3 region
gcgaaagatggggaccctgattacgtttgggggaagtatcgttatcaaacatactattttgactac

SEQ ID NO: 5244 - DNA, 39 bp, Artificial Sequence
  Synthetic polynucleotide encoding artificial human antibody CDR-H3 region
gcgacctccgtcctcggtgactattcccgctttgactac

SEQ ID NO: 5245 - DNA, 30 bp, Artificial Sequence
  Synthetic polynucleotide encoding artificial human antibody CDR-H3 region
gcgacatcatacggggactacgatgactac

SEQ ID NO: 5246 - DNA, 66 bp, Artificial Sequence
  Synthetic polynucleotide encoding artificial human antibody CDR-H3 region
gcgagagatttcaattggttcggggagttacataccacttactactactactactacatggacgtc

SEQ ID NO: 5247 - DNA, 51 bp, Artificial Sequence
  Synthetic polynucleotide encoding artificial human antibody CDR-H3 region
gcgagagatctatattactatggttcggggagttactgtgcttttgatctc

SEQ ID NO: 5248 - DNA, 54 bp, Artificial Sequence
  Synthetic polynucleotide encoding artificial human antibody CDR-H3 region
gcgagacggagggagttactatggctcggggagccccactgcggcatggacgtc

SEQ ID NO: 5249 - DNA, 54 bp, Artificial Sequence
  Synthetic polynucleotide encoding artificial human antibody CDR-H3 region
gcgcgagataagaaaccgtatttcgatattttgactggttcttattttgactcc

SEQ ID NO: 5250 - DNA, 69 bp, Artificial Sequence
  Synthetic polynucleotide encoding artificial human antibody CDR-H3 region
gcccgtgaggacacgatgcttcggagaattgggtggttcgcaagtgaaaagataaaccgattcgacccc

SEQ ID NO: 5251 - DNA, 30 bp, Artificial Sequence
  Synthetic polynucleotide encoding artificial human antibody CDR-H3 region
gcgagatttagtgggagggcttttgatatc

SEQ ID NO: 5252 - DNA, 57 bp, Artificial Sequence
  Synthetic polynucleotide encoding artificial human antibody CDR-H3 region
gcgagaggcggaagttcagggttatattgtagtggtggtagctgctactttgactac

SEQ ID NO: 5253 - DNA, 39 bp, Artificial Sequence
  Synthetic polynucleotide encoding artificial human antibody CDR-H3 region
gcgaaagatggtggggtgggaggtcatcccctggactcc

SEQ ID NO: 5254 - DNA, 36 bp, Artificial Sequence
  Synthetic polynucleotide encoding artificial human antibody CDR-H3 region
gcaaaagagggctacaggttgggttacctcgtctac

SEQ ID NO: 5255 - DNA, 42 bp, Artificial Sequence
  Synthetic polynucleotide encoding artificial human antibody CDR-H3 region
gcgaaatccacgaatctttataggagtggaggctttgactac

SEQ ID NO: 5256 - DNA, 42 bp, Artificial Sequence
  Synthetic polynucleotide encoding artificial human antibody CDR-H3 region
gcgagagatcgaggatggctacaaccctggtacttcgatctc

SEQ ID NO: 5257 - DNA, 33 bp, Artificial Sequence
  Synthetic polynucleotide encoding artificial human antibody CDR-H3 region
gcgagtggcatgatctctgatgcttttgatgtt

SEQ ID NO: 5258 - DNA, 45 bp, Artificial Sequence
  Synthetic polynucleotide encoding artificial human antibody CDR-H3 region
gcgagagagtggggtgggaggtatacgggccctttctttaattac

SEQ ID NO: 5259 - DNA, 45 bp, Artificial Sequence
  Synthetic polynucleotide encoding artificial human antibody CDR-H3 region
gcgagagaagggcagtgggagctactgggtagagcttttgatatc

SEQ ID NO: 5260 - DNA, 45 bp, Artificial Sequence
  Synthetic polynucleotide encoding artificial human antibody CDR-H3 region
gtaagagattccccccgtggtggctacggggcctactttgactac

SEQ ID NO: 5261 - DNA, 57 bp, Artificial Sequence
  Synthetic polynucleotide encoding artificial human antibody CDR-H3 region
gcgagagtgttcggctcgacgatttttggagtggttattattcaggcttttgatatc

SEQ ID NO: 5262 - DNA, 45 bp, Artificial Sequence
  Synthetic polynucleotide encoding artificial human antibody CDR-H3 region
gcgagagtggctctgactggttattataccggtgtgttggacttt

SEQ ID NO: 5263 - DNA, 54 bp, Artificial Sequence
  Synthetic polynucleotide encoding artificial human antibody CDR-H3 region
gcaaaagatagtcactatgatagtagtggttattaccagaatgcttttgatatc

SEQ ID NO: 5264 - DNA, 39 bp, Artificial Sequence
  Synthetic polynucleotide encoding artificial human antibody CDR-H3 region
tcgagggggggcagttacatgcactggcacctcgaggtt

SEQ ID NO: 5265 - DNA, 42 bp, Artificial Sequence
  Synthetic polynucleotide encoding artificial human antibody CDR-H3 region
gcgagagggacagcgttgcctgggctctactactttgaccac

SEQ ID NO: 5266 - DNA, 48 bp, Artificial Sequence
  Synthetic polynucleotide encoding artificial human antibody CDR-H3 region
gcgagagaatgggcgaagttttactttcctagtcccggtcccataaac

SEQ ID NO: 5267 - DNA, 33 bp, Artificial Sequence
  Synthetic polynucleotide encoding artificial human antibody CDR-H3 region
gcgagagggtgggtacgatacaactttgacttc

SEQ ID NO: 5268 - DNA, 54 bp, Artificial Sequence
  Synthetic polynucleotide encoding artificial human antibody CDR-H3 region
accacagggctgggtaacattacgtctgggggattcatcgccctatttgactac

SEQ ID NO: 5269 - DNA, 72 bp, Artificial Sequence
  Synthetic polynucleotide encoding artificial human antibody CDR-H3 region
gcgagagaggcgcccgcctgggctttcgtagtgctagtaggtgttccctaccactactattccatggacgtc

SEQ ID NO: 5270 - DNA, 33 bp, Artificial Sequence
  Synthetic polynucleotide encoding artificial human antibody CDR-H3 region
gcgagagtgaacggggcgattgaccttgacctc

SEQ ID NO: 5271 - DNA, 66 bp, Artificial Sequence
  Synthetic polynucleotide encoding artificial human antibody CDR-H3 region
gtgaatcccctctgggccgactatgactacatcttccggactgatctgtacaccggtttccagcac

SEQ ID NO: 5272 - DNA, 27 bp, Artificial Sequence
  Synthetic polynucleotide encoding artificial human antibody CDR-H3 region
gcgagggggcttacaggaaatgactac

SEQ ID NO: 5273 - DNA, 36 bp, Artificial Sequence
  Synthetic polynucleotide encoding artificial human antibody CDR-H3 region
gcgctcctcgcgtctcccgcctactacatggccgcc

SEQ ID NO: 5274 - DNA, 54 bp, Artificial Sequence
  Synthetic polynucleotide encoding artificial human antibody CDR-H3 region
gcgagagggacgagggacagctgggagcggaagttgaatatggccgttgactac

SEQ ID NO: 5275 - DNA, 33 bp, Artificial Sequence
  Synthetic polynucleotide encoding artificial human antibody CDR-H3 region
gcaactggaacgacggacgacgcctttgactac

SEQ ID NO: 5276 - DNA, 75 bp, Artificial Sequence
  Synthetic polynucleotide encoding artificial human antibody CDR-H3 region
gcgagaggccttgattacgatttttggtttagcgggccaatgactaattactactactactacggtatggacgtc

SEQ ID NO: 5277 - DNA, 57 bp, Artificial Sequence
  Synthetic polynucleotide encoding artificial human antibody CDR-H3 region
gcgagacaatcgtaccggtatagcagtggctggtactactactacggtatggacgtc

SEQ ID NO: 5278 - DNA, 51 bp, Artificial Sequence
  Synthetic polynucleotide encoding artificial human antibody CDR-H3 region
gcgagacatggcgatttttggagtggttattaccctggggcttttgatatt

SEQ ID NO: 5279 - DNA, 48 bp, Artificial Sequence
  Synthetic polynucleotide encoding artificial human antibody CDR-H3 region
gcgaggtcgccacctatagcagtggctggtacgacatggttcgacccc

SEQ ID NO: 5280 - DNA, 48 bp, Artificial Sequence
  Synthetic polynucleotide encoding artificial human antibody CDR-H3 region
actagaggagacaggcgtggatatctgtctcgccactacatgggcgtc

SEQ ID NO: 5281 - DNA, 63 bp, Artificial Sequence
  Synthetic polynucleotide encoding artificial human antibody CDR-H3 region
gcgagagtccctgcggacagacttgttctgcttccaagtgcagtgcagacctactttgactac

SEQ ID NO: 5282 - DNA, 33 bp, Artificial Sequence
  Synthetic polynucleotide encoding artificial human antibody CDR-H3 region
gcacgggacagtggaggccgtccctttgactac

SEQ ID NO: 5283 - DNA, 57 bp, Artificial Sequence
  Synthetic polynucleotide encoding artificial human antibody CDR-H3 region
gcacacagtctgcgtcgcgccacctggagcgaggcctcctattactacatggacgtc

SEQ ID NO: 5284 - DNA, 45 bp, Artificial Sequence
  Synthetic polynucleotide encoding artificial human antibody CDR-H3 region
gcgaaaggggatgattcggggacttattattactacatggacgtc

SEQ ID NO: 5285 - DNA, 63 bp, Artificial Sequence
  Synthetic polynucleotide encoding artificial human antibody CDR-H3 region
gcaaaagatgtcgaggaccgttattacgatttttccagtggctccacgagactccccggttct

SEQ ID NO: 5286 - DNA, 45 bp, Artificial Sequence
  Synthetic polynucleotide encoding artificial human antibody CDR-H3 region
gcgagaggttcgtattacgattttcgcgactactacatggacgtc

SEQ ID NO: 5287 - DNA, 48 bp, Artificial Sequence
  Synthetic polynucleotide encoding artificial human antibody CDR-H3 region
gcgagaccttactatgatagtagtggttaccatgatgcttttgatatc

SEQ ID NO: 5288 - DNA, 60 bp, Artificial Sequence
  Synthetic polynucleotide encoding artificial human antibody CDR-H3 region
gcgagaggccccgatattttgactggttattacaactactactactacggtatggacgtc

SEQ ID NO: 5289 - DNA, 42 bp, Artificial Sequence
  Synthetic polynucleotide encoding artificial human antibody CDR-H3 region
gcaaccttctgggcagtggcggcactttactactttgactac

SEQ ID NO: 5290 - DNA, 54 bp, Artificial Sequence
  Synthetic polynucleotide encoding artificial human antibody CDR-H3 region
gcgacaggggccgctttctctgatggtggttctccgatggccacttttgatttg

SEQ ID NO: 5291 - DNA, 57 bp, Artificial Sequence
  Synthetic polynucleotide encoding artificial human antibody CDR-H3 region
gcgagaacatcgtttagaagtgactggtattttaaacccccgaactggttcggcccc

SEQ ID NO: 5292 - DNA, 60 bp, Artificial Sequence
  Synthetic polynucleotide encoding artificial human antibody CDR-H3 region
gcgagacagcgaggagtggctacgatttttggcggttactactactacggtatggacgtc

SEQ ID NO: 5293 - DNA, 63 bp, Artificial Sequence
  Synthetic polynucleotide encoding artificial human antibody CDR-H3 region
gcgagagtggggacggattaccagggttcgggcatcttctacaattactacggcatggacgcc

SEQ ID NO: 5294 - DNA, 48 bp, Artificial Sequence
  Synthetic polynucleotide encoding artificial human antibody CDR-H3 region
gcgagaagtctcctctatggttcggggagttataaccattttgactac

SEQ ID NO: 5295 - DNA, 51 bp, Artificial Sequence
  Synthetic polynucleotide encoding artificial human antibody CDR-H3 region
gcgagacatactaggagatggctacagctacgaccgtcctactttgactac

SEQ ID NO: 5296 - DNA, 45 bp, Artificial Sequence
  Synthetic polynucleotide encoding artificial human antibody CDR-H3 region
gcgagagatctaagcagcagctggcaatccagcacactcgacccc

SEQ ID NO: 5297 - DNA, 66 bp, Artificial Sequence
  Synthetic polynucleotide encoding artificial human antibody CDR-H3 region
actagagatatcgcgatagcagcagctggtacattgcgttggtactactactactacatggacgtc

SEQ ID NO: 5298 - DNA, 51 bp, Artificial Sequence
  Synthetic polynucleotide encoding artificial human antibody CDR-H3 region
gcgagagatcttgggcagtggctggtacggggaatacgggggtttgactac

SEQ ID NO: 5299 - DNA, 57 bp, Artificial Sequence
  Synthetic polynucleotide encoding artificial human antibody CDR-H3 region
gcgagatgcactagggatattttgactggttattatttgggcaactggttcgacccc

SEQ ID NO: 5300 - DNA, 24 bp, Artificial Sequence
  Synthetic polynucleotide encoding artificial human antibody CDR-H3 region
tttggacatggaagctcgtcgtac

SEQ ID NO: 5301 - DNA, 66 bp, Artificial Sequence
  Synthetic polynucleotide encoding artificial human antibody CDR-H3 region
gcaacagggcccgcccattactatgatagtagtggttactattactactactacggtatggacgtc

SEQ ID NO: 5302 - DNA, 51 bp, Artificial Sequence
  Synthetic polynucleotide encoding artificial human antibody CDR-H3 region
gcgaaacagatgagcagtggctggtacgggggacaatttgcttttgatatc

SEQ ID NO: 5303 - DNA, 57 bp, Artificial Sequence
  Synthetic polynucleotide encoding artificial human antibody CDR-H3 region
gcaacctctcccgcgtattactatggttcggggaatattttacactggttcgacccc

SEQ ID NO: 5304 - DNA, 54 bp, Artificial Sequence
  Synthetic polynucleotide encoding artificial human antibody CDR-H3 region
gcgagacatggaggagggaagtacaactggaacgacgagggctggttcgacccc

SEQ ID NO: 5305 - DNA, 48 bp, Artificial Sequence
  Synthetic polynucleotide encoding artificial human antibody CDR-H3 region
gcacacaaaactactatgatagtagtggttggggatgcttttgatatc

SEQ ID NO: 5306 - DNA, 60 bp, Artificial Sequence
  Synthetic polynucleotide encoding artificial human antibody CDR-H3 region
gcgagagggtcatcgcggcatattgtggtggtgactgctcattactggtacttcgatctc

SEQ ID NO: 5307 - DNA, 30 bp, Artificial Sequence
  Synthetic polynucleotide encoding artificial human antibody CDR-H3 region
gcgagagacgggttcggggaccttgagttc

SEQ ID NO: 5308 - DNA, 54 bp, Artificial Sequence
  Synthetic polynucleotide encoding artificial human antibody CDR-H3 region
gcgagagggtcaacccagtggttcgggacaagcatgggcaactggttcgacccc

SEQ ID NO: 5309 - DNA, 66 bp, Artificial Sequence
  Synthetic polynucleotide encoding artificial human antibody CDR-H3 region
gcgagacatggggccgattgtactaatggtgtatgctattcttccgactactactacatggacgtc

SEQ ID NO: 5310 - DNA, 69 bp, Artificial Sequence
  Synthetic polynucleotide encoding artificial human antibody CDR-H3 region
gcaacaaccacgccggggggctattactatgatagtagtggttatcccctcacctcctggttcgacccc

SEQ ID NO: 5311 - DNA, 51 bp, Artificial Sequence
  Synthetic polynucleotide encoding artificial human antibody CDR-H3 region
gcgagaacggaccccaatacgatttttggagtggttacacattttgactac

SEQ ID NO: 5312 - DNA, 33 bp, Artificial Sequence
  Synthetic polynucleotide encoding artificial human antibody CDR-H3 region
gcgagtggcctttcaaggggactctttgacttc

SEQ ID NO: 5313 - DNA, 42 bp, Artificial Sequence
  Synthetic polynucleotide encoding artificial human antibody CDR-H3 region
gcaacagccagtatagtgggagctactgggtggttcgacccc

SEQ ID NO: 5314 - DNA, 48 bp, Artificial Sequence
  Synthetic polynucleotide encoding artificial human antibody CDR-H3 region
gcgagagatgatagcagaggctggaacccccgtgggagaatggactac

SEQ ID NO: 5315 - DNA, 48 bp, Artificial Sequence
  Synthetic polynucleotide encoding artificial human antibody CDR-H3 region
gcaacagtaaagcgtacagagtgggagctacttgatgcttttgatatc

SEQ ID NO: 5316 - DNA, 33 bp, Artificial Sequence
  Synthetic polynucleotide encoding artificial human antibody CDR-H3 region
gcaagcgcaagtcgcacgggcgactttgaccat

SEQ ID NO: 5317 - DNA, 57 bp, Artificial Sequence
  Synthetic polynucleotide encoding artificial human antibody CDR-H3 region
gccagagatctcgcggtaggagattgtagtggggctagctgcttcggccttgactcc

SEQ ID NO: 5318 - DNA, 48 bp, Artificial Sequence
  Synthetic polynucleotide encoding artificial human antibody CDR-H3 region
gcacggatcctccgggactggctaagctactactactacataaacgtc

SEQ ID NO: 5319 - DNA, 54 bp, Artificial Sequence
  Synthetic polynucleotide encoding artificial human antibody CDR-H3 region
gcgaaagatacggggaactatgatactagtggttgtaggggcctttttggctac

SEQ ID NO: 5320 - DNA, 66 bp, Artificial Sequence
  Synthetic polynucleotide encoding artificial human antibody CDR-H3 region
gcggctacctcggtgtattacgatattttgactggttattatcgactacatgatgcttttgatatc

SEQ ID NO: 5321 - DNA, 42 bp, Artificial Sequence
  Synthetic polynucleotide encoding artificial human antibody CDR-H3 region
gcaagagaggcagtagctggtacgaggaactggttcgacccc

SEQ ID NO: 5322 - DNA, 42 bp, Artificial Sequence
  Synthetic polynucleotide encoding artificial human antibody CDR-H3 region
gcgagggcgatagatggctacataggagactactttgagtac

SEQ ID NO: 5323 - DNA, 42 bp, Artificial Sequence
  Synthetic polynucleotide encoding artificial human antibody CDR-H3 region
gcgaggccggggggggggaattacttagcctcctttgactac

SEQ ID NO: 5324 - DNA, 42 bp, Artificial Sequence
  Synthetic polynucleotide encoding artificial human antibody CDR-H3 region
gcgaaaggcagtggctggcactactactacggtgtggacgtc

SEQ ID NO: 5325 - DNA, 51 bp, Artificial Sequence
  Synthetic polynucleotide encoding artificial human antibody CDR-H3 region
gcgagacataatattttgtttcgtcgtatctactacttctacatggacgtc

SEQ ID NO: 5326 - DNA, 45 bp, Artificial Sequence
  Synthetic polynucleotide encoding artificial human antibody CDR-H3 region
gcgagagaggggtccccctcagccacccttgagagggagaactac

SEQ ID NO: 5327 - DNA, 51 bp, Artificial Sequence
  Synthetic polynucleotide encoding artificial human antibody CDR-H3 region
gcgagagatacctccccttactatgatagtagtggtccctactttgactac

SEQ ID NO: 5328 - DNA, 60 bp, Artificial Sequence
  Synthetic polynucleotide encoding artificial human antibody CDR-H3 region
gcgagagccaatgtattacgatattttgactggtcctactactactacggtatggacgtc

SEQ ID NO: 5329 - DNA, 45 bp, Artificial Sequence
  Synthetic polynucleotide encoding artificial human antibody CDR-H3 region
gcgagacatcgggtagcagcttcagttaggtaccactttgactac

SEQ ID NO: 5330 - DNA, 45 bp, Artificial Sequence
  Synthetic polynucleotide encoding artificial human antibody CDR-H3 region
tccacttatttactagtaaagtgggacgccatgcgtggtgcctac

SEQ ID NO: 5331 - DNA, 63 bp, Artificial Sequence
  Synthetic polynucleotide encoding artificial human antibody CDR-H3 region
gcgaaagatcttgggaaaagggggagcagtggctggtactactactactacggtatggacgtc

SEQ ID NO: 5332 - DNA, 66 bp, Artificial Sequence
  Synthetic polynucleotide encoding artificial human antibody CDR-H3 region
gcgagagaaagggaatttgtttcgtatggttcggggagttattacaagtacaactggttcgacccc

SEQ ID NO: 5333 - DNA, 42 bp, Artificial Sequence
  Synthetic polynucleotide encoding artificial human antibody CDR-H3 region
ggtgatatagcaattcgccgtgagggcagtgtttttggtttc

SEQ ID NO: 5334 - DNA, 45 bp, Artificial Sequence
  Synthetic polynucleotide encoding artificial human antibody CDR-H3 region
gcgagagatccaagagttcggggagttatcctaatctttgactac

SEQ ID NO: 5335 - DNA, 36 bp, Artificial Sequence
  Synthetic polynucleotide encoding artificial human antibody CDR-H3 region
gcacacgttctttatagtgggagctactacgaaggc

SEQ ID NO: 5336 - DNA, 54 bp, Artificial Sequence
  Synthetic polynucleotide encoding artificial human antibody CDR-H3 region
gcgagaggggcgactcactggttcggagatcttttgggtaactggttcgacccc

SEQ ID NO: 5337 - DNA, 66 bp, Artificial Sequence
  Synthetic polynucleotide encoding artificial human antibody CDR-H3 region
gcgagaaatgtagccgaggccgtttatagcagtggctggtactactactactactacatggacgtc

SEQ ID NO: 5338 - DNA, 48 bp, Artificial Sequence
  Synthetic polynucleotide encoding artificial human antibody CDR-H3 region
gccacgaattactatgatagtagcggggcgcccggagtttttgactac

SEQ ID NO: 5339 - DNA, 57 bp, Artificial Sequence
  Synthetic polynucleotide encoding artificial human antibody CDR-H3 region
gcgaggaccccgttttcctatgacagcagtggtttttactatgggttctttgactcc

SEQ ID NO: 5340 - DNA, 45 bp, Artificial Sequence
  Synthetic polynucleotide encoding artificial human antibody CDR-H3 region
gcgagagatggcttgtgggagactggccgaggggggtttgactac

SEQ ID NO: 5341 - DNA, 60 bp, Artificial Sequence
  Synthetic polynucleotide encoding artificial human antibody CDR-H3 region
gccagagttccctttacgatttttgggggggttaactacttctactcctacatggacgtc

SEQ ID NO: 5342 - DNA, 75 bp, Artificial Sequence
  Synthetic polynucleotide encoding artificial human antibody CDR-H3 region
gcaacacacccctctgtagtagtaccagctgccagtttcccggagaattactactactactacggtatggacgtc

SEQ ID NO: 5343 - DNA, 69 bp, Artificial Sequence
  Synthetic polynucleotide encoding artificial human antibody CDR-H3 region
gcacacagacccacggtggggtattacgatattttgactggttatcgctctcacaactggttcgacccc

SEQ ID NO: 5344 - DNA, 45 bp, Artificial Sequence
  Synthetic polynucleotide encoding artificial human antibody CDR-H3 region
gcaacagtccctcccggcccagggggggagttatcgttagactac

SEQ ID NO: 5345 - DNA, 45 bp, Artificial Sequence
  Synthetic polynucleotide encoding artificial human antibody CDR-H3 region
gcgagatttgcgacatggttcggggagttattcggctttgactac

SEQ ID NO: 5346 - DNA, 42 bp, Artificial Sequence
  Synthetic polynucleotide encoding artificial human antibody CDR-H3 region
gcgagaggccgcagcatattgtggtggtggccgcttgactac

SEQ ID NO: 5347 - DNA, 69 bp, Artificial Sequence
  Synthetic polynucleotide encoding artificial human antibody CDR-H3 region
gcgagaggccataggaccgggcggattactatgatagtagtggttattacttcatactggttcgacccc

SEQ ID NO: 5348 - DNA, 42 bp, Artificial Sequence
  Synthetic polynucleotide encoding artificial human antibody CDR-H3 region
gcgagaaactcctactatggttcgggccacccgttcgacccc

SEQ ID NO: 5349 - DNA, 48 bp, Artificial Sequence
  Synthetic polynucleotide encoding artificial human antibody CDR-H3 region
gcaagagagactacggtgacttactactactactactacatggacgtc

SEQ ID NO: 5350 - DNA, 63 bp, Artificial Sequence
  Synthetic polynucleotide encoding artificial human antibody CDR-H3 region
gcgagatccggctatctgatcggggagttattatcgtactactactactacggtatggacgtc

SEQ ID NO: 5351 - DNA, 42 bp, Artificial Sequence
  Synthetic polynucleotide encoding artificial human antibody CDR-H3 region
gcgagggggggagcggggtactactactactacatggacgtc

SEQ ID NO: 5352 - DNA, 39 bp, Artificial Sequence
  Synthetic polynucleotide encoding artificial human antibody CDR-H3 region
gcgaagggttcgccgaggatacgggagggacctgactac

SEQ ID NO: 5353 - DNA, 75 bp, Artificial Sequence
  Synthetic polynucleotide encoding artificial human antibody CDR-H3 region
gcgagagatggcccgtattactatgatagtagtggttattactatccccgaccctggaactactacatggacgtc

SEQ ID NO: 5354 - DNA, 48 bp, Artificial Sequence
  Synthetic polynucleotide encoding artificial human antibody CDR-H3 region
gcgaaagacgaatcattactatggttcggggagttacactttgactac

SEQ ID NO: 5355 - DNA, 48 bp, Artificial Sequence
  Synthetic polynucleotide encoding artificial human antibody CDR-H3 region
gcgagtcccagtccgcgcgatggctacggcgactacgtttatgactat

SEQ ID NO: 5356 - DNA, 75 bp, Artificial Sequence
  Synthetic polynucleotide encoding artificial human antibody CDR-H3 region
gcgagagccctgtattactatgatagtagtggttattactccccccccctctactactactacggtatggacgtc

SEQ ID NO: 5357 - DNA, 36 bp, Artificial Sequence
  Synthetic polynucleotide encoding artificial human antibody CDR-H3 region
gcgagagtgcttccttacggtgactactatgactac

SEQ ID NO: 5358 - DNA, 54 bp, Artificial Sequence
  Synthetic polynucleotide encoding artificial human antibody CDR-H3 region
gcaaggaccccccggcagtggctggtactctactactactactacatggacgtc

SEQ ID NO: 5359 - DNA, 39 bp, Artificial Sequence
  Synthetic polynucleotide encoding artificial human antibody CDR-H3 region
gcaatagatctctcgcgtttgggggacttatcgaggacc

SEQ ID NO: 5360 - DNA, 54 bp, Artificial Sequence
  Synthetic polynucleotide encoding artificial human antibody CDR-H3 region
gcgagatttcggagcgttccgggagtccgccccgcttcgtactactgtgacttc

SEQ ID NO: 5361 - DNA, 33 bp, Artificial Sequence
  Synthetic polynucleotide encoding artificial human antibody CDR-H3 region
gcgaggagttcagcagcgactgcttttgatatc

SEQ ID NO: 5362 - DNA, 39 bp, Artificial Sequence
  Synthetic polynucleotide encoding artificial human antibody CDR-H3 region
gcgagagaggtgaaagtaacgcccgatgcttttgatatc

SEQ ID NO: 5363 - DNA, 42 bp, Artificial Sequence
  Synthetic polynucleotide encoding artificial human antibody CDR-H3 region
gcgaaagcccagactattgtactaatggtgtatgctattgac

SEQ ID NO: 5364 - DNA, 48 bp, Artificial Sequence
  Synthetic polynucleotide encoding artificial human antibody CDR-H3 region
gcgagaaaagaggcggtggcagtggctggtctctactactttgactac

SEQ ID NO: 5365 - DNA, 63 bp, Artificial Sequence
  Synthetic polynucleotide encoding artificial human antibody CDR-H3 region
gcgagagagaggggccagagatggctacaattaaaggactactactactactacatggacgtc

SEQ ID NO: 5366 - DNA, 42 bp, Artificial Sequence
  Synthetic polynucleotide encoding artificial human antibody CDR-H3 region
gcgagagagacacggggatatagcagtggctggtctgactac

SEQ ID NO: 5367 - DNA, 36 bp, Artificial Sequence
  Synthetic polynucleotide encoding artificial human antibody CDR-H3 region
gcgactgacgcgggcaccagttggccttttttctat

SEQ ID NO: 5368 - DNA, 39 bp, Artificial Sequence
  Synthetic polynucleotide encoding artificial human antibody CDR-H3 region
gcgagagaaatcacggtgacgcccgatgcttttgatatc

SEQ ID NO: 5369 - DNA, 39 bp, Artificial Sequence
  Synthetic polynucleotide encoding artificial human antibody CDR-H3 region
gcgaaagatgacgattactatgataaagttatggacgtc

SEQ ID NO: 5370 - DNA, 51 bp, Artificial Sequence
  Synthetic polynucleotide encoding artificial human antibody CDR-H3 region
gcgagagatcctataaccagcagtggcaactactgggggtcttttgactac

SEQ ID NO: 5371 - DNA, 33 bp, Artificial Sequence
  Synthetic polynucleotide encoding artificial human antibody CDR-H3 region
gcacggatctatggttcggggatacctgactac

SEQ ID NO: 5372 - DNA, 69 bp, Artificial Sequence
  Synthetic polynucleotide encoding artificial human antibody CDR-H3 region
gcgcgaggcgcccggcaattatataggagtggctggttcgaatactactactactactacatggacgtc

SEQ ID NO: 5373 - DNA, 57 bp, Artificial Sequence
  Synthetic polynucleotide encoding artificial human antibody CDR-H3 region
gcgagaatgaaatttattactatgatagtagtggttacccgcgaagggttcgacccc

SEQ ID NO: 5374 - DNA, 45 bp, Artificial Sequence
  Synthetic polynucleotide encoding artificial human antibody CDR-H3 region
gcgagtgaccttgggagctacggaggatttgagtacttcgatctc

SEQ ID NO: 5375 - DNA, 57 bp, Artificial Sequence
  Synthetic polynucleotide encoding artificial human antibody CDR-H3 region
gcgagagatgctcggtttttctatgatagtagtggttactcgaatgcttttgatatc

SEQ ID NO: 5376 - DNA, 57 bp, Artificial Sequence
  Synthetic polynucleotide encoding artificial human antibody CDR-H3 region
gcgagacgagattactatgatagtagtggttattaccccggctacggtatggacgtc

SEQ ID NO: 5377 - DNA, 30 bp, Artificial Sequence
  Synthetic polynucleotide encoding artificial human antibody CDR-H3 region
gcacaccttaccaatcgggatatagactac

SEQ ID NO: 5378 - DNA, 42 bp, Artificial Sequence
  Synthetic polynucleotide encoding artificial human antibody CDR-H3 region
gcgaggtcgtatagtgggagctaccgaggggcttttgatatc

SEQ ID NO: 5379 - DNA, 42 bp, Artificial Sequence
  Synthetic polynucleotide encoding artificial human antibody CDR-H3 region
gcgaaagatgagagggcgcgaggtggctgggcttttgaccac

SEQ ID NO: 5380 - DNA, 45 bp, Artificial Sequence
  Synthetic polynucleotide encoding artificial human antibody CDR-H3 region
gccagatctactagtggctggacctcagaaatctacattgactac

SEQ ID NO: 5381 - DNA, 51 bp, Artificial Sequence
  Synthetic polynucleotide encoding artificial human antibody CDR-H3 region
gcgagaagggaggccgaagatagagctatggccccctcccactttgactac

SEQ ID NO: 5382 - DNA, 42 bp, Artificial Sequence
  Synthetic polynucleotide encoding artificial human antibody CDR-H3 region
gcaacaacggcagtggctggtagagtgaactggttcgacccc

SEQ ID NO: 5383 - DNA, 39 bp, Artificial Sequence
  Synthetic polynucleotide encoding artificial human antibody CDR-H3 region
gcgagattcggtgggagctactacggggggtttgactac

SEQ ID NO: 5384 - DNA, 48 bp, Artificial Sequence
  Synthetic polynucleotide encoding artificial human antibody CDR-H3 region
gcgaggacgtattacgatattttgactgggaatttttggttcgacccc

SEQ ID NO: 5385 - DNA, 48 bp, Artificial Sequence
  Synthetic polynucleotide encoding artificial human antibody CDR-H3 region
gcacggatgtattacgatattttgactggttatttccaggaggactac

SEQ ID NO: 5386 - DNA, 51 bp, Artificial Sequence
  Synthetic polynucleotide encoding artificial human antibody CDR-H3 region
gcacacagttgtagtggtggtagctgctactactcaccggggttcgacccc

SEQ ID NO: 5387 - DNA, 45 bp, Artificial Sequence
  Synthetic polynucleotide encoding artificial human antibody CDR-H3 region
gcgaaagatgcggaatacagctatggtaacccaggtatggacgtc

SEQ ID NO: 5388 - DNA, 48 bp, Artificial Sequence
  Synthetic polynucleotide encoding artificial human antibody CDR-H3 region
gcgagagacttagggcagtggctggggtactactggtacttcgatctc

SEQ ID NO: 5389 - DNA, 48 bp, Artificial Sequence
  Synthetic polynucleotide encoding artificial human antibody CDR-H3 region
gcgagagcctacacagctatggttactggtgcctactacatggacgtc

SEQ ID NO: 5390 - DNA, 60 bp, Artificial Sequence
  Synthetic polynucleotide encoding artificial human antibody CDR-H3 region
gcgagagattgggaggggcggcttggtttggcgatagtagacgcgggctactttgactac

SEQ ID NO: 5391 - DNA, 45 bp, Artificial Sequence
  Synthetic polynucleotide encoding artificial human antibody CDR-H3 region
gcaacaggtcccgttataactggaactatggactggttcgacccc

SEQ ID NO: 5392 - DNA, 45 bp, Artificial Sequence
  Synthetic polynucleotide encoding artificial human antibody CDR-H3 region
actagacgccctgaagaatattgtggtggtgactgctacattccc

SEQ ID NO: 5393 - DNA, 63 bp, Artificial Sequence
  Synthetic polynucleotide encoding artificial human antibody CDR-H3 region
gcgagagataagacaaccaagcagtggctggtacttgtcgactactactacggtatggacgtc

SEQ ID NO: 5394 - DNA, 60 bp, Artificial Sequence
  Synthetic polynucleotide encoding artificial human antibody CDR-H3 region
gcgaggtcccttgatagcggtggctggggggggacctacaactactacggtatggacgtc

SEQ ID NO: 5395 - DNA, 66 bp, Artificial Sequence
  Synthetic polynucleotide encoding artificial human antibody CDR-H3 region
gcgagagatccccccttgtattactatggttcggggagttaccaatactactacggtatggacgtc

SEQ ID NO: 5396 - DNA, 33 bp, Artificial Sequence
  Synthetic polynucleotide encoding artificial human antibody CDR-H3 region
gtgagggcagccttagatgatgctttggatgtc

SEQ ID NO: 5397 - DNA, 42 bp, Artificial Sequence
  Synthetic polynucleotide encoding artificial human antibody CDR-H3 region
gcaacatctcccgggtatagcacagagaactggttcgacccc

SEQ ID NO: 5398 - DNA, 57 bp, Artificial Sequence
  Synthetic polynucleotide encoding artificial human antibody CDR-H3 region
gcgagagaggacgtattacgatattttgactggtacccctggagctggttcgacccc

SEQ ID NO: 5399 - DNA, 63 bp, Artificial Sequence
  Synthetic polynucleotide encoding artificial human antibody CDR-H3 region
gcgaaagtcgcggggcattactatgatagtagtggttattactacgagggcggtatggacgtc

SEQ ID NO: 5400 - DNA, 60 bp, Artificial Sequence
  Synthetic polynucleotide encoding artificial human antibody CDR-H3 region
gcgagagattgtagtaccagctgcatccaggccaactactactactacggtatggacgtc

SEQ ID NO: 5401 - DNA, 51 bp, Artificial Sequence
  Synthetic polynucleotide encoding artificial human antibody CDR-H3 region
gcgagacatagacggcagtggctggtacggacgcctgatgcttttgatatc

SEQ ID NO: 5402 - DNA, 66 bp, Artificial Sequence
  Synthetic polynucleotide encoding artificial human antibody CDR-H3 region
gcgagagagctcaaaacgtattacgatattttgactggttatcggcgactttacggtatggacgtc

SEQ ID NO: 5403 - DNA, 78 bp, Artificial Sequence
  Synthetic polynucleotide encoding artificial human antibody CDR-H3 region
gcaaccgcgccccccgtcgctcccctaaaggattacgatattttgactggttacctttactactacggtatggacgtc

SEQ ID NO: 5404 - DNA, 42 bp, Artificial Sequence
  Synthetic polynucleotide encoding artificial human antibody CDR-H3 region
gcgagattgggagggcatggagtgggagccccttttgactac

SEQ ID NO: 5405 - DNA, 33 bp, Artificial Sequence
  Synthetic polynucleotide encoding artificial human antibody CDR-H3 region
gcgagagactacggtgactactactttgactac

SEQ ID NO: 5406 - DNA, 57 bp, Artificial Sequence
  Synthetic polynucleotide encoding artificial human antibody CDR-H3 region
gcgagacattacggtactatgatagtagtggttattactccatactactttgactac

SEQ ID NO: 5407 - DNA, 45 bp, Artificial Sequence
  Synthetic polynucleotide encoding artificial human antibody CDR-H3 region
gcgacccccagggaggcgatagtagtggttaccgcctttgactac

SEQ ID NO: 5408 - DNA, 51 bp, Artificial Sequence
  Synthetic polynucleotide encoding artificial human antibody CDR-H3 region
gcaacaacatccccatttcggggagtcccgaatttgaactggttcgacccc

SEQ ID NO: 5409 - DNA, 54 bp, Artificial Sequence
  Synthetic polynucleotide encoding artificial human antibody CDR-H3 region
gcacggatggggaggagatggctacaattaaggccctctcactactttgactac

SEQ ID NO: 5410 - DNA, 57 bp, Artificial Sequence
  Synthetic polynucleotide encoding artificial human antibody CDR-H3 region
actagagaggacggatgtactaatggtgtatgctatatatcgaacgtctttgactac

SEQ ID NO: 5411 - DNA, 42 bp, Artificial Sequence
  Synthetic polynucleotide encoding artificial human antibody CDR-H3 region
gcacacagacggggcctatggttcggggagttttttgactac

SEQ ID NO: 5412 - DNA, 39 bp, Artificial Sequence
  Synthetic polynucleotide encoding artificial human antibody CDR-H3 region
gctgggcaactatatagaggctacgaatactttgactac

SEQ ID NO: 5413 - DNA, 21 bp, Artificial Sequence
  Synthetic polynucleotide encoding artificial human antibody CDR-H3 region
gcaagtatggggtttgatatc

SEQ ID NO: 5414 - DNA, 63 bp, Artificial Sequence
  Synthetic polynucleotide encoding artificial human antibody CDR-H3 region
gcgagagagcggtgggctccatattgtagtgatggtcgctgccaagcggatgtttttgatgtc

SEQ ID NO: 5415 - DNA, 51 bp, Artificial Sequence
  Synthetic polynucleotide encoding artificial human antibody CDR-H3 region
gcgagacatgtccccagggagcggtggctggcctgggcttacttcgatctc

SEQ ID NO: 5416 - DNA, 36 bp, Artificial Sequence
  Synthetic polynucleotide encoding artificial human antibody CDR-H3 region
gcgagagaggcgaaggactactggtacttcgatctc

SEQ ID NO: 5417 - DNA, 48 bp, Artificial Sequence
  Synthetic polynucleotide encoding artificial human antibody CDR-H3 region
gcgagactttactatgatagtagtggttattacgggtactttgattac

SEQ ID NO: 5418 - DNA, 33 bp, Artificial Sequence
  Synthetic polynucleotide encoding artificial human antibody CDR-H3 region
gcgagaggcactgaccagtttacagggggctcc

SEQ ID NO: 5419 - DNA, 54 bp, Artificial Sequence
  Synthetic polynucleotide encoding artificial human antibody CDR-H3 region
gcgagagatcggtattactatgatagtagtggttattctgaaccctttgactac

SEQ ID NO: 5420 - DNA, 45 bp, Artificial Sequence
  Synthetic polynucleotide encoding artificial human antibody CDR-H3 region
gcaacaatgtatgctttaaactacgacgtctactactttgactac

SEQ ID NO: 5421 - DNA, 66 bp, Artificial Sequence
  Synthetic polynucleotide encoding artificial human antibody CDR-H3 region
gcaacagccccttcagtggctggtagacccccatttgattactactactactacggtatggacgtc

SEQ ID NO: 5422 - DNA, 42 bp, Artificial Sequence
  Synthetic polynucleotide encoding artificial human antibody CDR-H3 region
gcaacgggagcagcagctggtacggttggctggttcgacccc

SEQ ID NO: 5423 - DNA, 63 bp, Artificial Sequence
  Synthetic polynucleotide encoding artificial human antibody CDR-H3 region
gcgagacaggggggccgtattactatgatagtagtggtcagcggtccttactactttgactac

SEQ ID NO: 5424 - DNA, 48 bp, Artificial Sequence
  Synthetic polynucleotide encoding artificial human antibody CDR-H3 region
gcgagagagtggaggagatggctacaatatcggggttactttgactac

SEQ ID NO: 5425 - DNA, 51 bp, Artificial Sequence
  Synthetic polynucleotide encoding artificial human antibody CDR-H3 region
gcgaaatctatggttcggggagttaactatttctactatggtatggacgtc

SEQ ID NO: 5426 - DNA, 75 bp, Artificial Sequence
  Synthetic polynucleotide encoding artificial human antibody CDR-H3 region
gcgaaagatctaaacggcgggggtttgggtattacgatttttggagtggttatgggccatgatgcttttgatatc

SEQ ID NO: 5427 - DNA, 36 bp, Artificial Sequence
  Synthetic polynucleotide encoding artificial human antibody CDR-H3 region
gcgaggtccgtattagaagactggtacttcgatctc

SEQ ID NO: 5428 - DNA, 42 bp, Artificial Sequence
  Synthetic polynucleotide encoding artificial human antibody CDR-H3 region
gcgagactaggatggttatttgagccctacggtatggacgtc

SEQ ID NO: 5429 - DNA, 63 bp, Artificial Sequence
  Synthetic polynucleotide encoding artificial human antibody CDR-H3 region
gcgagaggaggtggagtattactatggttcggggagttatcaggctactactacatggacgtc

SEQ ID NO: 5430 - DNA, 39 bp, Artificial Sequence
  Synthetic polynucleotide encoding artificial human antibody CDR-H3 region
gcgagcggtatagcagcagccacgtactaccttgactac

SEQ ID NO: 5431 - DNA, 36 bp, Artificial Sequence
  Synthetic polynucleotide encoding artificial human antibody CDR-H3 region
gcgactgacgcgggcaccagttggcattttttctat

SEQ ID NO: 5432 - DNA, 48 bp, Artificial Sequence
  Synthetic polynucleotide encoding artificial human antibody CDR-H3 region
gcccggagtacccgagggtggcttagcgctttatggtggttcgacccc

SEQ ID NO: 5433 - DNA, 36 bp, Artificial Sequence
  Synthetic polynucleotide encoding artificial human antibody CDR-H3 region
gcacacagacgggcgttctacggctactttgactac

SEQ ID NO: 5434 - DNA, 66 bp, Artificial Sequence
  Synthetic polynucleotide encoding artificial human antibody CDR-H3 region
gcgaaggatccgcgcatatttatgattacctatgggcgacctctcgctgatacccacttggacctc

SEQ ID NO: 5435 - DNA, 45 bp, Artificial Sequence
  Synthetic polynucleotide encoding artificial human antibody CDR-H3 region
gcaagagatagagacagatatagtggcaacgatggtcctgtatac

SEQ ID NO: 5436 - DNA, 69 bp, Artificial Sequence
  Synthetic polynucleotide encoding artificial human antibody CDR-H3 region
gcgagagaaatgataacggatattgtagtggtggtagctgctactgtcggctactacggtatggacgtc

SEQ ID NO: 5437 - DNA, 51 bp, Artificial Sequence
  Synthetic polynucleotide encoding artificial human antibody CDR-H3 region
gcacggacctattacgatattttgactggttattactacggtatggacgtc

SEQ ID NO: 5438 - DNA, 42 bp, Artificial Sequence
  Synthetic polynucleotide encoding artificial human antibody CDR-H3 region
gcaacaggggtggttcggggagtaacgaactggttcgacccc

SEQ ID NO: 5439 - DNA, 66 bp, Artificial Sequence
  Synthetic polynucleotide encoding artificial human antibody CDR-H3 region
gcgagagtaccgggtatagcagtggctggtacattatattactactactactactacatggacgtc

SEQ ID NO: 5440 - DNA, 51 bp, Artificial Sequence
  Synthetic polynucleotide encoding artificial human antibody CDR-H3 region
gcaaaagctcaggggacgtatagcagttactactactacggtatggacgtc

SEQ ID NO: 5441 - DNA, 51 bp, Artificial Sequence
  Synthetic polynucleotide encoding artificial human antibody CDR-H3 region
gggaacagtagagatggccacaaatggggcaattactacggtttggacgtc

SEQ ID NO: 5442 - DNA, 42 bp, Artificial Sequence
  Synthetic polynucleotide encoding artificial human antibody CDR-H3 region
gcgagagatagtcagagtagtggtgcccacgactttgactat

SEQ ID NO: 5443 - DNA, 48 bp, Artificial Sequence
  Synthetic polynucleotide encoding artificial human antibody CDR-H3 region
gcgagaggacgtacgatttttggagtggttattgagccctttgactac

SEQ ID NO: 5444 - DNA, 42 bp, Artificial Sequence
  Synthetic polynucleotide encoding artificial human antibody CDR-H3 region
gcgagaaggcgcagtggctggtctcgctacggtatggacgtc

SEQ ID NO: 5445 - DNA, 66 bp, Artificial Sequence
  Synthetic polynucleotide encoding artificial human antibody CDR-H3 region
gcgagagattattatgactatgatagtagtggttatttaggctactactactactacatggacgtc

SEQ ID NO: 5446 - DNA, 63 bp, Artificial Sequence
  Synthetic polynucleotide encoding artificial human antibody CDR-H3 region
gcgagaggccgttggagggatactatgatagtagtggttattagggatcatgcttttgatatc

SEQ ID NO: 5447 - DNA, 57 bp, Artificial Sequence
  Synthetic polynucleotide encoding artificial human antibody CDR-H3 region
gcaacaggacccgtgtattgtagtagtaccagctgcaaacaaaactggttcgacccc

SEQ ID NO: 5448 - DNA, 36 bp, Artificial Sequence
  Synthetic polynucleotide encoding artificial human antibody CDR-H3 region
gcgagacgccagaggagcccacgggcttttgatatc

SEQ ID NO: 5449 - DNA, 42 bp, Artificial Sequence
  Synthetic polynucleotide encoding artificial human antibody CDR-H3 region
gcgagggggaatgcgggctactactactactacatggacgtc

SEQ ID NO: 5450 - DNA, 51 bp, Artificial Sequence
  Synthetic polynucleotide encoding artificial human antibody CDR-H3 region
gcgagagatgcgtattacgatattttgactggttattacccatttgactac

SEQ ID NO: 5451 - DNA, 51 bp, Artificial Sequence
  Synthetic polynucleotide encoding artificial human antibody CDR-H3 region
gtgagacgttcgatattaccatcctctagtgtctggggggcctttgactgc

SEQ ID NO: 5452 - DNA, 42 bp, Artificial Sequence
  Synthetic polynucleotide encoding artificial human antibody CDR-H3 region
gcctcgggacctgtggtggtgacaaccagctggttcgacccc

SEQ ID NO: 5453 - DNA, 42 bp, Artificial Sequence
  Synthetic polynucleotide encoding artificial human antibody CDR-H3 region
gcgagagcggccaaccagcatggctacggtgaccttgactac

SEQ ID NO: 5454 - DNA, 57 bp, Artificial Sequence
  Synthetic polynucleotide encoding artificial human antibody CDR-H3 region
gcgagagcgaaaaagagatggctacaattgggtacggagggagatgcttttgatatc

SEQ ID NO: 5455 - DNA, 48 bp, Artificial Sequence
  Synthetic polynucleotide encoding artificial human antibody CDR-H3 region
gcacggatcctccgggactggctaagctactactactacatggacgtc

SEQ ID NO: 5456 - DNA, 30 bp, Artificial Sequence
  Synthetic polynucleotide encoding artificial human antibody CDR-H3 region
gcgagacaggacgggagggacgttgattac

SEQ ID NO: 5457 - DNA, 48 bp, Artificial Sequence
  Synthetic polynucleotide encoding artificial human antibody CDR-H3 region
gcaaagacaattttcccctgggcccactactactacggtatggacgtc

SEQ ID NO: 5458 - DNA, 51 bp, Artificial Sequence
  Synthetic polynucleotide encoding artificial human antibody CDR-H3 region
gcgcggaccgggaggggatggctacaattaattccgagctggttcgacccc

SEQ ID NO: 5459 - DNA, 48 bp, Artificial Sequence
  Synthetic polynucleotide encoding artificial human antibody CDR-H3 region
gcgagacatgcctggaacaccctaggccggacgaactggttcgacccc

SEQ ID NO: 5460 - DNA, 60 bp, Artificial Sequence
  Synthetic polynucleotide encoding artificial human antibody CDR-H3 region
gcgagaggcacacattgtagtagtaccagctgctatgccccctactactacatggacgtc

SEQ ID NO: 5461 - DNA, 54 bp, Artificial Sequence
  Synthetic polynucleotide encoding artificial human antibody CDR-H3 region
gcgagaggtagtatttactcaaatcctgcgggagagggctccttttttgactac

SEQ ID NO: 5462 - DNA, 39 bp, Artificial Sequence
  Synthetic polynucleotide encoding artificial human antibody CDR-H3 region
gcaggtcatagtagtgcttcccattactactttgaccgc

SEQ ID NO: 5463 - DNA, 54 bp, Artificial Sequence
  Synthetic polynucleotide encoding artificial human antibody CDR-H3 region
gcgagaatgttctctgatgatagtagtgtttcctactactacggtatggacgtc

SEQ ID NO: 5464 - DNA, 66 bp, Artificial Sequence
  Synthetic polynucleotide encoding artificial human antibody CDR-H3 region
gccaaagacggggtatcctacgacttttggagtggttatagtgggaaatactactacctggacgtt

SEQ ID NO: 5465 - DNA, 75 bp, Artificial Sequence
  Synthetic polynucleotide encoding artificial human antibody CDR-H3 region
gcgagagggcttcgggacgcggggcgccgtaaagagatagttgggacgccgcatcacaactactacatagacatt

SEQ ID NO: 5466 - DNA, 63 bp, Artificial Sequence
  Synthetic polynucleotide encoding artificial human antibody CDR-H3 region
gcgagagctccccccagcagtattacgatttttggagtggttaaatcgtggtacatggacgtc

SEQ ID NO: 5467 - DNA, 42 bp, Artificial Sequence
  Synthetic polynucleotide encoding artificial human antibody CDR-H3 region
gcaacaggttcccctatggttcggggtagctggttcgacccc

SEQ ID NO: 5468 - DNA, 60 bp, Artificial Sequence
  Synthetic polynucleotide encoding artificial human antibody CDR-H3 region
gcgagagagaggggccagagatggctacaattaaaggactactactactacatggacgtc

SEQ ID NO: 5469 - DNA, 30 bp, Artificial Sequence
  Synthetic polynucleotide encoding artificial human antibody CDR-H3 region
acaacactctccgctacctattctcactac

SEQ ID NO: 5470 - DNA, 45 bp, Artificial Sequence
  Synthetic polynucleotide encoding artificial human antibody CDR-H3 region
gcgagaggggtgattcttggagtcgttataaattacatggatgtc

SEQ ID NO: 5471 - DNA, 54 bp, Artificial Sequence
  Synthetic polynucleotide encoding artificial human antibody CDR-H3 region
ttaacagattcagattactatgacggaagtggttatatcgacggttttgatatt

SEQ ID NO: 5472 - DNA, 45 bp, Artificial Sequence
  Synthetic polynucleotide encoding artificial human antibody CDR-H3 region
gcaacttcatcccccattttgacaagaaccaactggttcgacccc

SEQ ID NO: 5473 - DNA, 33 bp, Artificial Sequence
  Synthetic polynucleotide encoding artificial human antibody CDR-H3 region
gcgaccctcagctcgcccccctactttgactac

SEQ ID NO: 5474 - DNA, 18 bp, Artificial Sequence
  Synthetic polynucleotide encoding artificial human antibody CDR-H3 region
gcgagagggtttgactac

SEQ ID NO: 5475 - DNA, 36 bp, Artificial Sequence
  Synthetic polynucleotide encoding artificial human antibody CDR-H3 region
gcgaaagaagctttatttcctacggggcttgaccac

SEQ ID NO: 5476 - DNA, 84 bp, Artificial Sequence
  Synthetic polynucleotide encoding artificial human antibody CDR-H3 region
gcgagagagcacctttattacgatattttgactggttacatatccccctcccggtattactactactactacggtatggacgtc

SEQ ID NO: 5477 - DNA, 36 bp, Artificial Sequence
  Synthetic polynucleotide encoding artificial human antibody CDR-H3 region
gcgagagatcttgaagtggttggcggtatggacgtc

SEQ ID NO: 5478 - DNA, 51 bp, Artificial Sequence
  Synthetic polynucleotide encoding artificial human antibody CDR-H3 region
gcgagaggtcgaaagatagtagtgcctaatgggctctacggtatggacgtc

SEQ ID NO: 5479 - DNA, 39 bp, Artificial Sequence
  Synthetic polynucleotide encoding artificial human antibody CDR-H3 region
gcgagagagcatagcagtggccggggcgggtttgactac

SEQ ID NO: 5480 - DNA, 27 bp, Artificial Sequence
  Synthetic polynucleotide encoding artificial human antibody CDR-H3 region
accacagggggcggatatctcacctac

SEQ ID NO: 5481 - DNA, 66 bp, Artificial Sequence
  Synthetic polynucleotide encoding artificial human antibody CDR-H3 region
gcgagaggtggatacagctatggtcacgacaccgatctactctactactactacggtatggacgtc

SEQ ID NO: 5482 - DNA, 66 bp, Artificial Sequence
  Synthetic polynucleotide encoding artificial human antibody CDR-H3 region
gcgaaagagggtcgacctataaatgggtattacgatattttgactgatccgtactactttgagtac

SEQ ID NO: 5483 - DNA, 72 bp, Artificial Sequence
  Synthetic polynucleotide encoding artificial human antibody CDR-H3 region
gcgagaggggagctattacgatattttgactggttatcacacgaaccggactactactacggtatggacgtc

SEQ ID NO: 5484 - DNA, 39 bp, Artificial Sequence
  Synthetic polynucleotide encoding artificial human antibody CDR-H3 region
gcgaggacgacgatggggatagcagaatactttgactac

SEQ ID NO: 5485 - DNA, 60 bp, Artificial Sequence
  Synthetic polynucleotide encoding artificial human antibody CDR-H3 region
gcgaaagatcctgaggggtatagcagtggctggatctactactactacggtatggacgtc

SEQ ID NO: 5486 - DNA, 33 bp, Artificial Sequence
  Synthetic polynucleotide encoding artificial human antibody CDR-H3 region
gcgagaaacggtggtaccaactggttcgacccc

SEQ ID NO: 5487 - DNA, 63 bp, Artificial Sequence
  Synthetic polynucleotide encoding artificial human antibody CDR-H3 region
gcaacgggtatagcagtggctgggacacctacacgttactactactactacggtatggacgtc

SEQ ID NO: 5488 - DNA, 60 bp, Artificial Sequence
  Synthetic polynucleotide encoding artificial human antibody CDR-H3 region
gcgaaatcggaatattttgactggttattgtactctgactactactacggtatggacgtc

SEQ ID NO: 5489 - DNA, 33 bp, Artificial Sequence
  Synthetic polynucleotide encoding artificial human antibody CDR-H3 region
gcacggggggattttgactggttattagactac

SEQ ID NO: 5490 - DNA, 39 bp, Artificial Sequence
  Synthetic polynucleotide encoding artificial human antibody CDR-H3 region
gccagagagaaatggacctcttttcgattccttgaaaac

SEQ ID NO: 5491 - DNA, 54 bp, Artificial Sequence
  Synthetic polynucleotide encoding artificial human antibody CDR-H3 region
gcgactacggtgactaccccccatgactactactactactacggtatggacgtc

SEQ ID NO: 5492 - DNA, 33 bp, Artificial Sequence
  Synthetic polynucleotide encoding artificial human antibody CDR-H3 region
gcgagatcggctgtcccgtactactttgactac

SEQ ID NO: 5493 - DNA, 57 bp, Artificial Sequence
  Synthetic polynucleotide encoding artificial human antibody CDR-H3 region
gcgcgaggggtggcggagacctatagtggggactactggctcgtgctttttgactac

SEQ ID NO: 5494 - DNA, 63 bp, Artificial Sequence
  Synthetic polynucleotide encoding artificial human antibody CDR-H3 region
actagagtcagagagcagggggagtatagcagctcgccgggtctcgaagggtggttcgacccc

SEQ ID NO: 5495 - DNA, 42 bp, Artificial Sequence
  Synthetic polynucleotide encoding artificial human antibody CDR-H3 region
gcgagacgctattgtagtggtggtagctgctacaaggactac

SEQ ID NO: 5496 - DNA, 45 bp, Artificial Sequence
  Synthetic polynucleotide encoding artificial human antibody CDR-H3 region
gcgagaggtgattactatggttcagggagtaacgactttgactac

SEQ ID NO: 5497 - DNA, 60 bp, Artificial Sequence
  Synthetic polynucleotide encoding artificial human antibody CDR-H3 region
gcgagaggcctgaggcgggcgggatcgatagtagtggttagtctttactactttgactac

SEQ ID NO: 5498 - DNA, 54 bp, Artificial Sequence
  Synthetic polynucleotide encoding artificial human antibody CDR-H3 region
gcgagagacggagggccggaggctggctccgactactaccacggtctggaagac

SEQ ID NO: 5499 - DNA, 72 bp, Artificial Sequence
  Synthetic polynucleotide encoding artificial human antibody CDR-H3 region
gcgagagacccgggacgggcccagacggtttggtggcatacagtggctacaattacgggttactttgactac

SEQ ID NO: 5500 - DNA, 42 bp, Artificial Sequence
  Synthetic polynucleotide encoding artificial human antibody CDR-H3 region
gcgagggcctatagtgggagctactactacggtatggacgtc

SEQ ID NO: 5501 - DNA, 57 bp, Artificial Sequence
  Synthetic polynucleotide encoding artificial human antibody CDR-H3 region
gcgaaagatcataacgtattactatggttcggggagttaaccgctggggtggacgtc

SEQ ID NO: 5502 - DNA, 42 bp, Artificial Sequence
  Synthetic polynucleotide encoding artificial human antibody CDR-H3 region
accacgagacggtggttcagggagttattaaaaaatgactac

SEQ ID NO: 5503 - DNA, 48 bp, Artificial Sequence
  Synthetic polynucleotide encoding artificial human antibody CDR-H3 region
gcgagagagcccgtagtatcccaactttacagttacggtatggacgtc

SEQ ID NO: 5504 - DNA, 33 bp, Artificial Sequence
  Synthetic polynucleotide encoding artificial human antibody CDR-H3 region
gcgagtattagcagtggctggtactctgactac

SEQ ID NO: 5505 - DNA, 33 bp, Artificial Sequence
  Synthetic polynucleotide encoding artificial human antibody CDR-H3 region
gcgcgtaacggtgactccaactactttgactac

SEQ ID NO: 5506 - DNA, 84 bp, Artificial Sequence
  Synthetic polynucleotide encoding artificial human antibody CDR-H3 region
gcaagagctcagactacgtgggcgggttcctatgactacgtttgggggagttatcgccaaacgaaaggtgatgcttttgatatc

SEQ ID NO: 5507 - DNA, 27 bp, Artificial Sequence
  Synthetic polynucleotide encoding artificial human antibody CDR-H3 region
gcgagcagatggctacaattggggtac

SEQ ID NO: 5508 - DNA, 51 bp, Artificial Sequence
  Synthetic polynucleotide encoding artificial human antibody CDR-H3 region
gccgtgggaggtggctattgtcatggtgggacctgcggctggttcgccccc

SEQ ID NO: 5509 - DNA, 36 bp, Artificial Sequence
  Synthetic polynucleotide encoding artificial human antibody CDR-H3 region
gcgagagattggagccggggatacggtatggacgtc

SEQ ID NO: 5510 - DNA, 24 bp, Artificial Sequence
  Synthetic polynucleotide encoding artificial human antibody CDR-H3 region
gcgagagatctacacttcgatatc

SEQ ID NO: 5511 - DNA, 78 bp, Artificial Sequence
  Synthetic polynucleotide encoding artificial human antibody CDR-H3 region
gtgagagcgcttctcggagggacccgggattacgatatttcgactggtcattataatgaaggatactattttgactac

SEQ ID NO: 5512 - DNA, 51 bp, Artificial Sequence
  Synthetic polynucleotide encoding artificial human antibody CDR-H3 region
gcaaaagatataggggcagacgtattactatggttcggggcctgggactac

SEQ ID NO: 5513 - DNA, 54 bp, Artificial Sequence
  Synthetic polynucleotide encoding artificial human antibody CDR-H3 region
gcacggatctggtatagcagtggctggtacgaacccaagtactactttgactac

SEQ ID NO: 5514 - DNA, 42 bp, Artificial Sequence
  Synthetic polynucleotide encoding artificial human antibody CDR-H3 region
gcgaaagatagagatgagtacggtgactatgcctttgactgc

SEQ ID NO: 5515 - DNA, 42 bp, Artificial Sequence
  Synthetic polynucleotide encoding artificial human antibody CDR-H3 region
gcaagagaaccccaatacgacattatgggtggttttgcgcag

SEQ ID NO: 5516 - DNA, 75 bp, Artificial Sequence
  Synthetic polynucleotide encoding artificial human antibody CDR-H3 region
gcgcgatccacgtattactatgatagtagtggttattactacccctattactactactactacggtatggacgtc

SEQ ID NO: 5517 - DNA, 54 bp, Artificial Sequence
  Synthetic polynucleotide encoding artificial human antibody CDR-H3 region
gcacgggatacctacgatattttgactggttatggacctctactgatggacgtc

SEQ ID NO: 5518 - DNA, 66 bp, Artificial Sequence
  Synthetic polynucleotide encoding artificial human antibody CDR-H3 region
gcgaggaaccccccgtattacgatattttgactggttattctctcgactactacggtatggacgtc

SEQ ID NO: 5519 - DNA, 42 bp, Artificial Sequence
  Synthetic polynucleotide encoding artificial human antibody CDR-H3 region
gcgaggacttatagtgggagctacaaaggctactttgactac

SEQ ID NO: 5520 - DNA, 84 bp, Artificial Sequence
  Synthetic polynucleotide encoding artificial human antibody CDR-H3 region
gcgagagacacgaagtattacgatttttggagtggttatttaggacgagaaactacgtactactactactacggtatggacgtc

SEQ ID NO: 5521 - DNA, 51 bp, Artificial Sequence
  Synthetic polynucleotide encoding artificial human antibody CDR-H3 region
gcgagatcgtgggatagcagcagctggtggttaaccaactggttcgacccc

SEQ ID NO: 5522 - DNA, 54 bp, Artificial Sequence
  Synthetic polynucleotide encoding artificial human antibody CDR-H3 region
gtgcgagactacgatgactacggtgactacggagagtcgtactactttgactac

SEQ ID NO: 5523 - DNA, 42 bp, Artificial Sequence
  Synthetic polynucleotide encoding artificial human antibody CDR-H3 region
gcgagacatcaaggaggctccccatttggcggtatggacgtc

SEQ ID NO: 5524 - DNA, 57 bp, Artificial Sequence
  Synthetic polynucleotide encoding artificial human antibody CDR-H3 region
gcgagatacgatattttgactggttattacatgggttcgggtcgctggttcgacccc

SEQ ID NO: 5525 - DNA, 51 bp, Artificial Sequence
  Synthetic polynucleotide encoding artificial human antibody CDR-H3 region
gcgagaggttccatggggggatttactatgatagtagtggctctatcccac

SEQ ID NO: 5526 - DNA, 45 bp, Artificial Sequence
  Synthetic polynucleotide encoding artificial human antibody CDR-H3 region
gcaacagacagggacctctacggtggtaaccactgttttgatatc

SEQ ID NO: 5527 - DNA, 36 bp, Artificial Sequence
  Synthetic polynucleotide encoding artificial human antibody CDR-H3 region
acgagcgtcttcggcgcctacgatgtttgtgactat

SEQ ID NO: 5528 - DNA, 48 bp, Artificial Sequence
  Synthetic polynucleotide encoding artificial human antibody CDR-H3 region
gcgagagcgggattcgatggagcagtggcccccgaggggttcgacccc

SEQ ID NO: 5529 - DNA, 36 bp, Artificial Sequence
  Synthetic polynucleotide encoding artificial human antibody CDR-H3 region
gcaacattttcatcttacgttggtagggcggactac

SEQ ID NO: 5530 - DNA, 51 bp, Artificial Sequence
  Synthetic polynucleotide encoding artificial human antibody CDR-H3 region
gcgagagtcagaaaacggttcggggacatagtgggggatgcttttgatatc

SEQ ID NO: 5531 - DNA, 30 bp, Artificial Sequence
  Synthetic polynucleotide encoding artificial human antibody CDR-H3 region
gcgaagggggtagagtactactctgactac

SEQ ID NO: 5532 - DNA, 42 bp, Artificial Sequence
  Synthetic polynucleotide encoding artificial human antibody CDR-H3 region
gcgagacgggggtattactatggttcggtagggttcgacccc

SEQ ID NO: 5533 - DNA, 63 bp, Artificial Sequence
  Synthetic polynucleotide encoding artificial human antibody CDR-H3 region
gcgaagccttcgtttggtctcagtggctggtttgacttctactactactacggtatggacgtc

SEQ ID NO: 5534 - DNA, 45 bp, Artificial Sequence
  Synthetic polynucleotide encoding artificial human antibody CDR-H3 region
gcgaaggtggtcggggagcccaaaggggcgaactggttcgacccc

SEQ ID NO: 5535 - DNA, 42 bp, Artificial Sequence
  Synthetic polynucleotide encoding artificial human antibody CDR-H3 region
accacagattcggcttctatcggatactacggtatggacgtc

SEQ ID NO: 5536 - DNA, 42 bp, Artificial Sequence
  Synthetic polynucleotide encoding artificial human antibody CDR-H3 region
gcaacaggcccaccctacggtgaccgaaactggttcgacccc

SEQ ID NO: 5537 - DNA, 69 bp, Artificial Sequence
  Synthetic polynucleotide encoding artificial human antibody CDR-H3 region
gcaacaggggtttcggcttactatgatagtagggatgggacgtactactactactacggtatggacgtc

SEQ ID NO: 5538 - DNA, 69 bp, Artificial Sequence
  Synthetic polynucleotide encoding artificial human antibody CDR-H3 region
gcgagaggatgtggtggtgactgctattccccctggggcttttactactactactacggtatggacgtc

SEQ ID NO: 5539 - DNA, 57 bp, Artificial Sequence
  Synthetic polynucleotide encoding artificial human antibody CDR-H3 region
gcgaaaggcgtagggtattacgatttttggagtggtcagggagatggtatggacgtc

SEQ ID NO: 5540 - DNA, 57 bp, Artificial Sequence
  Synthetic polynucleotide encoding artificial human antibody CDR-H3 region
gcgagagaacctctccgtattactatgatagtagtggagcggggggggctcgacccc

SEQ ID NO: 5541 - DNA, 66 bp, Artificial Sequence
  Synthetic polynucleotide encoding artificial human antibody CDR-H3 region
gcgagaaggcgtattacgatttttggagtggttattattgacaataggggggactggttcgacccc

SEQ ID NO: 5542 - DNA, 51 bp, Artificial Sequence
  Synthetic polynucleotide encoding artificial human antibody CDR-H3 region
gcgatacctcccttggcagctcagaactactactactacggtatggacgtc

SEQ ID NO: 5543 - DNA, 60 bp, Artificial Sequence
  Synthetic polynucleotide encoding artificial human antibody CDR-H3 region
gcgaaagatcgcccctattgtagtggtggtagctgccaagcttacggctggttcgacccc

SEQ ID NO: 5544 - DNA, 54 bp, Artificial Sequence
  Synthetic polynucleotide encoding artificial human antibody CDR-H3 region
gcgagagaggagtcgtacggtgactacccctggtctactcgtggtatggacgtc

SEQ ID NO: 5545 - DNA, 78 bp, Artificial Sequence
  Synthetic polynucleotide encoding artificial human antibody CDR-H3 region
gcgagagatgtagtggctacgggcgagggtattactatgatttggggggtttactactactactacggtatggacgtc

SEQ ID NO: 5546 - DNA, 45 bp, Artificial Sequence
  Synthetic polynucleotide encoding artificial human antibody CDR-H3 region
gcgagagagagtgatagtagtggttaccacgggtggttcgacccc

SEQ ID NO: 5547 - DNA, 39 bp, Artificial Sequence
  Synthetic polynucleotide encoding artificial human antibody CDR-H3 region
gcgcgagtcagtaattggaactatggcccccttgattac

SEQ ID NO: 5548 - DNA, 45 bp, Artificial Sequence
  Synthetic polynucleotide encoding artificial human antibody CDR-H3 region
gcgagacaccagacttactacggtgactacgggggggttgactac

SEQ ID NO: 5549 - DNA, 33 bp, Artificial Sequence
  Synthetic polynucleotide encoding artificial human antibody CDR-H3 region
gcgattcacgactacggtgactacgttgggtac

SEQ ID NO: 5550 - DNA, 48 bp, Artificial Sequence
  Synthetic polynucleotide encoding artificial human antibody CDR-H3 region
gtgcgagatcgccatggcgggagctactactgggagtacttccaattt

SEQ ID NO: 5551 - DNA, 45 bp, Artificial Sequence
  Synthetic polynucleotide encoding artificial human antibody CDR-H3 region
gcgagagggaacggcaattcccctagtagttatccttattctccc

SEQ ID NO: 5552 - DNA, 36 bp, Artificial Sequence
  Synthetic polynucleotide encoding artificial human antibody CDR-H3 region
gcgaggccaaattggggtgactttgcttttgatatc

SEQ ID NO: 5553 - DNA, 66 bp, Artificial Sequence
  Synthetic polynucleotide encoding artificial human antibody CDR-H3 region
gcaaaagataaaaggggacccctctacggtgactacggggtttactactactacggtatggacgtc

SEQ ID NO: 5554 - DNA, 72 bp, Artificial Sequence
  Synthetic polynucleotide encoding artificial human antibody CDR-H3 region
gcgagaaatggggggggggggggcccccaaatgattacgtttgggggagttatcgggcctttttttgactac

SEQ ID NO: 5555 - DNA, 45 bp, Artificial Sequence
  Synthetic polynucleotide encoding artificial human antibody CDR-H3 region
gcgagggtggactatcatagtagtgggccagttgcccgtgatatc

SEQ ID NO: 5556 - DNA, 72 bp, Artificial Sequence
  Synthetic polynucleotide encoding artificial human antibody CDR-H3 region
gcgagagatttgagctacggtgactacgtgtgggagactctagggggttactactactacggtatggacgtc

SEQ ID NO: 5557 - DNA, 66 bp, Artificial Sequence
  Synthetic polynucleotide encoding artificial human antibody CDR-H3 region
gcgaaagagggtcgacctataaatgggtattacgatattttgactgatccgtactactttgactac

SEQ ID NO: 5558 - DNA, 42 bp, Artificial Sequence; identical to SEQ ID NO: 5532
  Synthetic polynucleotide encoding artificial human antibody CDR-H3 region

SEQ ID NO: 5559 - DNA, 39 bp, Artificial Sequence
  Synthetic polynucleotide encoding artificial human antibody CDR-H3 region
gcgagaggggattgggggatagcagtggctggtacgaaa

SEQ ID NO: 5560 - DNA, 21 bp, Artificial Sequence
  Synthetic polynucleotide encoding artificial human antibody CDR-H3 region
accgcaggatttggggacgcc

SEQ ID NO: 5561 - DNA, 51 bp, Artificial Sequence
  Synthetic polynucleotide encoding artificial human antibody CDR-H3 region
gcgagaggtgacgtctggggcggcaccatcccccaggatgcttttgatatg

SEQ ID NO: 5562 - DNA, 45 bp, Artificial Sequence
  Synthetic polynucleotide encoding artificial human antibody CDR-H3 region
gcgagaggtttgatagtggtgttagctgatgatgtttttgatatc

SEQ ID NO: 5563 - DNA, 66 bp, Artificial Sequence
  Synthetic polynucleotide encoding artificial human antibody CDR-H3 region
gcgacagatccttgggtcggatataccggctatgattatggagactactattacggtatggacgtc

SEQ ID NO: 5564 - DNA, 72 bp, Artificial Sequence
  Synthetic polynucleotide encoding artificial human antibody CDR-H3 region
gcgagggggcctgaggtggctacggtggtaaccagaggagaagattactactactactacggtatggacgtc

SEQ ID NO: 5565 - DNA, 51 bp, Artificial Sequence
  Synthetic polynucleotide encoding artificial human antibody CDR-H3 region
gcgagagatccgagggggtggctagcagctcccccgggctactttgactac

SEQ ID NO: 5566 - DNA, 39 bp, Artificial Sequence
  Synthetic polynucleotide encoding artificial human antibody CDR-H3 region
gcgagagacggggggtctagcgcctcgtcctgggactac

SEQ ID NO: 5567 - DNA, 45 bp, Artificial Sequence
  Synthetic polynucleotide encoding artificial human antibody CDR-H3 region
gcaaagacgtactacgcaaagagcggagactggtacttcgatctc

SEQ ID NO: 5568 - DNA, 54 bp, Artificial Sequence
  Synthetic polynucleotide encoding artificial human antibody CDR-H3 region
gcgagaggtcgttggggccggcctgtctggcgacagtcatactactttgaccgc

SEQ ID NO: 5569 - DNA, 60 bp, Artificial Sequence
  Synthetic polynucleotide encoding artificial human antibody CDR-H3 region
gcgaaagatatgcagtttgttcttttcgaggcattaatatctccctcctactttgaccac

SEQ ID NO: 5570 - DNA, 42 bp, Artificial Sequence
  Synthetic polynucleotide encoding artificial human antibody CDR-H3 region
gtgacagacctgagtaacaattggtaccgatactttgacatc

SEQ ID NO: 5571 - DNA, 30 bp, Artificial Sequence
  Synthetic polynucleotide encoding artificial human antibody CDR-H3 region
agtaggtccaactggtgggatttagactac

SEQ ID NO: 5572 - DNA, 33 bp, Artificial Sequence
  Synthetic polynucleotide encoding artificial human antibody CDR-H3 region
gcgcgagactcgggtgttgtccggtttgaccac

SEQ ID NO: 5573 - DNA, 30 bp, Artificial Sequence
  Synthetic polynucleotide encoding artificial human antibody CDR-H3 region
gcgagaggatctactggccagttcgacccc

SEQ ID NO: 5574 - DNA, 75 bp, Artificial Sequence
  Synthetic polynucleotide encoding artificial human antibody CDR-H3 region
gcgagagccctcgatggctgcgatccttcgagtgggtatcgagggtccgcttgttacttctatggtttggacgtc

SEQ ID NO: 5575 - DNA, 72 bp, Artificial Sequence
  Synthetic polynucleotide encoding artificial human antibody CDR-H3 region
gcgagagatcaagcatattgtggtggtgattgctattgggggtggacctactactactacggtatggacgtc

SEQ ID NO: 5576 - DNA, 42 bp, Artificial Sequence
  Synthetic polynucleotide encoding artificial human antibody CDR-H3 region
gcgaaacgtcagtgggagcgagactggggtgcttttgatgtc

SEQ ID NO: 5577 - DNA, 42 bp, Artificial Sequence
  Synthetic polynucleotide encoding artificial human antibody CDR-H3 region
gcgagagagaaagggctgggcgccactacccactttgactac

SEQ ID NO: 5578 - DNA, 45 bp, Artificial Sequence
  Synthetic polynucleotide encoding artificial human antibody CDR-H3 region
gcgagggaaggcaggacgtggtatggtcaatactaccttgaacac

SEQ ID NO: 5579 - DNA, 48 bp, Artificial Sequence
  Synthetic polynucleotide encoding artificial human antibody CDR-H3 region
gcgagagcgcccccgagcagcacctgggccggggactactttgactac

SEQ ID NO: 5580 - DNA, 30 bp, Artificial Sequence
  Synthetic polynucleotide encoding artificial human antibody CDR-H3 region
gcgaggcacggtgactacgcctttgacgac

SEQ ID NO: 5581 - DNA, 24 bp, Artificial Sequence
  Synthetic polynucleotide encoding artificial human antibody CDR-H3 region
gcgagcgaatataccagtggcttg

SEQ ID NO: 5582 - DNA, 60 bp, Artificial Sequence
  Synthetic polynucleotide encoding artificial human antibody CDR-H3 region
gcgaaaggaggctatagtagtagctggcagaccgacttctactattacggcatggacgtc

SEQ ID NO: 5583 - DNA, 30 bp, Artificial Sequence
  Synthetic polynucleotide encoding artificial human antibody CDR-H3 region
actagagaaaattctgggggaaatagggac

SEQ ID NO: 5584 - DNA, 45 bp, Artificial Sequence
  Synthetic polynucleotide encoding artificial human antibody CDR-H3 region
gtgcgagaccgaagatatctggagcgcgactggtccttcgatctc

SEQ ID NO: 5585 - DNA, 45 bp, Artificial Sequence
  Synthetic polynucleotide encoding artificial human antibody CDR-H3 region
gcgagagcctccagggtctcgccgtggttcagggagtttgactac

SEQ ID NO: 5586 - DNA, 30 bp, Artificial Sequence
  Synthetic polynucleotide encoding artificial human antibody CDR-H3 region
gcgaggcacggtgactacgcctttgacgcc

SEQ ID NO: 5587 - DNA, 21 bp, Artificial Sequence
  Synthetic polynucleotide encoding artificial human antibody CDR-H3 region
gcgacggatggggggacctac

SEQ ID NO: 5588 - DNA, 75 bp, Artificial Sequence
  Synthetic polynucleotide encoding artificial human antibody CDR-H3 region
gcgagacagaactcgctagccaccggagatagcagcagctggaaccactactactactactactacatggacgtc

SEQ ID NO: 5589 - DNA, 39 bp, Artificial Sequence
  Synthetic polynucleotide encoding artificial human antibody CDR-H3 region
gcgagagaatctcccgacgggtggctgtactttgaccac

SEQ ID NO: 5590 - DNA, 39 bp, Artificial Sequence
  Synthetic polynucleotide encoding artificial human antibody CDR-H3 region
acgaacggaggcgggccattcttagtgtccggttcctac

SEQ ID NO: 5591 - DNA, 69 bp, Artificial Sequence
  Synthetic polynucleotide encoding artificial human antibody CDR-H3 region
gcccaaatttacataatgaaagaccttgactggtcacgaaaggtcttctggcactatcacatggaagtc

SEQ ID NO: 5592 - DNA, 51 bp, Artificial Sequence
  Synthetic polynucleotide encoding artificial human antibody CDR-H3 region
gcgagagatgccaaggcggcttatagtggctacaattacttctttgactac

SEQ ID NO: 5593 - DNA, 54 bp, Artificial Sequence
  Synthetic polynucleotide encoding artificial human antibody CDR-H3 region
gcgagagaccattgtagtggtggtagctgctatctcgactggtacttcgatctc

SEQ ID NO: 5594 - DNA, 60 bp, Artificial Sequence
  Synthetic polynucleotide encoding artificial human antibody CDR-H3 region
gccagagcggggacccgtaggaggatttttggagtggttatagttgaggcttttgatatc

SEQ ID NO: 5595 - DNA, 63 bp, Artificial Sequence
  Synthetic polynucleotide encoding artificial human antibody CDR-H3 region
gcgagagaaaaaagtactacagtaactacggggctgccttctgaatactactacatggacgtc

SEQ ID NO: 5596 - DNA, 39 bp, Artificial Sequence
  Synthetic polynucleotide encoding artificial human antibody CDR-H3 region
gtgaagtctggatatagtggctacgggagacttgagtcc

SEQ ID NO: 5597 - DNA, 63 bp, Artificial Sequence
  Synthetic polynucleotide encoding artificial human antibody CDR-H3 region
gcgagagaccactcgaacctaattacgatttttggagtggttatctcgcactactttgactac

SEQ ID NO: 5598 - DNA, 60 bp, Artificial Sequence
  Synthetic polynucleotide encoding artificial human antibody CDR-H3 region
gccagagaggcctttagtattacgatttttggagtggttacccggtgggggttcgacccc

SEQ ID NO: 5599 - DNA, 36 bp, Artificial Sequence
  Synthetic polynucleotide encoding artificial human antibody CDR-H3 region
gtcagtccctcaacgagtgggagcgaatttgactcc

SEQ ID NO: 5600 - DNA, 42 bp, Artificial Sequence
  Synthetic polynucleotide encoding artificial human antibody CDR-H3 region
gcgagactgggggggagtgatgtgggaaattggttcgacttc

SEQ ID NO: 5601 - DNA, 36 bp, Artificial Sequence
  Synthetic polynucleotide encoding artificial human antibody CDR-H3 region
gcgagagattgtagtggtggtagctgccttggttac

SEQ ID NO: 5602 - DNA, 54 bp, Artificial Sequence
  Synthetic polynucleotide encoding artificial human antibody CDR-H3 region
gcacggatgtggatacagctatggcccagaaactactactacggtatggacgtc

SEQ ID NO: 5603 - DNA, 42 bp, Artificial Sequence
  Synthetic polynucleotide encoding artificial human antibody CDR-H3 region
gctaaagaaacggaggaccataccagttcctattttgactcc

SEQ ID NO: 5604 - DNA, 48 bp, Artificial Sequence
  Synthetic polynucleotide encoding artificial human antibody CDR-H3 region
gcgagagatcctgatagtggctacgatttggatgatgcttttgatatc

SEQ ID NO: 5605 - DNA, 36 bp, Artificial Sequence
  Synthetic polynucleotide encoding artificial human antibody CDR-H3 region
gcgagacatgcttcgtcagcagctgggattgacttc

SEQ ID NO: 5606 - DNA, 42 bp, Artificial Sequence
  Synthetic polynucleotide encoding artificial human antibody CDR-H3 region
gcgagagaccgctgcgatgacgttgactgctactccgactac

SEQ ID NO: 5607 - DNA, 39 bp, Artificial Sequence
  Synthetic polynucleotide encoding artificial human antibody CDR-H3 region
gcaacagcctttcagtaccaggaactccccattagttcc

SEQ ID NO: 5608 - DNA, 42 bp, Artificial Sequence
  Synthetic polynucleotide encoding artificial human antibody CDR-H3 region
gcgagaggtccagcggccagctactactacggtatggacgtc

SEQ ID NO: 5609 - DNA, 69 bp, Artificial Sequence
  Synthetic polynucleotide encoding artificial human antibody CDR-H3 region
gcgagacgccgtactgggagctcccacggattcatcccaagtcttgccatcggcgatggctttgatatc

SEQ ID NO: 5610 - DNA, 45 bp, Artificial Sequence
  Synthetic polynucleotide encoding artificial human antibody CDR-H3 region
gcaacagagggggtggtgcctgttgtcatttacgcttttgatgtg

SEQ ID NO: 5611 - DNA, 66 bp, Artificial Sequence
  Synthetic polynucleotide encoding artificial human antibody CDR-H3 region
gcaaaagcccattattactatgatagtagtggttattaccggggctactactacggtatggacgtc

SEQ ID NO: 5612 - DNA, 54 bp, Artificial Sequence
  Synthetic polynucleotide encoding artificial human antibody CDR-H3 region
gccagagataggcggggatattgtagtgctggtccctgctaccggattgactcc

SEQ ID NO: 5613 - DNA, 39 bp, Artificial Sequence
  Synthetic polynucleotide encoding artificial human antibody CDR-H3 region
gcgagagggtatagcagtggctggtggtacttcgatctc

SEQ ID NO: 5614 - DNA, 45 bp, Artificial Sequence
  Synthetic polynucleotide encoding artificial human antibody CDR-H3 region
gcgagagccaccactgggacctccaacccctacaactttgactac

SEQ ID NO: 5615 - DNA, 51 bp, Artificial Sequence
  Synthetic polynucleotide encoding artificial human antibody CDR-H3 region
gcgagaggtgattacgtttgggggagtgatcgttatgacgatatggacgtc

SEQ ID NO: 5616 - DNA, 51 bp, Artificial Sequence
  Synthetic polynucleotide encoding artificial human antibody CDR-H3 region
gcgagagatcctaacgttgacagctatggttacgtatcttggttcgacccc

SEQ ID NO: 5617 - DNA, 27 bp, Artificial Sequence
  Synthetic polynucleotide encoding artificial human antibody CDR-H3 region
gcgagagggggggatggctacaacccc

SEQ ID NO: 5618 - DNA, 45 bp, Artificial Sequence
  Synthetic polynucleotide encoding artificial human antibody CDR-H3 region
gcgagggtctgtgatggtggtagctcctgggatgcttttgatatc

SEQ ID NO: 5619 - DNA, 57 bp, Artificial Sequence
  Synthetic polynucleotide encoding artificial human antibody CDR-H3 region
accactttattaacagattactttgatgctagtggagctcgacactactttgactac

SEQ ID NO: 5620 - DNA, 66 bp, Artificial Sequence
  Synthetic polynucleotide encoding artificial human antibody CDR-H3 region
gcgagggggggttatatagcagtggctggtaccgggctctactactactactacggtatggacgtc

SEQ ID NO: 5621 - DNA, 45 bp, Artificial Sequence
  Synthetic polynucleotide encoding artificial human antibody CDR-H3 region
gcgagacatttccttagagggaagaatcccgattactttgactac

SEQ ID NO: 5622 - DNA, 42 bp, Artificial Sequence
  Synthetic polynucleotide encoding artificial human antibody CDR-H3 region
gcgcggacctcgcgagtccaaacatcttacgactttgactat

SEQ ID NO: 5623 - DNA, 75 bp, Artificial Sequence
  Synthetic polynucleotide encoding artificial human antibody CDR-H3 region
gcgagattgggtcatttgagcagctggtacgagaatttggggggcccatcctactactactacggtatggacgtc

SEQ ID NO: 5624 - DNA, 63 bp, Artificial Sequence
  Synthetic polynucleotide encoding artificial human antibody CDR-H3 region
gcgagagaaggccccacccagggattctatggttcggggagttataataacggacttgactac

SEQ ID NO: 5625 - DNA, 42 bp, Artificial Sequence
  Synthetic polynucleotide encoding artificial human antibody CDR-H3 region
gcggggggggattattatggttcggggagttggcatgactac

SEQ ID NO: 5626 - DNA, 30 bp, Artificial Sequence
  Synthetic polynucleotide encoding artificial human antibody CDR-H3 region
gcacgcagtttaacaaggtactttgactac

SEQ ID NO: 5627 - DNA, 42 bp, Artificial Sequence
  Synthetic polynucleotide encoding artificial human antibody CDR-H3 region
gcgagagggggtgtgacgtggatagaattgtggtctgacttc

SEQ ID NO: 5628 - DNA, 54 bp, Artificial Sequence
  Synthetic polynucleotide encoding artificial human antibody CDR-H3 region
gcgagacatggcgccagcagctattacgaggggccacagatgtactttgacaac

SEQ ID NO: 5629 - DNA, 42 bp, Artificial Sequence
  Synthetic polynucleotide encoding artificial human antibody CDR-H3 region
gcgagagcccttcagtgggggctaccgctcacttgggtctcc

SEQ ID NO: 5630 - DNA, 27 bp, Artificial Sequence
  Synthetic polynucleotide encoding artificial human antibody CDR-H3 region
acgagagccgctagtggctggcccaac

SEQ ID NO: 5631 - DNA, 30 bp, Artificial Sequence
  Synthetic polynucleotide encoding artificial human antibody CDR-H3 region
gtgaagctcggtagacagtcaaatgactac

SEQ ID NO: 5632 - DNA, 39 bp, Artificial Sequence
  Synthetic polynucleotide encoding artificial human antibody CDR-H3 region
gcggggccttttatgcgtcttgaacacatctggggtcac

SEQ ID NO: 5633 - DNA, 42 bp, Artificial Sequence
  Synthetic polynucleotide encoding artificial human antibody CDR-H3 region
gcaagtgatcgctattggtatgatagtagtggttacgactac

SEQ ID NO: 5634 - DNA, 45 bp, Artificial Sequence
  Synthetic polynucleotide encoding artificial human antibody CDR-H3 region
gcaagaggtcgatggctacagtcgaactacttcgctatggacgtc

SEQ ID NO: 5635 - DNA, 72 bp, Artificial Sequence
  Synthetic polynucleotide encoding artificial human antibody CDR-H3 region
gcgagagataatcccgaattacaatattttgactggttgcggagcggctactcccacactggcgtggacgtc

SEQ ID NO: 5636 - DNA, 72 bp, Artificial Sequence
  Synthetic polynucleotide encoding artificial human antibody CDR-H3 region
gcgagagataatcccgaattacaatattttgactggttgcggagcgactactcccacactggcgtggacgtc

SEQ ID NO: 5637 - DNA, 39 bp, Artificial Sequence
  Synthetic polynucleotide encoding artificial human antibody CDR-H3 region
gcgaaaggactcactccccagatgaacttctttgactcc

SEQ ID NO: 5638 - DNA, 33 bp, Artificial Sequence
  Synthetic polynucleotide encoding artificial human antibody CDR-H3 region
gcacacagaccgggattacgaccctttgactac

SEQ ID NO: 5639 - DNA, 24 bp, Artificial Sequence
  Synthetic polynucleotide encoding artificial human antibody CDR-H3 region
gtgaaaggtgcctggtgtgacttc

SEQ ID NO: 5640 - DNA, 24 bp, Artificial Sequence
  Synthetic polynucleotide encoding artificial human antibody CDR-H3 region
gtgaagggtgcctggtgtgactac

SEQ ID NO: 5641 - DNA, 42 bp, Artificial Sequence
  Synthetic polynucleotide encoding artificial human antibody CDR-H3 region
gcgagaggcttgacagctggtgcgactagcgggttcgacccc

SEQ ID NO: 5642 - DNA, 33 bp, Artificial Sequence
  Synthetic polynucleotide encoding artificial human antibody CDR-H3 region
gcgagtagagcagtggcgagaaaccttgagtac

SEQ ID NO: 5643 - DNA, 42 bp, Artificial Sequence
  Synthetic polynucleotide encoding artificial human antibody CDR-H3 region
gccaaagagacttccgaccataccagcagttacttcgactct

SEQ ID NO: 5644 - DNA, 48 bp, Artificial Sequence
  Synthetic polynucleotide encoding artificial human antibody CDR-H3 region
gcgagaggaggtgaccacgtactgcatgacggctggttcttcgatctc

SEQ ID NO: 5645 - DNA, 60 bp, Artificial Sequence
  Synthetic polynucleotide encoding artificial human antibody CDR-H3 region
gcgagacacttgaggggattttgtagtagtgggagctgctacctgtactactttgaccag

SEQ ID NO: 5646 - DNA, 51 bp, Artificial Sequence
  Synthetic polynucleotide encoding artificial human antibody CDR-H3 region
gcaacagtgaagggtacggtgactacgcttggttactacggtatggacgtc

SEQ ID NO: 5647 - DNA, 66 bp, Artificial Sequence
  Synthetic polynucleotide encoding artificial human antibody CDR-H3 region
gcgagacatgggatgggggagtgggagctactatcccgttttaggtcccgcggttactttgactac

SEQ ID NO: 5648 - DNA, 48 bp, Artificial Sequence
  Synthetic polynucleotide encoding artificial human antibody CDR-H3 region
gcgagagatttactattatggttcggggaaacgccgggtaaggactac

SEQ ID NO: 5649 - DNA, 39 bp, Artificial Sequence
  Synthetic polynucleotide encoding artificial human antibody CDR-H3 region
tcgagaggccaacacgaagaatggcctgtcggggactac

SEQ ID NO: 5650 - DNA, 48 bp, Artificial Sequence
  Synthetic polynucleotide encoding artificial human antibody CDR-H3 region
gcgagattcacgggctggacgtctacaattaaggattgtcttgatttg

SEQ ID NO: 5651 - DNA, 69 bp, Artificial Sequence
  Synthetic polynucleotide encoding artificial human antibody CDR-H3 region
gcgagaggaggagggggcttttgtactacaaccacctgctatgaactccgcttcaattactatgactac

SEQ ID NO: 5652 - DNA, 63 bp, Artificial Sequence
  Synthetic polynucleotide encoding artificial human antibody CDR-H3 region
gtgacagacagggaagtccccgggactgtaatgatcacacctgcaaactccgcttttgatatc

SEQ ID NO: 5653 - DNA, 30 bp, Artificial Sequence
  Synthetic polynucleotide encoding artificial human antibody CDR-H3 region
gcgagaggcccccatggctactttgacttc

SEQ ID NO: 5654 - DNA, 51 bp, Artificial Sequence
  Synthetic polynucleotide encoding artificial human antibody CDR-H3 region
gcgaaagatctcggctacggtggtaactatgggacgggggcttttgatatc

SEQ ID NO: 5655 - DNA, 78 bp, Artificial Sequence
  Synthetic polynucleotide encoding artificial human antibody CDR-H3 region
gcgagagatcatgggagagaacgtattcctatggttcgcggagagcccgacatagatttctactacggaatggacgtc

SEQ ID NO: 5656 - DNA, 54 bp, Artificial Sequence
  Synthetic polynucleotide encoding artificial human antibody CDR-H3 region
gcgagaggtggcattgcagtgactgggactcgctactactacagtatggacgtc

SEQ ID NO: 5657 - DNA, 54 bp, Artificial Sequence
  Synthetic polynucleotide encoding artificial human antibody CDR-H3 region
gcgagaggaaattactttgaggctgcttctccgatggcgggatatttcgacccc

SEQ ID NO: 5658 - DNA, 45 bp, Artificial Sequence
  Synthetic polynucleotide encoding artificial human antibody CDR-H3 region
gcgcgttatcattgtcctgctgatatatgtgacggttttgatctc

SEQ ID NO: 5659 - DNA, 78 bp, Artificial Sequence
  Synthetic polynucleotide encoding artificial human antibody CDR-H3 region
acacgagatcagacttatttgaaagggagacaccatgccgtcaagtgcagtggcggcacctgcggcgtgcctggccac

SEQ ID NO: 5660 - DNA, 57 bp, Artificial Sequence
  Synthetic polynucleotide encoding artificial human antibody CDR-H3 region
gcgaaagatcagtacgttggtaacccccgggccagctactactacggtatggacgtc

SEQ ID NO: 5661 - DNA, 33 bp, Artificial Sequence
  Synthetic polynucleotide encoding artificial human antibody CDR-H3 region
gcaagagggggttcgggggacgggatgaacgtc

SEQ ID NO: 5662 - DNA, 39 bp, Artificial Sequence
  Synthetic polynucleotide encoding artificial human antibody CDR-H3 region
gcaagagatgtgccagaaaccggctacggtatggacgtc

SEQ ID NO: 5663 - DNA, 51 bp, Artificial Sequence
  Synthetic polynucleotide encoding artificial human antibody CDR-H3 region
gcgagagggccttcggccgttggcaaggactactacttctacatggacctc

SEQ ID NO: 5664 - DNA, 42 bp, Artificial Sequence
  Synthetic polynucleotide encoding artificial human antibody CDR-H3 region
gcgagagtcgggggcatcttagtttgggggagttttgacttc

SEQ ID NO: 5665 - DNA, 45 bp, Artificial Sequence
  Synthetic polynucleotide encoding artificial human antibody CDR-H3 region
gcgaagtattggagtggaggttcccgcccggatgcttttggtatc

SEQ ID NO: 5666 - DNA, 48 bp, Artificial Sequence
  Synthetic polynucleotide encoding artificial human antibody CDR-H3 region
gcgagagatgttgtagaagtaacagctgcttggttctactttgactac

SEQ ID NO: 5667 - DNA, 30 bp, Artificial Sequence
  Synthetic polynucleotide encoding artificial human antibody CDR-H3 region
gcgacagatagtcagggctactttgacaac

SEQ ID NO: 5668 - DNA, 42 bp, Artificial Sequence
  Synthetic polynucleotide encoding artificial human antibody CDR-H3 region
gggagaccgcaaagtgttgctcatcgtgatcgttttgggatc

SEQ ID NO: 5669 - DNA, 33 bp, Artificial Sequence
  Synthetic polynucleotide encoding artificial human antibody CDR-H3 region
gcaagacacgatgggagttaccactttgactac

SEQ ID NO: 5670 - DNA, 57 bp, Artificial Sequence
  Synthetic polynucleotide encoding artificial human antibody CDR-H3 region
acgagagaaacctacccgccggtaggtggcactcaccacttctacggtttggacgtc

SEQ ID NO: 5671 - DNA, 48 bp, Artificial Sequence
  Synthetic polynucleotide encoding artificial human antibody CDR-H3 region
gctagtaaggagacacttagggacttctcctactattacatggacgtc

SEQ ID NO: 5672 - DNA, 48 bp, Artificial Sequence
  Synthetic polynucleotide encoding artificial human antibody CDR-H3 region
acgactgcttattgtggtggtgactgctacccacccttctttgactat

SEQ ID NO: 5673 - DNA, 54 bp, Artificial Sequence
  Synthetic polynucleotide encoding artificial human antibody CDR-H3 region
gcgagacgagtcaggtccgatccagtcattagttccgacaactggctcggcccc

SEQ ID NO: 5674 - DNA, 33 bp, Artificial Sequence
  Synthetic polynucleotide encoding artificial human antibody CDR-H3 region
gtgagacaaaagggcgcagtggctcctgacttc

SEQ ID NO: 5675 - DNA, 45 bp, Artificial Sequence
  Synthetic polynucleotide encoding artificial human antibody CDR-H3 region
gcgagccccgggggccaatgcaatggtggcacctgctacccgtac

SEQ ID NO: 5676 - DNA, 42 bp, Artificial Sequence
  Synthetic polynucleotide encoding artificial human antibody CDR-H3 region
gcgagagaaggtatagtgggagctactacggggttcgacccc

SEQ ID NO: 5677 - DNA, 54 bp, Artificial Sequence
  Synthetic polynucleotide encoding artificial human antibody CDR-H3 region
gcgcgaaatcatgattactatgatagtagtggttattttctcctcgttgactac

SEQ ID NO: 5678 - DNA, 21 bp, Artificial Sequence
  Synthetic polynucleotide encoding artificial human antibody CDR-H3 region
gcgagaggcaccttaggccac

SEQ ID NO: 5679 - DNA, 42 bp, Artificial Sequence
  Synthetic polynucleotide encoding artificial human antibody CDR-H3 region
gcgagagccatgggattccttgcccacgactggttcgacccc

SEQ ID NO: 5680 - DNA, 36 bp, Artificial Sequence
  Synthetic polynucleotide encoding artificial human antibody CDR-H3 region
gcgagagagatgagtagcatcaccactacgggccac

SEQ ID NO: 5681 - DNA, 51 bp, Artificial Sequence
  Synthetic polynucleotide encoding artificial human antibody CDR-H3 region
agtggctactgtagaggtgggagctgcgccggtcacgggtcctttgacttc

SEQ ID NO: 5682 - DNA, 45 bp, Artificial Sequence
  Synthetic polynucleotide encoding artificial human antibody CDR-H3 region
gcgcgacatggcttacgattcggggcgtttgatccttttgatata

SEQ ID NO: 5683 - DNA, 57 bp, Artificial Sequence
  Synthetic polynucleotide encoding artificial human antibody CDR-H3 region
gcgagagcagagggatatagtggccacaactacgtttattattacggtatggacgtc

SEQ ID NO: 5684 - DNA, 33 bp, Artificial Sequence
  Synthetic polynucleotide encoding artificial human antibody CDR-H3 region
acttcggggccggggagttttcaaattgactac

SEQ ID NO: 5685 - DNA, 66 bp, Artificial Sequence
  Synthetic polynucleotide encoding artificial human antibody CDR-H3 region
gcgagagggaaaaggggggcagtggctgggattcttctcccctactactactacggtatggacgtc

SEQ ID NO: 5686 - DNA, 45 bp, Artificial Sequence
  Synthetic polynucleotide encoding artificial human antibody CDR-H3 region
gtaagaggcacggttcggggaattatcacgtatagctttcactac

SEQ ID NO: 5687 - DNA, 63 bp, Artificial Sequence
  Synthetic polynucleotide encoding artificial human antibody CDR-H3 region
gcgagacggcaggcgaatcatattgtgttggtgattgctattctggggggctggttcgacccc

SEQ ID NO: 5688 - DNA, 57 bp, Artificial Sequence
  Synthetic polynucleotide encoding artificial human antibody CDR-H3 region
gccagacgggcgagggaaagcagccaacaaaagctttactggtactacatggacgtc

SEQ ID NO: 5689 - DNA, 45 bp, Artificial Sequence
  Synthetic polynucleotide encoding artificial human antibody CDR-H3 region
atgtactactgtgcattgcaacatagtagcggttattggacccac

SEQ ID NO: 5690 - DNA, 39 bp, Artificial Sequence
  Synthetic polynucleotide encoding artificial human antibody CDR-H3 region
gcgagaggccaacaccaagagtggcctgtcggggactac

SEQ ID NO: 5691 - DNA, 24 bp, Artificial Sequence
  Synthetic polynucleotide encoding artificial human antibody CDR-H3 region
gcacagttgaccacggtgacgaca

SEQ ID NO: 5692 - DNA, 57 bp, Artificial Sequence
  Synthetic polynucleotide encoding artificial human antibody CDR-H3 region
gcgaaaacatattacaattcattgactgattattataacgtttatcttatggacgtc

SEQ ID NO: 5693 - DNA, 36 bp, Artificial Sequence
  Synthetic polynucleotide encoding artificial human antibody CDR-H3 region
gcgagagaaggaggattgaatacgattgcggactac

SEQ ID NO: 5694 - DNA, 60 bp, Artificial Sequence
  Synthetic polynucleotide encoding artificial human antibody CDR-H3 region
gcgagagacgctttacgatattttgacgggttcggttgggtggaggggtggttcgacccc

SEQ ID NO: 5695 - DNA, 39 bp, Artificial Sequence
  Synthetic polynucleotide encoding artificial human antibody CDR-H3 region
gcgcggggtcaatatcaaacatggcctgtcggtgactac

SEQ ID NO: 5696 - DNA, 36 bp, Artificial Sequence
  Synthetic polynucleotide encoding artificial human antibody CDR-H3 region
gcgagagcccggggcaacagctgctacaacgactac

SEQ ID NO: 5697 - DNA, 54 bp, Artificial Sequence
  Synthetic polynucleotide encoding artificial human antibody CDR-H3 region
gcgagaccgggaggatattgtagagggaacaattgccatgatgcttttgatacc

SEQ ID NO: 5698 - DNA, 57 bp, Artificial Sequence
  Synthetic polynucleotide encoding artificial human antibody CDR-H3 region
acgagagaaacccgcccgccggtaggtggcactcaccacttctacggattggacgtc

SEQ ID NO: 5699 - DNA, 60 bp, Artificial Sequence
  Synthetic polynucleotide encoding artificial human antibody CDR-H3 region
gcacggatactctttgaaagtgagtggctggtacagtacaactactacgggatggacgtc

SEQ ID NO: 5700 - DNA, 33 bp, Artificial Sequence
  Synthetic polynucleotide encoding artificial human antibody CDR-H3 region
gcgcgacaagtgggatggggacgcttcgacttc

SEQ ID NO: 5701 - DNA, 54 bp, Artificial Sequence
  Synthetic polynucleotide encoding artificial human antibody CDR-H3 region
gcgacagatattggatccagaagtgggggctacctgtccagggagactgactac

SEQ ID NO: 5702 - DNA, 51 bp, Artificial Sequence
  Synthetic polynucleotide encoding artificial human antibody CDR-H3 region
gcgaaggattgggagaattttcagtcttgtggtagtgactgcctccagtcc

SEQ ID NO: 5703 - DNA, 57 bp, Artificial Sequence
  Synthetic polynucleotide encoding artificial human antibody CDR-H3 region
gcgagaggtgttatctatggttcggggagttatttagcccctagctggttcgactcc

SEQ ID NO: 5704 - DNA, 36 bp, Artificial Sequence
  Synthetic polynucleotide encoding artificial human antibody CDR-H3 region
gcgagagggggggacttcggtgactacgggaactac

SEQ ID NO: 5705 - DNA, 42 bp, Artificial Sequence
  Synthetic polynucleotide encoding artificial human antibody CDR-H3 region
gcgaggggaactgtacgagcgcctggggcaccctttgacgag

SEQ ID NO: 5706 - DNA, 33 bp, Artificial Sequence
  Synthetic polynucleotide encoding artificial human antibody CDR-H3 region
gcggagggtggtagtgggagctactttgactac

SEQ ID NO: 5707 - DNA, 60 bp, Artificial Sequence
  Synthetic polynucleotide encoding artificial human antibody CDR-H3 region
gcgagagaacacctaggatattgtagtagtaccagctgctatactggtgcttttgatatc

SEQ ID NO: 5708 - DNA, 57 bp, Artificial Sequence
  Synthetic polynucleotide encoding artificial human antibody CDR-H3 region
gcgagagctaattactgggtagtagtaccagctgctatccataactggttcgacccc

SEQ ID NO: 5709 - DNA, 66 bp, Artificial Sequence
  Synthetic polynucleotide encoding artificial human antibody CDR-H3 region
gcgagagccccaatgcccagtattacgatttttggagtggttattacccattggtacttcgatctc

SEQ ID NO: 5710 - DNA, 42 bp, Artificial Sequence
  Synthetic polynucleotide encoding artificial human antibody CDR-H3 region
gcgagatcgagttcggggagttatctaagtgcttttgatatc

SEQ ID NO: 5711 - DNA, 54 bp, Artificial Sequence
  Synthetic polynucleotide encoding artificial human antibody CDR-H3 region
accacagaccgggtttatgattacgtttgggggagttatcgtccaagtgactac

SEQ ID NO: 5712 - DNA, 81 bp, Artificial Sequence
  Synthetic polynucleotide encoding artificial human antibody CDR-H3 region
gtgagaggttcaggcggtcacgatttttggactggtttcattcaaaatcgcccttattatcactattactatatggacgcc

SEQ ID NO: 5713 - DNA, 51 bp, Artificial Sequence
  Synthetic polynucleotide encoding artificial human antibody CDR-H3 region
gcgagagatacccgtggatacagctatggcctacggggaggtatggacgtc

SEQ ID NO: 5714 - DNA, 48 bp, Artificial Sequence
  Synthetic polynucleotide encoding artificial human antibody CDR-H3 region
gcgtcctatagtggctacgattacgggcccccctacggtatggacgtc

SEQ ID NO: 5715 - DNA, 48 bp, Artificial Sequence
  Synthetic polynucleotide encoding artificial human antibody CDR-H3 region
gcgagcggcgactatgggtcggggaattacgagtattactttgacttg

SEQ ID NO: 5716 - DNA, 63 bp, Artificial Sequence
  Synthetic polynucleotide encoding artificial human antibody CDR-H3 region
gcgaggttttcggaattactatggttcggggagttaacttcgccctactacggtatggacgtc

SEQ ID NO: 5717 - DNA, 42 bp, Artificial Sequence
  Synthetic polynucleotide encoding artificial human antibody CDR-H3 region
gcgagacatgtacgtggatacagctatggttcgcttgactac

SEQ ID NO: 5718 - DNA, 69 bp, Artificial Sequence
  Synthetic polynucleotide encoding artificial human antibody CDR-H3 region
gcacggatagtttttgacccactgccatatagtagcaactggtaccgggactactacggtttggacgtc

SEQ ID NO: 5719 - DNA, 57 bp, Artificial Sequence
  Synthetic polynucleotide encoding artificial human antibody CDR-H3 region
gcgagactttctattgggtatagcagtggctggtactactactacggtatggacgtc

SEQ ID NO: 5720 - DNA, 51 bp, Artificial Sequence
  Synthetic polynucleotide encoding artificial human antibody CDR-H3 region
gcgagacagggggagatgtgggagctaccgccgtcggactggttcgacccc

SEQ ID NO: 5721 - DNA, 36 bp, Artificial Sequence
  Synthetic polynucleotide encoding artificial human antibody CDR-H3 region
gcgcgaggaggagacagctctaagttctttgactac

SEQ ID NO: 5722 - DNA, 57 bp, Artificial Sequence
  Synthetic polynucleotide encoding artificial human antibody CDR-H3 region
gcacacagacattactatgatagtagtggttattactacctcgaggcttttgatatc

SEQ ID NO: 5723 - DNA, 45 bp, Artificial Sequence
  Synthetic polynucleotide encoding artificial human antibody CDR-H3 region
gcgctaggaggtgattataccagcgcgtccaggtactttgactac

SEQ ID NO: 5724 - DNA, 48 bp, Artificial Sequence
  Synthetic polynucleotide encoding artificial human antibody CDR-H3 region
gcgaccctaggaaattgtggtgatacttggtgccatacctttgactac

SEQ ID NO: 5725 - DNA, 42 bp, Artificial Sequence
  Synthetic polynucleotide encoding artificial human antibody CDR-H3 region
gcgaaaacctatagtgggagctactttgatgcttttgatatc

SEQ ID NO: 5726 - DNA, 81 bp, Artificial Sequence
  Synthetic polynucleotide encoding artificial human antibody CDR-H3 region
gcgcgaggttcaggaggtcacgatttttggaccggttttattcaaaatcgaccttattatcactactactatttggacgtc

SEQ ID NO: 5727 - DNA, 36 bp, Artificial Sequence
  Synthetic polynucleotide encoding artificial human antibody CDR-H3 region
gccagagagagccgggtatggggctactttgactac

SEQ ID NO: 5728 - DNA, 63 bp, Artificial Sequence
  Synthetic polynucleotide encoding artificial human antibody CDR-H3 region
gcgaaagaaggcgccaaggggtatagcagtggctggatctactactactacggtatggacgtc

SEQ ID NO: 5729 - DNA, 39 bp, Artificial Sequence
  Synthetic polynucleotide encoding artificial human antibody CDR-H3 region
gcgagagatgatatgactacttatgatgcttttgatatc

SEQ ID NO: 5730 - DNA, 42 bp, Artificial Sequence
  Synthetic polynucleotide encoding artificial human antibody CDR-H3 region
gcgagtgccctgacgtatagcagcagctggggctttgactac

SEQ ID NO: 5731 - DNA, 63 bp, Artificial Sequence
  Synthetic polynucleotide encoding artificial human antibody CDR-H3 region
gcgagaggtcgttacgatattttgactggttattatagctactactactacggtatggacgtc

SEQ ID NO: 5732 - DNA, 48 bp, Artificial Sequence
  Synthetic polynucleotide encoding artificial human antibody CDR-H3 region
gcggaagggaacctcttttacagtggttggtacaactggctcgacccc

SEQ ID NO: 5733 - DNA, 51 bp, Artificial Sequence
  Synthetic polynucleotide encoding artificial human antibody CDR-H3 region
gcgagagagcaagtgggagctactaaccaaggggatttttactttgactac

SEQ ID NO: 5734 - DNA, 63 bp, Artificial Sequence
  Synthetic polynucleotide encoding artificial human antibody CDR-H3 region
gcgagagtaacttcgggcctctatggttcggggagttattccccagtcaactggttcgacccc

SEQ ID NO: 5735 - DNA, 33 bp, Artificial Sequence
  Synthetic polynucleotide encoding artificial human antibody CDR-H3 region
gtgagagtggcactggatggccacttagacctc

SEQ ID NO: 5736 - DNA, 39 bp, Artificial Sequence
  Synthetic polynucleotide encoding artificial human antibody CDR-H3 region
gcgagacattttgaacatgatagtagtgtgctccagcac

SEQ ID NO: 5737 - DNA, 45 bp, Artificial Sequence
  Synthetic polynucleotide encoding artificial human antibody CDR-H3 region
gcaaaaggggactgtactggtgactgctattactactttgacttt

SEQ ID NO: 5738 - DNA, 57 bp, Artificial Sequence
  Synthetic polynucleotide encoding artificial human antibody CDR-H3 region
gcgagactccccgtagagggtagcagcagtatctactactactacggtatggacgtc

SEQ ID NO: 5739 - DNA, 51 bp, Artificial Sequence
  Synthetic polynucleotide encoding artificial human antibody CDR-H3 region
gcgaaagctatgagtgggactctaacatactactactacggtatggacgtc

SEQ ID NO: 5740 - DNA, 42 bp, Artificial Sequence
  Synthetic polynucleotide encoding artificial human antibody CDR-H3 region
gcgctactcactggcacgcactactactacggtatggacgtc

SEQ ID NO: 5741 - DNA, 45 bp, Artificial Sequence
  Synthetic polynucleotide encoding artificial human antibody CDR-H3 region
gcaagagatcggggagctggtggccacgattggggctttgactat

SEQ ID NO: 5742 - DNA, 45 bp, Artificial Sequence
  Synthetic polynucleotide encoding artificial human antibody CDR-H3 region
gcaagcaactatgcatataactggaaccacaagcactttgactac

SEQ ID NO: 5743 - DNA, 39 bp, Artificial Sequence
  Synthetic polynucleotide encoding artificial human antibody CDR-H3 region
gccagggggtcgaatattgtggactggtacttcgatctc

SEQ ID NO: 5744 - DNA, 42 bp, Artificial Sequence
  Synthetic polynucleotide encoding artificial human antibody CDR-H3 region
gcgagatatgatagtagtggttatttcaactggttcgacccc

SEQ ID NO: 5745 - DNA, 39 bp, Artificial Sequence
  Synthetic polynucleotide encoding artificial human antibody CDR-H3 region
gcacacagaccagctgctatacttggctggttcgacccc

SEQ ID NO: 5746 - DNA, 69 bp, Artificial Sequence
  Synthetic polynucleotide encoding artificial human antibody CDR-H3 region
gcacggaaccccgttagagggttcggggagttgaaccccgatgggtactactactacggtatggacgtc

SEQ ID NO: 5747 - DNA, 42 bp, Artificial Sequence
  Synthetic polynucleotide encoding artificial human antibody CDR-H3 region
gcgagaattaactggaacgagggctataactacatagacgtc

SEQ ID NO: 5748 - DNA, 81 bp, Artificial Sequence
  Synthetic polynucleotide encoding artificial human antibody CDR-H3 region
gtgagagcgcgccgcagcaggtccacgagcagctggtttcagctgtcccccccaaattattactactactacatggatgtc

SEQ ID NO: 5749 - DNA, 36 bp, Artificial Sequence
  Synthetic polynucleotide encoding artificial human antibody CDR-H3 region
gcgaaagcaagtggtaactccgccgactttgactac

SEQ ID NO: 5750 - DNA, 84 bp, Artificial Sequence
  Synthetic polynucleotide encoding artificial human antibody CDR-H3 region
gcgagagattctctcgccggggatattgtagtagtaccagctgctatagggatttcaccacttccgcactacggtatggacgtc

SEQ ID NO: 5751 - DNA, 60 bp, Artificial Sequence
  Synthetic polynucleotide encoding artificial human antibody CDR-H3 region
gcgagaggctacgatattttgactggttattataatgtctactactacggtatggacgtc

SEQ ID NO: 5752 - DNA, 69 bp, Artificial Sequence
  Synthetic polynucleotide encoding artificial human antibody CDR-H3 region
gcgcgagattttgctcggggcagcagctggtatggaggatcggaggactactactacggtctggacgtc

SEQ ID NO: 5753 - DNA, 36 bp, Artificial Sequence
  Synthetic polynucleotide encoding artificial human antibody CDR-H3 region
gcgagagctcttagtggctacaatttctttgacttt

SEQ ID NO: 5754 - DNA, 42 bp, Artificial Sequence
  Synthetic polynucleotide encoding artificial human antibody CDR-H3 region
gcgaagtgtaccagtttctgccaatataagtggttcgaggcc

SEQ ID NO: 5755 - DNA, 33 bp, Artificial Sequence
  Synthetic polynucleotide encoding artificial human antibody CDR-H3 region
gcgagagcggggagctactacccttttgactac

SEQ ID NO: 5756 - DNA, 81 bp, Artificial Sequence
  Synthetic polynucleotide encoding artificial human antibody CDR-H3 region
gcgagagatcttgaagcacctgttagttacgatttttggagtgtcatggaggggggctactactactactacatggacgtc

SEQ ID NO: 5757 - DNA, 54 bp, Artificial Sequence
  Synthetic polynucleotide encoding artificial human antibody CDR-H3 region
gcaaaagtatatagcagcagctggtggggagtagcagtggctggctatgactac

SEQ ID NO: 5758 - DNA, 39 bp, Artificial Sequence
  Synthetic polynucleotide encoding artificial human antibody CDR-H3 region
gcgaaagtggagggagctacttctacagggtttgactac

SEQ ID NO: 5759 - DNA, 60 bp, Artificial Sequence
  Synthetic polynucleotide encoding artificial human antibody CDR-H3 region
gcgaaagtgaacgatttttggagtggttatccttactactactactactacatggacgtc

SEQ ID NO: 5760 - DNA, 72 bp, Artificial Sequence
  Synthetic polynucleotide encoding artificial human antibody CDR-H3 region
gcgagagaaccccctaggggatattgtagtagtaccagctgggctaggctttgttactacggtatggacgtc

SEQ ID NO: 5761 - DNA, 39 bp, Artificial Sequence
  Synthetic polynucleotide encoding artificial human antibody CDR-H3 region
gcgaccgctagtaccagctggcgacactggttcgacccc

SEQ ID NO: 5762 - DNA, 60 bp, Artificial Sequence
  Synthetic polynucleotide encoding artificial human antibody CDR-H3 region
gcgagagatcagcgcggggattacgatattttgaccagctactactacggtatggacgtc

SEQ ID NO: 5763 - DNA, 39 bp, Artificial Sequence
  Synthetic polynucleotide encoding artificial human antibody CDR-H3 region
gcgagagaagaattccatgccaataaagcctttgactac

SEQ ID NO: 5764 - DNA, 42 bp, Artificial Sequence
  Synthetic polynucleotide encoding artificial human antibody CDR-H3 region
gcgaaggaccttggaggttactatggttcggggcgtgactac

SEQ ID NO: 5765 - DNA, 51 bp, Artificial Sequence
  Synthetic polynucleotide encoding artificial human antibody CDR-H3 region
gcgagagagccccatagcagcagctggtacataaagtactactttgactac

SEQ ID NO: 5766 - DNA, 66 bp, Artificial Sequence
  Synthetic polynucleotide encoding artificial human antibody CDR-H3 region
gcgagagattcagccggccgttacgatattttgactggttatatcaaggacaactggttcgacccc

SEQ ID NO: 5767 - DNA, 63 bp, Artificial Sequence
  Synthetic polynucleotide encoding artificial human antibody CDR-H3 region
gcgagacagcgagatacatattaccatggttcgcagacatattttttggactactttgacttc

SEQ ID NO: 5768 - DNA, 51 bp, Artificial Sequence
  Synthetic polynucleotide encoding artificial human antibody CDR-H3 region
gctagaaattactatgatagtagtggttattacttctacggtatggacgtc

SEQ ID NO: 5769 - DNA, 63 bp, Artificial Sequence
  Synthetic polynucleotide encoding artificial human antibody CDR-H3 region
gcgagagataatttccaaccactaggatattgtagtagtaccagctgctatgggttggactac

SEQ ID NO: 5770 - DNA, 72 bp, Artificial Sequence
  Synthetic polynucleotide encoding artificial human antibody CDR-H3 region
gcgagagatggtggggggcgatattgtagtggtggtagctgctacgtctactactactacggtatggacgtc

SEQ ID NO: 5771 - DNA, 42 bp, Artificial Sequence
  Synthetic polynucleotide encoding artificial human antibody CDR-H3 region
gcgagagatcgtggaggctacccgctttacgtctttgacctc

SEQ ID NO: 5772 - DNA, 39 bp, Artificial Sequence
  Synthetic polynucleotide encoding artificial human antibody CDR-H3 region
gcgagaggggctagcaacagcaataatgcatttgatacg

SEQ ID NO: 5773 - DNA, 33 bp, Artificial Sequence
  Synthetic polynucleotide encoding artificial human antibody CDR-H3 region
atgaagggcggctggggaaccgtcattgaccac

SEQ ID NO: 5774 - DNA, 63 bp, Artificial Sequence
  Synthetic polynucleotide encoding artificial human antibody CDR-H3 region
accacagatggcctaaccctggctacattttgcagtggtgaaaactgcccctggaatatctac

SEQ ID NO: 5775 - DNA, 54 bp, Artificial Sequence
  Synthetic polynucleotide encoding artificial human antibody CDR-H3 region
gcgagagatggaatgggggtgttgggtattaccccctcgaactggttcgacccc

SEQ ID NO: 5776 - DNA, 39 bp, Artificial Sequence
  Synthetic polynucleotide encoding artificial human antibody CDR-H3 region
gcgagagaagtagtaattgccaacaaagcctttgactac

SEQ ID NO: 5777 - DNA, 48 bp, Artificial Sequence
  Synthetic polynucleotide encoding artificial human antibody CDR-H3 region
gtcaaaaacagatatagtggaggcgattcgagggactactttgactcc

SEQ ID NO: 5778 - DNA, 45 bp, Artificial Sequence
  Synthetic polynucleotide encoding artificial human antibody CDR-H3 region
gcgagagatgagtattacgatattttgactggttattattcctac

SEQ ID NO: 5779 - DNA, 39 bp, Artificial Sequence
  Synthetic polynucleotide encoding artificial human antibody CDR-H3 region
gcgagaagtatagtgggagctacttggtactttgactac

SEQ ID NO: 5780 - DNA, 30 bp, Artificial Sequence
  Synthetic polynucleotide encoding artificial human antibody CDR-H3 region
gcgagagatataggtggctactttgactac

SEQ ID NO: 5781 - DNA, 78 bp, Artificial Sequence
  Synthetic polynucleotide encoding artificial human antibody CDR-H3 region
gcgagaatgatggcggggggggggacgaatatggttcggggacgtcttattgacttctactatcactacgtggacgtc

SEQ ID NO: 5782 - DNA, 63 bp, Artificial Sequence
  Synthetic polynucleotide encoding artificial human antibody CDR-H3 region
gcgcgagatcggtcaggaggttcgggaaattatctcgatcttagtacctactactttgacttt

SEQ ID NO: 5783 - DNA, 63 bp, Artificial Sequence
  Synthetic polynucleotide encoding artificial human antibody CDR-H3 region
gcgagacagcgagatacctattactatggttcgcagaattattttttggactactttgaccac

SEQ ID NO: 5784 - DNA, 42 bp, Artificial Sequence
  Synthetic polynucleotide encoding artificial human antibody CDR-H3 region
gcgagccccccatattgtagtggtggtagctgccgagactac

SEQ ID NO: 5785 - DNA, 48 bp, Artificial Sequence
  Synthetic polynucleotide encoding artificial human antibody CDR-H3 region
gtaaaagaggccagagatgcctactatgctgtggactactttgactac

SEQ ID NO: 5786 - DNA, 45 bp, Artificial Sequence
  Synthetic polynucleotide encoding artificial human antibody CDR-H3 region
gcgagatcgtatagtggctacgattcggatgatgcttttgatatc

SEQ ID NO: 5787 - DNA, 42 bp, Artificial Sequence
  Synthetic polynucleotide encoding artificial human antibody CDR-H3 region
gccccgtcatttggagtgggatcagggttcgacatggacgtc

SEQ ID NO: 5788 - DNA, 51 bp, Artificial Sequence
  Synthetic polynucleotide encoding artificial human antibody CDR-H3 region
gcgagagatacatccgattgtagtggtggtagctgctactggtttgactac

SEQ ID NO: 5789 - DNA, 57 bp, Artificial Sequence
  Synthetic polynucleotide encoding artificial human antibody CDR-H3 region
accacagatcctcaaaaggtgtattgtagtagtaccagctgctatatctgggactac

SEQ ID NO: 5790 - DNA, 42 bp, Artificial Sequence
  Synthetic polynucleotide encoding artificial human antibody CDR-H3 region
gcgagaggcggctacaccgctggccccaatgcttttgatatc

SEQ ID NO: 5791 - DNA, 78 bp, Artificial Sequence
  Synthetic polynucleotide encoding artificial human antibody CDR-H3 region
gcgagagatatcacgtattacgatattttgactggttatttccagcccgcttactactactactatggtatggacgtc

SEQ ID NO: 5792 - DNA, 27 bp, Artificial Sequence
  Synthetic polynucleotide encoding artificial human antibody CDR-H3 region
gcgagaggcggtccctggttcgacccc

SEQ ID NO: 5793 - DNA, 45 bp, Artificial Sequence
  Synthetic polynucleotide encoding artificial human antibody CDR-H3 region
gcgaaaggggaactaccagctgctatgacggtaggctttgactac

SEQ ID NO: 5794 - DNA, 42 bp, Artificial Sequence
  Synthetic polynucleotide encoding artificial human antibody CDR-H3 region
gcgagaggaggggggcgcatagcagcaactgtggtcggctac

SEQ ID NO: 5795 - DNA, 60 bp, Artificial Sequence
  Synthetic polynucleotide encoding artificial human antibody CDR-H3 region
gcgaaagacgggattaaaagtgttcggggagctgtctattataactatggcttgaacgtc

SEQ ID NO: 5796 - DNA, 90 bp, Artificial Sequence
  Synthetic polynucleotide encoding artificial human antibody CDR-H3 region
gcgagaagctcgacccgggccccctcgacaatagattgtagtggtggtagctgctatccaaagcccctctactactacggtatggacgtc

SEQ ID NO: 5797 - DNA, 54 bp, Artificial Sequence
  Synthetic polynucleotide encoding artificial human antibody CDR-H3 region
gcgagattcccgtatagcagctcgtcggacccctactactactacatggacgtc

SEQ ID NO: 5798 - DNA, 63 bp, Artificial Sequence
  Synthetic polynucleotide encoding artificial human antibody CDR-H3 region
gcgagacagcgaggtacatattactatggctcggggacttcttatttggattactttgactac

SEQ ID NO: 5799 - DNA, 51 bp, Artificial Sequence
  Synthetic polynucleotide encoding artificial human antibody CDR-H3 region
gcgagggggtcggggcgacaattgtactactacttctcctacatggacgtc

SEQ ID NO: 5800 - DNA, 48 bp, Artificial Sequence
  Synthetic polynucleotide encoding artificial human antibody CDR-H3 region
gcgagaggggggtggaccaggaactactactactactacatggacgtc

SEQ ID NO: 5801 - DNA, 39 bp, Artificial Sequence
  Synthetic polynucleotide encoding artificial human antibody CDR-H3 region
gcgagaagcgggtatagcagcagctggcactttgactac

SEQ ID NO: 5802 - DNA, 51 bp, Artificial Sequence
  Synthetic polynucleotide encoding artificial human antibody CDR-H3 region
gcgagagatttgccggtagtgggagctactgcttccgatgcttttgatatc

SEQ ID NO: 5803 - DNA, 63 bp, Artificial Sequence
  Synthetic polynucleotide encoding artificial human antibody CDR-H3 region
gcgagacagcgagatacgtattaccatggttcgcagagatattttttggactactttgactac

SEQ ID NO: 5804 - DNA, 54 bp, Artificial Sequence
  Synthetic polynucleotide encoding artificial human antibody CDR-H3 region
gcgaaagatcgattaggatattgtagtagtaccagctgccatagactcgacccc

SEQ ID NO: 5805 - DNA, 69 bp, Artificial Sequence
  Synthetic polynucleotide encoding artificial human antibody CDR-H3 region
gcgaccccgctatattgtagtggtggtagctgctaccgctacggggaatactactacggtatggacgtc

SEQ ID NO: 5806 - DNA, 48 bp, Artificial Sequence
  Synthetic polynucleotide encoding artificial human antibody CDR-H3 region
ggcaaagcgagtcccagtgtcgatatagcagcagctggaattgactac

SEQ ID NO: 5807 - DNA, 42 bp, Artificial Sequence
  Synthetic polynucleotide encoding artificial human antibody CDR-H3 region
gcgacctccggctatttccaagatattagtggtgacgacttt

SEQ ID NO: 5808 - DNA, 60 bp, Artificial Sequence
  Synthetic polynucleotide encoding artificial human antibody CDR-H3 region
gcgagacaagttgacggtgactacgtgggggactgggactactactacggtatggacgtc

SEQ ID NO: 5809 - DNA, 66 bp, Artificial Sequence
  Synthetic polynucleotide encoding artificial human antibody CDR-H3 region
gcgagagagacgtattactatggttcggggagctatccccaatactactactacggtatggacgtc

SEQ ID NO: 5810 - DNA, 63 bp, Artificial Sequence
  Synthetic polynucleotide encoding artificial human antibody CDR-H3 region
gcgagacagcgagatacgtattaccatggttcgcagaaatattttttggacttctttgactac

SEQ ID NO: 5811 - DNA, 69 bp, Artificial Sequence
  Synthetic polynucleotide encoding artificial human antibody CDR-H3 region
gcgagaacgacctatttctctgatgataatggtcactctcgttattactactactactacatggacgtc

SEQ ID NO: 5812 - DNA, 66 bp, Artificial Sequence
  Synthetic polynucleotide encoding artificial human antibody CDR-H3 region
accacagggaggggttcggggaatttttttgggggggagtactactactactacggtatggacgtc

SEQ ID NO: 5813 - DNA, 30 bp, Artificial Sequence
  Synthetic polynucleotide encoding artificial human antibody CDR-H3 region
gcgagatgggagggggggggtatggacgtc

SEQ ID NO: 5814 - DNA, 54 bp, Artificial Sequence
  Synthetic polynucleotide encoding artificial human antibody CDR-H3 region
gcgggggattacgatattttgactggttattactgggtgtatgcttttgatatc

SEQ ID NO: 5815 - DNA, 45 bp, Artificial Sequence
  Synthetic polynucleotide encoding artificial human antibody CDR-H3 region
gcgagacatgggcgtggatacagctatgatctgccgttcgacccc

SEQ ID NO: 5816 - DNA, 48 bp, Artificial Sequence
  Synthetic polynucleotide encoding artificial human antibody CDR-H3 region
gggaaagcgagtcccagtgtcgatatagcagcagctggaattgactac

SEQ ID NO: 5817 - DNA, 54 bp, Artificial Sequence
  Synthetic polynucleotide encoding artificial human antibody CDR-H3 region
gcgatgcccccccacggatatgtcagtaactggtacacctactggtttgacttc

SEQ ID NO: 5818 - DNA, 66 bp, Artificial Sequence
  Synthetic polynucleotide encoding artificial human antibody CDR-H3 region
gcgagagatggcccccattacgatgctttgaccgcctcatggacatatgttggtatttttgatgtc

SEQ ID NO: 5819 - DNA, 21 bp, Artificial Sequence
  Synthetic polynucleotide encoding artificial human antibody CDR-H3 region
accctcctccaagagcacctc

SEQ ID NO: 5820 - DNA, 45 bp, Artificial Sequence
  Synthetic polynucleotide encoding artificial human antibody CDR-H3 region
gcgagagagggggagatggctacaaggaatgatgcttttgatatc

SEQ ID NO: 5821 - DNA, 54 bp, Artificial Sequence
  Synthetic polynucleotide encoding artificial human antibody CDR-H3 region
gcgaaaagagacgttatattttggttgggcgagtcacaaggggcttttgatatc

SEQ ID NO: 5822 - DNA, 57 bp, Artificial Sequence
  Synthetic polynucleotide encoding artificial human antibody CDR-H3 region
gcgaggttatattgtagtagtaccagctgctataactactactactacatggacgtc

SEQ ID NO: 5823 - DNA, 30 bp, Artificial Sequence
  Synthetic polynucleotide encoding artificial human antibody CDR-H3 region
gcgacctggatttcagcgcattttgacaac

SEQ ID NO: 5824 - DNA, 33 bp, Artificial Sequence
  Synthetic polynucleotide encoding artificial human antibody CDR-H3 region
gcaagggacagagactgggaaatctttgacttt

SEQ ID NO: 5825 - DNA, 24 bp, Artificial Sequence
  Synthetic polynucleotide encoding artificial human antibody CDR-H3 region
gtcagaggacttgatattgactat

SEQ ID NO: 5826 - DNA, 42 bp, Artificial Sequence
  Synthetic polynucleotide encoding artificial human antibody CDR-H3 region
gcgaccaagggtggggagaatggttattactactggacctat

SEQ ID NO: 5827 - DNA, 39 bp, Artificial Sequence
  Synthetic polynucleotide encoding artificial human antibody CDR-H3 region
gcgagatccagggtcggaaggtgggagttacccgactac

SEQ ID NO: 5828 - DNA, 51 bp, Artificial Sequence
  Synthetic polynucleotide encoding artificial human antibody CDR-H3 region
gcccatatcgtttcttctacggtgactgacccagacctctactttaaaacc

SEQ ID NO: 5829 - DNA, 57 bp, Artificial Sequence
  Synthetic polynucleotide encoding artificial human antibody CDR-H3 region
gcaagggatatggtggcagtgtccgactcaagtgttggagaaggttggtttgacaac

SEQ ID NO: 5830 - DNA, 45 bp, Artificial Sequence
  Synthetic polynucleotide encoding artificial human antibody CDR-H3 region
gccaaagatcctaacggtgactaccctttggggtcctccgactac

SEQ ID NO: 5831 - DNA, 33 bp, Artificial Sequence
  Synthetic polynucleotide encoding artificial human antibody CDR-H3 region
gcaagagatcgtgcctggcagatatatgactac

SEQ ID NO: 5832 - DNA, 24 bp, Artificial Sequence
  Synthetic polynucleotide encoding artificial human antibody CDR-H3 region
gtgacggtccatgattcgccctct

SEQ ID NO: 5833 - DNA, 45 bp, Artificial Sequence
  Synthetic polynucleotide encoding artificial human antibody CDR-H3 region
gcgagagaacggatatacagctattcctcacgctcctttgactgc

SEQ ID NO: 5834 - DNA, 30 bp, Artificial Sequence
  Synthetic polynucleotide encoding artificial human antibody CDR-H3 region
tcggcagtatcgtggctggcctttgactac

SEQ ID NO: 5835 - DNA, 63 bp, Artificial Sequence
  Synthetic polynucleotide encoding artificial human antibody CDR-H3 region
gcgagaacggggctatatatagtgggacctacctgggactactactactacggtatggacgtc

SEQ ID NO: 5836 - DNA, 42 bp, Artificial Sequence
  Synthetic polynucleotide encoding artificial human antibody CDR-H3 region
gcgagagggtggtgtagtccccactgctacggtatgggcgtc

SEQ ID NO: 5837 - DNA, 39 bp, Artificial Sequence
  Synthetic polynucleotide encoding artificial human antibody CDR-H3 region
gcgagagtgcgtgggaggtactcctacggtatggacgtc

SEQ ID NO: 5838 - DNA, 42 bp, Artificial Sequence
  Synthetic polynucleotide encoding artificial human antibody CDR-H3 region
actagaggtgatagtgacagctactacgacttctctgcctat

SEQ ID NO: 5839 - DNA, 63 bp, Artificial Sequence
  Synthetic polynucleotide encoding artificial human antibody CDR-H3 region
gcgagagatccggtggcgagtattacgatttttggagtggttacccgctacggtatggacgtc

SEQ ID NO: 5840 - DNA, 39 bp, Artificial Sequence
  Synthetic polynucleotide encoding artificial human antibody CDR-H3 region
gcgagacaagcaatcacctggtacaattattttgacatg

SEQ ID NO: 5841 - DNA, 45 bp, Artificial Sequence
  Synthetic polynucleotide encoding artificial human antibody CDR-H3 region
gcgaaagaccctaacggcgactatgtcttggggtcctccgactcg

SEQ ID NO: 5842 - DNA, 54 bp, Artificial Sequence
  Synthetic polynucleotide encoding artificial human antibody CDR-H3 region
gcgagacagagggactacaccgcctcgtccggcgggggctggtacttcgatctc

SEQ ID NO: 5843 - DNA, 69 bp, Artificial Sequence
  Synthetic polynucleotide encoding artificial human antibody CDR-H3 region
gcgaccgaaggaactacatatgacgatttttggggtggacaaccccgtcttaacaactggttcgacccc

SEQ ID NO: 5844 - DNA, 42 bp, Artificial Sequence
  Synthetic polynucleotide encoding artificial human antibody CDR-H3 region
gcgaggggactacgcggcaactactactacggtatggacgtc

SEQ ID NO: 5845 - DNA, 48 bp, Artificial Sequence
  Synthetic polynucleotide encoding artificial human antibody CDR-H3 region
gtcacagggcagcccagaatcagtggctggtggggtgcttatgatatg

SEQ ID NO: 5846 - DNA, 24 bp, Artificial Sequence
  Synthetic polynucleotide encoding artificial human antibody CDR-H3 region
gcgaaatcaatggaccttgactac

SEQ ID NO: 5847 - DNA, 48 bp, Artificial Sequence
  Synthetic polynucleotide encoding artificial human antibody CDR-H3 region
gcgagaggaaggcccccctttttcaccagccctgatgtttttgatctt

SEQ ID NO: 5848 - DNA, 33 bp, Artificial Sequence
  Synthetic polynucleotide encoding artificial human antibody CDR-H3 region
gcacaccatacaataactacggtctttgactac

SEQ ID NO: 5849 - DNA, 60 bp, Artificial Sequence
  Synthetic polynucleotide encoding artificial human antibody CDR-H3 region
gccaaacgggccgaagacggacggtatggcaagtttggttatcacggggcttggggctcc

SEQ ID NO: 5850 - DNA, 45 bp, Artificial Sequence
  Synthetic polynucleotide encoding artificial human antibody CDR-H3 region
gcgagagaccggagactcacctactcttcacgctactttgactac

SEQ ID NO: 5851 - DNA, 45 bp, Artificial Sequence
  Synthetic polynucleotide encoding artificial human antibody CDR-H3 region
gggaaagatcctaatgggaactatgttttggggtcctccgactac

SEQ ID NO: 5852 - DNA, 30 bp, Artificial Sequence
  Synthetic polynucleotide encoding artificial human antibody CDR-H3 region
gcgagagatcttgactgggcttttgactac

SEQ ID NO: 5853 - DNA, 48 bp, Artificial Sequence
  Synthetic polynucleotide encoding artificial human antibody CDR-H3 region
gcgaaagattccgggggggacccaaggatggcctactggttcgacccc

SEQ ID NO: 5854 - DNA, 39 bp, Artificial Sequence
  Synthetic polynucleotide encoding artificial human antibody CDR-H3 region
gcgcgaggcgtggtgggagctgaagatgcttttgatctc

SEQ ID NO: 5855 - DNA, 42 bp, Artificial Sequence
  Synthetic polynucleotide encoding artificial human antibody CDR-H3 region
gcgaggcagtatagcagttcgtcgggacgacactttgactac

SEQ ID NO: 5856 - DNA, 66 bp, Artificial Sequence
  Synthetic polynucleotide encoding artificial human antibody CDR-H3 region
gcgaaagatgcgttctattttggttactgtagtggcggtgtttgccctaatgatgctttagatgtc

SEQ ID NO: 5857 - DNA, 33 bp, Artificial Sequence
  Synthetic polynucleotide encoding artificial human antibody CDR-H3 region
gcgagagggagtggtttgcgggggatcgacccg

SEQ ID NO: 5858 - DNA, 39 bp, Artificial Sequence
  Synthetic polynucleotide encoding artificial human antibody CDR-H3 region
gcgagagagagtggatacagctatggagtctttgactac

SEQ ID NO: 5859 - DNA, 48 bp, Artificial Sequence
  Synthetic polynucleotide encoding artificial human antibody CDR-H3 region
gcgaaagattacatggcacacactagtaggccctgggcttttgatgtc

SEQ ID NO: 5860 - DNA, 42 bp, Artificial Sequence
  Synthetic polynucleotide encoding artificial human antibody CDR-H3 region
gcgagagacttcccagggggtggctggtcttactttgactac

SEQ ID NO: 5861 - DNA, 36 bp, Artificial Sequence
  Synthetic polynucleotide encoding artificial human antibody CDR-H3 region
gctagaggagggcccatagatggctacaatccctac

SEQ ID NO: 5862 - DNA, 66 bp, Artificial Sequence
  Synthetic polynucleotide encoding artificial human antibody CDR-H3 region
gcgagaaaatacacaatagcagcagctggtatcctactaccctcctattactacgttatggacgtc

SEQ ID NO: 5863 - DNA, 30 bp, Artificial Sequence
  Synthetic polynucleotide encoding artificial human antibody CDR-H3 region
gcgagaggctctggctttacctggaatatc

SEQ ID NO: 5864 - DNA, 36 bp, Artificial Sequence
  Synthetic polynucleotide encoding artificial human antibody CDR-H3 region
acgacgggtgtttcagcagctgcccacgatggctac

SEQ ID NO: 5865 - DNA, 69 bp, Artificial Sequence
  Synthetic polynucleotide encoding artificial human antibody CDR-H3 region
gcgaggccgggatattgtagtggtggtagctgctacatcggatactacacatactacggattggacgtc

SEQ ID NO: 5866 - DNA, 45 bp, Artificial Sequence
  Synthetic polynucleotide encoding artificial human antibody CDR-H3 region
gccagaggcgtcgtttctggtgtggttttgcattatttggacctc

SEQ ID NO: 5867 - DNA, 66 bp, Artificial Sequence
  Synthetic polynucleotide encoding artificial human antibody CDR-H3 region
gcgaggcgagcttattgtggtggttcttgtacccggaatcactaccaatatttcggtatggacgtc

SEQ ID NO: 5868 - DNA, 60 bp, Artificial Sequence
  Synthetic polynucleotide encoding artificial human antibody CDR-H3 region
gcgagagatccgcggctggacgattattggagtggttatatcccggggtattctgactcc

SEQ ID NO: 5869 - DNA, 63 bp, Artificial Sequence
  Synthetic polynucleotide encoding artificial human antibody CDR-H3 region
gcgaggaccaccattgcgaaaattacgatttttggagtggttccccggtactactttgactac

SEQ ID NO: 5870 - DNA, 36 bp, Artificial Sequence
  Synthetic polynucleotide encoding artificial human antibody CDR-H3 region
gcgagagatgggggcaggtcgaccgactttgagtac

SEQ ID NO: 5871 - DNA, 36 bp, Artificial Sequence
  Synthetic polynucleotide encoding artificial human antibody CDR-H3 region
gtaaaggataacagtgggtggtactactttgactcc

SEQ ID NO: 5872 - DNA, 66 bp, Artificial Sequence
  Synthetic polynucleotide encoding artificial human antibody CDR-H3 region
gcgaaagattcgttcttttttggttactgtcgtaacggtgtatgccctaatgatgcttttgatgtc

SEQ ID NO: 5873 - DNA, 30 bp, Artificial Sequence
  Synthetic polynucleotide encoding artificial human antibody CDR-H3 region
ggcagagatactgcagcttctgtggacgtg

SEQ ID NO: 5874 - DNA, 60 bp, Artificial Sequence
  Synthetic polynucleotide encoding artificial human antibody CDR-H3 region
gcgagaggcccatatcgcaggatcctagtagtggtttcacccatgtactactttgactac

SEQ ID NO: 5875 - DNA, 60 bp, Artificial Sequence
  Synthetic polynucleotide encoding artificial human antibody CDR-H3 region
gttagacatgtttcccattactatgaaggtcgtggttggcacggacatgcttttgatagc

SEQ ID NO: 5876 - DNA, 51 bp, Artificial Sequence
  Synthetic polynucleotide encoding artificial human antibody CDR-H3 region
gcgcgagatgcattcgagtgggagttaccagctcgagggccggcagactac

SEQ ID NO: 5877 - DNA, 42 bp, Artificial Sequence
  Synthetic polynucleotide encoding artificial human antibody CDR-H3 region
gcgagaggggttcacggtggctggtacagtctttttgactac

SEQ ID NO: 5878 - DNA, 48 bp, Artificial Sequence
  Synthetic polynucleotide encoding artificial human antibody CDR-H3 region
gcgagacgggcagattgtagcaccaccacttgccaacactatgacttc

SEQ ID NO: 5879 - DNA, 36 bp, Artificial Sequence
  Synthetic polynucleotide encoding artificial human antibody CDR-H3 region
gcgagaagtatagcagcaactggtagggctgactac

SEQ ID NO: 5880 - DNA, 39 bp, Artificial Sequence
  Synthetic polynucleotide encoding artificial human antibody CDR-H3 region
gcaagaggttatataggagcgccggggcacggtgactac

SEQ ID NO: 5881 - DNA, 30 bp, Artificial Sequence
  Synthetic polynucleotide encoding artificial human antibody CDR-H3 region
gcgaaagatttccgggatgcttttgatatc

SEQ ID NO: 5882 - DNA, 39 bp, Artificial Sequence
  Synthetic polynucleotide encoding artificial human antibody CDR-H3 region
gcgaaatgcggtgggagcttcgcctggccctttgagtat

SEQ ID NO: 5883 - DNA, 51 bp, Artificial Sequence
  Synthetic polynucleotide encoding artificial human antibody CDR-H3 region
gcgagagcaggacgtattacgatttttggagtggttaaccactttgactac

SEQ ID NO: 5884 - DNA, 66 bp, Artificial Sequence
  Synthetic polynucleotide encoding artificial human antibody CDR-H3 region
gcgaaagatgcggtccattttggttactgtcctaatggtatatgtcctaatgatgcttttgatatc

SEQ ID NO: 5885 - DNA, 57 bp, Artificial Sequence
  Synthetic polynucleotide encoding artificial human antibody CDR-H3 region
gcgagattgttgttctttggttcgcggaaaacagccccaacgcatgcttttgatatc

SEQ ID NO: 5886 - DNA, 36 bp, Artificial Sequence
  Synthetic polynucleotide encoding artificial human antibody CDR-H3 region
gcgggagacactgcgagcccttctaggtcagacttc

SEQ ID NO: 5887 - DNA, 42 bp, Artificial Sequence
  Synthetic polynucleotide encoding artificial human antibody CDR-H3 region
gcgagacgatggggttattacgagactagtggttattattac

SEQ ID NO: 5888 - DNA, 48 bp, Artificial Sequence
  Synthetic polynucleotide encoding artificial human antibody CDR-H3 region
tctatttcgtatggggggcctggtctaccagcaggtggcctcgggtac

SEQ ID NO: 5889 - DNA, 63 bp, Artificial Sequence
  Synthetic polynucleotide encoding artificial human antibody CDR-H3 region
gcgagagtttttaagttaagtttttcggagtggccgcaaatcttcgattttgggtttgactac

SEQ ID NO: 5890 - DNA, 24 bp, Artificial Sequence
  Synthetic polynucleotide encoding artificial human antibody CDR-H3 region
gtcagaggacttgatattgactat

SEQ ID NO: 5891 - DNA, 36 bp, Artificial Sequence
  Synthetic polynucleotide encoding artificial human antibody CDR-H3 region
gtgagaggggagactttttggagtggcctagactac

SEQ ID NO: 5892 - DNA, 36 bp, Artificial Sequence
  Synthetic polynucleotide encoding artificial human antibody CDR-H3 region
gtggcggggatgttagtggaaacgacgtttgactat

SEQ ID NO: 5893 - DNA, 48 bp, Artificial Sequence
  Synthetic polynucleotide encoding artificial human antibody CDR-H3 region
gtgaaagattatactgtgaaaacactggccgaacccatgtttgagttc

SEQ ID NO: 5894 - DNA, 36 bp, Artificial Sequence
  Synthetic polynucleotide encoding artificial human antibody CDR-H3 region
gtaaaagataacagtgggtggtactactttgacaac

SEQ ID NO: 5895 - DNA, 42 bp, Artificial Sequence
  Synthetic polynucleotide encoding artificial human antibody CDR-H3 region
gcaaaagccttttattctggtgcgggggtcggcatggacgtc

SEQ ID NO: 5896 - DNA, 45 bp, Artificial Sequence
  Synthetic polynucleotide encoding artificial human antibody CDR-H3 region
gggaaagatcctaatggtgactacgttttggggtcctccgactac

SEQ ID NO: 5897 - DNA, 66 bp, Artificial Sequence
  Synthetic polynucleotide encoding artificial human antibody CDR-H3 region
gcgagaggcgttcgaagagcagcagctggttttctgttaccggtctactactacggtatggacgtc

SEQ ID NO: 5898 - DNA, 51 bp, Artificial Sequence
  Synthetic polynucleotide encoding artificial human antibody CDR-H3 region
gcgacagtttttggtagcagtggctgggtttggaggtactattttgattac

SEQ ID NO: 5899 - DNA, 60 bp, Artificial Sequence
  Synthetic polynucleotide encoding artificial human antibody CDR-H3 region
tcgacctcggacccatcacgaaattttgactggtttagttatgacttcggcatgcacgtc

SEQ ID NO: 5900 - DNA, 60 bp, Artificial Sequence
  Synthetic polynucleotide encoding artificial human antibody CDR-H3 region
gcgagagccggcgattattacgatattttgactggttattataaagcctactttgactac

SEQ ID NO: 5901 - DNA, 30 bp, Artificial Sequence
  Synthetic polynucleotide encoding artificial human antibody CDR-H3 region
tcaacctggctcgtatcccattttgactac

SEQ ID NO: 5902 - DNA, 36 bp, Artificial Sequence
  Synthetic polynucleotide encoding artificial human antibody CDR-H3 region
gtgagagtttttcagaagcagtcccttcctgcgttt

SEQ ID NO: 5903 - DNA, 39 bp, Artificial Sequence
  Synthetic polynucleotide encoding artificial human antibody CDR-H3 region
gtgagagaccgcggcagcacctggtggttctttgactcc

SEQ ID NO: 5904 - DNA, 57 bp, Artificial Sequence
  Synthetic polynucleotide encoding artificial human antibody CDR-H3 region
gcgagagattttagttacgtagccctagtggttatccgacactacggtatggacgtc

SEQ ID NO: 5905 - DNA, 57 bp, Artificial Sequence
  Synthetic polynucleotide encoding artificial human antibody CDR-H3 region
gcgtccgatgatcgaacgacttactctgaaaatagtggtcattctaactttgactac

SEQ ID NO: 5906 - DNA, 42 bp, Artificial Sequence
  Synthetic polynucleotide encoding artificial human antibody CDR-H3 region
gccagtcgccctccgcagtcggaagtaattgtctttgactac

SEQ ID NO: 5907 - DNA, 45 bp, Artificial Sequence
  Synthetic polynucleotide encoding artificial human antibody CDR-H3 region
gcgagagaaggaggaactagtggaaagtgcggctactttgactac

SEQ ID NO: 5908 - DNA, 48 bp, Artificial Sequence
  Synthetic polynucleotide encoding artificial human antibody CDR-H3 region
acgagaggacctttttcatcggtgactgagtttgcctggttcgacccc

SEQ ID NO: 5909 - DNA, 39 bp, Artificial Sequence
  Synthetic polynucleotide encoding artificial human antibody CDR-H3 region
gccagctccatgattcctcctcacacccgcatggacgtc

SEQ ID NO: 5910 - DNA, 57 bp, Artificial Sequence
  Synthetic polynucleotide encoding artificial human antibody CDR-H3 region
gcgtccgatgatcgaacaaattactttgtcaatagtggttattctaactttgactac

SEQ ID NO: 5911 - DNA, 39 bp, Artificial Sequence
  Synthetic polynucleotide encoding artificial human antibody CDR-H3 region
gcgagaggccgagatagtagtggttattactactgctac

SEQ ID NO: 5912 - DNA, 57 bp, Artificial Sequence
  Synthetic polynucleotide encoding artificial human antibody CDR-H3 region
gcgaaagattcgtcacctacaagggggggagttatcgtccccactcctttcgactct

SEQ ID NO: 5913 - DNA, 45 bp, Artificial Sequence
  Synthetic polynucleotide encoding artificial human antibody CDR-H3 region
gcgagagattataaattcgcggactttttttatggtatggacgtc

SEQ ID NO: 5914 - DNA, 51 bp, Artificial Sequence
  Synthetic polynucleotide encoding artificial human antibody CDR-H3 region
gcgagagggcctcgtgccaactttcggggagttatgtttgcttttgatatc

SEQ ID NO: 5915 - DNA, 78 bp, Artificial Sequence
  Synthetic polynucleotide encoding artificial human antibody CDR-H3 region
gcgagaggggggccgataggttcggagagttatcacatgaaatcaaatgggggcctttactactacaatgtggacgtc

SEQ ID NO: 5916 - DNA, 54 bp, Artificial Sequence
  Synthetic polynucleotide encoding artificial human antibody CDR-H3 region
gcgagagaatttaggaccggaggtccgtgggtccggcagctagccctagaccac

SEQ ID NO: 5917 - DNA, 57 bp, Artificial Sequence
  Synthetic polynucleotide encoding artificial human antibody CDR-H3 region
gcgtccgatgatcgaacgacttactctgaacatagtggtcattctaactttgactac

SEQ ID NO: 5918 - DNA, 21 bp, Artificial Sequence
  Synthetic polynucleotide encoding artificial human antibody CDR-H3 region
gccacacgggagttactattg

SEQ ID NO: 5919 - DNA, 42 bp, Artificial Sequence
  Synthetic polynucleotide encoding artificial human antibody CDR-H3 region
gcgagagatagacatattgtggtggtgaccggcgttgactcc

SEQ ID NO: 5920 - DNA, 57 bp, Artificial Sequence
  Synthetic polynucleotide encoding artificial human antibody CDR-H3 region
gcgtccgatgatcgaacgaattactttgataacagtggttattctaactttgactac

SEQ ID NO: 5921 - DNA, 57 bp, Artificial Sequence
  Synthetic polynucleotide encoding artificial human antibody CDR-H3 region
gcgtccgatgatcgaacaaattactatgataatagtggttattctaactttgactac

SEQ ID NO: 5922 - DNA, 60 bp, Artificial Sequence
  Synthetic polynucleotide encoding artificial human antibody CDR-H3 region
gcacggctcgtgggaacgtgtactactgtcagttgcttcagacggggctggttcgactcc

SEQ ID NO: 5923 - DNA, 39 bp, Artificial Sequence
  Synthetic polynucleotide encoding artificial human antibody CDR-H3 region
gccaaagcgggggatgccagcagctctcactttgacctc

SEQ ID NO: 5924 - DNA, 63 bp, Artificial Sequence
  Synthetic polynucleotide encoding artificial human antibody CDR-H3 region
gcgacagccccttatagtgggccctactacgctgggggttgggggccatactactttgattcg

SEQ ID NO: 5925 - DNA, 54 bp, Artificial Sequence
  Synthetic polynucleotide encoding artificial human antibody CDR-H3 region
gcgaaagatcgcggccttaccggacgctactactggtggtactactttgactcc

SEQ ID NO: 5926 - DNA, 45 bp, Artificial Sequence
  Synthetic polynucleotide encoding artificial human antibody CDR-H3 region
gcgagagagggggaaagcagtggtcgggccggaatttttgatgtt

SEQ ID NO: 5927 - DNA, 48 bp, Artificial Sequence
  Synthetic polynucleotide encoding artificial human antibody CDR-H3 region
gcgagagatctcgcgtcatggttcggggagttaccctcttttgggatc

SEQ ID NO: 5928 - DNA, 48 bp, Artificial Sequence
  Synthetic polynucleotide encoding artificial human antibody CDR-H3 region
gcaagatccaatttggacgcctctgttagcactgagtcttttgattcc

SEQ ID NO: 5929 - DNA, 39 bp, Artificial Sequence
  Synthetic polynucleotide encoding artificial human antibody CDR-H3 region
gcgagacagtctaggggtttagcagcagctgctgactac

SEQ ID NO: 5930 - DNA, 45 bp, Artificial Sequence
  Synthetic polynucleotide encoding artificial human antibody CDR-H3 region
ggtagtgctagagttgaaagtggtggtcactatttccttgattac

SEQ ID NO: 5931 - DNA, 45 bp, Artificial Sequence
  Synthetic polynucleotide encoding artificial human antibody CDR-H3 region
gcaaaaggccaatataccagcatttggtacgggggcattgactcc

SEQ ID NO: 5932 - DNA, 57 bp, Artificial Sequence
  Synthetic polynucleotide encoding artificial human antibody CDR-H3 region
gcgtccgatgatcgaactaattactattataatagtggttattctaactttgactac

SEQ ID NO: 5933 - DNA, 57 bp, Artificial Sequence
  Synthetic polynucleotide encoding artificial human antibody CDR-H3 region
gcggccgatgatcgaaggacttactatgagaacagtggttatgctaactttgactat

SEQ ID NO: 5934 - DNA, 27 bp, Artificial Sequence
  Synthetic polynucleotide encoding artificial human antibody CDR-H3 region
gctcgaagggccctctcacctagttcc

SEQ ID NO: 5935 - DNA, 42 bp, Artificial Sequence
  Synthetic polynucleotide encoding artificial human antibody CDR-H3 region
acgagacatctgggacgccaacgagactacggttgggacgcc

SEQ ID NO: 5936 - DNA, 42 bp, Artificial Sequence
  Synthetic polynucleotide encoding artificial human antibody CDR-H3 region
gtaaaagatagaggagtttcatatcatctctactttgactac

SEQ ID NO: 5937 - DNA, 57 bp, Artificial Sequence
  Synthetic polynucleotide encoding artificial human antibody CDR-H3 region
gcgggaggcaagaagcagtggctggtccttaatagggaggtccactggttcgacccc

SEQ ID NO: 5938 - DNA, 45 bp, Artificial Sequence
  Synthetic polynucleotide encoding artificial human antibody CDR-H3 region
gcgacagagggggggagcagtggaaagtgcggctactttgactac

SEQ ID NO: 5939 - DNA, 36 bp, Artificial Sequence
  Synthetic polynucleotide encoding artificial human antibody CDR-H3 region
gcgagatcgtatagtaatggccaatcccctggctac

SEQ ID NO: 5940 - DNA, 39 bp, Artificial Sequence
  Synthetic polynucleotide encoding artificial human antibody CDR-H3 region
gcgagacaccggggtggctacgattcgcgcctaccctac

SEQ ID NO: 5941 - DNA, 42 bp, Artificial Sequence
  Synthetic polynucleotide encoding artificial human antibody CDR-H3 region
gctgctgggcacaaggggaactactactacggtatggacgtc

SEQ ID NO: 5942 - DNA, 54 bp, Artificial Sequence
  Synthetic polynucleotide encoding artificial human antibody CDR-H3 region
gcgagagatctatatttctatgatgataatattggttattacgtacaggattac

SEQ ID NO: 5943 - DNA, 42 bp, Artificial Sequence
  Synthetic polynucleotide encoding artificial human antibody CDR-H3 region
gcgcgacatctgaaaaaaagtggcatataccagtttgattat

SEQ ID NO: 5944 - DNA, 51 bp, Artificial Sequence
  Synthetic polynucleotide encoding artificial human antibody CDR-H3 region
gcgagatcccgcggatatagtggctatcggggtggatattactttgagtac

SEQ ID NO: 5945 - DNA, 33 bp, Artificial Sequence
  Synthetic polynucleotide encoding artificial human antibody CDR-H3 region
gtccctcgctatactaaccattggtttgacaac

SEQ ID NO: 5946 - DNA, 48 bp, Artificial Sequence
  Synthetic polynucleotide encoding artificial human antibody CDR-H3 region
gcgagagcattatacagtagtaactggttcaaggatgcctttgatatc

SEQ ID NO: 5947 - DNA, 42 bp, Artificial Sequence
  Synthetic polynucleotide encoding artificial human antibody CDR-H3 region
gcgagagatctggggaggaggttctattacggcatggacgtc

SEQ ID NO: 5948 - DNA, 48 bp, Artificial Sequence
  Synthetic polynucleotide encoding artificial human antibody CDR-H3 region
gcgaaagatctgtttcgagcatcgtcggagctgcgtgctttagactac

SEQ ID NO: 5949 - DNA, 42 bp, Artificial Sequence
  Synthetic polynucleotide encoding artificial human antibody CDR-H3 region
tcgaaagggggggctgccccgccggggaactggttcgaccgt

SEQ ID NO: 5950 - DNA, 51 bp, Artificial Sequence
  Synthetic polynucleotide encoding artificial human antibody CDR-H3 region
gcgaaagtccactggcacagcagcaatccttattggggcggtctcgacccc

SEQ ID NO: 5951 - DNA, 39 bp, Artificial Sequence
  Synthetic polynucleotide encoding artificial human antibody CDR-H3 region
gcgagaggaaatcgtataggtggaacaagcgggcactac

SEQ ID NO: 5952 - DNA, 33 bp, Artificial Sequence
  Synthetic polynucleotide encoding artificial human antibody CDR-H3 region
gtccctcgctatactagccattggtttgacaac

SEQ ID NO: 5953 - DNA, 48 bp, Artificial Sequence
  Synthetic polynucleotide encoding artificial human antibody CDR-H3 region
gcgataaaaactgcatattgtgggagtgactgctatcggtttgaccac

SEQ ID NO: 5954 - DNA, 36 bp, Artificial Sequence
  Synthetic polynucleotide encoding artificial human antibody CDR-H3 region
gcgcgagatggccactatggctgggcttttgatatc

SEQ ID NO: 5955 - DNA, 30 bp, Artificial Sequence
  Synthetic polynucleotide encoding artificial human antibody CDR-H3 region
gcgcgtcaccgatcggtgactcttgacttc

SEQ ID NO: 5956 - DNA, 42 bp, Artificial Sequence
  Synthetic polynucleotide encoding artificial human antibody CDR-H3 region
gcgagaggggggagtgccccgccggggaactggttcgccgcc

SEQ ID NO: 5957 - DNA, 54 bp, Artificial Sequence
  Synthetic polynucleotide encoding artificial human antibody CDR-H3 region
accactgatcgcggtataagagtcggggagtatcactactacggcatggacgtc

SEQ ID NO: 5958 - DNA, 27 bp, Artificial Sequence
  Synthetic polynucleotide encoding artificial human antibody CDR-H3 region
gcgagagatttttggagtggtctctac

SEQ ID NO: 5959 - DNA, 51 bp, Artificial Sequence
  Synthetic polynucleotide encoding artificial human antibody CDR-H3 region
gcacacagactgatgagtgggagtccctggccttggggttactttgactac

SEQ ID NO: 5960 - DNA, 39 bp, Artificial Sequence
  Synthetic polynucleotide encoding artificial human antibody CDR-H3 region
gcgagaggagctcgtataggtggaacagccgggcactac

SEQ ID NO: 5961 - DNA, 33 bp, Artificial Sequence
  Synthetic polynucleotide encoding artificial human antibody CDR-H3 region
gcgagcgatccgagaacgacgttgtttgactac

SEQ ID NO: 5962 - DNA, 48 bp, Artificial Sequence
  Synthetic polynucleotide encoding artificial human antibody CDR-H3 region
gcgagacttcttccactggaggggccagctgcccccaactttgactac

SEQ ID NO: 5963 - DNA, 75 bp, Artificial Sequence
  Synthetic polynucleotide encoding artificial human antibody CDR-H3 region
gcgagatcgtccctctcctctcgtcttgccttgataatagtggttaattacccaaatttttactactttgactcc

SEQ ID NO: 5964 - DNA, 51 bp, Artificial Sequence
  Synthetic polynucleotide encoding artificial human antibody CDR-H3 region
gctaggtcccattatgtaggttcggagagttatagggatgcgcttgatatc

SEQ ID NO: 5965 - DNA, 39 bp, Artificial Sequence
  Synthetic polynucleotide encoding artificial human antibody CDR-H3 region
gcgaaacttattggggcattgcgaggagctacagaccac

SEQ ID NO: 5966 - DNA, 36 bp, Artificial Sequence
  Synthetic polynucleotide encoding artificial human antibody CDR-H3 region
gcgaaaactcatataagtgggtggtgctttgactat

SEQ ID NO: 5967 - DNA, 63 bp, Artificial Sequence
  Synthetic polynucleotide encoding artificial human antibody CDR-H3 region
gcgaaagaaagtgctgcattgttatgggtcggggccgaaaagaaaggaaactggttcgacccc

SEQ ID NO: 5968 - DNA, 42 bp, Artificial Sequence; identical to SEQ ID NO: 5949
  Synthetic polynucleotide encoding artificial human antibody CDR-H3 region

SEQ ID NO: 5969 - DNA, 42 bp, Artificial Sequence
  Synthetic polynucleotide encoding artificial human antibody CDR-H3 region
gcgagaggattaagatggttcggggagttagagttcgacccc

SEQ ID NO: 5970 - DNA, 51 bp, Artificial Sequence
  Synthetic polynucleotide encoding artificial human antibody CDR-H3 region
gcgaaaggtcccgggctacgatgggagctggtacgccgctactttgaacgc

SEQ ID NO: 5971 - DNA, 39 bp, Artificial Sequence
  Synthetic polynucleotide encoding artificial human antibody CDR-H3 region
acaagagattcggcgggagctactcccgcatttgacttc

SEQ ID NO: 5972 - DNA, 60 bp, Artificial Sequence
  Synthetic polynucleotide encoding artificial human antibody CDR-H3 region
gcgagagacggtcgattacatttgggggagttatcgttatactggccctcctttgactac

SEQ ID NO: 5973 - DNA, 45 bp, Artificial Sequence
  Synthetic polynucleotide encoding artificial human antibody CDR-H3 region
gcgaaagtcagagtggttattactcccaatgatggttttgatatc

SEQ ID NO: 5974 - DNA, 51 bp, Artificial Sequence
  Synthetic polynucleotide encoding artificial human antibody CDR-H3 region
gtaaggtctcactatgaaggttcggagagttttagggatgcgtttgatatc

SEQ ID NO: 5975 - DNA, 45 bp, Artificial Sequence
  Synthetic polynucleotide encoding artificial human antibody CDR-H3 region
gcgagagacgggcccgactacggtgactacgtgaacttcgactac

SEQ ID NO: 5976 - DNA, 57 bp, Artificial Sequence
  Synthetic polynucleotide encoding artificial human antibody CDR-H3 region
gcgaaacggaggggtaatctggttcggggacgtgtaactggtgacggtatggacgtc

SEQ ID NO: 5977 - DNA, 33 bp, Artificial Sequence
  Synthetic polynucleotide encoding artificial human antibody CDR-H3 region
gcgagagatggacaatggtttgaccttgactac

SEQ ID NO: 5978 - DNA, 51 bp, Artificial Sequence
  Synthetic polynucleotide encoding artificial human antibody CDR-H3 region
gtgaaagatctgcggggtggtatagcagaccgagacagtgtttttcatctt

SEQ ID NO: 5979 - DNA, 54 bp, Artificial Sequence
  Synthetic polynucleotide encoding artificial human antibody CDR-H3 region
gcgaaagggctgactgggttacgatattctccgtcgccacagtacttccagcac

SEQ ID NO: 5980 - DNA, 39 bp, Artificial Sequence
  Synthetic polynucleotide encoding artificial human antibody CDR-H3 region
accacagggctggctgcaagtacttactacgttgattac

SEQ ID NO: 5981 - DNA, 33 bp, Artificial Sequence
  Synthetic polynucleotide encoding artificial human antibody CDR-H3 region
gtccctcgctatactaaccattggtttgacaag

SEQ ID NO: 5982 - DNA, 36 bp, Artificial Sequence
  Synthetic polynucleotide encoding artificial human antibody CDR-H3 region
gcgagagatggccagtacggctgggcttttgatatc

SEQ ID NO: 5983 - DNA, 42 bp, Artificial Sequence
  Synthetic polynucleotide encoding artificial human antibody CDR-H3 region
gcgagagatttggggaggaggttcttctacggcatggaaatc

SEQ ID NO: 5984 - DNA, 39 bp, Artificial Sequence
  Synthetic polynucleotide encoding artificial human antibody CDR-H3 region
gcacagggggtcgggggatggaacccctggttcgacccc

SEQ ID NO: 5985 - DNA, 45 bp, Artificial Sequence
  Synthetic polynucleotide encoding artificial human antibody CDR-H3 region
gcgagagatgtttatagcagcacctgggattactactttgactac

SEQ ID NO: 5986 - DNA, 48 bp, Artificial Sequence
  Synthetic polynucleotide encoding artificial human antibody CDR-H3 region
gtgagagatcggaccaactcttatggcctcggttctaacgcggtctac

SEQ ID NO: 5987 - DNA, 51 bp, Artificial Sequence
  Synthetic polynucleotide encoding artificial human antibody CDR-H3 region
acgaggtcccattactctgggtcggagagttatagggattctcttgatatc

SEQ ID NO: 5988 - DNA, 30 bp, Artificial Sequence
  Synthetic polynucleotide encoding artificial human antibody CDR-H3 region
gcgagaggggggcggtaccaatttgactcc

SEQ ID NO: 5989 - DNA, 36 bp, Artificial Sequence
  Synthetic polynucleotide encoding artificial human antibody CDR-H3 region
gcgagagatggccgctacggctgggcttttgatatg

SEQ ID NO: 5990 - DNA, 51 bp, Artificial Sequence
  Synthetic polynucleotide encoding artificial human antibody CDR-H3 region
gcgaaacaatccggtccggggaatttcatcgtttactggtacttcgatctc

SEQ ID NO: 5991 - DNA, 42 bp, Artificial Sequence; identical to SEQ ID NO: 5956
  Synthetic polynucleotide encoding artificial human antibody CDR-H3 region

SEQ ID NO: 5992 - DNA, 51 bp, Artificial Sequence
  Synthetic polynucleotide encoding artificial human antibody CDR-H3 region
cagtcgggaccaacaggaactccaaactactactactacgatatggacgtc

SEQ ID NO: 5993 - DNA, 42 bp, Artificial Sequence
  Synthetic polynucleotide encoding artificial human antibody CDR-H3 region
gcgcgagagtcgcgggatgtagcagcggctggctatgacttc

SEQ ID NO: 5994 - DNA, 51 bp, Artificial Sequence
  Synthetic polynucleotide encoding artificial human antibody CDR-H3 region
gcgagaggctgctatagcagtggctgtgggcgtctcaaggaatttgactac

SEQ ID NO: 5995 - DNA, 30 bp, Artificial Sequence
  Synthetic polynucleotide encoding artificial human antibody CDR-H3 region
gcgagattagaaagtggcttccttgactta

SEQ ID NO: 5996 - DNA, 54 bp, Artificial Sequence
  Synthetic polynucleotide encoding artificial human antibody CDR-H3 region
gcgagggggagttacggtgactccctcaggcccgtcggagactactttgactcc

SEQ ID NO: 5997 - DNA, 51 bp, Artificial Sequence
  Synthetic polynucleotide encoding artificial human antibody CDR-H3 region
gcaaggtcccattacgttggttccctgaattttagggatgcgcttgatatc

SEQ ID NO: 5998 - DNA, 42 bp, Artificial Sequence
  Synthetic polynucleotide encoding artificial human antibody CDR-H3 region
gcgagagcaaaaagtggctggcgaccctacgctgtggacgtc

SEQ ID NO: 5999 - DNA, 36 bp, Artificial Sequence
  Synthetic polynucleotide encoding artificial human antibody CDR-H3 region
gcgaaaactcatataagtggctggtgctttgactac

SEQ ID NO: 6000 - DNA, 42 bp, Artificial Sequence
  Synthetic polynucleotide encoding artificial human antibody CDR-H3 region
gcgagagggggggctgccccgccggggaactggttcgaccgt

SEQ ID NO: 6001 - DNA, 33 bp, Artificial Sequence
  Synthetic polynucleotide encoding artificial human antibody CDR-H3 region
ggcagagatgggatggttacgggtattgacaac

SEQ ID NO: 6002 - DNA, 45 bp, Artificial Sequence
  Synthetic polynucleotide encoding artificial human antibody CDR-H3 region
gcgagagaaagagggacttattctccccttggagcctttgatatc

SEQ ID NO: 6003 - DNA, 45 bp, Artificial Sequence
  Synthetic polynucleotide encoding artificial human antibody CDR-H3 region
gcgagattttgtgggacctacaattccccatgtggatttgattct

SEQ ID NO: 6004 - DNA, 51 bp, Artificial Sequence
  Synthetic polynucleotide encoding artificial human antibody CDR-H3 region
gcaaggtcccattactctggttcggagagttatagggatgcttttgatttc

SEQ ID NO: 6005 - DNA, 54 bp, Artificial Sequence
  Synthetic polynucleotide encoding artificial human antibody CDR-H3 region
gcgagacatataggactaacgaaggatagcagcagctggtacaaaattgactac

SEQ ID NO: 6006 - DNA, 33 bp, Artificial Sequence
  Synthetic polynucleotide encoding artificial human antibody CDR-H3 region
gcgagagcaattagatacaactggttcgacccc

SEQ ID NO: 6007 - DNA, 54 bp, Artificial Sequence
  Synthetic polynucleotide encoding artificial human antibody CDR-H3 region
actacagatcgcgtggggacgaattgtggtggtgactgctaccagttccagcac

SEQ ID NO: 6008 - DNA, 33 bp, Artificial Sequence
  Synthetic polynucleotide encoding artificial human antibody CDR-H3 region
gcgaaaatccctccacggggcccttttgctatc

SEQ ID NO: 6009 - DNA, 45 bp, Artificial Sequence
  Synthetic polynucleotide encoding artificial human antibody CDR-H3 region
gcgaaaggggccactggctggtacgtttcacactattatgacttc

SEQ ID NO: 6010 - DNA, 45 bp, Artificial Sequence
  Synthetic polynucleotide encoding artificial human antibody CDR-H3 region
gcgaaacttcgagcggtggtgactgtcattgaggcattcgacttc

SEQ ID NO: 6011 - DNA, 72 bp, Artificial Sequence
  Synthetic polynucleotide encoding artificial human antibody CDR-H3 region
gcgagaggctcagggagcgcgtattacgatttttggagtggttattcccaccacatagcgccctttgactac

SEQ ID NO: 6012 - DNA, 39 bp, Artificial Sequence
  Synthetic polynucleotide encoding artificial human antibody CDR-H3 region
gcccgtgaaagggagttgttaactaagggtctggacgtc

SEQ ID NO: 6013 - DNA, 30 bp, Artificial Sequence
  Synthetic polynucleotide encoding artificial human antibody CDR-H3 region
gcgagagatgcggaaggtgggttcgacccc

SEQ ID NO: 6014 - DNA, 57 bp, Artificial Sequence
  Synthetic polynucleotide encoding artificial human antibody CDR-H3 region
gtcctcgggccatattaccagcacaatagtggtcagcgagtgggtgcttctgacgtc

SEQ ID NO: 6015 - DNA, 45 bp, Artificial Sequence
  Synthetic polynucleotide encoding artificial human antibody CDR-H3 region
gcgagagtgtgtgggagttacaactccccatgcggatttgactcc

SEQ ID NO: 6016 - DNA, 39 bp, Artificial Sequence
  Synthetic polynucleotide encoding artificial human antibody CDR-H3 region
gcgagaggaaatcgtataggtggaactagcgggcactac

SEQ ID NO: 6017 - DNA, 57 bp, Artificial Sequence
  Synthetic polynucleotide encoding artificial human antibody CDR-H3 region
gcgagagatgggggttgttttaccagctccagctgctatggatacggtatggacgtc

SEQ ID NO: 6018 - DNA, 60 bp, Artificial Sequence
  Synthetic polynucleotide encoding artificial human antibody CDR-H3 region
gcgagacaggcccgggaccgcagtatagcagctcgtccgttctctgggggctttgactac

SEQ ID NO: 6019 - DNA, 66 bp, Artificial Sequence
  Synthetic polynucleotide encoding artificial human antibody CDR-H3 region
gcgagagttaagggctcgtattacgatttttggagtggacgatatcgggtctacggtatggacgtc

SEQ ID NO: 6020 - DNA, 51 bp, Artificial Sequence
  Synthetic polynucleotide encoding artificial human antibody CDR-H3 region
gctaggtctcattatgtaggttcggagagttatagggatgcgcttgatatc

SEQ ID NO: 6021 - DNA, 51 bp, Artificial Sequence
  Synthetic polynucleotide encoding artificial human antibody CDR-H3 region
gcgaaagatttgccgaggcctggtaatgcttattactttgcgaatgattac

SEQ ID NO: 6022 - DNA, 45 bp, Artificial Sequence
  Synthetic polynucleotide encoding artificial human antibody CDR-H3 region
acaaaagcctgcgcgggtggttctagatgctatctgattgacttc

SEQ ID NO: 6023 - DNA, 54 bp, Artificial Sequence
  Synthetic polynucleotide encoding artificial human antibody CDR-H3 region
gcgaaagcccgggcctatagcaggtcctccgtctttttcttcgtcaacagccac

SEQ ID NO: 6024 - DNA, 36 bp, Artificial Sequence; identical to SEQ ID NO: 5954
  Synthetic polynucleotide encoding artificial human antibody CDR-H3 region

SEQ ID NO: 6025 - DNA, 45 bp, Artificial Sequence
  Synthetic polynucleotide encoding artificial human antibody CDR-H3 region
gcgagaggtccgtggataagcgtttggcagggcggcttcgactac

SEQ ID NO: 6026 - DNA, 48 bp, Artificial Sequence
  Synthetic polynucleotide encoding artificial human antibody CDR-H3 region
gcgaagggcgggcgagacggtgggggtccctacacctactttgactac

SEQ ID NO: 6027 - DNA, 54 bp, Artificial Sequence
  Synthetic polynucleotide encoding artificial human antibody CDR-H3 region
accacagatcgcgtggggacaaattgtgatggttactgctaccagttccagcac

SEQ ID NO: 6028 - DNA, 39 bp, Artificial Sequence
  Synthetic polynucleotide encoding artificial human antibody CDR-H3 region
gcgagagatcccaaaaccttacgatttggcgtggacgtc

SEQ ID NO: 6029 - DNA, 33 bp, Artificial Sequence; identical to SEQ ID NO: 5981
  Synthetic polynucleotide encoding artificial human antibody CDR-H3 region

SEQ ID NO: 6030 - DNA, 54 bp, Artificial Sequence
  Synthetic polynucleotide encoding artificial human antibody CDR-H3 region
gcgagagacaggggaccctggtctatagcagcatctggtacccactttgacttc

SEQ ID NO: 6031 - DNA, 39 bp, Artificial Sequence
  Synthetic polynucleotide encoding artificial human antibody CDR-H3 region
gcgaaagctataactatatttggctactatcttgacttc

SEQ ID NO: 6032 - DNA, 69 bp, Artificial Sequence
  Synthetic polynucleotide encoding artificial human antibody CDR-H3 region
gcgaaagatgcagagtgggggacgatttttggagtggttattataagtcctgggaatgcttttgatatc

SEQ ID NO: 6033 - DNA, 57 bp, Artificial Sequence
  Synthetic polynucleotide encoding artificial human antibody CDR-H3 region
gcgagagaataccctttttatagcggcagctggtacggggggcatgtttttgatatc

SEQ ID NO: 6034 - DNA, 54 bp, Artificial Sequence
  Synthetic polynucleotide encoding artificial human antibody CDR-H3 region
accactgatcgcggtatgagaggcggggagtatcactactacggcatggacgtc

SEQ ID NO: 6035 - DNA, 42 bp, Artificial Sequence
  Synthetic polynucleotide encoding artificial human antibody CDR-H3 region
gcgagacacgttggcagtaactggtactgggcttttgactac

SEQ ID NO: 6036 - DNA, 51 bp, Artificial Sequence
  Synthetic polynucleotide encoding artificial human antibody CDR-H3 region
gcgagacatgggcgacccggtatagtgggaggtacttactactttgaatat

SEQ ID NO: 6037 - DNA, 60 bp, Artificial Sequence
  Synthetic polynucleotide encoding artificial human antibody CDR-H3 region
gccacagatcggagacctggggtttgtcgtgacacctgctataactggttccccgatctc

SEQ ID NO: 6038 - DNA, 48 bp, Artificial Sequence
  Synthetic polynucleotide encoding artificial human antibody CDR-H3 region
gcgagggcggagcctatagtggcgaccactatttattactatgactat

SEQ ID NO: 6039 - DNA, 66 bp, Artificial Sequence
  Synthetic polynucleotide encoding artificial human antibody CDR-H3 region
gcgagaggcctccatgataattcggggagatattatgattattactattcatatggtctggacgtc

SEQ ID NO: 6040 - DNA, 30 bp, Artificial Sequence
  Synthetic polynucleotide encoding artificial human antibody CDR-H3 region
accatgtcccgtgaggcgctgtttgaccac

SEQ ID NO: 6041 - DNA, 39 bp, Artificial Sequence
  Synthetic polynucleotide encoding artificial human antibody CDR-H3 region
gtgggagagagggaccgaaactcttatcgctttgactac

SEQ ID NO: 6042 - DNA, 60 bp, Artificial Sequence
  Synthetic polynucleotide encoding artificial human antibody CDR-H3 region
tccacgtcgcccctttttgactggactctatacgcttccttttactggtatctcgaagtg

SEQ ID NO: 6043 - DNA, 30 bp, Artificial Sequence
  Synthetic polynucleotide encoding artificial human antibody CDR-H3 region
gcgacatcccgcaactggtacttggagtct

SEQ ID NO: 6044 - DNA, 36 bp, Artificial Sequence
  Synthetic polynucleotide encoding artificial human antibody CDR-H3 region
gtgaggagtccaagcgacatttacggcatggacgtc

SEQ ID NO: 6045 - DNA, 45 bp, Artificial Sequence
  Synthetic polynucleotide encoding artificial human antibody CDR-H3 region
gcgaggtcattgtcattactatggttcggggaaaactttgactac

SEQ ID NO: 6046 - DNA, 42 bp, Artificial Sequence
  Synthetic polynucleotide encoding artificial human antibody CDR-H3 region
gcgaaagatgatacaattgcgggtgctgatgcttttgatatc

SEQ ID NO: 6047 - DNA, 42 bp, Artificial Sequence
  Synthetic polynucleotide encoding artificial human antibody CDR-H3 region
gcgaaagatatcgaggggggaaaaaatgggggttatgacgaa

SEQ ID NO: 6048 - DNA, 63 bp, Artificial Sequence
  Synthetic polynucleotide encoding artificial human antibody CDR-H3 region
gggaaagatgaagagcaatgtactggtggcagttgcttttcggcctactacgctctggacgtc

SEQ ID NO: 6049 - DNA, 60 bp, Artificial Sequence
  Synthetic polynucleotide encoding artificial human antibody CDR-H3 region
gcgagagggtcgtcggggaacccgttttgcagcggtgactgtcccctctattttgactcc

SEQ ID NO: 6050 - DNA, 27 bp, Artificial Sequence
  Synthetic polynucleotide encoding artificial human antibody CDR-H3 region
gcgaattctcgcagcagctggctctac

SEQ ID NO: 6051 - DNA, 60 bp, Artificial Sequence
  Synthetic polynucleotide encoding artificial human antibody CDR-H3 region
gcgagggcccagagtatagcagctcgtcagtggtttcgctactactactttatggacgtc

SEQ ID NO: 6052 - DNA, 48 bp, Artificial Sequence
  Synthetic polynucleotide encoding artificial human antibody CDR-H3 region
gcgagagatcggggaaggacctctgacgactactacggtatggatgtc

SEQ ID NO: 6053 - DNA, 36 bp, Artificial Sequence
  Synthetic polynucleotide encoding artificial human antibody CDR-H3 region
gcgagggatccaattggcgaggacggtctggacgtc

SEQ ID NO: 6054 - DNA, 57 bp, Artificial Sequence
  Synthetic polynucleotide encoding artificial human antibody CDR-H3 region
gcgagagccgggtatagcagtagctggtattcgccccctgtccactggttcgacccc

SEQ ID NO: 6055 - DNA, 66 bp, Artificial Sequence
  Synthetic polynucleotide encoding artificial human antibody CDR-H3 region
gcgagagatcgtggggagtaccagctgctcatacgcccggccgcctactactacggtatggacgtc

SEQ ID NO: 6056 - DNA, 51 bp, Artificial Sequence
  Synthetic polynucleotide encoding artificial human antibody CDR-H3 region
gcgaaagatagagatggcagcggctggtatgggaggaacttctttgacggc

SEQ ID NO: 6057 - DNA, 45 bp, Artificial Sequence
  Synthetic polynucleotide encoding artificial human antibody CDR-H3 region
gcgaaagacggtcataactggaacttgtttcgatacttcgatctc

SEQ ID NO: 6058 - DNA, 42 bp, Artificial Sequence
  Synthetic polynucleotide encoding artificial human antibody CDR-H3 region
gtgagagagggtcggggctccatagcatcatttgggcaccac

SEQ ID NO: 6059 - DNA, 45 bp, Artificial Sequence
  Synthetic polynucleotide encoding artificial human antibody CDR-H3 region
gcgactctagtactaccagcggccggagggtactactttgactac

SEQ ID NO: 6060 - DNA, 54 bp, Artificial Sequence
  Synthetic polynucleotide encoding artificial human antibody CDR-H3 region
gcgagagattggaatagtggctacattttttactactactacggtatggacgtc

SEQ ID NO: 6061 - DNA, 54 bp, Artificial Sequence
  Synthetic polynucleotide encoding artificial human antibody CDR-H3 region
gcgaggacaccatatagcagttcgtccggttactactactacggtatggacgtc

SEQ ID NO: 6062 - DNA, 54 bp, Artificial Sequence
  Synthetic polynucleotide encoding artificial human antibody CDR-H3 region
actagagggggatattgtagtaccaccacgtgcgattgggtgatcagtgacttc

SEQ ID NO: 6063 - DNA, 42 bp, Artificial Sequence
  Synthetic polynucleotide encoding artificial human antibody CDR-H3 region
gtgagagatgaagcggcaacaggatctaatgaatatgatgtg

SEQ ID NO: 6064 - DNA, 69 bp, Artificial Sequence
  Synthetic polynucleotide encoding artificial human antibody CDR-H3 region
gcgagagatcttgcactaactacgatttttggagtggttattatagactactactacggtatggacgtc

SEQ ID NO: 6065 - DNA, 54 bp, Artificial Sequence
  Synthetic polynucleotide encoding artificial human antibody CDR-H3 region
gcgagagcaccatttcattacgatttttggagtggcccaaactggttcgacccc

SEQ ID NO: 6066 - DNA, 45 bp, Artificial Sequence
  Synthetic polynucleotide encoding artificial human antibody CDR-H3 region
gcaagaggggatggttatgttgataatagtggtgaacttgactac

SEQ ID NO: 6067 - DNA, 54 bp, Artificial Sequence
  Synthetic polynucleotide encoding artificial human antibody CDR-H3 region
gcgagaaattactatggttcggggaattattataaaccctatgcttttgatatc

SEQ ID NO: 6068 - DNA, 54 bp, Artificial Sequence
  Synthetic polynucleotide encoding artificial human antibody CDR-H3 region
gcgagccacccagcagcagctgatactacgtactactactacggtatggacgtc

SEQ ID NO: 6069 - DNA, 63 bp, Artificial Sequence
  Synthetic polynucleotide encoding artificial human antibody CDR-H3 region
gcacggatacccgtaacgttcggggagttattaggggactactactactacggtatggacgtc

SEQ ID NO: 6070 - DNA, 63 bp, Artificial Sequence
  Synthetic polynucleotide encoding artificial human antibody CDR-H3 region
gcgaaagatcaaataagagggtatagcagtggctggacgtactactactacggtatggacgtc

SEQ ID NO: 6071 - DNA, 45 bp, Artificial Sequence
  Synthetic polynucleotide encoding artificial human antibody CDR-H3 region
gcgagagaccagccaactgggcggggctacggcctctttgacttc

SEQ ID NO: 6072 - DNA, 45 bp, Artificial Sequence
  Synthetic polynucleotide encoding artificial human antibody CDR-H3 region
gcgagagagttggctgctatatttggttcctacggtatggacgtc

SEQ ID NO: 6073 - DNA, 60 bp, Artificial Sequence
  Synthetic polynucleotide encoding artificial human antibody CDR-H3 region
gcgaaagaacgggcctattattatgacagtggcggttatcggtcccacggcttggacgtc

SEQ ID NO: 6074 - DNA, 39 bp, Artificial Sequence
  Synthetic polynucleotide encoding artificial human antibody CDR-H3 region
gcgagagggtggtcatcattactatatggtatggacgtc

SEQ ID NO: 6075 - DNA, 45 bp, Artificial Sequence
  Synthetic polynucleotide encoding artificial human antibody CDR-H3 region
gcgagagggccaacttggagtggcggcccgtactactttgactac

SEQ ID NO: 6076 - DNA, 57 bp, Artificial Sequence
  Synthetic polynucleotide encoding artificial human antibody CDR-H3 region
gcgagacaacggatctattgtagtggtggtagctgctactcaaactggttcgacccc

SEQ ID NO: 6077 - DNA, 63 bp, Artificial Sequence
  Synthetic polynucleotide encoding artificial human antibody CDR-H3 region
gcgaaactaatgaatttggggacaattcaccccgacggctattatttctacgctctggacgtc

SEQ ID NO: 6078 - DNA, 54 bp, Artificial Sequence
  Synthetic polynucleotide encoding artificial human antibody CDR-H3 region
gccaaaacgaccgccatcttccacatatcagtagctggcagggcccttgactat

SEQ ID NO: 6079 - DNA, 33 bp, Artificial Sequence
  Synthetic polynucleotide encoding artificial human antibody CDR-H3 region
gtgagatcgggtgattattataacgacgccttg

SEQ ID NO: 6080 - DNA, 30 bp, Artificial Sequence
  Synthetic polynucleotide encoding artificial human antibody CDR-H3 region
gcgcgagatggggggtatagtgcagactac

SEQ ID NO: 6081 - DNA, 63 bp, Artificial Sequence
  Synthetic polynucleotide encoding artificial human antibody CDR-H3 region
gcgagacagggggtgtattttgactggttattatcgcctattcccggccccggtatggacgtc

SEQ ID NO: 6082 - DNA, 39 bp, Artificial Sequence
  Synthetic polynucleotide encoding artificial human antibody CDR-H3 region
gctcgcacgggtagtgggaactacattccccttgactac

SEQ ID NO: 6083 - DNA, 45 bp, Artificial Sequence
  Synthetic polynucleotide encoding artificial human antibody CDR-H3 region
gcgagaaacggcggttcggggagttatcttaattggttcgacccc

SEQ ID NO: 6084 - DNA, 63 bp, Artificial Sequence; identical to SEQ ID NO: 6070
  Synthetic polynucleotide encoding artificial human antibody CDR-H3 region

SEQ ID NO: 6085 - DNA, 60 bp, Artificial Sequence
  Synthetic polynucleotide encoding artificial human antibody CDR-H3 region
gcgagagagaggagaatcacttacgatttttggagtacttatcccgatgcttttgatatc

SEQ ID NO: 6086 - DNA, 36 bp, Artificial Sequence
  Synthetic polynucleotide encoding artificial human antibody CDR-H3 region
gcgagaaacagtggcttcggagacggtctagacgtc

SEQ ID NO: 6087 - DNA, 27 bp, Artificial Sequence
  Synthetic polynucleotide encoding artificial human antibody CDR-H3 region
gcgagagaaactggggcgtttgactac

SEQ ID NO: 6088 - DNA, 51 bp, Artificial Sequence
  Synthetic polynucleotide encoding artificial human antibody CDR-H3 region
gccagagccctttcgcattactatggtagaggtggttatttatgtgactac

SEQ ID NO: 6089 - DNA, 24 bp, Artificial Sequence
  Synthetic polynucleotide encoding artificial human antibody CDR-H3 region
accggtaactggaactgtgactac

SEQ ID NO: 6090 - DNA, 66 bp, Artificial Sequence
  Synthetic polynucleotide encoding artificial human antibody CDR-H3 region
gcgagaccggtggggtattactatggttcggggagttacgttcggcccagaacgagtatggacgtc

SEQ ID NO: 6091 - DNA, 69 bp, Artificial Sequence
  Synthetic polynucleotide encoding artificial human antibody CDR-H3 region
gcgagaggcgccgggggagcactggctggggttctcgtcaccgtatactactactacggtgtggacgtc

SEQ ID NO: 6092 - DNA, 69 bp, Artificial Sequence
  Synthetic polynucleotide encoding artificial human antibody CDR-H3 region
gcgcgggagtcgggggagtcttatgaaagtagacaattaacgttcaccgagcctggtgctttcgacatc

SEQ ID NO: 6093 - DNA, 42 bp, Artificial Sequence
  Synthetic polynucleotide encoding artificial human antibody CDR-H3 region
gcaacagacggcatatatagcaaccctggatggttcgacccc

SEQ ID NO: 6094 - DNA, 51 bp, Artificial Sequence
  Synthetic polynucleotide encoding artificial human antibody CDR-H3 region
gcgagagccccgggggtaccttttccacctgccatagcagcctttgacttc

SEQ ID NO: 6095 - DNA, 27 bp, Artificial Sequence
  Synthetic polynucleotide encoding artificial human antibody CDR-H3 region
gtggcatggggtggctccgatgcctac

SEQ ID NO: 6096 - DNA, 48 bp, Artificial Sequence
  Synthetic polynucleotide encoding artificial human antibody CDR-H3 region
gcgaaagcggcgattgtagtggtggtagctgctactgagcttgactac

SEQ ID NO: 6097 - DNA, 48 bp, Artificial Sequence
  Synthetic polynucleotide encoding artificial human antibody CDR-H3 region
gcgagagtcggggacgtggctcgaacggttaacaactggttggacccc

SEQ ID NO: 6098 - DNA, 39 bp, Artificial Sequence
  Synthetic polynucleotide encoding artificial human antibody CDR-H3 region
gcgagagatggggttctcttcggggaccttggtgactac

SEQ ID NO: 6099 - DNA, 42 bp, Artificial Sequence
  Synthetic polynucleotide encoding artificial human antibody CDR-H3 region
gcgggaagtactaaaagtgactggtcttggcacttcgatctc

SEQ ID NO: 6100 - DNA, 42 bp, Artificial Sequence
  Synthetic polynucleotide encoding artificial human antibody CDR-H3 region
gcgaggggggggcacttcggtggtactgagggctttgactat

SEQ ID NO: 6101 - DNA, 54 bp, Artificial Sequence
  Synthetic polynucleotide encoding artificial human antibody CDR-H3 region
gcgagaggggggccgcagtaccaggtgcgtcttcgcccgattttctttggcctt

SEQ ID NO: 6102 - DNA, 45 bp, Artificial Sequence
  Synthetic polynucleotide encoding artificial human antibody CDR-H3 region
gcgagcagactcggagattgtagaggtaccagctgccccatctac

SEQ ID NO: 6103 - DNA, 42 bp, Artificial Sequence
  Synthetic polynucleotide encoding artificial human antibody CDR-H3 region
gcacacagtaaatattattatgattggtcatggttcgacccc

SEQ ID NO: 6104 - DNA, 60 bp, Artificial Sequence
  Synthetic polynucleotide encoding artificial human antibody CDR-H3 region
gcgagaaatgaagaccgcgtcaccatactcgtcttatctcgtcactacggtatggacgtc

SEQ ID NO: 6105 - DNA, 39 bp, Artificial Sequence
  Synthetic polynucleotide encoding artificial human antibody CDR-H3 region
gcgaaagagtttgactactactactacggtatggacgtc

SEQ ID NO: 6106 - DNA, 57 bp, Artificial Sequence
  Synthetic polynucleotide encoding artificial human antibody CDR-H3 region
gcgaggagcagccccagagaatatagttctggtttggaggttgcctggttcgactcc

SEQ ID NO: 6107 - DNA, 45 bp, Artificial Sequence
  Synthetic polynucleotide encoding artificial human antibody CDR-H3 region
gcgagacggttcggtgactatcagtacgggtactactttgactac

SEQ ID NO: 6108 - DNA, 66 bp, Artificial Sequence
  Synthetic polynucleotide encoding artificial human antibody CDR-H3 region
gcgagacgccccttacagggtatttccctttttggagtggttacctataacaactggttcgacccc

SEQ ID NO: 6109 - DNA, 39 bp, Artificial Sequence
  Synthetic polynucleotide encoding artificial human antibody CDR-H3 region
gcgagacgtatagcagcagctggcacagctgttggatac

SEQ ID NO: 6110 - DNA, 30 bp, Artificial Sequence
  Synthetic polynucleotide encoding artificial human antibody CDR-H3 region
gccgtgggggagtgggagctacttgactac

SEQ ID NO: 6111 - DNA, 33 bp, Artificial Sequence
  Synthetic polynucleotide encoding artificial human antibody CDR-H3 region
gcgagagattatgatagcagctcgcttgactac

SEQ ID NO: 6112 - DNA, 54 bp, Artificial Sequence
  Synthetic polynucleotide encoding artificial human antibody CDR-H3 region
gcgaaagaaggcgggggatacagctatggttcggacggcgaaacgggggccgtc

SEQ ID NO: 6113 - DNA, 60 bp, Artificial Sequence
  Synthetic polynucleotide encoding artificial human antibody CDR-H3 region
gcgagagagggggatgacggtgacttcgagaggggattcttctactacgcaatggacgtc

SEQ ID NO: 6114 - DNA, 63 bp, Artificial Sequence
  Synthetic polynucleotide encoding artificial human antibody CDR-H3 region
gcgagaaggtcggggcagcagctggtatctaaagggagctactactactacggtatggacgtc

SEQ ID NO: 6115 - DNA, 57 bp, Artificial Sequence
  Synthetic polynucleotide encoding artificial human antibody CDR-H3 region
gcgagagagaattgtgtcaaaccaagtagggactaccactactacggaatggacgtc

SEQ ID NO: 6116 - DNA, 39 bp, Artificial Sequence
  Synthetic polynucleotide encoding artificial human antibody CDR-H3 region
gcgagaggggcatctgtcggtgacttttattttgattat

SEQ ID NO: 6117 - DNA, 66 bp, Artificial Sequence
  Synthetic polynucleotide encoding artificial human antibody CDR-H3 region
gcgaaagatcatcaatatctttatagcgccacgtggtataggggttctgctctgggctttgactcc

SEQ ID NO: 6118 - DNA, 33 bp, Artificial Sequence
  Synthetic polynucleotide encoding artificial human antibody CDR-H3 region
gcgagagaccccgccttcggggcgcttgacttc

SEQ ID NO: 6119 - DNA, 39 bp, Artificial Sequence
  Synthetic polynucleotide encoding artificial human antibody CDR-H3 region
gcgagagctttgatcggggagcgtgtggcgttcgccccc

SEQ ID NO: 6120 - DNA, 33 bp, Artificial Sequence
  Synthetic polynucleotide encoding artificial human antibody CDR-H3 region
gtgagagacggggggaggggcctctttgactgc

SEQ ID NO: 6121 - DNA, 51 bp, Artificial Sequence
  Synthetic polynucleotide encoding artificial human antibody CDR-H3 region
gcgaaagatgtgaacggtctaagagatggcaaccaatatgccgcggaccac

SEQ ID NO: 6122 - DNA, 51 bp, Artificial Sequence
  Synthetic polynucleotide encoding artificial human antibody CDR-H3 region
gcgagaggctctaattactacgatactagtggggaggactacctcgacccc

SEQ ID NO: 6123 - DNA, 30 bp, Artificial Sequence
  Synthetic polynucleotide encoding artificial human antibody CDR-H3 region
gcgagacaccccaatacagctatcgacttc

SEQ ID NO: 6124 - DNA, 36 bp, Artificial Sequence
  Synthetic polynucleotide encoding artificial human antibody CDR-H3 region
gcgcgagtggttcctgtggggtggtactgcgatctc

SEQ ID NO: 6125 - DNA, 39 bp, Artificial Sequence
  Synthetic polynucleotide encoding artificial human antibody CDR-H3 region
gcaaaaactgggctgcctgggcccctcgcttttgatatc

SEQ ID NO: 6126 - DNA, 33 bp, Artificial Sequence
  Synthetic polynucleotide encoding artificial human antibody CDR-H3 region
gcgagagactattattatgatagtagtggctac

SEQ ID NO: 6127 - DNA, 45 bp, Artificial Sequence
  Synthetic polynucleotide encoding artificial human antibody CDR-H3 region
gcgaaagggagcagtggctggtaccagagttactactttgactac

SEQ ID NO: 6128 - DNA, 48 bp, Artificial Sequence
  Synthetic polynucleotide encoding artificial human antibody CDR-H3 region
gcgagaggcgccccaagagtgtggcagtggctggactactttgactac

SEQ ID NO: 6129 - DNA, 42 bp, Artificial Sequence
  Synthetic polynucleotide encoding artificial human antibody CDR-H3 region
gcgaaaacgccctccggtaactacgaggcatactaccagaac

SEQ ID NO: 6130 - DNA, 30 bp, Artificial Sequence
  Synthetic polynucleotide encoding artificial human antibody CDR-H3 region
gcaagtctgcagggtagtgcgccccgcgcc

SEQ ID NO: 6131 - DNA, 57 bp, Artificial Sequence
  Synthetic polynucleotide encoding artificial human antibody CDR-H3 region
gcgcgacggtcgtcaatcggactcaagacaaatggacgtctgcgcgtctttgacaca

SEQ ID NO: 6132 - DNA, 30 bp, Artificial Sequence
  Synthetic polynucleotide encoding artificial human antibody CDR-H3 region
gcgagagttagttttggcgactacgcggtg

SEQ ID NO: 6133 - DNA, 45 bp, Artificial Sequence
  Synthetic polynucleotide encoding artificial human antibody CDR-H3 region
gtgaaggatgacgatgccagtactgattggtatgcggctgactcc

SEQ ID NO: 6134 - DNA, 36 bp, Artificial Sequence
  Synthetic polynucleotide encoding artificial human antibody CDR-H3 region
gcgagaggggcatcacctcgctccagaactgactac

SEQ ID NO: 6135 - DNA, 45 bp, Artificial Sequence
  Synthetic polynucleotide encoding artificial human antibody CDR-H3 region
gcgaaagggtccagtggctggtatatgagttactattttgactac

SEQ ID NO: 6136 - DNA, 54 bp, Artificial Sequence
  Synthetic polynucleotide encoding artificial human antibody CDR-H3 region
gcgagaggaggcgctccttatagtgttgggtgggacgacaactggttcgacccc

SEQ ID NO: 6137 - DNA, 45 bp, Artificial Sequence
  Synthetic polynucleotide encoding artificial human antibody CDR-H3 region
gcgaaagggagcagtggctggtaccgaaattactactttgactat

SEQ ID NO: 6138 - DNA, 45 bp, Artificial Sequence
  Synthetic polynucleotide encoding artificial human antibody CDR-H3 region
gcgagacggggtggtggtggctacccctactactacttcgatctc

SEQ ID NO: 6139 - DNA, 45 bp, Artificial Sequence
  Synthetic polynucleotide encoding artificial human antibody CDR-H3 region
gcaagagggagcagtggctggtactcggcatactactttgactac

SEQ ID NO: 6140 - DNA, 36 bp, Artificial Sequence
  Synthetic polynucleotide encoding artificial human antibody CDR-H3 region
gtgaggggggcctccgggattggggtgactcgctac

SEQ ID NO: 6141 - DNA, 42 bp, Artificial Sequence
  Synthetic polynucleotide encoding artificial human antibody CDR-H3 region
gcgaaatccccagtgagtggttattacaactactttgactac

SEQ ID NO: 6142 - DNA, 69 bp, Artificial Sequence
  Synthetic polynucleotide encoding artificial human antibody CDR-H3 region
gcgagatgggagagggagtatcgtgtcttcgagtataacaaaacgccaattggttggtacttcgatctc

SEQ ID NO: 6143 - DNA, 87 bp, Artificial Sequence
  Synthetic polynucleotide encoding artificial human antibody CDR-H3 region
gcgagaggtggaactccaacgagctactacgatattttgactggtcattatcccgctccacccgacttctactacggtatggacgtc

SEQ ID NO: 6144 - DNA, 48 bp, Artificial Sequence
  Synthetic polynucleotide encoding artificial human antibody CDR-H3 region
gcgagactatcgctagattactatgatagtagtggttaccatgactac

SEQ ID NO: 6145 - DNA, 39 bp, Artificial Sequence
  Synthetic polynucleotide encoding artificial human antibody CDR-H3 region
gcgaaggatcaggccttatggttcgatacttttgaccac

SEQ ID NO: 6146 - DNA, 30 bp, Artificial Sequence
  Synthetic polynucleotide encoding artificial human antibody CDR-H3 region
acgagagggggtggctggactactgagtac

SEQ ID NO: 6147 - DNA, 39 bp, Artificial Sequence
  Synthetic polynucleotide encoding artificial human antibody CDR-H3 region
gcgaaagcgacaaatgtgtatggcttctattttgacttc

SEQ ID NO: 6148 - DNA, 30 bp, Artificial Sequence
  Synthetic polynucleotide encoding artificial human antibody CDR-H3 region
gtgggagatcgggcctatgcctttgatatc

SEQ ID NO: 6149 - DNA, 39 bp, Artificial Sequence
  Synthetic polynucleotide encoding artificial human antibody CDR-H3 region
tcgagagtcgaagcggcgccaaacaattggttcgacccc

SEQ ID NO: 6150 - DNA, 45 bp, Artificial Sequence
  Synthetic polynucleotide encoding artificial human antibody CDR-H3 region
gcgaaaggcagcagtggctggtaccagagtcatgtttttgatatg

SEQ ID NO: 6151 - DNA, 33 bp, Artificial Sequence
  Synthetic polynucleotide encoding artificial human antibody CDR-H3 region
actagagggctggctgactggtacttcgatctc

SEQ ID NO: 6152 - DNA, 48 bp, Artificial Sequence
  Synthetic polynucleotide encoding artificial human antibody CDR-H3 region
gcgagggtcgtcaacgccaactatccaccgaataactacttcgacgcc

SEQ ID NO: 6153 - DNA, 36 bp, Artificial Sequence
  Synthetic polynucleotide encoding artificial human antibody CDR-H3 region
gtccgagcgaggactgggacaagtgcttttgatatc

SEQ ID NO: 6154 - DNA, 30 bp, Artificial Sequence
  Synthetic polynucleotide encoding artificial human antibody CDR-H3 region
gtgagagattatgcctacgcttttgatgtc

SEQ ID NO: 6155 - DNA, 30 bp, Artificial Sequence
  Synthetic polynucleotide encoding artificial human antibody CDR-H3 region
atgacacaccaggggtcaccccacccagag

SEQ ID NO: 6156 - DNA, 36 bp, Artificial Sequence
  Synthetic polynucleotide encoding artificial human antibody CDR-H3 region
gcgaggattcccgggtatagcagcactatggacgtc

SEQ ID NO: 6157 - DNA, 54 bp, Artificial Sequence
  Synthetic polynucleotide encoding artificial human antibody CDR-H3 region
gcgagagatcgggggtattacagtgatggtggttggtatacccttttggactac

SEQ ID NO: 6158 - DNA, 51 bp, Artificial Sequence
  Synthetic polynucleotide encoding artificial human antibody CDR-H3 region
gtgagacgaaactacgatgttttcactggatcttatctcgggttcgacccc

SEQ ID NO: 6159 - DNA, 39 bp, Artificial Sequence
  Synthetic polynucleotide encoding artificial human antibody CDR-H3 region
gtgagagaatttcggagtgggacgtattatagtgactat

SEQ ID NO: 6160 - DNA, 36 bp, Artificial Sequence
  Synthetic polynucleotide encoding artificial human antibody CDR-H3 region
gcgagaggggcgtcacctcgctccagaactgactac

SEQ ID NO: 6161 - DNA, 51 bp, Artificial Sequence
  Synthetic polynucleotide encoding artificial human antibody CDR-H3 region
gcgagagaggggatctggtataacagtggctgggacgagtacttccagctc

SEQ ID NO: 6162 - DNA, 18 bp, Artificial Sequence
  Synthetic polynucleotide encoding artificial human antibody CDR-H3 region
ctgagaccctatgactac

SEQ ID NO: 6163 - DNA, 39 bp, Artificial Sequence
  Synthetic polynucleotide encoding artificial human antibody CDR-H3 region
gcgagaggggtggttcggaataagaactggttcgacccc

SEQ ID NO: 6164 - DNA, 42 bp, Artificial Sequence
  Synthetic polynucleotide encoding artificial human antibody CDR-H3 region
gcgaggactgacggggggaattatatggcctactttgactac

SEQ ID NO: 6165 - DNA, 33 bp, Artificial Sequence
  Synthetic polynucleotide encoding artificial human antibody CDR-H3 region
gcgaggtatctcagcaggcgtgaatttgactgc

SEQ ID NO: 6166 - DNA, 48 bp, Artificial Sequence
  Synthetic polynucleotide encoding artificial human antibody CDR-H3 region
gcgagacacttaactggaagcaagtcgactcacgactggttcgacccc

SEQ ID NO: 6167 - DNA, 42 bp, Artificial Sequence
  Synthetic polynucleotide encoding artificial human antibody CDR-H3 region
accagagaatctatagccccctactccttctacatggacgtc

SEQ ID NO: 6168 - DNA, 39 bp, Artificial Sequence
  Synthetic polynucleotide encoding artificial human antibody CDR-H3 region
accacgcgaagtagcagttggtccgcgtcgtttgatcac

SEQ ID NO: 6169 - DNA, 36 bp, Artificial Sequence
  Synthetic polynucleotide encoding artificial human antibody CDR-H3 region
gcgagaggccctacggtgacagggtggttcgacccc

SEQ ID NO: 6170 - DNA, 75 bp, Artificial Sequence
  Synthetic polynucleotide encoding artificial human antibody CDR-H3 region
gcgagaggagccctagtgggaactactttctcttggggacctaaaacccccggcaggaccagctggttcgacccc

SEQ ID NO: 6171 - DNA, 48 bp, Artificial Sequence
  Synthetic polynucleotide encoding artificial human antibody CDR-H3 region
gcgcgagtcccccctacgaccagtggctgggatcactactttgaccac

SEQ ID NO: 6172 - DNA, 39 bp, Artificial Sequence
  Synthetic polynucleotide encoding artificial human antibody CDR-H3 region
gcacgcaaaacgacctccatggattattataccgaagtc

SEQ ID NO: 6173 - DNA, 63 bp, Artificial Sequence
  Synthetic polynucleotide encoding artificial human antibody CDR-H3 region
gcgtccaaatattacgatattttgactggtcatcaagtggtctactactacggtatggacgtc

SEQ ID NO: 6174 - DNA, 42 bp, Artificial Sequence
  Synthetic polynucleotide encoding artificial human antibody CDR-H3 region
gcgagagaggtcgagggtagtagtgcggactggttcgacccc

SEQ ID NO: 6175 - DNA, 51 bp, Artificial Sequence
  Synthetic polynucleotide encoding artificial human antibody CDR-H3 region
gcaaaagatctggacggtagcgccacctggaacttggatgcttttgatatc

SEQ ID NO: 6176 - DNA, 15 bp, Artificial Sequence
  Synthetic polynucleotide encoding artificial human antibody CDR-H3 region
actagatcggactac

SEQ ID NO: 6177 - DNA, 48 bp, Artificial Sequence
  Synthetic polynucleotide encoding artificial human antibody CDR-H3 region
gcgagagattattacgccaacggtgaatacgagacgatctttgagtat

SEQ ID NO: 6178 - DNA, 48 bp, Artificial Sequence
  Synthetic polynucleotide encoding artificial human antibody CDR-H3 region
gcgagagattattacgccaacggtgactacgagacgatctttgagtac

SEQ ID NO: 6179 - DNA, 48 bp, Artificial Sequence
  Synthetic polynucleotide encoding artificial human antibody CDR-H3 region
gcgagagcgaaatttgatgttgatggttttacccctttctttgactcc

SEQ ID NO: 6180 - DNA, 36 bp, Artificial Sequence
  Synthetic polynucleotide encoding artificial human antibody CDR-H3 region
gcgagagccagcatttggggaaattactttgactac

SEQ ID NO: 6181 - DNA, 48 bp, Artificial Sequence
  Synthetic polynucleotide encoding artificial human antibody CDR-H3 region
gcgaaacagggttacagcggtgcctggcccgaagttgcttttgatctc

SEQ ID NO: 6182 - DNA, 39 bp, Artificial Sequence
  Synthetic polynucleotide encoding artificial human antibody CDR-H3 region
gcgactagtggcagctggttcaggcagccttttgactac

SEQ ID NO: 6183 - DNA, 81 bp, Artificial Sequence
  Synthetic polynucleotide encoding artificial human antibody CDR-H3 region
gcgagcgtcaaggggagactggagcacccaagaggattttgtagtggtggtagctgctactcggattggaggttcgacccc

SEQ ID NO: 6184 - DNA, 45 bp, Artificial Sequence
  Synthetic polynucleotide encoding artificial human antibody CDR-H3 region
gcgagagatgaatcattgactggttttcgggggacccttgattcc

SEQ ID NO: 6185 - DNA, 57 bp, Artificial Sequence
  Synthetic polynucleotide encoding artificial human antibody CDR-H3 region
gcgagagtggatgccacggtgcattgtgccggtgggaggtgcgcctattttgactac

SEQ ID NO: 6186 - DNA, 48 bp, Artificial Sequence
  Synthetic polynucleotide encoding artificial human antibody CDR-H3 region
gcgagggattattacgtctccggtgactacgaaacgatctttcaacac

SEQ ID NO: 6187 - DNA, 51 bp, Artificial Sequence
  Synthetic polynucleotide encoding artificial human antibody CDR-H3 region
gcgaaagtcccaagcagcagctggtactccgggtctcgctggttcgacccc

SEQ ID NO: 6188 - DNA, 42 bp, Artificial Sequence
  Synthetic polynucleotide encoding artificial human antibody CDR-H3 region
gtgaaagaccgcttttattatggttcggaacaaacggactcc

SEQ ID NO: 6189 - DNA, 75 bp, Artificial Sequence
  Synthetic polynucleotide encoding artificial human antibody CDR-H3 region
gcgagagatcgccccccctccactttttactctactataagtggttcttactacgagcctgatgcttttgatatc

SEQ ID NO: 6190 - DNA, 54 bp, Artificial Sequence
  Synthetic polynucleotide encoding artificial human antibody CDR-H3 region
gcgagagaaggctcggatatagtggtgcctggtaccataggatggttcgacccc

SEQ ID NO: 6191 - DNA, 36 bp, Artificial Sequence
  Synthetic polynucleotide encoding artificial human antibody CDR-H3 region
gcgaaagcaggagtggggggggggtggttcgacccc

SEQ ID NO: 6192 - DNA, 33 bp, Artificial Sequence
  Synthetic polynucleotide encoding artificial human antibody CDR-H3 region
gcaagagatatcggaggcggtgcttttgatatc

SEQ ID NO: 6193 - DNA, 45 bp, Artificial Sequence
  Synthetic polynucleotide encoding artificial human antibody CDR-H3 region
gctagagccgccggagctggtaccgggtacaactggttcgacccc

SEQ ID NO: 6194 - DNA, 42 bp, Artificial Sequence
  Synthetic polynucleotide encoding artificial human antibody CDR-H3 region
gcgagggatgggacaacgggagtgttggctgcctttgacatc

SEQ ID NO: 6195 - DNA, 51 bp, Artificial Sequence
  Synthetic polynucleotide encoding artificial human antibody CDR-H3 region
gcgagagctcgggttactatgatagtgaggctcgtaaatgcttttgatatc

SEQ ID NO: 6196 - DNA, 72 bp, Artificial Sequence
  Synthetic polynucleotide encoding artificial human antibody CDR-H3 region
gcgagagatccccgcctgcggttcggggagttattccgagcccctttcaaatactactacggtatggacgtc

SEQ ID NO: 6197 - DNA, 57 bp, Artificial Sequence
  Synthetic polynucleotide encoding artificial human antibody CDR-H3 region
gcgagagattttgatgtctggaccgacgaagggcccgactactacggcatggacgtc

SEQ ID NO: 6198 - DNA, 48 bp, Artificial Sequence
  Synthetic polynucleotide encoding artificial human antibody CDR-H3 region
gcgagactgagacgacgggatatggttcggggagtgaactttgactac

SEQ ID NO: 6199 - DNA, 45 bp, Artificial Sequence
  Synthetic polynucleotide encoding artificial human antibody CDR-H3 region
gcggcaggaggcggtgggtacggtgactcctaccgtatggacgtc

SEQ ID NO: 6200 - DNA, 57 bp, Artificial Sequence
  Synthetic polynucleotide encoding artificial human antibody CDR-H3 region
gcaaaagtgcccactaacgattttttgattggttactcctctgatgcttttgacatc

SEQ ID NO: 6201 - DNA, 48 bp, Artificial Sequence
  Synthetic polynucleotide encoding artificial human antibody CDR-H3 region
gcgaaagatggggattttggtgggagttactcgttctactttgacaac

SEQ ID NO: 6202 - DNA, 63 bp, Artificial Sequence
  Synthetic polynucleotide encoding artificial human antibody CDR-H3 region
gcgcgaagttcgtatgggctcagggagtttgggggagttctccctttgggggactttgactac

SEQ ID NO: 6203 - DNA, 57 bp, Artificial Sequence
  Synthetic polynucleotide encoding artificial human antibody CDR-H3 region
gcgagaatctcgcgggttttttacgatctttggagtgatggttatgtactggacgtc

SEQ ID NO: 6204 - DNA, 78 bp, Artificial Sequence
  Synthetic polynucleotide encoding artificial human antibody CDR-H3 region
gcaagaggatcgatggttcggggagttatttatgcgcgggggccctccgaccccccggactactacggtatggacgtc

SEQ ID NO: 6205 - DNA, 48 bp, Artificial Sequence
  Synthetic polynucleotide encoding artificial human antibody CDR-H3 region
gcgagagagtatgtagtagtatcagctgctatgggtgggttcgacccc

SEQ ID NO: 6206 - DNA, 60 bp, Artificial Sequence
  Synthetic polynucleotide encoding artificial human antibody CDR-H3 region
gtcgcggcgacgtcaccgactgattttttagcagcacgtggtcgaactgcttttgatgtc

SEQ ID NO: 6207 - DNA, 54 bp, Artificial Sequence
  Synthetic polynucleotide encoding artificial human antibody CDR-H3 region
gcgagacgcagggtgggatattgtaagggaggcagctgctactcgtgggtccac

SEQ ID NO: 6208 - DNA, 54 bp, Artificial Sequence
  Synthetic polynucleotide encoding artificial human antibody CDR-H3 region
gcgagagccccccgtacggtggtaactggggactactactacggtatggacgtc

SEQ ID NO: 6209 - DNA, 36 bp, Artificial Sequence
  Synthetic polynucleotide encoding artificial human antibody CDR-H3 region
accacagacctacatgactacggtgactctgactac

SEQ ID NO: 6210 - DNA, 42 bp, Artificial Sequence
  Synthetic polynucleotide encoding artificial human antibody CDR-H3 region
acgaaactcccttttgactacggggcttactggttcgacccc

SEQ ID NO: 6211 - DNA, 57 bp, Artificial Sequence
  Synthetic polynucleotide encoding artificial human antibody CDR-H3 region
gcgagaatttttggttcggggtacctcggtcttgtgtcctatcattggttcgacccc

SEQ ID NO: 6212 - DNA, 33 bp, Artificial Sequence
  Synthetic polynucleotide encoding artificial human antibody CDR-H3 region
gcgagaggggactggttccgctactttgactac

SEQ ID NO: 6213 - DNA, 33 bp, Artificial Sequence
  Synthetic polynucleotide encoding artificial human antibody CDR-H3 region
accacagatccgggtatagaacttcgggggcat

SEQ ID NO: 6214 - DNA, 60 bp, Artificial Sequence
  Synthetic polynucleotide encoding artificial human antibody CDR-H3 region
gcgagagtctcggattggagttgtactggtggaacctgctacggaaactggttcgacccc

SEQ ID NO: 6215 - DNA, 63 bp, Artificial Sequence
  Synthetic polynucleotide encoding artificial human antibody CDR-H3 region
gcgagaccgataagaggtggctacaattacgggactcgggacttctactatggtatggacctc

SEQ ID NO: 6216 - DNA, 78 bp, Artificial Sequence
  Synthetic polynucleotide encoding artificial human antibody CDR-H3 region
gcgaaagatcgtgggaaaaactacgatttttggagtgcttattatacgggccgagattactactacggtatggacgtc

SEQ ID NO: 6217 - DNA, 51 bp, Artificial Sequence
  Synthetic polynucleotide encoding artificial human antibody CDR-H3 region
accaggccccgggcggagggatatgatagtggttatttcgactttgaatat

SEQ ID NO: 6218 - DNA, 48 bp, Artificial Sequence
  Synthetic polynucleotide encoding artificial human antibody CDR-H3 region
gcgagagattactacgccaaaggtgactacgagacgatctttgagtat

SEQ ID NO: 6219 - DNA, 24 bp, Artificial Sequence
  Synthetic polynucleotide encoding artificial human antibody CDR-H3 region
gcgagatcaccctggttcgacccc

SEQ ID NO: 6220 - DNA, 39 bp, Artificial Sequence
  Synthetic polynucleotide encoding artificial human antibody CDR-H3 region
gcacgactggcagctcgtccttacgatgcttttgatatc

SEQ ID NO: 6221 - DNA, 48 bp, Artificial Sequence
  Synthetic polynucleotide encoding artificial human antibody CDR-H3 region
gcgagagattcggcttcgggcacctattatatgactttcttcgactac

SEQ ID NO: 6222 - DNA, 33 bp, Artificial Sequence
  Synthetic polynucleotide encoding artificial human antibody CDR-H3 region
gcgagagccctgggcacagtttcccggggggac

SEQ ID NO: 6223 - DNA, 30 bp, Artificial Sequence
  Synthetic polynucleotide encoding artificial human antibody CDR-H3 region
gcgagacatcgggacggtgacgttgactac

SEQ ID NO: 6224 - DNA, 48 bp, Artificial Sequence
  Synthetic polynucleotide encoding artificial human antibody CDR-H3 region
gcgaaagacccttattacgatttttggagtggttattattatgactac

SEQ ID NO: 6225 - DNA, 57 bp, Artificial Sequence
  Synthetic polynucleotide encoding artificial human antibody CDR-H3 region
gcgagagatcaatggattactatgatagtagtggccccatatgatgcttttgatatc

SEQ ID NO: 6226 - DNA, 63 bp, Artificial Sequence
  Synthetic polynucleotide encoding artificial human antibody CDR-H3 region
gcgagaggtggggcgcagtgggagctactggggcgcccttactactactacggtatggacgtc

SEQ ID NO: 6227 - DNA, 54 bp, Artificial Sequence
  Synthetic polynucleotide encoding artificial human antibody CDR-H3 region
gtcaaagagacccccatgaagatttttggagtcggcttcagttgcttcgacccc

SEQ ID NO: 6228 - DNA, 48 bp, Artificial Sequence
  Synthetic polynucleotide encoding artificial human antibody CDR-H3 region
gcgcgctcggcgcgaattccaatcactgccactgatgcctttgatatc

SEQ ID NO: 6229 - DNA, 42 bp, Artificial Sequence
  Synthetic polynucleotide encoding artificial human antibody CDR-H3 region
gcaaaagacagcagtgcttacacccatacctggatcgactcc

SEQ ID NO: 6230 - DNA, 72 bp, Artificial Sequence
  Synthetic polynucleotide encoding artificial human antibody CDR-H3 region
gcgaaagatcagagctccggatacagctatggttcaggatggggctactactactactacggtatggacgtc

SEQ ID NO: 6231 - DNA, 42 bp, Artificial Sequence
  Synthetic polynucleotide encoding artificial human antibody CDR-H3 region
gcaaaaggttggggtaccctgatcaatcttcccattggcttc

SEQ ID NO: 6232 - DNA, 54 bp, Artificial Sequence
  Synthetic polynucleotide encoding artificial human antibody CDR-H3 region
gggagactcatcataagcagtggctggtaccaatactactacggtatggacgtc

SEQ ID NO: 6233 - DNA, 57 bp, Artificial Sequence
  Synthetic polynucleotide encoding artificial human antibody CDR-H3 region
gtgagagatttggggagctccagtcggggcctttactacttccacgggatggacgtt

SEQ ID NO: 6234 - DNA, 33 bp, Artificial Sequence
  Synthetic polynucleotide encoding artificial human antibody CDR-H3 region
gcgagctatgatagtagtgcttatttaggctac

SEQ ID NO: 6235 - DNA, 54 bp, Artificial Sequence
  Synthetic polynucleotide encoding artificial human antibody CDR-H3 region
gcaagaggcttatgtagtggtggtaggtgcgactactatttcggtatggacgtc

SEQ ID NO: 6236 - DNA, 33 bp, Artificial Sequence
  Synthetic polynucleotide encoding artificial human antibody CDR-H3 region
ataagaggggggtggggatcgcgctttgacttc

SEQ ID NO: 6237 - DNA, 51 bp, Artificial Sequence
  Synthetic polynucleotide encoding artificial human antibody CDR-H3 region
gcacggtcttcttacgatattttgactggttattctacagagtttgactac

SEQ ID NO: 6238 - DNA, 66 bp, Artificial Sequence
  Synthetic polynucleotide encoding artificial human antibody CDR-H3 region
gcgagagataaggcagtggctggtattctctcccgggcgccaaactactactacggtatggacgtc

SEQ ID NO: 6239 - DNA, 66 bp, Artificial Sequence
  Synthetic polynucleotide encoding artificial human antibody CDR-H3 region
gcgagaggggtagagtggatacagctatggtcccgcaatccaaaaaagtacaactggttcgacccc

SEQ ID NO: 6240 - DNA, 81 bp, Artificial Sequence
  Synthetic polynucleotide encoding artificial human antibody CDR-H3 region
gcgaaaggggatattgtagtagtaccagctgctataagctggtcacgttatgaacgagaagccctctactactttgactac

SEQ ID NO: 6241 - DNA, 30 bp, Artificial Sequence
  Synthetic polynucleotide encoding artificial human antibody CDR-H3 region
gcgagacggggtccggaggcttttgactat

SEQ ID NO: 6242 - DNA, 36 bp, Artificial Sequence; identical to SEQ ID NO: 6191
  Synthetic polynucleotide encoding artificial human antibody CDR-H3 region

SEQ ID NO: 6243 - DNA, 30 bp, Artificial Sequence
  Synthetic polynucleotide encoding artificial human antibody CDR-H3 region
gcgagacataagggggcctcctttgactcc

SEQ ID NO: 6244 - DNA, 66 bp, Artificial Sequence
  Synthetic polynucleotide encoding artificial human antibody CDR-H3 region
gcgagggaccgttccccgattgtagttgttccggctcttggacactggcactacggtatggacgtc

SEQ ID NO: 6245 - DNA, 57 bp, Artificial Sequence
  Synthetic polynucleotide encoding artificial human antibody CDR-H3 region
acgagagacttggagcccagtgtagaaggcgctgacttcgcccctacccatgactgc

SEQ ID NO: 6246 - DNA, 60 bp, Artificial Sequence
  Synthetic polynucleotide encoding artificial human antibody CDR-H3 region
gcgagaacggggtggagcacggatggttcggggagttatcggtatgatgcttttgatatc

SEQ ID NO: 6247 - DNA, 42 bp, Artificial Sequence
  Synthetic polynucleotide encoding artificial human antibody CDR-H3 region
gcaagagaaacaccgtttgggggagttatcgtcatagacaac

SEQ ID NO: 6248 - DNA, 48 bp, Artificial Sequence
  Synthetic polynucleotide encoding artificial human antibody CDR-H3 region
gcgagagattactctcttaatgtaggtggctacgattcccccaactac

SEQ ID NO: 6249 - DNA, 39 bp, Artificial Sequence
  Synthetic polynucleotide encoding artificial human antibody CDR-H3 region
gcgagagattatggtacggtgactacgtatcctgactac

SEQ ID NO: 6250 - DNA, 15 bp, Artificial Sequence
  Synthetic polynucleotide encoding artificial human antibody CDR-H3 region
actagacaagacgtc

SEQ ID NO: 6251 - DNA, 33 bp, Artificial Sequence
  Synthetic polynucleotide encoding artificial human antibody CDR-L3 region
gcagcatgggatgacagactgaatggcgtggta

SEQ ID NO: 6252 - DNA, 21 bp, Artificial Sequence
  Synthetic polynucleotide encoding artificial human antibody CDR-L3 region
cagcagtatggtagctcactt

SEQ ID NO: 6253 - DNA, 30 bp, Artificial Sequence
  Synthetic polynucleotide encoding artificial human antibody CDR-L3 region
caacagtataatagttattctccgtggacg

SEQ ID NO: 6254 - DNA, 27 bp, Artificial Sequence
  Synthetic polynucleotide encoding artificial human antibody CDR-L3 region
caacagtataaaaatcatccgatcacc

SEQ ID NO: 6255 - DNA, 30 bp, Artificial Sequence
  Synthetic polynucleotide encoding artificial human antibody CDR-L3 region
caacagtataatagttattctccctacact

SEQ ID NO: 6256 - DNA, 30 bp, Artificial Sequence; identical to SEQ ID NO: 6253
  Synthetic polynucleotide encoding artificial human antibody CDR-L3 region

SEQ ID NO: 6257 - DNA, 24 bp, Artificial Sequence
  Synthetic polynucleotide encoding artificial human antibody CDR-L3 region
caacagtataatagttattcgacg

SEQ ID NO: 6258 - DNA, 33 bp, Artificial Sequence; identical to SEQ ID NO: 6251
  Synthetic polynucleotide encoding artificial human antibody CDR-L3 region

SEQ ID NO: 6259 - DNA, 27 bp, Artificial Sequence
  Synthetic polynucleotide encoding artificial human antibody CDR-L3 region
cagcagcgtagcaactggcctctcact

SEQ ID NO: 6260 - DNA, 27 bp, Artificial Sequence
  Synthetic polynucleotide encoding artificial human antibody CDR-L3 region
cagcactatggtagctcacctcgcact

SEQ ID NO: 6261 - DNA, 30 bp, Artificial Sequence
  Synthetic polynucleotide encoding artificial human antibody CDR-L3 region
tgctcatatgcaggcagctacacttatgtc

SEQ ID NO: 6262 - DNA, 30 bp, Artificial Sequence; identical to SEQ ID NO: 6261
  Synthetic polynucleotide encoding artificial human antibody CDR-L3 region

SEQ ID NO: 6263 - DNA, 24 bp, Artificial Sequence
  Synthetic polynucleotide encoding artificial human antibody CDR-L3 region
atgcaaggtacacactggcgaact

SEQ ID NO: 6264 - DNA, 27 bp, Artificial Sequence
  Synthetic polynucleotide encoding artificial human antibody CDR-L3 region
atgcaagctctacaaatcgcgctcact

SEQ ID NO: 6265 - DNA, 27 bp, Artificial Sequence
  Synthetic polynucleotide encoding artificial human antibody CDR-L3 region
caacagagttacagtaccccgtacact

SEQ ID NO: 6266 - DNA, 27 bp, Artificial Sequence
  Synthetic polynucleotide encoding artificial human antibody CDR-L3 region
cagcagcatagtacctggcctctcacc

SEQ ID NO: 6267 - DNA, 30 bp, Artificial Sequence
  Synthetic polynucleotide encoding artificial human antibody CDR-L3 region
agctcatatgcaggcagcaacaatgtggta

SEQ ID NO: 6268 - DNA, 27 bp, Artificial Sequence
  Synthetic polynucleotide encoding artificial human antibody CDR-L3 region
gaggcctgggacagtaacactgtggtg

SEQ ID NO: 6269 - DNA, 30 bp, Artificial Sequence
  Synthetic polynucleotide encoding artificial human antibody CDR-L3 region
tgctcatatgcaggtagtaacacttgggtg

SEQ ID NO: 6270 - DNA, 33 bp, Artificial Sequence
  Synthetic polynucleotide encoding artificial human antibody CDR-L3 region
ctggtgtgggatagcagtagtgatcattgggtg

SEQ ID NO: 6271 - DNA, 30 bp, Artificial Sequence
  Synthetic polynucleotide encoding artificial human antibody CDR-L3 region
agctcatatacaagcagcagcacttatgtc

SEQ ID NO: 6272 - DNA, 30 bp, Artificial Sequence
  Synthetic polynucleotide encoding artificial human antibody CDR-L3 region
acctcacatacaatctacggcacccgggtc

SEQ ID NO: 6273 - DNA, 30 bp, Artificial Sequence
  Synthetic polynucleotide encoding artificial human antibody CDR-L3 region
cagcagtatggtagctcaccgaggtacact

SEQ ID NO: 6274 - DNA, 36 bp, Artificial Sequence
  Synthetic polynucleotide encoding artificial human antibody CDR-L3 region
agctcatatacaagcagcagcactttcggctgggtg

SEQ ID NO: 6275 - DNA, 27 bp, Artificial Sequence
  Synthetic polynucleotide encoding artificial human antibody CDR-L3 region
tgctcatatgcaggtagtagcaggata

SEQ ID NO: 6276 - DNA, 24 bp, Artificial Sequence
  Synthetic polynucleotide encoding artificial human antibody CDR-L3 region
cagcagtatggtagcccgtggacg

SEQ ID NO: 6277 - DNA, 27 bp, Artificial Sequence
  Synthetic polynucleotide encoding artificial human antibody CDR-L3 region
caacagagttacgttactccctacact

SEQ ID NO: 6278 - DNA, 39 bp, Artificial Sequence
  Synthetic polynucleotide encoding artificial human antibody CDR-L3 region
ggggcagaccatggcagtgggagcaacttcctcgtggta

SEQ ID NO: 6279 - DNA, 27 bp, Artificial Sequence
  Synthetic polynucleotide encoding artificial human antibody CDR-L3 region
caacagtattatagttacccgctcact

SEQ ID NO: 6280 - DNA, 27 bp, Artificial Sequence
  Synthetic polynucleotide encoding artificial human antibody CDR-L3 region
cagacctggggcactggcatgcagatg

SEQ ID NO: 6281 - DNA, 30 bp, Artificial Sequence
  Synthetic polynucleotide encoding artificial human antibody CDR-L3 region
cagcagtatggtagctcacctccgctcact

SEQ ID NO: 6282 - DNA, 27 bp, Artificial Sequence
  Synthetic polynucleotide encoding artificial human antibody CDR-L3 region
ctacagaataatcgttacccccgaacg

SEQ ID NO: 6283 - DNA, 30 bp, Artificial Sequence
  Synthetic polynucleotide encoding artificial human antibody CDR-L3 region
cagcagcgtagcaactggcctccgtggacg

SEQ ID NO: 6284 - DNA, 33 bp, Artificial Sequence
  Synthetic polynucleotide encoding artificial human antibody CDR-L3 region
cagtcagcagacagcagtggtactttttacgtc

SEQ ID NO: 6285 - DNA, 27 bp, Artificial Sequence
  Synthetic polynucleotide encoding artificial human antibody CDR-L3 region
caaaagtataacagtgccccatggacg

SEQ ID NO: 6286 - DNA, 30 bp, Artificial Sequence
  Synthetic polynucleotide encoding artificial human antibody CDR-L3 region
caacagttttataatttccccttcttcact

SEQ ID NO: 6287 - DNA, 30 bp, Artificial Sequence
  Synthetic polynucleotide encoding artificial human antibody CDR-L3 region
cagcagtataataactggcccccgtacact

SEQ ID NO: 6288 - DNA, 27 bp, Artificial Sequence
  Synthetic polynucleotide encoding artificial human antibody CDR-L3 region
ctacagcataatagttacccgctcact

SEQ ID NO: 6289 - DNA, 33 bp, Artificial Sequence
  Synthetic polynucleotide encoding artificial human antibody CDR-L3 region
caggtgtgggatagtagtagtgatcatggagtg

SEQ ID NO: 6290 - DNA, 30 bp, Artificial Sequence
  Synthetic polynucleotide encoding artificial human antibody CDR-L3 region
cagcaatattacagtactcccccatacact

SEQ ID NO: 6291 - DNA, 30 bp, Artificial Sequence; identical to SEQ ID NO: 6271
  Synthetic polynucleotide encoding artificial human antibody CDR-L3 region

SEQ ID NO: 6292 - DNA, 30 bp, Artificial Sequence
  Synthetic polynucleotide encoding artificial human antibody CDR-L3 region
tgctcatacacagacaggttctcctatgtc

SEQ ID NO: 6293 - DNA, 30 bp, Artificial Sequence
  Synthetic polynucleotide encoding artificial human antibody CDR-L3 region
tgctcatttgcaggtagtagtacttatgtc

SEQ ID NO: 6294 - DNA, 27 bp, Artificial Sequence
  Synthetic polynucleotide encoding artificial human antibody CDR-L3 region
cagcagtataataactggcctcggacg

SEQ ID NO: 6295 - DNA, 30 bp, Artificial Sequence
  Synthetic polynucleotide encoding artificial human antibody CDR-L3 region
aactcccgggacagcagtggtaaccaggta

SEQ ID NO: 6296 - DNA, 27 bp, Artificial Sequence
  Synthetic polynucleotide encoding artificial human antibody CDR-L3 region
atgcaaagtatacagcttcccctgggg

SEQ ID NO: 6297 - DNA, 18 bp, Artificial Sequence
  Synthetic polynucleotide encoding artificial human antibody CDR-L3 region
cagcgctctaggggctct

SEQ ID NO: 6298 - DNA, 33 bp, Artificial Sequence
  Synthetic polynucleotide encoding artificial human antibody CDR-L3 region
caacagtatgatgactggcctctggggatcact

SEQ ID NO: 6299 - DNA, 33 bp, Artificial Sequence
  Synthetic polynucleotide encoding artificial human antibody CDR-L3 region
cagtcctatgacagcagcctgagtggttctgtc

SEQ ID NO: 6300 - DNA, 27 bp, Artificial Sequence
  Synthetic polynucleotide encoding artificial human antibody CDR-L3 region
cagcagtattatagtattccctacact

SEQ ID NO: 6301 - DNA, 33 bp, Artificial Sequence
  Synthetic polynucleotide encoding artificial human antibody CDR-L3 region
tactcatatacaagcaccactaatcgttatgtc

SEQ ID NO: 6302 - DNA, 42 bp, Artificial Sequence
  Synthetic polynucleotide encoding artificial human antibody CDR-L3 region
gcagcatgggatgacagcctgagtggtcgggccatttgggtg

SEQ ID NO: 6303 - DNA, 33 bp, Artificial Sequence
  Synthetic polynucleotide encoding artificial human antibody CDR-L3 region
gcatcttgggatgacagcctgaagggtgtggta

SEQ ID NO: 6304 - DNA, 33 bp, Artificial Sequence
  Synthetic polynucleotide encoding artificial human antibody CDR-L3 region
ggaacatgggatagcagcctgagtgcttgggtg

SEQ ID NO: 6305 - DNA, 33 bp, Artificial Sequence
  Synthetic polynucleotide encoding artificial human antibody CDR-L3 region
aactcccgggacagcagtggtaaccattgggtg

SEQ ID NO: 6306 - DNA, 30 bp, Artificial Sequence
  Synthetic polynucleotide encoding artificial human antibody CDR-L3 region
cagcagtatgatgcctcagctctgtggacg

SEQ ID NO: 6307 - DNA, 30 bp, Artificial Sequence
  Synthetic polynucleotide encoding artificial human antibody CDR-L3 region
caacagagttacagtacccctcggatcacc

SEQ ID NO: 6308 - DNA, 33 bp, Artificial Sequence
  Synthetic polynucleotide encoding artificial human antibody CDR-L3 region
caatcagcagacagcagtggtaccctttgggtg

SEQ ID NO: 6309 - DNA, 27 bp, Artificial Sequence
  Synthetic polynucleotide encoding artificial human antibody CDR-L3 region
atgcaaagtatacagctcgcgctcact

SEQ ID NO: 6310 - DNA, 27 bp, Artificial Sequence
  Synthetic polynucleotide encoding artificial human antibody CDR-L3 region
caaaagtataacaatgccccgtggacg

SEQ ID NO: 6311 - DNA, 27 bp, Artificial Sequence
  Synthetic polynucleotide encoding artificial human antibody CDR-L3 region
caggcgtgggacagcagcactgtggta

SEQ ID NO: 6312 - DNA, 33 bp, Artificial Sequence
  Synthetic polynucleotide encoding artificial human antibody CDR-L3 region
tactcaacagacagcagtggtaatcattgggtg

SEQ ID NO: 6313 - DNA, 27 bp, Artificial Sequence
  Synthetic polynucleotide encoding artificial human antibody CDR-L3 region
atgcaagctctacaaaccccgatcacc

SEQ ID NO: 6314 - DNA, 27 bp, Artificial Sequence
  Synthetic polynucleotide encoding artificial human antibody CDR-L3 region
atgcaacgtatagagtttccgtggacg

SEQ ID NO: 6315 - DNA, 24 bp, Artificial Sequence
  Synthetic polynucleotide encoding artificial human antibody CDR-L3 region
atgcaagctctacaaccgtacact

SEQ ID NO: 6316 - DNA, 30 bp, Artificial Sequence
  Synthetic polynucleotide encoding artificial human antibody CDR-L3 region
agcacatttacaagcagcaccactttagtc

SEQ ID NO: 6317 - DNA, 27 bp, Artificial Sequence
  Synthetic polynucleotide encoding artificial human antibody CDR-L3 region
cagcagtatggtagctcactcttcact

SEQ ID NO: 6318 - DNA, 33 bp, Artificial Sequence
  Synthetic polynucleotide encoding artificial human antibody CDR-L3 region
ttagcgtgggacgacagcctcactgcttgggtc

SEQ ID NO: 6319 - DNA, 27 bp, Artificial Sequence
  Synthetic polynucleotide encoding artificial human antibody CDR-L3 region
cagcaatacttcgctcctcctcagacc

SEQ ID NO: 6320 - DNA, 24 bp, Artificial Sequence
  Synthetic polynucleotide encoding artificial human antibody CDR-L3 region
cagcagtataataactggtacact

SEQ ID NO: 6321 - DNA, 33 bp, Artificial Sequence
  Synthetic polynucleotide encoding artificial human antibody CDR-L3 region
gcactatgggatgacagcctgactggttatgtc

SEQ ID NO: 6322 - DNA, 27 bp, Artificial Sequence
  Synthetic polynucleotide encoding artificial human antibody CDR-L3 region
cagcagtatcatgactggccgctcact

SEQ ID NO: 6323 - DNA, 30 bp, Artificial Sequence
  Synthetic polynucleotide encoding artificial human antibody CDR-L3 region
tgctcatatgcaggtagtagcactttcgtc

SEQ ID NO: 6324 - DNA, 36 bp, Artificial Sequence
  Synthetic polynucleotide encoding artificial human antibody CDR-L3 region
gcagcatgggatgacagcctgagtggggatgtggta

SEQ ID NO: 6325 - DNA, 27 bp, Artificial Sequence
  Synthetic polynucleotide encoding artificial human antibody CDR-L3 region
caacagtatgacatcctccctataact

SEQ ID NO: 6326 - DNA, 30 bp, Artificial Sequence
  Synthetic polynucleotide encoding artificial human antibody CDR-L3 region
ttgctctcctatagtggtgctcggccggtg

SEQ ID NO: 6327 - DNA, 30 bp, Artificial Sequence
  Synthetic polynucleotide encoding artificial human antibody CDR-L3 region
caacacttttataattaccccttcttcact

SEQ ID NO: 6328 - DNA, 30 bp, Artificial Sequence
  Synthetic polynucleotide encoding artificial human antibody CDR-L3 region
atgcaagctctacaaactcctcggctcact

SEQ ID NO: 6329 - DNA, 27 bp, Artificial Sequence
  Synthetic polynucleotide encoding artificial human antibody CDR-L3 region
cagacctggggcactggcctgtgggtg

SEQ ID NO: 6330 - DNA, 27 bp, Artificial Sequence
  Synthetic polynucleotide encoding artificial human antibody CDR-L3 region
ctacagcataatagttacccgtacact

SEQ ID NO: 6331 - DNA, 27 bp, Artificial Sequence
  Synthetic polynucleotide encoding artificial human antibody CDR-L3 region
atgcaagctctacaaactcctctcact

SEQ ID NO: 6332 - DNA, 27 bp, Artificial Sequence
  Synthetic polynucleotide encoding artificial human antibody CDR-L3 region
caacagagttacagtaccccctacact

SEQ ID NO: 6333 - DNA, 24 bp, Artificial Sequence
  Synthetic polynucleotide encoding artificial human antibody CDR-L3 region
caacagtataatagttattggacg

SEQ ID NO: 6334 - DNA, 27 bp, Artificial Sequence
  Synthetic polynucleotide encoding artificial human antibody CDR-L3 region
caacagagttacagtacccctcgagcc

SEQ ID NO: 6335 - DNA, 27 bp, Artificial Sequence
  Synthetic polynucleotide encoding artificial human antibody CDR-L3 region
atgcaagctctacaaaccccgtacact

SEQ ID NO: 6336 - DNA, 30 bp, Artificial Sequence
  Synthetic polynucleotide encoding artificial human antibody CDR-L3 region
cagcagcgtagcaactggcctccgctcact

SEQ ID NO: 6337 - DNA, 30 bp, Artificial Sequence
  Synthetic polynucleotide encoding artificial human antibody CDR-L3 region
tgctcatacacaagcagtctttcctatgtc

SEQ ID NO: 6338 - DNA, 33 bp, Artificial Sequence
  Synthetic polynucleotide encoding artificial human antibody CDR-L3 region
caatcagcagacagcagtggtacttatgtggta

SEQ ID NO: 6339 - DNA, 30 bp, Artificial Sequence
  Synthetic polynucleotide encoding artificial human antibody CDR-L3 region
atgcaaggtacacactggcctcggctcact

SEQ ID NO: 6340 - DNA, 30 bp, Artificial Sequence
  Synthetic polynucleotide encoding artificial human antibody CDR-L3 region
caggtgtgggatagtagtagtgattatgtc

SEQ ID NO: 6341 - DNA, 27 bp, Artificial Sequence
  Synthetic polynucleotide encoding artificial human antibody CDR-L3 region
caacagggttaccttttcccatacact

SEQ ID NO: 6342 - DNA, 30 bp, Artificial Sequence
  Synthetic polynucleotide encoding artificial human antibody CDR-L3 region
tggtcatatgcgggtggaagcgattgggtg

SEQ ID NO: 6343 - DNA, 27 bp, Artificial Sequence
  Synthetic polynucleotide encoding artificial human antibody CDR-L3 region
atgcaagctacacaatttccatacact

SEQ ID NO: 6344 - DNA, 27 bp, Artificial Sequence
  Synthetic polynucleotide encoding artificial human antibody CDR-L3 region
caacagagttacagtacccctctcact

SEQ ID NO: 6345 - DNA, 24 bp, Artificial Sequence
  Synthetic polynucleotide encoding artificial human antibody CDR-L3 region
caacaggctaacagtttccctcga

SEQ ID NO: 6346 - DNA, 27 bp, Artificial Sequence
  Synthetic polynucleotide encoding artificial human antibody CDR-L3 region
cagcaatattatggtagtcctctcgct

SEQ ID NO: 6347 - DNA, 27 bp, Artificial Sequence
  Synthetic polynucleotide encoding artificial human antibody CDR-L3 region
caacagtatgataatctcccgtacact

SEQ ID NO: 6348 - DNA, 30 bp, Artificial Sequence
  Synthetic polynucleotide encoding artificial human antibody CDR-L3 region
cagcagtatggtagctcccctatgtacact

SEQ ID NO: 6349 - DNA, 30 bp, Artificial Sequence
  Synthetic polynucleotide encoding artificial human antibody CDR-L3 region
cagcagtatggtagctcacccccattcact

SEQ ID NO: 6350 - DNA, 27 bp, Artificial Sequence
  Synthetic polynucleotide encoding artificial human antibody CDR-L3 region
atgcaagctattcaaagtcctggtact

SEQ ID NO: 6351 - DNA, 33 bp, Artificial Sequence
  Synthetic polynucleotide encoding artificial human antibody CDR-L3 region
gcagcatgggatgacagcctgagtggacatgtc

SEQ ID NO: 6352 - DNA, 30 bp, Artificial Sequence; identical to SEQ ID NO: 6261
  Synthetic polynucleotide encoding artificial human antibody CDR-L3 region

SEQ ID NO: 6353 - DNA, 27 bp, Artificial Sequence
  Synthetic polynucleotide encoding artificial human antibody CDR-L3 region
ctacaagatcacaattacttgtggact

SEQ ID NO: 6354 - DNA, 27 bp, Artificial Sequence
  Synthetic polynucleotide encoding artificial human antibody CDR-L3 region
caacagagttacggtaacccgtacact

SEQ ID NO: 6355 - DNA, 27 bp, Artificial Sequence
  Synthetic polynucleotide encoding artificial human antibody CDR-L3 region
caacagagtgtccgtgcccctctcagt

SEQ ID NO: 6356 - DNA, 30 bp, Artificial Sequence
  Synthetic polynucleotide encoding artificial human antibody CDR-L3 region
agctcatatacaagcagcaccactcttgtc

SEQ ID NO: 6357 - DNA, 27 bp, Artificial Sequence
  Synthetic polynucleotide encoding artificial human antibody CDR-L3 region
cagcagcgtagcaactggcctctcact

SEQ ID NO: 6358 - DNA, 27 bp, Artificial Sequence
  Synthetic polynucleotide encoding artificial human antibody CDR-L3 region
ctacaagattacaattaccctcggacg

SEQ ID NO: 6359 - DNA, 27 bp, Artificial Sequence
  Synthetic polynucleotide encoding artificial human antibody CDR-L3 region
cagcagcgtagcagctggcctctcact

SEQ ID NO: 6360 - DNA, 27 bp, Artificial Sequence
  Synthetic polynucleotide encoding artificial human antibody CDR-L3 region
atgcaaggtacacactggccgtacact

SEQ ID NO: 6361 - DNA, 36 bp, Artificial Sequence
  Synthetic polynucleotide encoding artificial human antibody CDR-L3 region
aactcccgggacagcagtggtaaccataattatgtc

SEQ ID NO: 6362 - DNA, 30 bp, Artificial Sequence
  Synthetic polynucleotide encoding artificial human antibody CDR-L3 region
tgctcatatgcaggcagctacacttgggtg

SEQ ID NO: 6363 - DNA, 27 bp, Artificial Sequence
  Synthetic polynucleotide encoding artificial human antibody CDR-L3 region
atgcaaggtacacactggccgctcact

SEQ ID NO: 6364 - DNA, 33 bp, Artificial Sequence
  Synthetic polynucleotide encoding artificial human antibody CDR-L3 region
tgctcatatgcaggcacctacacttccgtgcta

SEQ ID NO: 6365 - DNA, 33 bp, Artificial Sequence
  Synthetic polynucleotide encoding artificial human antibody CDR-L3 region
cagtcgtatgacagccgcctgagtggttgggtg

SEQ ID NO: 6366 - DNA, 27 bp, Artificial Sequence
  Synthetic polynucleotide encoding artificial human antibody CDR-L3 region
caacagggtcacagtttcccactcact

SEQ ID NO: 6367 - DNA, 33 bp, Artificial Sequence
  Synthetic polynucleotide encoding artificial human antibody CDR-L3 region
ggaacatgggatagcagtctgaatgctgtactc

SEQ ID NO: 6368 - DNA, 30 bp, Artificial Sequence
  Synthetic polynucleotide encoding artificial human antibody CDR-L3 region
agctcatatgcagacacctacacttatgtc

SEQ ID NO: 6369 - DNA, 24 bp, Artificial Sequence
  Synthetic polynucleotide encoding artificial human antibody CDR-L3 region
caacagtatagtacttctaagacg

SEQ ID NO: 6370 - DNA, 27 bp, Artificial Sequence
  Synthetic polynucleotide encoding artificial human antibody CDR-L3 region
cagcagcgtagtcactggcctccaacc

SEQ ID NO: 6371 - DNA, 30 bp, Artificial Sequence
  Synthetic polynucleotide encoding artificial human antibody CDR-L3 region
agctcatatgcagacacctacaattatgtc

SEQ ID NO: 6372 - DNA, 27 bp, Artificial Sequence
  Synthetic polynucleotide encoding artificial human antibody CDR-L3 region
caacagtataatacttatccgtggacg

SEQ ID NO: 6373 - DNA, 33 bp, Artificial Sequence
  Synthetic polynucleotide encoding artificial human antibody CDR-L3 region
agctcatatacaagcagcagcacccctgtggta

SEQ ID NO: 6374 - DNA, 33 bp, Artificial Sequence
  Synthetic polynucleotide encoding artificial human antibody CDR-L3 region
gcatcatacgatgccaccctgaggggttatgtc

SEQ ID NO: 6375 - DNA, 30 bp, Artificial Sequence
  Synthetic polynucleotide encoding artificial human antibody CDR-L3 region
cagtcctatgacagcagcctgagtgtggta

SEQ ID NO: 6376 - DNA, 27 bp, Artificial Sequence
  Synthetic polynucleotide encoding artificial human antibody CDR-L3 region
cagcaatattatagtactccgtacact

SEQ ID NO: 6377 - DNA, 33 bp, Artificial Sequence
  Synthetic polynucleotide encoding artificial human antibody CDR-L3 region
gcagcatgggatgacagtctgaatggtccagtg

SEQ ID NO: 6378 - DNA, 30 bp, Artificial Sequence
  Synthetic polynucleotide encoding artificial human antibody CDR-L3 region
cagcaatataataactggcctccgctcact

SEQ ID NO: 6379 - DNA, 33 bp, Artificial Sequence
  Synthetic polynucleotide encoding artificial human antibody CDR-L3 region
aactcccgggacagcagtggtaaccatcgagtg

SEQ ID NO: 6380 - DNA, 27 bp, Artificial Sequence
  Synthetic polynucleotide encoding artificial human antibody CDR-L3 region
cagcaacttaatacttatccgctcact

SEQ ID NO: 6381 - DNA, 33 bp, Artificial Sequence; identical to SEQ ID NO: 6338
  Synthetic polynucleotide encoding artificial human antibody CDR-L3 region

SEQ ID NO: 6382 - DNA, 27 bp, Artificial Sequence
  Synthetic polynucleotide encoding artificial human antibody CDR-L3 region
caggcgtgggacagcagcggtgtggta

SEQ ID NO: 6383 - DNA, 33 bp, Artificial Sequence
  Synthetic polynucleotide encoding artificial human antibody CDR-L3 region
ggaacatgggatagcagcctgagtgtttgggtg

SEQ ID NO: 6384 - DNA, 33 bp, Artificial Sequence
  Synthetic polynucleotide encoding artificial human antibody CDR-L3 region
agctctcgcgacagaagtggtgaccgtgttata

SEQ ID NO: 6385 - DNA, 30 bp, Artificial Sequence
  Synthetic polynucleotide encoding artificial human antibody CDR-L3 region
caacagagtttcagtactcctcgggtcact

SEQ ID NO: 6386 - DNA, 33 bp, Artificial Sequence
  Synthetic polynucleotide encoding artificial human antibody CDR-L3 region
gcagcatgggatgacagcctgagtggtgtggta

SEQ ID NO: 6387 - DNA, 30 bp, Artificial Sequence
  Synthetic polynucleotide encoding artificial human antibody CDR-L3 region
aactcatatacaatcaccggggcttatgtc

SEQ ID NO: 6388 - DNA, 33 bp, Artificial Sequence; identical to SEQ ID NO: 6338
  Synthetic polynucleotide encoding artificial human antibody CDR-L3 region

SEQ ID NO: 6389 - DNA, 33 bp, Artificial Sequence
  Synthetic polynucleotide encoding artificial human antibody CDR-L3 region
agctcccgggacagcagtgatcatcttctggta

SEQ ID NO: 6390 - DNA, 27 bp, Artificial Sequence
  Synthetic polynucleotide encoding artificial human antibody CDR-L3 region
cagcagcgtagcaactggccattcact

SEQ ID NO: 6391 - DNA, 33 bp, Artificial Sequence
  Synthetic polynucleotide encoding artificial human antibody CDR-L3 region
agctctcgcgacagaagtggtgaccatgttata

SEQ ID NO: 6392 - DNA, 33 bp, Artificial Sequence
  Synthetic polynucleotide encoding artificial human antibody CDR-L3 region
caatcagcagacaacagtgatacttatcaggta

SEQ ID NO: 6393 - DNA, 27 bp, Artificial Sequence
  Synthetic polynucleotide encoding artificial human antibody CDR-L3 region
cagcaatattatagtactcccctcact

SEQ ID NO: 6394 - DNA, 27 bp, Artificial Sequence
  Synthetic polynucleotide encoding artificial human antibody CDR-L3 region
caatcagcagacatcagtggtagggtg

SEQ ID NO: 6395 - DNA, 27 bp, Artificial Sequence
  Synthetic polynucleotide encoding artificial human antibody CDR-L3 region
caacagagttacagtacccccctcact

SEQ ID NO: 6396 - DNA, 30 bp, Artificial Sequence
  Synthetic polynucleotide encoding artificial human antibody CDR-L3 region
caggcgtgggacaccattagtcatgtcgta

SEQ ID NO: 6397 - DNA, 27 bp, Artificial Sequence
  Synthetic polynucleotide encoding artificial human antibody CDR-L3 region
cagcagcgtagcaactggcctccgacg

SEQ ID NO: 6398 - DNA, 27 bp, Artificial Sequence
  Synthetic polynucleotide encoding artificial human antibody CDR-L3 region
caacagagttacagaactccgatcacc

SEQ ID NO: 6399 - DNA, 18 bp, Artificial Sequence
  Synthetic polynucleotide encoding artificial human antibody CDR-L3 region
cagctgtatggtaacact

SEQ ID NO: 6400 - DNA, 33 bp, Artificial Sequence
  Synthetic polynucleotide encoding artificial human antibody CDR-L3 region
agctcccgggacagcagtgataatcttctgatg

SEQ ID NO: 6401 - DNA, 36 bp, Artificial Sequence
  Synthetic polynucleotide encoding artificial human antibody CDR-L3 region
aactcccgggacagcagtggtaacctcaatgtggta

SEQ ID NO: 6402 - DNA, 33 bp, Artificial Sequence
  Synthetic polynucleotide encoding artificial human antibody CDR-L3 region
agctctcgcgacagaagtggtgatcgtgttata

SEQ ID NO: 6403 - DNA, 30 bp, Artificial Sequence
  Synthetic polynucleotide encoding artificial human antibody CDR-L3 region
gtgctgtatatgggtagtggcatttgggtg

SEQ ID NO: 6404 - DNA, 33 bp, Artificial Sequence
  Synthetic polynucleotide encoding artificial human antibody CDR-L3 region
aactctcgcgacagaagtggtgaccgtgttata

SEQ ID NO: 6405 - DNA, 27 bp, Artificial Sequence
  Synthetic polynucleotide encoding artificial human antibody CDR-L3 region
cagcaatattatactattccgtacact

SEQ ID NO: 6406 - DNA, 30 bp, Artificial Sequence
  Synthetic polynucleotide encoding artificial human antibody CDR-L3 region
agctcatatacaagcagcagcactttgatt

SEQ ID NO: 6407 - DNA, 30 bp, Artificial Sequence; identical to SEQ ID NO: 6375
  Synthetic polynucleotide encoding artificial human antibody CDR-L3 region

SEQ ID NO: 6408 - DNA, 33 bp, Artificial Sequence
  Synthetic polynucleotide encoding artificial human antibody CDR-L3 region
caatcagcagacagcagtggtacttattgggtg

SEQ ID NO: 6409 - DNA, 30 bp, Artificial Sequence
  Synthetic polynucleotide encoding artificial human antibody CDR-L3 region
cagtcttatgacagcaccctgagtgctgtc

SEQ ID NO: 6410 - DNA, 30 bp, Artificial Sequence
  Synthetic polynucleotide encoding artificial human antibody CDR-L3 region
agctcatatacaagcagaagtactttagtc

SEQ ID NO: 6411 - DNA, 30 bp, Artificial Sequence; identical to SEQ ID NO: 6271
  Synthetic polynucleotide encoding artificial human antibody CDR-L3 region

SEQ ID NO: 6412 - DNA, 27 bp, Artificial Sequence
  Synthetic polynucleotide encoding artificial human antibody CDR-L3 region
caacagagttacagtaccccgatcacc

SEQ ID NO: 6413 - DNA, 33 bp, Artificial Sequence
  Synthetic polynucleotide encoding artificial human antibody CDR-L3 region
cagcaacgtagcagctggcctccgcggatcacc

SEQ ID NO: 6414 - DNA, 27 bp, Artificial Sequence
  Synthetic polynucleotide encoding artificial human antibody CDR-L3 region
atgcaagctctacaaaccccgtacact

SEQ ID NO: 6415 - DNA, 33 bp, Artificial Sequence; identical to SEQ ID NO: 6391
  Synthetic polynucleotide encoding artificial human antibody CDR-L3 region

SEQ ID NO: 6416 - DNA, 27 bp, Artificial Sequence
  Synthetic polynucleotide encoding artificial human antibody CDR-L3 region
cagtcgtgggacagtatcactggggtg

SEQ ID NO: 6417 - DNA, 33 bp, Artificial Sequence
  Synthetic polynucleotide encoding artificial human antibody CDR-L3 region
agctctcgcgacagaagtggtgaccgtgttcta

SEQ ID NO: 6418 - DNA, 33 bp, Artificial Sequence
  Synthetic polynucleotide encoding artificial human antibody CDR-L3 region
aactcccgggacagaagtggtgaccatgtggtt

SEQ ID NO: 6419 - DNA, 30 bp, Artificial Sequence
  Synthetic polynucleotide encoding artificial human antibody CDR-L3 region
caacagtatggtagctcacccttattcacc

SEQ ID NO: 6420 - DNA, 33 bp, Artificial Sequence
  Synthetic polynucleotide encoding artificial human antibody CDR-L3 region
agctctcgcgacagaagtggtgaccttgttctc

SEQ ID NO: 6421 - DNA, 30 bp, Artificial Sequence
  Synthetic polynucleotide encoding artificial human antibody CDR-L3 region
ggctcatatacaggcagcaacaagaatgtc

SEQ ID NO: 6422 - DNA, 27 bp, Artificial Sequence
  Synthetic polynucleotide encoding artificial human antibody CDR-L3 region
cagtcttatgatagaactaatgtgatc

SEQ ID NO: 6423 - DNA, 30 bp, Artificial Sequence
  Synthetic polynucleotide encoding artificial human antibody CDR-L3 region
caggcgtgggagagcagcactgttgtggtt

SEQ ID NO: 6424 - DNA, 30 bp, Artificial Sequence
  Synthetic polynucleotide encoding artificial human antibody CDR-L3 region
ggaacatgggatagcagcctgagtgctcta

SEQ ID NO: 6425 - DNA, 30 bp, Artificial Sequence
  Synthetic polynucleotide encoding artificial human antibody CDR-L3 region
tgctcatatgcaggtagtagcactttggta

SEQ ID NO: 6426 - DNA, 30 bp, Artificial Sequence
  Synthetic polynucleotide encoding artificial human antibody CDR-L3 region
cagcagtatggtagctcactcccgatcacc

SEQ ID NO: 6427 - DNA, 33 bp, Artificial Sequence
  Synthetic polynucleotide encoding artificial human antibody CDR-L3 region
aactctcgcgacagaagtggtgaccatgttata

SEQ ID NO: 6428 - DNA, 27 bp, Artificial Sequence
  Synthetic polynucleotide encoding artificial human antibody CDR-L3 region
caacagtttgatagctatccgctcact

SEQ ID NO: 6429 - DNA, 30 bp, Artificial Sequence
  Synthetic polynucleotide encoding artificial human antibody CDR-L3 region
cagcaatattatactactcctgggatcact

SEQ ID NO: 6430 - DNA, 36 bp, Artificial Sequence
  Synthetic polynucleotide encoding artificial human antibody CDR-L3 region
caacagtatgataatctccctcccaacttcttcact

SEQ ID NO: 6431 - DNA, 27 bp, Artificial Sequence
  Synthetic polynucleotide encoding artificial human antibody CDR-L3 region
caacagagttacagtactccgattacc

SEQ ID NO: 6432 - DNA, 30 bp, Artificial Sequence
  Synthetic polynucleotide encoding artificial human antibody CDR-L3 region
caggcgtgggacagcagcactgatgtggta

SEQ ID NO: 6433 - DNA, 15 bp, Artificial Sequence
  Synthetic polynucleotide encoding artificial human antibody CDR-L3 region
cagtcttatgaggta

SEQ ID NO: 6434 - DNA, 33 bp, Artificial Sequence
  Synthetic polynucleotide encoding artificial human antibody CDR-L3 region
ggaacatgggatagcagcctgagtgctggggta

SEQ ID NO: 6435 - DNA, 30 bp, Artificial Sequence
  Synthetic polynucleotide encoding artificial human antibody CDR-L3 region
agctcatatacaagcagcagcactcttgtc

SEQ ID NO: 6436 - DNA, 33 bp, Artificial Sequence
  Synthetic polynucleotide encoding artificial human antibody CDR-L3 region
cagtcctatgacaacagcctgagtggttgggtg

SEQ ID NO: 6437 - DNA, 33 bp, Artificial Sequence
  Synthetic polynucleotide encoding artificial human antibody CDR-L3 region
agctcatatacaagcagcagcactctcgaggtg

SEQ ID NO: 6438 - DNA, 27 bp, Artificial Sequence
  Synthetic polynucleotide encoding artificial human antibody CDR-L3 region
cagcagtatggtaggtcccctcggacg

SEQ ID NO: 6439 - DNA, 33 bp, Artificial Sequence
  Synthetic polynucleotide encoding artificial human antibody CDR-L3 region
gcagcatgggatgacagcctgcgtggtctggta

SEQ ID NO: 6440 - DNA, 24 bp, Artificial Sequence
  Synthetic polynucleotide encoding artificial human antibody CDR-L3 region
cagcagtatggtagctcctacact

SEQ ID NO: 6441 - DNA, 30 bp, Artificial Sequence
  Synthetic polynucleotide encoding artificial human antibody CDR-L3 region
cagcaatattacagtattcctgggatcact

SEQ ID NO: 6442 - DNA, 27 bp, Artificial Sequence
  Synthetic polynucleotide encoding artificial human antibody CDR-L3 region
caacaggctaacagtttcccgtggacg

SEQ ID NO: 6443 - DNA, 33 bp, Artificial Sequence
  Synthetic polynucleotide encoding artificial human antibody CDR-L3 region
ggaacatgggatagcagcctgagtgctgaagtg

SEQ ID NO: 6444 - DNA, 24 bp, Artificial Sequence
  Synthetic polynucleotide encoding artificial human antibody CDR-L3 region
cagcagcgtagcaactggcccact

SEQ ID NO: 6445 - DNA, 27 bp, Artificial Sequence
  Synthetic polynucleotide encoding artificial human antibody CDR-L3 region
caaaagtataacagtgtcccgtggacg

SEQ ID NO: 6446 - DNA, 33 bp, Artificial Sequence
  Synthetic polynucleotide encoding artificial human antibody CDR-L3 region
ggaacatgggatagcagcctgagtgttgtggta

SEQ ID NO: 6447 - DNA, 27 bp, Artificial Sequence
  Synthetic polynucleotide encoding artificial human antibody CDR-L3 region
cagcaatattatagtactcctctcact

SEQ ID NO: 6448 - DNA, 30 bp, Artificial Sequence
  Synthetic polynucleotide encoding artificial human antibody CDR-L3 region
gcagcatgggatgacagcctgacttatgtc

SEQ ID NO: 6449 - DNA, 30 bp, Artificial Sequence
  Synthetic polynucleotide encoding artificial human antibody CDR-L3 region
tgctcacaatcaggcagcgacgctgtgtta

SEQ ID NO: 6450 - DNA, 27 bp, Artificial Sequence
  Synthetic polynucleotide encoding artificial human antibody CDR-L3 region
caggtgtgggactacgacggagtgaca

SEQ ID NO: 6451 - DNA, 30 bp, Artificial Sequence
  Synthetic polynucleotide encoding artificial human antibody CDR-L3 region
caatcagcagacagcagtggtacttgggtg

SEQ ID NO: 6452 - DNA, 30 bp, Artificial Sequence
  Synthetic polynucleotide encoding artificial human antibody CDR-L3 region
cagcaatattatagtgctccggggttcact

SEQ ID NO: 6453 - DNA, 27 bp, Artificial Sequence
  Synthetic polynucleotide encoding artificial human antibody CDR-L3 region
atgcaagctcgacaaattcctcagact

SEQ ID NO: 6454 - DNA, 33 bp, Artificial Sequence
  Synthetic polynucleotide encoding artificial human antibody CDR-L3 region
agttcccgggacagcagtgatagtcttctggtg

SEQ ID NO: 6455 - DNA, 33 bp, Artificial Sequence
  Synthetic polynucleotide encoding artificial human antibody CDR-L3 region
agctcatatacaagcagcagcactttcagggtc

SEQ ID NO: 6456 - DNA, 27 bp, Artificial Sequence
  Synthetic polynucleotide encoding artificial human antibody CDR-L3 region
atgcaaggtatatactggccattcact

SEQ ID NO: 6457 - DNA, 30 bp, Artificial Sequence
  Synthetic polynucleotide encoding artificial human antibody CDR-L3 region
caggtgtgggatagtagtagtgatagtgtc

SEQ ID NO: 6458 - DNA, 24 bp, Artificial Sequence
  Synthetic polynucleotide encoding artificial human antibody CDR-L3 region
cagcagtataatgactggtggacg

SEQ ID NO: 6459 - DNA, 39 bp, Artificial Sequence
  Synthetic polynucleotide encoding artificial human antibody CDR-L3 region
aactcccgggacagcagtggtaaccatctaaggggtgtc

SEQ ID NO: 6460 - DNA, 27 bp, Artificial Sequence
  Synthetic polynucleotide encoding artificial human antibody CDR-L3 region
atgcaagctctacaaactcctccggct

SEQ ID NO: 6461 - DNA, 27 bp, Artificial Sequence
  Synthetic polynucleotide encoding artificial human antibody CDR-L3 region
atgcaagctctacaaacccccctcact

SEQ ID NO: 6462 - DNA, 18 bp, Artificial Sequence
  Synthetic polynucleotide encoding artificial human antibody CDR-L3 region
caccactctaggggccct

SEQ ID NO: 6463 - DNA, 33 bp, Artificial Sequence
  Synthetic polynucleotide encoding artificial human antibody CDR-L3 region
gcagcatgggatgacagcctgaatgggtgggtg

SEQ ID NO: 6464 - DNA, 27 bp, Artificial Sequence
  Synthetic polynucleotide encoding artificial human antibody CDR-L3 region
cagcagtatggtagctcaccgctcact

SEQ ID NO: 6465 - DNA, 30 bp, Artificial Sequence
  Synthetic polynucleotide encoding artificial human antibody CDR-L3 region
gtcctgtatatgggtagtggcatttgggtg

SEQ ID NO: 6466 - DNA, 33 bp, Artificial Sequence
  Synthetic polynucleotide encoding artificial human antibody CDR-L3 region
gcagcatgggatgacagcctgagtggtggagta

SEQ ID NO: 6467 - DNA, 30 bp, Artificial Sequence
  Synthetic polynucleotide encoding artificial human antibody CDR-L3 region
caggcgtgggacagcaggagaactgtggtc

SEQ ID NO: 6468 - DNA, 30 bp, Artificial Sequence
  Synthetic polynucleotide encoding artificial human antibody CDR-L3 region
acctcatatacaaccagcggcactctcgtc

SEQ ID NO: 6469 - DNA, 33 bp, Artificial Sequence
  Synthetic polynucleotide encoding artificial human antibody CDR-L3 region
gcagcatgggatgacagcctgagtggtccggtg

SEQ ID NO: 6470 - DNA, 27 bp, Artificial Sequence
  Synthetic polynucleotide encoding artificial human antibody CDR-L3 region
caacagacttacaatatcccgtggacg

SEQ ID NO: 6471 - DNA, 33 bp, Artificial Sequence
  Synthetic polynucleotide encoding artificial human antibody CDR-L3 region
tactcccgggacagtagtggtaatcatggggtg

SEQ ID NO: 6472 - DNA, 30 bp, Artificial Sequence
  Synthetic polynucleotide encoding artificial human antibody CDR-L3 region
tcttcatatacaattaggaacactctcgtc

SEQ ID NO: 6473 - DNA, 21 bp, Artificial Sequence
  Synthetic polynucleotide encoding artificial human antibody CDR-L3 region
caatcgacttacagtagtgct

SEQ ID NO: 6474 - DNA, 33 bp, Artificial Sequence
  Synthetic polynucleotide encoding artificial human antibody CDR-L3 region
gcagcatgggatgacagcctgaatggtcctgtc

SEQ ID NO: 6475 - DNA, 33 bp, Artificial Sequence
  Synthetic polynucleotide encoding artificial human antibody CDR-L3 region
aattcccgggacagcagtgggacccaagtggta

SEQ ID NO: 6476 - DNA, 27 bp, Artificial Sequence
  Synthetic polynucleotide encoding artificial human antibody CDR-L3 region
cagcaatataatgattggccgctcact

SEQ ID NO: 6477 - DNA, 30 bp, Artificial Sequence
  Synthetic polynucleotide encoding artificial human antibody CDR-L3 region
caacagtatgataatctcctcccgatcacc

SEQ ID NO: 6478 - DNA, 27 bp, Artificial Sequence
  Synthetic polynucleotide encoding artificial human antibody CDR-L3 region
caacagcttaatagttaccccctcact

SEQ ID NO: 6479 - DNA, 36 bp, Artificial Sequence
  Synthetic polynucleotide encoding artificial human antibody CDR-L3 region
gcatcatgggatgacagtctcaatggccatgtggtt

SEQ ID NO: 6480 - DNA, 27 bp, Artificial Sequence
  Synthetic polynucleotide encoding artificial human antibody CDR-L3 region
atgcaagctacacaaatcccgtggacg

SEQ ID NO: 6481 - DNA, 24 bp, Artificial Sequence
  Synthetic polynucleotide encoding artificial human antibody CDR-L3 region
caggcgtgggacagcagcgtggta

SEQ ID NO: 6482 - DNA, 33 bp, Artificial Sequence
  Synthetic polynucleotide encoding artificial human antibody CDR-L3 region
aactcccgcgacagcagtggtaaccatctggta

SEQ ID NO: 6483 - DNA, 24 bp, Artificial Sequence
  Synthetic polynucleotide encoding artificial human antibody CDR-L3 region
ctgcaagccgtccacccttggacg

SEQ ID NO: 6484 - DNA, 27 bp, Artificial Sequence
  Synthetic polynucleotide encoding artificial human antibody CDR-L3 region
caaaagtataatggtgcccccttctct

SEQ ID NO: 6485 - DNA, 27 bp, Artificial Sequence
  Synthetic polynucleotide encoding artificial human antibody CDR-L3 region
acgcaagctacacaatttcctcacact

SEQ ID NO: 6486 - DNA, 27 bp, Artificial Sequence
  Synthetic polynucleotide encoding artificial human antibody CDR-L3 region
caggcgtgggacagcaccactgtggtt

SEQ ID NO: 6487 - DNA, 27 bp, Artificial Sequence
  Synthetic polynucleotide encoding artificial human antibody CDR-L3 region
cagcagtataatgagtggccactcact

SEQ ID NO: 6488 - DNA, 27 bp, Artificial Sequence
  Synthetic polynucleotide encoding artificial human antibody CDR-L3 region
atgcaaggtacacactggccgtggacg

SEQ ID NO: 6489 - DNA, 33 bp, Artificial Sequence
  Synthetic polynucleotide encoding artificial human antibody CDR-L3 region
gagacatgggatagcagtctgaattctgtgctg

SEQ ID NO: 6490 - DNA, 27 bp, Artificial Sequence
  Synthetic polynucleotide encoding artificial human antibody CDR-L3 region
caacagagttacagtaccctccccact

SEQ ID NO: 6491 - DNA, 27 bp, Artificial Sequence
  Synthetic polynucleotide encoding artificial human antibody CDR-L3 region
atgcaagctctacaaactccgtacact

SEQ ID NO: 6492 - DNA, 36 bp, Artificial Sequence
  Synthetic polynucleotide encoding artificial human antibody CDR-L3 region
gcagcatgggatgacagcctgagtggttctgtggta

SEQ ID NO: 6493 - DNA, 39 bp, Artificial Sequence
  Synthetic polynucleotide encoding artificial human antibody CDR-L3 region
gcaacatgggatggcagtgtggaccttggctcttatgtc

SEQ ID NO: 6494 - DNA, 33 bp, Artificial Sequence
  Synthetic polynucleotide encoding artificial human antibody CDR-L3 region
cagtcctatgacagcagcctgggcggtccggtt

SEQ ID NO: 6495 - DNA, 27 bp, Artificial Sequence
  Synthetic polynucleotide encoding artificial human antibody CDR-L3 region
atgcaaggttcacactggcctctcact

SEQ ID NO: 6496 - DNA, 33 bp, Artificial Sequence
  Synthetic polynucleotide encoding artificial human antibody CDR-L3 region
caatcagcagacagcagtggtacttatctagta

SEQ ID NO: 6497 - DNA, 36 bp, Artificial Sequence
  Synthetic polynucleotide encoding artificial human antibody CDR-L3 region
gcagcatgggatgacagcctgaatggttctaatgtc

SEQ ID NO: 6498 - DNA, 30 bp, Artificial Sequence
  Synthetic polynucleotide encoding artificial human antibody CDR-L3 region
cagacgtgggacagtaggaatgggggggtc

SEQ ID NO: 6499 - DNA, 30 bp, Artificial Sequence
  Synthetic polynucleotide encoding artificial human antibody CDR-L3 region
cagcagtattatattactcttgcgctcact

SEQ ID NO: 6500 - DNA, 27 bp, Artificial Sequence
  Synthetic polynucleotide encoding artificial human antibody CDR-L3 region
caacagagtcacagtacccctatgact

SEQ ID NO: 6501 - DNA, 27 bp, Artificial Sequence
  Synthetic polynucleotide encoding artificial human antibody CDR-L3 region
cagcagtatggtacctcaccgtacact

SEQ ID NO: 6502 - DNA, 27 bp, Artificial Sequence
  Synthetic polynucleotide encoding artificial human antibody CDR-L3 region
caacagtataatagttatccacggacg

SEQ ID NO: 6503 - DNA, 24 bp, Artificial Sequence
  Synthetic polynucleotide encoding artificial human antibody CDR-L3 region
atgcaaggtacataccttcggacg

SEQ ID NO: 6504 - DNA, 27 bp, Artificial Sequence
  Synthetic polynucleotide encoding artificial human antibody CDR-L3 region
cagcactatcatgggtggcctctcact

SEQ ID NO: 6505 - DNA, 27 bp, Artificial Sequence
  Synthetic polynucleotide encoding artificial human antibody CDR-L3 region
cagcagagtctcactatcccgctcact

SEQ ID NO: 6506 - DNA, 33 bp, Artificial Sequence
  Synthetic polynucleotide encoding artificial human antibody CDR-L3 region
gcagcatgggatgacagcctgaatggtgtggta

SEQ ID NO: 6507 - DNA, 33 bp, Artificial Sequence
  Synthetic polynucleotide encoding artificial human antibody CDR-L3 region
caatcagcagacaccagtggtagtcctgtggtt

SEQ ID NO: 6508 - DNA, 27 bp, Artificial Sequence
  Synthetic polynucleotide encoding artificial human antibody CDR-L3 region
ctacaacattacaattacccgtacact

SEQ ID NO: 6509 - DNA, 27 bp, Artificial Sequence
  Synthetic polynucleotide encoding artificial human antibody CDR-L3 region
caatcagcagacagcagtggtactgta

SEQ ID NO: 6510 - DNA, 30 bp, Artificial Sequence
  Synthetic polynucleotide encoding artificial human antibody CDR-L3 region
cagtcctatgacatcaccctaagttttgtc

SEQ ID NO: 6511 - DNA, 27 bp, Artificial Sequence
  Synthetic polynucleotide encoding artificial human antibody CDR-L3 region
cagcagtatggtagctcaccgctcact

SEQ ID NO: 6512 - DNA, 36 bp, Artificial Sequence
  Synthetic polynucleotide encoding artificial human antibody CDR-L3 region
caaatgtgggatccttttggtgatcatcctgtggtt

SEQ ID NO: 6513 - DNA, 27 bp, Artificial Sequence
  Synthetic polynucleotide encoding artificial human antibody CDR-L3 region
caacagcttaatagttaccctatcacc

SEQ ID NO: 6514 - DNA, 27 bp, Artificial Sequence
  Synthetic polynucleotide encoding artificial human antibody CDR-L3 region
cagcagtctgatgactggccgttaact

SEQ ID NO: 6515 - DNA, 24 bp, Artificial Sequence
  Synthetic polynucleotide encoding artificial human antibody CDR-L3 region
cagcagtatagtacttcacctctt

SEQ ID NO: 6516 - DNA, 27 bp, Artificial Sequence
  Synthetic polynucleotide encoding artificial human antibody CDR-L3 region
atgcaagctacacaatttcctcagacg

SEQ ID NO: 6517 - DNA, 30 bp, Artificial Sequence
  Synthetic polynucleotide encoding artificial human antibody CDR-L3 region
gtgctgtatatgggtggtggcatttgggtg

SEQ ID NO: 6518 - DNA, 33 bp, Artificial Sequence
  Synthetic polynucleotide encoding artificial human antibody CDR-L3 region
tattcaacagacagcagtggtaatcgttgggtg

SEQ ID NO: 6519 - DNA, 27 bp, Artificial Sequence
  Synthetic polynucleotide encoding artificial human antibody CDR-L3 region
caacagacttacagtgcccctcggacg

SEQ ID NO: 6520 - DNA, 30 bp, Artificial Sequence
  Synthetic polynucleotide encoding artificial human antibody CDR-L3 region
tattcttggactgacaacaatttaggactt

SEQ ID NO: 6521 - DNA, 27 bp, Artificial Sequence
  Synthetic polynucleotide encoding artificial human antibody CDR-L3 region
caaaagtataatggtgcccccttctct

SEQ ID NO: 6522 - DNA, 33 bp, Artificial Sequence
  Synthetic polynucleotide encoding artificial human antibody CDR-L3 region
agctcatatacaaacagcagcactctaagggta

SEQ ID NO: 6523 - DNA, 30 bp, Artificial Sequence
  Synthetic polynucleotide encoding artificial human antibody CDR-L3 region
cagtcctttgacagcagcccgcaagtggtg

SEQ ID NO: 6524 - DNA, 27 bp, Artificial Sequence
  Synthetic polynucleotide encoding artificial human antibody CDR-L3 region
ctgctcttttacggtggaatatggatg

SEQ ID NO: 6525 - DNA, 27 bp, Artificial Sequence
  Synthetic polynucleotide encoding artificial human antibody CDR-L3 region
atgcaagctctacaaactgggtacact

SEQ ID NO: 6526 - DNA, 33 bp, Artificial Sequence
  Synthetic polynucleotide encoding artificial human antibody CDR-L3 region
aactcccgggacagcagtggtaaccatcaagta

SEQ ID NO: 6527 - DNA, 30 bp, Artificial Sequence; identical to SEQ ID NO: 6425
  Synthetic polynucleotide encoding artificial human antibody CDR-L3 region

SEQ ID NO: 6528 - DNA, 27 bp, Artificial Sequence
  Synthetic polynucleotide encoding artificial human antibody CDR-L3 region
caacaacgtagcaactggccattcact

SEQ ID NO: 6529 - DNA, 27 bp, Artificial Sequence
  Synthetic polynucleotide encoding artificial human antibody CDR-L3 region
caacaggctaacagtttcccgtacact

SEQ ID NO: 6530 - DNA, 27 bp, Artificial Sequence
  Synthetic polynucleotide encoding artificial human antibody CDR-L3 region
agttcatatgaaattgattcttggctg

SEQ ID NO: 6531 - DNA, 24 bp, Artificial Sequence
  Synthetic polynucleotide encoding artificial human antibody CDR-L3 region
caggcgtggggcagccgcgtggtt

SEQ ID NO: 6532 - DNA, 27 bp, Artificial Sequence
  Synthetic polynucleotide encoding artificial human antibody CDR-L3 region
ttacagcatgacagtttccctcgaacg

SEQ ID NO: 6533 - DNA, 21 bp, Artificial Sequence
  Synthetic polynucleotide encoding artificial human antibody CDR-L3 region
caacaatataagacccataca

SEQ ID NO: 6534 - DNA, 27 bp, Artificial Sequence
  Synthetic polynucleotide encoding artificial human antibody CDR-L3 region
cagcagtctggtagttcacctaagacg

SEQ ID NO: 6535 - DNA, 30 bp, Artificial Sequence
  Synthetic polynucleotide encoding artificial human antibody CDR-L3 region
gcctcatatacaactagtggcactgtggtt

SEQ ID NO: 6536 - DNA, 33 bp, Artificial Sequence
  Synthetic polynucleotide encoding artificial human antibody CDR-L3 region
gcagcatgggatgacagcctgagtggtccggta

SEQ ID NO: 6537 - DNA, 27 bp, Artificial Sequence
  Synthetic polynucleotide encoding artificial human antibody CDR-L3 region
cagcagtatggtagctcatcgctcact

SEQ ID NO: 6538 - DNA, 39 bp, Artificial Sequence
  Synthetic polynucleotide encoding artificial human antibody CDR-L3 region
cagtcctatgacagcagcctgagtggttggcatgtggta

SEQ ID NO: 6539 - DNA, 30 bp, Artificial Sequence; identical to SEQ ID NO: 6425
  Synthetic polynucleotide encoding artificial human antibody CDR-L3 region

SEQ ID NO: 6540 - DNA, 27 bp, Artificial Sequence
  Synthetic polynucleotide encoding artificial human antibody CDR-L3 region
ctcttttattatcgagcctcttatgtc

SEQ ID NO: 6541 - DNA, 27 bp, Artificial Sequence
  Synthetic polynucleotide encoding artificial human antibody CDR-L3 region
cagcagcgtagcgactggccgatcacc

SEQ ID NO: 6542 - DNA, 33 bp, Artificial Sequence; identical to SEQ ID NO: 6434
  Synthetic polynucleotide encoding artificial human antibody CDR-L3 region

SEQ ID NO: 6543 - DNA, 24 bp, Artificial Sequence
  Synthetic polynucleotide encoding artificial human antibody CDR-L3 region
gttcaatctctacaatcgtggacg

SEQ ID NO: 6544 - DNA, 30 bp, Artificial Sequence
  Synthetic polynucleotide encoding artificial human antibody CDR-L3 region
tgctcatatgcaggtagtagcacttatgtc

SEQ ID NO: 6545 - DNA, 27 bp, Artificial Sequence
  Synthetic polynucleotide encoding artificial human antibody CDR-L3 region
caacagtataatagttactctcggacg

SEQ ID NO: 6546 - DNA, 33 bp, Artificial Sequence
  Synthetic polynucleotide encoding artificial human antibody CDR-L3 region
caggtgtgggatagtagtagtgatcaagtggta

SEQ ID NO: 6547 - DNA, 27 bp, Artificial Sequence
  Synthetic polynucleotide encoding artificial human antibody CDR-L3 region
caacagtataatagttattctaggacg

SEQ ID NO: 6548 - DNA, 30 bp, Artificial Sequence
  Synthetic polynucleotide encoding artificial human antibody CDR-L3 region
cagcagcgtagcaactggccttcgatcacc

SEQ ID NO: 6549 - DNA, 27 bp, Artificial Sequence
  Synthetic polynucleotide encoding artificial human antibody CDR-L3 region
caacagagttacagtaccccgtacact

SEQ ID NO: 6550 - DNA, 27 bp, Artificial Sequence
  Synthetic polynucleotide encoding artificial human antibody CDR-L3 region
ttgctctcctttggtactgctcgggta

SEQ ID NO: 6551 - DNA, 27 bp, Artificial Sequence
  Synthetic polynucleotide encoding artificial human antibody CDR-L3 region
atgcaagctacacaatttcccctcacc

SEQ ID NO: 6552 - DNA, 27 bp, Artificial Sequence
  Synthetic polynucleotide encoding artificial human antibody CDR-L3 region
caacactatgatagtctgcctccaact

SEQ ID NO: 6553 - DNA, 33 bp, Artificial Sequence
  Synthetic polynucleotide encoding artificial human antibody CDR-L3 region
agctcatatgcaggcagcaacaatcccgtggta

SEQ ID NO: 6554 - DNA, 30 bp, Artificial Sequence; identical to SEQ ID NO: 6261
  Synthetic polynucleotide encoding artificial human antibody CDR-L3 region

SEQ ID NO: 6555 - DNA, 27 bp, Artificial Sequence
  Synthetic polynucleotide encoding artificial human antibody CDR-L3 region
caggcgtgggacagcagcactgtggta

SEQ ID NO: 6556 - DNA, 30 bp, Artificial Sequence; identical to SEQ ID NO: 6425
  Synthetic polynucleotide encoding artificial human antibody CDR-L3 region

SEQ ID NO: 6557 - DNA, 24 bp, Artificial Sequence
  Synthetic polynucleotide encoding artificial human antibody CDR-L3 region
caacagtatggtagttcacggacg

SEQ ID NO: 6558 - DNA, 30 bp, Artificial Sequence
  Synthetic polynucleotide encoding artificial human antibody CDR-L3 region
tgctcatatacaagcagcagcacttgggtg

SEQ ID NO: 6559 - DNA, 27 bp, Artificial Sequence
  Synthetic polynucleotide encoding artificial human antibody CDR-L3 region
cagcaatattatagtactcctcagacg

SEQ ID NO: 6560 - DNA, 33 bp, Artificial Sequence
  Synthetic polynucleotide encoding artificial human antibody CDR-L3 region
ggaacatgggatagcagcctgagtgctgtggta

SEQ ID NO: 6561 - DNA, 30 bp, Artificial Sequence
  Synthetic polynucleotide encoding artificial human antibody CDR-L3 region
tgctcatatgcaggcagctacactttcgta

SEQ ID NO: 6562 - DNA, 27 bp, Artificial Sequence
  Synthetic polynucleotide encoding artificial human antibody CDR-L3 region
cagcaatattctagtactccattcact

SEQ ID NO: 6563 - DNA, 30 bp, Artificial Sequence
  Synthetic polynucleotide encoding artificial human antibody CDR-L3 region
tgctcatatgcaggtagtagcactgtggta

SEQ ID NO: 6564 - DNA, 30 bp, Artificial Sequence
  Synthetic polynucleotide encoding artificial human antibody CDR-L3 region
ggctcatatacaagcagcagcactctgctc

SEQ ID NO: 6565 - DNA, 27 bp, Artificial Sequence
  Synthetic polynucleotide encoding artificial human antibody CDR-L3 region
caacagtataatagttatgaggggacg

SEQ ID NO: 6566 - DNA, 27 bp, Artificial Sequence
  Synthetic polynucleotide encoding artificial human antibody CDR-L3 region
caacagagttacagtacccccttcact

SEQ ID NO: 6567 - DNA, 27 bp, Artificial Sequence
  Synthetic polynucleotide encoding artificial human antibody CDR-L3 region
ctacagcataatacttaccctcggacg

SEQ ID NO: 6568 - DNA, 27 bp, Artificial Sequence
  Synthetic polynucleotide encoding artificial human antibody CDR-L3 region
caacagtataatagttattcgtacact

SEQ ID NO: 6569 - DNA, 27 bp, Artificial Sequence
  Synthetic polynucleotide encoding artificial human antibody CDR-L3 region
cagcaatattatagtaggccttggacg

SEQ ID NO: 6570 - DNA, 27 bp, Artificial Sequence
  Synthetic polynucleotide encoding artificial human antibody CDR-L3 region
cagcagtatggtagctcattgtggacg

SEQ ID NO: 6571 - DNA, 27 bp, Artificial Sequence
  Synthetic polynucleotide encoding artificial human antibody CDR-L3 region
cagcagcgtagcaactggccgctcact

SEQ ID NO: 6572 - DNA, 30 bp, Artificial Sequence
  Synthetic polynucleotide encoding artificial human antibody CDR-L3 region
cagcagtatggtacctcacccccgtggacg

SEQ ID NO: 6573 - DNA, 27 bp, Artificial Sequence
  Synthetic polynucleotide encoding artificial human antibody CDR-L3 region
cagcaatattttagtactccgctcact

SEQ ID NO: 6574 - DNA, 30 bp, Artificial Sequence
  Synthetic polynucleotide encoding artificial human antibody CDR-L3 region
agctcatgtacaagcagtagcactctcgta

SEQ ID NO: 6575 - DNA, 33 bp, Artificial Sequence
  Synthetic polynucleotide encoding artificial human antibody CDR-L3 region
ggaacatgggatagtagcctgagtgcttatgtc

SEQ ID NO: 6576 - DNA, 33 bp, Artificial Sequence
  Synthetic polynucleotide encoding artificial human antibody CDR-L3 region
tactcaacagacagcagtggtaatcatagggtg

SEQ ID NO: 6577 - DNA, 30 bp, Artificial Sequence
  Synthetic polynucleotide encoding artificial human antibody CDR-L3 region
cagcagcgtagcaactggcctccactcact

SEQ ID NO: 6578 - DNA, 27 bp, Artificial Sequence
  Synthetic polynucleotide encoding artificial human antibody CDR-L3 region
cagcagtatggtagctcaccgtggacg

SEQ ID NO: 6579 - DNA, 27 bp, Artificial Sequence
  Synthetic polynucleotide encoding artificial human antibody CDR-L3 region
cagcaatattatagtcgtcctctgacg

SEQ ID NO: 6580 - DNA, 27 bp, Artificial Sequence
  Synthetic polynucleotide encoding artificial human antibody CDR-L3 region
atgcaaactaaacagcttcctcttact

SEQ ID NO: 6581 - DNA, 27 bp, Artificial Sequence
  Synthetic polynucleotide encoding artificial human antibody CDR-L3 region
atgcaagctacacaatttcctctcact

SEQ ID NO: 6582 - DNA, 33 bp, Artificial Sequence; identical to SEQ ID NO: 6305
  Synthetic polynucleotide encoding artificial human antibody CDR-L3 region

SEQ ID NO: 6583 - DNA, 27 bp, Artificial Sequence
  Synthetic polynucleotide encoding artificial human antibody CDR-L3 region
ctgcagtataatacttaccctcggacg

SEQ ID NO: 6584 - DNA, 27 bp, Artificial Sequence
  Synthetic polynucleotide encoding artificial human antibody CDR-L3 region
caggcgtgggacagcagcactgtggta

SEQ ID NO: 6585 - DNA, 24 bp, Artificial Sequence
  Synthetic polynucleotide encoding artificial human antibody CDR-L3 region
cagcagcgtagcaactggctcact

SEQ ID NO: 6586 - DNA, 30 bp, Artificial Sequence
  Synthetic polynucleotide encoding artificial human antibody CDR-L3 region
tgttcatatacgaccagtggcccttttgtc

SEQ ID NO: 6587 - DNA, 27 bp, Artificial Sequence
  Synthetic polynucleotide encoding artificial human antibody CDR-L3 region
caacagtataatagttattcgtggacg

SEQ ID NO: 6588 - DNA, 27 bp, Artificial Sequence
  Synthetic polynucleotide encoding artificial human antibody CDR-L3 region
caacagtatgataatctcccattcact

SEQ ID NO: 6589 - DNA, 30 bp, Artificial Sequence
  Synthetic polynucleotide encoding artificial human antibody CDR-L3 region
cagtcctatgacagaagcctgagtcaagtc

SEQ ID NO: 6590 - DNA, 24 bp, Artificial Sequence
  Synthetic polynucleotide encoding artificial human antibody CDR-L3 region
caccaatatcatagtattccgacg

SEQ ID NO: 6591 - DNA, 30 bp, Artificial Sequence
  Synthetic polynucleotide encoding artificial human antibody CDR-L3 region
agctcatatacaagcagtaccactgtggta

SEQ ID NO: 6592 - DNA, 27 bp, Artificial Sequence
  Synthetic polynucleotide encoding artificial human antibody CDR-L3 region
atgcaagctacacaatttcccttcacc

SEQ ID NO: 6593 - DNA, 33 bp, Artificial Sequence
  Synthetic polynucleotide encoding artificial human antibody CDR-L3 region
caggtgtgggatagtagtagtgatcatccggtg

SEQ ID NO: 6594 - DNA, 27 bp, Artificial Sequence
  Synthetic polynucleotide encoding artificial human antibody CDR-L3 region
cagcagtatggtagctcaccttacact

SEQ ID NO: 6595 - DNA, 27 bp, Artificial Sequence
  Synthetic polynucleotide encoding artificial human antibody CDR-L3 region
ctacagcataatagttacccattcact

SEQ ID NO: 6596 - DNA, 27 bp, Artificial Sequence
  Synthetic polynucleotide encoding artificial human antibody CDR-L3 region
caacagtataatagttattcgtacact

SEQ ID NO: 6597 - DNA, 33 bp, Artificial Sequence
  Synthetic polynucleotide encoding artificial human antibody CDR-L3 region
aactcccgggacagcagtggtaaccatctggtg

SEQ ID NO: 6598 - DNA, 27 bp, Artificial Sequence
  Synthetic polynucleotide encoding artificial human antibody CDR-L3 region
cagcactatggtaactcaccgtacact

SEQ ID NO: 6599 - DNA, 27 bp, Artificial Sequence
  Synthetic polynucleotide encoding artificial human antibody CDR-L3 region
caacagtatgataatctcccgtacact

SEQ ID NO: 6600 - DNA, 27 bp, Artificial Sequence
  Synthetic polynucleotide encoding artificial human antibody CDR-L3 region
cagtcttatgatagcagcaatcaggta

SEQ ID NO: 6601 - DNA, 24 bp, Artificial Sequence
  Synthetic polynucleotide encoding artificial human antibody CDR-L3 region
caacagagttacagtaccctcact

SEQ ID NO: 6602 - DNA, 27 bp, Artificial Sequence
  Synthetic polynucleotide encoding artificial human antibody CDR-L3 region
atgcaaggtacacactggtcctacact

SEQ ID NO: 6603 - DNA, 27 bp, Artificial Sequence
  Synthetic polynucleotide encoding artificial human antibody CDR-L3 region
cagcagcgtagcaactggcctctcact

SEQ ID NO: 6604 - DNA, 33 bp, Artificial Sequence
  Synthetic polynucleotide encoding artificial human antibody CDR-L3 region
aactcccgggacagcagtggtaaccatctggta

SEQ ID NO: 6605 - DNA, 33 bp, Artificial Sequence
  Synthetic polynucleotide encoding artificial human antibody CDR-L3 region
ggaacatgggataccagcctgagtgagtatgtc

SEQ ID NO: 6606 - DNA, 33 bp, Artificial Sequence; identical to SEQ ID NO: 6386
  Synthetic polynucleotide encoding artificial human antibody CDR-L3 region

SEQ ID NO: 6607 - DNA, 33 bp, Artificial Sequence; identical to SEQ ID NO: 6434
  Synthetic polynucleotide encoding artificial human antibody CDR-L3 region

SEQ ID NO: 6608 - DNA, 27 bp, Artificial Sequence
  Synthetic polynucleotide encoding artificial human antibody CDR-L3 region
cagcagtatggtagctcaacgggaacg

SEQ ID NO: 6609 - DNA, 27 bp, Artificial Sequence
  Synthetic polynucleotide encoding artificial human antibody CDR-L3 region
ctacaagattaccagtacccgctcact

SEQ ID NO: 6610 - DNA, 36 bp, Artificial Sequence
  Synthetic polynucleotide encoding artificial human antibody CDR-L3 region
cagacctatgacaccagactgagtggttcttatgtc

SEQ ID NO: 6611 - DNA, 27 bp, Artificial Sequence
  Synthetic polynucleotide encoding artificial human antibody CDR-L3 region
caaaagtataacagtgccccctggacg

SEQ ID NO: 6612 - DNA, 27 bp, Artificial Sequence
  Synthetic polynucleotide encoding artificial human antibody CDR-L3 region
caacagactaaaactttcccgtacact

SEQ ID NO: 6613 - DNA, 30 bp, Artificial Sequence
  Synthetic polynucleotide encoding artificial human antibody CDR-L3 region
agctcatatacaagcagcagcactgtggta

SEQ ID NO: 6614 - DNA, 27 bp, Artificial Sequence
  Synthetic polynucleotide encoding artificial human antibody CDR-L3 region
caggcgtgggacagcagctctgtggta

SEQ ID NO: 6615 - DNA, 36 bp, Artificial Sequence
  Synthetic polynucleotide encoding artificial human antibody CDR-L3 region
cagtcctatgacagcagcctgagtggttgggtggta

SEQ ID NO: 6616 - DNA, 27 bp, Artificial Sequence
  Synthetic polynucleotide encoding artificial human antibody CDR-L3 region
cagcagtatgataactcccctcgcact

SEQ ID NO: 6617 - DNA, 27 bp, Artificial Sequence
  Synthetic polynucleotide encoding artificial human antibody CDR-L3 region
atgcaggcaacacattttcctcggacg

SEQ ID NO: 6618 - DNA, 27 bp, Artificial Sequence
  Synthetic polynucleotide encoding artificial human antibody CDR-L3 region
caacagactaacagtttcccgtacact

SEQ ID NO: 6619 - DNA, 27 bp, Artificial Sequence
  Synthetic polynucleotide encoding artificial human antibody CDR-L3 region
ctgctctactatggtggtgcttgggtg

SEQ ID NO: 6620 - DNA, 30 bp, Artificial Sequence
  Synthetic polynucleotide encoding artificial human antibody CDR-L3 region
cagcagtttggtagctcacctttgtacacc

SEQ ID NO: 6621 - DNA, 27 bp, Artificial Sequence
  Synthetic polynucleotide encoding artificial human antibody CDR-L3 region
cagcaatattatagtactccgtacact

SEQ ID NO: 6622 - DNA, 24 bp, Artificial Sequence
  Synthetic polynucleotide encoding artificial human antibody CDR-L3 region
ctgcagtataaaagttcttattgt

SEQ ID NO: 6623 - DNA, 30 bp, Artificial Sequence
  Synthetic polynucleotide encoding artificial human antibody CDR-L3 region
cagcagtataataactggcctccgatcacc

SEQ ID NO: 6624 - DNA, 33 bp, Artificial Sequence; identical to SEQ ID NO: 6576
  Synthetic polynucleotide encoding artificial human antibody CDR-L3 region

SEQ ID NO: 6625 - DNA, 33 bp, Artificial Sequence
  Synthetic polynucleotide encoding artificial human antibody CDR-L3 region
caggcgtgggacggcagcattgagggttatgtc

SEQ ID NO: 6626 - DNA, 33 bp, Artificial Sequence; identical to SEQ ID NO: 6338
  Synthetic polynucleotide encoding artificial human antibody CDR-L3 region

SEQ ID NO: 6627 - DNA, 30 bp, Artificial Sequence
  Synthetic polynucleotide encoding artificial human antibody CDR-L3 region
tgctcatatgcaggtagcatcacttatgtc

SEQ ID NO: 6628 - DNA, 24 bp, Artificial Sequence
  Synthetic polynucleotide encoding artificial human antibody CDR-L3 region
cagcagtatggtagctcgtacact

SEQ ID NO: 6629 - DNA, 27 bp, Artificial Sequence
  Synthetic polynucleotide encoding artificial human antibody CDR-L3 region
caacaatatgatgactggccgctcact

SEQ ID NO: 6630 - DNA, 33 bp, Artificial Sequence
  Synthetic polynucleotide encoding artificial human antibody CDR-L3 region
caggtgtgggatagtagtagtgatcatgtggta

SEQ ID NO: 6631 - DNA, 27 bp, Artificial Sequence
  Synthetic polynucleotide encoding artificial human antibody CDR-L3 region
atgcaagctctacaaactccgtggacg

SEQ ID NO: 6632 - DNA, 33 bp, Artificial Sequence
  Synthetic polynucleotide encoding artificial human antibody CDR-L3 region
ggaacatgggatagcagcctgagtgctggggtg

SEQ ID NO: 6633 - DNA, 30 bp, Artificial Sequence
  Synthetic polynucleotide encoding artificial human antibody CDR-L3 region
cagtcttatgatagcagcaatcctgtggta

SEQ ID NO: 6634 - DNA, 27 bp, Artificial Sequence
  Synthetic polynucleotide encoding artificial human antibody CDR-L3 region
caggcgtgggacagcagcactgtggta

SEQ ID NO: 6635 - DNA, 33 bp, Artificial Sequence
  Synthetic polynucleotide encoding artificial human antibody CDR-L3 region
gcagcatgggatgacagcctgagtggtcgggtg

SEQ ID NO: 6636 - DNA, 27 bp, Artificial Sequence
  Synthetic polynucleotide encoding artificial human antibody CDR-L3 region
cagtcttatgatagcagcaatgtggta

SEQ ID NO: 6637 - DNA, 30 bp, Artificial Sequence
  Synthetic polynucleotide encoding artificial human antibody CDR-L3 region
tactctgcggctgacaacaatctaggggta

SEQ ID NO: 6638 - DNA, 33 bp, Artificial Sequence
  Synthetic polynucleotide encoding artificial human antibody CDR-L3 region
aactcccgggacagcagtggtaaccattatgtc

SEQ ID NO: 6639 - DNA, 27 bp, Artificial Sequence
  Synthetic polynucleotide encoding artificial human antibody CDR-L3 region
caggcgtgggacagcagcactgtggta

SEQ ID NO: 6640 - DNA, 27 bp, Artificial Sequence
  Synthetic polynucleotide encoding artificial human antibody CDR-L3 region
caacaggctaacagtttccccctcact

SEQ ID NO: 6641 - DNA, 33 bp, Artificial Sequence
  Synthetic polynucleotide encoding artificial human antibody CDR-L3 region
ggaacatgggatagcagcctgagtgcttatgtc

SEQ ID NO: 6642 - DNA, 27 bp, Artificial Sequence
  Synthetic polynucleotide encoding artificial human antibody CDR-L3 region
cagtcttatgatagtagcaattgggtg

SEQ ID NO: 6643 - DNA, 27 bp, Artificial Sequence
  Synthetic polynucleotide encoding artificial human antibody CDR-L3 region
atgcaagctctacaaactcccatcacc

SEQ ID NO: 6644 - DNA, 30 bp, Artificial Sequence
  Synthetic polynucleotide encoding artificial human antibody CDR-L3 region
cagcagtttggaagctcaccttgggggact

SEQ ID NO: 6645 - DNA, 30 bp, Artificial Sequence; identical to SEQ ID NO: 6271
  Synthetic polynucleotide encoding artificial human antibody CDR-L3 region

SEQ ID NO: 6646 - DNA, 27 bp, Artificial Sequence
  Synthetic polynucleotide encoding artificial human antibody CDR-L3 region
ctacaagactacaattatccattcatt

SEQ ID NO: 6647 - DNA, 33 bp, Artificial Sequence; identical to SEQ ID NO: 6632
  Synthetic polynucleotide encoding artificial human antibody CDR-L3 region

SEQ ID NO: 6648 - DNA, 36 bp, Artificial Sequence
  Synthetic polynucleotide encoding artificial human antibody CDR-L3 region
aactcccgggacagcagtggtaaccatctgggagtg

SEQ ID NO: 6649 - DNA, 30 bp, Artificial Sequence
  Synthetic polynucleotide encoding artificial human antibody CDR-L3 region
caatcagcagacagcagtggtacttatgtc

SEQ ID NO: 6650 - DNA, 27 bp, Artificial Sequence
  Synthetic polynucleotide encoding artificial human antibody CDR-L3 region
ctacaagattacaattacccgctcact

SEQ ID NO: 6651 - DNA, 27 bp, Artificial Sequence
  Synthetic polynucleotide encoding artificial human antibody CDR-L3 region
caacagtataatagttattcgtacact

SEQ ID NO: 6652 - DNA, 30 bp, Artificial Sequence
  Synthetic polynucleotide encoding artificial human antibody CDR-L3 region
cagtcctatgacagcagcctgagtggggta

SEQ ID NO: 6653 - DNA, 27 bp, Artificial Sequence
  Synthetic polynucleotide encoding artificial human antibody CDR-L3 region
atgcaagctacacaatttccgtacact

SEQ ID NO: 6654 - DNA, 30 bp, Artificial Sequence; identical to SEQ ID NO: 6271
  Synthetic polynucleotide encoding artificial human antibody CDR-L3 region

SEQ ID NO: 6655 - DNA, 27 bp, Artificial Sequence
  Synthetic polynucleotide encoding artificial human antibody CDR-L3 region
cagcagtataataactggcctcgaacg

SEQ ID NO: 6656 - DNA, 30 bp, Artificial Sequence
  Synthetic polynucleotide encoding artificial human antibody CDR-L3 region
cagcagtataataactggcctccgtggacg

SEQ ID NO: 6657 - DNA, 27 bp, Artificial Sequence
  Synthetic polynucleotide encoding artificial human antibody CDR-L3 region
caacagtatgataatctcccgctcact

SEQ ID NO: 6658 - DNA, 33 bp, Artificial Sequence; identical to SEQ ID NO: 6434
  Synthetic polynucleotide encoding artificial human antibody CDR-L3 region

SEQ ID NO: 6659 - DNA, 27 bp, Artificial Sequence
  Synthetic polynucleotide encoding artificial human antibody CDR-L3 region
caacagtataatagtccattgtggacg

SEQ ID NO: 6660 - DNA, 30 bp, Artificial Sequence
  Synthetic polynucleotide encoding artificial human antibody CDR-L3 region
ttgctctcctatagtggtgcttatgctgtg

SEQ ID NO: 6661 - DNA, 27 bp, Artificial Sequence
  Synthetic polynucleotide encoding artificial human antibody CDR-L3 region
atgcaagctctacaaactccgatcacc

SEQ ID NO: 6662 - DNA, 27 bp, Artificial Sequence
  Synthetic polynucleotide encoding artificial human antibody CDR-L3 region
cagcagtatgatgtctggccgctcact

SEQ ID NO: 6663 - DNA, 27 bp, Artificial Sequence
  Synthetic polynucleotide encoding artificial human antibody CDR-L3 region
cagcaatattatagtactccgagcact

SEQ ID NO: 6664 - DNA, 27 bp, Artificial Sequence
  Synthetic polynucleotide encoding artificial human antibody CDR-L3 region
cagcaatattatagtactcctcgcact

SEQ ID NO: 6665 - DNA, 27 bp, Artificial Sequence
  Synthetic polynucleotide encoding artificial human antibody CDR-L3 region
cagacctggggcactggcaccgtggta

SEQ ID NO: 6666 - DNA, 27 bp, Artificial Sequence
  Synthetic polynucleotide encoding artificial human antibody CDR-L3 region
agctcatatacaagcagcaccgtggta

SEQ ID NO: 6667 - DNA, 33 bp, Artificial Sequence; identical to SEQ ID NO: 6338
  Synthetic polynucleotide encoding artificial human antibody CDR-L3 region

SEQ ID NO: 6668 - DNA, 27 bp, Artificial Sequence
  Synthetic polynucleotide encoding artificial human antibody CDR-L3 region
gaacagtatgataaatttccgatcacc

SEQ ID NO: 6669 - DNA, 33 bp, Artificial Sequence
  Synthetic polynucleotide encoding artificial human antibody CDR-L3 region
caggtgtgggatagtagtagtgatcattgggtg

SEQ ID NO: 6670 - DNA, 30 bp, Artificial Sequence
  Synthetic polynucleotide encoding artificial human antibody CDR-L3 region
agctcatatacaagcagcagcactctggta

SEQ ID NO: 6671 - DNA, 27 bp, Artificial Sequence
  Synthetic polynucleotide encoding artificial human antibody CDR-L3 region
atgcaagctacacaatttccgctaacc

SEQ ID NO: 6672 - DNA, 36 bp, Artificial Sequence
  Synthetic polynucleotide encoding artificial human antibody CDR-L3 region
ggaacatgggatagcagcctgagtgctgaggtggta

SEQ ID NO: 6673 - DNA, 30 bp, Artificial Sequence; identical to SEQ ID NO: 6656
  Synthetic polynucleotide encoding artificial human antibody CDR-L3 region

SEQ ID NO: 6674 - DNA, 27 bp, Artificial Sequence
  Synthetic polynucleotide encoding artificial human antibody CDR-L3 region
caacagagttacagtaccccgctcact

SEQ ID NO: 6675 - DNA, 24 bp, Artificial Sequence
  Synthetic polynucleotide encoding artificial human antibody CDR-L3 region
caggtgtgggacagcagcgtggta

SEQ ID NO: 6676 - DNA, 24 bp, Artificial Sequence
  Synthetic polynucleotide encoding artificial human antibody CDR-L3 region
caacagtattatagttaccccacc

SEQ ID NO: 6677 - DNA, 33 bp, Artificial Sequence; identical to SEQ ID NO: 6408
  Synthetic polynucleotide encoding artificial human antibody CDR-L3 region

SEQ ID NO: 6678 - DNA, 36 bp, Artificial Sequence
  Synthetic polynucleotide encoding artificial human antibody CDR-L3 region
gcagcatgggatgacagcctgagtggtctttgggtg

SEQ ID NO: 6679 - DNA, 33 bp, Artificial Sequence
  Synthetic polynucleotide encoding artificial human antibody CDR-L3 region
cagcagtataataactggcctcaggtgtacact

SEQ ID NO: 6680 - DNA, 27 bp, Artificial Sequence
  Synthetic polynucleotide encoding artificial human antibody CDR-L3 region
atgcaaggtacactctggcctcccact

SEQ ID NO: 6681 - DNA, 27 bp, Artificial Sequence
  Synthetic polynucleotide encoding artificial human antibody CDR-L3 region
atgcaggcaacacattttcctcggacg

SEQ ID NO: 6682 - DNA, 24 bp, Artificial Sequence
  Synthetic polynucleotide encoding artificial human antibody CDR-L3 region
caacagagttacagtacccccact

SEQ ID NO: 6683 - DNA, 27 bp, Artificial Sequence
  Synthetic polynucleotide encoding artificial human antibody CDR-L3 region
atgcaagctctacaaactccgctcact

SEQ ID NO: 6684 - DNA, 33 bp, Artificial Sequence
  Synthetic polynucleotide encoding artificial human antibody CDR-L3 region
cagtcttatgacagcagcctaagtgcttcggtg

SEQ ID NO: 6685 - DNA, 33 bp, Artificial Sequence
  Synthetic polynucleotide encoding artificial human antibody CDR-L3 region
gcagcatgggatgacagcctgaatggttgggtg

SEQ ID NO: 6686 - DNA, 24 bp, Artificial Sequence
  Synthetic polynucleotide encoding artificial human antibody CDR-L3 region
caggcgtgggacagcagcatcgta

SEQ ID NO: 6687 - DNA, 33 bp, Artificial Sequence; identical to SEQ ID NO: 6386
  Synthetic polynucleotide encoding artificial human antibody CDR-L3 region

SEQ ID NO: 6688 - DNA, 33 bp, Artificial Sequence; identical to SEQ ID NO: 6641
  Synthetic polynucleotide encoding artificial human antibody CDR-L3 region

SEQ ID NO: 6689 - DNA, 27 bp, Artificial Sequence
  Synthetic polynucleotide encoding artificial human antibody CDR-L3 region
caacagtataatagttattcgtggacg

SEQ ID NO: 6690 - DNA, 33 bp, Artificial Sequence; identical to SEQ ID NO: 6685
  Synthetic polynucleotide encoding artificial human antibody CDR-L3 region

SEQ ID NO: 6691 - DNA, 27 bp, Artificial Sequence
  Synthetic polynucleotide encoding artificial human antibody CDR-L3 region
caacaggttgatagttacccgaacact

SEQ ID NO: 6692 - DNA, 27 bp, Artificial Sequence
  Synthetic polynucleotide encoding artificial human antibody CDR-L3 region
cagcagtatcatgactggccgatcacc

SEQ ID NO: 6693 - DNA, 27 bp, Artificial Sequence
  Synthetic polynucleotide encoding artificial human antibody CDR-L3 region
cagcagtatggtagctcacctctgacg

SEQ ID NO: 6694 - DNA, 33 bp, Artificial Sequence; identical to SEQ ID NO: 6641
  Synthetic polynucleotide encoding artificial human antibody CDR-L3 region

SEQ ID NO: 6695 - DNA, 30 bp, Artificial Sequence
  Synthetic polynucleotide encoding artificial human antibody CDR-L3 region
gcagcatgggatgacagcctgaatagggta

SEQ ID NO: 6696 - DNA, 27 bp, Artificial Sequence
  Synthetic polynucleotide encoding artificial human antibody CDR-L3 region
cagcaatattatagtactccgtggacg

SEQ ID NO: 6697 - DNA, 33 bp, Artificial Sequence; identical to SEQ ID NO: 6641
  Synthetic polynucleotide encoding artificial human antibody CDR-L3 region

SEQ ID NO: 6698 - DNA, 30 bp, Artificial Sequence; identical to SEQ ID NO: 6267
  Synthetic polynucleotide encoding artificial human antibody CDR-L3 region

SEQ ID NO: 6699 - DNA, 33 bp, Artificial Sequence
  Synthetic polynucleotide encoding artificial human antibody CDR-L3 region
caacagagttacagtaccccccccatgtacact

SEQ ID NO: 6700 - DNA, 33 bp, Artificial Sequence
  Synthetic polynucleotide encoding artificial human antibody CDR-L3 region
gcagcatgggatgacagcctgaatggtccggta

SEQ ID NO: 6701 - DNA, 27 bp, Artificial Sequence
  Synthetic polynucleotide encoding artificial human antibody CDR-L3 region
cagcaacgtagcgcctggcctctcacc

SEQ ID NO: 6702 - DNA, 33 bp, Artificial Sequence
  Synthetic polynucleotide encoding artificial human antibody CDR-L3 region
agctcatatacaagcagcagcactctcgtggta

SEQ ID NO: 6703 - DNA, 33 bp, Artificial Sequence
  Synthetic polynucleotide encoding artificial human antibody CDR-L3 region
gctgcatgggatgacagcctgaagggtctggga

SEQ ID NO: 6704 - DNA, 30 bp, Artificial Sequence; identical to SEQ ID NO: 6670
  Synthetic polynucleotide encoding artificial human antibody CDR-L3 region

SEQ ID NO: 6705 - DNA, 27 bp, Artificial Sequence
  Synthetic polynucleotide encoding artificial human antibody CDR-L3 region
caacagtataatagttattcgtacact

SEQ ID NO: 6706 - DNA, 39 bp, Artificial Sequence
  Synthetic polynucleotide encoding artificial human antibody CDR-L3 region
gcatcatgggatgacagcctgactggtcccaattatgtc

SEQ ID NO: 6707 - DNA, 27 bp, Artificial Sequence
  Synthetic polynucleotide encoding artificial human antibody CDR-L3 region
cagcagcgtagcaactggccttccact

SEQ ID NO: 6708 - DNA, 30 bp, Artificial Sequence; identical to SEQ ID NO: 6261
  Synthetic polynucleotide encoding artificial human antibody CDR-L3 region

SEQ ID NO: 6709 - DNA, 33 bp, Artificial Sequence; identical to SEQ ID NO: 6305
  Synthetic polynucleotide encoding artificial human antibody CDR-L3 region

SEQ ID NO: 6710 - DNA, 30 bp, Artificial Sequence; identical to SEQ ID NO: 6613
  Synthetic polynucleotide encoding artificial human antibody CDR-L3 region

SEQ ID NO: 6711 - DNA, 33 bp, Artificial Sequence; identical to SEQ ID NO: 6669
  Synthetic polynucleotide encoding artificial human antibody CDR-L3 region

SEQ ID NO: 6712 - DNA, 30 bp, Artificial Sequence
  Synthetic polynucleotide encoding artificial human antibody CDR-L3 region
cagcagtttgattactcacctcggtggacg

SEQ ID NO: 6713 - DNA, 27 bp, Artificial Sequence
  Synthetic polynucleotide encoding artificial human antibody CDR-L3 region
caggcgtgggacagcagcactgtggtg

SEQ ID NO: 6714 - DNA, 33 bp, Artificial Sequence
  Synthetic polynucleotide encoding artificial human antibody CDR-L3 region
agttcccgggacagaagtggtagtcatgtagtc

SEQ ID NO: 6715 - DNA, 30 bp, Artificial Sequence
  Synthetic polynucleotide encoding artificial human antibody CDR-L3 region
cagcagtataatgagtggccccggatcacc

SEQ ID NO: 6716 - DNA, 27 bp, Artificial Sequence
  Synthetic polynucleotide encoding artificial human antibody CDR-L3 region
cagcagtatggtagctcaccgctcact

SEQ ID NO: 6717 - DNA, 33 bp, Artificial Sequence; identical to SEQ ID NO: 6669
  Synthetic polynucleotide encoding artificial human antibody CDR-L3 region

SEQ ID NO: 6718 - DNA, 36 bp, Artificial Sequence; identical to SEQ ID NO: 6615
  Synthetic polynucleotide encoding artificial human antibody CDR-L3 region

SEQ ID NO: 6719 - DNA, 33 bp, Artificial Sequence
  Synthetic polynucleotide encoding artificial human antibody CDR-L3 region
gcagcatgggatgacagcctgaatgcttgggtg

SEQ ID NO: 6720 - DNA, 30 bp, Artificial Sequence
  Synthetic polynucleotide encoding artificial human antibody CDR-L3 region
gcaacatgggatacgagcctgagtgtcgtc

SEQ ID NO: 6721 - DNA, 27 bp, Artificial Sequence
  Synthetic polynucleotide encoding artificial human antibody CDR-L3 region
caagcagtggacgggaagaattatgtt

SEQ ID NO: 6722 - DNA, 33 bp, Artificial Sequence; identical to SEQ ID NO: 6685
  Synthetic polynucleotide encoding artificial human antibody CDR-L3 region

SEQ ID NO: 6723 - DNA, 33 bp, Artificial Sequence
  Synthetic polynucleotide encoding artificial human antibody CDR-L3 region
caatcagcagacagcagtggtcccctttatgtc

SEQ ID NO: 6724 - DNA, 27 bp, Artificial Sequence
  Synthetic polynucleotide encoding artificial human antibody CDR-L3 region
cagcagtatggtagctcaccgtggacg

SEQ ID NO: 6725 - DNA, 27 bp, Artificial Sequence
  Synthetic polynucleotide encoding artificial human antibody CDR-L3 region
cagcaatattacagcactccgtacact

SEQ ID NO: 6726 - DNA, 33 bp, Artificial Sequence; identical to SEQ ID NO: 6434
  Synthetic polynucleotide encoding artificial human antibody CDR-L3 region

SEQ ID NO: 6727 - DNA, 27 bp, Artificial Sequence
  Synthetic polynucleotide encoding artificial human antibody CDR-L3 region
cagcagtatggtagctcaccgggcact

SEQ ID NO: 6728 - DNA, 27 bp, Artificial Sequence
  Synthetic polynucleotide encoding artificial human antibody CDR-L3 region
caacagagttacagtaccccgtacact

SEQ ID NO: 6729 - DNA, 33 bp, Artificial Sequence; identical to SEQ ID NO: 6630
  Synthetic polynucleotide encoding artificial human antibody CDR-L3 region

SEQ ID NO: 6730 - DNA, 27 bp, Artificial Sequence
  Synthetic polynucleotide encoding artificial human antibody CDR-L3 region
ttgctctcctatagtggtacttgggtg

SEQ ID NO: 6731 - DNA, 27 bp, Artificial Sequence
  Synthetic polynucleotide encoding artificial human antibody CDR-L3 region
cagcagtatggtagctcaccgtacact

SEQ ID NO: 6732 - DNA, 30 bp, Artificial Sequence
  Synthetic polynucleotide encoding artificial human antibody CDR-L3 region
cagcagtataataactggcctccgtacact

SEQ ID NO: 6733 - DNA, 27 bp, Artificial Sequence
  Synthetic polynucleotide encoding artificial human antibody CDR-L3 region
ctacagcataatagttaccctcccact

SEQ ID NO: 6734 - DNA, 27 bp, Artificial Sequence
  Synthetic polynucleotide encoding artificial human antibody CDR-L3 region
caacagtataatagttacccgtacact

SEQ ID NO: 6735 - DNA, 27 bp, Artificial Sequence
  Synthetic polynucleotide encoding artificial human antibody CDR-L3 region
atgcaaagtatacagcttccgtacact

SEQ ID NO: 6736 - DNA, 33 bp, Artificial Sequence
  Synthetic polynucleotide encoding artificial human antibody CDR-L3 region
caggtgtgggatagtagtagtgatcattatgtc

SEQ ID NO: 6737 - DNA, 27 bp, Artificial Sequence
  Synthetic polynucleotide encoding artificial human antibody CDR-L3 region
caacagagttacagtacccctcgtacg

SEQ ID NO: 6738 - DNA, 30 bp, Artificial Sequence; identical to SEQ ID NO: 6271
  Synthetic polynucleotide encoding artificial human antibody CDR-L3 region

SEQ ID NO: 6739 - DNA, 27 bp, Artificial Sequence
  Synthetic polynucleotide encoding artificial human antibody CDR-L3 region
cagcagcgtagcaactggccgctcact

SEQ ID NO: 6740 - DNA, 27 bp, Artificial Sequence
  Synthetic polynucleotide encoding artificial human antibody CDR-L3 region
caccaatttggggacccaccctacact

SEQ ID NO: 6741 - DNA, 27 bp, Artificial Sequence
  Synthetic polynucleotide encoding artificial human antibody CDR-L3 region
atgcaagctctacaaactcctcccacc

SEQ ID NO: 6742 - DNA, 27 bp, Artificial Sequence
  Synthetic polynucleotide encoding artificial human antibody CDR-L3 region
cagtcttatgatagcagcaatgtggta

SEQ ID NO: 6743 - DNA, 27 bp, Artificial Sequence
  Synthetic polynucleotide encoding artificial human antibody CDR-L3 region
caacagtttggtacgtcaccggagact

SEQ ID NO: 6744 - DNA, 27 bp, Artificial Sequence
  Synthetic polynucleotide encoding artificial human antibody CDR-L3 region
atgcaagctctacaaactccgctcact

SEQ ID NO: 6745 - DNA, 27 bp, Artificial Sequence
  Synthetic polynucleotide encoding artificial human antibody CDR-L3 region
caggcgtgggacagcagcatcgtggta

SEQ ID NO: 6746 - DNA, 27 bp, Artificial Sequence
  Synthetic polynucleotide encoding artificial human antibody CDR-L3 region
atgcaaggtacacactggcctcgtact

SEQ ID NO: 6747 - DNA, 27 bp, Artificial Sequence
  Synthetic polynucleotide encoding artificial human antibody CDR-L3 region
caggcgtgggacagcagcactgtggta

SEQ ID NO: 6748 - DNA, 33 bp, Artificial Sequence
  Synthetic polynucleotide encoding artificial human antibody CDR-L3 region
caggtgtgggataccagtagtgatgaatgggtg

SEQ ID NO: 6749 - DNA, 30 bp, Artificial Sequence
  Synthetic polynucleotide encoding artificial human antibody CDR-L3 region
cagcagtataatgactggcctccgtggacg

SEQ ID NO: 6750 - DNA, 27 bp, Artificial Sequence
  Synthetic polynucleotide encoding artificial human antibody CDR-L3 region
cagcagtatggtagctcacctctcact

SEQ ID NO: 6751 - DNA, 27 bp, Artificial Sequence
  Synthetic polynucleotide encoding artificial human antibody CDR-L3 region
caacagtataatagttacccattcact

SEQ ID NO: 6752 - DNA, 30 bp, Artificial Sequence; identical to SEQ ID NO: 6732
  Synthetic polynucleotide encoding artificial human antibody CDR-L3 region

SEQ ID NO: 6753 - DNA, 33 bp, Artificial Sequence; identical to SEQ ID NO: 6338
  Synthetic polynucleotide encoding artificial human antibody CDR-L3 region

SEQ ID NO: 6754 - DNA, 27 bp, Artificial Sequence
  Synthetic polynucleotide encoding artificial human antibody CDR-L3 region
cagcagtataataactggcctctgacg

SEQ ID NO: 6755 - DNA, 33 bp, Artificial Sequence
  Synthetic polynucleotide encoding artificial human antibody CDR-L3 region
caggtgtgggatagtagtagtgattcttatgtc

SEQ ID NO: 6756 - DNA, 27 bp, Artificial Sequence
  Synthetic polynucleotide encoding artificial human antibody CDR-L3 region
caacagagttacagtaccccggacacc

SEQ ID NO: 6757 - DNA, 27 bp, Artificial Sequence
  Synthetic polynucleotide encoding artificial human antibody CDR-L3 region
cagtcttatgatagcagcacctgggtg

SEQ ID NO: 6758 - DNA, 33 bp, Artificial Sequence
  Synthetic polynucleotide encoding artificial human antibody CDR-L3 region
caatcttacaataatgtctctccaatgtacatt

SEQ ID NO: 6759 - DNA, 30 bp, Artificial Sequence
  Synthetic polynucleotide encoding artificial human antibody CDR-L3 region
tactcaacagacagcagtggtacgagggtg

SEQ ID NO: 6760 - DNA, 24 bp, Artificial Sequence
  Synthetic polynucleotide encoding artificial human antibody CDR-L3 region
ctccagtataatagttattggacg

SEQ ID NO: 6761 - DNA, 33 bp, Artificial Sequence
  Synthetic polynucleotide encoding artificial human antibody CDR-L3 region
ggctcatattcgaccaccaccactctcggtctc

SEQ ID NO: 6762 - DNA, 30 bp, Artificial Sequence
  Synthetic polynucleotide encoding artificial human antibody CDR-L3 region
cagcagtataataactggcccctgtacact

SEQ ID NO: 6763 - DNA, 33 bp, Artificial Sequence
  Synthetic polynucleotide encoding artificial human antibody CDR-L3 region
agctcatatacaagcagcagcactccttatgtc

SEQ ID NO: 6764 - DNA, 27 bp, Artificial Sequence
  Synthetic polynucleotide encoding artificial human antibody CDR-L3 region
caacagtttaatattttcccccctcac

SEQ ID NO: 6765 - DNA, 33 bp, Artificial Sequence
  Synthetic polynucleotide encoding artificial human antibody CDR-L3 region
gcagcatgggatgacagcctgagtggttatctc

SEQ ID NO: 6766 - DNA, 33 bp, Artificial Sequence; identical to SEQ ID NO: 6386
  Synthetic polynucleotide encoding artificial human antibody CDR-L3 region

SEQ ID NO: 6767 - DNA, 33 bp, Artificial Sequence
  Synthetic polynucleotide encoding artificial human antibody CDR-L3 region
gcagcatgggatgacagcctgagtggttgggtg

SEQ ID NO: 6768 - DNA, 33 bp, Artificial Sequence; identical to SEQ ID NO: 6536
  Synthetic polynucleotide encoding artificial human antibody CDR-L3 region

SEQ ID NO: 6769 - DNA, 27 bp, Artificial Sequence
  Synthetic polynucleotide encoding artificial human antibody CDR-L3 region
cagcagtatggtagctcacctcaaact

SEQ ID NO: 6770 - DNA, 27 bp, Artificial Sequence
  Synthetic polynucleotide encoding artificial human antibody CDR-L3 region
caacagcttaatagttacccgtacact

SEQ ID NO: 6771 - DNA, 30 bp, Artificial Sequence
  Synthetic polynucleotide encoding artificial human antibody CDR-L3 region
agctcatatacaagcagcagcactctcgtg

SEQ ID NO: 6772 - DNA, 27 bp, Artificial Sequence
  Synthetic polynucleotide encoding artificial human antibody CDR-L3 region
caaaagtataagagtgccccgtacact

SEQ ID NO: 6773 - DNA, 27 bp, Artificial Sequence
  Synthetic polynucleotide encoding artificial human antibody CDR-L3 region
caacagtatgataatccttcgatcacc

SEQ ID NO: 6774 - DNA, 33 bp, Artificial Sequence; identical to SEQ ID NO: 6338
  Synthetic polynucleotide encoding artificial human antibody CDR-L3 region

SEQ ID NO: 6775 - DNA, 27 bp, Artificial Sequence
  Synthetic polynucleotide encoding artificial human antibody CDR-L3 region
atgcaagctctacaaactcccctcact

SEQ ID NO: 6776 - DNA, 33 bp, Artificial Sequence
  Synthetic polynucleotide encoding artificial human antibody CDR-L3 region
caggtgtgggatagtagtagtgatcatagggta

SEQ ID NO: 6777 - DNA, 15 bp, Artificial Sequence
  Synthetic polynucleotide encoding artificial human antibody CDR-L3 region
caacaccgtcggact

SEQ ID NO: 6778 - DNA, 27 bp, Artificial Sequence
  Synthetic polynucleotide encoding artificial human antibody CDR-L3 region
caacagtataatagttacccgtacact

SEQ ID NO: 6779 - DNA, 33 bp, Artificial Sequence; identical to SEQ ID NO: 6630
  Synthetic polynucleotide encoding artificial human antibody CDR-L3 region

SEQ ID NO: 6780 - DNA, 30 bp, Artificial Sequence
  Synthetic polynucleotide encoding artificial human antibody CDR-L3 region
caacagagttacagtgatactcgggtcacg

SEQ ID NO: 6781 - DNA, 36 bp, Artificial Sequence
  Synthetic polynucleotide encoding artificial human antibody CDR-L3 region
cagcagcgtagcaactggcctccgggggctctcact

SEQ ID NO: 6782 - DNA, 27 bp, Artificial Sequence
  Synthetic polynucleotide encoding artificial human antibody CDR-L3 region
atgcaagctctacaaactccattcact

SEQ ID NO: 6783 - DNA, 27 bp, Artificial Sequence
  Synthetic polynucleotide encoding artificial human antibody CDR-L3 region
atgcaagctctacaaactcctcacact

SEQ ID NO: 6784 - DNA, 30 bp, Artificial Sequence
  Synthetic polynucleotide encoding artificial human antibody CDR-L3 region
caacagagttacagtacccttatgtacact

SEQ ID NO: 6785 - DNA, 30 bp, Artificial Sequence
  Synthetic polynucleotide encoding artificial human antibody CDR-L3 region
caggcgtgggacagcagcactaattatgtc

SEQ ID NO: 6786 - DNA, 33 bp, Artificial Sequence; identical to SEQ ID NO: 6630
  Synthetic polynucleotide encoding artificial human antibody CDR-L3 region

SEQ ID NO: 6787 - DNA, 30 bp, Artificial Sequence
  Synthetic polynucleotide encoding artificial human antibody CDR-L3 region
gcagcatgggatgacagcctgagtggtcca

SEQ ID NO: 6788 - DNA, 27 bp, Artificial Sequence
  Synthetic polynucleotide encoding artificial human antibody CDR-L3 region
caaaagtataacagtgccccgtggacg

SEQ ID NO: 6789 - DNA, 27 bp, Artificial Sequence
  Synthetic polynucleotide encoding artificial human antibody CDR-L3 region
caacagcatgataatctccctctcact

SEQ ID NO: 6790 - DNA, 27 bp, Artificial Sequence
  Synthetic polynucleotide encoding artificial human antibody CDR-L3 region
cagcagtataataactggcctcggacg

SEQ ID NO: 6791 - DNA, 27 bp, Artificial Sequence
  Synthetic polynucleotide encoding artificial human antibody CDR-L3 region
caacaggctaacagtttccctctcact

SEQ ID NO: 6792 - DNA, 27 bp, Artificial Sequence
  Synthetic polynucleotide encoding artificial human antibody CDR-L3 region
cagcagtatggtagctcattgtacact

SEQ ID NO: 6793 - DNA, 39 bp, Artificial Sequence
  Synthetic polynucleotide encoding artificial human antibody CDR-L3 region
caatcagcagacagcagtggtacttatcctaattgggtg

SEQ ID NO: 6794 - DNA, 27 bp, Artificial Sequence
  Synthetic polynucleotide encoding artificial human antibody CDR-L3 region
caacagtatgataatctcatgtacact

SEQ ID NO: 6795 - DNA, 33 bp, Artificial Sequence
  Synthetic polynucleotide encoding artificial human antibody CDR-L3 region
tgctcatatgcaggtagtagcacttccctggta

SEQ ID NO: 6796 - DNA, 27 bp, Artificial Sequence
  Synthetic polynucleotide encoding artificial human antibody CDR-L3 region
cagtcttatgatagcagcaatgtggta

SEQ ID NO: 6797 - DNA, 24 bp, Artificial Sequence
  Synthetic polynucleotide encoding artificial human antibody CDR-L3 region
caacagtacgataatctccggacg

SEQ ID NO: 6798 - DNA, 27 bp, Artificial Sequence
  Synthetic polynucleotide encoding artificial human antibody CDR-L3 region
ctacagcataatagttacccgctcact

SEQ ID NO: 6799 - DNA, 27 bp, Artificial Sequence
  Synthetic polynucleotide encoding artificial human antibody CDR-L3 region
atggaaggtctacaaactcctcccact

SEQ ID NO: 6800 - DNA, 15 bp, Artificial Sequence
  Synthetic polynucleotide encoding artificial human antibody CDR-L3 region
caacaacgcgggcct

SEQ ID NO: 6801 - DNA, 27 bp, Artificial Sequence
  Synthetic polynucleotide encoding artificial human antibody CDR-L3 region
caacagaattaccgtaaccctcaaacg

SEQ ID NO: 6802 - DNA, 27 bp, Artificial Sequence
  Synthetic polynucleotide encoding artificial human antibody CDR-L3 region
cagcagtatagttccttacctcggacg

SEQ ID NO: 6803 - DNA, 33 bp, Artificial Sequence; identical to SEQ ID NO: 6289
  Synthetic polynucleotide encoding artificial human antibody CDR-L3 region

SEQ ID NO: 6804 - DNA, 27 bp, Artificial Sequence
  Synthetic polynucleotide encoding artificial human antibody CDR-L3 region
caggcgtgggacagcagcactgtggta

SEQ ID NO: 6805 - DNA, 27 bp, Artificial Sequence
  Synthetic polynucleotide encoding artificial human antibody CDR-L3 region
caccagtatgataatctgccattcact

SEQ ID NO: 6806 - DNA, 36 bp, Artificial Sequence
  Synthetic polynucleotide encoding artificial human antibody CDR-L3 region
aactcccgggacagcagtggtaaccatctttatgtc

SEQ ID NO: 6807 - DNA, 30 bp, Artificial Sequence; identical to SEQ ID NO: 6732
  Synthetic polynucleotide encoding artificial human antibody CDR-L3 region

SEQ ID NO: 6808 - DNA, 30 bp, Artificial Sequence
  Synthetic polynucleotide encoding artificial human antibody CDR-L3 region
atgcaaggtacacactggcctccgtgcact

SEQ ID NO: 6809 - DNA, 30 bp, Artificial Sequence
  Synthetic polynucleotide encoding artificial human antibody CDR-L3 region
caggcgtgggacagcagcactgcatgggtg

SEQ ID NO: 6810 - DNA, 33 bp, Artificial Sequence
  Synthetic polynucleotide encoding artificial human antibody CDR-L3 region
ggatcatgggacagcctgaatgccctctttgtc

SEQ ID NO: 6811 - DNA, 24 bp, Artificial Sequence
  Synthetic polynucleotide encoding artificial human antibody CDR-L3 region
caccagtatggtagctcgcacact

SEQ ID NO: 6812 - DNA, 27 bp, Artificial Sequence
  Synthetic polynucleotide encoding artificial human antibody CDR-L3 region
caacaggctaacagtttccctcgcact

SEQ ID NO: 6813 - DNA, 27 bp, Artificial Sequence
  Synthetic polynucleotide encoding artificial human antibody CDR-L3 region
ctgcagggtggtagctcgccgctcact

SEQ ID NO: 6814 - DNA, 27 bp, Artificial Sequence
  Synthetic polynucleotide encoding artificial human antibody CDR-L3 region
cagcagtatggtagctcaccttggacg

SEQ ID NO: 6815 - DNA, 30 bp, Artificial Sequence
  Synthetic polynucleotide encoding artificial human antibody CDR-L3 region
cagcagtatggtagctcacccatgtacact

SEQ ID NO: 6816 - DNA, 27 bp, Artificial Sequence
  Synthetic polynucleotide encoding artificial human antibody CDR-L3 region
ctacaatatgatacttctccgtacact

SEQ ID NO: 6817 - DNA, 33 bp, Artificial Sequence
  Synthetic polynucleotide encoding artificial human antibody CDR-L3 region
gcagcatgggatgacagcctgagtggtccggtt

SEQ ID NO: 6818 - DNA, 27 bp, Artificial Sequence
  Synthetic polynucleotide encoding artificial human antibody CDR-L3 region
caacagtttaataattacccggtcact

SEQ ID NO: 6819 - DNA, 30 bp, Artificial Sequence
  Synthetic polynucleotide encoding artificial human antibody CDR-L3 region
cagcaacgttacaactggcctccgctcact

SEQ ID NO: 6820 - DNA, 24 bp, Artificial Sequence
  Synthetic polynucleotide encoding artificial human antibody CDR-L3 region
cagcagcgtagcacctggcacacc

SEQ ID NO: 6821 - DNA, 33 bp, Artificial Sequence
  Synthetic polynucleotide encoding artificial human antibody CDR-L3 region
aactcccgagacaacagtggtgaccattatgtc

SEQ ID NO: 6822 - DNA, 27 bp, Artificial Sequence
  Synthetic polynucleotide encoding artificial human antibody CDR-L3 region
atgcaaggtacacattggcctccgacg

SEQ ID NO: 6823 - DNA, 30 bp, Artificial Sequence
  Synthetic polynucleotide encoding artificial human antibody CDR-L3 region
cagcagtacactagctcgcctccgtacact

SEQ ID NO: 6824 - DNA, 27 bp, Artificial Sequence
  Synthetic polynucleotide encoding artificial human antibody CDR-L3 region
caacagcttgacagtgtcccaccgact

SEQ ID NO: 6825 - DNA, 27 bp, Artificial Sequence
  Synthetic polynucleotide encoding artificial human antibody CDR-L3 region
atgcaaggtatacaccttccgatcacc

SEQ ID NO: 6826 - DNA, 27 bp, Artificial Sequence
  Synthetic polynucleotide encoding artificial human antibody CDR-L3 region
caaaaatatgaacgtgcccctctcact

SEQ ID NO: 6827 - DNA, 30 bp, Artificial Sequence
  Synthetic polynucleotide encoding artificial human antibody CDR-L3 region
agctcatatgcaggcagcaacaccggggta

SEQ ID NO: 6828 - DNA, 27 bp, Artificial Sequence
  Synthetic polynucleotide encoding artificial human antibody CDR-L3 region
caaacatatggaagtgcccctcctatg

SEQ ID NO: 6829 - DNA, 27 bp, Artificial Sequence
  Synthetic polynucleotide encoding artificial human antibody CDR-L3 region
cagcagtataagaactggccgctcact

SEQ ID NO: 6830 - DNA, 27 bp, Artificial Sequence
  Synthetic polynucleotide encoding artificial human antibody CDR-L3 region
atgcaagctctacaaaatccctggacg

SEQ ID NO: 6831 - DNA, 27 bp, Artificial Sequence
  Synthetic polynucleotide encoding artificial human antibody CDR-L3 region
tcactcggctatggtgatgctcgggtg

SEQ ID NO: 6832 - DNA, 27 bp, Artificial Sequence
  Synthetic polynucleotide encoding artificial human antibody CDR-L3 region
caacagactcacagtaagttgtggacg

SEQ ID NO: 6833 - DNA, 30 bp, Artificial Sequence
  Synthetic polynucleotide encoding artificial human antibody CDR-L3 region
attctttatttgggtcctggctcttgggtg

SEQ ID NO: 6834 - DNA, 30 bp, Artificial Sequence
  Synthetic polynucleotide encoding artificial human antibody CDR-L3 region
agttcatatgcaggcagcaacaatgtacta

SEQ ID NO: 6835 - DNA, 24 bp, Artificial Sequence
  Synthetic polynucleotide encoding artificial human antibody CDR-L3 region
caacagagttacactactctcact

SEQ ID NO: 6836 - DNA, 27 bp, Artificial Sequence
  Synthetic polynucleotide encoding artificial human antibody CDR-L3 region
atgcaagctctacaaaatccctggacg

SEQ ID NO: 6837 - DNA, 27 bp, Artificial Sequence
  Synthetic polynucleotide encoding artificial human antibody CDR-L3 region
ctacaaactaataactggcctttcact

SEQ ID NO: 6838 - DNA, 39 bp, Artificial Sequence
  Synthetic polynucleotide encoding artificial human antibody CDR-L3 region
aactcccgggacagcagtggtaaccatctaaggtgggtg

SEQ ID NO: 6839 - DNA, 33 bp, Artificial Sequence
  Synthetic polynucleotide encoding artificial human antibody CDR-L3 region
cacgtgtgggatgacagtagtgatcaccacgtg

SEQ ID NO: 6840 - DNA, 27 bp, Artificial Sequence
  Synthetic polynucleotide encoding artificial human antibody CDR-L3 region
acgcaagttacacaatttccattcact

SEQ ID NO: 6841 - DNA, 33 bp, Artificial Sequence
  Synthetic polynucleotide encoding artificial human antibody CDR-L3 region
ggagcatgggataccagcctgactgttatgatg

SEQ ID NO: 6842 - DNA, 27 bp, Artificial Sequence
  Synthetic polynucleotide encoding artificial human antibody CDR-L3 region
cagcagcgtaacagctggcctaggact

SEQ ID NO: 6843 - DNA, 30 bp, Artificial Sequence; identical to SEQ ID NO: 6432
  Synthetic polynucleotide encoding artificial human antibody CDR-L3 region

SEQ ID NO: 6844 - DNA, 27 bp, Artificial Sequence
  Synthetic polynucleotide encoding artificial human antibody CDR-L3 region
cagcagtatggtagctcacctctcact

SEQ ID NO: 6845 - DNA, 27 bp, Artificial Sequence
  Synthetic polynucleotide encoding artificial human antibody CDR-L3 region
cagcagcgtagcaactggcctctcact

SEQ ID NO: 6846 - DNA, 27 bp, Artificial Sequence
  Synthetic polynucleotide encoding artificial human antibody CDR-L3 region
atgcaagctctacaacctcctctcgct

SEQ ID NO: 6847 - DNA, 30 bp, Artificial Sequence; identical to SEQ ID NO: 6732
  Synthetic polynucleotide encoding artificial human antibody CDR-L3 region

SEQ ID NO: 6848 - DNA, 27 bp, Artificial Sequence
  Synthetic polynucleotide encoding artificial human antibody CDR-L3 region
cagcagtataataactggcctcggacc

SEQ ID NO: 6849 - DNA, 33 bp, Artificial Sequence; identical to SEQ ID NO: 6635
  Synthetic polynucleotide encoding artificial human antibody CDR-L3 region

SEQ ID NO: 6850 - DNA, 33 bp, Artificial Sequence
  Synthetic polynucleotide encoding artificial human antibody CDR-L3 region
caatcagcagacatcactgatacttatgtagta

SEQ ID NO: 6851 - DNA, 30 bp, Artificial Sequence
  Synthetic polynucleotide encoding artificial human antibody CDR-L3 region
cagtcttatgatagcagcaattgttgggtg

SEQ ID NO: 6852 - DNA, 33 bp, Artificial Sequence
  Synthetic polynucleotide encoding artificial human antibody CDR-L3 region
cagtcctatgacagcagcctgagtggttgggtg

SEQ ID NO: 6853 - DNA, 27 bp, Artificial Sequence
  Synthetic polynucleotide encoding artificial human antibody CDR-L3 region
cagacctggggccctggctttcaggtc

SEQ ID NO: 6854 - DNA, 30 bp, Artificial Sequence
  Synthetic polynucleotide encoding artificial human antibody CDR-L3 region
atgcaaggtacacactggcctccgtacact

SEQ ID NO: 6855 - DNA, 27 bp, Artificial Sequence
  Synthetic polynucleotide encoding artificial human antibody CDR-L3 region
caacagtattatagtatcccgtggaca

SEQ ID NO: 6856 - DNA, 27 bp, Artificial Sequence
  Synthetic polynucleotide encoding artificial human antibody CDR-L3 region
ctacaagattacaattacccgtacact

SEQ ID NO: 6857 - DNA, 27 bp, Artificial Sequence
  Synthetic polynucleotide encoding artificial human antibody CDR-L3 region
cagcagtatggtaggtcaccgttcact

SEQ ID NO: 6858 - DNA, 24 bp, Artificial Sequence
  Synthetic polynucleotide encoding artificial human antibody CDR-L3 region
caacagagttacagccccttcgct

SEQ ID NO: 6859 - DNA, 27 bp, Artificial Sequence
  Synthetic polynucleotide encoding artificial human antibody CDR-L3 region
cagcagtatgttgactcaccgtggacg

SEQ ID NO: 6860 - DNA, 27 bp, Artificial Sequence
  Synthetic polynucleotide encoding artificial human antibody CDR-L3 region
cagcagtatggtagtacaccgtacact

SEQ ID NO: 6861 - DNA, 24 bp, Artificial Sequence
  Synthetic polynucleotide encoding artificial human antibody CDR-L3 region
cagcagtataataactggctcact

SEQ ID NO: 6862 - DNA, 33 bp, Artificial Sequence
  Synthetic polynucleotide encoding artificial human antibody CDR-L3 region
caacagagttacagtgcccctccggtggactct

SEQ ID NO: 6863 - DNA, 24 bp, Artificial Sequence
  Synthetic polynucleotide encoding artificial human antibody CDR-L3 region
caacagtataatagttattggacg

SEQ ID NO: 6864 - DNA, 30 bp, Artificial Sequence
  Synthetic polynucleotide encoding artificial human antibody CDR-L3 region
cagcaatatagtgattattctcgggggacg

SEQ ID NO: 6865 - DNA, 30 bp, Artificial Sequence
  Synthetic polynucleotide encoding artificial human antibody CDR-L3 region
caacagagttacatcacccccccgatcacc

SEQ ID NO: 6866 - DNA, 33 bp, Artificial Sequence; identical to SEQ ID NO: 6669
  Synthetic polynucleotide encoding artificial human antibody CDR-L3 region

SEQ ID NO: 6867 - DNA, 30 bp, Artificial Sequence
  Synthetic polynucleotide encoding artificial human antibody CDR-L3 region
agctcatatacaagcagcagcactctggtg

SEQ ID NO: 6868 - DNA, 27 bp, Artificial Sequence
  Synthetic polynucleotide encoding artificial human antibody CDR-L3 region
caggcgtgggacagcagcactgtggta

SEQ ID NO: 6869 - DNA, 33 bp, Artificial Sequence
  Synthetic polynucleotide encoding artificial human antibody CDR-L3 region
aatttatgggacaacagtagtaaccattggctg

SEQ ID NO: 6870 - DNA, 33 bp, Artificial Sequence
  Synthetic polynucleotide encoding artificial human antibody CDR-L3 region
caatcagcagacagcagtggtacccgttatgtc

SEQ ID NO: 6871 - DNA, 27 bp, Artificial Sequence
  Synthetic polynucleotide encoding artificial human antibody CDR-L3 region
cagcaacattatactattccgtccact

SEQ ID NO: 6872 - DNA, 33 bp, Artificial Sequence
  Synthetic polynucleotide encoding artificial human antibody CDR-L3 region
gcagcatgggataacaacctgagtggtggggtg

SEQ ID NO: 6873 - DNA, 30 bp, Artificial Sequence; identical to SEQ ID NO: 6403
  Synthetic polynucleotide encoding artificial human antibody CDR-L3 region

SEQ ID NO: 6874 - DNA, 27 bp, Artificial Sequence
  Synthetic polynucleotide encoding artificial human antibody CDR-L3 region
caggcgtgggacagcagtattgtggca

SEQ ID NO: 6875 - DNA, 39 bp, Artificial Sequence
  Synthetic polynucleotide encoding artificial human antibody CDR-L3 region
ggggcagaccatggcagtgggagcaacttcgtgtgggtg

SEQ ID NO: 6876 - DNA, 27 bp, Artificial Sequence
  Synthetic polynucleotide encoding artificial human antibody CDR-L3 region
caacagtacaatagttattctcggacg

SEQ ID NO: 6877 - DNA, 36 bp, Artificial Sequence
  Synthetic polynucleotide encoding artificial human antibody CDR-L3 region
agctcatatacaagccgtagcaccctcgaggtgatc

SEQ ID NO: 6878 - DNA, 36 bp, Artificial Sequence
  Synthetic polynucleotide encoding artificial human antibody CDR-L3 region
cagtcctatgacagcagcctgactcgttattgggtg

SEQ ID NO: 6879 - DNA, 30 bp, Artificial Sequence
  Synthetic polynucleotide encoding artificial human antibody CDR-L3 region
cagtcctatgacaccaggatgagggaagtg

SEQ ID NO: 6880 - DNA, 27 bp, Artificial Sequence
  Synthetic polynucleotide encoding artificial human antibody CDR-L3 region
tcgctctactatagtggtatgagggtg

SEQ ID NO: 6881 - DNA, 27 bp, Artificial Sequence
  Synthetic polynucleotide encoding artificial human antibody CDR-L3 region
atgcaacctacacactggccgtggacg

SEQ ID NO: 6882 - DNA, 27 bp, Artificial Sequence
  Synthetic polynucleotide encoding artificial human antibody CDR-L3 region
cagaagtattatgactggcctctcatt

SEQ ID NO: 6883 - DNA, 27 bp, Artificial Sequence
  Synthetic polynucleotide encoding artificial human antibody CDR-L3 region
caggcgtgggacagtcgcacctgggtg

SEQ ID NO: 6884 - DNA, 27 bp, Artificial Sequence
  Synthetic polynucleotide encoding artificial human antibody CDR-L3 region
caacagagttatagtgccccattcact

SEQ ID NO: 6885 - DNA, 33 bp, Artificial Sequence
  Synthetic polynucleotide encoding artificial human antibody CDR-L3 region
aactcccgggacagcagtggggaccattatgtc

SEQ ID NO: 6886 - DNA, 33 bp, Artificial Sequence; identical to SEQ ID NO: 6885
  Synthetic polynucleotide encoding artificial human antibody CDR-L3 region

SEQ ID NO: 6887 - DNA, 27 bp, Artificial Sequence
  Synthetic polynucleotide encoding artificial human antibody CDR-L3 region
catcagcgtagcgactggcctattacc

SEQ ID NO: 6888 - DNA, 33 bp, Artificial Sequence
  Synthetic polynucleotide encoding artificial human antibody CDR-L3 region
ctggtgtgggacagcggcgccagcgcctatgtc

SEQ ID NO: 6889 - DNA, 27 bp, Artificial Sequence
  Synthetic polynucleotide encoding artificial human antibody CDR-L3 region
cttcatcatggttctttcccgtacact

SEQ ID NO: 6890 - DNA, 27 bp, Artificial Sequence
  Synthetic polynucleotide encoding artificial human antibody CDR-L3 region
cttcatcatggttctttcccgtacact

SEQ ID NO: 6891 - DNA, 27 bp, Artificial Sequence
  Synthetic polynucleotide encoding artificial human antibody CDR-L3 region
caggcgtgggacagtagcgcagtgata

SEQ ID NO: 6892 - DNA, 33 bp, Artificial Sequence
  Synthetic polynucleotide encoding artificial human antibody CDR-L3 region
tgctcatatgcaggcagctacactctttgggtg

SEQ ID NO: 6893 - DNA, 27 bp, Artificial Sequence
  Synthetic polynucleotide encoding artificial human antibody CDR-L3 region
cagacgtggggcactggctttcaagtg

SEQ ID NO: 6894 - DNA, 27 bp, Artificial Sequence
  Synthetic polynucleotide encoding artificial human antibody CDR-L3 region
caccactattatttctggcctgggacg

SEQ ID NO: 6895 - DNA, 27 bp, Artificial Sequence
  Synthetic polynucleotide encoding artificial human antibody CDR-L3 region
cagcaatattatagtactccgtacact

SEQ ID NO: 6896 - DNA, 27 bp, Artificial Sequence
  Synthetic polynucleotide encoding artificial human antibody CDR-L3 region
caacagagttacagtaccctttggacg

SEQ ID NO: 6897 - DNA, 27 bp, Artificial Sequence
  Synthetic polynucleotide encoding artificial human antibody CDR-L3 region
cagcagtataataactggcctcgaacg

SEQ ID NO: 6898 - DNA, 30 bp, Artificial Sequence
  Synthetic polynucleotide encoding artificial human antibody CDR-L3 region
cagtcctatgacagcagcctgagaggggta

SEQ ID NO: 6899 - DNA, 27 bp, Artificial Sequence
  Synthetic polynucleotide encoding artificial human antibody CDR-L3 region
caatactatgggaccccacctcggatg

SEQ ID NO: 6900 - DNA, 33 bp, Artificial Sequence
  Synthetic polynucleotide encoding artificial human antibody CDR-L3 region
ggaacatgggataccagcctgaatggcgtggtt

SEQ ID NO: 6901 - DNA, 30 bp, Artificial Sequence
  Synthetic polynucleotide encoding artificial human antibody CDR-L3 region
agctcatatggaggcggcaacactttgttg

SEQ ID NO: 6902 - DNA, 27 bp, Artificial Sequence
  Synthetic polynucleotide encoding artificial human antibody CDR-L3 region
caacagagttacgatatcccattcacc

SEQ ID NO: 6903 - DNA, 27 bp, Artificial Sequence
  Synthetic polynucleotide encoding artificial human antibody CDR-L3 region
cagcattattttgtacttccgtactcc

SEQ ID NO: 6904 - DNA, 27 bp, Artificial Sequence
  Synthetic polynucleotide encoding artificial human antibody CDR-L3 region
cagcaatattatagtattcctcggacg

SEQ ID NO: 6905 - DNA, 27 bp, Artificial Sequence
  Synthetic polynucleotide encoding artificial human antibody CDR-L3 region
cagcaatgtggtacgtcttcgatcacc

SEQ ID NO: 6906 - DNA, 33 bp, Artificial Sequence
  Synthetic polynucleotide encoding artificial human antibody CDR-L3 region
caggtgtgggattctaacactgatcattgggtt

SEQ ID NO: 6907 - DNA, 36 bp, Artificial Sequence
  Synthetic polynucleotide encoding artificial human antibody CDR-L3 region
tcaacatgggatgacagtttaagtgggtctgtggtg

SEQ ID NO: 6908 - DNA, 30 bp, Artificial Sequence
  Synthetic polynucleotide encoding artificial human antibody CDR-L3 region
gttctatatatgggtgatggcttttgggtg

SEQ ID NO: 6909 - DNA, 27 bp, Artificial Sequence
  Synthetic polynucleotide encoding artificial human antibody CDR-L3 region
ctgcaacacaaaagtttccctcttact

SEQ ID NO: 6910 - DNA, 27 bp, Artificial Sequence
  Synthetic polynucleotide encoding artificial human antibody CDR-L3 region
caggcgtgggacagcagcactggggta

SEQ ID NO: 6911 - DNA, 30 bp, Artificial Sequence
  Synthetic polynucleotide encoding artificial human antibody CDR-L3 region
caggcgtgggacaccggcactcatatagta

SEQ ID NO: 6912 - DNA, 30 bp, Artificial Sequence
  Synthetic polynucleotide encoding artificial human antibody CDR-L3 region
agctcatattcaagcagcagcactctggtt

SEQ ID NO: 6913 - DNA, 27 bp, Artificial Sequence
  Synthetic polynucleotide encoding artificial human antibody CDR-L3 region
caacagactgacaatattcctcggacg

SEQ ID NO: 6914 - DNA, 30 bp, Artificial Sequence
  Synthetic polynucleotide encoding artificial human antibody CDR-L3 region
caacagagtttcattgcccgtgcgtacact

SEQ ID NO: 6915 - DNA, 27 bp, Artificial Sequence
  Synthetic polynucleotide encoding artificial human antibody CDR-L3 region
caacaatgtaacgatattcctctcact

SEQ ID NO: 6916 - DNA, 30 bp, Artificial Sequence
  Synthetic polynucleotide encoding artificial human antibody CDR-L3 region
agctcatatgcaggcagcaacaatttggtg

SEQ ID NO: 6917 - DNA, 27 bp, Artificial Sequence
  Synthetic polynucleotide encoding artificial human antibody CDR-L3 region
cagcaatattatgctattccgtggacg

SEQ ID NO: 6918 - DNA, 33 bp, Artificial Sequence
  Synthetic polynucleotide encoding artificial human antibody CDR-L3 region
caggtgtggaataatagacgtcagcatgtgatt

SEQ ID NO: 6919 - DNA, 24 bp, Artificial Sequence
  Synthetic polynucleotide encoding artificial human antibody CDR-L3 region
cagcagtatagtgcatactggtcg

SEQ ID NO: 6920 - DNA, 33 bp, Artificial Sequence
  Synthetic polynucleotide encoding artificial human antibody CDR-L3 region
caggtgtgggatggcaatagtgctcatgtgatt

SEQ ID NO: 6921 - DNA, 27 bp, Artificial Sequence
  Synthetic polynucleotide encoding artificial human antibody CDR-L3 region
cagtcttctgacagcaacattttaatt

SEQ ID NO: 6922 - DNA, 30 bp, Artificial Sequence
  Synthetic polynucleotide encoding artificial human antibody CDR-L3 region
cagcagtataataagtggcctccgtacact

SEQ ID NO: 6923 - DNA, 27 bp, Artificial Sequence
  Synthetic polynucleotide encoding artificial human antibody CDR-L3 region
cagcagcgtagcaaatggcctctcact

SEQ ID NO: 6924 - DNA, 30 bp, Artificial Sequence
  Synthetic polynucleotide encoding artificial human antibody CDR-L3 region
gcctcatatgcaggcaccaacatcgctctc

SEQ ID NO: 6925 - DNA, 27 bp, Artificial Sequence
  Synthetic polynucleotide encoding artificial human antibody CDR-L3 region
catcagagtggtactttaccgtggacg

SEQ ID NO: 6926 - DNA, 36 bp, Artificial Sequence
  Synthetic polynucleotide encoding artificial human antibody CDR-L3 region
tactcaacagacagcagtggtaatcatagaggggta

SEQ ID NO: 6927 - DNA, 27 bp, Artificial Sequence
  Synthetic polynucleotide encoding artificial human antibody CDR-L3 region
gagacctgggacagtaacacccgggtt

SEQ ID NO: 6928 - DNA, 27 bp, Artificial Sequence
  Synthetic polynucleotide encoding artificial human antibody CDR-L3 region
catcagtatgatgattcggagtggacg

SEQ ID NO: 6929 - DNA, 30 bp, Artificial Sequence
  Synthetic polynucleotide encoding artificial human antibody CDR-L3 region
tgcttatatgttccttacagtttgtggcta

SEQ ID NO: 6930 - DNA, 27 bp, Artificial Sequence
  Synthetic polynucleotide encoding artificial human antibody CDR-L3 region
caacagtataatagttatccgtggacg

SEQ ID NO: 6931 - DNA, 27 bp, Artificial Sequence
  Synthetic polynucleotide encoding artificial human antibody CDR-L3 region
cagcagcgtagcgactggcctctcact

SEQ ID NO: 6932 - DNA, 27 bp, Artificial Sequence
  Synthetic polynucleotide encoding artificial human antibody CDR-L3 region
cagcagtattatgactggcccctcacc

SEQ ID NO: 6933 - DNA, 27 bp, Artificial Sequence
  Synthetic polynucleotide encoding artificial human antibody CDR-L3 region
atgcaaactaaacaagttccggtcact

SEQ ID NO: 6934 - DNA, 27 bp, Artificial Sequence
  Synthetic polynucleotide encoding artificial human antibody CDR-L3 region
caacaatttgatagttaccctcttact

SEQ ID NO: 6935 - DNA, 27 bp, Artificial Sequence
  Synthetic polynucleotide encoding artificial human antibody CDR-L3 region
cagcagtatggtagctcaccgtacact

SEQ ID NO: 6936 - DNA, 33 bp, Artificial Sequence
  Synthetic polynucleotide encoding artificial human antibody CDR-L3 region
cagcaccgtagcagctggtctcctgtattcact

SEQ ID NO: 6937 - DNA, 30 bp, Artificial Sequence; identical to SEQ ID NO: 6623
  Synthetic polynucleotide encoding artificial human antibody CDR-L3 region

SEQ ID NO: 6938 - DNA, 33 bp, Artificial Sequence
  Synthetic polynucleotide encoding artificial human antibody CDR-L3 region
caggtgtgggatagtagtattgatcatccactc

SEQ ID NO: 6939 - DNA, 30 bp, Artificial Sequence
  Synthetic polynucleotide encoding artificial human antibody CDR-L3 region
cagcagtataaggagtggcctcctcggaca

SEQ ID NO: 6940 - DNA, 27 bp, Artificial Sequence
  Synthetic polynucleotide encoding artificial human antibody CDR-L3 region
cagtactatgggaccccacctcggatg

SEQ ID NO: 6941 - DNA, 27 bp, Artificial Sequence
  Synthetic polynucleotide encoding artificial human antibody CDR-L3 region
cagcaggcttacagtagccggtggaca

SEQ ID NO: 6942 - DNA, 33 bp, Artificial Sequence
  Synthetic polynucleotide encoding artificial human antibody CDR-L3 region
acaggctgggatgacggcctgggtggtccggtg

SEQ ID NO: 6943 - DNA, 27 bp, Artificial Sequence
  Synthetic polynucleotide encoding artificial human antibody CDR-L3 region
cagaagtatgggagttcaatgtggacg

SEQ ID NO: 6944 - DNA, 27 bp, Artificial Sequence
  Synthetic polynucleotide encoding artificial human antibody CDR-L3 region
caacagcttaatagttaccctcccacg

SEQ ID NO: 6945 - DNA, 27 bp, Artificial Sequence
  Synthetic polynucleotide encoding artificial human antibody CDR-L3 region
caaaactatgggacggaacctcggatg

SEQ ID NO: 6946 - DNA, 27 bp, Artificial Sequence
  Synthetic polynucleotide encoding artificial human antibody CDR-L3 region
agctcatatacaggcaacaaaatttta

SEQ ID NO: 6947 - DNA, 24 bp, Artificial Sequence
  Synthetic polynucleotide encoding artificial human antibody CDR-L3 region
caggcgtgggacagtaccgtggtt

SEQ ID NO: 6948 - DNA, 33 bp, Artificial Sequence
  Synthetic polynucleotide encoding artificial human antibody CDR-L3 region
caggtgtgggatggcgatagtgctcatgtcata

SEQ ID NO: 6949 - DNA, 33 bp, Artificial Sequence
  Synthetic polynucleotide encoding artificial human antibody CDR-L3 region
caatcagcagacagcagtggtacttatgtgcta

SEQ ID NO: 6950 - DNA, 27 bp, Artificial Sequence
  Synthetic polynucleotide encoding artificial human antibody CDR-L3 region
cagcaatgttatagttttccgtacgct

SEQ ID NO: 6951 - DNA, 27 bp, Artificial Sequence
  Synthetic polynucleotide encoding artificial human antibody CDR-L3 region
cgcaaatatgggaccttaccctccact

SEQ ID NO: 6952 - DNA, 33 bp, Artificial Sequence
  Synthetic polynucleotide encoding artificial human antibody CDR-L3 region
gcagcttgggatgacagcctgaacggttggttg

SEQ ID NO: 6953 - DNA, 30 bp, Artificial Sequence
  Synthetic polynucleotide encoding artificial human antibody CDR-L3 region
caacagcttaatagttaccctccgatcacc

SEQ ID NO: 6954 - DNA, 27 bp, Artificial Sequence
  Synthetic polynucleotide encoding artificial human antibody CDR-L3 region
cagcagcgtagctactggcccaggact

SEQ ID NO: 6955 - DNA, 36 bp, Artificial Sequence
  Synthetic polynucleotide encoding artificial human antibody CDR-L3 region
cagacgtatgacaacagactgagtgcctcagtggtg

SEQ ID NO: 6956 - DNA, 30 bp, Artificial Sequence
  Synthetic polynucleotide encoding artificial human antibody CDR-L3 region
tgctcatatgcaggcagctacctttgggtg

SEQ ID NO: 6957 - DNA, 24 bp, Artificial Sequence
  Synthetic polynucleotide encoding artificial human antibody CDR-L3 region
cagcaatattatagtctccggacg

SEQ ID NO: 6958 - DNA, 15 bp, Artificial Sequence
  Synthetic polynucleotide encoding artificial human antibody CDR-L3 region
cagttccggggaacg

SEQ ID NO: 6959 - DNA, 30 bp, Artificial Sequence
  Synthetic polynucleotide encoding artificial human antibody CDR-L3 region
cagcagtataataactggcctccgctcact

SEQ ID NO: 6960 - DNA, 30 bp, Artificial Sequence
  Synthetic polynucleotide encoding artificial human antibody CDR-L3 region
caacagcttaatagttaccctcccctcact

SEQ ID NO: 6961 - DNA, 27 bp, Artificial Sequence
  Synthetic polynucleotide encoding artificial human antibody CDR-L3 region
caaaagtataacagtgccccgctcact

SEQ ID NO: 6962 - DNA, 27 bp, Artificial Sequence
  Synthetic polynucleotide encoding artificial human antibody CDR-L3 region
caagaacttaatagttaccctcgcacc

SEQ ID NO: 6963 - DNA, 27 bp, Artificial Sequence
  Synthetic polynucleotide encoding artificial human antibody CDR-L3 region
caaaagtataacagtgccctcgggacg

SEQ ID NO: 6964 - DNA, 30 bp, Artificial Sequence
  Synthetic polynucleotide encoding artificial human antibody CDR-L3 region
tgctcatatgcaggcagctactcttatgtc

SEQ ID NO: 6965 - DNA, 24 bp, Artificial Sequence
  Synthetic polynucleotide encoding artificial human antibody CDR-L3 region
tgctcatatacaggcacctattac

SEQ ID NO: 6966 - DNA, 33 bp, Artificial Sequence; identical to SEQ ID NO: 6338
  Synthetic polynucleotide encoding artificial human antibody CDR-L3 region

SEQ ID NO: 6967 - DNA, 27 bp, Artificial Sequence
  Synthetic polynucleotide encoding artificial human antibody CDR-L3 region
ctacagcataatagttaccccctcacc

SEQ ID NO: 6968 - DNA, 33 bp, Artificial Sequence
  Synthetic polynucleotide encoding artificial human antibody CDR-L3 region
cagctgtgggatagtagtggtgatcaagtggtt

SEQ ID NO: 6969 - DNA, 27 bp, Artificial Sequence
  Synthetic polynucleotide encoding artificial human antibody CDR-L3 region
cagcagtatggtagctcattcgggact

SEQ ID NO: 6970 - DNA, 33 bp, Artificial Sequence; identical to SEQ ID NO: 6560
  Synthetic polynucleotide encoding artificial human antibody CDR-L3 region

SEQ ID NO: 6971 - DNA, 27 bp, Artificial Sequence
  Synthetic polynucleotide encoding artificial human antibody CDR-L3 region
cagcaatatttgacagcgcatccgtcc

SEQ ID NO: 6972 - DNA, 27 bp, Artificial Sequence
  Synthetic polynucleotide encoding artificial human antibody CDR-L3 region
caacagagttacagtacctcgtacact

SEQ ID NO: 6973 - DNA, 27 bp, Artificial Sequence
  Synthetic polynucleotide encoding artificial human antibody CDR-L3 region
caaaaatacaacagtgccccatacact

SEQ ID NO: 6974 - DNA, 27 bp, Artificial Sequence
  Synthetic polynucleotide encoding artificial human antibody CDR-L3 region
aaccagtataataactggcccctcact

SEQ ID NO: 6975 - DNA, 30 bp, Artificial Sequence
  Synthetic polynucleotide encoding artificial human antibody CDR-L3 region
caacagcttaatagttaccctccgtacact

SEQ ID NO: 6976 - DNA, 27 bp, Artificial Sequence
  Synthetic polynucleotide encoding artificial human antibody CDR-L3 region
caatacctcagtgactctccgcgcacc

SEQ ID NO: 6977 - DNA, 27 bp, Artificial Sequence
  Synthetic polynucleotide encoding artificial human antibody CDR-L3 region
cagcagtatggtagctcacctggaacg

SEQ ID NO: 6978 - DNA, 27 bp, Artificial Sequence
  Synthetic polynucleotide encoding artificial human antibody CDR-L3 region
atgcaaagtatacagcttccgctcact

SEQ ID NO: 6979 - DNA, 33 bp, Artificial Sequence
  Synthetic polynucleotide encoding artificial human antibody CDR-L3 region
caatcagcagacagcagtggtacttccttagtg

SEQ ID NO: 6980 - DNA, 24 bp, Artificial Sequence
  Synthetic polynucleotide encoding artificial human antibody CDR-L3 region
caggcgtgggacagcagcactgta

SEQ ID NO: 6981 - DNA, 27 bp, Artificial Sequence
  Synthetic polynucleotide encoding artificial human antibody CDR-L3 region
caacagagttacagtacccctaagacg

SEQ ID NO: 6982 - DNA, 36 bp, Artificial Sequence
  Synthetic polynucleotide encoding artificial human antibody CDR-L3 region
aactcccgagacaacagtggtaaccatccaaggatc

SEQ ID NO: 6983 - DNA, 30 bp, Artificial Sequence; identical to SEQ ID NO: 6544
  Synthetic polynucleotide encoding artificial human antibody CDR-L3 region

SEQ ID NO: 6984 - DNA, 27 bp, Artificial Sequence
  Synthetic polynucleotide encoding artificial human antibody CDR-L3 region
cagcagcgtagcaactggcctctcact

SEQ ID NO: 6985 - DNA, 27 bp, Artificial Sequence
  Synthetic polynucleotide encoding artificial human antibody CDR-L3 region
cagcaatattatacaaatccctttact

SEQ ID NO: 6986 - DNA, 42 bp, Artificial Sequence
  Synthetic polynucleotide encoding artificial human antibody CDR-L3 region
ggggcagaccatggcagtgggagcaacttcgtgtatgtggta

SEQ ID NO: 6987 - DNA, 36 bp, Artificial Sequence
  Synthetic polynucleotide encoding artificial human antibody CDR-L3 region
tactcaacagacagtaaggggtatcatcagggcata

SEQ ID NO: 6988 - DNA, 33 bp, Artificial Sequence
  Synthetic polynucleotide encoding artificial human antibody CDR-L3 region
caatcagcagacagcagtggtacttccgtggta

SEQ ID NO: 6989 - DNA, 27 bp, Artificial Sequence
  Synthetic polynucleotide encoding artificial human antibody CDR-L3 region
caggcgtgggacagcagcaccgtggta

SEQ ID NO: 6990 - DNA, 27 bp, Artificial Sequence
  Synthetic polynucleotide encoding artificial human antibody CDR-L3 region
tgctcatatgcaggcagccttgtggta

SEQ ID NO: 6991 - DNA, 30 bp, Artificial Sequence
  Synthetic polynucleotide encoding artificial human antibody CDR-L3 region
tcctcatatgcaggtaatagaaagggagta

SEQ ID NO: 6992 - DNA, 36 bp, Artificial Sequence
  Synthetic polynucleotide encoding artificial human antibody CDR-L3 region
cagtcctatgacagcagcctgagtggcctttatgtc

SEQ ID NO: 6993 - DNA, 27 bp, Artificial Sequence
  Synthetic polynucleotide encoding artificial human antibody CDR-L3 region
cagcagtatgataagtggccgctcact

SEQ ID NO: 6994 - DNA, 30 bp, Artificial Sequence
  Synthetic polynucleotide encoding artificial human antibody CDR-L3 region
caacagagttacagtacccctccgtacact

SEQ ID NO: 6995 - DNA, 30 bp, Artificial Sequence
  Synthetic polynucleotide encoding artificial human antibody CDR-L3 region
caggcgtgggacagcagcacttttgtggta

SEQ ID NO: 6996 - DNA, 33 bp, Artificial Sequence
  Synthetic polynucleotide encoding artificial human antibody CDR-L3 region
gcagcatgggatgacagcctgagtgcttgggtg

SEQ ID NO: 6997 - DNA, 33 bp, Artificial Sequence
  Synthetic polynucleotide encoding artificial human antibody CDR-L3 region
atgcaaagtatacagcttcctctgatttacact

SEQ ID NO: 6998 - DNA, 24 bp, Artificial Sequence
  Synthetic polynucleotide encoding artificial human antibody CDR-L3 region
caacagtacaagagtaattacaat

SEQ ID NO: 6999 - DNA, 27 bp, Artificial Sequence
  Synthetic polynucleotide encoding artificial human antibody CDR-L3 region
caggcgtgggacagcagcactggcgtc

SEQ ID NO: 7000 - DNA, 39 bp, Artificial Sequence
  Synthetic polynucleotide encoding artificial human antibody CDR-L3 region
ggggcagaccatggcagtgggagcaacttcgtttatgtc

SEQ ID NO: 7001 - DNA, 36 bp, Artificial Sequence
  Synthetic polynucleotide encoding artificial human antibody CDR-L3 region
cagtcctatgacagcagcctgagtggttcgggggtg

SEQ ID NO: 7002 - DNA, 27 bp, Artificial Sequence
  Synthetic polynucleotide encoding artificial human antibody CDR-L3 region
caacaatataatagttattctcggacg

SEQ ID NO: 7003 - DNA, 27 bp, Artificial Sequence
  Synthetic polynucleotide encoding artificial human antibody CDR-L3 region
cagcagcgcagcaagtggcctctcact

SEQ ID NO: 7004 - DNA, 27 bp, Artificial Sequence
  Synthetic polynucleotide encoding artificial human antibody CDR-L3 region
caacaacttaatagttacccgctcact

SEQ ID NO: 7005 - DNA, 33 bp, Artificial Sequence
  Synthetic polynucleotide encoding artificial human antibody CDR-L3 region
cagcagtataataactggcctccaatttggacg

SEQ ID NO: 7006 - DNA, 27 bp, Artificial Sequence
  Synthetic polynucleotide encoding artificial human antibody CDR-L3 region
cagcagcgtagcaactggccgatcacc

SEQ ID NO: 7007 - DNA, 27 bp, Artificial Sequence
  Synthetic polynucleotide encoding artificial human antibody CDR-L3 region
caacagtataatagttaccccgtcacc

SEQ ID NO: 7008 - DNA, 27 bp, Artificial Sequence
  Synthetic polynucleotide encoding artificial human antibody CDR-L3 region
caggcgtgggacagcagcactgtggta

SEQ ID NO: 7009 - DNA, 27 bp, Artificial Sequence
  Synthetic polynucleotide encoding artificial human antibody CDR-L3 region
caatcagcagacagcagtggtatcgta

SEQ ID NO: 7010 - DNA, 27 bp, Artificial Sequence
  Synthetic polynucleotide encoding artificial human antibody CDR-L3 region
caacaggctaacagtttcccgctcact

SEQ ID NO: 7011 - DNA, 15 bp, Artificial Sequence
  Synthetic polynucleotide encoding artificial human antibody CDR-L3 region
caacagcttaatacc

SEQ ID NO: 7012 - DNA, 33 bp, Artificial Sequence
  Synthetic polynucleotide encoding artificial human antibody CDR-L3 region
tgctcatatgcaggtagtagcactttcgtggta

SEQ ID NO: 7013 - DNA, 33 bp, Artificial Sequence
  Synthetic polynucleotide encoding artificial human antibody CDR-L3 region
tcctcatttgcaggcatccccaagcattatgtc

SEQ ID NO: 7014 - DNA, 30 bp, Artificial Sequence; identical to SEQ ID NO: 6649
  Synthetic polynucleotide encoding artificial human antibody CDR-L3 region

SEQ ID NO: 7015 - DNA, 36 bp, Artificial Sequence
  Synthetic polynucleotide encoding artificial human antibody CDR-L3 region
tgctcatatgcaggtagtagcacttcctatgtggta

SEQ ID NO: 7016 - DNA, 33 bp, Artificial Sequence; identical to SEQ ID NO: 6702
  Synthetic polynucleotide encoding artificial human antibody CDR-L3 region

SEQ ID NO: 7017 - DNA, 36 bp, Artificial Sequence
  Synthetic polynucleotide encoding artificial human antibody CDR-L3 region
caatcagcagacaacattggttcttttcttgtggtt

SEQ ID NO: 7018 - DNA, 33 bp, Artificial Sequence; identical to SEQ ID NO: 6408
  Synthetic polynucleotide encoding artificial human antibody CDR-L3 region

SEQ ID NO: 7019 - DNA, 30 bp, Artificial Sequence
  Synthetic polynucleotide encoding artificial human antibody CDR-L3 region
caacagagttacagtacccctctgtacact

SEQ ID NO: 7020 - DNA, 39 bp, Artificial Sequence
  Synthetic polynucleotide encoding artificial human antibody CDR-L3 region
ggggcagaccatggcagtgggagcaacttcgctgtggta

SEQ ID NO: 7021 - DNA, 27 bp, Artificial Sequence
  Synthetic polynucleotide encoding artificial human antibody CDR-L3 region
cagcagtatggtcgctctcctccaacc

SEQ ID NO: 7022 - DNA, 27 bp, Artificial Sequence
  Synthetic polynucleotide encoding artificial human antibody CDR-L3 region
atgcaaggaacacactggccgctcact

SEQ ID NO: 7023 - DNA, 33 bp, Artificial Sequence
  Synthetic polynucleotide encoding artificial human antibody CDR-L3 region
ctcctttatcacagtgcgtttgtggtgataggc

SEQ ID NO: 7024 - DNA, 33 bp, Artificial Sequence
  Synthetic polynucleotide encoding artificial human antibody CDR-L3 region
tactcaagagacaccagtggtaatcttcgggtg

SEQ ID NO: 7025 - DNA, 27 bp, Artificial Sequence
  Synthetic polynucleotide encoding artificial human antibody CDR-L3 region
cagcaatattatagtactcctccgacg

SEQ ID NO: 7026 - DNA, 33 bp, Artificial Sequence
  Synthetic polynucleotide encoding artificial human antibody CDR-L3 region
agctcatttgcaggcaccgactatcattatgtc

SEQ ID NO: 7027 - DNA, 27 bp, Artificial Sequence
  Synthetic polynucleotide encoding artificial human antibody CDR-L3 region
caacagtattatagtaccacggtcacc

SEQ ID NO: 7028 - DNA, 27 bp, Artificial Sequence
  Synthetic polynucleotide encoding artificial human antibody CDR-L3 region
caacagtattatagttacccctggacg

SEQ ID NO: 7029 - DNA, 24 bp, Artificial Sequence
  Synthetic polynucleotide encoding artificial human antibody CDR-L3 region
tgctcatatgcaggtagttgggtg

SEQ ID NO: 7030 - DNA, 27 bp, Artificial Sequence
  Synthetic polynucleotide encoding artificial human antibody CDR-L3 region
caatcagcagacagcagtggttatgtc

SEQ ID NO: 7031 - DNA, 33 bp, Artificial Sequence
  Synthetic polynucleotide encoding artificial human antibody CDR-L3 region
gcagcatgggatgacaggctgcttggtccgcta

SEQ ID NO: 7032 - DNA, 36 bp, Artificial Sequence
  Synthetic polynucleotide encoding artificial human antibody CDR-L3 region
cagtcctatgacgggagcctgagtggctccggggtc

SEQ ID NO: 7033 - DNA, 36 bp, Artificial Sequence
  Synthetic polynucleotide encoding artificial human antibody CDR-L3 region
caatcagcagacagcagtggtacttttcttgtggta

SEQ ID NO: 7034 - DNA, 30 bp, Artificial Sequence; identical to SEQ ID NO: 6283
  Synthetic polynucleotide encoding artificial human antibody CDR-L3 region

SEQ ID NO: 7035 - DNA, 27 bp, Artificial Sequence
  Synthetic polynucleotide encoding artificial human antibody CDR-L3 region
catcagactcacagcacccctcgcact

SEQ ID NO: 7036 - DNA, 27 bp, Artificial Sequence
  Synthetic polynucleotide encoding artificial human antibody CDR-L3 region
ctacagcataatagttaccctctcact

SEQ ID NO: 7037 - DNA, 30 bp, Artificial Sequence
  Synthetic polynucleotide encoding artificial human antibody CDR-L3 region
atgcaaggtacagactggcctgtgtatact

SEQ ID NO: 7038 - DNA, 36 bp, Artificial Sequence
  Synthetic polynucleotide encoding artificial human antibody CDR-L3 region
gcagcatgggatgacagcctgagtggttcttatgtc

SEQ ID NO: 7039 - DNA, 30 bp, Artificial Sequence
  Synthetic polynucleotide encoding artificial human antibody CDR-L3 region
cagtcttatgatagcagcaatcatgtggta

SEQ ID NO: 7040 - DNA, 27 bp, Artificial Sequence
  Synthetic polynucleotide encoding artificial human antibody CDR-L3 region
cagcagacttacaattccccgtggacg

SEQ ID NO: 7041 - DNA, 33 bp, Artificial Sequence
  Synthetic polynucleotide encoding artificial human antibody CDR-L3 region
ggaacatgggatagcagcctgagtgctgtcgtc

SEQ ID NO: 7042 - DNA, 27 bp, Artificial Sequence
  Synthetic polynucleotide encoding artificial human antibody CDR-L3 region
caggcgtgggacagcagcactgcggta

SEQ ID NO: 7043 - DNA, 30 bp, Artificial Sequence
  Synthetic polynucleotide encoding artificial human antibody CDR-L3 region
gcagcatgggatgacagcctgagtgtctta

SEQ ID NO: 7044 - DNA, 33 bp, Artificial Sequence; identical to SEQ ID NO: 6685
  Synthetic polynucleotide encoding artificial human antibody CDR-L3 region

SEQ ID NO: 7045 - DNA, 27 bp, Artificial Sequence
  Synthetic polynucleotide encoding artificial human antibody CDR-L3 region
cagcaatttctttctcctccgtacact

SEQ ID NO: 7046 - DNA, 39 bp, Artificial Sequence
  Synthetic polynucleotide encoding artificial human antibody CDR-L3 region
ggggcagaccatggcagtgggagcaacttcgtgtatgtc

SEQ ID NO: 7047 - DNA, 33 bp, Artificial Sequence; identical to SEQ ID NO: 6767
  Synthetic polynucleotide encoding artificial human antibody CDR-L3 region

SEQ ID NO: 7048 - DNA, 36 bp, Artificial Sequence
  Synthetic polynucleotide encoding artificial human antibody CDR-L3 region
caatcagcagagagtagcggttcttatcttgtggta

SEQ ID NO: 7049 - DNA, 27 bp, Artificial Sequence
  Synthetic polynucleotide encoding artificial human antibody CDR-L3 region
caacagagttacagtcccccgtggacg

SEQ ID NO: 7050 - DNA, 33 bp, Artificial Sequence
  Synthetic polynucleotide encoding artificial human antibody CDR-L3 region
gcagcatgggatgacagcctgaatggtccggtg

SEQ ID NO: 7051 - DNA, 27 bp, Artificial Sequence
  Synthetic polynucleotide encoding artificial human antibody CDR-L3 region
caacagagttacagtaccccattcact

SEQ ID NO: 7052 - DNA, 33 bp, Artificial Sequence; identical to SEQ ID NO: 6312
  Synthetic polynucleotide encoding artificial human antibody CDR-L3 region

SEQ ID NO: 7053 - DNA, 36 bp, Artificial Sequence
  Synthetic polynucleotide encoding artificial human antibody CDR-L3 region
caatcagcagacaacattggtacttttcttgtgctg

SEQ ID NO: 7054 - DNA, 36 bp, Artificial Sequence
  Synthetic polynucleotide encoding artificial human antibody CDR-L3 region
cagtcctatgacagcagcctaattggttctgtgatt

SEQ ID NO: 7055 - DNA, 33 bp, Artificial Sequence; identical to SEQ ID NO: 6338
  Synthetic polynucleotide encoding artificial human antibody CDR-L3 region

SEQ ID NO: 7056 - DNA, 27 bp, Artificial Sequence
  Synthetic polynucleotide encoding artificial human antibody CDR-L3 region
cagcaatattacaatactccgtactct

SEQ ID NO: 7057 - DNA, 33 bp, Artificial Sequence
  Synthetic polynucleotide encoding artificial human antibody CDR-L3 region
cactcccgggccaaaagtggttatcattatgtc

SEQ ID NO: 7058 - DNA, 33 bp, Artificial Sequence; identical to SEQ ID NO: 6434
  Synthetic polynucleotide encoding artificial human antibody CDR-L3 region

SEQ ID NO: 7059 - DNA, 24 bp, Artificial Sequence
  Synthetic polynucleotide encoding artificial human antibody CDR-L3 region
caggcgtgggacagcagcactgta

SEQ ID NO: 7060 - DNA, 36 bp, Artificial Sequence
  Synthetic polynucleotide encoding artificial human antibody CDR-L3 region
caatcagcagacaacattggtacttttcttgtggtt

SEQ ID NO: 7061 - DNA, 33 bp, Artificial Sequence
  Synthetic polynucleotide encoding artificial human antibody CDR-L3 region
cagcagtatactaagtggccgccggggctcact

SEQ ID NO: 7062 - DNA, 27 bp, Artificial Sequence
  Synthetic polynucleotide encoding artificial human antibody CDR-L3 region
caggcgtgggacagcagcctttatgtc

SEQ ID NO: 7063 - DNA, 27 bp, Artificial Sequence
  Synthetic polynucleotide encoding artificial human antibody CDR-L3 region
caggcgtgggacagcagcactgcggta

SEQ ID NO: 7064 - DNA, 27 bp, Artificial Sequence
  Synthetic polynucleotide encoding artificial human antibody CDR-L3 region
cagcagtatggtagctcacttgtgacg

SEQ ID NO: 7065 - DNA, 33 bp, Artificial Sequence; identical to SEQ ID NO: 6338
  Synthetic polynucleotide encoding artificial human antibody CDR-L3 region

SEQ ID NO: 7066 - DNA, 27 bp, Artificial Sequence
  Synthetic polynucleotide encoding artificial human antibody CDR-L3 region
cagcaatattataatactccgtacact

SEQ ID NO: 7067 - DNA, 24 bp, Artificial Sequence
  Synthetic polynucleotide encoding artificial human antibody CDR-L3 region
atgcaaggtatacacctttggacg

SEQ ID NO: 7068 - DNA, 33 bp, Artificial Sequence
  Synthetic polynucleotide encoding artificial human antibody CDR-L3 region
cagctatatgctgagtggcctccgaaacacact

SEQ ID NO: 7069 - DNA, 33 bp, Artificial Sequence; identical to SEQ ID NO: 6979
  Synthetic polynucleotide encoding artificial human antibody CDR-L3 region

SEQ ID NO: 7070 - DNA, 36 bp, Artificial Sequence
  Synthetic polynucleotide encoding artificial human antibody CDR-L3 region
caatcagcagacagcagtggtacttccgatgtggta

SEQ ID NO: 7071 - DNA, 30 bp, Artificial Sequence
  Synthetic polynucleotide encoding artificial human antibody CDR-L3 region
agctcatctataggcaactacaattatgtc

SEQ ID NO: 7072 - DNA, 30 bp, Artificial Sequence
  Synthetic polynucleotide encoding artificial human antibody CDR-L3 region
caggtgtgggatagtagtagtcccgtggta

SEQ ID NO: 7073 - DNA, 27 bp, Artificial Sequence
  Synthetic polynucleotide encoding artificial human antibody CDR-L3 region
atgcaagtcacagattttccctggacg

SEQ ID NO: 7074 - DNA, 27 bp, Artificial Sequence
  Synthetic polynucleotide encoding artificial human antibody CDR-L3 region
atgatctggcataacatggctctggtg

SEQ ID NO: 7075 - DNA, 33 bp, Artificial Sequence
  Synthetic polynucleotide encoding artificial human antibody CDR-L3 region
tcagcgtgggacagcagcctcactgctcgggtt

SEQ ID NO: 7076 - DNA, 27 bp, Artificial Sequence
  Synthetic polynucleotide encoding artificial human antibody CDR-L3 region
cagcagtatggtgactcacagctcact

SEQ ID NO: 7077 - DNA, 27 bp, Artificial Sequence
  Synthetic polynucleotide encoding artificial human antibody CDR-L3 region
caacaggctgacagtttcccggtcacc

SEQ ID NO: 7078 - DNA, 33 bp, Artificial Sequence
  Synthetic polynucleotide encoding artificial human antibody CDR-L3 region
ggaacatgggataccagcctgagtgcttgggtg

SEQ ID NO: 7079 - DNA, 33 bp, Artificial Sequence
  Synthetic polynucleotide encoding artificial human antibody CDR-L3 region
cactcccgggacagcagtggtcacctctctctc

SEQ ID NO: 7080 - DNA, 27 bp, Artificial Sequence
  Synthetic polynucleotide encoding artificial human antibody CDR-L3 region
cagcactatcataaatggcccatcacc

SEQ ID NO: 7081 - DNA, 27 bp, Artificial Sequence
  Synthetic polynucleotide encoding artificial human antibody CDR-L3 region
atgatttgggacaacaatgctgcggtc

SEQ ID NO: 7082 - DNA, 27 bp, Artificial Sequence
  Synthetic polynucleotide encoding artificial human antibody CDR-L3 region
atgcaagctacacattttcctctctct

SEQ ID NO: 7083 - DNA, 36 bp, Artificial Sequence
  Synthetic polynucleotide encoding artificial human antibody CDR-L3 region
ggaacatgggatagcagcctgagtgctggaggacta

SEQ ID NO: 7084 - DNA, 30 bp, Artificial Sequence
  Synthetic polynucleotide encoding artificial human antibody CDR-L3 region
agctcatatgcaggcagcaacaattgggtg

SEQ ID NO: 7085 - DNA, 36 bp, Artificial Sequence
  Synthetic polynucleotide encoding artificial human antibody CDR-L3 region
cagcagtataataactggcctcccgcaaggatcacc

SEQ ID NO: 7086 - DNA, 30 bp, Artificial Sequence
  Synthetic polynucleotide encoding artificial human antibody CDR-L3 region
gttctctataggggtcgtggcgccgtggta

SEQ ID NO: 7087 - DNA, 33 bp, Artificial Sequence
  Synthetic polynucleotide encoding artificial human antibody CDR-L3 region
gcagcatgggatgacagcctgaatggttatgtc

SEQ ID NO: 7088 - DNA, 27 bp, Artificial Sequence
  Synthetic polynucleotide encoding artificial human antibody CDR-L3 region
cagcagcgtgccaagtggcctccaacg

SEQ ID NO: 7089 - DNA, 27 bp, Artificial Sequence
  Synthetic polynucleotide encoding artificial human antibody CDR-L3 region
caacagcttaatagttaccctttcact

SEQ ID NO: 7090 - DNA, 30 bp, Artificial Sequence
  Synthetic polynucleotide encoding artificial human antibody CDR-L3 region
caggtgtgggatagtggtaatgagcgggtg

SEQ ID NO: 7091 - DNA, 27 bp, Artificial Sequence
  Synthetic polynucleotide encoding artificial human antibody CDR-L3 region
cagcactatattgagtggcccatcacc

SEQ ID NO: 7092 - DNA, 30 bp, Artificial Sequence
  Synthetic polynucleotide encoding artificial human antibody CDR-L3 region
cagcagtataaaaactggcccacgtggacg

SEQ ID NO: 7093 - DNA, 27 bp, Artificial Sequence
  Synthetic polynucleotide encoding artificial human antibody CDR-L3 region
cagcagcgtagcaagtggccgatcacc

SEQ ID NO: 7094 - DNA, 27 bp, Artificial Sequence
  Synthetic polynucleotide encoding artificial human antibody CDR-L3 region
caacagagttacagtacccctcacact

SEQ ID NO: 7095 - DNA, 24 bp, Artificial Sequence
  Synthetic polynucleotide encoding artificial human antibody CDR-L3 region
cagcagtattatagttaccgggga

SEQ ID NO: 7096 - DNA, 33 bp, Artificial Sequence
  Synthetic polynucleotide encoding artificial human antibody CDR-L3 region
tcagcatgggacagcagcctcagtgctcaggtg

SEQ ID NO: 7097 - DNA, 27 bp, Artificial Sequence
  Synthetic polynucleotide encoding artificial human antibody CDR-L3 region
caaaagtataacagtgtccctctcact

SEQ ID NO: 7098 - DNA, 27 bp, Artificial Sequence
  Synthetic polynucleotide encoding artificial human antibody CDR-L3 region
agctcatatacaagcagcagcacggtg

SEQ ID NO: 7099 - DNA, 27 bp, Artificial Sequence
  Synthetic polynucleotide encoding artificial human antibody CDR-L3 region
caacagaacgataacgtcccgatcacc

SEQ ID NO: 7100 - DNA, 36 bp, Artificial Sequence
  Synthetic polynucleotide encoding artificial human antibody CDR-L3 region
ggaacatgggatagcggcctgagtggtggggcatta

SEQ ID NO: 7101 - DNA, 27 bp, Artificial Sequence
  Synthetic polynucleotide encoding artificial human antibody CDR-L3 region
cagcaatattttaagtggcccatcacc

SEQ ID NO: 7102 - DNA, 30 bp, Artificial Sequence
  Synthetic polynucleotide encoding artificial human antibody CDR-L3 region
tgctcatatgcacgtggtgagaaatgggtg

SEQ ID NO: 7103 - DNA, 39 bp, Artificial Sequence
  Synthetic polynucleotide encoding artificial human antibody CDR-L3 region
tgctcccgggacagtagtgggaatcatctgcgggtgatc

SEQ ID NO: 7104 - DNA, 27 bp, Artificial Sequence
  Synthetic polynucleotide encoding artificial human antibody CDR-L3 region
cagcagcgtaccaactggccgctcact

SEQ ID NO: 7105 - DNA, 30 bp, Artificial Sequence
  Synthetic polynucleotide encoding artificial human antibody CDR-L3 region
gcctcatatacaaccaggttgtttgtggtg

SEQ ID NO: 7106 - DNA, 30 bp, Artificial Sequence
  Synthetic polynucleotide encoding artificial human antibody CDR-L3 region
cagcaatataagaactggcctccgaggacg

SEQ ID NO: 7107 - DNA, 27 bp, Artificial Sequence
  Synthetic polynucleotide encoding artificial human antibody CDR-L3 region
tgctcatatataagcaccaacactctt

SEQ ID NO: 7108 - DNA, 36 bp, Artificial Sequence
  Synthetic polynucleotide encoding artificial human antibody CDR-L3 region
aactcccgggacactagtggtgatcatctttggatg

SEQ ID NO: 7109 - DNA, 30 bp, Artificial Sequence
  Synthetic polynucleotide encoding artificial human antibody CDR-L3 region
caatcagcagacaacaatggtttcgtggcc

SEQ ID NO: 7110 - DNA, 30 bp, Artificial Sequence
  Synthetic polynucleotide encoding artificial human antibody CDR-L3 region
cagcactatggtagttcaccgccgtacagt

SEQ ID NO: 7111 - DNA, 27 bp, Artificial Sequence
  Synthetic polynucleotide encoding artificial human antibody CDR-L3 region
cagcactattatgatactcctctctct

SEQ ID NO: 7112 - DNA, 27 bp, Artificial Sequence
  Synthetic polynucleotide encoding artificial human antibody CDR-L3 region
caacagagttacagtaccgcgatcacc

SEQ ID NO: 7113 - DNA, 30 bp, Artificial Sequence
  Synthetic polynucleotide encoding artificial human antibody CDR-L3 region
atgtcatatacaaccagcaactcttatgtc

SEQ ID NO: 7114 - DNA, 27 bp, Artificial Sequence
  Synthetic polynucleotide encoding artificial human antibody CDR-L3 region
ctagactataatagttatccgctcact

SEQ ID NO: 7115 - DNA, 27 bp, Artificial Sequence
  Synthetic polynucleotide encoding artificial human antibody CDR-L3 region
atgcaagctctacgatctcctatcacc

SEQ ID NO: 7116 - DNA, 27 bp, Artificial Sequence
  Synthetic polynucleotide encoding artificial human antibody CDR-L3 region
cagtcccatgacgccgcctctgttgtt

SEQ ID NO: 7117 - DNA, 27 bp, Artificial Sequence
  Synthetic polynucleotide encoding artificial human antibody CDR-L3 region
atgcaacctctacacactccgtggacg

SEQ ID NO: 7118 - DNA, 27 bp, Artificial Sequence
  Synthetic polynucleotide encoding artificial human antibody CDR-L3 region
cagcactacaataactggcctccggcc

SEQ ID NO: 7119 - DNA, 33 bp, Artificial Sequence
  Synthetic polynucleotide encoding artificial human antibody CDR-L3 region
agctcatatacaagcagcagcactctttgggtg

SEQ ID NO: 7120 - DNA, 33 bp, Artificial Sequence
  Synthetic polynucleotide encoding artificial human antibody CDR-L3 region
gcagcatgggatgacaccctgattggttatgtc

SEQ ID NO: 7121 - DNA, 27 bp, Artificial Sequence
  Synthetic polynucleotide encoding artificial human antibody CDR-L3 region
caatcttatgatcgcggcaaaatggtc

SEQ ID NO: 7122 - DNA, 30 bp, Artificial Sequence
  Synthetic polynucleotide encoding artificial human antibody CDR-L3 region
cagcagtatatgaactggcctccgaggacg

SEQ ID NO: 7123 - DNA, 30 bp, Artificial Sequence
  Synthetic polynucleotide encoding artificial human antibody CDR-L3 region
tgctcatatgccggcaacaacagatttgtc

SEQ ID NO: 7124 - DNA, 33 bp, Artificial Sequence
  Synthetic polynucleotide encoding artificial human antibody CDR-L3 region
tgctcatatacagacagcagcccttcggtggtg

SEQ ID NO: 7125 - DNA, 30 bp, Artificial Sequence
  Synthetic polynucleotide encoding artificial human antibody CDR-L3 region
caactgtatgataatgtcgttccggtcact

SEQ ID NO: 7126 - DNA, 27 bp, Artificial Sequence
  Synthetic polynucleotide encoding artificial human antibody CDR-L3 region
caaaagtataacagtgccccccttacg

SEQ ID NO: 7127 - DNA, 27 bp, Artificial Sequence
  Synthetic polynucleotide encoding artificial human antibody CDR-L3 region
caacagtataatagttattcaggcagt

SEQ ID NO: 7128 - DNA, 30 bp, Artificial Sequence
  Synthetic polynucleotide encoding artificial human antibody CDR-L3 region
tgctcatatgtaggtgacttctatgtcatt

SEQ ID NO: 7129 - DNA, 27 bp, Artificial Sequence
  Synthetic polynucleotide encoding artificial human antibody CDR-L3 region
caacagagttacactaccccgatcact

SEQ ID NO: 7130 - DNA, 27 bp, Artificial Sequence
  Synthetic polynucleotide encoding artificial human antibody CDR-L3 region
caactctactatggtggtgctcttgtc

SEQ ID NO: 7131 - DNA, 27 bp, Artificial Sequence
  Synthetic polynucleotide encoding artificial human antibody CDR-L3 region
caacagcttaatagttactcgctcact

SEQ ID NO: 7132 - DNA, 33 bp, Artificial Sequence
  Synthetic polynucleotide encoding artificial human antibody CDR-L3 region
agttgccgggacggcaatggtaaccatgtgccc

SEQ ID NO: 7133 - DNA, 27 bp, Artificial Sequence
  Synthetic polynucleotide encoding artificial human antibody CDR-L3 region
cagcagtatggtagctcacctctaacg

SEQ ID NO: 7134 - DNA, 30 bp, Artificial Sequence
  Synthetic polynucleotide encoding artificial human antibody CDR-L3 region
cagcagtatagcaactggcctccgaggacg

SEQ ID NO: 7135 - DNA, 27 bp, Artificial Sequence
  Synthetic polynucleotide encoding artificial human antibody CDR-L3 region
caacagagctacagttccccatacaat

SEQ ID NO: 7136 - DNA, 33 bp, Artificial Sequence
  Synthetic polynucleotide encoding artificial human antibody CDR-L3 region
gcagcgtgggatgacagcctgaatggtgtgcta

SEQ ID NO: 7137 - DNA, 36 bp, Artificial Sequence
  Synthetic polynucleotide encoding artificial human antibody CDR-L3 region
caggtgtgggatactaatactgatcatttggaggta

SEQ ID NO: 7138 - DNA, 27 bp, Artificial Sequence
  Synthetic polynucleotide encoding artificial human antibody CDR-L3 region
cagaaatataacagtgccccgtggacg

SEQ ID NO: 7139 - DNA, 33 bp, Artificial Sequence
  Synthetic polynucleotide encoding artificial human antibody CDR-L3 region
gcagtatgggatgacaccctgagagctgtgatt

SEQ ID NO: 7140 - DNA, 33 bp, Artificial Sequence
  Synthetic polynucleotide encoding artificial human antibody CDR-L3 region
tcagcgtgggacagcagcctcaatgttcgggtt

SEQ ID NO: 7141 - DNA, 33 bp, Artificial Sequence
  Synthetic polynucleotide encoding artificial human antibody CDR-L3 region
agctcatttacaagcgacagcactcatctgatt

SEQ ID NO: 7142 - DNA, 27 bp, Artificial Sequence
  Synthetic polynucleotide encoding artificial human antibody CDR-L3 region
cagcaatattatagtcatccgtacacc

SEQ ID NO: 7143 - DNA, 27 bp, Artificial Sequence
  Synthetic polynucleotide encoding artificial human antibody CDR-L3 region
ctgcaatctacacaatttcctcggacg

SEQ ID NO: 7144 - DNA, 27 bp, Artificial Sequence
  Synthetic polynucleotide encoding artificial human antibody CDR-L3 region
caatcttatgatcgcggcgtaatggtt

SEQ ID NO: 7145 - DNA, 30 bp, Artificial Sequence
  Synthetic polynucleotide encoding artificial human antibody CDR-L3 region
cagtcttatgattcttccaatcaaataatt

SEQ ID NO: 7146 - DNA, 27 bp, Artificial Sequence
  Synthetic polynucleotide encoding artificial human antibody CDR-L3 region
caacactattatgaatggcccatcacc

SEQ ID NO: 7147 - DNA, 27 bp, Artificial Sequence
  Synthetic polynucleotide encoding artificial human antibody CDR-L3 region
cagcagtatggtagctcaccctggacg

SEQ ID NO: 7148 - DNA, 33 bp, Artificial Sequence
  Synthetic polynucleotide encoding artificial human antibody CDR-L3 region
cagtcctatgacagtagcctgagtggttgggtg

SEQ ID NO: 7149 - DNA, 39 bp, Artificial Sequence
  Synthetic polynucleotide encoding artificial human antibody CDR-L3 region
agctcatatacaaggaggagcaacactgtgactgtggta

SEQ ID NO: 7150 - DNA, 33 bp, Artificial Sequence; identical to SEQ ID NO: 6386
  Synthetic polynucleotide encoding artificial human antibody CDR-L3 region

SEQ ID NO: 7151 - DNA, 27 bp, Artificial Sequence
  Synthetic polynucleotide encoding artificial human antibody CDR-L3 region
atgcaagctacacagtttccttggacg

SEQ ID NO: 7152 - DNA, 27 bp, Artificial Sequence
  Synthetic polynucleotide encoding artificial human antibody CDR-L3 region
cagcagtatgagacttactcgtggacg

SEQ ID NO: 7153 - DNA, 33 bp, Artificial Sequence
  Synthetic polynucleotide encoding artificial human antibody CDR-L3 region
gcaacttgggataggagtctgagtgcttgggtg

SEQ ID NO: 7154 - DNA, 30 bp, Artificial Sequence; identical to SEQ ID NO: 6623
  Synthetic polynucleotide encoding artificial human antibody CDR-L3 region

SEQ ID NO: 7155 - DNA, 33 bp, Artificial Sequence
  Synthetic polynucleotide encoding artificial human antibody CDR-L3 region
gcagtatgggatgacagcctgaatggtccggtg

SEQ ID NO: 7156 - DNA, 30 bp, Artificial Sequence
  Synthetic polynucleotide encoding artificial human antibody CDR-L3 region
caacagtatgatagaacacctccggttacc

SEQ ID NO: 7157 - DNA, 27 bp, Artificial Sequence
  Synthetic polynucleotide encoding artificial human antibody CDR-L3 region
caacattatagtgcttacccgcccact

SEQ ID NO: 7158 - DNA, 27 bp, Artificial Sequence
  Synthetic polynucleotide encoding artificial human antibody CDR-L3 region
atgcaagctctacaaattccgtatact

SEQ ID NO: 7159 - DNA, 36 bp, Artificial Sequence
  Synthetic polynucleotide encoding artificial human antibody CDR-L3 region
gcagcatgggatgacagactgcgtggttcctgggtg

SEQ ID NO: 7160 - DNA, 33 bp, Artificial Sequence
  Synthetic polynucleotide encoding artificial human antibody CDR-L3 region
gcaacatgggatgacagcctcaagggtccggtg

SEQ ID NO: 7161 - DNA, 27 bp, Artificial Sequence
  Synthetic polynucleotide encoding artificial human antibody CDR-L3 region
cagacctggggcactggctcttgggtg

SEQ ID NO: 7162 - DNA, 30 bp, Artificial Sequence
  Synthetic polynucleotide encoding artificial human antibody CDR-L3 region
cagcagtatcgtatgtggcctccgctcact

SEQ ID NO: 7163 - DNA, 33 bp, Artificial Sequence
  Synthetic polynucleotide encoding artificial human antibody CDR-L3 region
gcaacatgggatgacagcctgaatggtcccgta

SEQ ID NO: 7164 - DNA, 30 bp, Artificial Sequence
  Synthetic polynucleotide encoding artificial human antibody CDR-L3 region
cagcagtatggtagctcgtttgcgtacact

SEQ ID NO: 7165 - DNA, 33 bp, Artificial Sequence
  Synthetic polynucleotide encoding artificial human antibody CDR-L3 region
ggaacttgggataatagtttgagtgctggggta

SEQ ID NO: 7166 - DNA, 33 bp, Artificial Sequence
  Synthetic polynucleotide encoding artificial human antibody CDR-L3 region
ggagcttgggacagcgacctcgctatttatgtc

SEQ ID NO: 7167 - DNA, 33 bp, Artificial Sequence; identical to SEQ ID NO: 7155
  Synthetic polynucleotide encoding artificial human antibody CDR-L3 region

SEQ ID NO: 7168 - DNA, 33 bp, Artificial Sequence
  Synthetic polynucleotide encoding artificial human antibody CDR-L3 region
tcagcttgggattacagcctgaatggtcggttg

SEQ ID NO: 7169 - DNA, 27 bp, Artificial Sequence
  Synthetic polynucleotide encoding artificial human antibody CDR-L3 region
atgcaagctctacaaactgcccgcagt

SEQ ID NO: 7170 - DNA, 33 bp, Artificial Sequence; identical to SEQ ID NO: 7160
  Synthetic polynucleotide encoding artificial human antibody CDR-L3 region

SEQ ID NO: 7171 - DNA, 33 bp, Artificial Sequence; identical to SEQ ID NO: 7160
  Synthetic polynucleotide encoding artificial human antibody CDR-L3 region

SEQ ID NO: 7172 - DNA, 27 bp, Artificial Sequence
  Synthetic polynucleotide encoding artificial human antibody CDR-L3 region
cagtcctatgacaacaacctttgggtg

SEQ ID NO: 7173 - DNA, 27 bp, Artificial Sequence
  Synthetic polynucleotide encoding artificial human antibody CDR-L3 region
atgcaagctacagaatttcctcgtact

SEQ ID NO: 7174 - DNA, 27 bp, Artificial Sequence
  Synthetic polynucleotide encoding artificial human antibody CDR-L3 region
caacattatgatagtctcccgctcact

SEQ ID NO: 7175 - DNA, 33 bp, Artificial Sequence
  Synthetic polynucleotide encoding artificial human antibody CDR-L3 region
caacaggtcactagttatcgtcaggggtgcact

SEQ ID NO: 7176 - DNA, 27 bp, Artificial Sequence
  Synthetic polynucleotide encoding artificial human antibody CDR-L3 region
caacactatgatggttattctattact

SEQ ID NO: 7177 - DNA, 33 bp, Artificial Sequence; identical to SEQ ID NO: 6312
  Synthetic polynucleotide encoding artificial human antibody CDR-L3 region

SEQ ID NO: 7178 - DNA, 30 bp, Artificial Sequence
  Synthetic polynucleotide encoding artificial human antibody CDR-L3 region
tgttcatacgctggcacatacacctgggtg

SEQ ID NO: 7179 - DNA, 33 bp, Artificial Sequence
  Synthetic polynucleotide encoding artificial human antibody CDR-L3 region
ggaacatgggatggcagcctgagtgccgtggta

SEQ ID NO: 7180 - DNA, 27 bp, Artificial Sequence
  Synthetic polynucleotide encoding artificial human antibody CDR-L3 region
caacagtatgcgagttaccctctcact

SEQ ID NO: 7181 - DNA, 27 bp, Artificial Sequence
  Synthetic polynucleotide encoding artificial human antibody CDR-L3 region
caacagcttaatcgttacccgctcact

SEQ ID NO: 7182 - DNA, 33 bp, Artificial Sequence; identical to SEQ ID NO: 7160
  Synthetic polynucleotide encoding artificial human antibody CDR-L3 region

SEQ ID NO: 7183 - DNA, 33 bp, Artificial Sequence
  Synthetic polynucleotide encoding artificial human antibody CDR-L3 region
gcaacatgggatgacagtgtcaagggtccggtg

SEQ ID NO: 7184 - DNA, 27 bp, Artificial Sequence
  Synthetic polynucleotide encoding artificial human antibody CDR-L3 region
ttgcaagctacaaaatttcccctcacc

SEQ ID NO: 7185 - DNA, 27 bp, Artificial Sequence
  Synthetic polynucleotide encoding artificial human antibody CDR-L3 region
ctggcgaccaacaatctcccgtacact

SEQ ID NO: 7186 - DNA, 33 bp, Artificial Sequence
  Synthetic polynucleotide encoding artificial human antibody CDR-L3 region
tcctcatatacaggcagtaatactttcgcggtg

SEQ ID NO: 7187 - DNA, 33 bp, Artificial Sequence
  Synthetic polynucleotide encoding artificial human antibody CDR-L3 region
agctcatatgcaggcagcaacaatttgggggtg

SEQ ID NO: 7188 - DNA, 27 bp, Artificial Sequence
  Synthetic polynucleotide encoding artificial human antibody CDR-L3 region
caacattatgatacttatccgcccagt

SEQ ID NO: 7189 - DNA, 27 bp, Artificial Sequence
  Synthetic polynucleotide encoding artificial human antibody CDR-L3 region
cagcaatgttttagtactccgtggacg

SEQ ID NO: 7190 - DNA, 33 bp, Artificial Sequence
  Synthetic polynucleotide encoding artificial human antibody CDR-L3 region
gctgcatgggatgacaccctgaatgctctggtg

SEQ ID NO: 7191 - DNA, 27 bp, Artificial Sequence
  Synthetic polynucleotide encoding artificial human antibody CDR-L3 region
caacagagttacagtaccccattcact

SEQ ID NO: 7192 - DNA, 30 bp, Artificial Sequence
  Synthetic polynucleotide encoding artificial human antibody CDR-L3 region
caacagcttaatacttaccctccgaggacg

SEQ ID NO: 7193 - DNA, 30 bp, Artificial Sequence
  Synthetic polynucleotide encoding artificial human antibody CDR-L3 region
agctcatatgcagccaccaacactttgatt

SEQ ID NO: 7194 - DNA, 33 bp, Artificial Sequence
  Synthetic polynucleotide encoding artificial human antibody CDR-L3 region
cagtcctatgacagcagcctgagtggtgtggta

SEQ ID NO: 7195 - DNA, 27 bp, Artificial Sequence
  Synthetic polynucleotide encoding artificial human antibody CDR-L3 region
caccagcgtgccaactttccgctcact

SEQ ID NO: 7196 - DNA, 27 bp, Artificial Sequence
  Synthetic polynucleotide encoding artificial human antibody CDR-L3 region
cagcaatattataatactcctctcact

SEQ ID NO: 7197 - DNA, 33 bp, Artificial Sequence
  Synthetic polynucleotide encoding artificial human antibody CDR-L3 region
tgctcatatgcacgtgattaccccaattgggtt

SEQ ID NO: 7198 - DNA, 33 bp, Artificial Sequence
  Synthetic polynucleotide encoding artificial human antibody CDR-L3 region
ggaacatgggatagcagcctgagtgctgcggtg

SEQ ID NO: 7199 - DNA, 30 bp, Artificial Sequence
  Synthetic polynucleotide encoding artificial human antibody CDR-L3 region
tgttcatatgcaggcgcctataatgtgtta

SEQ ID NO: 7200 - DNA, 30 bp, Artificial Sequence
  Synthetic polynucleotide encoding artificial human antibody CDR-L3 region
agttcgtatgcaaaacacggaattctcgtc

SEQ ID NO: 7201 - DNA, 33 bp, Artificial Sequence
  Synthetic polynucleotide encoding artificial human antibody CDR-L3 region
tcatcatgggatgacagcctgcatggtcaggtg

SEQ ID NO: 7202 - DNA, 27 bp, Artificial Sequence
  Synthetic polynucleotide encoding artificial human antibody CDR-L3 region
ctccagcgtgccagcttgccgctcacc

SEQ ID NO: 7203 - DNA, 27 bp, Artificial Sequence
  Synthetic polynucleotide encoding artificial human antibody CDR-L3 region
gcggtttgggctgacaaccgctgggtg

SEQ ID NO: 7204 - DNA, 30 bp, Artificial Sequence
  Synthetic polynucleotide encoding artificial human antibody CDR-L3 region
agctcatatacaggcagcggcactgtgata

SEQ ID NO: 7205 - DNA, 27 bp, Artificial Sequence
  Synthetic polynucleotide encoding artificial human antibody CDR-L3 region
cagcagtataatagtccatcgtacact

SEQ ID NO: 7206 - DNA, 30 bp, Artificial Sequence
  Synthetic polynucleotide encoding artificial human antibody CDR-L3 region
agctcagaagcagacaggtaccttgtgata

SEQ ID NO: 7207 - DNA, 27 bp, Artificial Sequence
  Synthetic polynucleotide encoding artificial human antibody CDR-L3 region
ctgcaaaccacacactggccgctcacc

SEQ ID NO: 7208 - DNA, 27 bp, Artificial Sequence
  Synthetic polynucleotide encoding artificial human antibody CDR-L3 region
caacagtataatagttatttgtgggcg

SEQ ID NO: 7209 - DNA, 27 bp, Artificial Sequence
  Synthetic polynucleotide encoding artificial human antibody CDR-L3 region
agctcatatgcaggcacctctgtgata

SEQ ID NO: 7210 - DNA, 33 bp, Artificial Sequence
  Synthetic polynucleotide encoding artificial human antibody CDR-L3 region
tcgtcatgggatgacagcctgcatggtcaggtg

SEQ ID NO: 7211 - DNA, 24 bp, Artificial Sequence
  Synthetic polynucleotide encoding artificial human antibody CDR-L3 region
atgcaaggtacacacttgtttact

SEQ ID NO: 7212 - DNA, 33 bp, Artificial Sequence
  Synthetic polynucleotide encoding artificial human antibody CDR-L3 region
agttcctatgcagacaccaacaatttcggggta

SEQ ID NO: 7213 - DNA, 24 bp, Artificial Sequence
  Synthetic polynucleotide encoding artificial human antibody CDR-L3 region
caacagacttacaataaagccacc

SEQ ID NO: 7214 - DNA, 30 bp, Artificial Sequence
  Synthetic polynucleotide encoding artificial human antibody CDR-L3 region
agttcatatacaactaccggcactgtgctg

SEQ ID NO: 7215 - DNA, 27 bp, Artificial Sequence
  Synthetic polynucleotide encoding artificial human antibody CDR-L3 region
caacagtatggtcactcaccgtggacg

SEQ ID NO: 7216 - DNA, 27 bp, Artificial Sequence
  Synthetic polynucleotide encoding artificial human antibody CDR-L3 region
cagcagtatgggaactcacctcttacc

SEQ ID NO: 7217 - DNA, 27 bp, Artificial Sequence
  Synthetic polynucleotide encoding artificial human antibody CDR-L3 region
cagcaatatagtacgtcacctaggacg

SEQ ID NO: 7218 - DNA, 30 bp, Artificial Sequence
  Synthetic polynucleotide encoding artificial human antibody CDR-L3 region
agttcatatgcaggcgcctatattgtgatc

SEQ ID NO: 7219 - DNA, 33 bp, Artificial Sequence
  Synthetic polynucleotide encoding artificial human antibody CDR-L3 region
agctcatttgcaggcagcgacaacccttttgtc

SEQ ID NO: 7220 - DNA, 27 bp, Artificial Sequence
  Synthetic polynucleotide encoding artificial human antibody CDR-L3 region
caacaatatagtgataattctaatact

SEQ ID NO: 7221 - DNA, 27 bp, Artificial Sequence
  Synthetic polynucleotide encoding artificial human antibody CDR-L3 region
caggcgtgggacagcagcactggcgtg

SEQ ID NO: 7222 - DNA, 27 bp, Artificial Sequence
  Synthetic polynucleotide encoding artificial human antibody CDR-L3 region
caacagcttaatagttacccgtacact

SEQ ID NO: 7223 - DNA, 27 bp, Artificial Sequence
  Synthetic polynucleotide encoding artificial human antibody CDR-L3 region
caaaagtataacagtgccccgtggacg

SEQ ID NO: 7224 - DNA, 30 bp, Artificial Sequence
  Synthetic polynucleotide encoding artificial human antibody CDR-L3 region
agttcatatataaccagtggcggtgtgata

SEQ ID NO: 7225 - DNA, 33 bp, Artificial Sequence
  Synthetic polynucleotide encoding artificial human antibody CDR-L3 region
gcagcttgggaatccaccctgaatgcttgggtg

SEQ ID NO: 7226 - DNA, 27 bp, Artificial Sequence
  Synthetic polynucleotide encoding artificial human antibody CDR-L3 region
caacaatataatgattattcattcgct

SEQ ID NO: 7227 - DNA, 27 bp, Artificial Sequence
  Synthetic polynucleotide encoding artificial human antibody CDR-L3 region
atgcaaggtacacactggccgtggacg

SEQ ID NO: 7228 - DNA, 36 bp, Artificial Sequence
  Synthetic polynucleotide encoding artificial human antibody CDR-L3 region
cagtcttatggcagggacctggctggcctctatgtc

SEQ ID NO: 7229 - DNA, 27 bp, Artificial Sequence
  Synthetic polynucleotide encoding artificial human antibody CDR-L3 region
caacaatattatagtactcctcaaact

SEQ ID NO: 7230 - DNA, 33 bp, Artificial Sequence
  Synthetic polynucleotide encoding artificial human antibody CDR-L3 region
gcaacatgggatggcagcctgagcgcttgggtg

SEQ ID NO: 7231 - DNA, 27 bp, Artificial Sequence
  Synthetic polynucleotide encoding artificial human antibody CDR-L3 region
cagcagcgtgccaagttgccgctaact

SEQ ID NO: 7232 - DNA, 27 bp, Artificial Sequence
  Synthetic polynucleotide encoding artificial human antibody CDR-L3 region
cagcaatatcatagtcctcctctcact

SEQ ID NO: 7233 - DNA, 33 bp, Artificial Sequence
  Synthetic polynucleotide encoding artificial human antibody CDR-L3 region
tgctcatatgcaactaattaccccaattgggta

SEQ ID NO: 7234 - DNA, 24 bp, Artificial Sequence
  Synthetic polynucleotide encoding artificial human antibody CDR-L3 region
cagcagcgtagcaactggtacact

SEQ ID NO: 7235 - DNA, 33 bp, Artificial Sequence
  Synthetic polynucleotide encoding artificial human antibody CDR-L3 region
tactcgacagacagcagtggtaatcatggggtc

SEQ ID NO: 7236 - DNA, 27 bp, Artificial Sequence
  Synthetic polynucleotide encoding artificial human antibody CDR-L3 region
caaacctggggccctggcattcaggtg

SEQ ID NO: 7237 - DNA, 30 bp, Artificial Sequence
  Synthetic polynucleotide encoding artificial human antibody CDR-L3 region
agctcatatacaagcagcaacactataata

SEQ ID NO: 7238 - DNA, 30 bp, Artificial Sequence
  Synthetic polynucleotide encoding artificial human antibody CDR-L3 region
tccgcatatgcaggtagtaacactttccca

SEQ ID NO: 7239 - DNA, 27 bp, Artificial Sequence
  Synthetic polynucleotide encoding artificial human antibody CDR-L3 region
cagcaatatcttagtcctcctctcact

SEQ ID NO: 7240 - DNA, 33 bp, Artificial Sequence
  Synthetic polynucleotide encoding artificial human antibody CDR-L3 region
cagcagcgtaacaactggcctccccaagtcact

SEQ ID NO: 7241 - DNA, 30 bp, Artificial Sequence
  Synthetic polynucleotide encoding artificial human antibody CDR-L3 region
agctcagaagcagacaggtaccttgtggtc

SEQ ID NO: 7242 - DNA, 27 bp, Artificial Sequence
  Synthetic polynucleotide encoding artificial human antibody CDR-L3 region
caaaagtttaacagtgccccttggacg

SEQ ID NO: 7243 - DNA, 27 bp, Artificial Sequence
  Synthetic polynucleotide encoding artificial human antibody CDR-L3 region
caggcgtgggacagcagggcttatgtc

SEQ ID NO: 7244 - DNA, 27 bp, Artificial Sequence
  Synthetic polynucleotide encoding artificial human antibody CDR-L3 region
ttcctctcctatggtggtgctcgggtg

SEQ ID NO: 7245 - DNA, 30 bp, Artificial Sequence
  Synthetic polynucleotide encoding artificial human antibody CDR-L3 region
cagcagtataataactggcctccgttggcc

SEQ ID NO: 7246 - DNA, 36 bp, Artificial Sequence
  Synthetic polynucleotide encoding artificial human antibody CDR-L3 region
gtagcgtgggatgacagcctcaatggtctttatgtc

SEQ ID NO: 7247 - DNA, 30 bp, Artificial Sequence
  Synthetic polynucleotide encoding artificial human antibody CDR-L3 region
agctcatatacaagcagcagcactgtgata

SEQ ID NO: 7248 - DNA, 27 bp, Artificial Sequence
  Synthetic polynucleotide encoding artificial human antibody CDR-L3 region
cagcaatattatgatactcctcggacg

SEQ ID NO: 7249 - DNA, 27 bp, Artificial Sequence
  Synthetic polynucleotide encoding artificial human antibody CDR-L3 region
cagcagtatgggaactcacgtcttact

SEQ ID NO: 7250 - DNA, 30 bp, Artificial Sequence
  Synthetic polynucleotide encoding artificial human antibody CDR-L3 region
agctcatatgcaggcagctacattgtggta

SEQ ID NO: 7251 - DNA, 24 bp, Artificial Sequence
  Synthetic polynucleotide encoding artificial human antibody CDR-L3 region
caacaggctaccagcccgtacact

SEQ ID NO: 7252 - DNA, 27 bp, Artificial Sequence
  Synthetic polynucleotide encoding artificial human antibody CDR-L3 region
caacactatcgttcttcttcctggacg

SEQ ID NO: 7253 - DNA, 27 bp, Artificial Sequence
  Synthetic polynucleotide encoding artificial human antibody CDR-L3 region
caacaggttaacagtttcccgtacact

SEQ ID NO: 7254 - DNA, 30 bp, Artificial Sequence
  Synthetic polynucleotide encoding artificial human antibody CDR-L3 region
agctcatatacaggcagcggcactgtggtg

SEQ ID NO: 7255 - DNA, 33 bp, Artificial Sequence
  Synthetic polynucleotide encoding artificial human antibody CDR-L3 region
cagtcctatgacagcagcctgagtggttcggtg

SEQ ID NO: 7256 - DNA, 27 bp, Artificial Sequence
  Synthetic polynucleotide encoding artificial human antibody CDR-L3 region
caacaggctaacagtttccctcggacg

SEQ ID NO: 7257 - DNA, 27 bp, Artificial Sequence
  Synthetic polynucleotide encoding artificial human antibody CDR-L3 region
cagcattatcatactgttcctcggacg

SEQ ID NO: 7258 - DNA, 30 bp, Artificial Sequence
  Synthetic polynucleotide encoding artificial human antibody CDR-L3 region
cagccgcgtggcagctggcggggtttcact

SEQ ID NO: 7259 - DNA, 27 bp, Artificial Sequence
  Synthetic polynucleotide encoding artificial human antibody CDR-L3 region
cagcactataacatctggccttacact

SEQ ID NO: 7260 - DNA, 27 bp, Artificial Sequence
  Synthetic polynucleotide encoding artificial human antibody CDR-L3 region
cagcagtatggtggttcacctcggact

SEQ ID NO: 7261 - DNA, 24 bp, Artificial Sequence
  Synthetic polynucleotide encoding artificial human antibody CDR-L3 region
caacagtataatagttattggacg

SEQ ID NO: 7262 - DNA, 36 bp, Artificial Sequence
  Synthetic polynucleotide encoding artificial human antibody CDR-L3 region
cagtcgtatgaccgctccctgagtgcctcggcggtt

SEQ ID NO: 7263 - DNA, 27 bp, Artificial Sequence
  Synthetic polynucleotide encoding artificial human antibody CDR-L3 region
caggcgtgggacagcagcactgcagga

SEQ ID NO: 7264 - DNA, 27 bp, Artificial Sequence
  Synthetic polynucleotide encoding artificial human antibody CDR-L3 region
catcaatatgatagtttttcgtggacg

SEQ ID NO: 7265 - DNA, 27 bp, Artificial Sequence
  Synthetic polynucleotide encoding artificial human antibody CDR-L3 region
caacagcttaacagtttcccgtacact

SEQ ID NO: 7266 - DNA, 33 bp, Artificial Sequence
  Synthetic polynucleotide encoding artificial human antibody CDR-L3 region
tcatcatgggatgacatcctgcatgaacaggtg

SEQ ID NO: 7267 - DNA, 33 bp, Artificial Sequence
  Synthetic polynucleotide encoding artificial human antibody CDR-L3 region
cagcagtatggtggctcacctccgcagctcact

SEQ ID NO: 7268 - DNA, 27 bp, Artificial Sequence
  Synthetic polynucleotide encoding artificial human antibody CDR-L3 region
caacagagttacagtactccgtacact

SEQ ID NO: 7269 - DNA, 30 bp, Artificial Sequence
  Synthetic polynucleotide encoding artificial human antibody CDR-L3 region
tactctgcggctgacaacaatgggggggtg

SEQ ID NO: 7270 - DNA, 30 bp, Artificial Sequence
  Synthetic polynucleotide encoding artificial human antibody CDR-L3 region
agttcatatacaacccccggcactgtggtg

SEQ ID NO: 7271 - DNA, 27 bp, Artificial Sequence
  Synthetic polynucleotide encoding artificial human antibody CDR-L3 region
cagcaggcttacactttccctttcact

SEQ ID NO: 7272 - DNA, 24 bp, Artificial Sequence
  Synthetic polynucleotide encoding artificial human antibody CDR-L3 region
caacaatattataatactcccacg

SEQ ID NO: 7273 - DNA, 27 bp, Artificial Sequence
  Synthetic polynucleotide encoding artificial human antibody CDR-L3 region
caacaatattatattctcccgtggacg

SEQ ID NO: 7274 - DNA, 27 bp, Artificial Sequence
  Synthetic polynucleotide encoding artificial human antibody CDR-L3 region
cagcaatatcttagtcctcctctcact

SEQ ID NO: 7275 - DNA, 30 bp, Artificial Sequence
  Synthetic polynucleotide encoding artificial human antibody CDR-L3 region
gcagcatgggattacggcctgcatggtcta

SEQ ID NO: 7276 - DNA, 27 bp, Artificial Sequence
  Synthetic polynucleotide encoding artificial human antibody CDR-L3 region
caacagtatactacttattctcgaacg

SEQ ID NO: 7277 - DNA, 27 bp, Artificial Sequence
  Synthetic polynucleotide encoding artificial human antibody CDR-L3 region
cagcattatcatagtgttcctcggacg

SEQ ID NO: 7278 - DNA, 36 bp, Artificial Sequence
  Synthetic polynucleotide encoding artificial human antibody CDR-L3 region
gcagcatgggatgacagcctgagtggccattgggtg

SEQ ID NO: 7279 - DNA, 27 bp, Artificial Sequence
  Synthetic polynucleotide encoding artificial human antibody CDR-L3 region
cagcagcgtgccaacttgccgctaact

SEQ ID NO: 7280 - DNA, 27 bp, Artificial Sequence
  Synthetic polynucleotide encoding artificial human antibody CDR-L3 region
ctgcaagattataattaccccaaaaca

SEQ ID NO: 7281 - DNA, 27 bp, Artificial Sequence
  Synthetic polynucleotide encoding artificial human antibody CDR-L3 region
cagcaatgttatggtgttccgctcact

SEQ ID NO: 7282 - DNA, 30 bp, Artificial Sequence
  Synthetic polynucleotide encoding artificial human antibody CDR-L3 region
atgcaaggtacacactggccttcgtggacg

SEQ ID NO: 7283 - DNA, 30 bp, Artificial Sequence
  Synthetic polynucleotide encoding artificial human antibody CDR-L3 region
tgctcatatgcagccaggggcacttcggtg

SEQ ID NO: 7284 - DNA, 27 bp, Artificial Sequence
  Synthetic polynucleotide encoding artificial human antibody CDR-L3 region
ctgcaaaccacacactggccgctcacc

SEQ ID NO: 7285 - DNA, 30 bp, Artificial Sequence
  Synthetic polynucleotide encoding artificial human antibody CDR-L3 region
gcctcagttgcaggcggtgacaacttgcta

SEQ ID NO: 7286 - DNA, 24 bp, Artificial Sequence
  Synthetic polynucleotide encoding artificial human antibody CDR-L3 region
cagcactatgctgccgcaatcact

SEQ ID NO: 7287 - DNA, 30 bp, Artificial Sequence
  Synthetic polynucleotide encoding artificial human antibody CDR-L3 region
cagcactataatacctggccccggtggacg

SEQ ID NO: 7288 - DNA, 27 bp, Artificial Sequence
  Synthetic polynucleotide encoding artificial human antibody CDR-L3 region
caacaggttcatagttaccccttcact

SEQ ID NO: 7289 - DNA, 33 bp, Artificial Sequence
  Synthetic polynucleotide encoding artificial human antibody CDR-L3 region
aactcccggcacagcagtggtaactatctggtc

SEQ ID NO: 7290 - DNA, 33 bp, Artificial Sequence
  Synthetic polynucleotide encoding artificial human antibody CDR-L3 region
tactcaacagacaggtatgctgatcacagggtg

SEQ ID NO: 7291 - DNA, 33 bp, Artificial Sequence
  Synthetic polynucleotide encoding artificial human antibody CDR-L3 region
gcatcttgggatgacagtctgcacggttatgtc

SEQ ID NO: 7292 - DNA, 33 bp, Artificial Sequence
  Synthetic polynucleotide encoding artificial human antibody CDR-L3 region
gctgtatgggatgacagtgtaaatgctccggtg

SEQ ID NO: 7293 - DNA, 27 bp, Artificial Sequence
  Synthetic polynucleotide encoding artificial human antibody CDR-L3 region
cagcaccgaagcaactggcctctcact

SEQ ID NO: 7294 - DNA, 27 bp, Artificial Sequence
  Synthetic polynucleotide encoding artificial human antibody CDR-L3 region
cagcagtatcttacgtcaattgggacg

SEQ ID NO: 7295 - DNA, 30 bp, Artificial Sequence; identical to SEQ ID NO: 6271
  Synthetic polynucleotide encoding artificial human antibody CDR-L3 region

SEQ ID NO: 7296 - DNA, 24 bp, Artificial Sequence
  Synthetic polynucleotide encoding artificial human antibody CDR-L3 region
caacaatataaaacttatcccact

SEQ ID NO: 7297 - DNA, 27 bp, Artificial Sequence
  Synthetic polynucleotide encoding artificial human antibody CDR-L3 region
ctacaagactacctctacccagccact

SEQ ID NO: 7298 - DNA, 27 bp, Artificial Sequence
  Synthetic polynucleotide encoding artificial human antibody CDR-L3 region
cagcaatattatgctgttccgctcact

SEQ ID NO: 7299 - DNA, 30 bp, Artificial Sequence
  Synthetic polynucleotide encoding artificial human antibody CDR-L3 region
aactcatattcgcgcgccggatatagtgtt

SEQ ID NO: 7300 - DNA, 27 bp, Artificial Sequence
  Synthetic polynucleotide encoding artificial human antibody CDR-L3 region
caacaatattatagtactgcctggacg

SEQ ID NO: 7301 - DNA, 27 bp, Artificial Sequence
  Synthetic polynucleotide encoding artificial human antibody CDR-L3 region
cagcagtatggtagctcaccgtacact

SEQ ID NO: 7302 - DNA, 27 bp, Artificial Sequence
  Synthetic polynucleotide encoding artificial human antibody CDR-L3 region
cagacgtggggcactgacacttgggtg

SEQ ID NO: 7303 - DNA, 30 bp, Artificial Sequence
  Synthetic polynucleotide encoding artificial human antibody CDR-L3 region
caggcgtgggacaataggaatcttgatgtc

SEQ ID NO: 7304 - DNA, 27 bp, Artificial Sequence
  Synthetic polynucleotide encoding artificial human antibody CDR-L3 region
tgctcatatgcaggcagcccttatgtc

SEQ ID NO: 7305 - DNA, 30 bp, Artificial Sequence; identical to SEQ ID NO: 6261
  Synthetic polynucleotide encoding artificial human antibody CDR-L3 region

SEQ ID NO: 7306 - DNA, 27 bp, Artificial Sequence
  Synthetic polynucleotide encoding artificial human antibody CDR-L3 region
cagcagtatggtagctcaccgctcact

SEQ ID NO: 7307 - DNA, 30 bp, Artificial Sequence
  Synthetic polynucleotide encoding artificial human antibody CDR-L3 region
ggagcatgggatactgggctgactgtgatg

SEQ ID NO: 7308 - DNA, 33 bp, Artificial Sequence
  Synthetic polynucleotide encoding artificial human antibody CDR-L3 region
gcagcgtgggacgacagcctgaatgcatggctg

SEQ ID NO: 7309 - DNA, 27 bp, Artificial Sequence
  Synthetic polynucleotide encoding artificial human antibody CDR-L3 region
caacaggctaacagtttcccattcact

SEQ ID NO: 7310 - DNA, 27 bp, Artificial Sequence
  Synthetic polynucleotide encoding artificial human antibody CDR-L3 region
cagcagtatggtagctcaccgcggact

SEQ ID NO: 7311 - DNA, 27 bp, Artificial Sequence
  Synthetic polynucleotide encoding artificial human antibody CDR-L3 region
caacagagttacagcacccctcctact

SEQ ID NO: 7312 - DNA, 30 bp, Artificial Sequence
  Synthetic polynucleotide encoding artificial human antibody CDR-L3 region
cagcagtatgataagtggcctccgttcact

SEQ ID NO: 7313 - DNA, 27 bp, Artificial Sequence
  Synthetic polynucleotide encoding artificial human antibody CDR-L3 region
caaaagtctgacggtgccccgtggacg

SEQ ID NO: 7314 - DNA, 30 bp, Artificial Sequence
  Synthetic polynucleotide encoding artificial human antibody CDR-L3 region
atgcaaggtacacactggcctccgtggacg

SEQ ID NO: 7315 - DNA, 33 bp, Artificial Sequence
  Synthetic polynucleotide encoding artificial human antibody CDR-L3 region
agctcatatacaagcaccagcactctcgtggta

SEQ ID NO: 7316 - DNA, 33 bp, Artificial Sequence
  Synthetic polynucleotide encoding artificial human antibody CDR-L3 region
ggaacctgggatgagatcctgggtgtgtgggtc

SEQ ID NO: 7317 - DNA, 24 bp, Artificial Sequence
  Synthetic polynucleotide encoding artificial human antibody CDR-L3 region
atgcaagctctacaaactccggcg

SEQ ID NO: 7318 - DNA, 27 bp, Artificial Sequence
  Synthetic polynucleotide encoding artificial human antibody CDR-L3 region
caggcgtgggacagcagcactccggta

SEQ ID NO: 7319 - DNA, 33 bp, Artificial Sequence
  Synthetic polynucleotide encoding artificial human antibody CDR-L3 region
gcaacatgggatgacagcctgagtggttgggtg

SEQ ID NO: 7320 - DNA, 27 bp, Artificial Sequence
  Synthetic polynucleotide encoding artificial human antibody CDR-L3 region
cagcagcgtagcaactggccccatccc

SEQ ID NO: 7321 - DNA, 27 bp, Artificial Sequence
  Synthetic polynucleotide encoding artificial human antibody CDR-L3 region
cagcaatattatagtagtccgtaccct

SEQ ID NO: 7322 - DNA, 33 bp, Artificial Sequence; identical to SEQ ID NO: 6767
  Synthetic polynucleotide encoding artificial human antibody CDR-L3 region

SEQ ID NO: 7323 - DNA, 27 bp, Artificial Sequence
  Synthetic polynucleotide encoding artificial human antibody CDR-L3 region
cagatgtataacactgccccctggacg

SEQ ID NO: 7324 - DNA, 30 bp, Artificial Sequence
  Synthetic polynucleotide encoding artificial human antibody CDR-L3 region
tactcatatgcaggtagtagcacttgggtg

SEQ ID NO: 7325 - DNA, 33 bp, Artificial Sequence; identical to SEQ ID NO: 6386
  Synthetic polynucleotide encoding artificial human antibody CDR-L3 region

SEQ ID NO: 7326 - DNA, 33 bp, Artificial Sequence; identical to SEQ ID NO: 6685
  Synthetic polynucleotide encoding artificial human antibody CDR-L3 region

SEQ ID NO: 7327 - DNA, 30 bp, Artificial Sequence
  Synthetic polynucleotide encoding artificial human antibody CDR-L3 region
cagctctatgataattcaccgaaattcact

SEQ ID NO: 7328 - DNA, 33 bp, Artificial Sequence
  Synthetic polynucleotide encoding artificial human antibody CDR-L3 region
ggaacttgggatagcagcctgagcgctggagtc

SEQ ID NO: 7329 - DNA, 30 bp, Artificial Sequence
  Synthetic polynucleotide encoding artificial human antibody CDR-L3 region
gtgctgtatatgggtagtggcatctgggtg

SEQ ID NO: 7330 - DNA, 27 bp, Artificial Sequence
  Synthetic polynucleotide encoding artificial human antibody CDR-L3 region
atgcaaggtacacactggccttggact

SEQ ID NO: 7331 - DNA, 27 bp, Artificial Sequence
  Synthetic polynucleotide encoding artificial human antibody CDR-L3 region
atgcaagctctacaaactctgtacact

SEQ ID NO: 7332 - DNA, 33 bp, Artificial Sequence; identical to SEQ ID NO: 6763
  Synthetic polynucleotide encoding artificial human antibody CDR-L3 region

SEQ ID NO: 7333 - DNA, 33 bp, Artificial Sequence
  Synthetic polynucleotide encoding artificial human antibody CDR-L3 region
gcagcatgggatgacggcctgaatggtctcgcc

SEQ ID NO: 7334 - DNA, 27 bp, Artificial Sequence
  Synthetic polynucleotide encoding artificial human antibody CDR-L3 region
acgcaagctacacaatttccattcacc

SEQ ID NO: 7335 - DNA, 36 bp, Artificial Sequence
  Synthetic polynucleotide encoding artificial human antibody CDR-L3 region
gcagcatgggatgacagcctgaatggtcgttatgtc

SEQ ID NO: 7336 - DNA, 27 bp, Artificial Sequence
  Synthetic polynucleotide encoding artificial human antibody CDR-L3 region
caccaatataatttttttccgtggacg

SEQ ID NO: 7337 - DNA, 27 bp, Artificial Sequence
  Synthetic polynucleotide encoding artificial human antibody CDR-L3 region
agctcatatacaagcagcaccagggtc

SEQ ID NO: 7338 - DNA, 30 bp, Artificial Sequence
  Synthetic polynucleotide encoding artificial human antibody CDR-L3 region
agctcatatacaagcaccatcaccctggtg

SEQ ID NO: 7339 - DNA, 24 bp, Artificial Sequence
  Synthetic polynucleotide encoding artificial human antibody CDR-L3 region
caggcctggggcactggcattgtg

SEQ ID NO: 7340 - DNA, 30 bp, Artificial Sequence
  Synthetic polynucleotide encoding artificial human antibody CDR-L3 region
cagtcctatgacagcagcctgaggagagta

SEQ ID NO: 7341 - DNA, 33 bp, Artificial Sequence
  Synthetic polynucleotide encoding artificial human antibody CDR-L3 region
aactcccgggacagcagtggtaaccatgtggta

SEQ ID NO: 7342 - DNA, 36 bp, Artificial Sequence
  Synthetic polynucleotide encoding artificial human antibody CDR-L3 region
tgctcatatggaactacccccacttccccttatgtc

SEQ ID NO: 7343 - DNA, 33 bp, Artificial Sequence
  Synthetic polynucleotide encoding artificial human antibody CDR-L3 region
cagcagtctggtagctcacctcctatgtacact

SEQ ID NO: 7344 - DNA, 30 bp, Artificial Sequence
  Synthetic polynucleotide encoding artificial human antibody CDR-L3 region
catcactatggtagttcacctgcgtggacg

SEQ ID NO: 7345 - DNA, 27 bp, Artificial Sequence
  Synthetic polynucleotide encoding artificial human antibody CDR-L3 region
atgcaacatacacactggccccacact

SEQ ID NO: 7346 - DNA, 33 bp, Artificial Sequence
  Synthetic polynucleotide encoding artificial human antibody CDR-L3 region
agctcatatgcaggcagcaacaattttgtggta

SEQ ID NO: 7347 - DNA, 27 bp, Artificial Sequence
  Synthetic polynucleotide encoding artificial human antibody CDR-L3 region
tgctcatatgcaggcggcccctttgtc

SEQ ID NO: 7348 - DNA, 24 bp, Artificial Sequence
  Synthetic polynucleotide encoding artificial human antibody CDR-L3 region
tactctgcggctgaccagggagtg

SEQ ID NO: 7349 - DNA, 27 bp, Artificial Sequence
  Synthetic polynucleotide encoding artificial human antibody CDR-L3 region
caccaatatcgtcatcgtccttccacc

SEQ ID NO: 7350 - DNA, 33 bp, Artificial Sequence
  Synthetic polynucleotide encoding artificial human antibody CDR-L3 region
gcatcttgggatgacagcctgaatggtgtggtg

SEQ ID NO: 7351 - DNA, 27 bp, Artificial Sequence
  Synthetic polynucleotide encoding artificial human antibody CDR-L3 region
ctacaacttaatagttaccccctcact

SEQ ID NO: 7352 - DNA, 27 bp, Artificial Sequence
  Synthetic polynucleotide encoding artificial human antibody CDR-L3 region
caaagatataaccttgccccgtggacg

SEQ ID NO: 7353 - DNA, 33 bp, Artificial Sequence
  Synthetic polynucleotide encoding artificial human antibody CDR-L3 region
ggaacatgggataccagcctgcatattgtggtc

SEQ ID NO: 7354 - DNA, 33 bp, Artificial Sequence
  Synthetic polynucleotide encoding artificial human antibody CDR-L3 region
gcagcatgggatgacagcctgagtggcgtggta

SEQ ID NO: 7355 - DNA, 27 bp, Artificial Sequence
  Synthetic polynucleotide encoding artificial human antibody CDR-L3 region
cagacctgggacactggcgtttgggtg

SEQ ID NO: 7356 - DNA, 30 bp, Artificial Sequence
  Synthetic polynucleotide encoding artificial human antibody CDR-L3 region
caacagcttattgaacaccctccgctcact

SEQ ID NO: 7357 - DNA, 33 bp, Artificial Sequence
  Synthetic polynucleotide encoding artificial human antibody CDR-L3 region
gcagcatgggatgacagcctgaatggcctggta

SEQ ID NO: 7358 - DNA, 27 bp, Artificial Sequence
  Synthetic polynucleotide encoding artificial human antibody CDR-L3 region
caacaggctaacagtttccccctcact

SEQ ID NO: 7359 - DNA, 27 bp, Artificial Sequence
  Synthetic polynucleotide encoding artificial human antibody CDR-L3 region
caacagtataatagttacccgtggacg

SEQ ID NO: 7360 - DNA, 30 bp, Artificial Sequence; identical to SEQ ID NO: 6336
  Synthetic polynucleotide encoding artificial human antibody CDR-L3 region

SEQ ID NO: 7361 - DNA, 27 bp, Artificial Sequence
  Synthetic polynucleotide encoding artificial human antibody CDR-L3 region
cagacctggggcagtggcgtctgggtg

SEQ ID NO: 7362 - DNA, 27 bp, Artificial Sequence
  Synthetic polynucleotide encoding artificial human antibody CDR-L3 region
cagacctggggcactggcccctgggtg

SEQ ID NO: 7363 - DNA, 27 bp, Artificial Sequence
  Synthetic polynucleotide encoding artificial human antibody CDR-L3 region
atgcaagcttttctttttccatacacc

SEQ ID NO: 7364 - DNA, 30 bp, Artificial Sequence
  Synthetic polynucleotide encoding artificial human antibody CDR-L3 region
caacagagttacagtacccctccggacact

SEQ ID NO: 7365 - DNA, 24 bp, Artificial Sequence
  Synthetic polynucleotide encoding artificial human antibody CDR-L3 region
caacagtattttcatatggggacc

SEQ ID NO: 7366 - DNA, 33 bp, Artificial Sequence
  Synthetic polynucleotide encoding artificial human antibody CDR-L3 region
gcagcgtgggatgacagcctgacttctctgttg

SEQ ID NO: 7367 - DNA, 27 bp, Artificial Sequence
  Synthetic polynucleotide encoding artificial human antibody CDR-L3 region
cagcaatatggtagtttacctttcgcc

SEQ ID NO: 7368 - DNA, 27 bp, Artificial Sequence
  Synthetic polynucleotide encoding artificial human antibody CDR-L3 region
aaacagggttcacacgggccgcacact

SEQ ID NO: 7369 - DNA, 27 bp, Artificial Sequence
  Synthetic polynucleotide encoding artificial human antibody CDR-L3 region
atgcaagcagtacaaactccgtggacg

SEQ ID NO: 7370 - DNA, 30 bp, Artificial Sequence
  Synthetic polynucleotide encoding artificial human antibody CDR-L3 region
cagacgtgggccagtggcttttggggggtg

SEQ ID NO: 7371 - DNA, 24 bp, Artificial Sequence
  Synthetic polynucleotide encoding artificial human antibody CDR-L3 region
gtgcagcgccactggccttggacg

SEQ ID NO: 7372 - DNA, 33 bp, Artificial Sequence
  Synthetic polynucleotide encoding artificial human antibody CDR-L3 region
gcagtgtgggatgactacctggatggtccggta

SEQ ID NO: 7373 - DNA, 33 bp, Artificial Sequence
  Synthetic polynucleotide encoding artificial human antibody CDR-L3 region
cagtgctttgacaccagactgagtggttcggtg

SEQ ID NO: 7374 - DNA, 27 bp, Artificial Sequence
  Synthetic polynucleotide encoding artificial human antibody CDR-L3 region
caacagacttacagtaatccccggact

SEQ ID NO: 7375 - DNA, 30 bp, Artificial Sequence
  Synthetic polynucleotide encoding artificial human antibody CDR-L3 region
gcctcatatgcgggcggcgacacttgggtg

SEQ ID NO: 7376 - DNA, 27 bp, Artificial Sequence
  Synthetic polynucleotide encoding artificial human antibody CDR-L3 region
cagcagtatgataactggcctcgaact

SEQ ID NO: 7377 - DNA, 27 bp, Artificial Sequence
  Synthetic polynucleotide encoding artificial human antibody CDR-L3 region
caacagtataatatttttccgtacact

SEQ ID NO: 7378 - DNA, 27 bp, Artificial Sequence
  Synthetic polynucleotide encoding artificial human antibody CDR-L3 region
cagcagtatggtaggtcaccggtcact

SEQ ID NO: 7379 - DNA, 27 bp, Artificial Sequence
  Synthetic polynucleotide encoding artificial human antibody CDR-L3 region
caacaatataatacgtatcccatcact

SEQ ID NO: 7380 - DNA, 30 bp, Artificial Sequence
  Synthetic polynucleotide encoding artificial human antibody CDR-L3 region
ctctcatacggaggcgactatacttatgtc

SEQ ID NO: 7381 - DNA, 33 bp, Artificial Sequence
  Synthetic polynucleotide encoding artificial human antibody CDR-L3 region
cagtcccatgacgactttttgggtggcgcgatt

SEQ ID NO: 7382 - DNA, 33 bp, Artificial Sequence
  Synthetic polynucleotide encoding artificial human antibody CDR-L3 region
cagtcctacgacagcagcctgtttggaggagtg

SEQ ID NO: 7383 - DNA, 33 bp, Artificial Sequence
  Synthetic polynucleotide encoding artificial human antibody CDR-L3 region
agttcggctcctaccaaaatcgctctcgaggtg

SEQ ID NO: 7384 - DNA, 27 bp, Artificial Sequence
  Synthetic polynucleotide encoding artificial human antibody CDR-L3 region
cagtcttatgatggcaacaattgggtg

SEQ ID NO: 7385 - DNA, 27 bp, Artificial Sequence
  Synthetic polynucleotide encoding artificial human antibody CDR-L3 region
caacactataataagtggccgtacact

SEQ ID NO: 7386 - DNA, 30 bp, Artificial Sequence
  Synthetic polynucleotide encoding artificial human antibody CDR-L3 region
tgctcatttgcaggaagtagcacttatgtc

SEQ ID NO: 7387 - DNA, 27 bp, Artificial Sequence
  Synthetic polynucleotide encoding artificial human antibody CDR-L3 region
cagcagtataataactggccgtacact

SEQ ID NO: 7388 - DNA, 27 bp, Artificial Sequence
  Synthetic polynucleotide encoding artificial human antibody CDR-L3 region
caacaggctagcggtttcccgtacact

SEQ ID NO: 7389 - DNA, 27 bp, Artificial Sequence
  Synthetic polynucleotide encoding artificial human antibody CDR-L3 region
cagcactatcttaagtggccgtacact

SEQ ID NO: 7390 - DNA, 27 bp, Artificial Sequence
  Synthetic polynucleotide encoding artificial human antibody CDR-L3 region
caacaatatgattcttatccgctcact

SEQ ID NO: 7391 - DNA, 27 bp, Artificial Sequence
  Synthetic polynucleotide encoding artificial human antibody CDR-L3 region
cagcagtatggtagctcaccgagaact

SEQ ID NO: 7392 - DNA, 27 bp, Artificial Sequence
  Synthetic polynucleotide encoding artificial human antibody CDR-L3 region
cagcagtatggtagctcaccggggacg

SEQ ID NO: 7393 - DNA, 27 bp, Artificial Sequence
  Synthetic polynucleotide encoding artificial human antibody CDR-L3 region
cagcaatattatagttcccctcaaact

SEQ ID NO: 7394 - DNA, 33 bp, Artificial Sequence; identical to SEQ ID NO: 6604
  Synthetic polynucleotide encoding artificial human antibody CDR-L3 region

SEQ ID NO: 7395 - DNA, 33 bp, Artificial Sequence
  Synthetic polynucleotide encoding artificial human antibody CDR-L3 region
tcagcgtgggatgacagcctgagtgtcgtactc

SEQ ID NO: 7396 - DNA, 27 bp, Artificial Sequence
  Synthetic polynucleotide encoding artificial human antibody CDR-L3 region
atgcaaggtacacactggccttacact

SEQ ID NO: 7397 - DNA, 27 bp, Artificial Sequence
  Synthetic polynucleotide encoding artificial human antibody CDR-L3 region
cagcaatgttatggtagtccgctcact

SEQ ID NO: 7398 - DNA, 33 bp, Artificial Sequence
  Synthetic polynucleotide encoding artificial human antibody CDR-L3 region
agctcatatggaggcaggaacaatttttgggtg

SEQ ID NO: 7399 - DNA, 27 bp, Artificial Sequence
  Synthetic polynucleotide encoding artificial human antibody CDR-L3 region
catcagagtattcatttaccgtacact

SEQ ID NO: 7400 - DNA, 27 bp, Artificial Sequence
  Synthetic polynucleotide encoding artificial human antibody CDR-L3 region
caacaatataatagtttcgcgtacact

SEQ ID NO: 7401 - DNA, 27 bp, Artificial Sequence
  Synthetic polynucleotide encoding artificial human antibody CDR-L3 region
caaaagtataacagtgccccgtggacg

SEQ ID NO: 7402 - DNA, 30 bp, Artificial Sequence; identical to SEQ ID NO: 6548
  Synthetic polynucleotide encoding artificial human antibody CDR-L3 region

SEQ ID NO: 7403 - DNA, 30 bp, Artificial Sequence
  Synthetic polynucleotide encoding artificial human antibody CDR-L3 region
atctcatttacaagcagcggcacttatgtc

SEQ ID NO: 7404 - DNA, 30 bp, Artificial Sequence
  Synthetic polynucleotide encoding artificial human antibody CDR-L3 region
tgttcatatgcaggcagtatgacttgggtg

SEQ ID NO: 7405 - DNA, 24 bp, Artificial Sequence
  Synthetic polynucleotide encoding artificial human antibody CDR-L3 region
caacattatagtagtctgtacact

SEQ ID NO: 7406 - DNA, 33 bp, Artificial Sequence
  Synthetic polynucleotide encoding artificial human antibody CDR-L3 region
agctcatatggaggcagcaacatattttatgtc

SEQ ID NO: 7407 - DNA, 27 bp, Artificial Sequence
  Synthetic polynucleotide encoding artificial human antibody CDR-L3 region
aaacaagattacaattacccgcacact

SEQ ID NO: 7408 - DNA, 36 bp, Artificial Sequence
  Synthetic polynucleotide encoding artificial human antibody CDR-L3 region
tgctcatatacaaccatacccgaccacacttgggtg

SEQ ID NO: 7409 - DNA, 33 bp, Artificial Sequence
  Synthetic polynucleotide encoding artificial human antibody CDR-L3 region
cagtcccatgacagtagcctgagtatttgggtg

SEQ ID NO: 7410 - DNA, 27 bp, Artificial Sequence
  Synthetic polynucleotide encoding artificial human antibody CDR-L3 region
cagtcttatgataacaacaattgggtg

SEQ ID NO: 7411 - DNA, 27 bp, Artificial Sequence
  Synthetic polynucleotide encoding artificial human antibody CDR-L3 region
caacagtatgcaagttaccccatgacc

SEQ ID NO: 7412 - DNA, 27 bp, Artificial Sequence
  Synthetic polynucleotide encoding artificial human antibody CDR-L3 region
cagcagcgtggcacctggccctacact

SEQ ID NO: 7413 - DNA, 33 bp, Artificial Sequence
  Synthetic polynucleotide encoding artificial human antibody CDR-L3 region
cagtcctatgacagcggcctgagtgtttatgtc

SEQ ID NO: 7414 - DNA, 27 bp, Artificial Sequence
  Synthetic polynucleotide encoding artificial human antibody CDR-L3 region
caacagttctctctttatcccatcact

SEQ ID NO: 7415 - DNA, 27 bp, Artificial Sequence
  Synthetic polynucleotide encoding artificial human antibody CDR-L3 region
caacaggctaacagtttcccgatcacc

SEQ ID NO: 7416 - DNA, 27 bp, Artificial Sequence
  Synthetic polynucleotide encoding artificial human antibody CDR-L3 region
cagcagtatggtagctcaccgtacact

SEQ ID NO: 7417 - DNA, 27 bp, Artificial Sequence
  Synthetic polynucleotide encoding artificial human antibody CDR-L3 region
cagcaggcttacagtttcccggtcacc

SEQ ID NO: 7418 - DNA, 27 bp, Artificial Sequence
  Synthetic polynucleotide encoding artificial human antibody CDR-L3 region
cagcagcgtagcagctggcctctcact

SEQ ID NO: 7419 - DNA, 27 bp, Artificial Sequence
  Synthetic polynucleotide encoding artificial human antibody CDR-L3 region
cagcagtatgataaatggcctcccagt

SEQ ID NO: 7420 - DNA, 27 bp, Artificial Sequence
  Synthetic polynucleotide encoding artificial human antibody CDR-L3 region
cagcagtatggtagctcacccctcact

SEQ ID NO: 7421 - DNA, 33 bp, Artificial Sequence
  Synthetic polynucleotide encoding artificial human antibody CDR-L3 region
cagtcctatgacatcagcctgagtggttatgtc

SEQ ID NO: 7422 - DNA, 30 bp, Artificial Sequence
  Synthetic polynucleotide encoding artificial human antibody CDR-L3 region
gagacttgggacactgacagtcgtggtgtg

SEQ ID NO: 7423 - DNA, 27 bp, Artificial Sequence
  Synthetic polynucleotide encoding artificial human antibody CDR-L3 region
caggcgtgggacagcagcactgcggta

SEQ ID NO: 7424 - DNA, 30 bp, Artificial Sequence
  Synthetic polynucleotide encoding artificial human antibody CDR-L3 region
gtgctgtatatgactagtggcaattgggtg

SEQ ID NO: 7425 - DNA, 24 bp, Artificial Sequence
  Synthetic polynucleotide encoding artificial human antibody CDR-L3 region
caggcgtgggacagcactgtggtg

SEQ ID NO: 7426 - DNA, 27 bp, Artificial Sequence
  Synthetic polynucleotide encoding artificial human antibody CDR-L3 region
caacagcttaatagttaccctttcacc

SEQ ID NO: 7427 - DNA, 27 bp, Artificial Sequence
  Synthetic polynucleotide encoding artificial human antibody CDR-L3 region
caaacctgggcctctggcattcgagtg

SEQ ID NO: 7428 - DNA, 27 bp, Artificial Sequence
  Synthetic polynucleotide encoding artificial human antibody CDR-L3 region
caaacctggggctctggcattcgagtg

SEQ ID NO: 7429 - DNA, 27 bp, Artificial Sequence
  Synthetic polynucleotide encoding artificial human antibody CDR-L3 region
caacagtatgatacttatcctgtcacc

SEQ ID NO: 7430 - DNA, 27 bp, Artificial Sequence
  Synthetic polynucleotide encoding artificial human antibody CDR-L3 region
cagcagcgtcacagctggcctctcact

SEQ ID NO: 7431 - DNA, 27 bp, Artificial Sequence
  Synthetic polynucleotide encoding artificial human antibody CDR-L3 region
caacaccttaaaagttacccattcgct

SEQ ID NO: 7432 - DNA, 27 bp, Artificial Sequence
  Synthetic polynucleotide encoding artificial human antibody CDR-L3 region
cagcaatattatagtactccgtacact

SEQ ID NO: 7433 - DNA, 24 bp, Artificial Sequence
  Synthetic polynucleotide encoding artificial human antibody CDR-L3 region
caacagagttacagtacccctaat

SEQ ID NO: 7434 - DNA, 30 bp, Artificial Sequence
  Synthetic polynucleotide encoding artificial human antibody CDR-L3 region
cagacttgggccaactggaacacctggata

SEQ ID NO: 7435 - DNA, 27 bp, Artificial Sequence
  Synthetic polynucleotide encoding artificial human antibody CDR-L3 region
ctacaggattgcgaataccccctcact

SEQ ID NO: 7436 - DNA, 27 bp, Artificial Sequence
  Synthetic polynucleotide encoding artificial human antibody CDR-L3 region
ctgacgtggggcgctggctttcgagtg

SEQ ID NO: 7437 - DNA, 24 bp, Artificial Sequence
  Synthetic polynucleotide encoding artificial human antibody CDR-L3 region
cagcagcgtgtcagctggcccact

SEQ ID NO: 7438 - DNA, 27 bp, Artificial Sequence
  Synthetic polynucleotide encoding artificial human antibody CDR-L3 region
cagcagtataatggctggccgtacact

SEQ ID NO: 7439 - DNA, 27 bp, Artificial Sequence
  Synthetic polynucleotide encoding artificial human antibody CDR-L3 region
cagacctgggacacaggcattcgggtg

SEQ ID NO: 7440 - DNA, 33 bp, Artificial Sequence
  Synthetic polynucleotide encoding artificial human antibody CDR-L3 region
caggtgtgggatagtaataatgatcatcaggtg

SEQ ID NO: 7441 - DNA, 33 bp, Artificial Sequence
  Synthetic polynucleotide encoding artificial human antibody CDR-L3 region
gcaacatgggatgacagcctgagtcgtcccgtg

SEQ ID NO: 7442 - DNA, 27 bp, Artificial Sequence
  Synthetic polynucleotide encoding artificial human antibody CDR-L3 region
cagcaatattatagtactccgatcacc

SEQ ID NO: 7443 - DNA, 27 bp, Artificial Sequence
  Synthetic polynucleotide encoding artificial human antibody CDR-L3 region
cagcagtataaaaactggcctcagacg

SEQ ID NO: 7444 - DNA, 24 bp, Artificial Sequence
  Synthetic polynucleotide encoding artificial human antibody CDR-L3 region
atgcaaggtacacactggcggact

SEQ ID NO: 7445 - DNA, 27 bp, Artificial Sequence
  Synthetic polynucleotide encoding artificial human antibody CDR-L3 region
cagcagtatggtagctcacctctcact

SEQ ID NO: 7446 - DNA, 27 bp, Artificial Sequence
  Synthetic polynucleotide encoding artificial human antibody CDR-L3 region
cagcagtatggtagctcacctcgaacg

SEQ ID NO: 7447 - DNA, 27 bp, Artificial Sequence
  Synthetic polynucleotide encoding artificial human antibody CDR-L3 region
caacagagttacagtacccctcgaacg

SEQ ID NO: 7448 - DNA, 30 bp, Artificial Sequence; identical to SEQ ID NO: 6670
  Synthetic polynucleotide encoding artificial human antibody CDR-L3 region

SEQ ID NO: 7449 - DNA, 27 bp, Artificial Sequence
  Synthetic polynucleotide encoding artificial human antibody CDR-L3 region
atgcaagctctacaaactccgtggacg

SEQ ID NO: 7450 - DNA, 30 bp, Artificial Sequence
  Synthetic polynucleotide encoding artificial human antibody CDR-L3 region
cagcagtataatcactggcccttgatcacc

SEQ ID NO: 7451 - DNA, 27 bp, Artificial Sequence
  Synthetic polynucleotide encoding artificial human antibody CDR-L3 region
cagcaatattatgctactcctccaacg

SEQ ID NO: 7452 - DNA, 33 bp, Artificial Sequence
  Synthetic polynucleotide encoding artificial human antibody CDR-L3 region
tcagcgtgggacagcactctcagtgtttgggtg

SEQ ID NO: 7453 - DNA, 33 bp, Artificial Sequence
  Synthetic polynucleotide encoding artificial human antibody CDR-L3 region
gcaacatgggatactagcctgagttctggttgg

SEQ ID NO: 7454 - DNA, 27 bp, Artificial Sequence
  Synthetic polynucleotide encoding artificial human antibody CDR-L3 region
tactctgcggctgacaacaatcgggtg

SEQ ID NO: 7455 - DNA, 30 bp, Artificial Sequence; identical to SEQ ID NO: 6649
  Synthetic polynucleotide encoding artificial human antibody CDR-L3 region

SEQ ID NO: 7456 - DNA, 30 bp, Artificial Sequence
  Synthetic polynucleotide encoding artificial human antibody CDR-L3 region
cagcagtatgataactggcctcccgttacg

SEQ ID NO: 7457 - DNA, 27 bp, Artificial Sequence
  Synthetic polynucleotide encoding artificial human antibody CDR-L3 region
cagcagttttatgccactcctccgact

SEQ ID NO: 7458 - DNA, 36 bp, Artificial Sequence
  Synthetic polynucleotide encoding artificial human antibody CDR-L3 region
caggtgtgggatagtagtagtgatcatcatgtggta

SEQ ID NO: 7459 - DNA, 24 bp, Artificial Sequence
  Synthetic polynucleotide encoding artificial human antibody CDR-L3 region
caacagtataatagttattggacg

SEQ ID NO: 7460 - DNA, 27 bp, Artificial Sequence
  Synthetic polynucleotide encoding artificial human antibody CDR-L3 region
caacagtatagtacttatcctctcact

SEQ ID NO: 7461 - DNA, 33 bp, Artificial Sequence
  Synthetic polynucleotide encoding artificial human antibody CDR-L3 region
cagtcctatgacatcgtgagagatcagatggtg

SEQ ID NO: 7462 - DNA, 30 bp, Artificial Sequence
  Synthetic polynucleotide encoding artificial human antibody CDR-L3 region
agctcatatacaaccagcaccacttatgtc

SEQ ID NO: 7463 - DNA, 30 bp, Artificial Sequence
  Synthetic polynucleotide encoding artificial human antibody CDR-L3 region
ttgctctactgtggtgattctcagcaggtt

SEQ ID NO: 7464 - DNA, 30 bp, Artificial Sequence
  Synthetic polynucleotide encoding artificial human antibody CDR-L3 region
cagtcctatgacagcagcctgaatgctctg

SEQ ID NO: 7465 - DNA, 33 bp, Artificial Sequence
  Synthetic polynucleotide encoding artificial human antibody CDR-L3 region
cagtcctatgacgccggcctgagtgctgttgtt

SEQ ID NO: 7466 - DNA, 30 bp, Artificial Sequence; identical to SEQ ID NO: 6403
  Synthetic polynucleotide encoding artificial human antibody CDR-L3 region

SEQ ID NO: 7467 - DNA, 30 bp, Artificial Sequence
  Synthetic polynucleotide encoding artificial human antibody CDR-L3 region
caggtgtgggacaccaacactcttagggtg

SEQ ID NO: 7468 - DNA, 27 bp, Artificial Sequence
  Synthetic polynucleotide encoding artificial human antibody CDR-L3 region
caaacttggggctctggcattcgagtg

SEQ ID NO: 7469 - DNA, 27 bp, Artificial Sequence
  Synthetic polynucleotide encoding artificial human antibody CDR-L3 region
caacagagttacagtaccccgtacact

SEQ ID NO: 7470 - DNA, 30 bp, Artificial Sequence
  Synthetic polynucleotide encoding artificial human antibody CDR-L3 region
caatcaggagacagcagtgttacttatgtc

SEQ ID NO: 7471 - DNA, 27 bp, Artificial Sequence
  Synthetic polynucleotide encoding artificial human antibody CDR-L3 region
cagcaatatggtacctcaccaattacc

SEQ ID NO: 7472 - DNA, 27 bp, Artificial Sequence
  Synthetic polynucleotide encoding artificial human antibody CDR-L3 region
tcgctctggtatgatggtgttcgagtg

SEQ ID NO: 7473 - DNA, 27 bp, Artificial Sequence
  Synthetic polynucleotide encoding artificial human antibody CDR-L3 region
cagcagtatggtagctcctcgatcacc

SEQ ID NO: 7474 - DNA, 27 bp, Artificial Sequence
  Synthetic polynucleotide encoding artificial human antibody CDR-L3 region
caacagtataatagttatccgctcact

SEQ ID NO: 7475 - DNA, 27 bp, Artificial Sequence
  Synthetic polynucleotide encoding artificial human antibody CDR-L3 region
cagcaatattatagtactcctcgcact

SEQ ID NO: 7476 - DNA, 36 bp, Artificial Sequence
  Synthetic polynucleotide encoding artificial human antibody CDR-L3 region
gcagcatgggatgacagcctgagtgctctttatgtc

SEQ ID NO: 7477 - DNA, 27 bp, Artificial Sequence
  Synthetic polynucleotide encoding artificial human antibody CDR-L3 region
caacagatttacagtacccttcggacc

SEQ ID NO: 7478 - DNA, 36 bp, Artificial Sequence
  Synthetic polynucleotide encoding artificial human antibody CDR-L3 region
caggtttgggatagtactactgatcataacgtggtc

SEQ ID NO: 7479 - DNA, 33 bp, Artificial Sequence
  Synthetic polynucleotide encoding artificial human antibody CDR-L3 region
cagtcttatgacatcagcctgagaggttcggtg

SEQ ID NO: 7480 - DNA, 27 bp, Artificial Sequence
  Synthetic polynucleotide encoding artificial human antibody CDR-L3 region
caacagcttaatagttaccctcagacg

SEQ ID NO: 7481 - DNA, 27 bp, Artificial Sequence
  Synthetic polynucleotide encoding artificial human antibody CDR-L3 region
cagcaatattatactaccccatacacc

SEQ ID NO: 7482 - DNA, 36 bp, Artificial Sequence
  Synthetic polynucleotide encoding artificial human antibody CDR-L3 region
agctcatatgcaggcaacagcaagcataattatgtc

SEQ ID NO: 7483 - DNA, 36 bp, Artificial Sequence
  Synthetic polynucleotide encoding artificial human antibody CDR-L3 region
gcagcctgggatgacagcctggatggtcattgggtg

SEQ ID NO: 7484 - DNA, 27 bp, Artificial Sequence
  Synthetic polynucleotide encoding artificial human antibody CDR-L3 region
cagcagcgtagcaactggcctttcact

SEQ ID NO: 7485 - DNA, 33 bp, Artificial Sequence
  Synthetic polynucleotide encoding artificial human antibody CDR-L3 region
cagtcctatgacagcagcctgagtggttatgtc

SEQ ID NO: 7486 - DNA, 27 bp, Artificial Sequence
  Synthetic polynucleotide encoding artificial human antibody CDR-L3 region
ttgctctcctatagtggtgcttcagtg

SEQ ID NO: 7487 - DNA, 33 bp, Artificial Sequence; identical to SEQ ID NO: 6767
  Synthetic polynucleotide encoding artificial human antibody CDR-L3 region

SEQ ID NO: 7488 - DNA, 30 bp, Artificial Sequence
  Synthetic polynucleotide encoding artificial human antibody CDR-L3 region
agctcatatacaagcagcagcactcaggtc

SEQ ID NO: 7489 - DNA, 24 bp, Artificial Sequence
  Synthetic polynucleotide encoding artificial human antibody CDR-L3 region
caggcgtgggacagcagcgtggta

SEQ ID NO: 7490 - DNA, 30 bp, Artificial Sequence; identical to SEQ ID NO: 6959
  Synthetic polynucleotide encoding artificial human antibody CDR-L3 region

SEQ ID NO: 7491 - DNA, 33 bp, Artificial Sequence
  Synthetic polynucleotide encoding artificial human antibody CDR-L3 region
tcatcatgggatagtggcctgagtgctgtggtc

SEQ ID NO: 7492 - DNA, 33 bp, Artificial Sequence
  Synthetic polynucleotide encoding artificial human antibody CDR-L3 region
gcaacatgggatgacggcctgagtcgtcccgtg

SEQ ID NO: 7493 - DNA, 30 bp, Artificial Sequence
  Synthetic polynucleotide encoding artificial human antibody CDR-L3 region
cagcaatttggtaactcgcctctgtacact

SEQ ID NO: 7494 - DNA, 33 bp, Artificial Sequence
  Synthetic polynucleotide encoding artificial human antibody CDR-L3 region
ttaacatgggattacagtctgaatgctcgagtc

SEQ ID NO: 7495 - DNA, 36 bp, Artificial Sequence
  Synthetic polynucleotide encoding artificial human antibody CDR-L3 region
caatcagtagtcaaagatgttaccccctatgtgatc

SEQ ID NO: 7496 - DNA, 33 bp, Artificial Sequence; identical to SEQ ID NO: 6469
  Synthetic polynucleotide encoding artificial human antibody CDR-L3 region

SEQ ID NO: 7497 - DNA, 30 bp, Artificial Sequence; identical to SEQ ID NO: 6959
  Synthetic polynucleotide encoding artificial human antibody CDR-L3 region

SEQ ID NO: 7498 - DNA, 27 bp, Artificial Sequence
  Synthetic polynucleotide encoding artificial human antibody CDR-L3 region
caacagtataatagttacccttggacg

SEQ ID NO: 7499 - DNA, 30 bp, Artificial Sequence
  Synthetic polynucleotide encoding artificial human antibody CDR-L3 region
caacagagttacagtacccctccgtggacg

SEQ ID NO: 7500 - DNA, 27 bp, Artificial Sequence
  Synthetic polynucleotide encoding artificial human antibody CDR-L3 region
caacagcttaatagttacccattcact

SEQ ID NO: 7501 - DNA, 384 bp, Artificial Sequence
  Synthetic polynucleotide encoding artificial human antibody VH domain
gaggtgcagctggtggagtccgggggaggcttagttcagcctggggggtccctgagactctcctgtgcagcctcgggattcaccttcactacttactggatgcactgggtccgccaagctccagggaaggggctggagtgggtctcacatattaatactgatgggagtgccacaaactacgcggactccgtgaagggccgattcaccatctccagagacaacgccaagaactcactgtatctgcaaatgaacagcctgagagccgaggacacggccgtgtattactgtgctagagacacagcgaggggaggtcagtgtgagcccggacacaaacctccctgcaggggcgcgtggggccagggcaccctggtcaccgtctcctca

SEQ ID NO: 7502 - DNA, 378 bp, Artificial Sequence
  Synthetic polynucleotide encoding artificial human antibody VH domain
caggtcaccttgaaggagtctggtcctgtgctggtgaaacccacagagaccctcacgctgacctgcaccgtctctgggttctcactcagcaatcgtagaatgggtgtgagctgggtccgtcagcccccagggaaggccctggagtggcttgcacacattttttcgaatgacgaaaaatcctacagcacatctctgaagagcagactcagtatctccaaggacacctccaagagccaggtggtccttaccatgaccaacgtggaccctgtggacacagccacatattactgtgtacggatagggaccgaaatgattctatggtatttctactactacatggacgtctggggcaaggggaccacggtcaccgtctcctca

SEQ ID NO: 7503 - DNA, 378 bp, Artificial Sequence; identical to SEQ ID NO: 7502
  Synthetic polynucleotide encoding artificial human antibody VH domain

SEQ ID NO: 7504 - DNA, 378 bp, Artificial Sequence; identical to SEQ ID NO: 7502
  Synthetic polynucleotide encoding artificial human antibody VH domain

SEQ ID NO: 7505 - DNA, 378 bp, Artificial Sequence; identical to SEQ ID NO: 7502
  Synthetic polynucleotide encoding artificial human antibody VH domain

SEQ ID NO: 7506 - DNA, 378 bp, Artificial Sequence; identical to SEQ ID NO: 7502
  Synthetic polynucleotide encoding artificial human antibody VH domain

SEQ ID NO: 7507 - DNA, 378 bp, Artificial Sequence; identical to SEQ ID NO: 7502
  Synthetic polynucleotide encoding artificial human antibody VH domain

SEQ ID NO: 7508 - DNA, 363 bp, Artificial Sequence
  Synthetic polynucleotide encoding artificial human antibody VH domain
gaggtgcagctggtggagtctgggggaggcctggtcaagcctggggggtccctgagactctcctgtgcagcctctggattcaccttcagtagctatagcatgaactgggtccgccaggctccagggaaggggctggagtgggttggccgcattaaaagaaaaagtgatggtgggacaacagactacgctgcacccgtgaaaggcagattcaccatctcaagagatgattcaaaaaacacgctgtatctgcaaatgaacagcctgaaaaccgaggacacagccgtgtattactgtaccacagacctgcatgactacggtgactccgactactggggccagggaaccctggtcaccgtctcctca

SEQ ID NO: 7509 - DNA, 363 bp, Artificial Sequence; identical to SEQ ID NO: 7508
  Synthetic polynucleotide encoding artificial human antibody VH domain

SEQ ID NO: 7510 - DNA, 366 bp, Artificial Sequence
  Synthetic polynucleotide encoding artificial human antibody VH domain
cagctgcagctgcaggagtcgggcccaggactggtgaagccttcggagaccctgtccctcacctgcactgtctctggtggctccctcagcagtagtagttactactggggctggatccgccagcccccagggaagggactggagtggattgggagtatctattatactgggagcacctactacaacccgtccctcgagagtcgagtcaccatatccgacgacacgtccaagaaccagttctccctgaaactgagctctgtgaccgccgcagacacggctatatattactgtgcggcctcacccctctatgacagcagtgatttttactattcctggggccagggagccctggtcaccgtctcctca

SEQ ID NO: 7511 - DNA, 369 bp, Artificial Sequence
  Synthetic polynucleotide encoding artificial human antibody VH domain
gaggtgcaactggtggagtccggaggaggcttgaaccagccgggggggtccctgagactctcctgtgcagcctctgagttcaccgtcagtagcaattacatgacctgggtccgccaggctccagggaaggggctggagtgggtctcagttatctacagcggtggaggcacacattacgcagagtccgtgaagggccgattcaccatctccagagacaacgccaagaactcactgtatcttcaaatgaacagcctgagagtcgaggacacggccatgtattattgtgctggtcaatcaccgagtgtgtatagtagtggctggtatgtctttgactattggggccagggaaccctggtgaccgtctcctca

SEQ ID NO: 7512 - DNA, 372 bp, Artificial Sequence
  Synthetic polynucleotide encoding artificial human antibody VH domain
gaggtgcagctggtggagtctgggggaggcctggtcaagcctggggggtccctgagactctcctgtgcagcctctggattcacctttagcagctatgccatgagctgggtccgccaggctccagggaaggggctggagtgggtctcatccattagtagtagtagtagttacatatactacgcagactcagtgaagggccgattcaccatctccagagacaacgccaagaactcactgtatctgcaaatgaacagcctgagagccgaggacacggctgtctattactgtgcgagagatgcctttttttcactcaaatacggtgcctacggtatggacgtctggggccaagggaccacggtcaccgtctcctca

SEQ ID NO: 7513 - DNA, 372 bp, Artificial Sequence
  Synthetic polynucleotide encoding artificial human antibody VH domain
gaggtgcagctgttggagtctgggggaggcttggtacagccgggggggtccctgagactctcctgtgcagcctctggattcacctttagcagctatgccatgagctgggtccgccaggctccagggaaggggctggagtgggtctcagctattagtggtagtggtggtagcacatactacgcagactccgtgaagggccggttcaccatctccagagacaattccaagaacacgctgtatctgcaaatgaacagcctgagagccgaggacacggccgtatattactgtgcgaaagatcccgcgatgtatagcagcagctggctatctccttcggacgtctggggccaagggaccacggtcaccgtctcctca

SEQ ID NO: 7514 - DNA, 393 bp, Artificial Sequence
  Synthetic polynucleotide encoding artificial human antibody VH domain
caggtgcagctgcaggagtcgggcccaggactggtgaagccttcacagaccctgtccctcacctgcactgtctctggtggctccatcagcagtagtaactggtggagttgggtccgccagcccccagggaaggggctggagtggattggggaaatcaatcatagtggaagcaccaactacaacccgtccctcaagagtcgagtcaccatatccgtagacacgtccaagaaccagttctccctgaagctgagctctgtgaccgctgcggacacggctgtgtattactgtgcaagagtagtccaccgtcggtcgtcctactatgatagtaggaattactactactactactacatggacgtctggggcaaagggaccacggtcaccgtctcctca

SEQ ID NO: 7515 - DNA, 393 bp, Artificial Sequence
  Synthetic polynucleotide encoding artificial human antibody VH domain
cagatcaccttgaaggagtctggtcctacgctggtgaaacccacacagaccctcacgctgacctgcaccttctctgggttctcactcagcactagtggagtgggtgtgggctggatccgtcagcccccaggaaaggccctggagtggcttgcactcatttattgggatgatgataagcgctacagcccatctctgaagagcaggctcaccatcaccaaggacacctccaaaaaccaggtggtccttacaatgaccaacatggaccctgtggacacagccacatattactgtgcacacatcccccccgaaagtcgtatggttctatttggagtggttatccaaaattactactttgactactggggccagggaaccctggtcaccgtctcctca

SEQ ID NO: 7516 - DNA, 384 bp, Artificial Sequence
  Synthetic polynucleotide encoding artificial human antibody VH domain
caggtgcagctggtggagtctgggggaggcgtggtccagcccgggaggtccctgagactctcctgtacagcctctggattcgccttcaataattttggcttccactgggtccgccaggctccaggcaaggggctggagtgggtggcagttatttggcatgatggaagtcagcaacactatgcagactccgtgaagggccgattcaccatctccagagacaattccaagaacacgttgcatctgcaaatgaacagcctgagagatgaggacacggctgtgtattactgtgcgagagaggcggcagggatattacgatttttggagtggtcaaccaaaggatactttgactactggggccagggaaccctggtcaccgtctcctca

SEQ ID NO: 7517 - DNA, 360 bp, Artificial Sequence
  Synthetic polynucleotide encoding artificial human antibody VH domain
caggtgcagttggggcagtctggggctgaggtgaagaggcctggggcctcagtgagggtctcctgcaaggcctctggatacaccttcaccggtcactatatacactgggtgcgacaggcccctggacaagggcttgagtggatgggatggatcaaccctaacagtggtggcacaaactatgcacagaagtttcagggcagggtcaccatgaccagggacacgtccatcaacacagcctacatggagctgagcaggctgacatctgacgacacggccgtgtattactgtgcgagaggcccccggactacggtgccaaatcttgactactggggccagggaaccctggtcaccgtctcctca

SEQ ID NO: 7518 - DNA, 360 bp, Artificial Sequence
  Synthetic polynucleotide encoding artificial human antibody VH domain
caggtgcagctggtgcaatctgggtctgagttgaagaggcctggggcctcagtgaaggtttcctgcaaggcttctggatacaccttcactagctatgctatgcattgggtgcgacaggcccctggacaagggcttgagtggatgggatggatcaacaccaacactgggagcccaacgtatgcccagggcttcacaggacggtttgtcttctccttggacacctctgtcagcacggcatatctgcagatcagcagcctaaaggctgaggacactgccgtgtattactgtgcgagagatcacggtgactggtacctaagcgttgactactggggccagggaaccctggtcaccgtctcctca

SEQ ID NO: 7519 - DNA, 369 bp, Artificial Sequence
  Synthetic polynucleotide encoding artificial human antibody VH domain
caggtgcagctggtgcagtctggggctgaggtgaagaagcctggggcctcagtgaaggtctcctgcacggcttctggatacaccttcaccgactactttatgcactgggtgcgacaggcccctggacaagggcttgagtggatgggatggatcaaccctaacagtggtggcacaaactatgcacagaagtttcagggcagggtcaccatgaccagggacacgtccatcaccacagcctacatggagttgctcaggctgcaatctgacgacacggccgtgtattattgtgtgagagattttatcggggtctactcgctccatgaagcttttgatctctggggccaggggacaatggtcaccgtctctgca

SEQ ID NO: 7520 - DNA, 372 bp, Artificial Sequence
  Synthetic polynucleotide encoding artificial human antibody VH domain
gaagtgcacctggtggagtctgggggaggcttggtacagcctggcaggtccctgagcctctcctgtgcagcctctggattcatttttgatgatcatggcatgcactgggtccggcaagttccaggaaagggcctggagtgggtctcagggattagttacaacagtcgtagcataggctatgcggactctgtgaagggccgattcaccgtctccagagacagcgccaagaagtccctctatctgcacatgaacagtctgaaagttgaggacacggccttctattactgtgcaagagataagtcgaggtcatactatgcttcggggagttatcccgactactggggccagggaaccctggtcaccgtctcctca

SEQ ID NO: 7521 - DNA, 375 bp, Artificial Sequence
  Synthetic polynucleotide encoding artificial human antibody VH domain
caggtgcagctggtgcagtctggggctgaggtgaagaagcctgggtcctcggtgaaggtctcctgcagggcttctggaggcaccttcagcggctttgctatcagctgggtgcgacaggcccctggacaaggacttgagtggatgggagggatcatccctatctttgatacaagaaactacgcacagaaattccagggcagggtcgcggtcaccgtggacgaatccacgagcacagcctacatggagctgagcggcctgagatttgatgacacggccgtgtattattgtgcgagaggacgggatattgtggtggaaccagcccctcttgatgcttttgatgtctggggccacgggacaatggtcaccgtctcttca

SEQ ID NO: 7522 - DNA, 357 bp, Artificial Sequence
  Synthetic polynucleotide encoding artificial human antibody VH domain
caggtgcagctggtggagtctgggggagccgtggtccagcctgggaggtccctgagactctcctgtgcagcctctggattcagtttcagtaactataatatccactgggcccgccaggctccaggcaaggggctggaatggctgtcaattatacatcacgatgaaaacgacaaacgctacgcagactccgtgaagggccgatttaccatctccagagacaattccaagaacacagtgtatctgcaaatgaacagcctgaggcctgaggacacgggtgtttattactgtgcgagagacttcaccagtgggagctcaggagactgctggggccagggaaccctggtcaccgtctcctca

SEQ ID NO: 7523 - DNA, 366 bp, Artificial Sequence
  Synthetic polynucleotide encoding artificial human antibody VH domain
caggtccagctggtacagtctggggctgaggtgaagaagcctggggcctcagtgaaggtctcctgcaaggtttccggatacaccctcactgaattatccatgcactgggtgcgacaggctcctggaaaagggcttgagtggatgggaggttttgatcctgaagatggtgaaacaatctacgcacagaagttccagggcagagtcaccatgaccgaggacacatctacagacacagcctacatggagctgagcagcctgagatctgaggacacggccgtgtattactgtgcaacaggttcggggagttattatagtatgggctggttcgacccctggggccagggaaccctggtcaccgtctcctca

SEQ ID NO: 7524 - DNA, 393 bp, Artificial Sequence
  Synthetic polynucleotide encoding artificial human antibody VH domain
caggtccagcttgtgcagtctggggctgaggtgaagaagcctggggcctcagtgaaggtttcctgcaaggcttctggatacaccttcactagctatgctatgcattgggtgcgccaggcccccggacaaaggcttgagtggatgggatggatcaacgctggcaatggtaacacaaaatattcacagaagttccagggcagagtcaccattaccagggacacatccgcgagcacagcctacatggagctgagcagcctgagatctgaagacacggctgtgtattactgtgcgattcggggcgctgattgtagtggtggtagctgctacttcgtgtccgcttttggttggattatggacgtctggggccaagggaccacggtcaccgtctcctca

SEQ ID NO: 7525 - DNA, 387 bp, Artificial Sequence
  Synthetic polynucleotide encoding artificial human antibody VH domain
caggtccagctggtacagtctggggctgaggtgaagaagcctggggcctcagtgaaggtctcctgcaaggtttccggatacaccctcactgaattatccatgcactgggtgcgacaggctcctggaaaagggcttgagtggatgggaggttttgatcctgaagatggtgaaacaatctacgcacagaagttccagggcagagtcaccatgaccgaggacacatctacagacacagcctacatggagctgagcagcctgagatctgaggacacggccgtgtattactgtgcaacagcgggcccccagtattactatggttcggggagttatgcaccgtacaactggttcgacccctggggccagggaaccctggtcaccgtctcctca

SEQ ID NO: 7526 - DNA, 378 bp, Artificial Sequence
  Synthetic polynucleotide encoding artificial human antibody VH domain
caggtgcagctggtggagtctgggggaggcgtggtccagcctgggaagtccctaagagtctcctgtgcagcctctggattccacttcagtagctatgctatgcactgggtccgccaggctccaggcaaggggctggagtgggtggcagttctatcatatgatggaagttttaaaaagtacgcagactccgtgaagggccgattcaccatctccagagacaattccaagaacacactctttttggaaatgagcggcctgagagctgaggacacggctgtctattactgtgcgagagattccgttttactattcttcgggtatctaccccatggagcttttgatatgtggggccaggggacaatggtcaccgtttcttca

SEQ ID NO: 7527 - DNA, 366 bp, Artificial Sequence
  Synthetic polynucleotide encoding artificial human antibody VH domain
gaggtgccgttgttggagtcggggggaggcttggtacagccgggggggtccctaagactgtcctgtttggcctctggattcacctttagcaattacgccatgagctgggtccgccaggctccagggaaggggctggagtgggtctcaaccattcatggcggaggcactacgacacactccgcagactccgtgaagggccgattcagcgtctccagggataatggcaagaacacgctgtatctgcaaatggacagcctgagagtcgaggacacggccgtctattattgtgcgaaggcttcgactggatccagctatggctttgctcttgatacttggggccttgggaccatggtcaccgtctcctca

SEQ ID NO: 7528 - DNA, 405 bp, Artificial Sequence
  Synthetic polynucleotide encoding artificial human antibody VH domain
caggtgcagctggtggagtctgggggaggcgtggtccagcctgggaggtccctgagactctcctgtgcagcctctggattcaccttcagtagctatgctatgcactgggtccgccaggctccaggcaaggggctggagtgggtggcagttatatcatatgatggaagcaataaatactacgcagactccgtgaagggccgattcaccatctccagagacaattccaagaacacgctgtatctgcaaatgaacagcctgagagctgaggacacgactgtgtattactgtgcgagagatggagggtcgccgggcgagtactatgatagtagtggttattatggatttggctactactactacggtatggacgtctggggccaagggaccacggtcaccgtctcctca

SEQ ID NO: 7529 - DNA, 375 bp, Artificial Sequence
  Synthetic polynucleotide encoding artificial human antibody VH domain
caggtgcagctggtggagtctgggggaggcgtggtccagcctgggaggtccctgagactctcctgtgcagcgtctggattcaccttcagtagctatggcatgcactgggtccgccaggctccaggcaaggggctggagtgggtggcagttatatggtatgatggaagtaataaatactatgcagactccgtgaagggccgattcaccatctccagagacaattccaagaacacgctgtatctgcaaatgaacagcctgagagccgaggacacggctgtgtattactgtgcgagagatggcggggttcggggagttatcatctactactacggtatggacgtctggggccaagggaccacggtcaccgtctcctca

SEQ ID NO: 7530 - DNA, 363 bp, Artificial Sequence
  Synthetic polynucleotide encoding artificial human antibody VH domain
caggtgcagctggtggagtctgggggaggcgtggtccagcctgggaggtccctgagactctcctgtgcagcctctggattcaccttcagtagatatgctttccactgggtccgccaggctccaggcaaggggctggagtgggtggcaattgtttcatatgctggaaatactgaatacaacacagactccatgaagggccgattcaccatctccagagacaattccaagaacacggtgtatctgcaaatgaacagcctgagagctgaggacacggctgtgtatttctgtgcgagagaatgggaagactatgatagtagtgtctttgactactggggccagggaaccctggtcaccgtctcctca

SEQ ID NO: 7531 - DNA, 366 bp, Artificial Sequence
  Synthetic polynucleotide encoding artificial human antibody VH domain
caggtgcagctggtgcagtctggggctgaggtgaagaagcctggggcctcagtgaaggtctcctgcaaggcttctggatacaccttcaccagttatgatatcaactgggtgcgacaggccactggacaagggcttgagtggatgggatggatgaaccctaacagtggtaacacaggctatgcacagaagttccagggcagagtcaccatgaccaggaacacctccataagcacagcctacatggagctgagcagcctgagatctgaggacacggccgtgtattactgtgcgagagactacggtgacgacgaggcctactacggtatggacgtctggggccaagggaccacggtcaccgtctcctca

SEQ ID NO: 7532 - DNA, 375 bp, Artificial Sequence
  Synthetic polynucleotide encoding artificial human antibody VH domain
caggttcagctggtgcagtctggagctgaggtgaagaagcctggggcctcagtgaaggtctcctgcaaggcttctggttacacctttatcaacaatcgtatcagctgggtgcgacaggcccctggacaagggcttgagtggatgggatggatcagcgcatacaatcgtaacacaaactatgcagcgagcttccagggcagagtcaccatgaccatagacacatacacgagcataagttacatggagttgaggagcctgagatttgacgacacggccgtgtattattgtgcgagagatggatcggatcgcagtggctacgattctttttacgatatggacgtctggggccaagggaccacggtcaccgtctcctca

SEQ ID NO: 7533 - DNA, 372 bp, Artificial Sequence
  Synthetic polynucleotide encoding artificial human antibody VH domain
gaggtgcagctggtggagtctgggggagacctggtagagccagggcggtccctgagactctcctgtacagcttctggattcacctttggtgattttgctatgagttggttccgccaggctccagggaaggggctggagtgggtcggtttcattagaagcaaagtttacggtgcgacaacagaatacgccgcgtctgtgaaaggcagattcaccatctcaagagatgattctaaaagtatcgcctatctgcaaatgaacagcctgaaaaccgaggatacagccgtgtattattgtattcgttgccgccgaagcagtggcccttattactactttgactactggggccagggaaccctggtcaccgtctcctca

SEQ ID NO: 7534 - DNA, 363 bp, Artificial Sequence
  Synthetic polynucleotide encoding artificial human antibody VH domain
caggtgcagctgcaggtgtcgggcccaggactggtgaagccctcggagaccctgtccctcacctgcactgtctctattggctccatcagttctcactactggacttggatccggcagaccccagggaagggactggagtgggttgggtttgtacattacagtgggagcaccaactacaacccctccctcaagagtcgactcaccatatcaatagacccgtccaagaaccagttctccctgaggctgacctctgtgagcgctgcggacacggccacctattactgtgcgagaggccagtacgaaatgttgactggctacttcgttgattactggggcccgggaactctggtcaccgtctcctca

SEQ ID NO: 7535 - DNA, 339 bp, Artificial Sequence
  Synthetic polynucleotide encoding artificial human antibody VH domain
gaggtgcggttattgcagtctgggggaggcttggtacagcctggggaatccctgagactctcctgtgcagcctccggattcacctttaaaaaatatctcatgaactgggtccgccaggctccagggaaggggctggagtgggtctcaattattgatagcggtggtgaaaaaacacactatgcagactccgtgaagggccgcttcaccatctccagagataattccaagaacactctttacttggaaatgaacagcctgagagccgaggactcggccgtctattactgtgcgcccgttggacttctctggggccagggatccctggtcaccgtctcctca

SEQ ID NO: 7536 - DNA, 366 bp, Artificial Sequence
  Synthetic polynucleotide encoding artificial human antibody VH domain
gaagtgcacctggtggagtctgggggaggcttggtacaccctggcaggtccctgagactctcctgtgcagcctctggattcatttttgatgattatgccatgttttgggtccggcaaagtccagggaagggcctggagtgggtctcaggaattagttggaatagtgatgacatagggtatgcggactctgtgaagggccgtttcaccatttccagagacaacgccaagaactccctctatctgcaaatgaacagtctgagggctgaggacacggccatctattactgtacaaaggggagtttccataacagtggtcggggtatctttgactcctggggccagggaaccctggtcaacgtctcctca

SEQ ID NO: 7537 - DNA, 381 bp, Artificial Sequence
  Synthetic polynucleotide encoding artificial human antibody VH domain
gaggtgcagctggtggagtctgggggaggcttggtccagcctggggggtccctgagactctcctgtgcagcctctggattcaccttcagtagctatgctatgcactgggtccgccaggctccagggaagggactggaatatgtttcagctattagtagtaatgggggtagcacatattatgcaaactctgtgaagggcagattcaccatctccagagacaattccaagaacacgctgtatcttcaaatgggcagcctgagagctgaggacatggctgtgtattactgtgcgagagatcgggagagattacgatattttgactgggtttactactacggtatggacgtctggggccaagggaccacggtcaccgtctcctca

SEQ ID NO: 7538 - DNA, 357 bp, Artificial Sequence
  Synthetic polynucleotide encoding artificial human antibody VH domain
caggtccagctggtgcagtctggggctgaggtgaagaagcctgggtcctcggtgaaggtctcctgcaaggcttctggaggcaccttcagcagctatgctatcagctgggtgcgacaggcccctggacaagggcttgagtggatgggaaggatcatccctatccttggtatagcaaactacgcacagaagttccagggcagagtcacgattaccgcggacaaatccacgagcacagcctacatggagctgagcagcctgagatctgaggacacggccgtgtattactgtgcgagagatgggggagcagcagctggttttgactactggggccagggaaccctggtcaccgtctcctca

SEQ ID NO: 7539 - DNA, 375 bp, Artificial Sequence
  Synthetic polynucleotide encoding artificial human antibody VH domain
caggtgcagctggtgcagtctggggctgaggtgaagaagcctggggcctcagtgaaggtctcctgcaaggcttctggatacaccttcaccagttatgatatcaactgggtgcgacaggccactggacaagggcttgagtggatgggatggatgaaccctaacagtggtaacacaggctatgcacagaagttccagggcagagtcaccatgaccaggaacacctccataagcacagcctacatggagctgagcagcctgagatctgaggacacggccgtgtattactgtgcgagagtagcccactcattacgatattttgactggcccctggcttttgatatctggggccaagggacaatggtcaccgtctcttca

SEQ ID NO: 7540 - DNA, 369 bp, Artificial Sequence
  Synthetic polynucleotide encoding artificial human antibody VH domain
gaggtgcagctgttggagtctgggggaggcttggtccagcctggggggtccctgagactctcctgtgcagcctctggattcaccttcagcagctatgccatgagctgggtccgccaggctcctgggaaggggctggagtgggtctcagttatttacaacgatggtattggcacgttctatgcagactccgtgaagggccggtttaccatctccagagagaattccaagaacaccctgtatctgcaaatggacaccctgcgagtcgaggacacggccctatattactgtgcgaaactccttgggaactccggggagttattattcccctttgactcctggggccagggaaccctggtcagtgtctcctca

SEQ ID NO: 7541 - DNA, 387 bp, Artificial Sequence
  Synthetic polynucleotide encoding artificial human antibody VH domain
gaagtgcagctggtggagtctgggggaggcttggtacagcctggcaggtccctgagactctcctgtgcagcctctggattcacctttgatgattatgccatgcactgggtccggcaagctccagggaagggcctggagtgggtctcaggtattagttggaatagtggtagcataggctatgcggactctgtgaagggccgattcaccatctccagagacaacgccaagaactccctgtatctgcaaatgaacagtctgagagctgaggacacggccttgtattactgtgcaaaagatatgtcaccattactatggttcggggagttattaggctactactacggtatggacgtctggggccaagggaccacggtcaccgtctcctca

SEQ ID NO: 7542 - DNA, 372 bp, Artificial Sequence
  Synthetic polynucleotide encoding artificial human antibody VH domain
gaggtgcagctggtggagtctgggggaggcttggtccaacctggacggtctctgagactctcctgtagatcatttggattcagtctcggaaaattttggatgagttgggttcgccagactccaggaaaggggctggagtgggtggccaccataaagcaggatggacgtgaacaatattatgtggactctgtgaggggccgcttctccgtctccagggataacgccaaggggtcagtgaatttgcaattgaacagcctgagaatcgacgacacggcaatgtattattgtgcgagagaattcacgggacggtgggatgacatgggttattatggcgacctctggggccagggaaccctcgtcaccgtctcccca

SEQ ID NO: 7543 - DNA, 366 bp, Artificial Sequence
  Synthetic polynucleotide encoding artificial human antibody VH domain
caggtccagcttgtgcagtctggggctgaggtgaagaatcctggggcctcagtgacagtttcctgcaaggcttctggattcaccttcgtgagctttgctgtacattgggtgcgccaggcccccggacaaaggcttgagtggatgggaaggatcaacgctgtcaatggaaacacaaaatattcacagaagttccagggtagagtcaccatcaccagggacacatccgcgagcacagcctacatggacctgagcagcctgagatttgaagacacggctgtgtattactgtacgagagtcggttattactatgatggtagtgtcgtctttgactattggggccagggaaccctggtcaccgtctcctca

SEQ ID NO: 7544 - DNA, 381 bp, Artificial Sequence
  Synthetic polynucleotide encoding artificial human antibody VH domain
caggtgcagctgcaggagtcgggcccaggactggtgaagccttcggagaccctgtccctcacctgcactgtctctggtggctccatcagtcgttactactggagctggatccggcagcccccaggaaagggactggagtggattggctatatctattacagtgggagcaccaactacaacccctccctcaagagtcgagtcaccatatcagtagacacgtccaagaaccagttctccctgaagctgagttctgtgaccgctgcggacacggccgtgtattactgtgcgggagagggactagctaccctttatggttcggggagttatcgcgtagggtactttgaccactggggccagggaaccctggtcaccgtctcctca

SEQ ID NO: 7545 - DNA, 375 bp, Artificial Sequence
  Synthetic polynucleotide encoding artificial human antibody VH domain
cagctgcagctgcaggagtcgggcccaggactggtgaagccttcggagaccctgtccctcacctgcactgtctctggtggctccatcagcagtagtagttactactggggctggatccgccagcccccagggaaggggctggagtggattgggagtatctattatagtgggagcacctactacaacccgtccctcaagagtcgagtcaccatatccgtagacacgtccaagaaccagttctccctgaagctgagctctgtgaccgccgcagacacggctgtgtattactgtgcgagacattcccccatatggttaactcaggtttccccgtactttgactactggggccagggaaccctggtcaccgtctcctca

SEQ ID NO: 7546 - DNA, 387 bp, Artificial Sequence
  Synthetic polynucleotide encoding artificial human antibody VH domain
caggtgcagctggtggagtctgggggaggcgtggtccagcctgggaggtccctgagactctcctgtgcagcctctggattcaccttcagtagctatggcatgcactgggtccgccaggctccaggcaaggggctggagtgggtggcagttatatcatatgatggaagtaataaatactatgcagactccgtgaagggccgattcaccatctccagagacaattccaagaacacgctgtatctgcaaatgaacagcctgagagctgaggacacggctgtgtattactgtgcgaaagattccgcccccccctaccatagcagtggctggtactactactactacggtatggacgtctggggccaagggaccacggtcaccgtctcctca

SEQ ID NO: 7547 - DNA, 354 bp, Artificial Sequence
  Synthetic polynucleotide encoding artificial human antibody VH domain
caggtccagctggtacagtctggggctgaggtgaagaagcctggcgcctcagtgaaggtctcctgcaaaatttccggatacaggctcactgaagtagccatgcactgggtgcgacaggctcccggacaagggcttgagtggatggggagttttgatcctcaagatgaagagccaatctacgcacagaagctgcagggcagagtcaccatgaccgaggacacatcttcagacacagcctacatgcaactgagccgcctgagttctgacgacacggccgtctattactgtgcaacaagtccgtgggacgtgacgttagagtactggggccagggaaccctggtcaccgtctcctca

SEQ ID NO: 7548 - DNA, 372 bp, Artificial Sequence
  Synthetic polynucleotide encoding artificial human antibody VH domain
gaggtgcagctgttggagtctgggggaggcttggtacagccgggggggtccctgagactctcctgtgtagtctctggattcacctttggtgatcatgccatgagctgggtccgccaggctccagggaaggggctggagtgggtctcatctataagtggcagtggtaatggcgcacactacgcagactccgttaggggccgcttcaccctctccagagacaattccaagaacacggtgtctctgcaaatgaacaacctgagagccgaggacacggccacatatttctgtgcgaaagtaaactacgacgatgatagagttgaactggcttactttgagcactggggcccgggaaccctggtcaccgtctcctca

SEQ ID NO: 7549 - DNA, 363 bp, Artificial Sequence
  Synthetic polynucleotide encoding artificial human antibody VH domain
caggtgcagctggtggaatctgggggaggcgtggtccagcctgggaggtccctgagactctcctgtgcagcctctggattctccttcagtcgctatgctatgcactgggtccgccaggctccaggcaaggggctggagtgggtggcagttatatcatttgatggaagtattaaatacttcgcagactacgtgaagggccgattcaccatttccagagacacttccaagcagacgctgtatttgcagatgaacagcctgagacctgacgacacggctgtgtattactgtgcgaaggggacccatgatagtcgtgattataagttcgacttttggggccagggaaccctggtcaccgtctcctca

SEQ ID NO: 7550 - DNA, 381 bp, Artificial Sequence
  Synthetic polynucleotide encoding artificial human antibody VH domain
gaggtgttcctggtggagtctgggggaggcttggtccagcctggggggtccctgagactctcctgtgcagcctctggattcaccttttctactcattggatgacctgggtccgccaggctccagggaaggggctcgagtgggtggccaatataaagcacgatggaagtgagaaattctatgtggactctgtgaagggccgattcaccatctccagagacaacgccaagaactcaatgtatttgcaaatgaacagcctgagagccgaggacacggctgtctattactgtgcgagagaagcttgtgccagctgctcctgcgcaccgggatgcgcctacggtttggacgtctggggccaagggaccacggtcaccgtgtcctca

SEQ ID NO: 7551 - DNA, 354 bp, Artificial Sequence
  Synthetic polynucleotide encoding artificial human antibody VH domain
gaggtgcaattggtggagtctgggggacgcctggtccagcctggggggtccctgagactctcttgtgcagtctctggattcactttccgtagctattggatgacttgggtccgccaggctccagggaaggggctggagtgggtggccaacataaatcaaggtggaaatgagagatactatgtggactccgggaagggccgattcaccgtctccagagacaacgcccagaatttactgtttctacaaatgaacagcctgagggtcgaggacacggctgtgtattactgtgcgagggatggagtctggtatgcgtctgactcgtggggccaggggaccctggtcaccgtctcctca

SEQ ID NO: 7552 - DNA, 381 bp, Artificial Sequence
  Synthetic polynucleotide encoding artificial human antibody VH domain
caaatgcagctggtgcagtctgggcctgaggtgaagaagcctgggacctcagtgaaggtctcctgcaaggcttctggattcacctttactagctctgctatgcagtgggtgcgacaggctcgtggacaacgccttgagtggataggatggatcgtcgttggcagtggtaacacaaactacgcacagaagttccaggaaagagtcaccattaccagggacatgtccacaagcacagcctacatggagctgagcagcctgagatccgaggacacggccgtgtattactgtgcggcagcgggtggagaggggtggctacgacagtactactactactacggtatggacgtctggggccaagggaccacggtcaccgtctcctca

SEQ ID NO: 7553 - DNA, 363 bp, Artificial Sequence
  Synthetic polynucleotide encoding artificial human antibody VH domain
caggttcaactggtgcagtctggagctgaggtgaagaagcccggggcctcagtgacggtctcctgcaagacttctggctatagttttaccacctatggtatcagttgggtgcggcaggcccctggacaagggcttgagtggatgggatggatcagcgctttcaacggtttcacaaattatgcacagaaatttcagggcagagtcaccatgaccgcagaaacatccaccgatacagcctacctggaattaaggagcctgacatctgacgacacggccatttattactgtgcgcgaagggacggtgactacgggtggtcctacttcgactactggggccagggaactctggtcaccgtctcctca

SEQ ID NO: 7554 - DNA, 384 bp, Artificial Sequence
  Synthetic polynucleotide encoding artificial human antibody VH domain
gaggtgcagctggtggagtctgggggaggcctggtcaagcctggggggtccctgagactctcctgtgcagcctctggattcaccttcagtagctatagcatgaactgggtccgccaggctccagggaaggggctggagtgggtctcatccattagtagtagtagtagttacatatactacgcagactcagtgaagggccgattcaccatctccagagacaacgccaagaactcactgtatctgcaaatgaacagcctgagagccgaggacacggctgtgtattactgtgcgagagtgttgaggagcagctggtacttcccagtcaaacccatgaatgatgcttttgatatctggggccaagggacaatggtcaccgtctcttca

SEQ ID NO: 7555 - DNA, 372 bp, Artificial Sequence
  Synthetic polynucleotide encoding artificial human antibody VH domain
caggtacagctgcagcagtcaggtccaggactggtgaagccctcgcagaccctctcactcacctgtgccatctccggggacagtgtctctagcaacagtgctgcttggaactggatcaggcagtccccatcgagaggccttgagtggctgggaaggacatactacaggtccaagtggtataatgattatgcagtatctgtgaaaagtcgaataaccatcaacccagacacatccaagaaccagttctccctgcagctgaactctgtgactcccgaggacacggctgtgtattactgtgcgagagatcgtactggtggctactacggctactttgactactggggccagggaaccctggtcaccgtctcctca

SEQ ID NO: 7556 - DNA, 366 bp, Artificial Sequence
  Synthetic polynucleotide encoding artificial human antibody VH domain
cagatcaccttgaaggagtctggtcctacgctggtgaaacccacacagaccctcacgttgacctgcaccttctctgggttttcactcagcacaagtacagtgggtgtgggctggatccgtcagccccccggaaaggccctggagtggcttgcactcgtttattgggatgatgataagcgctacagcccatctctgaagagcaggttcaccatcaccaaagacacatccagaaaccaggtggtgcttacaatgaccaacatggacccagtggacacagccacatatttctgtgctcacagcggttactatggttcgggcctggcttttaatatctggggccaggggacaatggtcaccgtctcttca

SEQ ID NO: 7557 - DNA, 366 bp, Artificial Sequence
  Synthetic polynucleotide encoding artificial human antibody VH domain
gaggtgcagctggtggagtctgggggaggcctggtcaagcctggggggtccctgagactctcctgtgcagcctctggattcaccttcagtagctatagcatgaactgggtccgccaggctccagggaaggggctggagtgggtctcatccattagtagtagtagtagttacatatactacgcagactcagtgaagggccgattcaccatctccagagacaacgccaagaactcactgtatctgcaaatgaacagcctgagagccgaggacacggctgtgtattactgtgcgagagacccgcattacgatattttgactggttattatgactactggggccagggaaccctggtcaccgtctcctca

SEQ ID NO: 7558 - DNA, 375 bp, Artificial Sequence
  Synthetic polynucleotide encoding artificial human antibody VH domain
caggtgcagctggtgcagtctggggctgaggtgaagaagcctggggcctcagtgaaggtctcctgcaaggcttctggatacaccttcaccggctactatatgcactgggtgcgacaggcccctggacaagggcttgagtggatgggatggatcaaccctaacagtggtggcacaaactatgcacagaagtttcagggctgggtcaccatgaccagggacacgtccatcagcacagcctacatggagctgagcaggctgagatctgacgacacggccgtgtattactgtgcgagagggatagcagcagctggtacgcggtactactactacggtatggacgtctggggccaagggaccacggtcaccgtctcctca

SEQ ID NO: 7559 - DNA, 384 bp, Artificial Sequence
  Synthetic polynucleotide encoding artificial human antibody VH domain
caggtgcagctggtggagtctgggggaggcgtggtccagcctgggaggtccctgagactctcctgtgcagcctctggattcaccttcagtagctatggcatgcactgggtccgccaggctccaggcaaggggctggagtgggtggcagttatatcatatgatggaagtaataaatactatgcagactccgtgaagggccgattcaccatctccagagacaattccaagaacacgctgtatctgcaaatgaacagcctgagagctgaggacacggctgtgtattactgtgcgaaagatatcggtcttcgaagcagctggggttttaactactactactacggtatggacgtctggggccaagggaccacggtcaccgtctcctca

SEQ ID NO: 7560 - DNA, 339 bp, Artificial Sequence
  Synthetic polynucleotide encoding artificial human antibody VH domain
gaggtgcgcctggtggagtctggaggaggcttgatccggcctggggggtccctgagactctcctgtgcagcctctgggttcagcatcagtgacaactacgttaattgggtccgccaggctccagggaaggggctggagtgggtctcaattacttatagcggtggtgacacattgtacgcagactccgtgaagggccgattcaccgtctccagagacaattccaagaacacactgtatcttcaaatgaacagtctgggagccgctgacacggccgtttattactgtgcgagagagacttttgatctctggggccaagggacaatggtcaccgtctcttca

SEQ ID NO: 7561 - DNA, 360 bp, Artificial Sequence
  Synthetic polynucleotide encoding artificial human antibody VH domain
cagatcaccttgaaggagtctggtcctacgctggtgaaacccacacagaccctcacgctgacctgcaccttctctgggttctcactcagcactagtggagtgggtgtgggctggatccgtcagcccccaggaaaggccctggagtggcttgcactcatttattgggatgatgataagcgctacagcccatctctgaagagcaggctcaccatcaccaaggacacctccaaaaaccaggtggtccttacaatgaccaacatggaccctgtggacacagccacatattactgtgcacacacaactggaacgacgcccctctttgactactggggccagggaaccctggtcaccgtctcctca

SEQ ID NO: 7562 - DNA, 360 bp, Artificial Sequence
  Synthetic polynucleotide encoding artificial human antibody VH domain
caggtgcagctggtggagtctgggggaggcgtggtccagcctgggaggtccctgagactctcctgtgcagcgtctggattcaccttcagtagctatggcatgcactgggtccgccaggctccaggcaaggggctggagtgggtggcagttatatggtatgatggaagtaataaatactatgcagactccgtgaagggccgattcaccatctccagagacaattccaagaacacgctgtatctgcaaatgaacagcctgagagccgaggacacggctgtgtattactgtgcgagagatcatggggtagatggctcccctggtggctactggggccagggaaccctggtcaccgtctcctca

SEQ ID NO: 7563 - DNA, 381 bp, Artificial Sequence
  Synthetic polynucleotide encoding artificial human antibody VH domain
caggtgcagctggtggagtctgggggaggcgtggtccagcctgggaggtccctgagactctcctgtgcagcgtctggattcaccttcagtagctatggcatgcactgggtccgccaggctccaggcaaggggctggagtgggtggcagttatatggtatgatggaagtaataaatactatgcagactccgtgaagggccgattcaccatctccagagacaattccaagaacacgctgtatctgcaaatgaacagcctgagagccgaggacacggctgtgtattactgtgcgagagatgaaaacactggcagcagctggccctttagctactactacggtatggacgtctggggccaagggaccacggtcaccgtctcctca

SEQ ID NO: 7564 - DNA, 363 bp, Artificial Sequence
  Synthetic polynucleotide encoding artificial human antibody VH domain
gaggtgcagctggtggagtctgggggaggcctggtcaagcctggggggtccctgagactctcctgtgcagcctctggattcaccttcagtagctatagcatgaactgggtccgccaggctccagggaaggggctggagtgggtctcatccattagtagtagtagtagttacatatactacgcagactcagtgaagggccgattcaccatctccagagacaacgccaagaactcactgtatctgcaaatgaacagcctgagagccgaggacacggctgtgtattactgtgcgagatacaattcctactactactactacggtatggacgtctggggccaagggaccacggtcaccgtctcctca

SEQ ID NO: 7565 - DNA, 357 bp, Artificial Sequence
  Synthetic polynucleotide encoding artificial human antibody VH domain
cagatcaccttgaaggagtctggtcctacgctggtgaaacccacacagaccctcacgctgacctgcaccttctctgggttctcactcagcactagtggagtgggtgtgggctggatccgtcagcccccaggaaaggccctggagtggcttgcactcatttattgggatgatgataagcgctacagcccatctctgaagagcaggctcaccatcaccaaggacacctccaaaaaccaggtggtccttacaatgaccaacatggaccctgtggacacagccacatattactgtgcacacagacttacgataaacggtatggacgtctggggccaagggaccacggtcaccgtctcctca

SEQ ID NO: 7566 - DNA, 363 bp, Artificial Sequence
  Synthetic polynucleotide encoding artificial human antibody VH domain
gaggtgcagttgttggagtctgggggaggcttggtacagcctggggggtccctgagactctcctgtgtggcctctggattcacctttagtagctatgccatgaactgggtccgccaggctccagggaaggggctggagtgggtctcagttgtttataccagtggtgataacacacactatgcagactccgtgaagggccggttcaccatctccagagataattctaagaacatgctgtatctacaaatgaacagcctgagagccgaggatacggccatttatcactgtgcgaaagcccgagcaggcagtggctggcacgtttttgacgactggggccagggcaccctggtcaccgtctcctca

SEQ ID NO: 7567 - DNA, 348 bp, Artificial Sequence
  Synthetic polynucleotide encoding artificial human antibody VH domain
caggtgcagctgcaggagtcgggcccaggactggtgaagcctccggagaccctgtccctcacctgcactgtctctggtggctccatcagtagtttctactggagctggatccggcagcccccagggaagggactggagtggattgggtatatctattacagtgggaacaccaactacaacccctccctcaagagtcgagtcaccatgtcactagacacgtccaagaaccagttctccctgaatctgaattctgtgaccgctgcggacacggccgtctattactgtgcgagagtaggggctggatcctttgactactggggccagggaaccctggtcaccgtctcctca

SEQ ID NO: 7568 - DNA, 378 bp, Artificial Sequence
  Synthetic polynucleotide encoding artificial human antibody VH domain
gaggtgcagctggtggagtctgggggaggcttagtacagcctggggggtccctaagactctcctgtgtagtctctggattcaccttcaagacctatagcatgaactgggtccgccaggctccagggaaggggctggagtgggttgcatacattaatagtgataatagtaggatacactatgcagactccgtgaagggccgactcaccatctccagagacaatgccaagaactcactgtttctgcaaatgaacagcctgagagacgaggacacggctgtctattactgtgtaagagattggacccgaacagctactacggacttctactactacgggatggacgtctggggccaagggaccacggtcaccgtctcctca

SEQ ID NO: 7569 - DNA, 375 bp, Artificial Sequence
  Synthetic polynucleotide encoding artificial human antibody VH domain
gaggtgcagctgttggagtctgggggaggcttggtacagccgggggggtccctgagactctcctgtgcagcctctggcttcacctttagtggttatggcatgacctgggtccgccaggctccagggaacgggctggagtgggtctcagttatttttggcggtggcggtcccatgaccacattctatgcggactccgtgaagggccgcttcaccatctccagagataactccaagaacacgctgtttctccaaatgaatagcctgagagtcgacgacacggccgtatattactgtgcgaaagctaagatggagggcccggggagtccactaggtttggacgtctggggccgagggaccacggtcaccgtctcctca

SEQ ID NO: 7570 - DNA, 393 bp, Artificial Sequence
  Synthetic polynucleotide encoding artificial human antibody VH domain
gaggtgcagctgttggagtctgggggaggcttggtacagcctggggggtccctgagactctcctgtgcagcctctggattcacctttagcagctatgccatgagctgggtccgccaggctccagggaaggggctggagtgggtctcagctattagtggtagtggtggtagcacatactacgcagactccgtgaagggccggttcaccatctccagagacaattccaagaacacgctgtatctgcaaatgaacagcctgagagccgaggacacggccgtatattactgtgcgaaactggacaatactatggttcggggagttactcttttagggcactactactactacggtatggacgtctggggccaagggaccacggtcaccgtctcctca

SEQ ID NO: 7571 - DNA, 381 bp, Artificial Sequence
  Synthetic polynucleotide encoding artificial human antibody VH domain
gaggtgcagctggtggagtctgggggaggcttggtccagcctggggggtccctgaaactctcctgtgcagcctctgggttcgccttcagtggctctgctatgcactgggtccgccaggcttccgggaaagggctggagtgggttggccgtattagaagcaaaactaacacttacgcgacagcatatgctgcgtcggtgaaaggcaggttcaccatctccagagatgagtcaaagaacacggcttatctgcaaatggacagcctgaagaccgaggacacggccgtctattactgcactagacatgtggagggcactatgagactggtggacccctacttctttgactactggggccggggaaccctggtcaccgtctcctca

SEQ ID NO: 7572 - DNA, 369 bp, Artificial Sequence
  Synthetic polynucleotide encoding artificial human antibody VH domain
cagctgcaactgcaggagtcgggcccaggactggtaaagccttcggagaccctgtccctcacctgcactgtctctgatggctccagcagtaggaattactacttctggggctgggtccgccagcccccagggaagggactggagtggattgggagtgtctcctatagaggggaaaccttctacgacccgtccctcaagggtcgggtcaccatatccgtaaacatgtccaagaaccaattctccctgaaactgaactctgtgaccgccgctgactcggctgtgtattactgtgcgacccacttttccacctatcgttccgcctatcagtttgactactggggccagggaaccctggtcaccgtctcctca

SEQ ID NO: 7573 - DNA, 366 bp, Artificial Sequence
  Synthetic polynucleotide encoding artificial human antibody VH domain
gaagtgcagctggtggagtctgggggaggcttggtacagcctggcaggtccctgagactctcctgtgcagcctctggattcacctttgatgattatgccatgcactgggtccggcaagctccagggaagggcctggagtgggtctcaggtattagttggaatagtggtagcataggctatgcggactctgtgaagggccgattcaccatctccagagacaacgccaagaactccctgtatctgcaaatgaacagtctgagagctgaggacacggccttgtattactgtgcaaaagacttgagcagtggctggtcccctcggggtatggacgtctggggccaagggaccacggtcaccgtctcctca

SEQ ID NO: 7574 - DNA, 378 bp, Artificial Sequence
  Synthetic polynucleotide encoding artificial human antibody VH domain
caggtgcagctggtgcaatctgggtctgagttgaagaagcctggggcctcagtgaaggtttcctgcaaggcttctggatacaccttcactagctatgctatgaattgggtgcgacaggcccctggacaagggcttgagtggatgggatggatcaacaccaacactgggaacccaacgtatgcccagggcttcacaggacggtttgtcttctccttggacacctctgtcagcacggcatatctgcagatcagcagcctaaaggctgaggacactgccgtgtattactgtgcgagagctttggtagtaccagctgctatagactactactactacggtatggacgtctggggccaagggaccacggtcaccgtctcctca

SEQ ID NO: 7575 - DNA, 363 bp, Artificial Sequence
  Synthetic polynucleotide encoding artificial human antibody VH domain
gaggtgctcctggcgcagtctggaggaggcttgatccacccgggggggtccctgagactctcctgtgcagcctctgggttcaacgtcagtaacaactacttgacctgggtccgccaggctcaagggaaggggctggagtgggtctcaattatttatgatgttggtcacacgtactacgcagactccgtgaagggccgattcaccatctccagagacacatccaagaatatgttatatcttcaaatgaacagcctgagacccgaggacacggccgtatattattgttatagtgcttatcgatcaaagggcaacgacgacggcatggacgtctggggccaggggaccggggtcaccgtctcctca

SEQ ID NO: 7576 - DNA, 378 bp, Artificial Sequence
  Synthetic polynucleotide encoding artificial human antibody VH domain
gaggtgcagctggtggagtctgggggaggcctggtcaagcctggggggtccctgagactctcctgtgcagcctctggattcaccttcagtagctatagcatgaactgggtccgccaggctccagggaaggggctggagtgggtctcatccattagtagtagtagtagttacatatactacgcagactcagtgaagggccgattcaccatctccagagacaacgccaagaactcactgtatctgcaaatgaacagcctgagagccgaggacacggctgtgtattactgtgcgagaacgaggcagtgggagctattatattactactactactacggtatggacgtctggggccaagggaccacggtcaccgtctcctca

SEQ ID NO: 7577 - DNA, 366 bp, Artificial Sequence
  Synthetic polynucleotide encoding artificial human antibody VH domain
gaagtgcacctggtggagtctgggggaggcttggtacagcctggcaggtccctgagactctcctgtgcagcctctggattcatgtttgatggttatgccatgttttgggtccggcaagctccagggaagggcctggaatgggtctcaggaattagttggaatggtgatgacataggctatgcggactctgtgaagggccgtttcaccatctccagagacaacgccaagaactccctctatctgcagatgaacagtctgagggctgaagacacggccttgtattactgcacaaaggggaactttcataatagtggtcggggaatctttgactcctggggccagggaaccctggtcaccgtctcctca

SEQ ID NO: 7578 - DNA, 360 bp, Artificial Sequence
  Synthetic polynucleotide encoding artificial human antibody VH domain
gaagtgcagctggtggagtctgggggaggcttggtacagcctggcaggtccctgagactctcctgtgcagcctctggattcacctttgatgattatgccatgcactgggtccggcaagctccagggaagggcctggagtgggtctcaggtattagttggaatagtggtagcataggctatgcggactctgtgaagggccgattcaccatctccagagacaacgccaagaactccctgtatctgcaaatgaacagtctgagagctgaggacacggccttgtattactgtgcaaaagtagatcactatgatagtagtggggtggactactggggccagggaaccctggtcaccgtctcctca

SEQ ID NO: 7579 - DNA, 381 bp, Artificial Sequence
  Synthetic polynucleotide encoding artificial human antibody VH domain
gaggtgcagctggtggagtctgggggaggcctggtcaagcctggggggtccctgagactctcctgtgcagcctctggattcaccttcagtagctatagcatgaactgggtccgccaggctccagggaaggggctggagtgggtctcatccattagtagtagtagtagttacatatactacgcagactcagtgaagggccgattcaccatctccagagacaacgccaagaactcactgtatctgcaaatgaacagcctgagagccgaggacacggctgtgtattactgtgcgagagcacccgtggacgtattactatggttcggggaggatttttactactttgactactggggccagggaaccctggtcaccgtctcctca

SEQ ID NO: 7580 - DNA, 372 bp, Artificial Sequence
  Synthetic polynucleotide encoding artificial human antibody VH domain
gaggtgcagctgttggagtctgggggaggcttggtacagcctggggggtccctgagactctcctgtgcagcctctggattcacctttagcagctatgccatgagctgggtccgccaggctccagggaaggggctggagtgggtctcagctattagtggtagtggtggtagcacatactacgcagactccgtgaagggccggttcaccatctccagagacaattccaagaacacgctgtatctgcaaatgaacagcctgagacccgaggacacggccgtatattactgtgcgaaagaccacttatggttcggggagttattcaaaaactggttcgacccctggggccagggaaccctggtcaccgtctcctca

SEQ ID NO: 7581 - DNA, 381 bp, Artificial Sequence
  Synthetic polynucleotide encoding artificial human antibody VH domain
gaggtgcagctggtggagtccgggggaggcttagttcagcctggggggtccctgagactctcctgtgcagcctctggattcaccttcagtagctactggatgcactgggtccgccaagctccagggaaggggctggtgtgggtctcacgtattaatagtgatgggagtagcacaagctacgcggactccgtgaagggccgattcaccatctccagagacaacgccaagaacacgctgtatctgcaaatgaacagtctgagagccgaggacacggctgtgtattactgtgcaagagatctaagcgggtattacgatattttgactggttattcctactactttgactactggggccagggaaccctggtcaccgtctcctca

SEQ ID NO: 7582 - DNA, 357 bp, Artificial Sequence
  Synthetic polynucleotide encoding artificial human antibody VH domain
caggtgcagctggtgcagtctggggctgaggtgaagaagcctggggcctcagtgaaggtctcctgcaaggcttctggatacaccttcaccagctatgatatcaactgggtgcgacaggccactggacaagggcttgagtggatgggatggatgaaccctaacagtggtaacacaggctatgcacagaagttccagggcagagtcaccatgaccaggaacacctccataagcacagcctacatggagctgagcagcctgagatctgaggacacggccgtgtattactgtgcgagaggcggacagagatggctacaattagggtactggggccagggaaccctggtcaccgtctcctca

SEQ ID NO: 7583 - DNA, 360 bp, Artificial Sequence
  Synthetic polynucleotide encoding artificial human antibody VH domain
caggtgcagctggtggagtctgggggaggcgtggtccagcctgggaggtccctgagactctcctgtgcagcctctggattcaccttcagtagctatgctatgcactgggtccgccaggctccaggcaaggggctggagtgggtggcagttatatcatatgatggaagcaataaatactacgcagactccgtgaagggccgattcaccatctccagagacaattccaagaacacgctgtatctgcaaatgaacagcctgagagctgaggacacggctgtgtattactgtgcgagacccagttcggggagttattatggcgcgattttctggggccagggaaccctggtcaccgtctcctca

SEQ ID NO: 7584 - DNA, 360 bp, Artificial Sequence
  Synthetic polynucleotide encoding artificial human antibody VH domain
caggtcaccttgagggagtctggtcctgcgctggtgaaacccacacagaccctcacactgacctgcaccttctctgggttctcactcagcactagtggaatgtgtgtgagctggatccgtcagcccccagggaaggccctggagtggcttgcacgcattgattgggatgatgataaatactacagcacatctctgaagaccaggctcaccatctccaaggacacctccaaaaaccaggtggtccttacaatgaccaacatggaccctgtggacacagccacgtattactgtgcacgctccttagcagtggctgcccttatggacgtctggggccaagggaccacggtcaccgtctcctca

SEQ ID NO: 7585 - DNA, 387 bp, Artificial Sequence
  Synthetic polynucleotide encoding artificial human antibody VH domain
caggtgcagctggtggagtctgggggaggcgtggtccagcctgggaggtccctgagactctcctgtgcagcctctggattcaccttcagtagctatggcatgcactgggtccgccaggctccaggcaaggggctggagtgggtggcagttatatcatatgatggaagtaataaatactatgcagactccgtgaagggccgattcaccatctccagagacaattccaagaacacgctgtatctgcaaatgaacagcctgagagctgaggacacggctgtgtattactgtgcgaaagattcttactatggttcggggagcaaccgcggttactactactactacggtatggacgtctggggccaagggaccacggtcaccgtctcctca

SEQ ID NO: 7586 - DNA, 399 bp, Artificial Sequence
  Synthetic polynucleotide encoding artificial human antibody VH domain
caggtgcagctggtgcagtctggggctgaggtgaagaagcctggggcctcagtgaaggtttcctgcaaggcatctggatacaccttcaccagctactatatgcactgggtgcgacaggcccctggacaagggcttgagtggatgggaataatcaaccctagtggtggtagcacaagctacgcacagaagttccagggcagagtcaccatgaccagggacacgtccacgagcacagtctacatggagctgagcagcctgagatctgaggacacggccgtgtattactgtgcgagggaccaaacacccccgaacgcatatgattacgtttgggggagttatcgttatatcgggggggagtttgactactggggccagggaaccctggtcaccgtctcctca

SEQ ID NO: 7587 - DNA, 372 bp, Artificial Sequence
  Synthetic polynucleotide encoding artificial human antibody VH domain
gaggtgcagttggtggagtctgggggaggcttggtccagcctggggggtccctgagactctcttgtgcaaccagtggattcactttcagcaatttttggatgagttgggtccgccaggctccaggaaagggacttgagtgggtggccaccataaaacaagatggacgtgaacaatattatgtggactctgtaaagggccgattcaccatttctagagacaacggcaggaggtcgctgtctctgcagttgaaccgcctgagagtcgacgacacggctacatattattgcacgagagaattcacgggacgatacgacgacatgggctactacggcgacctctggggtcggggaagtcgggtcaccgtctcctca

SEQ ID NO: 7588 - DNA, 372 bp, Artificial Sequence
  Synthetic polynucleotide encoding artificial human antibody VH domain
caggtccagctggtgcagtctggggctgaggtgaagaagcctgggtcctcggtgaaggtctcctgcaaggcttctggaggcaccttcagcagctatgctatcagctgggtgcgacaggcccctggacaagggcttgagtggatgggaaggatcatccctatccttggtatagcaaactacgcacagaagttccagggcagagtcacgattaccgcggacaaatccacgagcacagcctacatggagctgagcagcctgagatctgaggacacggccgtgtattactgtgcgagagatttccccctttataactggaacgacgtggggtactttgactactggggccagggaaccctggtcaccgtctcctca

SEQ ID NO: 7589 - DNA, 366 bp, Artificial Sequence
  Synthetic polynucleotide encoding artificial human antibody VH domain
gaagtgcagctggtggagtctgggggaggcttggtacagcctggcaggtccctgagactctcctgtgcagcctctggattcacctttgatgattatgccatgcactgggtccggcaagctccagggaagggcctggagtgggtctcaggtattagttggaatagtggtagcataggctatgcggactctgtgaagggccgattcaccatctccagagacaacgccaagaactccctgtatctgcaaatgaacagtctgagagctgaggacacggccttgtattactgtgctaccttagctgctacgccctactactactacggtatggacgtctggggccaagggaccacggtcaccgtctcctca

SEQ ID NO: 7590 - DNA, 366 bp, Artificial Sequence
  Synthetic polynucleotide encoding artificial human antibody VH domain
gaggtgcagctggtggagtctggaggaggcttgatccagcctggggggtccctgagactctcctgtgcagcctctgggttcaccgtcagtagcaactacatgagctgggtccgccaggctccagggaaggggctggagtgggtctcagttatttatagcggtggtagcacatactacgcagactccgtgaagggccgattcaccatctccagagacaattccaagaacacgctgtatcttcaaatgaacagcctgagagccgaggacacggccgtgtattactgtgcgattttatggttcggggaggggaggctggctgaatacttccagcactggggccagggcaccctggtcaccgtctcctca

SEQ ID NO: 7591 - DNA, 357 bp, Artificial Sequence
  Synthetic polynucleotide encoding artificial human antibody VH domain
gaggtgcagctgttggagtctgggggacaccggctacagccgggggggtccctgagactctcctgtgttgcctctagattcacttttagtagccatgccctgaactgggtccgccaggctccagggaaggggctggagtgggtctcaagtattactggcagtggcggtaccacatattacgcagactccgtgagggggcggttcatcatctccagagacaattccaagaacactctctttctgcaaatgaacagcctgagagtcgacgacacggccttttattactgtgtgaggggttcggggagttatttcccctttgaagagtggggccagggaaacctcgtcaccgtctcctca

SEQ ID NO: 7592 - DNA, 366 bp, Artificial Sequence
  Synthetic polynucleotide encoding artificial human antibody VH domain
caggtccagcttgtgcagtctggggctgaggtgaagaagcctggggcctcagtgaaggtttcctgccaggcttctggatacagcttcactgactatgttatgttttgggtgcgccaggcccccggacaaaggcttgagtggatgggatggatccaccctggcaatggtcgcacagcttattcacagaagttccagggcagagtcgccattaccagggacacatccgcgagcacagcccacatggaactgagcagcctgagatctgaagacacggctacttattattgtgcgagagatctgggctttaccaccagttggcgcggccctgactactggggccagggaaccctggtcaccgtctccgca

SEQ ID NO: 7593 - DNA, 357 bp, Artificial Sequence
  Synthetic polynucleotide encoding artificial human antibody VH domain
caggtccagcttgtacagtctggggctgaggtgaagaagcctggggcctcagtgaaggtttcctgcagggcctctggatacaccttcagtaactatgttatccattggatgcgccaggcccccggacaaaggcttgagtggatgggatggatccacgctggcaatggaaagacattgtatgcacagaatgtccagggcagactcacctttaccggagacacatccgcgagaatagtctacatggagctgagcagcctgagacctgaagacacgactatctattactgtgcgaccgaagtctggggatcgggttactgtgactactggggtcagggaaccctggtcaccgtctcctca

SEQ ID NO: 7594 - DNA, 375 bp, Artificial Sequence
  Synthetic polynucleotide encoding artificial human antibody VH domain
cagatgcagctggtgcagtctggggctgaggtgaagaagactgggtcctcagtgaaggtttcctgcaaggcttccggatacaccttcacctaccgctacctgcactgggtgcgacaggcccccggacaagcgcttgagtggatgggatggatcacacctttcaatggtaacaccaactacgcacagaaattccaggacagagtcaccattaccagggacaggtctatgagcacagcctacatggagctgagcagcctgagatctgaggacacagccatgtattactgtgcaagatccgatatagcagcagctggtacgggttactactacggtatggacgtctggggccaagggaccacggtcaccgtctcctca

SEQ ID NO: 7595 - DNA, 378 bp, Artificial Sequence
  Synthetic polynucleotide encoding artificial human antibody VH domain
caggtgcagctggtgcagtctggggctgaggtgaagaagcctggggcctcagtgaaggtttcctgcaaggcatctggatacaccttcaccagctactatatgcactgggtgcgacaggcccctggacaagggcttgagtggatgggaataatcaaccctagtggtggtagcacaagctacgcacagaagttccagggcagagtcaccatgaccagggacacgtccacgagcacagtctacatggagctgagcagcctgagatctgaggacacggccgtgtattactgtgcgagagatctattgtcgtatagcagtggctggtacgcgggaaactggttcgacccctggggccagggaaccctggtcaccgtctcctca

SEQ ID NO: 7596 - DNA, 378 bp, Artificial Sequence
  Synthetic polynucleotide encoding artificial human antibody VH domain
caggtgcagctggtggagtctgggggaggcgtggtccagcctgggaggtccctgagactctcctgtgcagccgctggattctccttcggtgactatggcatgcactgggtccgccaggctccaggcaagggcctggagtgggtggcagttatttcaaatgatgcaaataatcatttttatgcggcctccgtgaagggccgatacgccgtctcgagagacacttccaagaatacgctgtatctggagatgaacagcctgagacctgaggacacggctgtgtatttctgtgcgaggggggggaagggttctatgctggcgacggatatcttctggtacttcgatctctggggccgtggcaccctggtcactgtctcctca

SEQ ID NO: 7597 - DNA, 375 bp, Artificial Sequence
  Synthetic polynucleotide encoding artificial human antibody VH domain
caggtccagctggtgcagtctggggctgaggtgaagaagcctgggtcctcggtgaaggtctcctgcaaggcttctggaggcaccttcagcagctatgctatcagctgggtgcgacaggcccctggacaagggcttgagtggatgggaaggatcatccctatccttggtatagcaaactacgcacagaagttccagggcagagtcacgattaccgcggacaaatccacgagcacagcctacatggagctgagcagcctgagatctgaggacacggccgtgtattactgtgcgaggaaatattgtagtagtaccagctgctatctcttcgactactttgactactggggccagggaaccctggtcaccgtctcctca

SEQ ID NO: 7598 - DNA, 363 bp, Artificial Sequence
  Synthetic polynucleotide encoding artificial human antibody VH domain
caggtgcagctggtggagtctgggggaggcgtggtccagcctgggaggtccctgagactctcctgtgcagcctctggattcaccttcagtagctatgctatgcactgggtccgccaggctccaggcaaggggctggagtgggtggcagttatatcatatgatggaagcaataaatactacgcagactccgtgaagggccgattcaccatctccagagacaattccaagaacacgctgtatctgcaaatgaacagcctgagagctgaggacacggctgtgtattactgtgcgagggctcgttcggggagttattataacccgttcgacccctggggccagggaaccctggtcaccgtctcctca

SEQ ID NO: 7599 - DNA, 378 bp, Artificial Sequence
  Synthetic polynucleotide encoding artificial human antibody VH domain
gaggtgcagctggtggagtccgggggaggcttagttcagcctggggggtccctgagactctcctgtgcagcctctggattcaccttcagtagctactggatgcactgggtccgccaagctccagggaaggggctggtgtgggtctcacgtattaatagtgatgggagtagcacaagctacgcggactccgtgaagggccgattcaccatctccagagacaacgccaagaacacgctgtatctgcaaatgaacagtctgagagccgaggacacggctgtgtattactgtgcaagaggggaggtcaattaccgggggatttactactactactacggtatggacgtctggggccaagggaccacggtcaccgtctcctca

SEQ ID NO: 7600 - DNA, 375 bp, Artificial Sequence
  Synthetic polynucleotide encoding artificial human antibody VH domain
gaggtgcacttgttggagtctgggggaaacttggtacagccgggggggtccctgagactctcctgtgcagcctctggattcacttttagcgaatatgccatgagttgggtccgccaggttccagggaaggggctggagtgggtcgcaggtattgttgggagtggtggaaccacgtactatacagacgccgtgcatcgccggttcaccgtctccagagacaattccaagaacatgctgtatctccagatgaacagtctgacaacggaagacacggccctatattactgtgcgagactgacccccactagcagttggtaccgcttcttatacggtatggacgtctggggccaagggaccacggtcaccgtctcctca

SEQ ID NO: 7601 - DNA, 363 bp, Artificial Sequence
  Synthetic polynucleotide encoding artificial human antibody VH domain
caggtgcagctggtgcagtctggggctgaggtgaagaagcctggggcctcagtgaaggtctcctgcaaggcttctggatacaccttcaccagttatgatatcaactgggtgcgacaggccactggacaagggcttgagtggatgggatggatgaaccctaacagtggtaacacaggctatgcacagaagttccagggcagagtcaccatgaccaggaacacctccataagcacagcctacatggagctgagcagcctgagatctgaggacacggccgtgtattactgtgcgagacggggcagtggctggctcaactacggtatggacgtctggggccaagggaccacggtcaccgtctcctca

SEQ ID NO: 7602 - DNA, 369 bp, Artificial Sequence
  Synthetic polynucleotide encoding artificial human antibody VH domain
caggtgcagctggtggagtctgggggaggcgtggtccagcctgggaggtccctgagactctcctgtgcagcctctggattcaccttcagtagctatgctatgcactgggtccgccaggctccaggcaaggggctggagtgggtggcagttatatcatatgatggaagcaataaatactacgcagactccgtgaagggccgattcaccatctccagagacaattccaagaacacgctgtatctgcaaatgaacagcctgagagctgaggacacggctgtgtattactgtgcgagagatccggagttcgatattttgactggttaccactttgactactggggccagggaaccctggtcaccgtctcctca

SEQ ID NO: 7603 - DNA, 369 bp, Artificial Sequence
  Synthetic polynucleotide encoding artificial human antibody VH domain
cagctgcagctgcaggagtcgggcccagggctgctgaatccttcggagaccctgtccctcacctgcactgtctcttatgcctccgtcagcggtactaccgactactggggctggatccgccagccccccgggaaggggctggagtggattgggactgttttttattctgggagtacctactacaacccgtccctcgagagccgagtctccatatccatagacacgtccaagaaccagttctccctgaccttgacctctgtgaccgccgcggacacggctatgtattactgtgcgagactcaagaatttctatccttcggggagttacccagactactggggccagggaatccaggtcaccgtctcccca

SEQ ID NO: 7604 - DNA, 366 bp, Artificial Sequence
  Synthetic polynucleotide encoding artificial human antibody VH domain
cagctgcaggtgcaggaatcgggcccaggactggtgaagccttcggagaccctgtccctcacctgcactgtctctggtgactccatcagcagtaatggttattactgggcctggatccgccagcccccaggggaggggctggagtggattgggactatctattacagtgagagcagttactacaacccgtccctcaagagtcgagtctccatatccgtagacacgtccaagaaccagatctccctgaaactgagctctgtgaccgccacagacacggctgtgtattactgcgcgaggggtcggtacacctatggaaccaccacctttgactactggggccagggaaccctggtcaccgtctcctca

SEQ ID NO: 7605 - DNA, 357 bp, Artificial Sequence
  Synthetic polynucleotide encoding artificial human antibody VH domain
caggtccagctggtgcaatctgaggctgaaatgaaggagcctgggtcctcggtgaaggtctcctgcaaggcttctggaggcaccttcaccagttatgctttcagctgggtgcgccaggcccctggccaagggcttgagtggatgggaaggatcatccctgtccttggtaaatcagactacgcacagagattacagggcagagtcaccattatggcggacaaatccacgagcacagtctacatggaattgagcagcctgagatcggacgactcggccgtctactactgtgcgagcgatgctattgcagtggcccagtttgactcctggggccagggaaccctggtcaccgtctcctca

SEQ ID NO: 7606 - DNA, 372 bp, Artificial Sequence
  Synthetic polynucleotide encoding artificial human antibody VH domain
cagctgcagctgcaggagtcgggcccaggactggtgaagccttcggagaccctgtccctcacctgcactgtctctggtggctccatcagcagtagtagttacttctggggctggatccgccagcccccagggaaggggctggaatggattgggactatctattatagtgggagcacctactacaccccgtccctcaagagtcgagtcaccatatccgttgacacgtccaagaaccagttctccctgaggctgaactctgtgaccgccgcagacacggctgtgtattactgtgcgagccgacgattctatagtgggagctacctagatccttttgatatctggggccaagggacaatggtcaccgtctcttca

SEQ ID NO: 7607 - DNA, 363 bp, Artificial Sequence
  Synthetic polynucleotide encoding artificial human antibody VH domain
caggtgcagctggtggagtctgggggaggcgtggtccagcctgggaggtccctgagactctcctgtgcagcctctggattcaccttcagtagctatgctatgcactgggtccgccaggctccaggcaaggggctggagtgggtggcagttatatcatatgatggaagtaataaatactacgcagactccgtgaagggccgattcaccatctccagagacaattccaagaacacgctgtatctgcaaatgaacagcctgagagctgaggacacggctgtgtattactgtgcgagaaccggtagtgggagctacttggatgcttttgatatctggggccaagggacaatggtcaccgtctcttca

SEQ ID NO: 7608 - DNA, 366 bp, Artificial Sequence
  Synthetic polynucleotide encoding artificial human antibody VH domain
gaagtgcagctggtggactctgggggaggcttggtacagcctggcaggtccctgagactctcctgtgcagcctctggattcacctttgatgattatgccatgcactgggtccggcaagctccagggaagggcctggagtgggtctcaggtattagttggaatagtggtagcataggctatgcggactctgtgaagggccgattcaccatctccagagacaacgccaagaactccctgtatctgcaaatgaacagtctgagagctgaggacacggccttgtattactgtgcaaaagccaccgggtatagcagcaactggtacccttttgactactggggccagggaaccctggtcaccgtctcctca

SEQ ID NO: 7609 - DNA, 360 bp, Artificial Sequence
  Synthetic polynucleotide encoding artificial human antibody VH domain
cagctgcagctgcaggagtcgggcccaggactggcgaagccttcggagaccctgtccctcacctgcactgtctctggtgactccataagcagtagtagttattactggggctggatccgccagcccccagggaaggggctggagtggattggcagtatcaagtatagtgggagcacctattacaacccgtccctcaagagtcgagtcaccatatccatagacacgtccaagaagcagttctccctgaagttgagctccgtgaccgccgcagatacggctgtgtattactgtgcgagacacgggggggcaccagctggactaagtgcctggggccagggaaccctggtcagcgtctcctca

SEQ ID NO: 7610 - DNA, 387 bp, Artificial Sequence
  Synthetic polynucleotide encoding artificial human antibody VH domain
gaggtgcagctggtggagtctgggggaggcttggtccagcctggggggtccctgagactctcctgtgcagcctctggattcacctttagtagctattggatgagctgggtccgccaggctccagggaaggggctggagtgggtggccaacataaagcaagatggaagtgagaaatactatgtggactctgtgaagggccgattcaccatctccagagacaacgccaagaactcactgtatctgcaaatgaacagcctgagagccgaggacacggctgtgtattactgtgcgagagatcgccccggcggagaacgatattttgactggttattatccctcgatgcttttgatatctggggccaagggacaatggtcaccgtctcttca

SEQ ID NO: 7611 - DNA, 387 bp, Artificial Sequence
  Synthetic polynucleotide encoding artificial human antibody VH domain
caggtgcagctggtggagtctgggggaggcgtggtccagcctgggaggtccctgagactctcctgtgcagcctctggattcaccttcagtagctatgctatgcactgggtccgccaggctccaggcaaggggctggagtgggtggcagttatatcatatgatggaagtaataaatactacgcagactccgtgaagggccgattcaccatctccagagacaattccaagaacacgctgtatctgcaaatgaacagcctgagagctgaggacacggctgtgtattactgtgcgagagatttgactactatgatagtagtggttattacgccatactactactacggtatggacgtctggggccaagggaccacggtcaccgtctcctca

SEQ ID NO: 7612 - DNA, 378 bp, Artificial Sequence
  Synthetic polynucleotide encoding artificial human antibody VH domain
caggtgcagctggtgcagtctggggctgaggtgaagaagcctggggcctcagtgaaggtttcctgcaaggcatctggatacaccttcaccagctactatatgcactgggtgcgacaggcccctggacaagggcttgagtggatgggaataatcaaccctagtggtggtagcacaagctacgcacagaagttccagggcagagtcaccatgaccagggacacgtccacgagcacagtctacatggagctgagcagcctgagatctgaggacacggccgtgtattactgtgcgagagaggattactatgatagtagtggttctaggtactactacggtatggacgtctggggccaagggaccacggtcaccgtctcctca

SEQ ID NO: 7613 - DNA, 366 bp, Artificial Sequence
  Synthetic polynucleotide encoding artificial human antibody VH domain
caggtgcagctggtggagtctgggggaggcgtggtccagcctgggaggtccctgagactctcctgtgcagcctctggattcaccttcagtagctatgctatgcactgggtccgccaggctccaggcaaggggctggagtgggtggcagttatatcatatgatggaagtaataaatactacgcagactccgtgaagggccgattcaccatctccagagacaattccaagaacacgctgtatctgcaaatgaacagcctgagagctgaggacacggctgtgtattactgtgcgagaggtgatagcagcagccgttactactacggtatggacgtctggggccaagggaccacggtcaccgtctcctca

SEQ ID NO: 7614 - DNA, 378 bp, Artificial Sequence
  Synthetic polynucleotide encoding artificial human antibody VH domain
caggtgcatctgcaggagtcgggcccaggactggtgaagccttcacagaccctgtccctcacctgcactgtctctggtggctccatcagcagtggtagttactactggacctggatccggcagcccgccgggaagggactggagtggattgggcgtatctatactagtgggagcaccaactacaatacctccctcaagagtcgagtcagcatatcagaagacacgtccaagaaccagatctccctgacactcagctctgtgaccgccgcagacacggccatgtattactgtgcgagagagaataggaactactgtattggtaataactgctactactttgactcctggggccagggaaccctggtcaccgtctcctca

SEQ ID NO: 7615 - DNA, 369 bp, Artificial Sequence
  Synthetic polynucleotide encoding artificial human antibody VH domain
caggtgcagctggtgcagtctggggctgaggtgaagaagcctggggcctcaatgaaggtctcctgcaaggcttctggatacacctttaccgcctactatatacactgggtgcgacaggcccctggaccaggccttgagtggatgggatggatcaaccctaaaagtggtgacacatactatgcacggaagtttcagggcagggtcaccatgaccagggacacgtccagcaccacaacctacatggagctgagcggtctggactccgacgacacggccatgtattattgtgcgagagatgggggcgaggacgatattttgacgggcccccgagactactggggccagggaaccctgctcaccgtctcctca

SEQ ID NO: 7616 - DNA, 363 bp, Artificial Sequence
  Synthetic polynucleotide encoding artificial human antibody VH domain
caggttcagctggtgcagtctggggttgaggtgaagaagcctggggcctcagtgagggtctcctgcaaggcttctggttacacgttcaccagctatggagtcaactgggtgcgacaggcccctggacaaggacttgagtggatgggatggatcagcgtttacaatggcaacacaaactatgcacggagcctccaggacagagtcatcatgaccacagatacatccacgaggacagtctacatggagctgaggaacctgagatctgacgacacggccgtgtattactgtgtgagagcagtggctggaactccctactacgggatggacgtctggggccaagggaccacggtcaccgtctcctca

SEQ ID NO: 7617 - DNA, 363 bp, Artificial Sequence
  Synthetic polynucleotide encoding artificial human antibody VH domain
caggtgcacctggtgcagtctggggctgatgtgaggacgcctggggcctcactgaaggtctcctgcggggcttctggatacaaattcaccgccttctatattcactgggtgcgacaggcccctggacatgcacttgagtggatgggatggatcaaccctagcaatggtgccagaaggcttgcacagaattttcaggacaggttcaccatgaccacggacacgtccatcaatacagcctccatgacattgagcaggctgacgtctgacgacacggccgtctattactgtgcggcacgcgggtgtggtgactgccacccatactttgactactggggccagggaaccctggtcaccgtctcctca

SEQ ID NO: 7618 - DNA, 378 bp, Artificial Sequence
  Synthetic polynucleotide encoding artificial human antibody VH domain
caggtgcgcctagaacagtggggcgcaggacagttgaggccttcggagaccctgtccctcacctgcgctgtctacggtgactccttccgtggttactactggaactggatccgccagaccccagggaagggcctggagtggattggagaaatcaatcatactggaaccatcaactacaacccgtccctcaggagtcgagtcgccatatcagtagactcgttcaagaagcagttgtcccttaaggtgtcctctgtgaccgacgcggactcggctatttatttctgtgcgagaggccggccagcgaatccactatggatcggtccacgtggatattactttgacaactggggccagggaactgtggtcaccgtttccgca

SEQ ID NO: 7619 - DNA, 351 bp, Artificial Sequence
  Synthetic polynucleotide encoding artificial human antibody VH domain
caggtgcagctacagcaggggggcgcaggactgtcgaagccgtcggagaccctgtccctcacctgcgctatttctggtgggtccttcactgctaactacttgagctggatccgccagccccctgggaaggggctggaatggattggtgaaatgcatcatagcggaacgaccagttacacttcgccgttcaagagtcgggccaccatatcacttgacacgtccaagaaccagttcaccctgaggctgctctctgtttccgccgaggacacggctgtgtattactgtgcgagacaggattcccactatgctttcggggactggggccagggaaccctggtcaccgtctcctca

SEQ ID NO: 7620 - DNA, 363 bp, Artificial Sequence
  Synthetic polynucleotide encoding artificial human antibody VH domain
gaggtgcagctggtggagtctgggggaggcttggtccagcctggggggtccctcagactctcctgtgcagcgtctggattcaccttcggttcctttgatatgcactgggtccgccagtctccggggagaggactggaatttgtatcatcgattagtggtaatggggctagcgcatattatgctaactctgtgaagggcagattcaccatctccagagacaattccaagaacactctgtttcttcaaatgggcagcctgagaggtgaggacgcggctgtttatttctgtgcgagagggacgacgcagaagctgcccccccactttgactactggggccagggaacccttgtcaccgtctcctca

SEQ ID NO: 7621 - DNA, 378 bp, Artificial Sequence
  Synthetic polynucleotide encoding artificial human antibody VH domain
caggtgcgcctagaacagtggggcgcaggacagttgaggccttcggagaccctgtccctcacctgcgctgtctatggtgactccttccgtggttactactggaactggatccgccagcccccagggaagggcctggagtggattggagaaatcaatcatactggaaccatcaactacaacccgtccctcaggagtcgagtcgccatatcagtagactcgttcaagaagcagttctcccttaagatgtcctctgtgaccgccgcggacacgggtgtgtatttctgtgcgagaggccggccagcgaatccactatggatcgggccacggggatattattttgactactgggaccagggaatcctggtctccgtctccgca

SEQ ID NO: 7622 - DNA, 363 bp, Artificial Sequence
  Synthetic polynucleotide encoding artificial human antibody VH domain
caggtgcagctacagcagtggggcgcaggactcttgaagccttcggacaccctgtccctcacctgcgctgtctatggtgggtccttcaatgcttactactggacctggatccgccagcccccagggaaggggctggagtggattggggaaatcaatcatagtggaagcaccaactataacccgtccctcaagagtcgagtcagcatatcagtagacacgtccaagaaccagttctccctgaaactgaactctgtgaccgccgcggacacgggtgtgtattattgtgccagatacccgcgtgagtcagcagctggaaaggcgtttgactactggggccagggaatcctggtcaccgtctcctca

SEQ ID NO: 7623 - DNA, 360 bp, Artificial Sequence
  Synthetic polynucleotide encoding artificial human antibody VH domain
caggtgcagctggtggagtctgggggaggcgtggtccagcctgggaggtccctgagactctcctgtgcagcctctggattcaccttcagtagctatgctatgcactgggtccgccaggctccaggcaaggggctggagtgggtggcagttatatcatatgatggaagcaataaatactacgcagactccgtgaagggccgattcaccatctccagagacaattccaagaacacgctgtatctgcaaatgaacagcctgagagctgaggacacggctgtgtattactgtgcgagagatttctctggtggctacgtccgggtcggctactggggccagggaaccctggtcaccgtctcctca

SEQ ID NO: 7624 - DNA, 354 bp, Artificial Sequence
  Synthetic polynucleotide encoding artificial human antibody VH domain
caggtcaccttgaaggagtctggccccacgctggtgaaacccacagagaccctcacactgagttgcaccttctctgggttctcactcaccaccgctggactgggtgtggcctggatccgtcagcccccaggaaaggccctggagtggattgcgaccattttttgggatgatgataagcgctatcgcccatccctgaccaaccggctcaccatcaccaaggacacctccaaaaaccaagtgttcctcacaatgaccaacatggaccctgtggacacagccacatattactgtgcactccggggggagtggcaatttgcctcctggggccagggcaccctggtcaccgtctcctca

SEQ ID NO: 7625 - DNA, 387 bp, Artificial Sequence
  Synthetic polynucleotide encoding artificial human antibody VH domain
gaagtgcagctggtgcagtccggagcagaggtgaaaaagcccggggagtctctgaggatctcctgtaagggttctggatacagctttaccagctactggatcagctgggtgcgccagatgcccgggaaaggcctggagtggatggggaggattgatcctagtgactcttataccaactacagcccgtccttccaaggccacgtcaccatctcagctgacaagtccatcagcactgcctacctgcagtggagcagcctgaaggcctcggacaccgccatgtattactgtgcgagacatttcgcgggatattgtagtagtaccagctgctatacccctcttaactggttcgacccctggggccagggaaccctggtcaccgtctcctca

SEQ ID NO: 7626 - DNA, 390 bp, Artificial Sequence
  Synthetic polynucleotide encoding artificial human antibody VH domain
caggtacagctgcagcagtcaggtccaggactggtgaagccctcgcagaccctctcactcacctgtgccatctccggggacagtgtctctagcaacagtgctgcttggaactggatcaggcagtccccatcgagaggccttgagtggctgggaaggacatactacaggtccaagtggtataatgattatgcagtatctgtgaaaagtcgaataaccatcaacccagacacatccaagaaccagttctccctgcagctgaactctgtgactcccgaggacacggctgtgtattactgtgcaagagaagcgtcgggcgtacgatattttgactggttattaaattactactttgactactggggccagggaaccctggtcaccgtctcctca

SEQ ID NO: 7627 - DNA, 363 bp, Artificial Sequence
  Synthetic polynucleotide encoding artificial human antibody VH domain
gaagtgcagctggtgcagtctggagcagaggtgaaaaagcccggggagtctctgaggatctcctgtaagggttctggatacagctttaccagctactggatcagctgggtgcgccagatgcccgggaaaggcctggagtggatggggaggattgatcctagtgactcttataccaactacagcccgtccttccaaggccacgtcaccatctcagctgacaagtccatcagcactgcctacctgcagtggagcagcctgaaggcctcggacaccgccatgtattactgtgcgagacaagagggctatttctactactactacatggacgtctggggcaaagggaccacggtcaccgtctcctca

SEQ ID NO: 7628 - DNA, 366 bp, Artificial Sequence
  Synthetic polynucleotide encoding artificial human antibody VH domain
caggtgcagctgcaggagtcgggcccaggactggtgaagccttcggagaccctgtccctcagctgctctgtctctggtggctccatgaatagctatcactggagttgggtccggcagtccccagggaagggactggagtggattggcaatatctattatagtgggaacaccaactacaacccctccctcaagagtcgagtcaccatatcagtagacacgcccaagaaccagttcttcctgaaggtgacctctgtgaccgccgcggacacggccgtatattactgtgcgagaaacgggcttaatagcggctggtccatgtactactttgaccagtggggccagggaaccctggtcaccgtctcctca

SEQ ID NO: 7629 - DNA, 396 bp, Artificial Sequence
  Synthetic polynucleotide encoding artificial human antibody VH domain
caggtgcagctacaacagtggggcgcaggactgttgaagccttcggagaccctgtccctcacctgcgctgtctatggtgggtccttcagtgtttaccagtggagctggatccgccaggccccagggaaggggctggagtggattggggaaatcaatcacagtggaagcaccaactacaacccgtccctcaagagtcgagtcaccatatcagtggacacgtccaaaaaccagttctccctgaggttgaggtctgtgaccgccgcggacacggctgtgtatttctgtgcgagaggccaaaatggagtagtgccagctcctgtattggggatcggacctttctacacctactcctacatggacgtctggggcacagggaccacggtcagggtctcctca

SEQ ID NO: 7630 - DNA, 363 bp, Artificial Sequence
  Synthetic polynucleotide encoding artificial human antibody VH domain
gaggtgcagctggtggagtccgggggagtcttagttcattctggggggtccctgagactctcctgtgcagcctctggattcaatttcaatatttactggatgcactgggtccgccaagctccagggaaggggctggagtgggtctcagttatcactaatgatgggggtactgcattctacgcggacgccgtgaagggccgattcaccgtctccagagacaacgccaagaataacctgtatttgcaaatgaacagtctgacagccgaagacacggctgtatatttttgtgcaagggatcgacaggagctcgggaacaactggctcgactcctggggccagggaactctggtcagagtctcctca

SEQ ID NO: 7631 - DNA, 384 bp, Artificial Sequence
  Synthetic polynucleotide encoding artificial human antibody VH domain
caggtgcagctggtgcagtctggggctgaggtgaagaagcctggggcctcagtgaaggtttcctgcaaggcatctggatacaccttcaccagctactatatgcactgggtgcgacaggcccctggacaagggcttgagtggatgggaataatcaaccctagtggtggtagcacaagctacgcacagaagttccagggcagagtcaccatgaccagggacacgtccacgagcacagtctacatggagctgagcagcctgagatctgaggacacggccgtgtattactgtgcgagagatcccaccatgactacggtgactacgagttactactactactactacatggacgtctggggcaaagggaccacggtcaccgtctcctca

SEQ ID NO: 7632 - DNA, 375 bp, Artificial Sequence
  Synthetic polynucleotide encoding artificial human antibody VH domain
gaagtgcagctggtgcagtctggagcagaggtgaaaaagcccggggagtctctgaggatctcctgtaagggttctggatacagctttaccagctactggatcagctgggtgcgccagatgcccgggaaaggcctggagtggatggggaggattgatcctagtgactcttataccaactacagcccgtccttccaaggccacgtcaccatctcagctgacaagtccatcagcactgcctacctgcagtggagcagcctgaaggcctcggacaccgccatgtattactgtgcgagatacgagatgtattgtagtagtaccagctgctatggcgcttttgatatctggggccaagggacaatggtcaccgtctcttca

SEQ ID NO: 7633 - DNA, 366 bp, Artificial Sequence
  Synthetic polynucleotide encoding artificial human antibody VH domain
caggtcaccttgagggagtctggtcctgcgctggtgaaacccacacagaccctcacactgacctgcaccttctctgggttctcactcagcactagtggaatgtgtgtgagctggatccgtcagcccccagggaaggccctggagtggcttgcacgcattgattgggatgatgataaatactacagcacatctctgaagaccaggctcaccatctccaaggacacctccaaaaaccaggtggtccttacaatgaccaacatggaccctgtggacacagccccgtattactgtgcacggttcctagtgggaggtactaagaactggttcgacccctggggccagggaaccctggtcaccgtctcctca

SEQ ID NO: 7634 - DNA, 387 bp, Artificial Sequence
  Synthetic polynucleotide encoding artificial human antibody VH domain
caggtgcagctacagcagtggggcgcgggactgttgaagccttcggagaccctgtccctcacctgcgctgtctatggtgtgtcgcccactacttactattggagctggatccgtcagtcccccgggaagggtctggagtggattggggaaatcactcatagtggaagcaccaactacaacccgtcccacaagagtcgagtcaccatgtcactggacacgtccaagagccagttctccctgaagttgagttctgtgaccgccgcggacacggccatatattattgtgcgaggggacgcagtgaggagaccatgatagtgatggttgtcacgggaattgatttctactttgactcttggggccaggggaccctggtcaccgtctcctca

SEQ ID NO: 7635 - DNA, 378 bp, Artificial Sequence
  Synthetic polynucleotide encoding artificial human antibody VH domain
caggtgcagctggtggagtctgggggaggcgtggtccagcctggggggtccctgagagtctcctgtgcaacctctggattcaccttcaacaaccacggcatgcactgggtccgccaggctccaggcaaggggctggagtgggtggcatttatttcatatgagggaagtattaaaaactatgcagactccattaagggccgattcaccatctccagagactctttcagtcacaccctgtctctgcaaatgaatagcctgagagctgaagacacggctgtgtatttctgtgcgaaagattcgcgattctttcaccttggatatacctatggaccaatctttgactactggggccagggaactctggtcaccgtctcctca

SEQ ID NO: 7636 - DNA, 369 bp, Artificial Sequence
  Synthetic polynucleotide encoding artificial human antibody VH domain
caggtccagctggtacagtctggggctgaggtgaagaagcctggggcctcagtgaaggtctcctgcaaggtttccggatacaccctcactgaattatccatgcactgggtgcgacaggctcctggaaaagggcttgagtggatgggaggttttgatcctgaagatggtgaaacaatctacgcacagaagttccagggcagagtcaccatgaccgaggacacatctacagacacagcctacatggagctgagcagcctgagatctgaggacacggccgtgtattactgtgcaacaggccccccagtgggagctaccaaccggcactggttcgacccctggggccagggaaccctggtcaccgtctcctca

SEQ ID NO: 7637 - DNA, 360 bp, Artificial Sequence
  Synthetic polynucleotide encoding artificial human antibody VH domain
gaggtgcagctggtggagtccgggggaagctcagttcagcctggggggtccctgaaactctcctgtgcagcccctggattccccctcagtccctattggatacactgggtccgccaacgtccagggaaggggttggagtgggtctcacgtactaattctgatggaacgactacaacgtacgcggattccgtgaagggccggttctccatctctatagacaacgccgagaacatggtgaatttgcagatgaacagtctgagagtcgaggacacggctctttatttctgtgcgagagttaatggcggactctcttattcctttgatatttggggccaagggacactggtcaccgtctcctca

SEQ ID NO: 7638 - DNA, 387 bp, Artificial Sequence
  Synthetic polynucleotide encoding artificial human antibody VH domain
caggtgcagctacagcagtggggcgcgggactgttgaagccttcggagaccctgtccctcacctgcgctgtctatggtgtgtcgcccactatttactattggagctggatccgtcagtcccccgggaagggcctggagtggattggcgaaatcactcatagtggaagcaccaactacaacccgtccctcaagagtcgagtcaccatgtcactggacacgtccaagagccagttctccctgaagttgagttctgtgaccgccgcggacacggccatatattattgtgcgaggggacgcagtgaggagaccatgatagtgatggttgtcacgggaattgatttctactttgactcttggggccaggggaccctggtcaccgtctcctca

SEQ ID NO: 7639 - DNA, 387 bp, Artificial Sequence
  Synthetic polynucleotide encoding artificial human antibody VH domain
caggtgcacctacagcagtggggcgcaggactgttgaagcctctggagaccctgtccctcacctgcgctgtgtatggtgagtcctccagcgatcactactggagctggatccgccagcccccagggaaggggctggagtggattggggagatcagtcagggtggaagcaccaagtacaacccgtccctcaagagtcgagtcaccatctcaagagacacctccaagaatcaattctccctgaagctgaactctgtgaccgccgcggacacggctgtatattattgtgcgagaggccttaagggacttaccatgatggtagtggtttttactggggcatatgatgcttttgatatgtggggccaagggacaatggtcacggtctcttca

SEQ ID NO: 7640 - DNA, 348 bp, Artificial Sequence
  Synthetic polynucleotide encoding artificial human antibody VH domain
gaagtgcagctggtggagtctgggggaggcttggtacagcctggcaggtccctgagactctcctgtgcagcctctggattcacctttgatgattatgccatgcactgggtccggcaagctccagggaagggcctggagtgggtctcaggtattagttggaatagtggtagcataggctatgcggactctgtgaagggccgattcaccatctccagagacaacgccaagaactccctgtatctgcaaatgaacagtctgagagctgaggacacggccttgtattactgtgtttgtggagatggcttaattgactactggggccagggaaccctggtcaccgtctcctca

SEQ ID NO: 7641 - DNA, 387 bp, Artificial Sequence
  Synthetic polynucleotide encoding artificial human antibody VH domain
caggtgcagctacaacagtggggcgcaggactgttgaagccttcggagaccctgtccctcacctgcgctgtctatggtgtgtcgcccagtaattactattggacctggatccgccaatcccccgaaaaggggctggagtggattggggaaatcactcatagtggaagcgccaactacaacccgtccctcaggagtcgagtcaccatgtctctagacacgtccaagagccagttctccctgaaaatgagttctgtgaccgccgcggacacggctatgtattactgtgcgagaggacgcagtgaggagactatgatagtggtggttgtcacgggaattgattactactttgactcctggggccagggaaccctggtcaccgtctcctca

SEQ ID NO: 7642 - DNA, 363 bp, Artificial Sequence
  Synthetic polynucleotide encoding artificial human antibody VH domain
gaggtgcggctggtgcagtctggaccagaggtgaaaaagcccggggagtctctgaggatctcctgtaagggttctggatacattttaaccagcaactggatcggctgggtgcgccagatgcccgggaaaggcctggagtggatggggattatctatcctggtgactctgataccagatacagcccgtccttccaaggccaggtcaccatctcagccgacaacttcatcagcaccgcctacctgcagtggagcagcctgaaggcctcggacaccgccatgtattactgtgcgaatagaaataccgaccgaacgggagatgcttttgatatctggggccaagggacaatggtcaccgtctcttca

SEQ ID NO: 7643 - DNA, 375 bp, Artificial Sequence
  Synthetic polynucleotide encoding artificial human antibody VH domain
gaggtgcagctggtggagtctgggggaggcttggtacagcctggggggtccctgagactctcctgtgcagcctctggattcaccttcagtagctacgacatgcactgggtccgccaagctacaggaaaaggtctggagtgggtctcagttattggtactgctggtgacacatactatccaggctccgtgaagggccgattcaccatctccagagaaaatgccaagaactccttgtatcttcaaatgaacagcctgagagccggggacacggctgtgtattactgtgcaagaggtctctattgtggtggtgactgctattctatcctcgatgcttttgatatctggggccaagggacaatggtcaccgtctcttca

SEQ ID NO: 7644 - DNA, 363 bp, Artificial Sequence
  Synthetic polynucleotide encoding artificial human antibody VH domain
caggtgcggctggaggagtctgggggaggcttggtcaagcctggagggtccttgagactctcctgtacagcctctggattcagcttcagtgactactacatgtcctgggtccgccaggctccagggaaggggctggagtggatttcatacattagtagtagtactcattttataaaatacgcagactctgtgaagggccgattcaccatctccagagacaacgccaggaactcactgtatctgcaaatgaacagcctgagagccgaggacacggccgtctattactgtgtgagagatggggtgggaaatactattggctactttgactactggggccagggagccctggtcaccgtctcctca

SEQ ID NO: 7645 - DNA, 372 bp, Artificial Sequence
  Synthetic polynucleotide encoding artificial human antibody VH domain
cagatcaccttgaaggagtctggtcctacgctggtgaaacccacacagaccctcacgctgacctgcaccttctctggattctcactcagcacaagtggagtgggtgtgggctggatccgtcagccccctggaaaggccctggattggcttgcactcatttattgggatgataatgagcgctacagcccatctctgaagagcaggctcaccatctccaaggacacctccaaaaaccaggtggtccttacaatgaccgacatggaccctgtggacacagccacatattattgtgcacgtctgggcagctatggttacgatatcaccgaggtccttgactactggggccagggaaccctagtcagcgtctcctca

SEQ ID NO: 7646 - DNA, 363 bp, Artificial Sequence
  Synthetic polynucleotide encoding artificial human antibody VH domain
caggtgcagctgcaggagtcgggcccaggactggtgaagccttcacagaccctgtccctcacctgcactgtctctggtgcctccatcagcagtggtggttattactggagctggatccgccagcatccagggaagggcctggagtggattgggtacatttataacactgggactacctattacaacccgtccctcaagagtcgagttaccattccaggagacacctctaagaataagttctccctgaacctgaggtatgtgactgccgcggacacggccgtgtattactgtgcgagaggtggagtattcggcgtcggagtttttgatatctggggccaagggacagtggtcaccgtctcttca

SEQ ID NO: 7647 - DNA, 363 bp, Artificial Sequence
  Synthetic polynucleotide encoding artificial human antibody VH domain
caggtgcagctggtggagtctgggggaggcgtggtccagcctgggaggtccctgagactctcctgtgcagcctctggattcaccttcagtacctatgctatacactgggtccgccaggctccaggcaaggggctggagtgggtggcagttatatcatatgatggaagcaatatatactacgcagactctgtgaagggccgattcaccatctccagagacaattccaagaacacggtgtatctgcaagtgaacagcctgagagctgaggacacggctgtctattactgtacgagggtcaccgggggtggctacaataatccttttgactactggggccagggaaccctggtcaccgtctcctca

SEQ ID NO: 7648 - DNA, 399 bp, Artificial Sequence
  Synthetic polynucleotide encoding artificial human antibody VH domain
gaggtgcaactggtggagtcggggggggacttggtcccgccgggggggtccctgagactctcttgtgtagggtctggattcaccttcagtagttcttggttgacctgggtccgccaacgtccagggaaagggctggagtgggtggccaacataaaggaggatggaagtgagacaaattatgtggactctgtgatgggccgattcaccatctccagagacaatcccaggaattcggtgtttttgcaaatgaacaacctgagagccgacgacgcggccgtctactactgtgcgagagaccagtatcggatttctcggggtcggggcatttatataacgaacaccttctactattacggtatggacgtctggggccaagggaccacggtctccgtctcctca

SEQ ID NO: 7649 - DNA, 366 bp, Artificial Sequence
  Synthetic polynucleotide encoding artificial human antibody VH domain
caggtgcagctgcaggagtcgggcccaggactggtgaagccttcggggaccctgtccctcacctgcactgtctctggtgactccatcagcagtagcaactggtggacttgggtccgccagcccccagggaaggggctggaatggatcgcggaaatctatcagagtgggagcaccaactacaactcgtccctccagagtcgagtcaccatatcagtagacaggtccaagaaccaggtctccctgaggctgacctctgtgaccgccgcggacacggccatgtattattgtgcgagatattcaccatatggttcggggcacggggcgctggactattggggccagggaaccctggtcaccgtctcctca

SEQ ID NO: 7650 - DNA, 387 bp, Artificial Sequence
  Synthetic polynucleotide encoding artificial human antibody VH domain
caggtgcacctacagcagtggggcgcaggactgttgaagcctctggagaccctatccctcacctgcgctgtatatggtgagtcctccagcgatcacttctggagctggatccgccagcccccagggaaggggctggagtggattggggacatcagtcatggtggaagcaccaagtacaacccgtccctcaagagtcgagtcaccatctcaagaaacacctccaagaatcagttctccctgaaactgaactctgtgaccgccgcggacacggctgtatattattgtgcgagaggccttaagggacttaccatgatggtagtggtttttactggggcatatgattcttttgattcctggggccaaggaactgtggtcacggtctcttca

SEQ ID NO: 7651 - DNA, 372 bp, Artificial Sequence
  Synthetic polynucleotide encoding artificial human antibody VH domain
cagctgcagctgcaggagtcgggcccaggactggtgaagccttcggagaccctgtccctcacctgcactgtctctggtggctccatcagcagtagtagttactactggggctggatccgccagcccccagggaaggggctggagtggattgggagtatctattatagtgggagcacctactacaacccgtcccacaagagtcgagtcaccatatccgtagacacgtccaagaaccagttctccctgaagctgagccctgtgaccgccgcagacacggctgtgtattactgtgcgagacattcgtggggatggctacaattaggtggtgcttttgatatctggggccaagggacaatggtcaccgtctcttca

SEQ ID NO: 7652 - DNA, 390 bp, Artificial Sequence
  Synthetic polynucleotide encoding artificial human antibody VH domain
caggtgcagctacagcagtggggcgcgggactgttgaagccttcggagaccctgtccctcacctgcgctgtctatggtgtgtcgcccactacttactactactggacctggattcgtcagtcccccgggaagggtctggagtggattggggaaatcactcatagcggaagcaccaactacaacccgtccctcaagagtcgagtcaccatgtccctggacacgtctaagagtcagttctcactgaagttgagttctgtgaccgccgcggacacggctatatattactgtgcgaggggacgcagtgaggagactatgatagtgatggttgtcacgggaattgataactactttgactcctggggccaggggaccctggtcaccgtctcctca

SEQ ID NO: 7653 - DNA, 375 bp, Artificial Sequence
  Synthetic polynucleotide encoding artificial human antibody VH domain
caggtgcagctggtggagtctgggggaggcgtggtccagcctgggaggtccctgagactctcctgtgcagcctctggattcaccttcagtagctatggcatgcactgggtccgccaggctccaggcaaggggctggagtgggtggcagttatatcatatgatggaagtaataaatactatgcagactccgtgaagggccgattcaccatctccagagacaattccaagaacacgctgtatctgcaaatgaacagcctgagagctgaggacacggctgtgtattactgtgcgaaagattttccgcagtatagcagtggctggtacgaggggggttttgactactggggccagggaaccctggtcaccgtctcctca

SEQ ID NO: 7654 - DNA, 387 bp, Artificial Sequence
  Synthetic polynucleotide encoding artificial human antibody VH domain
caggtgcagctgcagcagtggggcgcgggactgttgaagccttcggagaccctgtccctcacctgcgctgtctatggtgtgtcgcccactccttactactggagctggatccgtcagtcccccgggaagggtctggagtggattggggaaatcactcatggtggaagcaccaactacaacccgtccctcaagagtcgagtcaccatgtcacttgacacgtccaagagccagttctccctgaagttgagttctgtgactgccgcggacacggctgtatattactgtgcgaggggacgctatgaggagactatgatagtgatggttgtcacgggaattgattactactttgactcctggggccaggggaccctggtcaccgtctcctca

SEQ ID NO: 7655 - DNA, 363 bp, Artificial Sequence
  Synthetic polynucleotide encoding artificial human antibody VH domain
gaggtgcagctgtcggagtctgggggagtcttggtacagccgggggggtccctgagactctcctgtgcagcctctggattcatcttcagtaattatgccatgacctgggtccgccaggctccagggaaggggctggaatgggtctcagctattggtggaagtggtgaaaacaaatattacgcagagtccgtgaagggccggttcaccatctccagagacaattccaagaacacgctgtctctgcagatgaacagcctgacaggcgacgacacggccacatattactgtgcgagaccccaggaggttcggggaggtccctacttagcctactggggccagggaaccctggtcaccgtctcctca

SEQ ID NO: 7656 - DNA, 369 bp, Artificial Sequence
  Synthetic polynucleotide encoding artificial human antibody VH domain
caggtgaagatggtggaatctgggggaggcgtggtccagcctgcgaggtccctgagactctcctgtgcagcctctggactcaccttcagtgactttgctctgcactgggtccgccaggctccaggcaaggggctggagtgggtcgcatttatttcatatgatggaaggagtaaatactacggagactccgtgaggggccgattcaccatctccagagacaactccaagaacacgctgtatctgcaaatgaacagcctgagagctgaggacacggctgtttattactgtgcgagggggtattattatggttcggggaggtattataacctttggttctggggccagggaaccctggtcaccgtctcctca

SEQ ID NO: 7657 - DNA, 372 bp, Artificial Sequence
  Synthetic polynucleotide encoding artificial human antibody VH domain
caggtccagcttgtgcagtctggggctgaggtgaagaagcctggggcctcagtgaaggtttcctgcaaggcttctggatacaccttcactagctatgctatgcattgggtgcgccaggcccccggacaaaggcttgagtggatgggatggatcaacgctggcaatggtaacacaaaatattcacagaagttccagggcagagtcaccattaccagggacacatccgcgagcacagcctacatggagctgagcagcctgagatctgaagacacggctgtgtattactgtgcgagaggggtaatatggttcggggagttcccgaggtactactttgactactggggccagggaaccctggtcaccgtctcctca

SEQ ID NO: 7658 - DNA, 345 bp, Artificial Sequence
  Synthetic polynucleotide encoding artificial human antibody VH domain
gaggtgcagctggtggagtctgggggaggcttggtacagcctggggggtccctgagactctcctgtgcagcctctggattcaccttcagtagctatagcatgaactgggtccgccaggctccagggaaggggctggagtgggtttcatacattagtagtagtagtagtaccatatactacgcagactctgtgaagggccgattcaccatctccagagacaatgccaagaactcactgtatctgcaaatgaacagcctgagagacgaggacacggctgtgtattactgtgcgacgctttacgatatttttctctggggccagggaaccctggtcaccgtctcctca

SEQ ID NO: 7659 - DNA, 363 bp, Artificial Sequence
  Synthetic polynucleotide encoding artificial human antibody VH domain
caggttcaactggtgcagtctggagctgaggtggagaagcctggggcctcagtcaaggtctcctgcaaggcttctggttacagctttaccaattatggtttcacctgggtgcgacaggcccctggacaagggcttgagtggatgggatggatcagcgcttacaatggtaaaacaaaatatgcagagaagttccagggcagagtcaccatgaccacagacacatccacgagcacaggctacatggagctgaggagcctgagatctgaggacacggccgtgtattactgtgcgagaggggccacagttatggttaatgtctggttccacccctggggccagggaaccctggtcaccgtctcctca

SEQ ID NO: 7660 - DNA, 366 bp, Artificial Sequence
  Synthetic polynucleotide encoding artificial human antibody VH domain
gaggtgcaggtcgtggagtccggaggaggcttgatccagcctggggagtccctgagagtctcctgcgcaccctctgggttcatcgtcggtgacaattacatgagctgggtccgccaggctccagggaaggggctggagtgggtctcaagtatttatagcactggtgccggtggtagagtgtattacgcagactccgtgaagggccgattctccatctccagagacaattccaagaacacgttgtttcttcaaatgaacagcctgagagccgaggacacggccgtgtattactgtgcgaggggagtcactctgggaaattacggtctggacgtctggggcctagggaccacggtcaccgtctcctca

SEQ ID NO: 7661 - DNA, 384 bp, Artificial Sequence
  Synthetic polynucleotide encoding artificial human antibody VH domain
caggtccagctggtacagtctggggctgaggtgaagaagcctggggcctcagtgaaggtctcctgcaaggtttccggatacaccctcactgaattatccatgcactgggtgcgacaggctcctggaaaagggcttgagtggatgggaggttttgatcctgaagatggtgaaacaatctacgcacagaagttccagggcagagtcaccatgaccgaggacacatctacagacacagcctacatggagctgagcagcctgagatctgaggacacggccgtgtattactgtgcaacaggtcccgcagtggctggtaccattggggactcttactactactacggtatggacgtctggggccaagggaccacggtcaccgtctcctca

SEQ ID NO: 7662 - DNA, 399 bp, Artificial Sequence
  Synthetic polynucleotide encoding artificial human antibody VH domain
gaggtgcagttggtggagtctgggggagacttggtccagcctggggggtccctgagactctcctgtgcagcctctggattcacctttagtagttcttggatgacctgggtccgccagcctccagggagagggctggaatgggtggccaacataaaggaggatggaagtgagaagaattatttggactctgtgaagggccgattcaccatctccagagacaatgccaagaattcactgtatttgcaaatgaacagcctgagagccgaggacacggccgtgtactactgtgcgagagaccagtatcggatttctaggggtcggggaatttttataacgaaaacgttcttctactacggtatggacgtctggggccaagggaccacggtctccgtctcctca

SEQ ID NO: 7663 - DNA, 369 bp, Artificial Sequence
  Synthetic polynucleotide encoding artificial human antibody VH domain
gaggtggagctggtggagtctgggggaggcctggtcaagccgggggggtccctgagactctcctgtgcagcctctggatttaatttcggtgaccataatatgatttgggtccgtcaggctccagggaaggggctggagtgggtctcatccattagcggaagtactagttacagatattacgctgactcagtgaagggccgattcaccatctccagagacaacgccaagaactcactgtatctgcaaatggacggcctgaaattcgaagacacggctttgtatttctgtgcgagagatcggggggtggctccaattatgtactggcacttcgatctctggggccgtggcaccctggtcactgtctcctca

SEQ ID NO: 7664 - DNA, 366 bp, Artificial Sequence
  Synthetic polynucleotide encoding artificial human antibody VH domain
cagatcaccttgaaggagtctggtcctacgctggtgaaacccacacagaccctcacgctgacctgcaccttctctgggttctcactcagcactagtggagtgggtgtgggctggatccgtcagcccccaggaaaggccctggagtggcttgcactcatttattgggatgatgataagcgctacagcccatctctgaagagcaggctcaccatcaccaaggacacctccaaaaaccaggtggtccttacaatgaccaacatggaccctgtggacacagccacatattactgtgcacacagactagccgggtttgtacgtaactggttcgacccctggggccagggaaccctggtcaccgtctcctca

SEQ ID NO: 7665 - DNA, 387 bp, Artificial Sequence
  Synthetic polynucleotide encoding artificial human antibody VH domain
caggtgcaactgcaacagtggggcgcaggactgttgaagccttcggagaccctgtccctcacctgcgctgtttatggtgtgtcgcccagtaattactactggagttggatccgtcagtcccccgggaaggggctggagtggattggggaaatcactcatagtggaagcgccaactacaacccgtccctcaggagtcgagtcatcatgtctctggacacgtccaagagccagttctccctgaaaatgagttctgtgaccgccgcggacacggccatatattactgtgcgagaggacgcagtgaggagactatgatagtgttagttgtcacgggtattgattactactttgactcctggggccagggaaccctggtcaccgtctcctca

SEQ ID NO: 7666 - DNA, 369 bp, Artificial Sequence
  Synthetic polynucleotide encoding artificial human antibody VH domain
caggtgcagctgcaggagtcgggcccaggactggtgaagccctcacagaccctgtctctcacgtgcactgtctctagtgtctccatcaccagtggtggttcctactggaactggatccgccagcacccagggaagggcctggagtggattgggtccatctcttacagtgggagcacctcctacaattcgtccctcaagagtcgacttaccatatcagaaaacacctctgagaaccagttctccctgaaactgagttctgtttctgcctcggacacggccgtgtattactgtgcgagatccgaaaacgactacggtggtaactgggcctttgactactggggccagggaaccctggtcaccgtctcctca

SEQ ID NO: 7667 - DNA, 387 bp, Artificial Sequence
  Synthetic polynucleotide encoding artificial human antibody VH domain
caggtgcagctacagcagtggggcgcgggactgttgaagccttcggagaccctgtccctcacctgcgctgtctatggtgtgtcgcccagtagttactcttggaactggattcgccagccccccgggaaggggctggagtggattggggaaatcagtcaaaccggaagcaccaactacaacccgtccctcaagagtcgagtcagcatgtcactggacacgtccaagagccagttgtccctgaagctgagttctgtgaccgccgcggacacggctacatattactgcgcgagaggacgcagtgaagagactatgatagtgctggttgtcacgggcattgacttctactttgacgcctggggccagggaaccctggtcaccgtctcctca

SEQ ID NO: 7668 - DNA, 387 bp, Artificial Sequence
  Synthetic polynucleotide encoding artificial human antibody VH domain
caggtgcagctacagcagtggggcgcaggactgttgaagccttcggagaccctgtccctcacctgcgctgtctatggtgggtccttcagtggttactactggagctggatccgccagcccccagggaaggggctggagtggattggggaaatcactcatagtggaagcaccaattacaccccgtccctcaagaatcgagtcaccatgtccctagacacgtccaagaaccagttctccctgaagctgacttctgtcaccgccgcggacacggctgtgtattactgtgcgagaggacgcagtgaggagactatgatagtcgtggttattacggcaatggattactactttgactactggggccagggagccctagtcaccgtctcctca

SEQ ID NO: 7669 - DNA, 396 bp, Artificial Sequence
  Synthetic polynucleotide encoding artificial human antibody VH domain
caggtgcagctagaggagtcgggcccgggaccggtgaagccttcggagaccctgtccctcacctgcactgtctctggtggctccgtcagcagtgggagtaactactggagctggatccggcagcccccagggaagggactggagtggattgggtacatccactacagtggaaataccaactacaatccctccctcaagagtcgagtcagcttgtcagtagacacgtccaacaaccagttctccctgaagctgaggtctgtgaccgctgcggacacggccctgtattactgtgcgagaatggtgggaaaaaaccatacctcgggactttttcgaggttactactacttctacggtttggacgtctggggccaagggaccgcggtcaccgtctcctca

SEQ ID NO: 7670 - DNA, 387 bp, Artificial Sequence
  Synthetic polynucleotide encoding artificial human antibody VH domain
caggtgcaactacaacagtggggcgcaggactgttgaagccttcggagaccctgtccctcacctgcgctgtctatggtgtgtcgcccagtgattactattggagctggatccgccagtcccccgggaaggggctggagtggattggggaaatcactcatagtggaagcgccaactacaacccgtccctcaggagtcgagtcaccgtgtctctagacacgtccaagggccagttctccctgaaaatgagttctgtgaccgccgcggacacggctatgtattactgtgcgagaggacgcagtgaagagactatgatagttgtggttgtcacgggaattgattacttctttgactcctggggccagggaaccctggtcaccgtctcctca

SEQ ID NO: 7671 - DNA, 363 bp, Artificial Sequence
  Synthetic polynucleotide encoding artificial human antibody VH domain
caggtgcagctggtggagtctgggggaggcgtggtccagcctgggaggtccctgagactctcctgtggagcctctggattcaccctcagaagctatgctatgcactgggtccgccaggctccaggcaaggggctggagtgggtggcagttatatcatatgatggaagcaataaatactacgcagactccgtgaagggccgattcaccatcaccagagacaattccaagaacacgttgtatctggaaatgaacagcctgagaggtgaggacacggctgtgtatcactgtgcgagagccaatggcggcaactactactacggtatggacgtctggggccaagggaccacggtcaccgtctcctca

SEQ ID NO: 7672 - DNA, 387 bp, Artificial Sequence
  Synthetic polynucleotide encoding artificial human antibody VH domain
caggtgcacctggtggagtctgggggaggcgtggtccagcctgggaggtccctgaaactctcctgtggagtctctggattcaccttccatgaatatggcatgcactgggtccgccaggctccaggcaaggggctggagtgggtggcatttatgtcatatgatgaaactgagcaatacctcgcagactccgtgaagggccgattcgccatctccagagaaaactccaagagcacgctgtatctggaaatgaacatcctgagaactgaggacacggctgtgtattactgtgcgaaagatagtgagaattgtagtggtggtagttgcgacgactactactactacggtatggacgtctggggccaagggaccacggtcaccgtctcctca

SEQ ID NO: 7673 - DNA, 360 bp, Artificial Sequence
  Synthetic polynucleotide encoding artificial human antibody VH domain
caggtgcagatggtgcagtctggggctgaggtgaagaagcctggggcctcagtgagggtctcctgcgaggcttctggatacaccttcatcgattatgatatcaactgggtgcgacaggcccctggacaagggcttgagtgggtgggatggatggaccccaacagtggtctcacaggctctgcacagaagttccagggcagagtcaccatgaccaggaacaccgccatgcacacagcctacatggagctgagaggcctcagatctgaggacgcggccgtttattactgtgcgcgaggactccatagtaatggtttcacctttgactactggggccagggaaccctggtcaccgtctcctca

SEQ ID NO: 7674 - DNA, 363 bp, Artificial Sequence
  Synthetic polynucleotide encoding artificial human antibody VH domain
caggtccagctggtacagtctggggctgaggtgaagaagcctggggcctcagtgaaggtctcctgcaaggtttccggatacaccctcactgaattatccatgcactgggtgcgacaggctcctggaaaagggcttgagtggatgggaggttttgatcctgaagatggtgaaacaatctacgcacagaagttccagggcagagtcaccatgaccgaggacacatctacagacacagcctacatggagctgagcagcctgagatctgaggacacggccgtgtattactgtgcaacagccgcagcagctgggcaacccaactggttcgacccctggggccagggaaccctggtcaccgtctcctca

SEQ ID NO: 7675 - DNA, 372 bp, Artificial Sequence
  Synthetic polynucleotide encoding artificial human antibody VH domain
gaagtgcagctggtggagtctgggggaggcttggtacagcctggcaggtccctgagactctcctgtgcagcctctggattcacctttgatgattatgccatgcactgggtccggcaagctccagggaagggcctggagtgggtctcaggtattagttggaatagtggtagcataggctatgcggactctgtgaagggccgattcaccatctccagagacaacgccaagaactccctgtatctgcaaatgaacagtctgagagctgaggacacggccttgtattactgtgcaactctaggcggggagttatcctactactactactacggtatggacgtctggggccaagggaccacggtcaccgtctcctca

SEQ ID NO: 7676 - DNA, 375 bp, Artificial Sequence
  Synthetic polynucleotide encoding artificial human antibody VH domain
caggtgcagctggtggagtctgggggaggcgtggtccagcctgggaggtccctgagactctcctgtgcagcctctggattcaccttcagtagctatgctatgcactgggtccgccaggctccaggcaaggggctggagtgggtggcagttatatcatatgatggaagcaataaatactacgcagactccgtgaagggccgattcaccatctccagagacaattccaagaacacgctgtatctgcaaatgaacagcctgagagctgaggacacggctgtgtattactgtgcgagcacttacgatattttgactggttattaccatttatacggtatggacgtctggggccaagggaccacggtcaccgtctcctca

SEQ ID NO: 7677 - DNA, 387 bp, Artificial Sequence
  Synthetic polynucleotide encoding artificial human antibody VH domain
caggtgcagctacaacagtggggcgcaggactgttgaagccttcggagaccctgtccctcacctgcgctgtctatggtgtgtcgcccagtaatttctattggagctggatccgccagtcccccgggaaggggctggagtggattggggaaatcactcatagtggaagcgccaactacaacccgtccctcaggagtcgagtcaccatgtctctagacacgtccaagagccagttctccctgaaaatgagttctgtgaccgccgcggacacggctatgtattactgtgcgagaggacgcagtgaggagactatgatagtggtggttgtcacgggaattgattactactttgactcctggggccagggaaccctggtcaccgtctcctca

SEQ ID NO: 7678 - DNA, 375 bp, Artificial Sequence
  Synthetic polynucleotide encoding artificial human antibody VH domain
caggtgcagctggtggagtccgggggaggcgtggtccagcctgggaggtccctgaaactctcgtgtgtggcctctggattcagtttcaacaactatggcatgcactggctccgccaggcgccaggcaaggggctggagtgggtggcagttatatcatatgaaggaagcaaaaaatactatggagacgccctgaagggccgattcactatctccagagacagttccaagaacacggtgcatctgcaaatgaacaggctgacaactgaggacacggctgtctattactgtgcgaaagccgggccaatattttggttcggggaggggaagaactattttgacgactggggccagggaaccctggtcaccgtctcctca

SEQ ID NO: 7679 - DNA, 360 bp, Artificial Sequence
  Synthetic polynucleotide encoding artificial human antibody VH domain
caggtgcaactggtggagtctgggggaggcgtggtccagcctgggaggtccctgagactctcctgtgcagcctctggattcaccttcagaacctatactatgcactgggtccgccaggctccaggcaaggggctggagtgggtggcagttatatcagatgatggaagcaataaatattacgcagaccccgtgaagggccgattcaccatctccagagacaattccaagaacacgctgtatctgcaaatgaacagcctgagagctgaggacacggctgtctattactgttcgagagggggatgggagctactggaggcttttgatatctggggccaagggacaatggtcaccgtctcttca

SEQ ID NO: 7680 - DNA, 357 bp, Artificial Sequence
  Synthetic polynucleotide encoding artificial human antibody VH domain
gaggtgcagctggtgcagtctggagcagaggtgaaaaagcccggggagtctctgaagatctcctgtaagggttctggatacagctttaccagctactggatcggctgggtgcgccagatgcccgggaaaggcctggagtggatggggatcatctatcctggtgactctgataccagatacagcccgtccttccaaggccaggtcaccatctcagccgacaagtccatcagcaccgcctacctgcagtggagcagcctgaaggcctcggacaccgccatgtattactgtgcgagacagctaccagcagctggcatacttgactactggggccagggaaccctggtcaccgtctcctca

SEQ ID NO: 7681 - DNA, 399 bp, Artificial Sequence
  Synthetic polynucleotide encoding artificial human antibody VH domain
gaggtgcaactggtggagtctgggggggacttggtccggccgggggagtccctgcgactctcctgtgtagggtctggattcgccttcagtagttcttggttgacctgggtccgccaacgtccaggaaaagggctggagtgggtggccaacataaaggaggatggaagtgagacaaattatgtggactctgtgaagggccgattcaccatctccagagacaatcccaggaattcggtgtatttgcaaatgaacagcctgagagccgacgacgcggccgtctactactgtgcgagagaccagtatcggatttctcggggtcggggcatttatataacgaacaccttctactattacggtatggacgtctggggccaagggaccacggtctccgtctcctca

SEQ ID NO: 7682 - DNA, 357 bp, Artificial Sequence
  Synthetic polynucleotide encoding artificial human antibody VH domain
cagatcaccttgaaggagtctggtcctacgctggtgaaacccacacagaccctcacgctgacctgcaccttctctggcttctcaatcagcactagtggagtgggtgtgggctggatccgtcagcccccaggaaaggccctggagtggcttgcactcatttattgggatgatgataagcggtacagaccatctctgaagagcaggctcaccatcaccaaggacaccgccaaaaaccaggtggtccttacaatgaccaacatggaccctgtggacacaggcacatattattgtgcacacagacgggctatagtggggcttgactactggggccagggaaccctggtcaccgtctcctca

SEQ ID NO: 7683 - DNA, 366 bp, Artificial Sequence
  Synthetic polynucleotide encoding artificial human antibody VH domain
gaagtgcagctggtgcagtctggagcagaggtgaaaaagcccggggagtctctgaggatctcctgtaagggttctggatacagctttaccagctactggatcagctgggtgcgccagatgcccgggaaaggcctggagtggatggggaggattgatcctagtgactcttataccaactacagcccgtccttccaaggccacgtcaccatctcagctgacaagtccatcagcactgcctacctgcagtggagcagcctgaaggcctcggacaccgccatgtattactgtgcgagacaatggttcggggcctactactactacggtatggacgtctggggccaagggaccacggtcaccgtctcctca

SEQ ID NO: 7684 - DNA, 381 bp, Artificial Sequence
  Synthetic polynucleotide encoding artificial human antibody VH domain
caggtccagctggtacagtctggggctgaggtgaagaagcctggggcctcagtgaaggtctcctgcaaggtttccggatacaccctcactgaattatccatgcactgggtgcgacaggctcctggaaaagggcttgagtggatgggaggttttgatcctgaagatggtgaaacaatctacgcacagaagttccagggcagagtcaccatgaccgaggacacatctacagacacagcctacatggagctgagcagcctgagatctgaggacacggccgtgtattactgtgcaacaggtccagcgacgtattactatggttcggggagtcccccggggtggttcgacccctggggccagggaaccctggtcaccgtctcctca

SEQ ID NO: 7685 - DNA, 369 bp, Artificial Sequence
  Synthetic polynucleotide encoding artificial human antibody VH domain
gaggtgcagctggtggagtctgggggaggcttggtacagcctggggggtccctgagactctcctgtgcagcctctggattcaccttcagtagctacgacatgcactgggtccgccaagctacaggaaaaggtctggaatgggtctcagctattggtactgctggtgacacatactatccaggctccgtgaagggccgattcaccatctccagagaaaatgccaagaactccttgtatcttcaaatggacagcctgagagccggggacacggctgtgtattactgtgcaagagccgactacggtggtaacttctactactactacggtatggacgtctggggccaagggaccacggtcaccgtctcctca

SEQ ID NO: 7686 - DNA, 366 bp, Artificial Sequence
  Synthetic polynucleotide encoding artificial human antibody VH domain
caggtgcagctggtggagtctgggggaggcgtggtccagcctgggaggtccctgatactctcctgtgcagtctctggattcaccttcaagaactatcctatgcactgggtccgccaggctccaggcaaggggctggagtgggtggcagttctatcatctggtggaagcaataaattctatgcagactccgtgaagggccgattctccatctccagagacaattccaagaacacgctgtatctgcaattgaacagcctaaaagctgacgacacggctgtgtattactgtgcgaggcataagggggatctactacggggtgggtatttcgacccctggggccagggaaccctggtcaccgtctcctca

SEQ ID NO: 7687 - DNA, 366 bp, Artificial Sequence
  Synthetic polynucleotide encoding artificial human antibody VH domain
gaggtgcagctggtggagtctgggggaggtgtggtacggcctggggggtccctgagactctcctgtgcagcctctggattcacctttgatgattatggcatgagctgggtccgccaagctccagggaaggggctggagtgggtctctggtattaattggaatggtggtagcacaggttatgcagactctgtgaagggccgattcaccatctccagagacaacgccaagaactccctgtatctgcaaatgaacagtctgagagccgaggacacggccttgtattactgtgcgagaggcgttatagcagtggctgccccatactactttgactactggggccagggaaccctggtcaccgtctcctca

SEQ ID NO: 7688 - DNA, 363 bp, Artificial Sequence
  Synthetic polynucleotide encoding artificial human antibody VH domain
gaggtgcagctggtggagtctgggggaagtgtggtacggcggggggggtccctgagactctcctgtgcagcctctggaatcacgtttgaggattatggcatgaactgggtccgccaagttccagggaaggggctggagtgggtctctggtattaattggaatggtgggagcacaggttatgcagactctgtgaagggccgattcaccatctccagagacaacgccaagaattccctgtatctggaaatgaacagtctcagcgccgaggacacggccttgtatttctgtgcgggcggggcagtggctgacaccctgggagcttttgctatctggggccaagggacaatggtcaccgtctcttca

SEQ ID NO: 7689 - DNA, 384 bp, Artificial Sequence
  Synthetic polynucleotide encoding artificial human antibody VH domain
gaggtgcagctggtgcagtctggagcagaggtgaaaaagcccggggagtctctgaagatttcctgtaagggttctggatacagctttcccacttactggatcgcctgggtgcgccagatgcccgggaaaggcctggagtggatggggatcatctatcctggtgactctgataccagatacagcccgtccttccaaggccaggtcaccatctcagccgacaagtccatcagcaccgcctacctgcagtggagtagcctgaaggcctcggacaccgccttgtattactgtgcgagataccctcaacctggggtgggagctagtgaaatctactactactatggtatggacgtctggggccaagggaccacggtcaccgtctcctca

SEQ ID NO: 7690 - DNA, 363 bp, Artificial Sequence
  Synthetic polynucleotide encoding artificial human antibody VH domain
caggtgcagctggtggagtctgggggaggcgtggtccagcctgggaggtccctgagactctcctgtgcagcctctggattcaccttcagtagctatggcatgcactgggtccgccaggctccaggcaaggggctggagtgggtggcagttatatcatatgatggaagtaataaatactatgcagactccgtgaagggccgattcaccatctccagagacaattccaagaacacgctgtatctgcaaatgaacagcctgagagctgaggacacggctgtgtattactgtgcgaaacctcatagtgggagctactatgatgcttttgatatctggggccaagggacaatggtcaccgtctcttca

SEQ ID NO: 7691 - DNA, 360 bp, Artificial Sequence
  Synthetic polynucleotide encoding artificial human antibody VH domain
caggtgcaactggtggagtctgggggaggcgtggtccagcctgggaagtccctgagactctcctgtgtagcctctggattcaccttcagacactatcctatgcactgggtccgccaggctccaggcaaggggctggagtgggtggcagtgatatcagatgatggaagcaataaatactacgcagactccgtgaagggccgattcaccatccccagagacaattccaagaatacgctctatctgcaaatgaacagcctgagagctgaggacacggctgtctattactgtgcgagagggggatgggagctactggaagcttttgatatctggggccaagggacaatggtcaccgtctcttca

SEQ ID NO: 7692 - DNA, 372 bp, Artificial Sequence
  Synthetic polynucleotide encoding artificial human antibody VH domain
gaggtgcagctggtgcagtctggagcagaggtgaaaaagcccggggagtctctgaagatctcctgtaagggttctggatacagctttaccagctactggatcggctgggtgcgccagatgcccgggaaaggcctggagtggatggggatcatctatcctggtgactctgataccagatacagcccgtccttccaaggccaggtcaccatctcagccgacaagtccatcagcaccgcctacctgcagtggagcagcctgaaggcctcggacaccgccatgtattactgtgcgagacagactccaactctatggttcggggagtccccatggttcgacccctggggccagggaaccctggtcaccgtctcctca

SEQ ID NO: 7693 - DNA, 381 bp, Artificial Sequence
  Synthetic polynucleotide encoding artificial human antibody VH domain
caggtgcagctgcaggagtcgggcccaggactggtgaagccttcacagaccctgtccctcacctgcactgtctctggtggctccatcagcagtggtgattactactggagctggatccgccagcacccagggaagggcctggagtggattgggtacatctattatagtgggaacacctactacaacccgtccctcaagagtcgagttaccatatcagtagacacgtctaagaaccagttctccctgaagctgacctctgtgactgccgcggacacggccgtgtattactgtgcgagagggactacggtgactaccctgacatgggactccacccccttttttgactactggggccagggaaccctggtcaccgtctcctca

SEQ ID NO: 7694 - DNA, 426 bp, Artificial Sequence
  Synthetic polynucleotide encoding artificial human antibody VH domain
caggtgcagctggtgcagtctggggctgaggtgaagaagcctggggcctcagtgaaggtttcctgcaaggcatctggatacaccttcaccagctactatatgcactgggtgcgacaggcccctggacaagggcttgagtggatgggaataatcaaccctagtggtggtagcacaagctacgcacagaagttccagggcagagtcaccatgaccagggacacgtccacgagcacagtctacatggagctgagcagcctgagatctgaggacacggccgtgtattactgtgcgagagaggggcggaccagccgaactcgagccgggtatagcagtggctggtacgttttaaccggggaggaccccgattactactactactacggtatggacgtctggggccaagggaccacggtcaccgtctcctca

SEQ ID NO: 7695 - DNA, 378 bp, Artificial Sequence
  Synthetic polynucleotide encoding artificial human antibody VH domain
gaggtgcagctgttggagtctgggggaggcttggtgcagcctggggggtccctgagactctcctgtgcagcctctggattcacctttaacagctatgccatgagctgggtccgccaggctccagggaaggggctggagtgggtctcaagtattactggtggtggtggtaccacatattacgcagactccgtgaagggccggctctccatctccagagacaattccaagagcacactgtatctgcaaatgagcagcctgagagccgaggacacggccgtatattactgtgggaaagtccgctatggtccggggacttataataacgaaggggcctactttgactactggggccagggagccctggtcaccgtctcctca

SEQ ID NO: 7696 - DNA, 360 bp, Artificial Sequence
  Synthetic polynucleotide encoding artificial human antibody VH domain
caggtgcagctacagcagtggggcgcaggactgttgaagccttcggagaccctgtccctcacctgcgctgtctatggtgggtccttcagtggttactactggagctggatccgccagcccccagggaaggggctggagtggattggggaaatcaatcatagtggaagcaccaactacaacccgtccctcaagagtcgagtcaccatatcagtagacacgtccaagaaccagttctccctgaaggtgagctctgtgaccgccgcggacacggctgtgtattactgtgcgagaggcgatggaagcacgattagctactactttgactactggggccagggaaccctggtcaccgtctcctca

SEQ ID NO: 7697 - DNA, 369 bp, Artificial Sequence
  Synthetic polynucleotide encoding artificial human antibody VH domain
caggtgcagctggtggagtctgggggaggcttggtcaagcctggcgggtccctgagactctcctgtgcagcctctggattcgtcttcagtgacagttacatggcctggatccgccaggctccagggaaggggctggagtgggtttcatacattggtagaggtggagatatcacaaacttcgcagactctgtgaggggccgattcatcatctccagagacaacgccaagaactcagtggtactgcagatgaatagcctgagagccgaggacacggccgtatattactgtgcgagtttcaggccaaatatgattcggggagttggcccgtttttctgctggggccagggaatcctggtcaccgtctcctca

SEQ ID NO: 7698 - DNA, 369 bp, Artificial Sequence
  Synthetic polynucleotide encoding artificial human antibody VH domain
gaagtgcagctggtgcagtctggagcagaggtgaaaaagcccggggagtctctgaggatctcctgtaagggttctggatacagctttaccagctactggatcagctgggtgcgccagatgcccgggaaaggcctggagtggatggggaggattgatcctagtgactcttataccaactacagcccgtccttccaaggccacgtcaccatctcagctgacaagtccatcagcactgcctacctgcagtggagcagcctgaaggcctcggacaccgccatgtattactgtgcgaggtggatacagctatcgcttttggattactacggtatggacgtctggggccaagggaccacggtcaccgtctcctca

SEQ ID NO: 7699 - DNA, 366 bp, Artificial Sequence
  Synthetic polynucleotide encoding artificial human antibody VH domain
gaggtgcagctgttggagtctgggggaggcttggtacagcctggggggtccctgagactctcctgtgtggcctctggattcacctttggcggccatgccatgacctgggtccgccagtctccagggaaagggctggagtgggtctcgactatcagtagtggcggtggcagtacatactacgcagacttcgtgaagggccggttccccatctccagagacaattccaagaatacgctgtatctgcaaatgaacggcctgagagccgaggacacggccgtatactactgtgcgaaattcaatggacccaactcctactactacggtttggacgtctggggccaggggaccacggtcaccgtctcctca

SEQ ID NO: 7700 - DNA, 366 bp, Artificial Sequence
  Synthetic polynucleotide encoding artificial human antibody VH domain
gaggtgcagctggtggagtccgggggaggcttagttcagcctggggggtccctgagactctcctgtgcagcctctggattcaccctcagcacttactggatgcactgggtccgccaaggtccagggaaggggctggtgtgggtctcacgtattaagagtgatgggagtagtgcaaactacgcggactctgtgaagggccgattcaccatttccagagacaacgccaagaatacgctgtatttgcaaatgaatagtctgagagtcgaggacacgggtgtctactactgtgtaagagatcagtggatcgagaagaagcgttacggtatggacgtctggggccaagggaccacggtcaccgtctcctca

SEQ ID NO: 7701 - DNA, 378 bp, Artificial Sequence
  Synthetic polynucleotide encoding artificial human antibody VH domain
gaggtgcagctggtggagtctgggggaggcttggtccagcctggggggtccctgagactctcctgtgcagcctctggattcacctttagtagctattggatgagctgggtccgccaggctccagggaaggggctggagtgggtggccaacataaagcaagatggaagtgagaaatactatgtggactctgtgaagggccgattcaccatctccagagacaacgccaagaactcactgtatctgcaaatgaacagcctgagagccgaggacacggctgtgtattactgtgcgagagattcagcagcagctggtacggtccactactactactacggtatggacgtctggggccaagggaccacggtcaccgtctcctca

SEQ ID NO: 7702 - DNA, 366 bp, Artificial Sequence
  Synthetic polynucleotide encoding artificial human antibody VH domain
caggtgcagctggtggagtctgggggaggcgtggtccagcctgggaggtccctgagattctcctgtgcagcctctggattcgccttcagtaattatgctatgcactgggtccgccaggctccaggcaaggggctggagtgggtggcacttatatcagatgacggaagcaacaaatactacgcagactccgtgaagggccgattcaccatctccagagacaattccaagaacacgctgtatctgcaaatgaacagcctgagagctgaggacacggctgtgtattactgtgcgagaggggggaacggaggggacctactacggtattttgactactggggtcagggaaccctggtcaccgtctcctca

SEQ ID NO: 7703 - DNA, 363 bp, Artificial Sequence
  Synthetic polynucleotide encoding artificial human antibody VH domain
gaggtgcagctggtggagtctgggggaggcctggtcaagcctggggggtccctgagactctcctgtgcagcctctggattcaccttcaatacctatagcatgagctgggtccgccaggctccagggaaggggctggagtgggtctcatccattgattttactagcacttacatatattacgcagactcactgaacggccgattcaccatctccagagacaacgccaagaattcactgtttctgcgaatgaacagcctgagagccgaggactcggctgtgtattactgtgcgagagttaggggtagtgggaccttctacgctatggacgtctggggccaagggaccacggtcaccgtctcctca

SEQ ID NO: 7704 - DNA, 387 bp, Artificial Sequence
  Synthetic polynucleotide encoding artificial human antibody VH domain
caggtgcacctacagcagtggggcgcaggactgttgaagcctctggagaccctgtccctcacctgcgctgtgtatggtgagtcctccagcgatcactactggagctggatccgccagcccccagggaaggggctggagtggattggggagatcagtcatggtggaagcaccaagtacaacccgtccctcaagagtcgagtcaccatctcaagagacacctccaagaatcagttctccctgaagctgaaatctgtgaccgccgcggacacggctgtatattattgtgcgagaggccttaagggacttaccatgatggtagtggtttttactggggcatatgatgcttttgatatctggggccaagggacaatggtcacggtctcttca

SEQ ID NO: 7705 - DNA, 360 bp, Artificial Sequence
  Synthetic polynucleotide encoding artificial human antibody VH domain
gaagtgcagctggtggagtctgggggaggcttggtacagcctggcaggtccctgagactctcctgtgcagcctctggattcacctttgatgattatgccatgcactgggtccggcaagctccagggaagggcctggagtgggtctcaggtattagttggaatagtggtagcataggctatgcggactctgtgaagggccgattcaccatctccagagacaacgccaagaactccctgtatctgcaaatgaacagtctgagagctgaggacacggccttgtattactgtgcatgcccgatcggtggctggtacgccaactttgactactggggccagggaaccctggtcaccgtctcctca

SEQ ID NO: 7706 - DNA, 348 bp, Artificial Sequence
  Synthetic polynucleotide encoding artificial human antibody VH domain
caggtgcagctggttgagtctgggggaggctgggtcaagcctggagggtccctgagactctcctgtacagcctctggattcaccttcagtgactactacatgacctggatccgccaggctccagggaagggactagagtgcctttcatacattagtggtagtagtggtgacagaaactacgcagactctgtgaagggccgattcaccatctccagagacaacgccaagaactcactgtatctgcaactgaacagcctgagagccgaggacacggccgtgtattactgtgcgcttaacgctaggatcccgggctactggggccagggaaccctggtcaccgtctcctca

SEQ ID NO: 7707 - DNA, 369 bp, Artificial Sequence
  Synthetic polynucleotide encoding artificial human antibody VH domain
caggtgcagctgcaggagtcgggcccaggactggtgaagccttcacagaccctgtccctcacctgcactgtctctggtggctccatcagcagtggtgattactactggagttggatccgccagcccccagggaagggcctggagtggattgggtacatctattacagtgggagcacctactacaacccgtccctcaagagtcgagttaccatatcagtagacacgtccaagaaccagttctccctgaagctgagctctgtgactgccgcagacacggccgtgtattactgtgccagagagacgggaagtatggttcaggggtactactttgactactggggccagggaaccctggtcaccgtctcctca

SEQ ID NO: 7708 - DNA, 351 bp, Artificial Sequence
  Synthetic polynucleotide encoding artificial human antibody VH domain
gaagtgcagctggtggagtctgggggaggcttgatacagcctggcaggtccctgagactctcctgtgcagcctctgggttcacctttgacgatcatgccatgcactgggtccggcaaactccagggaagggcctggagtgggtctcaggtattacttggaatggtaattacatagcctatgcggactctgtgaggggccgattcaccatctccagagacaacgccaagaacttcctatatctgcaaatgaacagtctgagaggtgaggacacggccttctattactgtgcaaaagatttcgaacttgacggcggaaactggggccagggaaccctggtcaccgtctcctca

SEQ ID NO: 7709 - DNA, 384 bp, Artificial Sequence
  Synthetic polynucleotide encoding artificial human antibody VH domain
caggtgcagctggtgcaatctgggtctgagttgaagaagcctggggcctcagtgaaggtttcctgcaaggcttctggatacaccttcactagctatgctatgaattgggtgcgacaggcccctggacaagggcttgagtggatgggatggatcaacaccaacactgggaacccaacgtatgcccagggcttcacaggacggtttgtcttctccttggacacctctgtcagcacggcatatctgcagatcagcagcctaaaggctgaggacactgccgtgtattactgtgcgagagatcttttacgatattttgactggtcgatcttctactactactacggtatggacgtctggggccaagggaccacggtcaccgtctcctca

SEQ ID NO: 7710 - DNA, 396 bp, Artificial Sequence
  Synthetic polynucleotide encoding artificial human antibody VH domain
caggtgcagctggtgcagtctggggctgaggtgaagaagcctgggtcctcggtgaaggtctcctgcaaggcttctggaggcaccttcagcagctatgctatcagctgggtgcgacaggcccctggacaagggcttgagtggatgggagggatcatccctatctttggtacagcaaactacgcacagaagttccagggcagagtcacgattaccgcggacgaatccacgagcacagcctacatggagctgagcagcctgagatctgaggacacggccgtgtattactgtgcgagaatggggtggaaaaaggggggtatagcagcagctgattggggggactactactactacggtatggacgtctggggccaagggaccacggtcaccgtctcctca

SEQ ID NO: 7711 - DNA, 363 bp, Artificial Sequence
  Synthetic polynucleotide encoding artificial human antibody VH domain
gaggtgcagctgttggagtctgggggaggcttggtacagcctggggggtccctgagactctcctgtgcagcctctggattcacctttagcacctataccatgagctgggtccgccaggctccagggaaggggctggagtgggtctcaagtattattggtagtgatggtagcacacactacgcagactccgtgaagggccggttcaccatctccagagacaattccaagaacaccctgtatgtgcaaatgaacagtctgagagccgaggacacggccgtatattactgtgcgaaagatttccggccggatggtcgctggacgattgactactggggccagggaaccctgggcaccgtctcctca

SEQ ID NO: 7712 - DNA, 354 bp, Artificial Sequence
  Synthetic polynucleotide encoding artificial human antibody VH domain
caggtccacctggtacagtctgtggctgaggtgaagaagcctggcgcctcagtgagggtctcctgcaaaatttccggatacaggctcactgaggtagccctgcactgggtgcgacaggctcctggacaagggcttgagtggatggggagttttgatcctcaagatgcagagccaatctacgcgcagaagttgcagggcagagtcaccatgaccgaggacacatcctcagacacagcctacatggaactgaggcgcctgagttctgacgacacggccgtctattactgtgcaacaagtccgtgggacgtgaccttagagtattggggccaggggtccctggtcacggtctcctca

SEQ ID NO: 7713 - DNA, 372 bp, Artificial Sequence
  Synthetic polynucleotide encoding artificial human antibody VH domain
caggtgcagctgcaggagtcgggcccaggactggtgaagccctcgcagaccctgtccctcacctgcactgtctctggtggctccatcactggttattactggagctggattcggcagcccccagggaagggactggagtgggttggacatgtacatgacagtgggagcaccaactacaacccctccctcaagagtcgagtcaccatctcagtcgacacgtccgagaaccagttctccctgaagctgagcgctgtgaccgctgcggacacggccatatattattgtgcgagagagatgccccggatacaactatggttgcggggagggtactttgactactggggccagggaaccctggccaccgtctcctca

SEQ ID NO: 7714 - DNA, 360 bp, Artificial Sequence
  Synthetic polynucleotide encoding artificial human antibody VH domain
caggtgcacctgcaggagtcgggcccaggactggtgaagccttcggagaccctgtccctcacctgcattgtctctggtggctccctcagtccttactactggagctgggtccggcagcccccagggaagggactggagtgggttgggtatatccattacaatgcgaacaccaattataacccttccctcatgagtcgagtcaccatgtcagtagacacgtccaagagccagttctccctgaagctgaactctgtgaccgctgcggacacggccgtgtatttctgtgcgagaagcggcggcggatggctccaattttactttgactactggggccaaggaaccctggtcaccgtctcctca

SEQ ID NO: 7715 - DNA, 372 bp, Artificial Sequence
  Synthetic polynucleotide encoding artificial human antibody VH domain
caggtgcagctgcaggagtcgggcccaggactggtgaagccttcggagaccctgtccctcacttgcactgtctcgggtggctccgtcagcagtggtagttactactggagctggatccggcagcccccagggaagggactggagtggattgggtatatctattacagtgggagcaccaactacaacccctccctcaagagtcgagtcaccatgtcagtagacacgtccaagaaccagttctccctgaagctgacctctgtgaccgctgcggacgcggccgtgtattactgtgcgagagtagagatggctacaattcccaaccgatactactttgactactggggccagggaaccctggtcaccgtctcctca

SEQ ID NO: 7716 - DNA, 381 bp, Artificial Sequence
  Synthetic polynucleotide encoding artificial human antibody VH domain
caggtgcagctgcaggagtcgggcccaggactggtgaagccttcacagaccctgtccctcacctgcactgtctctgatggcttcatcagcaatgatgattactcctggacttggatccgccagcccccggggaagggcctggagtggattgggcacatctattacagtgggagcgcctactacaacccgtccctcaagagtcgatataccatatcaatagacacgtccaggaaccagttctccctgaagctgacctctgtgactgacgcagacacggccgtcttttactgtgccagaggggttttttgcagtggtaatagctgctactcgagcccctggttcgacccctggggccagggaaccctggtcaccgcctcctca

SEQ ID NO: 7717 - DNA, 390 bp, Artificial Sequence
  Synthetic polynucleotide encoding artificial human antibody VH domain
caggtccaacttgtacagtctggggctgaggtggagaagcctggggcctctgtgaaagtttcctgccaggcctctggatacatcttcactgattttgctcttaattgggtacgccaggcccccgggcaagggcttgagtggatgggatggatcaacgctgccagcggtcacacagaatattcacggaagttccagggcagagttaccatcagtagggacacatccgcgaagacaacctatatggaactgagcggcctgacatctgaagacacggctgtttatttctgtgcgagagattcaggggtcagaccgagtggctatggcgtcccaaatgactactatttcggcatggacgtctggggccaagggaccacggtcaccgtctcctca

SEQ ID NO: 7718 - DNA, 360 bp, Artificial Sequence
  Synthetic polynucleotide encoding artificial human antibody VH domain
gaggtgcagctggtggagtctgggggaggtgtggtccggcctggggggtccctgagactctcctgtgtagcctctggattcatctttggtgattttgacatgagctgggtccgccaagctccagggaaggggctggagtgggtctccggtattaatttgaatggtggtagcacaggttatgcagactctgtgaagggccgattcaccatctccagagacaacgccaagaactccctgtatcttcaaatgaccagtctgagagccgaggacacggccttgtattattgtgcgagagatttctttcacggtgacccggtgcttgactactggggccagggaaccctggtcaccgtctcctca

SEQ ID NO: 7719 - DNA, 378 bp, Artificial Sequence
  Synthetic polynucleotide encoding artificial human antibody VH domain
caggtgcagctggtgcagtctggggctgaggtgaagaagcctggggcctcagtgaaggtctcctgcaaggcttctggatacaccttcaccggctactatatgcactgggtgcgacaggcccctggacaagggcttgagtggatgggatggatcaaccctaacagtggtggcacaaactatgcacagaagtttcagggcagggtcaccatgaccagggacacgtccatcagcacagcctacatggagctgagcaggctgagatctgacgacacggccgtgtattactgtgcgagagtagtatggtattgtagtagtaccagctgcttccatgatgcttttgatatctggggccaagggacaatggtcaccgtctcttca

SEQ ID NO: 7720 - DNA, 366 bp, Artificial Sequence
  Synthetic polynucleotide encoding artificial human antibody VH domain
gaggtgcaactggtggagtctgggggaggcttggtaaagccgggggggtccctgagactctcctgtgcagcctctggatccactctcagcaacgcctggatgagctgggtccgccaggctccagggaagggtctggaatgggttgcccgtattaaaagcaactatgatggtggggcaacggactacgctgcagccctgaaaggcagattcaccatctcaagagatgaatcaaagaacacactgtttcttcaaatgaacagcctgaaaatcgaggacacagccgtgtactactgtactaccgatccccccattcggcggtacgccatggacgtctggggccaagggaccacggtcaccgtctcctca

SEQ ID NO: 7721 - DNA, 396 bp, Artificial Sequence
  Synthetic polynucleotide encoding artificial human antibody VH domain
caggtacagctgcagcagtcaggtccaggactggtgaagccctcgcagaccctctcactcacctgtgccatctccggggacagtgtctctagcaacagtgctgcttggaactggatcaggcagtccccatcgagaggccttgagtggctgggaaggacatactacaggtccaagtggtataatgattatgcagtatctgtgaaaagtcgaataaccatcaacccagacacatccaagaaccagttctccctgcagctgaactctgtgacccccgaggacacggctgtgtattactgtgcgagaggcgtcagcgattttactatgatagtagtggttattactggcttctcctactttgactactggggccaaggaaccctggtcaccgtctcctca

SEQ ID NO: 7722 - DNA, 360 bp, Artificial Sequence
  Synthetic polynucleotide encoding artificial human antibody VH domain
gaggtgcaactggtggagtctgggggaactatgctacggccgggggagtccctgagactttcctgtgcagcctctggattcatctttggtgattatgacatggcctgggtccgccaagctccagggaaggggctggagtgggtctgtggtattaattacagtggtggtagttcaacttatgcagactctgtgaagggccgattcaccatctccagagacaacgtcaagaactccctgtacctgcaattgagcggtctgagagccgaggacacggccttatatttttgtgcgagagatttcttccacggtgacccggtgtttgacttctggggccagggaaccctggtcaccgtctcctca

SEQ ID NO: 7723 - DNA, 360 bp, Artificial Sequence
  Synthetic polynucleotide encoding artificial human antibody VH domain
caggtgcagcggctgcagtctgggactggggtgaagaggcctgggtcctcggtgaggttctcatgtcaggtgactggaggcaccctcagtaattcaggcatcaattgggtgcggcaggcccctggacaaggacttgagtggatgggaaagatcgttcctctcgttggaagaacatactacgcccagcagttccagggcagagtcacgatgaccgcggacgactcctcagagactatcgtctacatggaactgacgaggctatcatctgaggacacggccctctatttctgtgcgaaatccccgtcagtgaattatgtctttgaaatctggacgcaggggacaatgctcaccgtcacttca

SEQ ID NO: 7724 - DNA, 390 bp, Artificial Sequence
  Synthetic polynucleotide encoding artificial human antibody VH domain
caggttcagctggtgcagtctggagctgaggtgaagaagcctggggcctcagtgaaggtctcctgcaaggcttctggttacacctttaccagctatggtatcagctgggtgcgacaggcccctggacaagggcttgagtggatgggatggatcagcgcttacaatggtaacacaaactatgcacagaagctccagggcagagtcaccatgaccacagacacatccacgagcacagcctacatggagctgaggagcctgagatctgacgacacggccgtgtattactgtgcgagagtaggacgcctaggacccctttatagcagcagctggtatggagacgggaactggttcgacccctggggccagggaaccctggtcaccgtctcctca

SEQ ID NO: 7725 - DNA, 387 bp, Artificial Sequence
  Synthetic polynucleotide encoding artificial human antibody VH domain
caggtgcagctgcagcagtggggcgcaggactgttgaagccttcggagaccctgtccctcacttgcgctgtctatggtgcgtccctcagtggtaacgactggagctgggtccgccagtccccagggagggggctggagtggattggtgaaatcaatcaaagtggaaacaccaactacaacccgtccctcaagagtcgagtctccatatcgtcagacacgtccaagaaccaattctccctgaggttgaactctgtgaccgccgcggacacggctgtgtatttttgtgcgagaggccggggcgacataactatgttccttgttgctattactagtgcaacatactactttgactactggggccggggaaccctggccaccgtctcctca

SEQ ID NO: 7726 - DNA, 378 bp, Artificial Sequence
  Synthetic polynucleotide encoding artificial human antibody VH domain
caggtgcttctggtgcagtctggggctgaggtgaggaagcctggggcctcagtgagggtctcctgcaaggcctctggatacaccttcaccggctactatatacactggctgcgacaggcccctggtcaagggcctcaatggatgggctggatgaaccctagaagcggtggcacacactatggacagaagtttcggggcaggatcaccctgaccagggacacgtccatcggcacagcctacatggaactgaccagactgacgtctgacgacacggccatatattactgtgcgagggtcccaatagccggcaccacctggtctgttagaggatctcaatttgacttctggggccagggaaccctggtcaccgtctcctca

SEQ ID NO: 7727 - DNA, 366 bp, Artificial Sequence
  Synthetic polynucleotide encoding artificial human antibody VH domain
caggtgcagctggtggagtctgggggaggcgtggtccagcctgggaggtccctgagactctcctgtgcagcgtctggattcaccttcagtagctatggcatgcactgggtccgccaggctccaggcaaggggctggagtgggtggcagttatatggtatgatggaagtaataaatactatgcagactccgtgaagggccgattcaccatctccagagacaattccaagaacacgctgtatctgcaaatgaacagcctgagagccgaggacacggctgtgtattactgtgcgagcgcccgtaattactatgatagtagtggtgtttttgactactggggccagggaaccctggtcaccgtctcctca

SEQ ID NO: 7728 - DNA, 348 bp, Artificial Sequence
  Synthetic polynucleotide encoding artificial human antibody VH domain
gaggtgcagctggtggagtctgggggaggcttggtccagcctggggggtccctgagactctcctgtgcagcctctggattcacctttagtgactattggatgagctgggtccgccaggctccagggagggggctgcagtgggtggccaacataaaggaagatggaagtgagaaatactatgtggactctgtgaagggccgattcaccatctccagagacaacgccaagaactcactgtatctgcaaatgaacagcctgagagccgaggacacggctgtgtattactgtgcgaccgccaccctatacctccagcactggggccagggcaccctggtcaccgtctcctca

SEQ ID NO: 7729 - DNA, 363 bp, Artificial Sequence
  Synthetic polynucleotide encoding artificial human antibody VH domain
caggtgcacctgcaggagtcgggcccaggactggtgaagccttcggagaccctgtcgctcacctgcactgtctctggtggctccatcagtggtcactactggagctggatacggaaacccgccgggaagggactggagtggattgggcgtatgtatatcagtggcagttccaaccacaatccctccctcatgagtcgagtcaccatgtcaggagacacgtccaaaaatgagttctttctgaagctgaggtctgtgaccgccgcggacacggccatatattactgtgcgagggggtccgatatagaatatagcagtgccttgtacgcctactggggccagggaaccctggtcactgtctcctca

SEQ ID NO: 7730 - DNA, 339 bp, Artificial Sequence
  Synthetic polynucleotide encoding artificial human antibody VH domain
caggtccaacttgtgcagtctggggctgaggtgaagaagcctggggcctcagtgagggtttcctgcaggacttctggatacgtcttcactaactatgctatgcattgggtgcgccaggcccccggacagaggcttgagtggatgggctggattaaccctaacaatggtaacacaaaatattcacagaacttccagggcagagtcaccattgccagggacacatccgcgaacacagcctatatggacctgatcgacctgagacctgaagacacggctatatattactgtgcgaggaatcacgactactggggccagggaaccctggtcaccgtctcctca

SEQ ID NO: 7731 - DNA, 372 bp, Artificial Sequence
  Synthetic polynucleotide encoding artificial human antibody VH domain
caggtccagctggtgcagtctggggctgaggtgaagaagcctgggtcctcggtgaaggtctcctgcaaggcttctggaggcaccttcagcagctatgctatcagctgggtgcgccaggcccctggacaagggcttgagtggatgggaaggatcatccctatccttggtatagcaaactacgcacagaagttccagggcagagtcacgattaccgcggacaaatccacgagcacagcctacatggagctgagcagcctgagatctgaggacacggccgtgtattactgtgcggccactacattgagtgatagtagtggttattccctaccctgtgactactggggccagggaaccctggtcaccgtctcctca

SEQ ID NO: 7732 - DNA, 396 bp, Artificial Sequence
  Synthetic polynucleotide encoding artificial human antibody VH domain
caggtgcagctacagcagtggggcgcaggactgttgaagccttcggagaccctgtccctcacctgcgctgtctatggtgggtccttcactgattattactggagctggatccgccagcccccagggaaggggctggagtggattggagaaatcaatcatagcggaaacaccgacttcaacccgtccctcaagactcgagtcaccatatcagtagacacgtccaagaaccagttctccctgaaactgacctctgtgaccgccgcggacacggctgtctattactgtgcgagagtcagggctgtagtagtaccagctcctgtgttagggctaggtccatactactactcctactacatggacgtctggggcaaagggaccacggtcaccgtctcctca

SEQ ID NO: 7733 - DNA, 336 bp, Artificial Sequence
  Synthetic polynucleotide encoding artificial human antibody VH domain
caggtgcaactggtggagtctgggggaggcgtggtccagcctgggaggtccctgagactctcctgtgcagcctctggattcaccttcaatgtctatggcatccactgggtccgccaggctccaggcaaggggctggagtgggtggcacttatatcaggtgatggatataatcaattctatgcagactccgttaagggccgattcaccgtctccagagacaattccaggaacacggtgtatctgcaagtgagcagcctgagagctgaggacacggctatgtattattgtactcgacttgactactggggccagggcaccctggtcaccgtctcctca

SEQ ID NO: 7734 - DNA, 387 bp, Artificial Sequence
  Synthetic polynucleotide encoding artificial human antibody VH domain
gaggtgcagctgatggagtctgggggaggcttagtacagccgggggggtccctgagactctcctgtgcggcctctggattcaccttcagcggctatgtcatgggctgggtccgccaggctccagggaaggggctggagtggctctcctctattagcgcaagtggtaccagcacattctacgcagactctgtgaaggggcgggtcaccatctccagagacaactccaggaacattctgtatctggaaatggacagcctgcgacccgaggacacggccatgtattactgtgtgaatcccccctgggccgactatgactacatcttccggactgatctgtacaccggtttccagcactggggccagggcaccctggtcaccgtctcctca

SEQ ID NO: 7735 - DNA, 342 bp, Artificial Sequence
  Synthetic polynucleotide encoding artificial human antibody VH domain
gaggtgcagctgttggagtctgggggaaccttggtacggcctggggggtccctgagactctcctgtgcagcctctggattcacctttagcaactttgccatgagctgggtccgccaggctcccggggaggggctgaaatgggtctcaactgttagcgggagtggtgggagcacatactacgcagactccgtgaagggccggttcaccatctccagagacaattccaagaacaccttgtatctgcaaatgaacagcctgagagccgaggacacggccgtatatttctgtgcgaaaagggataccaccggttggggccagggaaccctggtcaccgtctcctca

SEQ ID NO: 7736 - DNA, 366 bp, Artificial Sequence
  Synthetic polynucleotide encoding artificial human antibody VH domain
gaggtgcaactggtggagtctgggggaggcttggtccagccgggggggtccctgagactctcctgtgcagtctccggattcacctttaataattattggatgagttgggtccgccaggctccagggaaggggctggagtgggtggccaacataaagcgagatggaggtgagaaaaactatgtggactctgtgaagggccgattcaccatctccagagacaacgccaagaacttagtctttctgcaaattaacagcctgagaaccgaggacacgggtgtctactactgtgcgagagaagggattatagcggaagctggtttctattttgactcctggggccagggaaccctggtcaccgtctcctca

SEQ ID NO: 7737 - DNA, 360 bp, Artificial Sequence
  Synthetic polynucleotide encoding artificial human antibody VH domain
caggtgcagctgcaggagtcgggcccaggactgttgaagccttcggagaccctgtccctcacctgcactgtctctggtggctccatcagtagttcctactggaactggatccggcagcccgccgggaagggactggagtggattgggcgtatctacaccagtgggaccaccaactacaacccctccctcaagaatcgagtcaccatgtcagtagacacgtccaagaaccagttctccctgaggctgacctctgtgacggccgcggacacggccgtgtattactgtgcgagagatttggggtgggagcaagccaactggttcgacccctggggccagggaaccctggtcaccgtctcctca

SEQ ID NO: 7738 - DNA, 360 bp, Artificial Sequence
  Synthetic polynucleotide encoding artificial human antibody VH domain
gaggtgcagctggtggagtctgggggaggcttggtccagcctggggggtccctgagactctcctgtgcagcctctggattcacctttagtacttattggatgagctgggtccgccaggctccagagaaggggctggagtgggtggccaacataaagtacgatggaagtgagaaatactatgtggactctgtgaagggccgattcaccatctccagagacaacgccaagaactcactgtatctgcaaatgaacagcctgagagtcgaggacacggctgtatattactgtgcgaaaggcgaccggggagatggtggctacgattcccgctggggccagggaaccctggtcaccgtctcctca

SEQ ID NO: 7739 - DNA, 372 bp, Artificial Sequence
  Synthetic polynucleotide encoding artificial human antibody VH domain
gaggtgcacctggtggaatctgggggaggcttggtacagccaggagggtccctgagagtctcctgtgcagcctctggattcaccttcagcaattatgaaatgaactgggtccgccaggctccagggaaggggctggagtgggttgcatacattgatcgcagtggtccgagcatcttctacgcagactctgttaagggccgattcaccgtctccagagacaacgccaacaatttactgtatctacatatgaacagcctgagagccgaggacacggctatttatcactgtacgagagaaaatcgtgaccctccgggatctggtccctactactttgactactggagccaaggagccctggtcgccgtctcgtca

SEQ ID NO: 7740 - DNA, 375 bp, Artificial Sequence
  Synthetic polynucleotide encoding artificial human antibody VH domain
caggtgcaggtgcaggagtcgggcccaggactggtgaagccctcacagaccctgtccctcacctgcactgtctctggtggctccatcagtagtggtggttattactggagctggatccgccagcacccaggtaagggcctggagtggattgggtacatctattacagtgggagcacctactacaacccgtccctcaagagtcgagttatcatatcagtagacacgtctaagaaccagttctccctgaagctgagctctgtgactgccgcggacacggccgtgtattactgtgcgagactggattactatgatagtagtgggcattgctactactttgactactggggccagggaaccctggtcaccgtctcctca

SEQ ID NO: 7741 - DNA, 360 bp, Artificial Sequence
  Synthetic polynucleotide encoding artificial human antibody VH domain
caggtgcagctggtggagtctgggggaggcttggtcaagcctggagggtccctgagactctcatgtgcagcctctggattcaccttcagtgactactacatgacctggatccgccaggctccagggaagggactggagtgggtttcatacattagtggtagtggtggtaccatatactactcagagtctgtgaagggccgactcaccatctccagggacaacgccaagaattcactgtatctgcaaatgaacagcctgagagccgaggacacggccgtgtattactgtgcgaggggaaataatggctacaattatcgttttgatatctggggccaagggacaatggtcaccgtctcttca

SEQ ID NO: 7742 - DNA, 378 bp, Artificial Sequence
  Synthetic polynucleotide encoding artificial human antibody VH domain
cagctgcagctgcaggagtcgggcccaggactggtgaagccttcggagaccctgtccctcacctgcactgtctctggtggctccatcagcagtagtagttactactggggctggatccgccagcccccagggaaggggctggagtggattgggagtatctattatagtgggagcacctactacaacccgtccctcaagagtcgagtcaccatatccgtagacacgtccaagaaccagttctccctgaagctgagctctgtgaccgccgcagacacggctgtgtattactgtgcgagaagtaggaaggattacgtttgggggagttatcgttatctcttcgacccctggggccagggaaccctggtcaccgtctcctca

SEQ ID NO: 7743 - DNA, 387 bp, Artificial Sequence
  Synthetic polynucleotide encoding artificial human antibody VH domain
gaggtgcagctgttggaatctgggggaggcttggttcagcctggggggtccctgagactctcctgtgaagcctctggattcacatttagcagctatgccatgagctgggtccgccaggctccagggaaggggttggagtggatcgcagttatcggtgggagtggttccgccacactctacgcagactccgtgaagggccggttcaccatctccagagacaaaaccaagcaaatgctctacctgcaaatggacagcctgagagccgaggacacggccgtatattactgtgcgaaagatggggaccctgattacgtttgggggaagtatcgttatcaaacatactattttgactactggggccaggggaccctggtcaccgtctcctca

SEQ ID NO: 7744 - DNA, 360 bp, Artificial Sequence
  Synthetic polynucleotide encoding artificial human antibody VH domain
gaggtgcagctgatggagtctgggggaggcttggtccagcctggggggtccctgagactctcctgtgcaggctctgggttcacctttaacatccatgccatgacttgggtccgtcaggctccggggaagggcctggagtgggtctcaactattagtgggactgggagtgtcacaaaatacgcagactccgtgaagggccggttcaccatctccagagacaattccaagaacaccctctatttgcaaatgaacagcctgcgagccgacgacacggccgtctattactgtgcgacctccgtcctcggtgactattcccgctttgactactggggccagggaacccggctcaccgtctcctca

SEQ ID NO: 7745 - DNA, 351 bp, Artificial Sequence
  Synthetic polynucleotide encoding artificial human antibody VH domain
gaggtgcagctggtggagtctgggggaggcttggtccagcctggggggtccctgagactctcctgtgcagcctctggattcacctttagtagctattggatgacctgggtccgccagtctccagggaaggggctggagtgggtggccaacataaagcaggatggaagtgcgaaacactatgtggactctgtgaagggccgattcaccatctccagagacaacgccaagaactcactgtatctgcaaatggacagcctgagagccgaggacacggctgtctactactgtgcgacatcatacggggactacgatgactactggggccagggaaccctggtcaccgtctcctca

SEQ ID NO: 7746 - DNA, 387 bp, Artificial Sequence
  Synthetic polynucleotide encoding artificial human antibody VH domain
caggtgcagctggtgcagtctggggctgaggtgaagaagcctggggcctcagtgaaggtttcctgcaaggcatctggatacaccttcaccagctactatatgcactgggtgcgacaggcccctggacaagggcttgagtggatgggaataatcaaccctagtggtggtagcacaagctacgcacagaagttccagggcagagtcaccatgaccagggacacgtccacgagcacagtctacatggagctgagcagcctgagatctgaggacacggccgtgtattactgtgcgagagatttcaattggttcggggagttacataccacttactactactactactacatggacgtctggggcaaagggaccacggtcaccgtctcctca

SEQ ID NO: 7747 - DNA, 372 bp, Artificial Sequence
  Synthetic polynucleotide encoding artificial human antibody VH domain
caggtgcagctggtggagtctgggggaggcttggtcaagcctggacggtccctgagactcttctgtgcagcctctggattcaccgtcagtgactactatatgagttggatccgccaggctccagggaaggggctggaatgggtttcatacatgagtagtactggtagtcccatatactacgcagactctgtgaagggccgattcaccgtctccagggacaacgccaagaacactctctatctacaaatgaacagcctgagagccgaggacacggccgtctattattgtgcgagagatctatattactatggttcggggagttactgtgcttttgatctctggggccaagggacaatggtcaccgtctcttca

SEQ ID NO: 7748 - DNA, 375 bp, Artificial Sequence
  Synthetic polynucleotide encoding artificial human antibody VH domain
caggtgcacctggcggagtctgggggaaccgtggtccagcctgggaggtccctgagactctcctgtgtagcctctggattcaacttcaataactatggcatgaactgggtccgccaggctccaggcaaggggctggaatgggtggcagttatctcatatgaaggaagtattaaatactatgcagactccctgaggggccgcttcaccatctccagagacagttccaagaacactctatatctgcaaatgaacagcctgatacctgaagacacggccgtgtattactgtgcgagacggagggagttactatggctcggggagccccactgcggcatggacgtctggggccaagggaccacggtcaccgtctcctca

SEQ ID NO: 7749 - DNA, 375 bp, Artificial Sequence
  Synthetic polynucleotide encoding artificial human antibody VH domain
caggtgcagctggtggagtctgggggaggcgtggtccagcctgggaggtccctgagactctcctgtgcagcgtctggattcaccttcagtaattatggctttcactgggtccgccaggctccaggcaaggggctggagtgggtggctcttatttggtttgatggaagtaatagatactatgcagactccgtgaagggccgattcaccatctccagagacaattccgagaacacgctgtttctgcaaatgaacagcctgagagccgaggacacggctgtttattactgtgcgcgagataagaaaccgtatttcgatattttgactggttcttattttgactcctggggccagggaaccctggtcaccgtctcctca

SEQ ID NO: 7750 - DNA, 387 bp, Artificial Sequence
  Synthetic polynucleotide encoding artificial human antibody VH domain
caggtgcagctacggcagtggggcgcaggactgttgaagcctccggagaccctgtccctcacgtgcgctgtgtatggtgggtccctcagtggttacttctggacctggatccgtcagcccccggggaaggggctggagtggattggggaaatcaatcatgttggaagtaccagttacaacccgtccctcaagagtcgagtcattatatcaatagacacgtccaaaaaccagttctccctgaagatgaggtctgtgaccgccgctgacacggctgtgtatttttgtgcccgtgaggacacgatgcttcggagaattgggtggttcgcaagtgaaaagataaaccgattcgacccctggggccagggaaccctggtcaccgtctcctca

SEQ ID NO: 7751 - DNA, 351 bp, Artificial Sequence
  Synthetic polynucleotide encoding artificial human antibody VH domain
caggtgcagctggtggagtctgggggaggcgtggtccagcctgggaggtccctgagactctcctgtgcagcctctggattcaccttcagtagttatggcatgcactgggtccgccaggctccaggcaaggggctggagtgggtggcacttatatcatatgatggaagcaataaatattacgcagactccgtgaagggccgattcaccatctccagagacaattccaagaacacggtgtatctgcaaatgaacagcctgagagctgaggacacggctgtctattactgtgcgagatttagtgggagggcttttgatatctggggccaagggacaatggtcaccgtctcttca

SEQ ID NO: 7752 - DNA, 378 bp, Artificial Sequence
  Synthetic polynucleotide encoding artificial human antibody VH domain
caggtccagcttgtgcagtctggggctgaggtgaagaagcctggggcctcagtgaaggtttcctgcaaggcttctggatacaccttcactagctatgctatgcattgggtgcgccaggcccccggacaaaggcttgagtggatgggatggatcaacgctggcaatggtaacacaaaatattcacagaagttccagggcagagtcaccattaccagggacacatccgcgagcacagcctacatggagctgagcagcctgagatctgaagacacggctgtgtattactgtgcgagaggcggaagttcagggttatattgtagtggtggtagctgctactttgactactggggccagggaaccctggtcaccgtctcctca

SEQ ID NO: 7753 - DNA, 360 bp, Artificial Sequence
  Synthetic polynucleotide encoding artificial human antibody VH domain
gaggtgcagctggtggagtctgggggaggcttggtccagcctggggggtccctgagactctcctgtgcagcctctggattcacctttactacttattttatgagctgggtccgccaggctccagggaaggggctggagtgggtggccaacataaagcatgatggaagtgagacatactatgtggactctgtcaagggccgattcaccgtctccagagacaacgccaagaactcactgtatctgcaaatgaacagcctgagagccgaggacacggctgtatattactgtgcgaaagatggtggggtgggaggtcatcccctggactcctggggccagggaaccctggtcaccgtctcctca

SEQ ID NO: 7754 - DNA, 357 bp, Artificial Sequence
  Synthetic polynucleotide encoding artificial human antibody VH domain
gaagtgcagctggtggagtctgggggaggcttggtacagcccggcacgtccctgagactctcctgtgcagtctctggattcgcctttgacaattatgccatgcactgggtccggcaagctccagggaagggccctgagtgggtctcaggcattacgtgggatagcggtgtcttagactatgcggactctgtgaagggccgattcaccatctccagagataacgccaagaactccctgtatctgcaaatggacagcctgcgagttgaggacacggccttttattactgtgcaaaagagggctacaggttgggttacctcgtctactggggcctgggaaccctggtcaccgtctcctca

SEQ ID NO: 7755 - DNA, 363 bp, Artificial Sequence
  Synthetic polynucleotide encoding artificial human antibody VH domain
caggtgcacctggtggagtctgggggaggcgtggtccagcctgggacgtccctgagactctcctgtccagcgtctggattctttttcagtgactatggcatgcactgggtccgccaggctccaggcaagggtctggagtgggtggcaggtatatcttacgatggaagcgataaggactatatagactccgtgaagggccggttttccatcgccagagacaattccaagagcactgtatatctgcagatgaacagcctgagaggtgaggacacggctgtctattattgtgcgaaatccacgaatctttataggagtggaggctttgactactggggccagggaaccctggtcaccgtctcctca

SEQ ID NO: 7756 - DNA, 363 bp, Artificial Sequence
  Synthetic polynucleotide encoding artificial human antibody VH domain
caggtgcagctggtggagtctgggggaggcttggtcaagcctggagggtccctgagactctcctgtgcagcctctggattcaccttcagtgactactacatgagctggatccgccaggctccagggaaggggctggagtgggtttcatacattagtagtagtggtagtaccatatactacgcagactctgtgaagggccgattcaccatctccagggacaacgccaagaactcactgtatctgcaaatgaacagcctgagagccgaggacacggccgtgtattactgtgcgagagatcgaggatggctacaaccctggtacttcgatctctggggccgtggcaccctggtcactgtctcctca

SEQ ID NO: 7757 - DNA, 351 bp, Artificial Sequence
  Synthetic polynucleotide encoding artificial human antibody VH domain
caggtgcacctgcaggagtcgggcccaggactggtgaaaccttcggagaccctgtccctcacctgcactgtctctggtggctccatcagtagttacttctggagctggatccggcagcccccagggaagggactggagtggattggctacatctatcacagtgggactaccgagtacaacccctccctcaagagtcgagtcaccattacagtcgacacgtccaagaaccaattctccgtgaggctcaactctgtgaccgccgcagacacggccatgtattactgtgcgagtggcatgatctctgatgcttttgatgtttggggccaagggacaatggtcaccgtctcttca

SEQ ID NO: 7758 - DNA, 366 bp, Artificial Sequence
  Synthetic polynucleotide encoding artificial human antibody VH domain
caggtgcagctggtggagtctgggggaggcgtggtccagcctgggaggtccctgagagtctcctgtgcagcctctggattcaccttcagtagttatgctatgcagtgggtccgccaggctccaggcaaggggctggagtgggtgacttttatatcatatgatggaagcaataaatattacgcagactccgtgaagggccgattcaccatctccagagacaattccaagaacacgctgtatctgcaaatgaacagcctgagacctgaggacacggctgtatattattgtgcgagagagtggggtgggaggtatacgggccctttctttaattactggggccagggaaccccggtcaccgtctcctca

SEQ ID NO: 7759 - DNA, 366 bp, Artificial Sequence
  Synthetic polynucleotide encoding artificial human antibody VH domain
caggtgcagctggtggagtctgggggaggcgtggtccagcctgggaggtccctgagactctcctgtgcagcctctggattcactttcagtagctatggtatgcactgggtccgccaggctccaggcaaggggctggagtgggtggcagttatatcatatgatggaagcagtaaatactacgcagactccgtgaagggccgattcaccatctccagagacaattccaagaacacgctgtatctgcaaatgaacagcctgagagctgaggacacggctgtgtattactgtgcgagagaagggcagtgggagctactgggtagagcttttgatatctggggccaagggacaatggtcaccgtctcttca

SEQ ID NO: 7760 - DNA, 375 bp, Artificial Sequence
  Synthetic polynucleotide encoding artificial human antibody VH domain
caggtacagatgcagcagtcaggtccaggactggtgaagccctcgcagaccctctcactcacctgtgccatctccggggacagtgtctctagcgacagtgctgcttggagctggatcaggcagtccccatcgagaggccttgagtggctgggaaggacatactacaggtccaagtggtataatgattatgcactatttgtgaaaagtcgaataaccatccgcccagacacatccaagaaccagttctccctggagttgaactctgtgtcttccgaggacacggctgtgtattactgtgtaagagattccccccgtggtggctacggggcctactttgactactggggccagggaaccctggtcaccgtctcctca

SEQ ID NO: 7761 - DNA, 375 bp, Artificial Sequence
  Synthetic polynucleotide encoding artificial human antibody VH domain
caggtgcagctgcaggagtcgggcccaggactggtgaagccttcggagaccctgtccctcacctgcactgtctctggtggctccatcagtagttactactggagctggatccggcagcccccagggaagggactggagtggattgggtatatctattacagtgggagcaccaactacaacccctccctcaagagtcgagtcaccatatcagtagacacgtccaagaaccagttctccctgaagctgagctctgtgaccgctgcggacacggccgtgtattactgtgcgagagtgttcggctcgacgatttttggagtggttattattcaggcttttgatatctggggccaagggacaatggtcaccgtctcttca

SEQ ID NO: 7762 - DNA, 366 bp, Artificial Sequence
  Synthetic polynucleotide encoding artificial human antibody VH domain
caggtccagcttgtgcagtctggggctgaggtgaagaagcctggggcctcagtgaagatttcctgcgagacctctggttacacctccagtaattacgctgtccattggctgcgccaggcccccggacaaaggcctgagtggatggcgtggatcaaggttggcgatggcgacacaagattgtcagagaagttcctgggcagactcaccttgaccagggccacgtccgcgaccacaacttacatggagttgggcagcctgacatctgaggacacggctgtctattactgtgcgagagtggctctgactggttattataccggtgtgttggacttttggggccagggaaccctggtcaccgtctcctca

SEQ ID NO: 7763 - DNA, 375 bp, Artificial Sequence
  Synthetic polynucleotide encoding artificial human antibody VH domain
gaagtgcagctggtggagtctgggggaggcttggtacagcctggcaggtccctgagactctcctgtgcagcctctggattcacctttgatgattatgccatgcactgggtccggcaagctccagggaagggcctggagtgggtctcaggtattagttggaatagtggtagcataggctatgcggactctgtgaagggccgattcaccatctccagagacaacgccaagaactccctgtatctgcaaatgaacagtctgagagctgaggacacggccttgtattactgtgcaaaagatagtcactatgatagtagtggttattaccagaatgcttttgatatctggggccaagggacaatggtcaccgtctcttca

SEQ ID NO: 7764 - DNA, 363 bp, Artificial Sequence
  Synthetic polynucleotide encoding artificial human antibody VH domain
cagctgcatctgcaggagtcgggcccagggctggtgaagacgtcggaaacgctgtccctcgcctgcaatatgtctggcgacctgttcagcagcactgccttctactacaattgggtccgccagtccccagggaagggcctggagtggattggggctttccactccagtggagtttcgttctacaacccgtccctcaagaaccggatcaccatgtccgtggacgcgtccacgaatcagttcttcctgcaaatggccgctgtgaccgccacagacacggctgtttattattgctcgagggggggcagttacatgcactggcacctcgaggtttggggccgcggcagcctggtcactgtctccaca

SEQ ID NO: 7765 - DNA, 363 bp, Artificial Sequence
  Synthetic polynucleotide encoding artificial human antibody VH domain
caggtgcagctgcaggagtcgggccctggactggtgaagcctgcggggaccctgtccctcacctgcggtgtctctggtgaccccctcacccttggtatcttctggagttgggtccgccagtccccagggaaggggctagaatggattggtgagatatatcatactggcattacgagctacaacacgtccctccagagtcgagtcaccatctccgtagacacgtccaggaaccagttctccctgcgcctgacctctgtgaccgccgcggacacggccatttattattgtgcgagagggacagcgttgcctgggctctactactttgaccactggggccagggaaccctggtcaccgtctcctca

SEQ ID NO: 7766 - DNA, 372 bp, Artificial Sequence
  Synthetic polynucleotide encoding artificial human antibody VH domain
caggtgcagctgcaggagtcgggcccaggactggtgaagccttcacagaccctgtccctcacctgcagtgtctctggtgcctccatcaccagtagtggttactactggagctggctccgccagctcccagggaagggcctggagtggattgggtacatctattccagtgggagcacccactacaacccgtcactcgagagtcgagttaccgtgtcagcggacatgtctaagaaccagttctccctgaatctgagctccgtgactgccgcggacacggccgtgtattactgtgcgagagaatgggcgaagttttactttcctagtcccggtcccataaactggggccagggaaccctggtcaccgtctcctca

SEQ ID NO: 7767 - DNA, 354 bp, Artificial Sequence
  Synthetic polynucleotide encoding artificial human antibody VH domain
gaggtgcagctggtggagtctgggggaggcttggtacagcctggagggtccctgagactctcctgtgcagcctctggattcaccttcagtacctatgcattgaactgggtccgccaggctccagggaaggggctggagtggatttcatacattagttacagtggtagtaccatatactacgcggactctgtgaagggccgattcaccatctccagagacaacgccaagaactctctttatttggagatgaacagcctgagagccgaggacacggctgtttattactgtgcgagagggtgggtacgatacaactttgacttctggggccagggaaccctggtcaccgtctcctca

SEQ ID NO: 7768 - DNA, 381 bp, Artificial Sequence
  Synthetic polynucleotide encoding artificial human antibody VH domain
gaggtgaagttggtggagtctgggggagacttggtaaagcctggggggtccctcagactctcctgtgcagcctctggattcactttcagttacgcctggatgagctgggtccgccaggctccagggaagggactggagtgggttggccgtattaaaagcaaaactgatggtgagacaacagactacgctgcacccgtgcaaggcagattcaccatctcaagagatgattcgaaaaacacgctgtttctgcaaatgaacagcctgaaaaccgaggacacagccgtgtattactgtaccacagggctgggtaacattacgtctgggggattcatcgccctatttgactactggggccagggtaccctggccaccgtctcctca

SEQ ID NO: 7769 - DNA, 390 bp, Artificial Sequence
  Synthetic polynucleotide encoding artificial human antibody VH domain
caggtgcagctacagcagtggggcgcaggactgttgaagccttcggagaccctgtccctcacttgcgctgtctatggtgggtccttcagtgattactactggagctgggtccgccagtccccagggagggggctggagtggattggggaaatcaatcatagtggaagcaccaactacaacccgtccctcaagagtcgagtcaccatatcagttgacacgtccaagaaccagttctccctgagcctgaggtctgtgaccgccgcggacacggctgtgtattactgtgcgagagaggcgcccgcctgggctttcgtagtgctagtaggtgttccctaccactactattccatggacgtctggggcaaagggaccacggtcaccgtctcctca

SEQ ID NO: 7770 - DNA, 354 bp, Artificial Sequence
  Synthetic polynucleotide encoding artificial human antibody VH domain
gaggtgcagctggtgcagtctggaggagaagtgaaaaagtccggggagtctctgacgatctcctgtcagggttctggatacaccttcaccgactactggatcgcctgggttcgccagatgcccgggaaaggcctggagtggatgggggccatctttcctcatgactctgatgtcaagcacactccgtccttccaaggccaggtcaccatctcagccgacaagtccatcagtaccgcctacctgcaatggaccagcctgaaggcctcggacaccgccatgtacttctgtgcgagagtgaacggggcgattgaccttgacctctggggccagggaaccctggtcaccgtctcctca

SEQ ID NO: 7771 - DNA, 387 bp, Artificial Sequence
  Synthetic polynucleotide encoding artificial human antibody VH domain
gaggtgcagctgatggagtctgggggaggcttagtacagccgggggggtccctgagactctcctgtgcggcctctggattcaccttcagcggctatgtcatgggctgggtccgccaggctccagggaaggggctggagtggctctcctctattagcgcaagtggtaccagcacattctacgcagactctgtgaaggggcgggtcaccatctccagagacaactccaggaacattctgtatctggaaatggacagcctgcgacccgaggacacggccatgtattactgtgtgaatcccctctgggccgactatgactacatcttccggactgatctgtacaccggtttccagcactggggccagggcaccctggtcaccgtctcctca

SEQ ID NO: 7772 - DNA, 348 bp, Artificial Sequence
  Synthetic polynucleotide encoding artificial human antibody VH domain
caggttcagctggtgcagcctggagttgaggtgaagaagcctggggcctcagtgaaggtctcctgcaaggcttctggttacacctttgccagctatggtatcagctgggtgcgacaggcccctggacaagggcttgagtggatgggatggatcagcacttacactggtaacacaaactatgcacagaagctccagggcagagtcaccatgaccacagacatatccacgagcacagcctacatggagctgaggaacctgagatttgacgacatggccatgtattactgtgcgagggggcttacaggaaatgactactggggccaggggaccctggtcaccgtctcctca

SEQ ID NO: 7773 - DNA, 354 bp, Artificial Sequence
  Synthetic polynucleotide encoding artificial human antibody VH domain
caggtgcagctgcaggagtcgggcccaggactggtgaagccttcggagaccctttccctcacctgcagtgtctctggtgcctccgtccttacttactactggacctggatccgtcagccccccgggaagggactggagtggattggatatatctattatagtggatacaccaactacaacccctccctcaagagtcgagtcaccatgtcaatggacacgtccaagacacatttctccctgaagctaacctctgtgaccgccgcagacacggccgtttatttctgtgcgctcctcgcgtctcccgcctactacatggccgcctggggcaaagggaccacggtcaccgtctcctca

SEQ ID NO: 7774 - DNA, 375 bp, Artificial Sequence
  Synthetic polynucleotide encoding artificial human antibody VH domain
caggtggacctggtcgagtctgggggaggcgtggtccagcctgggaggtccctgacactctcctgtgaagcctctggattcatcttcagaaattatgacatgcactgggtccgacaggctccaggcaaggggctggaatgggtgtccgttatatattatgacggaagtgatcaatggtacgcaggctccgtgaggggccgattcgccgtcttcagagacaattcaaagaaaacactgtttctgcaaatgaacgatttaagatttgaggacacggctgtctattactgtgcgagagggacgagggacagctgggagcggaagttgaatatggccgttgactactggggccggggaacccaggtcaccgtctcgtca

SEQ ID NO: 7775 - DNA, 354 bp, Artificial Sequence
  Synthetic polynucleotide encoding artificial human antibody VH domain
gaagtgcagctggtggagtctgggggagtcgtggtacagcctggggggtccctgagactctcctgtgcagcctctggattcacctttgatgattataccatgcactgggtccgtcaagctccggggaagggtctggagtgggtctctcttattagttgggatggtggtagcacatactatgcagactctgtgaagggccgattcaccatctccagagacaacagcaaaaactccctgtatctgcaaatgaacagtctgagaactgaggacaccgccttgtattactgtgcaactggaacgacggacgacgcctttgactactggggccagggaaccctggtcaccgtctcctca

SEQ ID NO: 7776 - DNA, 396 bp, Artificial Sequence
  Synthetic polynucleotide encoding artificial human antibody VH domain
caggtgcagctggtggagtctgggggaggcgtggtccagcctgggaggtccctgagactctcctgtgcagcctctggattcaccttcagtagctatgctatgcactgggtccgccaggctccaggcaaggggctggagtgggtggcagttatatcatatgatggaagtaataaatactacgcagactccgtgaagggccgattcaccatctccagagacaattccaagaacacgctgtatctgcaaatgaacagcctgagagctgaggacacggctgtgtattactgtgcgagaggccttgattacgatttttggtttagcgggccaatgactaattactactactactacggtatggacgtctggggccaagggaccacggtcaccgtctcctca

SEQ ID NO: 7777 - DNA, 378 bp, Artificial Sequence
  Synthetic polynucleotide encoding artificial human antibody VH domain
gaggtgcagctggtgcagtctggagcagaggtgaaaaagcccggggagtctctgaagatctcctgtaagggttctggatacagctttaccagctactggatcggctgggtgcgccagatgcccgggaaaggcctggagtggatggggatcatctatcctggtgactctgataccagatacagcccgtccttccaaggccaggtcaccatctcagccgacaagtccatcagcaccgcctacctgcagtggagcagcctgaaggcctcggacaccgccatgtattactgtgcgagacaatcgtaccggtatagcagtggctggtactactactacggtatggacgtctggggccaagggaccacggtcaccgtctcctca

SEQ ID NO: 7778 - DNA, 375 bp, Artificial Sequence
  Synthetic polynucleotide encoding artificial human antibody VH domain
cagctgcagctgcaggagtcgggcccaggactggtgaagccttcggagaccctgtccctcacctgcattgtctctggtggctccatcagcagtagtacttactactggggctggatccgccagcccccagggaaggggctggagtggattgggagtatctattatagtgggagtaccttcgacaacccatccctcaagagtcgagtcaccatgtccgtagacacgtccaagaaccagttgtccctgaagctgagttctgtgaccgccgcagacacggctgtatattactgtgcgagacatggcgatttttggagtggttattaccctggggcttttgatatttggggccaagggacaatggtcaccgtctcttca

SEQ ID NO: 7779 - DNA, 369 bp, Artificial Sequence
  Synthetic polynucleotide encoding artificial human antibody VH domain
caggtccagcttgtgcaatctggggctgaggtgaagaagcctggggcctcagtgaaggtttcctgcaaggcatctggatacaccttcactagctatgctatgcattgggtgcgccaggcccccggacaaaggcttgagtggatgggagggatcaacgttggcaatggttacacaaaatattcacagaagttccagggcagagtcaccattaccagggacacatccgcgagcacagcccacatggagctgagcagcctgagatctgaagacacggctgtgtattactgtgcgaggtcgccacctatagcagtggctggtacgacatggttcgacccctggggccagggaaccctggtcaccgtctcctca

SEQ ID NO: 7780 - DNA, 375 bp, Artificial Sequence
  Synthetic polynucleotide encoding artificial human antibody VH domain
gaggtggaactggtggagtcggggggagtcttggtacagccagggcgatccctgagactctcctgtagaggttctggattcacttttagggattatggtttggcctgggtccgccaggctccaacgaagggcctggagtgggtttgtctcattagcaacatcatttatggtgcgacaacacaatatgccgcgtctgtgagaggcaggttcaccatctcaagagatgattccaaaagcatcgcctatttgcaaatgactagcctgaagcccgaggacacaggcgtctatttttgtactagaggagacaggcgtggatatctgtctcgccactacatgggcgtctggggcaaggggaccacggtcaccgtctcctca

SEQ ID NO: 7781 - DNA, 390 bp, Artificial Sequence
  Synthetic polynucleotide encoding artificial human antibody VH domain
caggtgcagttggtgcaatctgggcctgagttgaagaagcctggggcctcagtgatggtctcctgcaaggcctctggatacgacttcactaagtttgttttgaattgggtgcgagtgcgacaggccccaggacaagggcctgagtggatgggatggatcaacaccgacactggggaccccacatacgcccaggactttccagaccggtttgtcttctccctcgacacctatgtcagcacggcatatctagaaatcagagacctggagcctgaggacactgccgtctattactgtgcgagagtccctgcggacagacttgttctgcttccaagtgcagtgcagacctactttgactactggggccaggggacactggtctccgtctcccca

SEQ ID NO: 7782 - DNA, 354 bp, Artificial Sequence
  Synthetic polynucleotide encoding artificial human antibody VH domain
gaagtgcaactggtggagtctgggggaaacgtggttcagccgggggggtccctgagactctcctgtgcagcctctggattcaccttcgattatcacactatgcactgggtccgtcaagctccggggaagggtctggagtgggtcggtcttgttgattggaatggagataacacagtctattccgactctgtgaggggccgattcatcatctccagagacaacagcaaaaactccctctatttgcaaatgaatagtctgaaaactgaggacactgccttctattactgtgcacgggacagtggaggccgtccctttgactactttggccagggaaccctggtcaccgtctcctca

SEQ ID NO: 7783 - DNA, 381 bp, Artificial Sequence
  Synthetic polynucleotide encoding artificial human antibody VH domain
cagatcaccttgagggagtctggtcctacactggtggaccccacacagaccctcactctgacctgcaccttctctgggttctcactgaagactaatggagtggctgtgggctggattcgtcggcccccaggaaaggccctggagtggctcgcactcatttcttgggatgatgataagcgctacagcccatccctgaacaccagggtcaccatcaccaagtacacctccgaaaaccgggtggtcctcacaatgaccaacttggcccctatggacacagccacatattattgtgcacacagtctgcgtcgcgccacctggagcgaggcctcctattactacatggacgtctggggcacagggaccaaggtcaccgtctcctca

SEQ ID NO: 7784 - DNA, 366 bp, Artificial Sequence
  Synthetic polynucleotide encoding artificial human antibody VH domain
gaggtgcagctgttggagtctgggggaggcttggtacagcctggggggtccctgagactctcctgtgcagcctctggattcacctttagcaactatgccatgaactgggtccgccaggctccagggaaggggctggagtgggtctcagttattagtggtagcggtggtagcacacagtacgcagactccgtgaagggccggttcaccatttccagagacaattccaagagcacgctgtatttgcaaatgaacagcctgagagccgaggacacggccgtatattactgcgcgaaaggggatgattcggggacttattattactacatggacgtctggggcaaagggaccacggtcaccgtctcctca

SEQ ID NO: 7785 - DNA, 384 bp, Artificial Sequence
  Synthetic polynucleotide encoding artificial human antibody VH domain
gaagtgcacctggtggagtctgggggagccgtgatacagcctggggggtccctgagactctcctgtgcagcctctggtttcatctttgaagattatgttatgcactgggtccgtcaatttccggcgaagggtctggagtgggtctctcttattagttgggatggtcatcagacctattatgcagacgctgtgaagggtcgattcatcatctccagagacaacagcaagaagtctctctacttgcaaatgaacaatctgggacccgaggacaccgccttgtattactgtgcaaaagatgtcgaggaccgttattacgatttttccagtggctccacgagactccccggttcttggggccagggaaccccggtcaccgtctcctca

SEQ ID NO: 7786 - DNA, 363 bp, Artificial Sequence
  Synthetic polynucleotide encoding artificial human antibody VH domain
caggtgcagctgcaggagtcgggcccaggactggtgaagccttcggagaccctgtccctcacctgcactgtctctggtggctccatcagtagttactactggagctggatccggcagcccccagggaagggactggagtggattgggtatatctattacagtgggagcaccaactacaacccctccctcaagagtcgagtcaccatatcagtagacacgtccaagaaccagttctccctgaagctgagctctgtgaccgctgcggacacggccgtgtattactgtgcgagaggttcgtattacgattttcgcgactactacatggacgtctggggcaaagggaccacggtcaccgtctcctca

SEQ ID NO: 7787 - DNA, 372 bp, Artificial Sequence
  Synthetic polynucleotide encoding artificial human antibody VH domain
cagctgcagctgcaggagtcgggcccaggactggtgaagccttcggagaccctgtccctcacctgcactgtctctggtggctccatcagcagtagtagttactactggggctggatccgccagcccccagggaaggggctggagtggattgggagtatctattatagtgggagcacctactacaacccgtccctcaagagtcgagtcaccatatccgtagacacgtccaagaaccagttctccctgaagctgagctctgtgaccgccgcagacacggctgtgtattactgtgcgagaccttactatgatagtagtggttaccatgatgcttttgatatctggggccaagggacaatggtcaccgtctcttca

SEQ ID NO: 7788 - DNA, 381 bp, Artificial Sequence
  Synthetic polynucleotide encoding artificial human antibody VH domain
caggtgcagctggtggagtctgggggaggcgtggtccagcctgggaggtccctgagactctcctgtgcagcgtctggattcaccttcagtagctatggcatgcactgggtccgccaggctccaggcaaggggctggagtgggtggcagttatatggtatgatggaagtaataaatactatgcagactccgtgaagggccgattcaccatctccagagacaattccaagaacacgctgtatctgcaaatgaacagcctgagagccgaggacacggctgtgtattactgtgcgagaggccccgatattttgactggttattacaactactactactacggtatggacgtctggggccaagggaccacggtcaccgtctcctca

SEQ ID NO: 7789 - DNA, 363 bp, Artificial Sequence
  Synthetic polynucleotide encoding artificial human antibody VH domain
caggtccagctggtacagtctggggctgaggtgaagaagcctggggcctcagtgaaggtctcctgcaaggtttccggatacaccctcactgaattatccatgcactgggtgcgacaggctcctggaaaagggcttgagtggatgggaggttttgatcctgaagatggtgaaacaatctacgcacagaagttccagggcagagtcaccatgaccgaggacacatctacagacacagcctacatggagctgagcagcctgagatctgaggacacggccgtgtattactgtgcaaccttctgggcagtggcggcactttactactttgactactggggccagggaaccctggtcaccgtctcctca

SEQ ID NO: 7790 - DNA, 378 bp, Artificial Sequence
  Synthetic polynucleotide encoding artificial human antibody VH domain
caggtgcaattactggagtcgggcccaggactggtgaggccctcacagaccccgtctctcacctgcagtgtctctggtgcctccatcagcagtggtaatcacttctacacctggatccgccagcgcccagggcagggcctggagtggattgggaacatctatcccagtgggagcacctcctacaacccgtctctcaagagtcgacttatcatttctattgacacgtccaagaacaaattttccctgaaggtgaattctgtgactaccgcggacacggccgtctatttctgtgcgacaggggccgctttctctgatggtggttctccgatggccacttttgatttgtggggccaagggacactgctcaacgtctcttca

SEQ ID NO: 7791 - DNA, 378 bp, Artificial Sequence
  Synthetic polynucleotide encoding artificial human antibody VH domain
gaggtgcaactgttggagtctgggggaggcttggtacagcctggggggtccctgagactctcctgtgcagcctctggattcacctttagcacctatgccatgaactgggtccgccaggctccagggaaggggttagaatgggtctcaactattagtgatactggtgttagcacattctacgcaaattccgttaagggccgcttcaccgtctccagagacaattccgagaacacgttatttctgcaaatgaacagcctgagagccgaggacacggccatatattactgtgcgagaacatcgtttagaagtgactggtattttaaacccccgaactggttcggcccctgggcccagggaaccctggtcaccgtctcctca

SEQ ID NO: 7792 - DNA, 378 bp, Artificial Sequence
  Synthetic polynucleotide encoding artificial human antibody VH domain
caggtgcagctgcaggagtcgggcccaggactggtgaagccttcggagaccctgtccctcacctgcactgtctctggtggctccatcagtagttactactggagctggatccggcagcccccagggaagggactggagtggattgggtatatctattacagtgggagcaccaactacaacccctccctcaagagtcgagtcaccatatcagtagacacgtccaagaaccagttctccctgaagctgagctctgtgaccgccgcagacacggccgtgtattactgtgcgagacagcgaggagtggctacgatttttggcggttactactactacggtatggacgtctggggccaagggaccacggtcaccgtctcctca

SEQ ID NO: 7793 - DNA, 381 bp, Artificial Sequence
  Synthetic polynucleotide encoding artificial human antibody VH domain
caggtgcagctgcaggagtcgggcccaggactggtgaagccttcggagaccctggccctcacctgcactgtctctggtgtctccatcactacctactactggaactggatccggcagcccgccgggaagggactggagtggattgggcgtatctttcccagtgggagcaccaacgtcaacccctccctcaagagtcgagtcgccatgtcaatagacacgtccagcaaccagttctccctgaagttgacctctgtgaccgccgctgacacgggcgtctattactgtgcgagagtggggacggattaccagggttcgggcatcttctacaattactacggcatggacgcctggggccaagggaccacggtcaccgtctcctca

SEQ ID NO: 7794 - DNA, 369 bp, Artificial Sequence
  Synthetic polynucleotide encoding artificial human antibody VH domain
caggtgcagctggtgcagtctggggctgaggtgaagaagcctggggcctcagtgaaggtctcctgcaaggcttctggatacaccttcaccggctactatatgcactgggtgcgacaggcccctggacaagggcttgagtggatgggatggatcaaccctaacagtggtggcacaaactatgcacagaagtttcagggcagggtcaccatgaccagggacacgtccatcagcacagcctacatggagctgagcaggctgagatctgacgacacggccgtgtattactgtgcgagaagtctcctctatggttcggggagttataaccattttgactactggggccagggaaccctggtcaccgtctcctca

SEQ ID NO: 7795 - DNA, 375 bp, Artificial Sequence
  Synthetic polynucleotide encoding artificial human antibody VH domain
cagctgcagctgcaggagtcgggcccaggactggtgaagccttcggagaccctgtccctcacctgcactgtctctggtggctccatcagcagtagtagttactactggggctggatccgccagcccccagggaaggggctggagtggattgggagtatctattatagtgggagcacctactacaacccgtccctcaagagtcgagtcaccatatccgtagacacgtccaagaaccagttctccctgaagctgagctctgtgaccgccgcagacacggctgtgtattactgtgcgagacatactaggagatggctacagctacgaccgtcctactttgactactggggccagggaaccctggtcaccgtctcctca

SEQ ID NO: 7796 - DNA, 366 bp, Artificial Sequence
  Synthetic polynucleotide encoding artificial human antibody VH domain
caggtgcagctggtggagtctgggggaggcgtggtccagcctgggaggtccctgagactctcctgtgcagcgtctggattcaccttcagtagctatggcatgcactgggtccgccaggctccaggcaaggggctggagtgggtggcagttatatggtatgatggaagtaataaatactatgcagactccgtgaagggccgattcaccatctccagagacaattccaagaacacgctgtatctgcaaatgaacagcctgagagccgaggacacggctgtgtattactgtgcgagagatctaagcagcagctggcaatccagcacactcgacccctggggccagggaaccctggtcaccgtctcctca

SEQ ID NO: 7797 - DNA, 393 bp, Artificial Sequence
  Synthetic polynucleotide encoding artificial human antibody VH domain
gaggtgcagctggtggagtctgggggaggcttggtacagccagggcggtccctgagactctcctgtacagcttctggattcacctttggtgattatgctatgagctgggtccgccaggctccagggaaggggctggagtgggtaggtttcattagaagcaaagcttatggtgggacaacagaatacgccgcgtctgtgaaaggcagattcaccatctcaagagatgattccaaaagcatcgcctatctgcaaatgaacagcctgaaaaccgaggacacagccgtgtattactgtactagagatatcgcgatagcagcagctggtacattgcgttggtactactactactacatggacgtctggggcaaagggaccacggtcaccgtctcctca

SEQ ID NO: 7798 - DNA, 372 bp, Artificial Sequence
  Synthetic polynucleotide encoding artificial human antibody VH domain
caggtgcagctggtgcagtctggggctgaggtgaagaagcctggggcctcagtgaaggtctcctgcaaggcttctggatacaccttcaccggctactatatgcactgggtgcgacaggcccctggacaagggcttgagtggatgggatggatcaaccctaacagtggtggcacaaactatgcacagaagtttcagggctgggtcaccatgaccagggacacgtccatcagcacagcctacatggagctgagcaggctgagatctgacgacacggccgtgtattactgtgcgagagatcttgggcagtggctggtacggggaatacgggggtttgactactggggccagggaaccctggtcaccgtctcctca

SEQ ID NO: 7799 - DNA, 381 bp, Artificial Sequence
  Synthetic polynucleotide encoding artificial human antibody VH domain
caggtgcagctgcaggagtcgggcccaggactggtgaagccttcacagaccctgtccctcacctgcactgtctctggtggctccatcagcagtggtggttactactggagctggatccgccagcacccagggaagggcctggagtggattgggtacatctattacagtgggagcacctactacaacccgtccctcaagagtcgagttaccatatcagtagacacgtctaagaaccagttctccctgaagctgagctctgtgactgccgcggacacggccgtgtattactgtgcgagatgcactagggatattttgactggttattatttgggcaactggttcgacccctggggccagggaaccctggtcaccgtctcctca

SEQ ID NO: 7800 - DNA, 345 bp, Artificial Sequence
  Synthetic polynucleotide encoding artificial human antibody VH domain
gaggtgcacctattggagtctgggggaggccttgtgcagccgggggggtccctgagactctcctgtgcagtctctggattcgccctccgcggcaatggcatgacctgggtccgccaggctccagggaagggactggagtgggtctcaagcatttatggaaataccggtaacacggaccacgcggactccgtgaagggccggttcaccatctccggagacaattccaaaaacatgctgcatctgcacatgaacagcctgagagccgacgacacggccgtatattattgttttggacatggaagctcgtcgtactggggccagggaaccctggtcaccgtctcctca

SEQ ID NO: 7801 - DNA, 387 bp, Artificial Sequence
  Synthetic polynucleotide encoding artificial human antibody VH domain
caggtccagctggtacagtctggggctgaggtgaagaagcctggggcctcagtgaaggtctcctgcaaggtttccggatacaccctcactgaattatccatgcactgggtgcgacaggctcctggaaaagggcttgagtggatgggaggttttgatcctgaagatggtgaaacaatctacgcacagaagttccagggcagagtcaccatgaccgaggacacatctacagacacagcctacatggagctgagcagcctgagatctgaggacacggccgtgtattactgtgcaacagggcccgcccattactatgatagtagtggttactattactactactacggtatggacgtctggggccaagggaccacggtcaccgtctcctca

SEQ ID NO: 7802 - DNA, 369 bp, Artificial Sequence
  Synthetic polynucleotide encoding artificial human antibody VH domain
gaggtgcagttgttggaatcgggggggggcttgataccgccgggggggtccctcagactctcctgtgcagcgtctggactcagcttcaccagctttgccatgagttgggtccgccaggctccagggaaggggctggagtgggtctcaggtattagtagtggtggcaggacacactacgcagactctgcgaagggccgattcaccatctctagagacaattccaagaactcggtgtatctagacatgggcagcctgagagccgaggacacggcactatattactgtgcgaaacagatgagcagtggctggtacgggggacaatttgcttttgatatctggggccaagggacaatggtcaccgtctcttca

SEQ ID NO: 7803 - DNA, 378 bp, Artificial Sequence
  Synthetic polynucleotide encoding artificial human antibody VH domain
caggtccagctggtacagtctggggctgaggtgaagaagcctggggcctcagtgaaggtctcctgcaaggtttccggatacaccctcactgaattatccatgcactgggtgcgacaggctcctggaaaagggcttgagtggatgggaggttttgatcctgaagatggtgaaacaatctacgcacagaagttccagggcagagtcaccatgaccgaggacacatctacagacacagcctacatggagctgagcagcctgagatctgaggacacggccgtgtattactgtgcaacctctcccgcgtattactatggttcggggaatattttacactggttcgacccctggggccagggaaccctggtcaccgtctcctca

SEQ ID NO: 7804 - DNA, 372 bp, Artificial Sequence
  Synthetic polynucleotide encoding artificial human antibody VH domain
caggtgcagctgcaggagtcgggcccaggactggtgaagccttcggagaccctgtccctcacctgcactgtctctggtggctccatcagtagttactactggagctggatccggcagcccccagggaagggactggagtggattgggtatatctattacagtgggagcaccaactacaacccctccctcaagagtcgagtcaccatatcagtagacacgtccaagaaccagttctccctgaagctgagctctgtgaccgccgcagacacggccgtgtattactgtgcgagacatggaggagggaagtacaactggaacgacgagggctggttcgacccctggggccagggaaccctggtcaccgtctcctca

SEQ ID NO: 7805 - DNA, 372 bp, Artificial Sequence
  Synthetic polynucleotide encoding artificial human antibody VH domain
cagatcaccttgaaggagtctggtcctacgctggtgaaacccacacagaccctcacgctgacctgcaccttctctgggttctcactcagcactagtggagtgggtgtgggctggatccgtcagcccccaggaaaggccctggagtggcttgcactcatttattgggatgatgataagcgctacagcccatctctgaagagcaggctcaccatcaccaaggacacctccaaaaaccaggtggtccttacaatgaccaacatggaccctgtggacacagccacatattactgtgcacacaaaactactatgatagtagtggttggggatgcttttgatatctggggccaagggacaatggtcaccgtctcttca

SEQ ID NO: 7806 - DNA, 381 bp, Artificial Sequence
  Synthetic polynucleotide encoding artificial human antibody VH domain
caggtgcagctggtgcagtctggggctgaggtgaagaagcctggggcctcagtgaaggtctcctgcaaggcttctggatacaccttcaccggctactatatgcactgggtgcgacaggcccctggacaagggcttgagtggatgggatggatcaaccctaacagtggtggcacaaactatgcacagaagtttcagggctgggtcaccatgaccagggacacgtccatcagcacagcctacatggagctgagcaggctgagatctgacgacacggccgtgtattactgtgcgagagggtcatcgcggcatattgtggtggtgactgctcattactggtacttcgatctctggggccgtggcaccctggtcactgtctcctca

SEQ ID NO: 7807 - DNA, 351 bp, Artificial Sequence
  Synthetic polynucleotide encoding artificial human antibody VH domain
caggtgcaactggtgcagtctggggctgaggtgatggagcctggggcctcagtgaaggtttcctgcgggacatctggatacaggttcaccacatatcacatacactgggtgcgacaggcccctggacaagggcctgagtggatgggaagattcgatcccactggcggccccacactatacgcacggaagttccaggacagactcaccattactggtgacgcgtccacgagcacagtctttatggaattgagagccctgaaatctgaagacacggccgtttatttctgcgcgagagacgggttcggggaccttgagttctggggccatgggaccctggtcaccgtctcctca

SEQ ID NO: 7808 - DNA, 372 bp, Artificial Sequence
  Synthetic polynucleotide encoding artificial human antibody VH domain
caggtgcaactgcagcagtcgggcccagggctggtgaggccttcggagaccctgtccctcacgtgcactgtcaacggtgcctccatcactacttactactggaattggatcaggcagcccccagggaagggacttgaatggattgccaatatctattccagtgggagcaccaactacaatccctccctcaagaggcgagtctccatatcggtagacacttccaagaaccgattctctctacaacttaattctgtgaccgctgcggacacggccgtatattactgtgcgagagggtcaacccagtggttcgggacaagcatgggcaactggttcgacccctggggccagggaatcctggtcaccgtctcgtca

SEQ ID NO: 7809 - DNA, 387 bp, Artificial Sequence
  Synthetic polynucleotide encoding artificial human antibody VH domain
gaggtgcagctggtgcagtctggagcagaggtgaaaaagcccggggagtctctgaagatctcctgtaagggttctggatacagctttaccagctactggatcggctgggtgcgccagatgcccgggaaaggcctggagtggatggggatcatctatcctggtgactctgataccagatacagcccgtccttccaaggccaggtcaccatctcagccgacaagtccatcagcaccgcctacctgcagtggagcagcctgaaggcctcggacaccgccatgtattactgtgcgagacatggggccgattgtactaatggtgtatgctattcttccgactactactacatggacgtctggggcaaagggaccacggtcaccgtctcctca

SEQ ID NO: 7810 - DNA, 390 bp, Artificial Sequence
  Synthetic polynucleotide encoding artificial human antibody VH domain
caggtccagctggtacagtctggggctgaggtgaagaagcctggggcctcagtgaaggtctcctgcaaggtttccggatacaccctcactgaattatccatgcactgggtgcgacaggctcctggaaaagggcttgagtggatgggaggttttgatcctgaagatggtgaaacaatctacgcacagaagttccagggcagagtcaccatgaccgaggacacatctacagacacagcctacatggagctgagcagcctgagatctgaggacacggccgtgtattactgtgcaacaaccacgccggggggctattactatgatagtagtggttatcccctcacctcctggttcgacccctggggccagggaaccctggtcaccgtctcctca

SEQ ID NO: 7811 - DNA, 369 bp, Artificial Sequence
  Synthetic polynucleotide encoding artificial human antibody VH domain
gaggtgcagctggtggagtctggaggaggcttggtccagcctggggggtccctgagactctcctgtgcagcctctgggttcaccgtcagtagcaactacatgagctgggtccgccaggctccagggaaggggctggagtgggtctcagttatttatagcggtggtagcacatactacgcagactccgtgaagggccgattcaccatctccagacacaattccaagaacacgctgtatcttcaaatgaacagcctgagagctgaggacacggccgtgtattactgtgcgagaacggaccccaatacgatttttggagtggttacacattttgactactggggccagggaaccctggtcaccgtctcctca

SEQ ID NO: 7812 - DNA, 354 bp, Artificial Sequence
  Synthetic polynucleotide encoding artificial human antibody VH domain
caggtgcaactagtggagtctgggggaggcttggtcaagcctggcgggtccctgagactctcctgtgcagcctctggattcaccttcagtgacttctacatgagctggatccgccaggctccagggaagggactggagtggatttcatacattggtcttcatggtactaccctgtactatgcagactctgtgaagggccgattcaccatctccagggacagcgccaagaactcactgtatctgcaaatgaacagcctgagagccgaggacacggccgtgtattactgtgcgagtggcctttcaaggggactctttgacttctggggccagggaaccctggtcaccgtctcctca

SEQ ID NO: 7813 - DNA, 363 bp, Artificial Sequence
  Synthetic polynucleotide encoding artificial human antibody VH domain
caggtccagctggtacagtctggggctgaggtgaagaagcctggggcctcagtgaaggtctcctgcaaggtttccggatacaccctcactgaattatccatgcactgggtgcgacaggctcctggaaaagggcttgagtggatgggaggttttgatcctgaagatggtgaaacaatctacgcacagaagttccagggcagagtcaccatgaccgaggacacatctacagacacagcctacatggagctgagcagcctgagatctgaggacacggccgtgtattactgtgcaacagccagtatagtgggagctactgggtggttcgacccctggggccagggaaccctggtcaccgtctcctca

SEQ ID NO: 7814 - DNA, 369 bp, Artificial Sequence
  Synthetic polynucleotide encoding artificial human antibody VH domain
gaggtgcagctggtggagtctgggggaggcttggtccagcctggggggtccctgagactctcctgtgcagcctctggattcacctttagtagctattggatgagctgggtccgccaggctccagggaaggggctggagtgggtggccaacgtaaagcaagatggaagtgagaaatactatctggactctgtgaagggccgattcaccctctccagagacaacgccaagaactcactgtatctgcaaatgaacagcctgagagccgaggacacggctgtgtattactgtgcgagagatgatagcagaggctggaacccccgtgggagaatggactactggggccagggaaccctggtcaccgtctcctca

SEQ ID NO: 7815 - DNA, 369 bp, Artificial Sequence
  Synthetic polynucleotide encoding artificial human antibody VH domain
caggtccagctggtacagtctggggctgaggtgaagaagcctggggcctcagtgaaggtctcctgcaaggtttccggatacaccctcactgaattatccatgcactgggtgcgacaggctcctggaaaagggcttgagtggatgggaggttttgatcctgaagatggtgaaacaatctacgcacagaagttccagggcagagtcaccatgaccgaggacacatctacagacacagcctacatggagctgagcagcctgagatctgaggacacggccgtgtattactgtgcaacagtaaagcgtacagagtgggagctacttgatgcttttgatatctggggccaagggacaatggtcaccgtctcttca

SEQ ID NO: 7816 - DNA, 354 bp, Artificial Sequence
  Synthetic polynucleotide encoding artificial human antibody VH domain
gaggtgcagctgttggagtctgggggaaccttggtacagcctggggggtccctgagactctcctgtgcagcctctggattcacctttagcaactctgccatgaattgggtccgccaggctccagggaaggggctggagtgggtctcaggcattagtggaagtggcgatcgcacaaactacggagactccgttaagggccggttcaccatctacagagacaattccaagaacacactgtatcttcaaatgaacagcctgagggccgaggactcggccgtatacaggtgtgcaagcgcaagtcgcacgggcgactttgaccattggggcccgggaacccgggtaaccgtctcctca

SEQ ID NO: 7817 - DNA, 381 bp, Artificial Sequence
  Synthetic polynucleotide encoding artificial human antibody VH domain
caggtgcagctgcaggagtcgggcccaggactggtgaagccttcacagaccctgtccctcacctgcactgtctctggtggctccatcaccagtggtgattcctactggacttggatccgccagcccccagggaagggcctggagtggattgggtacatctcttacagtgggagcactttctacagcccgtccctcaagagtcgacttaccatgtcattacacacgtccaagaatcagctctccctgaaactgacctctgtgactgccgcagacacggccgtgtatttctgtgccagagatctcgcggtaggagattgtagtggggctagctgcttcggccttgactcctggggccagggaaccctggtcaccgtctcctca

SEQ ID NO: 7818 - DNA, 372 bp, Artificial Sequence
  Synthetic polynucleotide encoding artificial human antibody VH domain
caggtcaccttgaaggagtctggtcctgtgctggtgaaacccacagagaccctcacgctgacctgcaccgtctctgggttctcactcagcaatgctagaatgggtgtgagctggatccgtcagcccccagggaaggccctggagtggcttgcacacattttttcgaatgacgaaaaatcctacagcacatctctgaagagcaggctcaccatctccaaggacacctccaaaagccaggtggtccttaccatgaccaacatggaccctgtggacacagccacatattactgtgcacggatcctccgggactggctaagctactactactacataaacgtctggggcaaagggaccacggtcaccgtctcctca

SEQ ID NO: 7819 - DNA, 375 bp, Artificial Sequence
  Synthetic polynucleotide encoding artificial human antibody VH domain
gaggtgcaactgttggagtctgggggaggcttggtacagccgggggggtgcctgagactctcctgtgcagcctccgaattcacctttagtaactatgccatgagctgggtccgccaggctccagggaaggggctggagtgggtctcacagataagcggtagtggccgaaatacaaactacgcggactccgtgaagggccggttcaccatctccagagacaattccaagaacacgctttatctccaaatgaacagcctgagagccgaggacacggccatatattactgtgcgaaagatacggggaactatgatactagtggttgtaggggcctttttggctactggggccagggaaccctggtcaccgtctcctca

SEQ ID NO: 7820 - DNA, 390 bp, Artificial Sequence
  Synthetic polynucleotide encoding artificial human antibody VH domain
caggtgcagctgcaggagtcgggcccaggactggtgaagccttcacagaccctgtccctcacctgcactgtctctggtggctccatcagcagtggtagttactactggagctggatccggcagcccgccgggaagggactggagtggattgggcgtatctataccagtgggagcaccaactacaacccctccctcaagagtcgagtcaccatatcagtagacacgtccaagaaccagttctccctgaagctgagctctgtgaccgccgcagacacggccgtgtattactgtgcggctacctcggtgtattacgatattttgactggttattatcgactacatgatgcttttgatatctggggccaagggacaatggtcaccgtctcttca

SEQ ID NO: 7821 - DNA, 363 bp, Artificial Sequence
  Synthetic polynucleotide encoding artificial human antibody VH domain
gaggtgcagctggtggagtccgggggaggcttagttcagccgggggggtccctgagactctcctgtgcagcctctggattcaccttcagtagctactggatgcactgggtccgccaagctccagggagggggctggtatgtgtctcacgtattactagtgatgggagtagcgcaagctacgcggactccgtgaagggccgattcaccatctccagagacaacgccaagaacacgctgtatctgcaaatgaacagtctgagagtcgacgacacggctgtgtattactgtgcaagagaggcagtagctggtacgaggaactggttcgacccctggggccagggaaccctggtcaccgtctcctca

SEQ ID NO: 7822 - DNA, 363 bp, Artificial Sequence
  Synthetic polynucleotide encoding artificial human antibody VH domain
gaggtgcagctggtggagtctgggggaggcctggtcaagccgggggggtccctgagactctcctgtgcagcctctggattcagtatcagtagctatagcatgaactgggtccgccaggctccagggaaggggctggagtgggtctcatccatcagtaggagtagtcgcaacatatactacgaagactcagtgaagggccgattcaccatttccagggacaacgccagaaactcactgtatctgcaaatgaacagcctgagagccgaggacacggctgtatattactgtgcgagggcgatagatggctacataggagactactttgagtactggggccagggaaccctggtcaccgtctcctca

SEQ ID NO: 7823 - DNA, 363 bp, Artificial Sequence
  Synthetic polynucleotide encoding artificial human antibody VH domain
caggtgcagctggtggagtctgggggaggcgtggtccagcctgggaggtccctgagactctcctgtgcagcctctggattcatcttcagtagctatgctatgcactgggtccgccaggctccaggcaaggggctggagtgggtggcagttatatcatatgatggaagcaataaatactccgcagactccgtgaagggccgattcaccttctccagagacaattccaaaaacacgctgtatctgcaaatgaacagcctgagagctgaggacacggctgtgtattactgtgcgaggccggggggggggaattacttagcctcctttgactactggggccagggaaccctggtcaccgtctcctca

SEQ ID NO: 7824 - DNA, 363 bp, Artificial Sequence
  Synthetic polynucleotide encoding artificial human antibody VH domain
gaggtgcagctgttggagtctgggggagacttggtacagcctggggggtccctgagagtctcctgtgcagcctctggattcacctttagcacctatgtcatgaactgggtccgccaggctccagggaaggggctggagtgggtctcagctatttctgttagtggtgataccccatactacgcagactccgtgaagggccggttcaccatctccagagacaactccaagaacacgctatatctgcaaatgaacagcctgagagccgaggacacggccgtatattactgtgcgaaaggcagtggctggcactactactacggtgtggacgtctggggccaggggaccacggtcaccgtctcctca

SEQ ID NO: 7825 - DNA, 372 bp, Artificial Sequence
  Synthetic polynucleotide encoding artificial human antibody VH domain
gaggtgcagctggtgcagtctggagcggaagtgaggaagcccggggagtctctgaacatctcctgtcagtcttctggatacaactttaacgattactggatcggctggctgcgccagaagcccgggcaaggcctggagtggatgggaatcatctatcctggtgactccgataccagatacagcccgtccttccaaggccgggtcaccatctcagccgacaagcccatcaccaccgcctacctgcagttgagcggcctgacggcctcggacaccgccatttattattgtgcgagacataatattttgtttcgtcgtatctactacttctacatggacgtctggggcaaagggaccacggtcaccgtctcctca

SEQ ID NO: 7826 - DNA, 366 bp, Artificial Sequence
  Synthetic polynucleotide encoding artificial human antibody VH domain
gaggtgcagctggtggagtctgggggaggcttggtacagcctggagggtccctgagactctcctgtgcagcctctggattcaccttcagtagttatgaaatgaactgggtccgccaggctccagggaaggggctggagtgggtttcatacattagtagtagtggtagtaccatatactacgcagactctgtgaagggccgattcaccatctccagagacaacgccaagaactcactgtatctgcaaatgaacagcctgagagccgaggacacggctgtttattactgtgcgagagaggggtccccctcagccacccttgagagggagaactactggggccagggaaccctggtcaccgtctcctca

SEQ ID NO: 7827 - DNA, 372 bp, Artificial Sequence
  Synthetic polynucleotide encoding artificial human antibody VH domain
caggtccagctggtgcagtctggggctgaggtgaagaagcctgggtcctcggtgaaggtctcctgcaaggcttctggaggcaccttcagcagctatgctatcagctgggtgcgacaggcccctggacaagggcttgagtggatgggaaggatcatccctatccttggtatagcaaactacgcacagaagttccagggcagagtcacgattaccgcggacaaatccacgagcacagcctacatggagctgagcagcctgagatctgaggacacggccgtgtattactgtgcgagagatacctccccttactatgatagtagtggtccctactttgactactggggccagggaaccctggtcaccgtctcctca

SEQ ID NO: 7828 - DNA, 378 bp, Artificial Sequence
  Synthetic polynucleotide encoding artificial human antibody VH domain
caggtgcagctacagcagtggggcgcaggactgttgaagccttcggagaccctgtccctcacctgcgctgtctatggtgggtccttcagtggttactactggagctggatccgccagcccccagggaaggggctggagtggattggggaaatcaatcatagtggaagcaccaactacaacccgtccctcaagagtcgagtcaccatatcagtagacacgtccaagaaccagttctccctgaagctgagctctgtgaccgccgcggacacggctgtgtattactgtgcgagagccaatgtattacgatattttgactggtcctactactactacggtatggacgtctggggccaagggaccacggtcaccgtctcctca

SEQ ID NO: 7829 - DNA, 369 bp, Artificial Sequence
  Synthetic polynucleotide encoding artificial human antibody VH domain
cagctgcagctgcaggagtcgggcccaggactggtgaagccttcggagaccctgtccctcacgtgcactgtctctggtggctccatcagcagtagtacttacttctgggactggatccgccagcccccagggaaggggctggaatggattgggagtatctattatagtgggagcacctactacaacccgtccctcaagagtccagtcaccatgtccgtagacacgtccaagaaccaattctccctgaaggtgagctctgtgaccgccgcagacacggctgtgtattactgtgcgagacatcgggtagcagcttcagttaggtaccactttgactactggggccagggaaccctggtcaccgtctcctca

SEQ ID NO: 7830 - DNA, 372 bp, Artificial Sequence
  Synthetic polynucleotide encoding artificial human antibody VH domain
gaggtgcagttggtggagtctgggggaggcttggtaaagcctggggggtcccttagactctcctgtgcagcctctggattcactttcagtaacgcctggatgacctgggtccgccaggctccagggaagggactggagtgggttggccgtattaaaagcaaaactgatggtgggacaacagactaccctgcacccgtgaaaggcagattcaccatctcaagagatgattcaaaaaacacgctgtatctgcaaatggacagcctggaaaccgaggacacagccttttattattgttccacttatttactagtaaagtgggacgccatgcgtggtgcctactggggccagggaaccctggtcaccgtctcctca

SEQ ID NO: 7831 - DNA, 384 bp, Artificial Sequence
  Synthetic polynucleotide encoding artificial human antibody VH domain
caggtgcagctggtggagtctgggggaggcgtggtccagcctgggaggtccctgagactctcctgtgcagcctctggattcaccttcagtagctatggcatgcactgggtccgccaggctccaggcaaggggctggagtgggtggcagttatatcatatgatggaagtaataaatactatgcagactccgtgaagggccgattcaccatctccagagacaattccaagaacacgctgtatctgcaaatgaacagcctgagagctgaggacacggctgtgtattactgtgcgaaagatcttgggaaaagggggagcagtggctggtactactactactacggtatggacgtctggggccaagggaccacggtcaccgtctcctca

SEQ ID NO: 7832 - DNA, 387 bp, Artificial Sequence
  Synthetic polynucleotide encoding artificial human antibody VH domain
caggttcagctggtgcagtctggagctgaggtgaagaagcctggggcctcagtgaaggtctcctgcaaggcttctggttacacctttaccagctatggtatcagctgggtgcgacaggcccctggacaagggcttgagtggatgggatggatcagcgcttacaatggtaacacaaactatgcacagaagctccagggcagagtcaccatgaccacagacacatccacgagcacagcctacatggagctgaggagcctgagatctgacgacacggccgtgtattactgtgcgagagaaagggaatttgtttcgtatggttcggggagttattacaagtacaactggttcgacccctggggccagggaaccctggtcaccgtctcctca

SEQ ID NO: 7833 - DNA, 369 bp, Artificial Sequence
  Synthetic polynucleotide encoding artificial human antibody VH domain
gaggtgcaggtggtggagtctgggggaggcttggtccagcctggagggtccctgagactctcctgtgtagcctctggactcaccttcagtgaccactacatagactgggtccgccaggctccagggaaggggctggagtggattgggctcattagaaacaaaccgaacagttacaccatgcaatacgccgcgtctgtggaaggcagattcaccatctcaagagacgattcaaagaactcagtgtatctgcaagtgaacagcctgaaaaccgaggacacggccgtttattactgtggtgatatagcaattcgccgtgagggcagtgtttttggtttctggggccaagggatactggtcaccgtctcttca

SEQ ID NO: 7834 - DNA, 366 bp, Artificial Sequence
  Synthetic polynucleotide encoding artificial human antibody VH domain
caggtgcagctggtgcagtctgggactgaggtgaagaggcctggggcctcagtgaaggtctcctgcaaggcttctggatacaccttcaccggctactatatacactgggtgcgacaggcccctggacaagggcttgagtggatgggatggatcaaccctaacagtggtggcacaaactatgcacagaagtttcagggcagggtcaccctgaccggggacacgtccctcagcacagcctacatggagctgagcagcctgagatctgacgacacggccgtctattactgtgcgagagatccaagagttcggggagttatcctaatctttgactactggggccagggaaccctggtcaccgtctcctca

SEQ ID NO: 7835 - DNA, 360 bp, Artificial Sequence
  Synthetic polynucleotide encoding artificial human antibody VH domain
cagatcaccttgaaggagtctggtcctacgctggtgaaacccacacagaccctcacgctgacctgcaccttctctgggttctcactcagcactagtggagtgggtgtgggctggatccgtcagcccccaggaaaggccctggagtggcttgcactcatttattgggatgatgataagcgctacagcccatctctgaagagcaggctcaccatcaccaaggacacctccaaaaaccaggtggtccttacaatgaccaacatggaccctgtggacacagccacatattactgtgcacacgttctttatagtgggagctactacgaaggctggggccaagggacaatggtcaccgtctcttca

SEQ ID NO: 7836 - DNA, 372 bp, Artificial Sequence
  Synthetic polynucleotide encoding artificial human antibody VH domain
caggtgccgctgcgacagtcgggtccagaagtggtgaagccttcggagaccctgtccctcacgtgcactgtctctggtgcccccatcacaacttactactggaactggatccgccagcccccagggaagggactggagtggattgggaacatccactccagtggggacaccaactctaacccctccctgaagagtcgcatcaccatgtcacttgacacctccagaaatcagttctccctgaggctgacctctgtgacggctgaggacacggccgtctattactgcgcgagaggggcgactcactggttcggagatcttttgggtaactggttcgacccctggggccatggctccctggtcagcgtctccaca

SEQ ID NO: 7837 - DNA, 387 bp, Artificial Sequence
  Synthetic polynucleotide encoding artificial human antibody VH domain
gaggtgcagctggtggagtctgggggaggcttggtccagccgggggggtccctgagactcacctgtgcagcctctggattcacctttagtacctattggatgagctgggtccgccaggctccagggaaggggctggagtgggtggccaacataaagcaagatggaagtgagaaatactatgtggactctgtgaagggccgattcaccatctccagagacaacgccaagaactcactgtatctgcaaatgaacagcctgagagccgaggacacggctgtgtattactgtgcgagaaatgtagccgaggccgtttatagcagtggctggtactactactactactacatggacgtctggggcaaagggaccacggtcaccgtctcctca

SEQ ID NO: 7838 - DNA, 369 bp, Artificial Sequence
  Synthetic polynucleotide encoding artificial human antibody VH domain
gaagtgcagctggtggagtctgggggaggcgtggtacagcctggggggtccctgagactctcctgtgcagcctctggattcacctttgatgattatgccatgcactgggtccgtcaagctccagggaagggtctggagtgggtctctcttattagtggggatggtggtagcacatactatgcagactctgtgaagggccgattcaccatctccagagacaacagcaaaaactccctgtatctgcaaatgaacagtctgagaactgaggacaccgccttgtattactgtgccacgaattactatgatagtagcggggcgcccggagtttttgactactggggccagggaaccctggtcaccgtctcctca

SEQ ID NO: 7839 - DNA, 381 bp, Artificial Sequence
  Synthetic polynucleotide encoding artificial human antibody VH domain
caggtgcagctgcgggagtcgggcccaggactggtgaagccttcacagaccctgtccctcacttgcacggtctctggcgactccatcagcaggggcacttactactggaactggatccggcagcccgccgggaagggaccggagtggattgggcgcatctttacccgtgggagcaccaactacaacccctccctcaagagtcgagtcaccatatcagcagacacgtccaacaaccacttctccctgattctgacctctgtgaccgccgcagacacggccgtctatttctgtgcgaggaccccgttttcctatgacagcagtggtttttactatgggttctttgactcctggggccagggaatactggtcaccgtctcgtca

SEQ ID NO: 7840 - DNA, 366 bp, Artificial Sequence
  Synthetic polynucleotide encoding artificial human antibody VH domain
gaggtgcacctggtggagtctgggggaggcttggtccagccgggggggtccctgagactctcctgtgaagcctccggattcacctttagtaggtattggatgaactggatacgccaggctccagggaaggggctggagtgggtggccaagataaagaacgatggaagtgaggaatactatgtcgactctgtgaagggccgattcagcatctccagagataacgccagaagtttactggttctgcaaatgaacagcctgagagccgaggacacggctgtctattactgtgcgagagatggcttgtgggagactggccgaggggggtttgactactggggccagggaaccctggtcaccgtctccgca

SEQ ID NO: 7841 - DNA, 384 bp, Artificial Sequence
  Synthetic polynucleotide encoding artificial human antibody VH domain
caggtgcagctgcaggagtcgggcccaggactggtgaagccttcacagaccctgtccctcacctgctctgtctctggtggccccatcagcagtggtaattactactggagttggatccgccagcccccggggaagggcctggagtggattgggtacatctattacagtgggagcacctacttcaacccgtccctcaagagtcgagtttccatatcagtagacacgtccaagaaccagttctccctgaagctgagctctgtgactgccgcagacacggccgtgtattactgtgccagagttccctttacgatttttgggggggttaactacttctactcctacatggacgtctggggcaaagggaccacggtcaccgtctcctca

SEQ ID NO: 7842 - DNA, 396 bp, Artificial Sequence
  Synthetic polynucleotide encoding artificial human antibody VH domain
caggtccagctggtacagtctggggctgaggtgaagaagcctggggcctcagtgaaggtctcctgcaaggtttccggatacaccctcattgaattatccatgcactgggtgcgacaggctcctggaaaagggcttgagtggatgggaggttttgatcctgaagatggtgaaacaatctacgcacagaagttccagggcagagtcaccatgaccgaggacacatctacagacacagcctacatggagctgagcagcctgagatctgaggacacggccgtgtattactgtgcaacacacccctctgtagtagtaccagctgccagtttcccggagaattactactactactacggtatggacgtctggggccaagggaccacggtcaccgtctcctca

SEQ ID NO: 7843 - DNA, 393 bp, Artificial Sequence
  Synthetic polynucleotide encoding artificial human antibody VH domain
cagatcaccttgaaggagtctggtcctacgctggtgaaacccacacagaccctcacgctgacctgcaccttctctgggttctcactcagcactagtggagtgggtgtgggctggatccgtcagcccccaggaaaggccctggagtggcttgcactcatttattgggatgatgataagcgctacagcccatctctgaagagcaggctcaccatcaccaaggacacctccaaaaaccaggtggtccttacaatgaccaacatggaccctgtggacacagccacatattactgtgcacacagacccacggtggggtattacgatattttgactggttatcgctctcacaactggttcgacccctggggccagggaaccctggtcaccgtctcctca

SEQ ID NO: 7844 - DNA, 366 bp, Artificial Sequence
  Synthetic polynucleotide encoding artificial human antibody VH domain
caggtccagctggtacagtctggggctgaggtgaagaagcctggggcctcagtgaaggtctcctgcaaggtttccggatacaccctcactgaattatccatgcactgggtgcgacaggctcctggaaaagggcttgagtggatgggaggttttgatcctgaagatggtgaaacaatctacgcacagaagttccagggcagagtcaccatgaccgaggacacatctacagacacagcctacatggagctgagcagcctgagatctgaggacacggccgtgtattactgtgcaacagtccctcccggcccagggggggagttatcgttagactactggggccagggaaccctggtcaccgtctcctca

SEQ ID NO: 7845 - DNA, 369 bp, Artificial Sequence
  Synthetic polynucleotide encoding artificial human antibody VH domain
caggtgcagctgcaggagtcgggcccaggactggtgaagccttcacagaccctgtccctcacctgcactgtctctggtggctccatcagcagtggtggttactactggagctggatccgccagcacccagggaagggcctggagtggattgggtacatctattacagtgggagcacctactacaacccgtccctcaagagtcgagttaccatatcagtagacacgtctaagaaccagttctccctgaagctgagctctgtgactgccgcggacacggccgtgtattactgtgcgagatttgcgacatggttcggggagttattcggctttgactactggggccagggaaccctggtcaccgtctcctca

SEQ ID NO: 7846 - DNA, 360 bp, Artificial Sequence
  Synthetic polynucleotide encoding artificial human antibody VH domain
caggtgcagctacagcagtggggcgcaggactgttgaagccttcggagaccctgtccctcacctgcgctgtctatggtgggtccttcagtggttactactggagctggatccgccagcccccagggaaggggctggagtggattggggaaatcaatcatagtggaagcaccaactacaacccgtccctcaagagtcgagtcaccatatcagtagacacgtccaagaaccagttctccctgaagctgagctctgtgaccgccgcggacacggctgtgtattactgtgcgagaggccgcagcatattgtggtggtggccgcttgactactggggccagggaaccctggtcaccgtctcctca

SEQ ID NO: 7847 - DNA, 387 bp, Artificial Sequence
  Synthetic polynucleotide encoding artificial human antibody VH domain
caggtgcagctacagcagtggggcgcaggactgttgaagccttcggagaccctgtccctcacctgcgctgtctatggtgggtccttcagtggttactactggagctggatccgccagcccccagggaaggggctggagtggattggggaaatcaatcatagtggaagcaccaactacaacccgtccctcaagagtcgagtcaccatatcagtagacacgtccaagaaccagttctccctgaagctgagctctgtgaccgccgcggacacggctgtgtattactgtgcgagaggccataggaccgggcggattactatgatagtagtggttattacttcatactggttcgacccctggggccagggaaccctggtcaccgtctcctca

SEQ ID NO: 7848 - DNA, 363 bp, Artificial Sequence
  Synthetic polynucleotide encoding artificial human antibody VH domain
caggtgcagctggtgcagtctggggctgaggtggagaagcctggggcctcagtgaaggtctcctgcaaggcttctggatacaccttcaccggctactatttgcactgggtgcgacaggcccctggacaagggcttgagtggctgggatggatcaaccctaacagtggtggcacaaactatgcacagaagtttcagggcagggtcaccatgaccagggacacgtccatcagcacagcctacatggagctgagcaggctgagatctgacgacacggccgtgtattactgtgcgagaaactcctactatggttcgggccacccgttcgacccctggggccagggaaccctggtcaccgtctcctca

SEQ ID NO: 7849 - DNA, 378 bp, Artificial Sequence
  Synthetic polynucleotide encoding artificial human antibody VH domain
caggtacagctgcagcagtcaggtccaggactggtgaagccctcgcagaccctctcactcacctgtgccatctccggggacagtgtctctagcaacagtgctgcttggaactggatcaggcagtccccatcgagaggccttgagtggctgggaaggacatactacaggtccaagtggtataatgattatgcagtatctgtgaaaagtcgaataaccatcaacccagacacatccaagaaccagttctccctgcagctgaactctgtgactcccgaggacacggctgtgtattactgtgcaagagagactacggtgacttactactactactactacatggacgtctggggcaaagggaccacggtcaccgtctcctca

SEQ ID NO: 7850 - DNA, 381 bp, Artificial Sequence
  Synthetic polynucleotide encoding artificial human antibody VH domain
caggtgcagctgcaggagtcgggcccaggactggtgaagccttcggagaccctgtccctcacctgcactgtctctggtggctccatcagtagttactactggagctggatccggcagcccccagggaagggactggagtggattgggtatatctattacagtgggagcaccaactacaacccctccctcaagagtcgagtcaccatatcagtagacacgtccaagaaccagttctccctgaagctgagctctgtgaccgctgcggacacggccgtgtattactgtgcgagatccggctatctgatcggggagttattatcgtactactactactacggtatggacgtctggggccaagggaccacggtcaccgtctcctca

SEQ ID NO: 7851 - DNA, 366 bp, Artificial Sequence
  Synthetic polynucleotide encoding artificial human antibody VH domain
caggtgcagctgcaggagtcgggcccaggactggtgaagccttcacagaccctgtccctcacctgcactgtctctggtggctccatcagcagtggtagttactactggagctggatccggcagcccgccgggaagggactggagtggattgggcgtatctataccagtgggagcaccaactacaacccctccctcaagagtcgagtcaccatatcagtagacacgtccaagaaccagttctccctgaagctgagctctgtgaccgccgcagacacggccgtgtattactgtgcgagggggggagcggggtactactactactacatggacgtctggggcaaagggaccacggtcaccgtctcctca

SEQ ID NO: 7852 - DNA, 360 bp, Artificial Sequence
  Synthetic polynucleotide encoding artificial human antibody VH domain
gaggtgcagctgttggagtctgggggagacttggtacagcctggggggtccctgagactctcctgtgcagcctctggattcacctttagcagctttgccatgagctgggcccgccaggctccagggaaggggctggcgtgggtctcagcaattagtggtcgtggtgatgacaccaactacgcagactccgtgaagggccggttcaccatctccagagacaattccaagaacacgctgtatctgcaaatgaacagcctgagacccgaggacacggccatatattactgtgcgaagggttcgccgaggatacgggagggacctgactactggggccaggggaccctggtcaccgtctcctca

SEQ ID NO: 7853 - DNA, 396 bp, Artificial Sequence
  Synthetic polynucleotide encoding artificial human antibody VH domain
caggtgcagctggtggagtctgggggaggcgtggtccagcctgggaggtccctgagactctcctgtgcagcgtctggattcaccttcagtagctatggcatgcactgggtccgccaggctccaggcaaggggctggagtgggtggcagttatatggtatgatggaagtaataaatactatgcagactccgtgaagggccgattcaccatctccagagacaattccaagaacacgctgtatctgcaaatgaacagcctgagagccgaggacacggctgtgtattactgtgcgagagatggcccgtattactatgatagtagtggttattactatccccgaccctggaactactacatggacgtctggggcaaagggaccacggtcaccgtctcctca

SEQ ID NO: 7854 - DNA, 369 bp, Artificial Sequence
  Synthetic polynucleotide encoding artificial human antibody VH domain
caggtgcagctggtggagtctgggggaggcgtggtccagcctgggaggtccctgagactctcctgtgcagcctctggattcaccttcagtagctatggcatgcactgggtccgccaggctccaggcaaggggctggagtgggtggcagttatatcatatgatggaagtaataaatactatgcagactccgtgaagggccgattcaccatctccagagacaattccaagaacacgctgtatctgcaaatgaacagcctgagagctgaggacacggctgtgtattactgtgcgaaagacgaatcattactatggttcggggagttacactttgactactggggccagggaaccctggtcaccgtctcctca

SEQ ID NO: 7855 - DNA, 369 bp, Artificial Sequence
  Synthetic polynucleotide encoding artificial human antibody VH domain
caggtccagctcgtgcaatctggggctgaggtgaagaagcctgggtcctcggtgaaggtctcctgcaaggcttctggaggcaccttcagcagctatactttcgcctgggtgcgactggcccctggacaagggcttcagtggatggggaggatcatccctattcttggtgtaatcaactacgcacagaacttcctgggcagagtcacgatttccgcgggcgagtccacgagcacaacctacatggagctgtccagcctgacatctgaagacacggccgtctattactgtgcgagtcccagtccgcgcgatggctacggcgactacgtttatgactattggggccagggaaccctcataaccgtctcctca

SEQ ID NO: 7856 - DNA, 396 bp, Artificial Sequence
  Synthetic polynucleotide encoding artificial human antibody VH domain
caggtgcagctggtggagtctgggggaggcgtggtccagcctgggaggtccctgagactctcctgtgcagcgtctggattcaccttcagtagctatggcatgcactgggtccgccaggctccaggcaaggggctggagtgggtggcagttatatggtatgatggaagtaataaatactatgcagactccgtgaagggccgattcaccatctccagagacaattccaagaacacgctgtatctgcaaatgaacagcctgagagccgaggacacggctgtgtattactgtgcgagagccctgtattactatgatagtagtggttattactccccccccctctactactactacggtatggacgtctggggccaagggaccacggtcaccgtctcctca

SEQ ID NO: 7857 - DNA, 354 bp, Artificial Sequence
  Synthetic polynucleotide encoding artificial human antibody VH domain
gaggtgcagctggtggagtctggaggaggcttggtccagcctggggggtccctgagactctcctgtgcagcctctgggttcaccgtcagtagcaactacatgagctgggtccgccaggctccagggaaggggctggagtgggtctcagttatttatagcggtggtagcacatactacgcagactccgtgaagggccgattcaccatctccagacacaattccaagaacacgctgtatcttcaaatgaacagcctgagagctgaggacacggccgtgtattactgtgcgagagtgcttccttacggtgactactatgactactggggccagggaaccctggtcaccgtctcctca

SEQ ID NO: 7858 - DNA, 384 bp, Artificial Sequence
  Synthetic polynucleotide encoding artificial human antibody VH domain
caggtacagctgcagcagtcaggtccaggactggtgaagccctcgcagaccctctcactcacctgtgccatctccggggacagtgtctctagcaacagtgctgcttggaactggatcaggcagtccccatcgagaggccttgagtggctgggaaggacatactacaggtccaagtggtataatgattatgcagtatctgtgaaaagtcgaataaccatcaacccagacacatccaagaaccagttctccctgcagctgaactctgtgactcccgaggacacggctgtgtattactgtgcaaggaccccccggcagtggctggtactctactactactactacatggacgtctggggcaaagggaccacggtcaccgtctcctca

SEQ ID NO: 7859 - DNA, 360 bp, Artificial Sequence
  Synthetic polynucleotide encoding artificial human antibody VH domain
caggtccagctggtacagtctggggctgaggtgaagaagcctggggcctcagtgaaagtctcctgcagggtttccggagacagcctcactgaattttccatgcactgggtgcgacaggctcctggaatagggcttgagtggatgggaagttttgatcctttagatggtgaatcaatctacgcacagaagttccaagacagaatcaccatgaccgaggacacatctacagacacagcctacatggaactaaacagcctgagatctgacgacacggccgtgtattattgtgcaatagatctctcgcgtttgggggacttatcgaggacctggggccagggaacccaggtcaccgtctcctca

SEQ ID NO: 7860 - DNA, 375 bp, Artificial Sequence
  Synthetic polynucleotide encoding artificial human antibody VH domain
caggtgcagttggtgcagtctgggactgaggtgaagaagcctggggcctcagtgaaggtctcctgcaaggcttctggatacaccttcaccacctatgacattacctgggtgcggcaggcccctggacaagggcttgagtggttgggatggatgaaccctaaaagtggaagcacagcgtttgcagagaggttccagggcagagtcatcctgaccaggaacacctccataaatacagcctacatggaggtgaccagcctgacgtctcaggacacggccgtctactactgtgcgagatttcggagcgttccgggagtccgccccgcttcgtactactgtgacttctgggcccagggaacccaggtcattgtctcctca

SEQ ID NO: 7861 - DNA, 354 bp, Artificial Sequence
  Synthetic polynucleotide encoding artificial human antibody VH domain
caggtgcagctggtggagtctgggggaggcgtggtccagcctgggacgtccctgagactctcctgtgccgcgtctggattcaccttcagtaactatggcatgtactgggtccgccaggctccaggcaaggggctggagtgggtggcagctatatggtatgatggaagtattaaatactatacagactccgtgaagggccgattcacaatcgccagagacaattccaagaacacgctgtatctgcaaatgaacagcctgagagccgaggacacggctgtgttttactgtgcgaggagttcagcagcgactgcttttgatatctggggccaagggacaatggtcagcgtctcttca

SEQ ID NO: 7862 - DNA, 360 bp, Artificial Sequence
  Synthetic polynucleotide encoding artificial human antibody VH domain
gaggtgcagctggtggactctgggggaggcttggtacagcctggagggtccctgagactctcctgtgcagcctctggattcaccttcagtagttatgaaatgaactgggtccgccaggctccagggaaggggctggagtggatttcatacattaatgctcgtggtaatagtaaatactacgcagactctgtgaagggccgattcaccgtctccagagacaacgccgagaactcactgtatctgcaaatgtacagcctgagagccgaggacacggctgtttattactgtgcgagagaggtgaaagtaacgcccgatgcttttgatatctggggccaagggacattggtcaccgtctcttca

SEQ ID NO: 7863 - DNA, 363 bp, Artificial Sequence
  Synthetic polynucleotide encoding artificial human antibody VH domain
gaggtgcagctgttggagtctgggggaggcttggtacagcctggggggtccctgagactctcctgtgcagcctctagattcacctttagcagctatgccatgagctgggtccgccaggctccagggaaggggctggagtgggtctcagctattagtggtagtggtggtagcacatactacgcagactccgtgaagggccggttcaccatctccagagacaattccaagaacacgctgtatctgcaaatgaacagcctgagagccgaggacacggccgtatattactgtgcgaaagcccagactattgtactaatggtgtatgctattgactggggccagggaaccctggtcaccgtctcctca

SEQ ID NO: 7864 - DNA, 372 bp, Artificial Sequence
  Synthetic polynucleotide encoding artificial human antibody VH domain
cagctgcagctgcaggagtcgggcccaggactggtgaagccttcggagaccctgtccctcacctgcactgtctctggtggctccatcagcagtagtagttactactggggctggatccgccagcccccagggaaggggctggagtggattgggagtatctattatagtgggagcacctactacaacccgtccctcaagagtcgagtcaccatatccgtagacacgtccaagaaccagttctccctgaagctgagctctgtgaccgccgcagacacggctgtgtattactgtgcgagaaaagaggcggtggcagtggctggtctctactactttgactactggggccagggaaccctggtcaccgtctcctca

SEQ ID NO: 7865 - DNA, 387 bp, Artificial Sequence
  Synthetic polynucleotide encoding artificial human antibody VH domain
caggtgcagctgcaggagtcgggcccaggactggtgaagccttcacagaccctgtccctcacctgcactgtctctggtggctccatcagcagtggtagttactactggagctggatccggcagcccgccgggaagggactggagtggattgggcgtatctataccagtgggagcaccaactacaacccctccctcaagagtcgagtcaccatatcagtagacacgtccaagaaccagttctccctgaagctgagctctgtgaccgccgcagacacggccgtgtattactgtgcgagagagaggggccagagatggctacaattaaaggactactactactactacatggacgtctggggcaaagggaccacggtcaccgtctcctca

SEQ ID NO: 7866 - DNA, 363 bp, Artificial Sequence
  Synthetic polynucleotide encoding artificial human antibody VH domain
caggtgcagctggtgcagtctggggctgaggtgaagaagcctggggcctcagtgaaggtctcctgcaaggcttctggatacaccttcaccagttatgatctcaactgggtgcgacaggcccctggacaagggcttgagtggatgggatggatgaaccctaacagtggtgacacaggctatgcacagaagttccagggcagagtcaccatgaccagggacacctccataagcacagcctacatggagctgagcagcctgagatctgaggacacggccgtgtattactgtgcgagagagacacggggatatagcagtggctggtctgactactggggccagggaaccctggtcaccgtctcctca

SEQ ID NO: 7867 - DNA, 357 bp, Artificial Sequence
  Synthetic polynucleotide encoding artificial human antibody VH domain
gaggtgcaactgttggagtctgggggaggcttgttcccgcctggggggtccctgagactctcctgtgcagcctctggattcttccttaggggtcgtggcttagcttgggtccgccaggctccagggaagggactcgagtgggtctcgaccattagtggtgatggcaaaagtactcattatgcagactccgtgcagggccgcttcaccgtctccagagacaactccagaaatatcgtgtttttacagatggacagcctcagagccgaggacacggccgaatatttctgtgcgactgacgcgggcaccagttggccttttttctattggggccaggggaccctggtcaccgtctcttca

SEQ ID NO: 7868 - DNA, 360 bp, Artificial Sequence
  Synthetic polynucleotide encoding artificial human antibody VH domain
gaggtgcacctggtggagtctgggggaggcttggtacagcctggagggtccctgagactctcctgtgcagcctctggattcaccttcagtagttatgaaatgaactgggtccgccaggctccagggaaggggctggagtggcttgcatacattagaagtagcaggagtgccatatactacacagactctgtgaagggccgattcaccgtctccatagacaacgccaaggactcactgtatctgcaaatgaacagcctgagagccgaggacacggctgtttattactgtgcgagagaaatcacggtgacgcccgatgcttttgatatctggggccaagggacaatggtcaccgtctcttca

SEQ ID NO: 7869 - DNA, 360 bp, Artificial Sequence
  Synthetic polynucleotide encoding artificial human antibody VH domain
caggtgcagctggtggagtctgggggaggcgtggtccagcctgggaggtccctgagactctcctgtgcagcctctggattcaccttcagtagctatggcatgcactgggtccgccaggctccaggcaaggggctggagtgggtggcagttatatcatatgatggaagtaataaatactatgcagactccgtgaagggccgattcaccatctccagagacaattccaagaacacgctgtatctgcaaatgaacagcctgagagctgaggacacggctgtgtattactgtgcgaaagatgacgattactatgataaagttatggacgtctggggccaagggaccacggtcaccgtctcctca

SEQ ID NO: 7870 - DNA, 369 bp, Artificial Sequence
  Synthetic polynucleotide encoding artificial human antibody VH domain
gaggtggagctggtggagtctggaggaggcctggtccagccgggggggtccctgagactctcctgtgcagcctctgggttcaccgtcagtagcaactacatgagctgggtccgccaggctccagggaaggggctggagtgggtctcagtcatttatagcggtgggagtacatattatgcagactccgtgaagggccgattcaccatctccagacacaattccaagaacacgctgtatcttcaaatgaacagcctgagatctgaggacacggccgtgtatttctgtgcgagagatcctataaccagcagtggcaactactgggggtcttttgactactggggccagggagccctggtcaccgtctcctca

SEQ ID NO: 7871 - DNA, 357 bp, Artificial Sequence
  Synthetic polynucleotide encoding artificial human antibody VH domain
caggtcaccttgagggagtctggtcctgcgctggtgaaacccacacagaccctcacactgacctgcaccttctctgggttctcactcagcactagtggaatgtgtgtgagctggatccgtcagcccccagggaaggccctggagtggcttgcacgcattgattgggatgatgataaatactacagcacatctctgaagaccaggctcaccatctccaaggacacctccaaaaaccaggtggtccttacaatgaccaacatggaccctgtggacacagccacgtattactgtgcacggatctatggttcggggatacctgactactggggccagggaaccctggtcaccgtctcctca

SEQ ID NO: 7872 - DNA, 387 bp, Artificial Sequence
  Synthetic polynucleotide encoding artificial human antibody VH domain
caggtgcaactacagcactggggcgcaggactgttgaagccttcggagaccctgtccctcacctgcggtgtgtctggtgggcccttcagtgattcctactggaactggatccgccagcccccagggaaggggctggagtggattggggaaatcagtcctagtggagacaccagctacaacccgtccctcgggagccgggtcaccatatcagtagacacgtccaagagtcagttctccctgaggctgacccctctgaccgccgcggacacggctgtgtattactgtgcgcgaggcgcccggcaattatataggagtggctggttcgaatactactactactactacatggacgtctgggacacagggaccacggtcaccgtctcctca

SEQ ID NO: 7873 - DNA, 381 bp, Artificial Sequence
  Synthetic polynucleotide encoding artificial human antibody VH domain
cagctgcagctgcaggagtcgggcccaggactggtgaagccttcggagaccctgtccctcacctgcactgtctctggtggctccatcagcagtagtagttactactggggctggatccgccagcccccagggaaggggctggagtggattgggagtatctattatagtgggagcacctactacaacccgtccctcaagagtcgagtcaccatatccgtagacacgtccaagaaccagttctccctgaagctgagctctgtgaccgccgcagacacggctgtgtattactgtgcgagaatgaaatttattactatgatagtagtggttacccgcgaagggttcgacccctggggccagggaaccctggtcaccgtctcctca

SEQ ID NO: 7874 - DNA, 366 bp, Artificial Sequence
  Synthetic polynucleotide encoding artificial human antibody VH domain
caggtgcagctggtggagtctgggggaggcgtggtccagcctgggaggtccctgagactctcctgtgcagcgtctggattcaccttcagtagctatggcatgcactgggtccgccaggctccaggcaaggggctggagtgggtggcagttatatggtatgatggaagtaataaatactatgcagactccgtgaagggccgattcaccatctccagagacaattccaagaacacgctgtatctgcaaatgaacagcctgagagccgaggacacggctgtgtattactgtgcgagtgaccttgggagctacggaggatttgagtacttcgatctctggggccgtggcaccctggtcactgtctcctca

SEQ ID NO: 7875 - DNA, 378 bp, Artificial Sequence
  Synthetic polynucleotide encoding artificial human antibody VH domain
gaggtgcagctggtggagtctgggggaggcttggtacagcctggagggtccctgagactctcctgtgcagcctctggattcaccttcagtaattatgaaatgaactgggtccgccaggctccagggaaggggctggagtgggtttcatacattagtagtagtggtagtgccatatactacgcagactctgtgaagggccgattcaccatctccagagacaacgccaagaactcactgtatgtgcaaatgaacagcctgagagccgaggacacggctatttattattgtgcgagagatgctcggtttttctatgatagtagtggttactcgaatgcttttgatatctggggccaagggacaatggtcaccgtctcttca

SEQ ID NO: 7876 - DNA, 378 bp, Artificial Sequence
  Synthetic polynucleotide encoding artificial human antibody VH domain
caggtgcagctggtgcagtctggggctgaggtgaagaagcctggggcctcagtgaaggtttcctgcaaggcatctggatacaccttcaccagctactatatgcactgggtgcgacaggcccctggacaagggcttgagtggatgggaataatcaaccctagtggtggtagcacaagctacgcacagaagttccagggcagagtcaccatgaccagggacacgtccacgagcacagtctacatggagctgagcagcctgagatctgaggacacggccgtgtattactgtgcgagacgagattactatgatagtagtggttattaccccggctacggtatggacgtctggggccaagggaccacggtcaccgtctcctca

SEQ ID NO: 7877 - DNA, 354 bp, Artificial Sequence
  Synthetic polynucleotide encoding artificial human antibody VH domain
cagatcaccttgaaggagtctggtcctacgctggtgaaacccacacagaccctcacgctgacctgcaccttctctgggttctcactcagtactagtggagtgggtgtgggctggatccgtcagcccccaggaaaggccctggagtttcttacactcatttattgggatggagataagcgctacaacccatctctgatgcgcaggctcgccatcaccaaggacacctccaaaaaccaggtggtccttacaatgaccagcatggaccctgtggacacagccacttatttctgtgcacaccttaccaatcgggatatagactactggggccagggaaccctggtcaccgtctcctca

SEQ ID NO: 7878 - DNA, 363 bp, Artificial Sequence
  Synthetic polynucleotide encoding artificial human antibody VH domain
caggtgcagctggtggagtctgggggaggcgtggtccagcctgggaggtccctgagactctcctgtgcagcctctggattcaccttcagtagctatgctatgcactgggtccgccaggctccaggcaaggggctggagtgggtggcagttatatcatatgatggaagcaataaatactacgcagactccgtgaagggccgattcaccatctccagagacaattccaagaacacgctgtatctgcaaatgaacagcctgagagctgaggacacggctgtgtattactgtgcgaggtcgtatagtgggagctaccgaggggcttttgatatctggggccaagggacaatggtcaccgtctcttca

SEQ ID NO: 7879 - DNA, 363 bp, Artificial Sequence
  Synthetic polynucleotide encoding artificial human antibody VH domain
caggtgcagctggtggagtctgggggaggcgtggtccagcctgggaggtccctgagactctcctgtgcagtctctggattcaccttcaacagctatgccatgcactgggtccgccaggctccaggcaaggggctggagtgggtggcaaatatatataatgatggaagtaacaaacgctatgcagactccgtgaagggccgattcaccatctccagagacaattcaaagaacacgctgtatctgcaaatggacagcctgagagctgaggacacggccatgtattactgtgcgaaagatgagagggcgcgaggtggctgggcttttgaccactggggccagggaaccctggtcaccgtctcctca

SEQ ID NO: 7880 - DNA, 369 bp, Artificial Sequence
  Synthetic polynucleotide encoding artificial human antibody VH domain
caggtgcagctgcaggagtcgggcccaggactggtgaagccctcacagaccctgtccctcacctgcgccgtctctggtggctccatcagcagtggtgattactattggagttggatccgccagcccccagggaagggcctggagtggattgggtacatcttttacagtgggagcaccatctacaacccgtccctcaagagtcgagttaccatatcagtagatacgtccaagaaccagttctccctgaggctgaactctgtgactgccgcagacacggccgtatattactgtgccagatctactagtggctggacctcagaaatctacattgactactggggccagggaaccctggtcaccgtctcctca

SEQ ID NO: 7881 - DNA, 372 bp, Artificial Sequence
  Synthetic polynucleotide encoding artificial human antibody VH domain
caggtgcagctggtggagtctgggggaggcgtggtccagcctgggaggtccctgagactctcctgtgtagcgtctggattcacgttcagtacctatggcatgcactgggtccgccaggctccaggcaaggggctggagtgggtggcagttatatggtatgatggaagtaataaatactatgcagactccgtgaagggccgattcaccatctccagagacaattccaagaacacgctgtatctgcaaatgaacagcctgagagccgaggacacggctgtgtattactgtgcgagaagggaggccgaagatagagctatggccccctcccactttgactactggggccagggaaccctggtcaccgtctcctca

SEQ ID NO: 7882 - DNA, 363 bp, Artificial Sequence
  Synthetic polynucleotide encoding artificial human antibody VH domain
caggtccagctggtacagtctggggctgaggtgaagaagcctggggcctcagtgaaggtctcctgcaaggtttccggatacaccctcactgaattatccatgcactgggtgcgacaggctcctggaaaagggcttgagtggatgggaggttttgatcctgaagatggtgaaacaatctacgcacagaagttccagggcagagtcaccatgaccgaggacacatctacagacacagcctacatggagctgagcagcctgagatctgaggacacggccgtgtattactgtgcaacaacggcagtggctggtagagtgaactggttcgacccctggggccagggaaccctggtcaccgtctcctca

SEQ ID NO: 7883 - DNA, 360 bp, Artificial Sequence
  Synthetic polynucleotide encoding artificial human antibody VH domain
gaggtgcagctggtggagtctgggggaggcttggtacagcctggagggtccctgagactctcctgtgcagcctctggattcaccttcagtagttatgaaatgaactgggtccgccaggctccagggaaggggctggagtgggtttcatacattagtagtagtggtagtaccatatactacgcagactctgtgaagggccgattcaccatctccagagacaacgccaagaactcactgtatctgcaaatgaacagcctgagagccgaggacacggctgtttattactgtgcgagattcggtgggagctactacggggggtttgactactggggccagggaaccctggtcaccgtctcctca

SEQ ID NO: 7884 - DNA, 372 bp, Artificial Sequence
  Synthetic polynucleotide encoding artificial human antibody VH domain
caggtgcagctgcaggagtcgggcccaggactggtgaagccttcacagaccctgtccctcacctgcactgtctctggtggctccatcagcagtggtggttactactggagctggatccgccagcacccagggaagggcctggagtggattgggtacatctattacagtgggagcacctactacaacccgtccctcaagagtcgagttaccatatcagtagacacgtctaagaaccagttctccctgaagctgagctctgtgactgccgcggacacggccgtgtattactgtgcgaggacgtattacgatattttgactgggaatttttggttcgacccctggggccagggaaccctggtcaccgtctcctca

SEQ ID NO: 7885 - DNA, 372 bp, Artificial Sequence
  Synthetic polynucleotide encoding artificial human antibody VH domain
caggtcaccttgagggagtctggtcctgcgctggtgaaacccacacagaccctcacactgacctgcaccttctctgggttctcactcagcactagtggaatgtgtgtgagctggatccgtcagcccccagggaaggccctggagtggcttgcacgcattgattgggatgatgataaatactacagcacatctctgaagaccaggctcaccatctccaaggacacctccaaaaaccaggtggtccttacaatgaccaacatggaccctgtggacacagccacgtattactgtgcacggatgtattacgatattttgactggttatttccaggaggactactggggccagggaaccctggtcaccgtctcctca

SEQ ID NO: 7886 - DNA, 375 bp, Artificial Sequence
  Synthetic polynucleotide encoding artificial human antibody VH domain
cagatcaccttgaaggagtctggtcctacgctggtgaaacccacacagaccctcacgctgacctgcaccttctctgggttctcactcagcactagtggagtgggtgtgggctggatccgtcagcccccaggaaaggccctggagtggcttgcactcatttattgggatgatgataagcgctacagcccatctctgaagagcaggctcaccatcaccaaggacacctccaaaaaccaggtggtccttacaatgaccaacatggaccctgtggacacagccacatattactgtgcacacagttgtagtggtggtagctgctactactcaccggggttcgacccctggggccagggaaccctggtcaccgtctcctca

SEQ ID NO: 7887 - DNA, 366 bp, Artificial Sequence
  Synthetic polynucleotide encoding artificial human antibody VH domain
caggtgcagctggtggagtctgggggaggcgtggtccagcctgggaggtccctgagactctcctgtgcagcctctggattcaccttcagtagctatggcatgcactgggtccgccaggctccaggcaaggggctggagtgggtggcagttatatcatatgatggaagtaataaatactatgcagactccgtgaagggccgattcaccatctccagagacaattccaagaacacgctgtatctgcaaatgaacagcctgagagctgaggacacggctgtgtattactgtgcgaaagatgcggaatacagctatggtaacccaggtatggacgtctggggccaagggaccacggtcaccgtctcctca

SEQ ID NO: 7888 - DNA, 366 bp, Artificial Sequence
  Synthetic polynucleotide encoding artificial human antibody VH domain
caggtgcagctgcaggagtcgggcccaggactggtgaagccttcggagaccctgtccctcacctgcactgtctctggtggctccatcagtagttactactggagctggatccggcagcccgccgggaagggactggagtggattgggcgtatctataccagtgggagcaccaactacaacccctccctcaagagtcgagtcaccatgtcagtagacacgtccaagaaccagttctccctgaagctgagctctgtgaccgccgcggacacggccgtgtattactgtgcgagagacttagggcagtggctggggtactactggtacttcgatctctggggccgtggcaccctggtcactgtctcctca

SEQ ID NO: 7889 - DNA, 369 bp, Artificial Sequence
  Synthetic polynucleotide encoding artificial human antibody VH domain
caggtgcagctgcaggagtcgggcccaggactggtgaagccttcggggaccctgtccctcacctgcgctgtctctggtggctccatcagcagtagtaactggtggagttgggtccgccagcccccagggaaggggctggagtggattggggaaatctatcatagtgggagcaccaactacaacccgtccctcaagagtcgagtcaccatatcagtagacaagtccaagaaccagttctccctgaagctgagctctgtgaccgccgcggacacggccgtgtattactgtgcgagagcctacacagctatggttactggtgcctactacatggacgtctggggcaaagggaccacggtcaccgtctcctca

SEQ ID NO: 7890 - DNA, 381 bp, Artificial Sequence
  Synthetic polynucleotide encoding artificial human antibody VH domain
caggtgcagctggtgcagtctggggctgaggtgaagaagcctggggcctcagtgaaggtttcctgcaaggcatctggatacaccttcaccagctactatatgcactgggtgcgacaggcccctggacaagggcttgagtggatgggaataatcaaccctagtggtggtagcacaaactacgcacagaagttccagggcagaatcaccatgaccagggacacgtccacgagcacagtctacatggagctgagcagcctgagatctgaggacacggccgtgtattactgtgcgagagattgggaggggcggcttggtttggcgatagtagacgcgggctactttgactactggggccagggaaccctggtcaccgtctcctca

SEQ ID NO: 7891 - DNA, 366 bp, Artificial Sequence
  Synthetic polynucleotide encoding artificial human antibody VH domain
caggtccagctggtacagtctggggctgaggtgaagaagcctggggcctcagtgaaggtctcctgcaaggtttccggatacaccctcactgaattatccatgcactgggtgcgacaggctcctggaaaagggcttgagtggatgggaggttttgatcctgaagatggtgaaacaatctacgcacagaagttccagggcagagtcaccatgaccgaggacacatctacagacacagcctacatggagctgagcagcctgagatctgaggacacggccgtgtattactgtgcaacaggtcccgttataactggaactatggactggttcgacccctggggccagggaaccctggtcaccgtctcctca

SEQ ID NO: 7892 - DNA, 372 bp, Artificial Sequence
  Synthetic polynucleotide encoding artificial human antibody VH domain
gaggtgcagctggtggagtctgggggaggcttggtccagcctggggggtccctgaaactctcctgtgcagcctctgggttcaccttcagtggctctgctgtgcactgggtccgccaggcttccgggaaagggctggagtgggttggccgtattcgaatcaaagccaacgcttacgcgacagcatatgctgcgtcggtgaaaggcaggttcaccatctccagagatgattcaaacaacacggcgtatttgcaaatgaacagcctccaaaccgaggacacggccgtctattactgtactagacgccctgaagaatattgtggtggtgactgctacattccctggggccagggaaccctggtcaccgtctcctca

SEQ ID NO: 7893 - DNA, 384 bp, Artificial Sequence
  Synthetic polynucleotide encoding artificial human antibody VH domain
caggtgcagctggtggagtctgggggaggcttggtcaagcctggagggtccctgagactctcctgtgcagcctctggattcaccttcagtgactactacatgagctggatccgccaggctccagggaaggggctggagtgggtttcatacattagtagtagtggtagtaccatatactacgcagactctgtgaagggccgattcaccatctccagggacaacgccaagaactcactgtatctgcaaatgaacagcctgagagccgaggacacggccgtgtattactgtgcgagagataagacaaccaagcagtggctggtacttgtcgactactactacggtatggacgtctggggccaagggaccacggtcaccgtctcctca

SEQ ID NO: 7894 - DNA, 381 bp, Artificial Sequence
  Synthetic polynucleotide encoding artificial human antibody VH domain
gaggtgcagctggtgcagtctggaggagaggtgaaaaagcccggggagtctctgaagatctcctgtaaggcttctggatacatatttactaagtactggatcggctgggtgcgccagatgcccgggaaaggcctggagtggatggggatcatctatcctgacgactctgatactagatatagtccgtccttccaaggccaggtcaccatttcagccgacaagtccatctccaccgcctacttacagtggaccagcctgaaggcctccgacaccgccatgtattactgtgcgaggtcccttgatagcggtggctggggggggacctacaactactacggtatggacgtctggggccaagggaccgcggtcaccgtctcctca

SEQ ID NO: 7895 - DNA, 387 bp, Artificial Sequence
  Synthetic polynucleotide encoding artificial human antibody VH domain
caggtgcagctggtgcagtctggggctgaggtgaagaagcctggggcctcagtgaaggtctcctgcaaggcttctggatacaccttcaccggctactatatgcactgggtgcgacaggcccctggacaagggcttgagtggatgggatggatcaaccctaacagtggtggcacaaactatgcacagaagtttcagggcagggtcaccatgaccagggacacgtccatcagcacagcctacatggagctgagcaggctgagatctgacgacacggccgtgtattactgtgcgagagatccccccttgtattactatggttcggggagttaccaatactactacggtatggacgtctggggccaagggaccacggtcaccgtctcctca

SEQ ID NO: 7896 - DNA, 354 bp, Artificial Sequence
  Synthetic polynucleotide encoding artificial human antibody VH domain
caggtggaggtggtggagtctgggggaggcgtggtccagcctgagacgtccctgagactctcctgtacagcctctggattccacttcagtggcactgacatgcactgggtccgccagggtccaggcaagggactggaatgggtggcagtgatctcttttgacggaagtaccagagtctatgcagactctgtgcagggtcgattcaccatctccagagacaattccgagaacatggtgtatctgcaaatgaacaacctgagacgtgaggacacggctgtctattactgtgtgagggcagccttagatgatgctttggatgtctggggccaagggacagtcgtcaccgtctcttca

SEQ ID NO: 7897 - DNA, 363 bp, Artificial Sequence
  Synthetic polynucleotide encoding artificial human antibody VH domain
caggtccagctggtacagtctggggctgaggtgaagaagcctggggcctcagtgaaggtctcctgcaaggtttccggatacaccctcactgaattatccatgcactgggtgcgacaggctcctggaaaagggcttgagtggatgggaggttttgatcctgaagatggtgaaacaatctacgcacagaagttccagggcagagtcaccatgaccgaggacacatctacagacacagcctacatggagctgagcagcctgagatctgaggacacggccgtgtattactgtgcaacatctcccgggtatagcacagagaactggttcgacccctggggccagggaaccctggtcaccgtctcctca

SEQ ID NO: 7898 - DNA, 378 bp, Artificial Sequence
  Synthetic polynucleotide encoding artificial human antibody VH domain
caggtgcagctggtggagtctgggggaggcgtggtccagcctgggaggtccctgagactctcctgtgcagcctctggattcaccttcagtagctatgctatgtactgggtccgccaggctccaggcaaggggctggagtgggtggcagttatatcatatgatggaagcaataaatactacgcagactccgtgaagggccgattcaccatctccagagacaattccaagaacacgctgtatctgcaaatgaacagcctgagagctgaggacacggctgtgtattactgtgcgagagaggacgtattacgatattttgactggtacccctggagctggttcgacccctggggccagggaaccctggtcaccgtctcctca

SEQ ID NO: 7899 - DNA, 384 bp, Artificial Sequence
  Synthetic polynucleotide encoding artificial human antibody VH domain
caggtgcagctggtggagtctgggggaggcgtggtccagcctgggaggtccctgagactctcctgtgcagcctctggattcaccttcagtagctatggcatgcactgggtccgccaggctccaggcaaggggctggagtgggtggcagttatatcatatgatggaagtaataaatactatgcagactccgtgaagggccgattcaccatctccagagacaattccaagaacacgctgtatctgcaaatgaacagcctgagagctgaggacacggctgtgtattactgtgcgaaagtcgcggggcattactatgatagtagtggttattactacgagggcggtatggacgtctggggccaagggaccacggtcaccgtctcctca

SEQ ID NO: 7900 - DNA, 381 bp, Artificial Sequence
  Synthetic polynucleotide encoding artificial human antibody VH domain
gaggtgcagctggtggagtctgggggaggcttggtccagcctggggggtccctgagactctcctgtgcagcctctggattcacctttagtagctattggatgagctgggtccgccaggctccagggaaggggctggagtgggtggccaacataaagcaagatggaagtgagaaatactatgtggactctgtgaagggccgattcaccatctccagagacaacgccaagaactcactgtatctgcaaatgaacagcctgagagccgaggacacggctgtgtattactgtgcgagagattgtagtaccagctgcatccaggccaactactactactacggtatggacgtctggggccaagggaccacggtcaccgtctcctca

SEQ ID NO: 7901 - DNA, 375 bp, Artificial Sequence
  Synthetic polynucleotide encoding artificial human antibody VH domain
cagctgcagctgcaggagtcgggcccaggactggtgaagccttcggagaccctgtccctcacctgcactgtctctggtggctccatcagcagtagtagttactactggggctggatccgccagcccccagggaaggggctggagtggattgggagtatctattatagtgggagcacctactacaacccgtccctcaagagtcgagtcaccatatccgtagacacgtccaagaaccagttctccctgaagctgagctctgtgaccgccgcagacacggctgtgtattactgtgcgagacatagacggcagtggctggtacggacgcctgatgcttttgatatctggggccaagggacaatggtcaccgtctcttca

SEQ ID NO: 7902 - DNA, 387 bp, Artificial Sequence
  Synthetic polynucleotide encoding artificial human antibody VH domain
caggtgcagctggtggagtctgggggaggcttggtcaagcctggagggtccctgagactctcctgtgcagcctctggattcaccttcagtgactactacatgagctggatccgccaggctccagggaaggggctggagtgggtttcatacattagtagtagtggtagtaccatatactacgcagactctgtgaagggccgattcaccatctccagggacaacgccaagaactcactgtatctgcaaatgaacagcctgagagccgaggacacggccgtgtattactgtgcgagagagctcaaaacgtattacgatattttgactggttatcggcgactttacggtatggacgtctggggccaagggaccacggtcaccgtctcctca

SEQ ID NO: 7903 - DNA, 399 bp, Artificial Sequence
  Synthetic polynucleotide encoding artificial human antibody VH domain
caggtccagctggtacagtctggggctgaggtgaagaagcctggggcctcagtgaaggtctcctgcaaggtttccggatacaccctcactgaattatccatgcactgggtgcgacaggctcctggaaaagggcttgagtggatgggaggttttgatcctgaagatggtgaaacaatctacgcacagaagttccagggcagagtcaccatgaccgaggacacatctacagacacagcctacatggagctgagcagcctgagatctgaggacacggccgtgtattactgtgcaaccgcgccccccgtcgctcccctaaaggattacgatattttgactggttacctttactactacggtatggacgtctggggccaagggaccacggtcaccgtctcctca

SEQ ID NO: 7904 - DNA, 363 bp, Artificial Sequence
  Synthetic polynucleotide encoding artificial human antibody VH domain
caggtgcagctgcaggagtcgggcccaggactggtgaagccttcggggaccctgtccctcacctgcgctgtctctggtggctccatcagcagtagtaactggtggagttgggtccgccagcccccagggaaggggctggagtggattggggaaatctatcatagtgggagcaccaactacaacccgtccctcaagagtcgagtcaccatatcagtagacaagtccaagaaccagttctccctgaagctgagctctgtgaccgccgcggacacggccgtgtattactgtgcgagattgggagggcatggagtgggagccccttttgactactggggccagggaaccctggtcaccgtctcctca

SEQ ID NO: 7905 - DNA, 351 bp, Artificial Sequence
  Synthetic polynucleotide encoding artificial human antibody VH domain
gaggtgcagctggtggagtctgggggaggcttggtccagcctggggggtccctgagactctcctgtgcagcctctggattcaccgtcagtagcaactacatgagctgggtccgccaggctccagggaaggggctggagtgggtctcagttatttatagcggtggtagcacatactacgcagactccgtgaagggccgattcaccatctccagagacaattccaagaacacgctgtatcttcaaatgaacagcctgagagctgaggacacggctgtgtattactgtgcgagagactacggtgactactactttgactactggggccagggaaccctggtcaccgtctcctca

SEQ ID NO: 7906 - DNA, 381 bp, Artificial Sequence
  Synthetic polynucleotide encoding artificial human antibody VH domain
cagctgcagctgcaggagtcgggcccaggactggtgaagccttcggagaccctgtccctcacctgcactgtctctggtggctccatcagcagtagtagttactactggggctggatccgccagcccccagggaaggggctggagtggattgggagtatctattatagtgggagcacctactacaacccgtccctcaagagtcgagtcaccatatccgtagacacgtccaagaaccagttctccctgaagctgagctctgtgaccgccgcagacacggctgtgtattactgtgcgagacattacggtactatgatagtagtggttattactccatactactttgactactggggccagggaaccctggtcaccgtctcctca

SEQ ID NO: 7907 - DNA, 366 bp, Artificial Sequence
  Synthetic polynucleotide encoding artificial human antibody VH domain
gaggtgcagctgttggagtctgggggaggcttggtacagcctggggggtccctgagactctcctgtgcagcctctggattcacctttagcagctatgccatgagctgggtccgccaggctccagggaaggggctggagtgggtctcagctattagtggtagtggtggtagcacatactacgcagactccgtgaagggccggttcaccatctccagagacaattccaagaacacgctgtatctgcaaatgaacagcctgagagccgaggacacggccgtatattactgtgcgacccccagggaggcgatagtagtggttaccgcctttgactactggggccagggaaccctggtcaccgtctcctca

SEQ ID NO: 7908 - DNA, 372 bp, Artificial Sequence
  Synthetic polynucleotide encoding artificial human antibody VH domain
caggtccagctggtacagtctggggctgaggtgaagaagcctggggcctcagtgaaggtctcctgcaaggtttccggatacaccctcactgaattatccatgcactgggtgcgacaggctcctggaaaagggcttgagtggatgggaggttttgatcctgaagatggtgaaacaatctacgcacagaagttccagggcagagtcaccatgaccgaggacacatctacagacacagcctacatggagctgagcagcctgagatctgaggacacggccgtgtattactgtgcaacaacatccccatttcggggagtcccgaatttgaactggttcgacccctggggccagggaaccctggtcaccgtctcctca

SEQ ID NO: 7909 - DNA, 378 bp, Artificial Sequence
  Synthetic polynucleotide encoding artificial human antibody VH domain
caggtcaccttgaaggagtctggtcctgtgctggtgaaacccacagagaccctcacgctgacctgcaccgtctctgggttctcactcagcaatgctagaatgggtgtgagctggatccgtcagcccccagggaaggccctggagtggcttgcacacattttttcgaatgacgaaaaatcctacagcacatctctgaagagcaggctcaccatctccaaggacacctccaaaagccaggtggtccttaccatgaccaacatggaccctgtggacacagccacatattactgtgcacggatggggaggagatggctacaattaaggccctctcactactttgactactggggccagggaaccctggtcaccgtctcctca

SEQ ID NO: 7910 - DNA, 384 bp, Artificial Sequence
  Synthetic polynucleotide encoding artificial human antibody VH domain
gaggtgcagctggtggagtctgggggaggcttggtacagccagggcggtccctgagactctcctgtacagcttctggattcacctttggtgattatgctatgagctgggtccgccaggctccagggaaggggctggagtgggtaggtttcattagaagcaaagcttatggtgggacaacagaatacgccgcgtctgtgaaaggcagattcaccatctcaagagatgattccaaaagcatcgcctatctgcaaatgaacagcctgaaaaccgaggacacagccgtgtattactgtactagagaggacggatgtactaatggtgtatgctatatatcgaacgtctttgactactggggccagggaaccctggtcaccgtctcctca

SEQ ID NO: 7911 - DNA, 366 bp, Artificial Sequence
  Synthetic polynucleotide encoding artificial human antibody VH domain
cagatcaccttgaaggagtctggtcctacgctggtgaaacccacacagaccctcacgctgacctgcaccttctctgggttctcactcagcactagtggagtgggtgtgggctggatccgtcagcccccaggaaaggccctggagtggcttgcactcatttattgggatgatgataagcgctacagcccatctctgaagagcaggctcaccatcaccaaggacacctccaaaaaccaggtggtccttacaatgaccaacatggaccctgtggacacagccacatattactgtgcacacagacggggcctatggttcggggagttttttgactactggggccagggaaccctggtcaccgtctcctca

SEQ ID NO: 7912 - DNA, 357 bp, Artificial Sequence
  Synthetic polynucleotide encoding artificial human antibody VH domain
caggtgcagctgcaggagtcgggcccaggactggtgaagccttcggagaccctgtccctcacctgctctgtctctggtggctccatcaatagttactactggagctggatccggcagccccccgggaagggactggagtggattgggtatatctctcgcagtgcgagtaccacctacaacccctccctcaagagtcgagtcaccatatcagtagacacgtccaaaaaccagttctccctgaaggtgacctctgtgaccgccgcagacacggccgtgtatttctgtgctgggcaactatatagaggctacgaatactttgactactggggccagggaaccctggtcaccgtctcctca

SEQ ID NO: 7913 - DNA, 342 bp, Artificial Sequence
  Synthetic polynucleotide encoding artificial human antibody VH domain
gaggtgcagctggtggagtccgggggaggcttagttcagcctggggggtccctgagactctcctgtgcagcctctggattcaccttcagtagctactggatgcactgggtccgccaagctccagggaaggggctggtgtgggtctcacgtattaatagtgatgggagtagcacaagctacgcggactccgtgaagggccgattcaccatctccagagacaacgccaagaacacgctgtatctgcaaatgaacagtctgagagccgaggacacggctgtgtattactgtgcaagtatggggtttgatatctggggccaagggacaatggtcaccgtctcttca

SEQ ID NO: 7914 - DNA, 387 bp, Artificial Sequence
  Synthetic polynucleotide encoding artificial human antibody VH domain
caggtgcagctgcaggagtcgggcccaggactggtgaagccttcacagaccctgtccctcacctgcactgtctctggtggctccatcagcagtggtagttactactggagctggatccggcagcccgccgggaagggactggagtggattgggcgtatctataccagtgggagcaccaactacaacccctccctcaagagtcgagtcaccatatcagtagacacgtccaagaaccagttctccctgatgctgagctctgtgaccgccgcagacacggccgtgtattactgtgcgagagagcggtgggctccatattgtagtgatggtcgctgccaagcggatgtttttgatgtctggggccaagggacactggtcaccgtctcttca

SEQ ID NO: 7915 - DNA, 375 bp, Artificial Sequence
  Synthetic polynucleotide encoding artificial human antibody VH domain
cagctgcagctgcaggagtcgggcccaggactggtgaagccttcggagaccctgtccctcacctgcactgtctctggtggctccatcagcagtagtagttactactggggctggatccgccagcccccagggaaggggctggagtggattgggagtatctattatagtgggagcacctactacaacccgtccctcaagagtcgagtcaccatatccgtagacacgtccaagaaccagttctccctgaagctgagctctgtgaccgccgcagacacggctgtgtattactgtgcgagacatgtccccagggagcggtggctggcctgggcttacttcgatctctggggccgtggcaccctggtcactgtctcctca

SEQ ID NO: 7916 - DNA, 354 bp, Artificial Sequence
  Synthetic polynucleotide encoding artificial human antibody VH domain
caggtgcagctgcaggagtcgggcccaggactggtgaagccttcggagaccctgtccctcacctgcactgtctctggtggctccatcagtagttactactggagctggatccggcagcccccagggaagggactggagtggattgggtatatctattacagtgggagcaccaactacaacccctccctcaagagtcgagtcaccatatcagtagacacgtccaagaaccagttctccctgaagctgagctctgtgaccgctgcggacacggccgtgtattactgtgcgagagaggcgaaggactactggtacttcgatctctggggccgtggcaccctggtcactgtctcctca

SEQ ID NO: 7917 - DNA, 366 bp, Artificial Sequence
  Synthetic polynucleotide encoding artificial human antibody VH domain
caggtgcagctgcaggagtcgggcccaggactggtgaagccttcggagaccctgtccctcacctgcactgtctctggtggctccatcagtagttactactggagctggatccggcagcccccagggaagggactggagtggattgggtatatctattacagtgggagcaccaactacaacccctccctcaagagtcgagtcaccatatcagtagacacgtccaagaaccagttctccctgaagctgagctctgtgaccgccgcagacacggccgtgtattactgtgcgagactttactatgatagtagtggttattacgggtactttgattactggggccagggaaccctggtcaccgtctcctca

SEQ ID NO: 7918 - DNA, 354 bp, Artificial Sequence
  Synthetic polynucleotide encoding artificial human antibody VH domain
gaggtgcgattggtggagtctgggggaggcctggtcaagcctggggggtccctgacactctcctgtgcagcctctggcttcgacttcactaactttttcatgaagtgggtccgccaggctccagggaaggggctggagtgggtctcatccattagtccttctagtacctccaaatattactcagacttagtgaggggccgattcaccgtctccagagacaacgccgcgggctcactgtttctgcatttgagtggcctgagagccgaagactctgctgtctactactgtgcgagaggcactgaccagtttacagggggctcctggggccagggaaccctggtccgcgtctcttca

SEQ ID NO: 7919 - DNA, 375 bp, Artificial Sequence
  Synthetic polynucleotide encoding artificial human antibody VH domain
caggttcagctggtgcagtctggagctgaggtgaagaagcctggggcctcagtgaaggtctcctgcaaggcttctggttacacctttaccagctatggtatcagctgggtgcgacaggcccctggacaagggcttgagtggatgggatggatcagcgcttacaatggtaacacaaactatgcacagaagctccagggcagagtcaccatgaccacagacacatccacgagcacagcctacatggagctgaggagcctgagatctgacgacacggccgtgtattactgtgcgagagatcggtattactatgatagtagtggttattctgaaccctttgactactggggccagggaaccctggtcaccgtctcctca

SEQ ID NO: 7920 - DNA, 366 bp, Artificial Sequence
  Synthetic polynucleotide encoding artificial human antibody VH domain
caggtccagctggtacagtctggggctgaggtgaagaagcctggggcctcagtgaaggtctcctgcaaggtttccggatacaccctcactgaattatccatgcactgggtgcgacaggctcctggaaaagggcttgagtggatgggaggttttgatcctgaagatggtgaaacaatctacgcacagaagttccagggcagagtcaccatgaccgaggacacatctacagacacagcctacatggagctgagcagcctgagatctgaggacacggccgtgtattactgtgcaacaatgtatgctttaaactacgacgtctactactttgactactggggccagggaaccctggtcaccgtctcctca

SEQ ID NO: 7921 - DNA, 387 bp, Artificial Sequence
  Synthetic polynucleotide encoding artificial human antibody VH domain
caggtccagctggtacagtctggggctgaggtgaagaagcctggggcctcagtgaaggtctcctgcaaggtttccggatacaccctcactgaattatccatgcactgggtgcgacaggctcctggaaaagggcttgagtggatgggaggttttgatcctgaagatggtgaaacaatctacgcacagaagttccagggcagagtcaccatgaccgaggacacatctacagacacagcctacatggagctgagcagcctgagatctgaggacacggccgtgtattactgtgcaacagccccttcagtggctggtagacccccatttgattactactactactacggtatggacgtctggggccaagggaccacggtcaccgtctcctca

SEQ ID NO: 7922 - DNA, 363 bp, Artificial Sequence
  Synthetic polynucleotide encoding artificial human antibody VH domain
caggtccagctggtacagtctggggctgaggtgaagaagcctggggcctcagtgaaggtctcctgcaaggtttccggatacaccctcactgaattatccatgcactgggtgcgacaggctcctggaaaagggcttgagtggatgggaggttttgatcctgaagatggtgaaacaatctacgcacagaagttccagggcagagtcaccatgaccgaggacacatctacagacacagcctacatggagctgagcagcctgagatctgaggacacggccgtgtattactgtgcaacgggagcagcagctggtacggttggctggttcgacccctggggccagggaaccctggtcaccgtctcctca

SEQ ID NO: 7923 - DNA, 387 bp, Artificial Sequence
  Synthetic polynucleotide encoding artificial human antibody VH domain
cagctgcagctgcaggagtcgggcccaggactggtgaagccttcggagaccctgtccctcacctgcactgtctctggtggctccatcagcagtagtagttactactggggctggatccgccagcccccagggaaggggctggagtggattgggagtatctattatagtgggagcacctactacaacccgtccctcaagagtcgagtcaccatatccgtagacacgtccaagaaccagttctccctgaagctgagctctgtgaccgccgcagacacggctgtgtattactgtgcgagacaggggggccgtattactatgatagtagtggtcagcggtccttactactttgactactggggccagggaaccctggtcaccgtctcctca

SEQ ID NO: 7924 - DNA, 372 bp, Artificial Sequence
  Synthetic polynucleotide encoding artificial human antibody VH domain
caggtgcagctgcaggagtcgggcccaggactggtgaagccttcacagaccctgtccctcacctgcactgtctctggtggctccatcagcagtggtagttactactggagctggatccggcagcccgccgggaagggactggagtggattgggcgtatctataccagtgggagcaccaactacaacccctccctcaagagtcgagtcaccatatcagtagacacgtccaagaaccagttctccctgaagctgagctctgtgaccgccgcagacacggccgtgtattactgtgcgagagagtggaggagatggctacaatatcggggttactttgactactggggccagggaaccctggtcaccgtctcctca

SEQ ID NO: 7925 - DNA, 372 bp, Artificial Sequence
  Synthetic polynucleotide encoding artificial human antibody VH domain
gaggtgcagttgttggagtctgggggagacttggtccagccgggggggtccctgagactctcctgtgcagcctctggattcgcctttaccacctatggcatgagttgggtccgccgggctccagggaaggggctggagtccgtcgcaactattagtgatactggaggtaaaacatattacgcagactccctgaagggccgcttcaccatctccagagacaactccaagaacatcctgtatctgcaaatgaacagcctgagagccgaggacacggccctttattactgcgcgaaatctatggttcggggagttaactatttctactatggtatggacgtctggggccaagggaccacggtcaccgtctcctca

SEQ ID NO: 7926 - DNA, 396 bp, Artificial Sequence
  Synthetic polynucleotide encoding artificial human antibody VH domain
gaggtgcagctgttggagtctgggggaggcttggtacagcctggggggtccctgagactctcctgtgcagcctctggattcacctttagcagctatgccatgagctgggtccgccaggctccagggaaggggctggagtgggtctcagctattagtggtagtggtggtagcacatactacgcagactccgtgaagggccggttcaccatctccagagacaattccaagaacacgctgtatctgcaaatgaacagcctgagagccgaggacacggccgtatattactgtgcgaaagatctaaacggcgggggtttgggtattacgatttttggagtggttatgggccatgatgcttttgatatctggggccaagggacaatggtcaccgtctcttca

SEQ ID NO: 7927 - DNA, 357 bp, Artificial Sequence
  Synthetic polynucleotide encoding artificial human antibody VH domain
caggtgcagctggtggagtctgggggaggcgtggtccagcctgggaggtccctgagactctcctgtgcagcgtctggattcaccttcagtagctatggcatgcactgggtccgccaggctccaggcaaggggctggagtgggtggcagttatatggtatgatggaagtaataaatactatgcagactccgtgaagggccgattcaccatctccagagacaattccaagaacacgctgtatctgcaaatgaacagcctgagagccgaggacacggctgtgtattactgtgcgaggtccgtattagaagactggtacttcgatctctggggccgtggcaccctggtcactgtctcctca

SEQ ID NO: 7928 - DNA, 366 bp, Artificial Sequence
  Synthetic polynucleotide encoding artificial human antibody VH domain
cagctgcagctgcaggagtcgggcccaggactggtgaagccttcggagaccctgtccctcacctgcactgtctctggtggctccatcagcagtagtagttactactggggctggatccgccagcccccagggaaggggctggagtggattgggagtatctattatagtgggagcacctactacaacccgtccctcaagagtcgagtcaccatatccgtagacacgtccaagaaccagttctccctgaagctgagctctgtgaccgccgcagacacggctgtgtattactgtgcgagactaggatggttatttgagccctacggtatggacgtctggggccaagggaccacggtcaccgtctcctca

SEQ ID NO: 7929 - DNA, 387 bp, Artificial Sequence
  Synthetic polynucleotide encoding artificial human antibody VH domain
caggtgcagctgcaggagtcgggcccaggactggtgaagccttcacagaccctgtccctcacctgcactgtctctggtggctccatcagcagtggtagttactactggagctggatccggcagcccgccgggaagggactggagtggattgggcgtatctataccagtgggagcaccaactacaacccctccctcaagagtcgagtcaccatatcagtagacacgtccaagaaccagttctccctgaagctgagctctgtgaccgccgcagacacggccgtgtattactgtgcgagaggaggtggagtattactatggttcggggagttatcaggctactactacatggacgtctggggcaaagggaccacggtcaccgtctcctca

SEQ ID NO: 7930 - DNA, 360 bp, Artificial Sequence
  Synthetic polynucleotide encoding artificial human antibody VH domain
caggtccagctggtgcagtctggggctgaggtgaagaagcctgggtcctcggtgaaggtctcctgcaaggcttctggaggcaccttcagcaactatgctttcagctgggtgcgacaggcccctggacaagggcttgagtggatgggaaggatcatccctattcttggtggtccaaactacgcacagaaattccagggcggagtcacgattaccgcggacaaatccacgaacacagcctacatggagctgagcagcctgagatctgaggacacggccgtgtattactgtgcgagcggtatagcagcagccacgtactaccttgactactggggccagggaaccctggtcaccgtctcctca

SEQ ID NO: 7931 - DNA, 357 bp, Artificial Sequence
  Synthetic polynucleotide encoding artificial human antibody VH domain
gaggtgcaactgttggagtctgggggaggcttgttcccgcctggggggtccctgagactctcctgtgcagcctctggattcttccttaggggtcgtggcttagcttgggtccgccaggctccagggaagggactcgagtgggtctcgaccattagtggtgatggcaaaagtactcattatgcagactccgtgcagggccgcttcaccgtctccagagacaactccagaaatatcgtgtttttacagatggacagcctcagagccgaggacacggccgaatatttctgtgcgactgacgcgggcaccagttggcattttttctattggggccaggggaccctggtcaccgtctcctca

SEQ ID NO: 7932 - DNA, 372 bp, Artificial Sequence
  Synthetic polynucleotide encoding artificial human antibody VH domain
caggtcaccttgaaggagtctggtcctgtgctggtgaaacccacagagaccctcacgctgacctgcaccgtctctgggttctcactcagcaatgctagaatgggtgtgagctggatccgtcagcccccagggaaggccctggagtggcttgcacacattttttcgaatgacgaaaaatcctacagcacatctctgaagagcaggctcaccatctccaaggacacctccaaaagccaggtggtccttaccatgaccaacatggaccctgtggacacagccacatattactgtgcccggagtacccgagggtggcttagcgctttatggtggttcgacccctggggccagggaaccctggtcaccgtctcctca

SEQ ID NO: 7933 - DNA, 360 bp, Artificial Sequence
  Synthetic polynucleotide encoding artificial human antibody VH domain
cagatcaccttgaaggagtctggtcctacgctggtgaaacccacacagaccctcacgctgacctgcaccttctctgggttctcactcagcactagtggagtgggtgtgggctggatccgtcagcccccaggaaaggccctggagtggcttgcactcatttattgggatgatgataagcgctacagcccatctctgaagagcaggctcaccatcaccaaggacacctccaaaaaccaggtggtccttacaatgaccaacatggaccctgtggacacagccacatattactgtgcacacagacgggcgttctacggctactttgactactggggccagggaaccctggtcaccgtctcctca

SEQ ID NO: 7934 - DNA, 387 bp, Artificial Sequence
  Synthetic polynucleotide encoding artificial human antibody VH domain
caggtgcacctggtggagtctgggggaggcgtggtccagcctgggaggtccctgagactctcctgtgaatcgtctggattcggcttcaataactatggcatgcactgggtccgccaggctccaggcaaggggctggagtgggtggcagttgtgtcatatgatggaagtcgtagattctatgcagactccgtgaagggccgcttcaccatctccaaagacaatgtcaagggcacgctgtacctgcaaatgaacagcctgagagctaacgacacggctgtgtactactgtgcgaaggatccgcgcatatttatgattacctatgggcgacctctcgctgatacccacttggacctctggggccagggaaccctggtcaccgtctcctca

SEQ ID NO: 7935 - DNA, 366 bp, Artificial Sequence
  Synthetic polynucleotide encoding artificial human antibody VH domain
gaggtgcaactggtggagtccgggggaggcttagttcagcctggggggtccctgagactctcctgtgcagcctctggattcaccttcagtagctactggatgcactgggtccgccaagctccagggaaggggctggtgtgggtctcacgtattaatagtgatgggagtaccacaaggtacgcggactccgtgaagggccgattcaccatctccagagacaacgccaagaacacgctgtatctgcaaatgagcagtctgagagccgaggacacggctgtgtattactgtgcaagagatagagacagatatagtggcaacgatggtcctgtatactggggccagggaaccctggtcaccgtctcctca

SEQ ID NO: 7936 - DNA, 390 bp, Artificial Sequence
  Synthetic polynucleotide encoding artificial human antibody VH domain
caggtgcagctggtgcagtctggggctgaggtgaagaagcctggggcctcagtgaaggtctcctgcaaggcttctggatacaccttcaccggctactatatgcactgggtgcgacaggcccctggacaagggcttgagtggatgggatggatcaaccctaacagtggtggcacaaactatgcacagaagtttcagggcagggtcaccatgaccagggacacgtccatcagcacagcctacatggagctgagcaggctgagatctgacgacacggccgtgtattactgtgcgagagaaatgataacggatattgtagtggtggtagctgctactgtcggctactacggtatggacgtctggggccaagggaccacggtcaccgtctcctca

SEQ ID NO: 7937 - DNA, 375 bp, Artificial Sequence
  Synthetic polynucleotide encoding artificial human antibody VH domain
caggtcaccttgagggagtctggtcctgcgctggtgaaacccacacagaccctcacactgacctgcaccttctctgggttctcactcagcactagtggaatgtgtgtgagctggatccgtcagcccccagggaaggccctggagtggcttgcacgcattgattgggatgatgataaatactacagcacatctctgaagaccaggctcaccatctccaaggacacctccaaaaaccaggtggtccttacaatgaccaacatggaccctgtggacacagccacgtattactgtgcacggacctattacgatattttgactggttattactacggtatggacgtctggggccaagggaccacggtcaccgtctcctca

SEQ ID NO: 7938 - DNA, 363 bp, Artificial Sequence
  Synthetic polynucleotide encoding artificial human antibody VH domain
caggtccagctggtacagtctggggctgaggtgaagaagcctggggcctcagtgaaggtctcctgcaaggtttccggatacaccctcactgaattatccatgcactgggtgcgacaggctcctggaaaagggcttgagtggatgggaggttttgatcctgaagatggtgaaacaatctacgcacagaagttccagggcagagtcaccatgaccgaggacacatctacagacacagcctacatggagctgagcagcctgagatctgaggacacggccgtgtattactgtgcaacaggggtggttcggggagtaacgaactggttcgacccctggggccagggaaccctggtcaccgtctcctca

SEQ ID NO: 7939 - DNA, 387 bp, Artificial Sequence
  Synthetic polynucleotide encoding artificial human antibody VH domain
gaggtgcagctggtggagtctgggggaggcttggtccagcctggggggtccctgagactctcctgtgcagcctctggattcacctttagtagctattggatgagctgggtccgccaggctccagggaaggggctggagtgggtggccaacataaagcaagatggaagtgagaaatactatgtggactctgtgaagggccgattcaccatctccagagacaacgccaagaactcactgtatctgcaaatgaacagcctgagagccgaggacacggctgtgtattactgtgcgagagtaccgggtatagcagtggctggtacattatattactactactactactacatggacgtctggggcaaagggaccacggtcaccgtctcctca

SEQ ID NO: 7940 - DNA, 372 bp, Artificial Sequence
  Synthetic polynucleotide encoding artificial human antibody VH domain
gaagtgcagctggtggagtctgggggaggcttggtacagcctggcaggtccctgagactctcctgtgcagcctctggattcacctttgatgattatgccatgcactgggtccggcaagctccagggaagggcctggagtgggtctcaggtattagttggaatagtggtagcataggctatgcggactctgtgaagggccgattcaccatctccagagacaacgccaagaactccctgtatctgcaaatgaacagtctgagagctgaggacacggccttgtattactgtgcaaaagctcaggggacgtatagcagttactactactacggtatggacgtctggggccaagggaccacggtcaccgtctcctca

SEQ ID NO: 7941 - DNA, 372 bp, Artificial Sequence
  Synthetic polynucleotide encoding artificial human antibody VH domain
caggtccagttggtgcagtctggggctgaggtgaagaagcctgggtcctcggtgattgtctcctgcaaggcctctggagcctccttcgacaacaatgcgatcaactgggtgcgacaggcccctggacaagggcctgagtggatgggaagggtcatccctatccttggtatagcaaactacgcacagaagttccagggcagagtcacgattaccgcggacaagttcacgactacagccttcatggagctgcgcggcctgagatctgaagacacggccgtttattattgtgggaacagtagagatggccacaaatggggcaattactacggtttggacgtctggggccaagggaccacggtcaccgtctcctca

SEQ ID NO: 7942 - DNA, 363 bp, Artificial Sequence
  Synthetic polynucleotide encoding artificial human antibody VH domain
gaggtgcagctggtggagtctgggggaggcctggtcaagcctggggggtccctgagactctcctgtgcagcctctggattcacctttagtagttatagcatgcactgggtccgccaggctcccgggaaggggctggagtgggtctcatccattactagtactagtagttacacaaaatacgcagactcaatgaagggccgattcaccatctccagagacaacgccaagaactcactgtatctgcaaatgaacagcctgagagccgaggacacggctgtgtattattgtgcgagagatagtcagagtagtggtgcccacgactttgactattggggccagggaaccctggtcaccgtctcctca

SEQ ID NO: 7943 - DNA, 366 bp, Artificial Sequence
  Synthetic polynucleotide encoding artificial human antibody VH domain
caggtgcagctgcaggagtcgggcccaggactggtgaagccttcggagaccctgtccctcacctgcactgtctctggtggctccatcagtagttactactggagctggatccggcagcccccagggaagggactggagtggattgggtatatctattacagtgggagcaccaactacaacccctccctcaagagtcgagtcaccatatcagtagacacgtccaagaaccagttctccctgaagctgagctctgtgaccgctgcggacacggccgtgtattactgtgcgagaggacgtacgatttttggagtggttattgagccctttgactactggggccagggaaccctggtcaccgtctcctca

SEQ ID NO: 7944 - DNA, 363 bp, Artificial Sequence
  Synthetic polynucleotide encoding artificial human antibody VH domain
caggtgcagctggtgcagtctggggctgaggtgaagaagcctggggcctcagtgaaggtctcctgcaaggcttctggatacaccttcaccagttatgatatcaactgggtgcgacaggccactggacaagggcttgagtggatgggatggatgaaccctaacagtggtaacacaggctatgcacagaagttccagggcagagtcaccatgaccaggaacacctccataagcacagcctacatggagctgagcagcctgagatctgaggacacggccgtgtattactgtgcgagaaggcgcagtggctggtctcgctacggtatggacgtctggggccaagggaccacggtcaccgtctcctca

SEQ ID NO: 7945 - DNA, 387 bp, Artificial Sequence
  Synthetic polynucleotide encoding artificial human antibody VH domain
gaggtgcagctggtggagtctgggggaggcctggtcaagcctggggggtccctgagactctcctgtgcagcctctggattcaccttcagtagctatagcatgaactgggtccgccaggctccagggaaggggctggagtgggtctcatccattagtagtagtagtagttacatatactacgcagactcagtgaagggccgattcaccatctccagagacaacgccaagaactcactgtatctgcaaatgaacagcctgagagccgaggacacggctgtgtattactgtgcgagagattattatgactatgatagtagtggttatttaggctactactactactacatggacgtctggggcaaagggaccacggtcaccgtctcctca

SEQ ID NO: 7946 - DNA, 381 bp, Artificial Sequence
  Synthetic polynucleotide encoding artificial human antibody VH domain
caggtgcagctacagcagtggggcgcaggactgttgaagccttcggagaccctgtccctcacctgcgctgtctatggtgggtccttcagtggttactactggagctggatccgccagcccccagggaaggggctggagtggattggggaaatcaatcatagtggaagcaccaactacaacccgtccctcaagagtcgagtcaccatatcagtagacacgtccaagaaccagttctccctgaagctgagctctgtgaccgccgcggacacggctgtgtattactgtgcgagaggccgttggagggatactatgatagtagtggttattagggatcatgcttttgatatctggggccaagggacaatggtcaccgtctcttca

SEQ ID NO: 7947 - DNA, 378 bp, Artificial Sequence
  Synthetic polynucleotide encoding artificial human antibody VH domain
caggtccagctggtacagtctggggctgaggtgaagaagcctggggcctcagtgaaggtctcctgcaaggtttccggatacaccctcactgaattatccatgcactgggtgcgacaggctcctggaaaagggcttgagtggatgggaggttttgatcctgaagatggtgaaacaatctacgcacagaagttccagggcagagtcaccatgaccgaggacacatctacagacacagcctacatggagctgagcagcctgagatctgaggacacggccgtgtattactgtgcaacaggacccgtgtattgtagtagtaccagctgcaaacaaaactggttcgacccctggggccagggaaccctggtcaccgtctcctca

SEQ ID NO: 7948 - DNA, 360 bp, Artificial Sequence
  Synthetic polynucleotide encoding artificial human antibody VH domain
cagctgcagctgcaggagtcgggcccaggactggtgaagccttcggagaccctgtccctcacctgcactgtctctggtggctccatcagcagtagtagttactactggggctggatccgccagcccccagggaaggggctggagtggattgggagtatctattatagtgggagcacctactacaacccgtccctcaagagtcgagtcaccatatccgtagacacgtccaagaaccagttctccctgaagctgagctctgtgaccgccgcagacacggctgtgtattactgtgcgagacgccagaggagcccacgggcttttgatatctggggccaagggacaatggtcaccgtctcttca

SEQ ID NO: 7949 - DNA, 366 bp, Artificial Sequence
  Synthetic polynucleotide encoding artificial human antibody VH domain
caggtgcagctgcaggagtcgggcccaggactggtgaagccttcacagaccctgtccctcacctgcactgtctctggtggctccatcagcagtggtagttactactggagctggatccggcagcccgccgggaagggactggagtggattgggcgtatctataccagtgggagcaccaactacaacccctccctcaagagtcgagtcaccatatcagtagacacgtccaagaaccagttctccctgaagctgagctctgtgaccgccgcagacacggccgtgtattactgtgcgagggggaatgcgggctactactactactacatggacgtctggggcaaagggaccacggtcaccgtctcctca

SEQ ID NO: 7950 - DNA, 372 bp, Artificial Sequence
  Synthetic polynucleotide encoding artificial human antibody VH domain
caggttcagctggtgcagtctggagctgaggtgaagaagcctggggcctcagtgaaggtctcctgcaaggcttctggttacacctttaccagctatggtatcagctgggtgcgacaggcccctggacaagggcttgagtggatgggatggatcagcgcttacaatggtaacacaaactatgcacagaagctccagggcagagtcaccatgaccacagacacatccacgagcacagcctacatggagctgaggagcctgagatctgacgacacggccgtgtattactgtgcgagagatgcgtattacgatattttgactggttattacccatttgactactggggccagggaaccctggtcaccgtctcctca

SEQ ID NO: 7951 - DNA, 372 bp, Artificial Sequence
  Synthetic polynucleotide encoding artificial human antibody VH domain
gaggtgcagctgctggagtctgggggagacttggttcagccgggggggtccctgagactctcctgtgcagcctctgggttcacttttagcaactatgtcatgaactgggtccgccaggctccagggaaggggctggagtgggtctcaactattactggtagtagtgataacacgtggtacgcagactccgtgaagggccggttcaccctctccagagacaattccaagaacgcgctgtatctgcaaatgaacagcctgagagtcgaagacacggccgtatattactgtgtgagacgttcgatattaccatcctctagtgtctggggggcctttgactgctggggccagggaacccttgtcactgtctcctca

SEQ ID NO: 7952 - DNA, 363 bp, Artificial Sequence
  Synthetic polynucleotide encoding artificial human antibody VH domain
caggtccagctggtacagtctggggctgaggtgaagaagcctggggcctcagtgaaggtctcctgcaaggtttccggatacaccctcactgaattatccatgcactgggtgcgacaggctcctggaaaagggcttgagtggatgggaggttttgatcctgaagatggtgaaacaatctacgcacagaagttccagggcagagtcaccatgaccgaggacacatctacagacacagcctacatggagctgagcagcctgagatctgaggacacggccgtgtattactgtgcctcgggacctgtggtggtgacaaccagctggttcgacccctggggccagggaaccctggtcaccgtctcctca

SEQ ID NO: 7953 - DNA, 363 bp, Artificial Sequence
  Synthetic polynucleotide encoding artificial human antibody VH domain
caggtgcagctggtgcagtctggggctgaggtgaagaagcctggggcctcagtgaaggtctcctgcaaggcttctggatacaccttcaccagttatgatatcaactgggtgcggcaggccactgggcagcggcctgagtggatgggatgggtgacccctaacagtggtaacacaggatatgcacagaagttccacggcagagtcaccatgaccagggacacctccataaggacagcctacatggaactgagcagcctgagatctgaggactcggccgtctattactgcgcgagagcggccaaccagcatggctacggtgaccttgactactggggccagggaaccctggtcaccgtctcctca

SEQ ID NO: 7954 - DNA, 381 bp, Artificial Sequence
  Synthetic polynucleotide encoding artificial human antibody VH domain
caggtgcagctgcaggagtcgggcccaggactggtgaagccttcacagaccctgtccctcacctgcactgtctctggtggctccatcagcagtggtagttactactggagctggatccggcagcccgccgggaagggactggagtggattgggcgtatctataccagtgggagcaccaactacaacccctccctcaagagtcgagtcaccatatcagtagacacgtccaagaaccagttctccctgaagctgagctctgtgaccgccgcagacacggccgtgtattactgtgcgagagcgaaaaagagatggctacaattgggtacggagggagatgcttttgatatctggggccaagggacaatggtcaccgtctcttca

SEQ ID NO: 7955 - DNA, 372 bp, Artificial Sequence
  Synthetic polynucleotide encoding artificial human antibody VH domain
caggtcaccttgaaggagtctggtcctgtgctggtgaaacccacagagaccctcacgctgacctgcaccgtctctgggttctcactcagcaatgctagaatgggtgtgagctggatccgtcagcccccagggaaggccctggagtggcttgcacacattttttcgaatgacgaaaaatcctacagcacatctctgaagagcaggctcaccatctccaaggacacctccaaaagccaggtggtccttaccatgaccaacatggaccctgtggacacagccacatattactgtgcacggatcctccgggactggctaagctactactactacatggacgtctggggcaaagggaccacggtcaccgtctcctca

SEQ ID NO: 7956 - DNA, 351 bp, Artificial Sequence
  Synthetic polynucleotide encoding artificial human antibody VH domain
caggttcacctggtgcaatctggagctgaagtgaagaagcctggggcctcagtgaaggtctcctgcaaggcttctggttacaacttcatgaactctggtgtcacctgggtgcgacaggcccctggacaaggacttgagtggctgggatggatcagcccctataatggtcaaacacactatccacagaacatccagggcagagtcaccatgacgacagacacatccacgagcacagcctacatggacctgaagaccctcaaatctgaagacacggccgtgtattactgtgcgagacaggacgggagggacgttgattactggggccagggaaccctggtcaccgtctcctca

SEQ ID NO: 7957 - DNA, 369 bp, Artificial Sequence
  Synthetic polynucleotide encoding artificial human antibody VH domain
gaagtgcagctggtggagtctgggggaggcttggtacagcctggcaggtccctgagactctcctgtgcagcctctggattcacctttgatgattatgccatgcactgggtccggcaagctccagggaagggcctggagtgggtctcaggtattagttggaatagtggtagcataggctatgcggactctgtgaagggccgattcaccatctccagagacaacgccaagaactccctgtatctgcaaatgaacagtctgagagctgaggacacggccttgtattactgtgcaaagacaattttcccctgggcccactactactacggtatggacgtctggggccaagggacgacggtcaccgtctcctca

SEQ ID NO: 7958 - DNA, 375 bp, Artificial Sequence
  Synthetic polynucleotide encoding artificial human antibody VH domain
caggtcaccttgaaggagtctggtcctgtgctggtgaaacccacagagaccctcacgctgacctgcaccgtctctgggttctcactcagcaatgctagaatgggtgtgagctggatccgtcagcccccagggaaggccctggagtggcttgcacacattttttcgaatgacgaaaaatcctacagcacatctctgaagagcaggctcaccatctccaaggacacctccaaaagccaggtggtccttaccatgaccaacatggaccctgtggacacagccacatattactgtgcgcggaccgggaggggatggctacaattaattccgagctggttcgacccctggggccagggaaccctggtcaccgtctcctca

SEQ ID NO: 7959 - DNA, 372 bp, Artificial Sequence
  Synthetic polynucleotide encoding artificial human antibody VH domain
cagctgcagctgcaggagtcgggcccaggactggtgaagccttcggagaccctgtccctcacctgcactgtctctggtggctccatcagcagtagtagttactactggggctggatccgccagcccccagggaaggggctggagtggattgggagtatctattatagtgggagcacctactacaacccgtccctcaagagtcgagtcaccatatccgtagacacgtccaagaaccagttctccctgaagctgagctctgtgaccgccgcagacacggctgtgtattactgtgcgagacatgcctggaacaccctaggccggacgaactggttcgacccctggggccagggaaccctggtcaccgtctcctca

SEQ ID NO: 7960 - DNA, 384 bp, Artificial Sequence
  Synthetic polynucleotide encoding artificial human antibody VH domain
caggtgcagctgcaggagtcgggcccaggactggtgaagccttcacagaccctgtccctcacctgcactgtctctggtggctccatcagcagtggtagttactactggagctggatccggcagcccgccgggaagggactggagtggattgggcgtatctataccagtgggagcaccaactacaacccctccctcaagagtcgagtcaccatatcagtagacacgtccaagaaccagttctccctgaagctgagctctgtgaccgccgcagacacggccgtgtattactgtgcgagaggcacacattgtagtagtaccagctgctatgccccctactactacatggacgtctggggcaaagggaccacggtcaccgtctcctca

SEQ ID NO: 7961 - DNA, 375 bp, Artificial Sequence
  Synthetic polynucleotide encoding artificial human antibody VH domain
caggtgcagctggtgcagtctggggctgaggtgaagaagcctggggcctcagtgaaggtttcctgcaaggcatctggatacaccttcaccagctactatatgcactgggtgcgacaggcccctggacaagggcttgagtggatgggaataatcaaccctagtggtggtagcacaagctacgcacagaagttccagggcagagtcaccatgaccagggacacgtccacgagcacagtctacatggagctgagcagcctgagatctgaggacacggccgtgtattactgtgcgagaggtagtatttactcaaatcctgcgggagagggctccttttttgactactggggccagggaaccctggtcaccgtctcctca

SEQ ID NO: 7962 - DNA, 369 bp, Artificial Sequence
  Synthetic polynucleotide encoding artificial human antibody VH domain
caggtacagctgcatcagtcaggtccaggactggtgaagccctcgcagaccctctcactcacctgtgccatctccggggacagtgtctctagcaacagtgctgcttggaactggatcaggcagtccccatcgagaggccttgagtggctgggaaggacatactacaggtccaagtggtataatgattatgcagtatctgtgaagagtcgaataaccgtcaaccccgacacatccaagaaccagttctccctgcacctgaactctgtgactcccgaggacacggctgtgtattactgtgcaggtcatagtagtgcttcccattactactttgaccgctggggccagggaaccctggtcaccgtctcctca

SEQ ID NO: 7963 - DNA, 375 bp, Artificial Sequence
  Synthetic polynucleotide encoding artificial human antibody VH domain
caggtgcagctggtgcagtctggggctgaggtgaagaagcctggggcctcagtgaaggtctcctgcaaggcttctggatacaccttcaccggctactatatgcactgggtgcgacaggcccctggacaagggcttgagtggatgggatggatcaaccctaacagtggtggcacaaactatgcacagaagtttcagggcagggtcaccatgaccagggacacgtccatcagcacagcctacatggagctgagcaggctgagatctgacgacacggccgtgtattactgtgcgagaatgttctctgatgatagtagtgtttcctactactacggtatggacgtctggggccaagggaccacggtcaccgtctcctca

SEQ ID NO: 7964 - DNA, 387 bp, Artificial Sequence
  Synthetic polynucleotide encoding artificial human antibody VH domain
caggtgcaactggaagagtcggggggaggcatggtccagcctgggaagcccctgagactctcctgtgcagcctctggattcgacttcgacacctttggcatgcactgggtccgccagtctccaggcaggggactggagtgggtggccctcgtctcatatgacggcagaaaagaaaattatgctgactctgtgaagggccgattcaccatctccagagacaattccaagaacaccctctttctgcacatggacagcctgaggggtgaagacacggctatctattactgtgccaaagacggggtatcctacgacttttggagtggttatagtgggaaatactactacctggacgtttggggcagagggaccccggtcatcgtctcctca

SEQ ID NO: 7965 - DNA, 396 bp, Artificial Sequence
  Synthetic polynucleotide encoding artificial human antibody VH domain
gaggtgcagctggtggagtctgggggaggcctggtccagccggggggatccctgcgactctcctgtgttgcctctggattctccttccgagacaatgttatgcactgggtccgccagactccagggaagggactgcaatatatttcagctatcagtagtgatgggggtgccacatattatgaagtctctgtgacgggcagattcaccatcaccagagacaaccccaagaaaacgttatttcttcaactgaccagcctgcgcgcgcaggacacgggtctatatttctgtgcgagagggcttcgggacgcggggcgccgtaaagagatagttgggacgccgcatcacaactactacatagacatttggggaaaagggaccatggtcaccgtctcctca

SEQ ID NO: 7966 - DNA, 387 bp, Artificial Sequence
  Synthetic polynucleotide encoding artificial human antibody VH domain
caggtgcagctgcaggagtcgggcccaggactggtgaagccttcacagaccctgtccctcacctgcactgtctctggtggctccatcagcagtggtggttactactggagctggatccgccagcacccagggaagggcctggagtggattgggtacatctattacagtgggagcacctactacaacccgtccctcaagagtcgagttaccatatcagtagacacgtctaagaaccagttctccctgaagctgagctctgtgactgccgcggacacggccgtgtattactgtgcgagagctccccccagcagtattacgatttttggagtggttaaatcgtggtacatggacgtctggggcaaagggaccacggtcaccgtctcctca

SEQ ID NO: 7967 - DNA, 363 bp, Artificial Sequence
  Synthetic polynucleotide encoding artificial human antibody VH domain
caggtccagctggtacagtctggggctgaggtgaagaagcctggggcctcagtgaaggtctcctgcaaggtttccggatacaccctcactgaattatccatgcactgggtgcgacaggctcctggaaaagggcttgagtggatgggaggttttgatcctgaagatggtgaaacaatctacgcacagaagttccagggcagagtcaccatgaccgaggacacatctacagacacagcctacatggagctgagcagcctgagatctgaggacacggccgtgtattactgtgcaacaggttcccctatggttcggggtagctggttcgacccctggggccagggaaccctggtcaccgtctcctca

SEQ ID NO: 7968 - DNA, 384 bp, Artificial Sequence
  Synthetic polynucleotide encoding artificial human antibody VH domain
caggtgcagctgcaggagtcgggcccaggactggtgaagccttcacagaccctgtccctcacctgcactgtctctggtggctccatcagcagtggtagttactactggagctggatccggcagcccgccgggaagggactggagtggattgggcgtatctataccagtgggagcaccaactacaacccctccctcaagagtcgagtcaccatatcagtagacacgtccaagaaccagttctccctgaagctgagctctgtgaccgccgcagacacggccgtgtattactgtgcgagagagaggggccagagatggctacaattaaaggactactactactacatggacgtctggggcaaagggaccacggtcaccgtctcctca

SEQ ID NO: 7969 - DNA, 357 bp, Artificial Sequence
  Synthetic polynucleotide encoding artificial human antibody VH domain
gaggtgcagctggtggagtctgggggaggcttcataaagcctggagagtcccttagactctcctgtgcagcctctggattcactttcagtaacgcctggatgacctgggtccgccaggctccagggaaggggctggagtgggttggccgtattaaaagcaaaactgatggtgggacaacagacttcgctgcacccttgaaaggcagattcaccatgtcaagagaggattcaaagaacacgctgtatctgcaaatgaacagcctgaaaatcgaggacacagccatttattactgtacaacactctccgctacctattctcactactggggccagggaaccctggtcaccgtctcgtca

SEQ ID NO: 7970 - DNA, 366 bp, Artificial Sequence
  Synthetic polynucleotide encoding artificial human antibody VH domain
caggttcaggtggtgcagtctggagctgaggtgaagaagtctggggcctcagtgaaggtctcctgcaaggcttttggtgacatctttgctagtgagggtatcacctgggtgcgacaggcccctggacaagggcttgagtggatgggatggatcagcgcttatactggaatcgcatactatgcacaggacttccagggcagagtcaccatggccacagacatgtccacgaacacagcctacatggagctgaggagcctgagatctgacgacacggccatttattactgtgcgagaggggtgattcttggagtcgttataaattacatggatgtctggggcaaagggaccacggtcaccgtctcctca

SEQ ID NO: 7971 - DNA, 375 bp, Artificial Sequence
  Synthetic polynucleotide encoding artificial human antibody VH domain
caggtccagttggtacagtctggggctgaggtgaagaagcctggggcctcactgaaggtctcctgcaaggtttccggatacagcctcagtaaattatccatccactgggtgcgacaggctcctggaggaggacttgagtggatggggggcgttgaccctgaagacgatgaaataatttatgcacagaggttccagggcagagtcaccttggccgaggacacgtccacagacacagcctacatggagctgaccagcctgagatctgaggacacggccgtctattactgtttaacagattcagattactatgacggaagtggttatatcgacggttttgatatttggggccaagggacaatggtctccgtctcatca

SEQ ID NO: 7972 - DNA, 366 bp, Artificial Sequence
  Synthetic polynucleotide encoding artificial human antibody VH domain
caggtccagctggtacagtctggggctgaggtgaagaagcctggggcctcagtgaaggtctcctgcaaggtttccggatacaccctcactgaattatccatgcactgggtgcgacaggctcctggaaaagggcttgagtggatgggaggttttgatcctgaagatggtgaaacaatctacgcacagaagttccagggcagagtcaccatgaccgaggacacatctacagacacagcctacatggagctgagcagcctgagatctgaggacacggccgtgtattactgtgcaacttcatcccccattttgacaagaaccaactggttcgacccctggggccagggaaccctggtcaccgtctcctca

SEQ ID NO: 7973 - DNA, 354 bp, Artificial Sequence
  Synthetic polynucleotide encoding artificial human antibody VH domain
caggtgcagctggtggagtctgggggaggcgtggtccagcctgggaggtccctgagactctcctgtgcagcgtctggattcaccttcagtagctatggcatgcactgggtccgccaggctccaggcaaggggctggagtgggtggcagttatatggtatgatggaagtaataaatactatgcagactccgtgaagggccgattcaccatctccagagacaattccaagaacacgctgtatctgcaaatgaacagcctgagagccgaggacacggctgtgtattactgtgcgaccctcagctcgcccccctactttgactactggggccagggaaccctggtcaccgtctcctca

SEQ ID NO: 7974 - DNA, 336 bp, Artificial Sequence
  Synthetic polynucleotide encoding artificial human antibody VH domain
caggtgcagctgcaggagtcgggcccaggactggtgaagccttcggagaccctgtccctcacctgcactgtctctggtggctccatcagtagttactactggagctggatccggcagcccccagggaagggactggagtggattgggtatatctattacagtgggagcaccaactacaacccctccctcaagagtcgagtcaccatatcagtagacacgtccaagaaccagttctccctgaagctgagctctgtgaccgctgcggacacggccgtgtattactgtgcgagagggtttgactactggggccagggaaccctggtcaccgtctcctca

SEQ ID NO: 7975 - DNA, 357 bp, Artificial Sequence
  Synthetic polynucleotide encoding artificial human antibody VH domain
gaggtgcagttgttggagtctgggggacgcttggttcagccgggggggtccctgagactctcctgtgaagtctctggattcacctttagcacctatgccatgagctgggtccgccaggctccagggaaggggctggagtgggtctcaggtattagtggcagtggtggtgccacatactacgcagactccgttaagggccggttcaccatctccagagacaattccaagaacaccctgtttctgcaacttcgcagcctgagagtcgaggacacggccttatattactgcgcgaaagaagctttatttcctacggggcttgaccactggggccagggaaccctggtcaccgtctcctca

SEQ ID NO: 7976 - DNA, 405 bp, Artificial Sequence
  Synthetic polynucleotide encoding artificial human antibody VH domain
caggtgcagctggtggagtctgggggaggcgtggtccagcctgggaggtccctgagactctcctgtgcagcgtctggattcaccttcagtagctatggcatgcactgggtccgccaggctccaggcaaggggctggagtgggtggcagttatatggtatgatggaagtaataaatactatgcagactccgtgaagggccgattcaccatctccagagacaattccaagaacacgctgtatctgcaaatgaacagcctgagagccgaggacacggctgtgtattactgtgcgagagagcacctttattacgatattttgactggttacatatccccctcccggtattactactactactacggtatggacgtctggggccaagggaccacggtcaccgtctcctca

SEQ ID NO: 7977 - DNA, 354 bp, Artificial Sequence
  Synthetic polynucleotide encoding artificial human antibody VH domain
gaggtgcagctggtggagtctggaggaggcttggtccagcctggggggtccctgagactctcctgtgcagcctctgggctcaccgtcagtagcaactacatgagctgggtccgccaggctccagggaaggggctggagtgggtctcagttatttatagcggtggtagcacttactacgcagactccgtgaagggccgattcaccatctccagacacaattccaagaacacgctgtatcttcaaatgaacagcctgagagctgaggacacggccgtgtattactgtgcgagagatcttgaagtggttggcggtatggacgtctggggccaagggaccacggtcaccgtctcctca

SEQ ID NO: 7978 - DNA, 372 bp, Artificial Sequence
  Synthetic polynucleotide encoding artificial human antibody VH domain
caggtgcagctggtgcagtctggggctgaggtgaagaagcctggggcctcagtgaaggtctcctgcaaggcttctggatacaccttcaccggctactatatgcactgggtgcgacaggcccctggacaagggcttgagtggatgggatggatcaaccctaacagtggtggcacaaactatgcacagaagtttcagggcagggtcaccatgaccagggacacgtccatcagcacagcctacatggagctgagcaggctgagatctgacgacacggccgtgtattactgtgcgagaggtcgaaagatagtagtgcctaatgggctctacggtatggacgtctggggccaagggaccacggtcaccgtctcctca

SEQ ID NO: 7979 - DNA, 357 bp, Artificial Sequence
  Synthetic polynucleotide encoding artificial human antibody VH domain
gaggtgcagctggtggagtctgggggaggcttggtccagcctggggggtccctgagactctcctgtgcagcctctggattcaccgtcagtagcaactacatgagctgggtccgccaggctccagggaaggggctggagtgggtctcagttatttatagcggtggtagcacatactacgcagactccgtgaagggcagattcaccatctccagagacaattccaagaacacgctgtatcttcaaatgaacagcctgagagccgaggacacggctgtgtattactgtgcgagagagcatagcagtggccggggcgggtttgactactggggccagggaaccctggtcaccgtctcctca

SEQ ID NO: 7980 - DNA, 354 bp, Artificial Sequence
  Synthetic polynucleotide encoding artificial human antibody VH domain
gaggtgcagctggtggagtctggggggggcttggtaaagccgggggagtcccttagcctctcctgtgcagcctctggattcattttcagtaacgcctggatgatttgggtccgccaggctccagggaaggggctggagtgggttggccgtattaaaagcaaaactgatggtgggacaatagactacgctgcacccgtgaaaggcagattcaccatgtcaagagatgattcaaaaaacatgctgtatctgcaaatgaacagcctgaaaaccgaggacacagccgtatattactgtaccacagggggcggatatctcacctactggggccagggaaccctggtcaccgtcttctca

SEQ ID NO: 7981 - DNA, 387 bp, Artificial Sequence
  Synthetic polynucleotide encoding artificial human antibody VH domain
gaggtgcagctggtggagtctgggggaggcctggtcaagcctggggggtccctgagactctcctgtgcagcctctggattcaccttcagtagctatagcatgaactgggtccgccaggctccagggaaggggctggagtgggtctcatccattagtagtagtagtagttacatatactacgcagactcagtgaagggccgattcaccatctccagagacaacgccaagaactcactgtatctgcaaatgaacagcctgagagccgaggacacggctgtgtattactgtgcgagaggtggatacagctatggtcacgacaccgatctactctactactactacggtatggacgtctggggccaagggaccacggtcaccgtctcctca

SEQ ID NO: 7982 - DNA, 387 bp, Artificial Sequence
  Synthetic polynucleotide encoding artificial human antibody VH domain
gaggtgcagctgttggagtctgggggaggcttggtacagcctggggggtccctgagactctcctgtgcagcctctggattcacctttagcagctatgccatgagctgggtccgccaggctccagggaaggggctggagtgggtctcagctattagtggtagtggtggtagcacatactacgcagactccgtgaagggccggttcaccatctccagagacaattccaagaacacgctgtatctgcaaatgaacagcctgagagccgaggacacggccgtatattactgtgcgaaagagggtcgacctataaatgggtattacgatattttgactgatccgtactactttgagtactggggccagggaaccctggtcaccgtctcctca

SEQ ID NO: 7983 - DNA, 393 bp, Artificial Sequence
  Synthetic polynucleotide encoding artificial human antibody VH domain
caggtgcagctggtgcagtctggggctgaggtgaagaagcctggggcctcagtgaaggtctcctgcaaggcttctggatacaccttcaccggctactatatgcactgggtgcgacaggcccctggacaagggcttgagtggatgggatggatcaaccctaacagtggtggcacaaactatgcacagaagtttcagggcagggtcaccatgaccagggacacgtccatcagcacagcctacatggagctgagcaggctgagatctgacgacacggccgtgtattactgtgcgagaggggagctattacgatattttgactggttatcacacgaaccggactactactacggtatggacgtctggggccaagggaccacggtcaccgtctcctca

SEQ ID NO: 7984 - DNA, 360 bp, Artificial Sequence
  Synthetic polynucleotide encoding artificial human antibody VH domain
caggttcagctggtgcagtctggagctgaggtgaagaagcctggggcctcagtgaaggtctcctgcaaggcttctggttacacctttaccagctacggtatcagctgggtgcgacaggcccctggacaagggcttgagtggatgggatggatcagcgcttacaatggtaacacaaactatgcacagaagctccagggcagagtcaccatgaccacagacacatccacgagcacagcctacatggagctgaggagcctgagatctgacgacacggccgtgtattactgtgcgaggacgacgatggggatagcagaatactttgactactggggccagggaaccctggtcaccgtctcctca

SEQ ID NO: 7985 - DNA, 381 bp, Artificial Sequence
  Synthetic polynucleotide encoding artificial human antibody VH domain
caggtgcagctggtggagtctgggggaggcgtggtccagcctgggaggtccctgagactctcctgtgcagcctctggattcaccttcagtagctatggcatgcactgggtccgccaggctccaggcaaggggctggagtgggtggcagttatatcatatgatggaagtaataaatactatgcagactccgtgaagggccgattcaccatctccagagacaattccaagaacacgctgtatctgcaaatgaacagcctgagagctgaggacacggctgtgtattactgtgcgaaagatcctgaggggtatagcagtggctggatctactactactacggtatggacgtctggggccaagggaccacggtcaccgtctcctca

SEQ ID NO: 7986 - DNA, 354 bp, Artificial Sequence
  Synthetic polynucleotide encoding artificial human antibody VH domain
caggtgcagctggtggagtctgggggaggcgtggtccagcctgggaggtccctgagactctcctgtgcagcctctggattcaccttcagtagctatgctatgcactgggtccgccaggctccaggcaaggggctggagtgggtggcagttatatcatatgatggaagcaataaatactacgcagactccgtgaagggccgattcaccatctccagagacaattccaagaacacgctgtatctgcaaatgaacagcctgagagctgaggacacggctgtgtattactgtgcgagaaacggtggtaccaactggttcgacccctggggccagggaaccctggtcaccgtctcctca

SEQ ID NO: 7987 - DNA, 384 bp, Artificial Sequence
  Synthetic polynucleotide encoding artificial human antibody VH domain
caggtccagctggtacagtctggggctgaggtgaagaagcctggggcctcagtgaaggtctcctgcaaggtttccggatacaccctcactgaattatccatgcactgggtgcgacaggctcctggaaaagggcttgagtggatgggaggttttgatcctgaagatggtgaaacaatctacgcacagaagttccagggcagagtcaccatgaccgaggacacatctacagacacagcctacatggagctgagcagcctgagatctgaggacacggccgtgtattactgtgcaacgggtatagcagtggctgggacacctacacgttactactactactacggtatggacgtctggggccaagggaccacggtcaccgtctcctca

SEQ ID NO: 7988 - DNA, 381 bp, Artificial Sequence
  Synthetic polynucleotide encoding artificial human antibody VH domain
caggtgcagctggtggagtctgggggaggcgtggtccagcctgggaggtccctgagactctcctgtgcagcctctggattcaccttcagtagctatggcatgcactgggtccgccaggctccaggcaaggggctggagtgggtggcagttatatcatatgatggaagtaataaatactatgcagactccgtgaagggccgattcaccatctccagagacaattccaagaacacgctgtatctgcaaatgaacagcctgagagctgaggacacggctgtgtattactgtgcgaaatcggaatattttgactggttattgtactctgactactactacggtatggacgtctggggccaagggaccacggtcaccgtctcctca

SEQ ID NO: 7989 - DNA, 357 bp, Artificial Sequence
  Synthetic polynucleotide encoding artificial human antibody VH domain
caggtcaccttgagggagtctggtcctgcgctggtgaaacccacacagaccctcacactgacctgcaccttctctgggttctcactcagcactagtggaatgtgtgtgagctggatccgtcagcccccagggaaggccctggagtggcttgcactcattgattgggatgatgataaatactacagcacatctctgaagaccaggctcaccatctccaaggacacctccaaaaaccaggtggtccttacaatgaccaacatggaccctgtggacacagccacgtattactgtgcacggggggattttgactggttattagactactggggccagggaaccctggtcaccgtctcctca

SEQ ID NO: 7990 - DNA, 363 bp, Artificial Sequence
  Synthetic polynucleotide encoding artificial human antibody VH domain
caggtgcacctgcaggagtcgggcccaggactggtgaagccttcacagaccctgtccctcacctgcactgtctctggtgcctccattagcagtgatgattactactggagttggatccggctgtccccagggaagggcctggagtggcttgggtacatccatcacagcgggaacacattttacagtccgtccctcaagagacgacttagtgtgtccctagacatgtcccagaaccaattctccatgagactgatctccgtgactgccgcagacacggccatatattactgtgccagagagaaatggacctcttttcgattccttgaaaactggggccagggagccctggtcaccgtctcctca

SEQ ID NO: 7991 - DNA, 375 bp, Artificial Sequence
  Synthetic polynucleotide encoding artificial human antibody VH domain
caggtgcagctggtggagtctgggggaggcgtggtccagcctgggaggtccctgagactctcctgtgcagcgtctggattcaccttcagtagctatggcatgcactgggtccgccaggctccaggcaaggggctggagtgggtggcagttatatcatatgatggaagtaataaatactatgcagactccgtgaagggccgattcaccatctccagagacaattccaagaacacgctgtatctgcaaatgaacagcctgagagctgaggacacggctgtgtattactgtgcgactacggtgactaccccccatgactactactactactacggtatggacgtctggggccaagggaccacggtcaccgtctcctca

SEQ ID NO: 7992 - DNA, 354 bp, Artificial Sequence
  Synthetic polynucleotide encoding artificial human antibody VH domain
gaagtgcagctggtgcagtctggagcagaggtgaaaaagcccggggagtctctgaggatctcctgtaagggttctggatacagctttaccagctactggatcagctgggtgcgccagatgcccgggaaaggcctggagtggatggggaggattgatcctagtgactcttataccaactacagcccgtccttccaaggccacgtcaccatctcagctgacaagtccatcagcactgcctacctgcagtggagcagcctgaaggcctcggacaccgccatgtattactgtgcgagatcggctgtcccgtactactttgactactggggccagggaaccctggtcaccgtctcctca

SEQ ID NO: 7993 - DNA, 375 bp, Artificial Sequence
  Synthetic polynucleotide encoding artificial human antibody VH domain
caggtgcagttgcaggagtcgggcccagggctggtgaagccttcggaaaccctgtccctcacctgctctgtctctggtggctccatgagtcgttactactggagctggatccggcagcccgccgggaagggactagaattgattgggcgtgtttattcaactgggacaaccaactacaatccctccctcaagagtcgagtcaccatgtcagtagacacgtccaagaatcagttctccctcaagctgaactctgtgaccgccgcggacacggccgtctatttctgtgcgcgaggggtggcggagacctatagtggggactactggctcgtgctttttgactactggggccagggatcccgggtcaccgtctcctca

SEQ ID NO: 7994 - DNA, 390 bp, Artificial Sequence
  Synthetic polynucleotide encoding artificial human antibody VH domain
gaggtgcagctggtggagtctgggggaggcttggtaaagccagggcggtccctgagactctcctgtacagcttctggattcacctttggtgattatgctatgagctggttccgccaggctccagggaaggggctggagtgggtaggtttcattagaagcaaagcttatggtgggacaacagaatacgccgcgtctgtgaaaggcagattcaccatctcaagagatgattccaaaagcatcgcctatctgcaaatgaacagcctgaaaaccgaggacacagccgtgtattactgtactagagtcagagagcagggggagtatagcagctcgccgggtctcgaagggtggttcgacccctggggccagggaaccctggtcaccgtctcctca

SEQ ID NO: 7995 - DNA, 363 bp, Artificial Sequence
  Synthetic polynucleotide encoding artificial human antibody VH domain
caggtgcagctggtgcagtctggggctgaggtgaagaagcctgggtcctcggtgaaggtctcctgcaaggcttctggaggcaccttcagcagctatgctatcagctgggtgcgacaggcccctggacaagggcttgagtggatgggaaggatcatccctatccttggtatagcaaactacgcacagaagttccagggcagagtcacgattaccgcggacaaatccacgagcacagcctacatggagctgagcagcctgagatctgaggacacggccgtgtattactgtgcgagacgctattgtagtggtggtagctgctacaaggactactggggccagggaaccctggtcaccgtctcctca

SEQ ID NO: 7996 - DNA, 366 bp, Artificial Sequence
  Synthetic polynucleotide encoding artificial human antibody VH domain
caggtgcagctggtggagtctgggggaggcgtggtccagcctgggaggtccctgagactctcctgtgcagcgtctggattcaccttcagtagctatggcatgcactgggtccgccaggctccaggcaaggggctggagtgggtggcagttatatggtatgatggaagtaataaatactatgcagactccgtgaagggccgattcaccatctccagagacaattccaagaacacgctgtatctgcaaatgaacagcctgagagccgaggacacggctgtgtattactgtgcgagaggtgattactatggttcagggagtaacgactttgactactggggccagggaaccctggtcaccgtctcctca

SEQ ID NO: 7997 - DNA, 381 bp, Artificial Sequence
  Synthetic polynucleotide encoding artificial human antibody VH domain
caggtgcagctggtgcagtctggggctgaggtgaagaagcctggggcctcagtgaaggtctcctgcaaggcttctggatacaccttcaccagttatgatatcaactgggtgcgacaggccactggacaagggcttgagtggatgggatggatgaaccctaacagtggtaacacaggctatgcacagaagttccagggcagagtcaccatgaccaggaacacctccataagcacagcctacatggagctgagcagcctgagatctgaggacacggccgtgtattactgtgcgagaggcctgaggcgggcgggatcgatagtagtggttagtctttactactttgactactggggccagggaaccctggtcaccgtctcctca

SEQ ID NO: 7998 - DNA, 375 bp, Artificial Sequence
  Synthetic polynucleotide encoding artificial human antibody VH domain
caggtgcatctggtgcagtctggggctgaggtgaagaagcctgggtcctcggtgaaggtctcctgcaagtcttctggaggttctttcaacacctatgcaatcagctgggtgcgacaggcccccggacaagggctggagtggatgggaaggatcatccccatcattggtacaggagaatacgcacagaagttccggggcagactcacgatcaccgcggacaaatccacgagcactgcctccatggaactgagtagcctgagatctgaggacacggccgtatattattgtgcgagagacggagggccggaggctggctccgactactaccacggtctggaagactggggccaagggaccacggtcaccgtctcctca

SEQ ID NO: 7999 - DNA, 393 bp, Artificial Sequence
  Synthetic polynucleotide encoding artificial human antibody VH domain
gaggtgcaactggtggagtctgggggaggcttggtgcagcctggggggtccctgagactctcctgtgcagcctctggattcagcttcaataactataacatgaactgggtccggcaggctccggggagggggctagagtgggtttcatacattagtagtaccagtaataccatctactacgcagactctgtgaagggccgattcaccatctccagagacaatgccaagaactcactgcatctgcaaatgaacagcctgagtgacgaggacacggctgtttattactgtgcgagagacccgggacgggcccagacggtttggtggcatacagtggctacaattacgggttactttgactactggggccagggagccctggtcaccgtctcctca

SEQ ID NO: 8000 - DNA, 363 bp, Artificial Sequence
  Synthetic polynucleotide encoding artificial human antibody VH domain
caggtgcagctggtggagtctgggggaggcgtggtccagcctgggaggtccctgagactctcctgtgcagcctctggattcaccttcagtagctatgctatgcactgggtccgccaggctccaggcaaggggctggagtgggtggcagttatatcatatgatggaagcaataaatactacgcagactccgtgaagggccgattcaccatctccagagacaattccaagaacacgctgtatctgcaaatgaacagcctgagagctgaggacacggctgtgtattactgtgcgagggcctatagtgggagctactactacggtatggacgtctggggccaagggaccacggtcaccgtctcctca

SEQ ID NO: 8001 - DNA, 378 bp, Artificial Sequence
  Synthetic polynucleotide encoding artificial human antibody VH domain
gaggtgcagctgttggagtctgggggaggcttggtacagcctggggggtccctgagactctcctgtgcagcctctggattcacctttagcagctatgccatgagctgggtccgccaggctccagggaaggggctggagtgggtctcagctattagtggtagtggtggtagcacatactacgcagactccgtgaagggccggttcaccatctccagagacaattccaagaacacgctgtatctgcaaatgaacagcctgagagccgaggacacggccgtatattactgtgcgaaagatcataacgtattactatggttcggggagttaaccgctggggtggacgtctggggccaagggaccacggtcaccgtctcctca

SEQ ID NO: 8002 - DNA, 369 bp, Artificial Sequence
  Synthetic polynucleotide encoding artificial human antibody VH domain
gaggtgcagctggtggagtctgggggaggcttggtaaagcctggggggtcccttagactctcctgtgcagcctctggattcactttcagtaacgcctggatgagctgggtccgccaggctccagggaaggggctggagtgggttggccgtattaaaagcaaaactgatggtgggacaacagactacgctgcacccgtgaaaggcagattcaccatctcaagagatgattcaaaaaacacgctgtatctgcaaatgaacagcctgaaaaccgaggacacagccgtgtattactgtaccacgagacggtggttcagggagttattaaaaaatgactactggggccagggaaccctggtcaccgtctcctca

SEQ ID NO: 8003 - DNA, 372 bp, Artificial Sequence
  Synthetic polynucleotide encoding artificial human antibody VH domain
caggtgcagctgcaggagtcgggcccaggactggtgaagccttcggagaccctgtccctcacctgcactgtctctggtggctccgtcagcagtggtagttactactggagctggatccggcagcccccagggaagggactggagtggattgggtatatctattacagtgggagcaccaactacaacccctccctcaagagtcgagtcaccatatcagtagacacgtccaagaaccagttctccctgaagctgagctctgtgaccgctgcggacacggccgtgtattactgtgcgagagagcccgtagtatcccaactttacagttacggtatggacgtctggggccaagggaccacggtcaccgtctcctca

SEQ ID NO: 8004 - DNA, 354 bp, Artificial Sequence
  Synthetic polynucleotide encoding artificial human antibody VH domain
caggtgcagctggtggagtctgggggaggcgtggtccagcctgggaggtccctgagactctcctgtgcagcctctggattcaccttcagtagctatggcatgcactgggtccgccaggctccaggcaaggggctggagtgggtggcagttatatcatatgatggaagtaataaatactatgcagactccgtgaagggccgattcaccatctccagagacaattccaagaacacgctgtatctgcaaatgaacagcctgagagctgaggacacggctgtgtattactgtgcgagtattagcagtggctggtactctgactactggggccagggaaccctggtcaccgtctcctca

SEQ ID NO: 8005 - DNA, 354 bp, Artificial Sequence
  Synthetic polynucleotide encoding artificial human antibody VH domain
caggtgcagctggtggagtctgggggaggcgtggtccagcctgggaggtccctgagactctcctgtgcagcctctggattcaccttcagtagctatgctatgcactgggtccgccaggctccaggcaaggggctggagtgggtggcagttatatcatatgatggaagcaataaatactacgcagactccgtgaagggccgattcaccatctccagagacaattccaagaacacgctgtatctgcaaatgaacagcctgagagctgaggacacggctgtgtattactgtgcgcgtaacggtgactccaactactttgactactggggccagggaaccctggtcaccgtctcctca

SEQ ID NO: 8006 - DNA, 402 bp, Artificial Sequence
  Synthetic polynucleotide encoding artificial human antibody VH domain
gaggtgcagctggtggagtctgggggaggcttggtacagcctggggggtccctgagactctcctgtgcagcctctggattcaccttcagtagctacgacatgcactgggtccgccaagctacaggaaaaggtctggagtgggtctcagctattggtactgctggtgacacatactatccaggctccgtgaagggccgattcaccatctccagagaaaatgccaagaactccttgtatcttcaaatgaacagcctgagagccggggacacggctgtgtattactgtgcaagagctcagactacgtgggcgggttcctatgactacgtttgggggagttatcgccaaacgaaaggtgatgcttttgatatctggggccaagggacaatggtcaccgtctcttca

SEQ ID NO: 8007 - DNA, 348 bp, Artificial Sequence
  Synthetic polynucleotide encoding artificial human antibody VH domain
gaggtgcagctgttggagtctgggggaggcttggtacagcctggggggtccctgagactctcctgtgcagcctctggattcacctttagcagctatgccatgagctgggtccgccaggctccagggaaggggctggagtgggtctcagctattagtggtagtggtggtagcacatactacgcagactccgtgaagggccggttcaccatctccagagacaattccaagaacacgctgtatctgcaaatgaacagcctgagagccgaggacacggccgtatattactgtgcgagcagatggctacaattggggtactggggccagggaaccctggtcaccgtctcctca

SEQ ID NO: 8008 - DNA, 372 bp, Artificial Sequence
  Synthetic polynucleotide encoding artificial human antibody VH domain
cagctgcaggtggaggagtccggttcgggactgacgaaaccttcagagaccctatatctcacctgcactgtctctggcgcctccgtcagagggggcggctactcctggagttggctccgcaagtctccagggagtggcctagagtggattggcttcatctatccgcccgcaagttattacaatccgtccctcaggagtcgcgccaccatttcagccggtccagcgttcaaccaggtctccctgacgctcacgtcagtcagcgccgcggacgcgggcgtttattactgcgccgtgggaggtggctattgtcatggtgggacctgcggctggttcgccccctggggccacggcatcatggtcgccgtctcctca

SEQ ID NO: 8009 - DNA, 357 bp, Artificial Sequence
  Synthetic polynucleotide encoding artificial human antibody VH domain
gaggtgcagctggtggagtctgggggaggcctggtcaagcctggggggtccctgagactctcctgtgcagcctctggattcaccttcagtagctatagcatgaactgggtccgccaggctccagggaaggggctggagtgggtctcatccattagtagtagtagtagttacatatactacgcagactcagtgaagggccgattcaccatctccagagacaacgccaagaactcactgtatctgcaaatgaacagcctgagagccgaggacacggctgtgtattactgtgcgagagattggagccggggatacggtatggacgtctggggccaagggaccacggtcaccgtctcctca

SEQ ID NO: 8010 - DNA, 342 bp, Artificial Sequence
  Synthetic polynucleotide encoding artificial human antibody VH domain
gaggtgcagttggaggagtctgggggaggcttggtccagccgggggggtccctgagactctcctgtgcagcctctggattcgccgtcagttccatctacatgagttgggtccgccaggctccagggaaggggctggagtgggtctccattttttatagcgatggagccacaaagtacgcagactccgtgaagggccgattcaccatctccagagacaattccgacaacacggtgtaccttcacatgaacagcctgagagtggaggacacggctatatatttctgtgcgagagatctacacttcgatatctggggccgcggcaccctggtcacggtctcctca

SEQ ID NO: 8011 - DNA, 399 bp, Artificial Sequence
  Synthetic polynucleotide encoding artificial human antibody VH domain
gaggtgcagctggtggagtctgggggaggcttggttcagcctggagggtccctcagactctcctgtgcggcctctcaattcaccttcagtcactatgaaatgagctgggtccgccaggctccagggaagggcctggagtgggttgcatacattagtcagagtggtagtaccctttatcacgcagacgcggtgaggggccgattcaccgtctccagagacaacgccgaaaactcgctgtttttgcaaatgaacagcctgagcgtcgaggacacggctacttactactgtgtgagagcgcttctcggagggacccgggattacgatatttcgactggtcattataatgaaggatactattttgactactggggccagggaaccctggtcaccgtcgcctca

SEQ ID NO: 8012 - DNA, 372 bp, Artificial Sequence
  Synthetic polynucleotide encoding artificial human antibody VH domain
gaagtgcagctggtggagtctgggggaggcgtggtacagcctggggggtccctgagactctcctgtgcagcctctggattcacctttgatgattatgccatgcactgggtccgtcaagctccagggaagggtctggagtgggtctctcttattagtggggatggtggtagcacatactatgcagactctgtgaagggccgattcaccatctccagagacaacagcaaaaactccctgtatctgcaaatgaacagtctgagaactgaggacaccgccttgtattactgtgcaaaagatataggggcagacgtattactatggttcggggcctgggactactggggccagggaaccctggtcaccgtctcctca

SEQ ID NO: 8013 - DNA, 378 bp, Artificial Sequence
  Synthetic polynucleotide encoding artificial human antibody VH domain
caggtcaccttgagggagtctggtcctgcgctggtgaaacccacacagaccctcacactgacctgcaccttctctgggttctcactcagcactagtggaatgtgtgtgagctggatccgtcagcccccagggaaggccctggagtggcttgcactcattgattgggatgatgataaatactacagcacatctctgaagaccaggctcaccatctccaaggacacctccaaaaaccaggtggtccttacaatgaccaacatggaccctgtggacacagccacgtattactgtgcacggatctggtatagcagtggctggtacgaacccaagtactactttgactactggggccagggaaccctggtcaccgtctcctca

SEQ ID NO: 8014 - DNA, 363 bp, Artificial Sequence
  Synthetic polynucleotide encoding artificial human antibody VH domain
gaggtgcagctgttggagtctgggggaggcttggtacagcctggggggtccctgagactctcctgtgcagcctctggattcacctttcagaactatgtcatgagttgggtccgccaggctccagggcaggggctggagtgggtctcagttgtttatcatggtggtgctaggacgtactacacagactccgtgaagggccggttcaccatctccagagacgattccaagaacacgctgtatctgcaaatgaacagcctgagagccgaggacacggccgtatattactgtgcgaaagatagagatgagtacggtgactatgcctttgactgctggggccagggcaccctggtcaccgtctcctca

SEQ ID NO: 8015 - DNA, 372 bp, Artificial Sequence
  Synthetic polynucleotide encoding artificial human antibody VH domain
caggtacagttgaagcagtcaggtccaggactggtgaagccctcgcagaccctctcactcacctgtgccatctcctgggacagtgtctcaactaaagaggctacttggaactggatcaggcagtccccatcgagaggccttgagtggctgggaaggacctactacaattccaagtggtttcaggattatgcactgtctgtgaaaagtcgaataatcatcaattcagacacatccaagaaccagttctccctgcagttgaactctgtgactcccgaggacacggctgtgtattactgtgcaagagaaccccaatacgacattatgggtggttttgcgcagtggagccagggaaccctggtcaccgtctcctca

SEQ ID NO: 8016 - DNA, 396 bp, Artificial Sequence
  Synthetic polynucleotide encoding artificial human antibody VH domain
caggtgcagctggtggagtctgggggaggcgtggtccagcctgggaggtccctgagactctcctgtgcagcgtctggattcaccttcagtagctatggcatgcactgggtccgccaggctccaggcaaggggctggagtgggtggcagttatatggtatgatggaagtaataaatactatgcagactccgtgaagggccgattcaccatctccagagacaattccaagaacacgctgtatctgcaaatgaacagcctgagagccgaggacacggctgtgtattactgtgcgcgatccacgtattactatgatagtagtggttattactacccctattactactactactacggtatggacgtctggggccaagggaccacggtcaccgtctcctca

SEQ ID NO: 8017 - DNA, 378 bp, Artificial Sequence
  Synthetic polynucleotide encoding artificial human antibody VH domain
caggtcaccttgagggagtctggtcctgcgctggtgaaacccacacagaccctcacactgacctgcaccttctctgggttctcactcagcactagtggaatgtgtgtgagctggatccgtcagcccccagggaaggccctggagtggcttgcacgcattgattgggatgatgataaatactacagcacatctctgaagaccaggctcaccatctccaaggacacctccaaaaaccaggtggtccttacaatgaccaacatggaccctgtggacacagccacgtattactgtgcacgggatacctacgatattttgactggttatggacctctactgatggacgtctggggccaagggaccacggtcaccgtctcctca

SEQ ID NO: 8018 - DNA, 387 bp, Artificial Sequence
  Synthetic polynucleotide encoding artificial human antibody VH domain
caggttcagctggtgcagtctggagctgaggtgaagaagcctggggcctcagtgaaggtctcctgcaaggcttctggttacacctttaccagctatggtatcagctgggtgcgacaggcccctggacaagggcttgagtggatgggatggatcagcgcttacaatggtaacacaaactatgcacagaagctccagggcagagtcaccatgaccacagacacatccacgagcacagcctacatggagctgaggagcctgagatctgacgacacggccgtgtattactgtgcgaggaaccccccgtattacgatattttgactggttattctctcgactactacggtatggacgtctggggccaagggaccacggtcaccgtctcctca

SEQ ID NO: 8019 - DNA, 363 bp, Artificial Sequence
  Synthetic polynucleotide encoding artificial human antibody VH domain
caggtgcagctggtggagtctgggggaggcgtggtccagcctgggaggtccctgagactctcctgtgcagcctctggattcaccttcagtagctatgctatgcactgggtccgccaggctccaggcaaggggctggagtgggtggcagttatatcatatgatggaagcaataaatactacgcagactccgtgaagggccgattcaccatctccagagacaattccaagaacacgctgtatctgcaaatgaacagcctgagagctgaggacacggctgtgtattactgtgcgaggacttatagtgggagctacaaaggctactttgactactggggccagggaaccctggtcaccgtctcctca

SEQ ID NO: 8020 - DNA, 405 bp, Artificial Sequence
  Synthetic polynucleotide encoding artificial human antibody VH domain
caggtgcagctggtggagtctgggggaggcgtggtccagcctgggaggtccctgagactctcctgtgcagcctctggattcaccttcagtagctatgctatgcactgggtccgccaggctccaggcaaggggctggagtgggtggcagttatatcatatgatggaagcaataaatactacgcagactccgtgaagggccgattcaccatctccagagacaattccaagaacacgctgtatctgcaaatgaacagcctgagagctgaggacacggctgtgtattactgtgcgagagacacgaagtattacgatttttggagtggttatttaggacgagaaactacgtactactactactacggtatggacgtctggggccaagggaccacggtcaccgtctcctca

SEQ ID NO: 8021 - DNA, 372 bp, Artificial Sequence
  Synthetic polynucleotide encoding artificial human antibody VH domain
gaggtgcagctggtgcagtctggagcagaggtgaaaaagcccggggagtctctgaagatctcctgtaagggttctggatacagctttaccagctactggatcggctgggtgcgccagatgcccgggaaaggcctggagtggatggggatcatctatcctggtgactctgataccagatacagcccgtccttccaaggccaggtcaccatctcagccgacaagtccatcagcaccgcctacctgcagtggagcagcctgaaggcctcggacaccgccatgtattactgtgcgagatcgtgggatagcagcagctggtggttaaccaactggttcgacccctggggccagggaaccctggtcaccgtctcctca

SEQ ID NO: 8022 - DNA, 375 bp, Artificial Sequence
  Synthetic polynucleotide encoding artificial human antibody VH domain
caggtgcagctggtggagtctgggggaggcgtggtccagcctgggaggtccctgagactctcctgtgcagcctctggattcaccttcagtagctatgctatgcactgggtccgccaggctccaggcaaggggctggagtgggtggcagttatatcatatgatggaagcaataaatactacgcagactccgtgaagggccgattcaccatctccagagacaattccaagaacacgctgtatctgcaaatgaacagcctgagagctgaggacacggctgtgtattactgtgtgcgagactacgatgactacggtgactacggagagtcgtactactttgactactggggccagggaaccctggtcaccgtctcctca

SEQ ID NO: 8023 - DNA, 363 bp, Artificial Sequence
  Synthetic polynucleotide encoding artificial human antibody VH domain
gaagtgcagctggtgcagtctggagcagaggtgaaaaagcccggggagtctctgaggatctcctgtaagggttctggatacagctttaccagctactggatcagctgggtgcgccagatgcccgggaaaggcctggagtggatggggaggattgatcctagtgactcttataccaactacagcccgtccttccaaggccacgtcaccatctcagctgacaagtccatcagcactgcctacctgcagtggagcagcctgaaggcctcggacaccgccatgtattactgtgcgagacatcaaggaggctccccatttggcggtatggacgtctggggccaagggaccacggtcaccgtctcctca

SEQ ID NO: 8024 - DNA, 375 bp, Artificial Sequence
  Synthetic polynucleotide encoding artificial human antibody VH domain
caggtgcagctgcaggagtcgggcccaggactggtgaagccttcggagaccctgtccctcacctgcactgtctctggtggctccatcagtagttactactggagctggatccggcagcccccagggaagggactggagtggattgggtatatctattacagtgggagcaccaactacaacccctccctcaagagtcgagtcaccatatcagtagacacgtccaagaaccagttctccctgaagctgagctctgtgaccgccgcagacacggccgtgtattactgtgcgagatacgatattttgactggttattacatgggttcgggtcgctggttcgacccctggggccagggaaccctggtcaccgtctcctca

SEQ ID NO: 8025 - DNA, 372 bp, Artificial Sequence
  Synthetic polynucleotide encoding artificial human antibody VH domain
gaggtgcagctggtggagtctgggggaggcctggtcaagcctggggggtccctgagactctcctgtgcagcctctggattcaccttcagtagctatagcatgaactgggtccgccaggctccagggaaggggctggagtgggtctcatccattagtagtagtagtagttacatatactacgcagactcagtgaagggccgattcaccatctccagagacaacgccaagaactcactgtatctgcaaatgaacagcctgagagccgaggacacggctgtgtattactgtgcgagaggttccatggggggatttactatgatagtagtggctctatcccactggggccagggaaccctggtcaccgtctcctca

SEQ ID NO: 8026 - DNA, 366 bp, Artificial Sequence
  Synthetic polynucleotide encoding artificial human antibody VH domain
caggtccagctggtacagtctggggctgaggtgaagaagcctggggcctcagtgaaggtctcctgcaaggtttccggatacaccctcactgaattatccatgcactgggtgcgacaggctcctggaaaagggcttgagtggatgggaggttttgatcctgaagatggtgaaacaatctacgcacagaagttccagggcagagtcaccatgaccgaggacacatctacagacacagcctacatggagctgagcagcctgagatctgaggacacggccgtgtattactgtgcaacagacagggacctctacggtggtaaccactgttttgatatctggggccaagggacaatggtcaccgtctcttca

SEQ ID NO: 8027 - DNA, 357 bp, Artificial Sequence
  Synthetic polynucleotide encoding artificial human antibody VH domain
gaggtgcaactggtagactctgggggaggtttggtccagcctggggggtccctgagactctcctgtgtagcctctggattcacctttagtagccgttggatgagctgggtccgccaggctccagggaaggggctggagtgggtggccaacataaatgaagacggaaatgtgattggctatgcggactctgtgaggggccgattcacgatctccagagacaacgccaagaactcactgtttctgcaaatgaacagcctgagcgacggggacacggctgtttacttttgtacgagcgtcttcggcgcctacgatgtttgtgactattggggccagggaacccgggtcaccgtctcctca

SEQ ID NO: 8028 - DNA, 372 bp, Artificial Sequence
  Synthetic polynucleotide encoding artificial human antibody VH domain
caggtgcagctgcaggagtcgggcccaggactggtgaagccttcacagaccctgtccctcacctgcactgtctctggtggctccatcagcagtggtggttactactggagctggatccgccagcacccagggaagggcctggagtggattgggtacatctattacagtgggagcacctactacaacccgtccctcaagagtcgagttaccatatcagtagacacgtctaagaaccagttctccctgaagctgagctctgtgactgccgcggacacggccgtgtattactgtgcgagagcgggattcgatggagcagtggcccccgaggggttcgacccctggggccagggaaccctggtcaccgtctcctca

SEQ ID NO: 8029 - DNA, 357 bp, Artificial Sequence
  Synthetic polynucleotide encoding artificial human antibody VH domain
caggtccagctggtacagtctggggctgaggtgaagaagcctggggcctcagtgaaggtctcctgcaaggtttccggatacaccctcactgaattatccatgcactgggtgcgacaggctcctggaaaagggcttgagtggatgggaggttttgatcctgaagatggtgaaacaatctacgcacagaagttccagggcagagtcaccatgaccgaggacacatctacagacacagcctacatggagctgagcagcctgagatctgaggacacggccgtgtattactgtgcaacattttcatcttacgttggtagggcggactactggggccagggaaccctggtcaccgtctcctca

SEQ ID NO: 8030 - DNA, 372 bp, Artificial Sequence
  Synthetic polynucleotide encoding artificial human antibody VH domain
gaggtgcagctggtgcagtctggagcagaggtgaaagagtccggggagtctctgaagatctcctgtaaggcctctggttacagctttcccagctactggatcggctgggtgcgccagatgcccgggaaaggcctggaatggatggggatcatctatcctggtgactctaatcccacgtacagcccctccttcgaaggccaggtcatcatctcagccgacaagtccatcaacaccgcctacctgcagtggatcagcctgagggcctcggacaccgccatgtatttctgtgcgagagtcagaaaacggttcggggacatagtgggggatgcttttgatatctggggccaagggacaatggtcaccgtcgcttca

SEQ ID NO: 8031 - DNA, 351 bp, Artificial Sequence
  Synthetic polynucleotide encoding artificial human antibody VH domain
caggtgcagctggtggagtctgggggaggcgtggtccagcctgggaggtccctgagactctcctgtgcagcctctggattcaccttcagtagctatggcatgcactgggtccgccaggctccaggcaaggggctggagtgggtggcagttatatcatatgatggaagtaataaatactatgcagactccgtgaagggccgattcaccatctccagagacaattccaagaacacgctgtatctgcaaatgaacagcctgagagctgaggacacggctgtgtattactgtgcgaagggggtagagtactactctgactactggggccagggaaccctggtcaccgtctcctca

SEQ ID NO: 8032 - DNA, 360 bp, Artificial Sequence
  Synthetic polynucleotide encoding artificial human antibody VH domain
caggtgcagctgcaggagtcgggcccaggactggtgaagccttcggagaccctgtccctcacctgcactgtctctggtggctccatcagtagttactactggagctggatccggcagcccccagggaagggactggagtggattgggtatatctattacagtgggagcaccaactacaacccctccctcaagagtcgagtcaccatatcagtagacacgtccaagaaccagttctccctgaagctgagctctgtgaccgccgcagacacggccgtgtattactgtgcgagacgggggtattactatggttcggtagggttcgacccctggggccagggaaccctggtcaccgtctcctca

SEQ ID NO: 8033 - DNA, 384 bp, Artificial Sequence
  Synthetic polynucleotide encoding artificial human antibody VH domain
caggtgcagctggtggagtctgggggaggcgtggtccagcctgggaggtccctgagactctcctgtgcagcgtctggattcaccttcagtagctatggcatgcactgggtccgccaggctccaggcaaggggctggagtgggtggcagttatatcatatgatggaagtaataaatactatgcagactccgtgaagggccgattcaccatctccagagacaattccaagaacacgctgtatctgcaaatgaacagcctgagagctgaggacacggctgtgtattactgtgcgaagccttcgtttggtctcagtggctggtttgacttctactactactacggtatggacgtctggggccaagggaccacggtcaccgtctcctca

SEQ ID NO: 8034 - DNA, 366 bp, Artificial Sequence
  Synthetic polynucleotide encoding artificial human antibody VH domain
gaggtgcagctgttggagtctgggggaggcttggtacagcctggggggtccctgagactctcctgtgcagcctctggattcacctttagcagctatgccatgagctgggtccgccaggctccagggaaggggctggagtgggtctcagctattagtggtagtggtggtagcacatactacgcagactccgtgaagggccggttcaccatctccagagacaattccaagaacacgctgtatctgcaaatgaacagcctgagagccgaggacacggccgtatattactgtgcgaaggtggtcggggagcccaaaggggcgaactggttcgacccctggggccagggaaccctggtcaccgtctcctca

SEQ ID NO: 8035 - DNA, 369 bp, Artificial Sequence
  Synthetic polynucleotide encoding artificial human antibody VH domain
gaggtgcagctggtggagtctgggggaggcttggtaaagcctggggggtcccttagactctcctgtgcagcctctggattcactttcagtaacgcctggatgagctgggtccgccaggctccagggaaggggctggagtgggttggccgtattaaaagcaaaactgatggtgggacaacagactacgctgcacccgtgaaaggcagattcaccatctcaagagatgattcaaaaaacacgctgtatctgcaaatgaacagcctgaaaaccgaggacacagccgtgtattactgtaccacagattcggcttctatcggatactacggtatggacgtctggggccaagggaccacggtcaccgtctcctca

SEQ ID NO: 8036 - DNA, 363 bp, Artificial Sequence
  Synthetic polynucleotide encoding artificial human antibody VH domain
caggtccagctggtacagtctggggctgaggtgaagaagcctggggcctcagtgaaggtctcctgcaaggtttccggatacaccctcactgaattatccatgcactgggtgcgacaggctcctggaaaagggcttgagtggatgggaggttttgatcctgaagatggtgaaacaatctacgcacagaagttccagggcagagtcaccatgaccgaggacacatctacagacacagcctacatggagctgagcagcctgagatctgaggacacggccgtgtattactgtgcaacaggcccaccctacggtgaccgaaactggttcgacccctggggccagggaaccctggtcaccgtctcctca

SEQ ID NO: 8037 - DNA, 390 bp, Artificial Sequence
  Synthetic polynucleotide encoding artificial human antibody VH domain
caggtccagctggtacagtctggggctgaggtgaagaagcctggggcctcagtgaaggtctcctgcaaggtttccggatacaccctcactgaattatccatgcactgggtgcgacaggctcctggaaaagggcttgagtggatgggaggttttgatcctgaagatggtgaaacaatctacgcacagaagttccagggcagagtcaccatgaccgaggacacatctacagacacagcctacatggagctgagcagcctgagatctgaggacacggccgtgtattactgtgcaacaggggtttcggcttactatgatagtagggatgggacgtactactactactacggtatggacgtctggggccaagggaccacggtcaccgtctcctca

SEQ ID NO: 8038 - DNA, 390 bp, Artificial Sequence
  Synthetic polynucleotide encoding artificial human antibody VH domain
caggttcagctggtgcagtctggagctgaggtgaagaagcctggggcctcagtgaaggtctcctgcaaggcttctggttacacctttaccagctatggtatcagctgggtgcgacaggcccctggacaagggcttgagtggatgggatggatcagcgcttacaatggtaacacaaactatgcacagaagctccagggcagagtcaccatgaccacagacacatccacgagcacagcctacatggagctgaggagcctgagatctgacgacacggccgtgtattactgtgcgagaggatgtggtggtgactgctattccccctggggcttttactactactactacggtatggacgtctggggccaagggaccacggtcaccgtctcctca

SEQ ID NO: 8039 - DNA, 378 bp, Artificial Sequence
  Synthetic polynucleotide encoding artificial human antibody VH domain
gaggtgcagctgttggagtctgggggaggcttagtacagcctggggagtccctgagactctcctgtgcagcctctggattcacgtttagcagctatgacatgacctgggtccgccaggctccagggaaggggctggagtgggtctcagcaattagtggtagtggtggtggcacatactacgcagactccgtgaagggccggttcaccatctccagagacaattccaagaacacgctgtatctgcaaatgaacagcctgagagccgaggacacggccgtatattactgtgcgaaaggcgtagggtattacgatttttggagtggtcagggagatggtatggacgtctggggccaagggaccacggtcaccgtctcctca

SEQ ID NO: 8040 - DNA, 381 bp, Artificial Sequence
  Synthetic polynucleotide encoding artificial human antibody VH domain
caggtgcagctgcaggagtcgggcccaggactggtgaagccttcggagaccctgtccctcacctgcactgtctctggtggctccgtcagcagtggtagttactactggagctggatccggcagcccccagggaagggactggagtggattgggtatatctattacagtgggagcaccaactacaacccctccctcaagagtcgagtcaccatatcagtagacacgtccaagaaccagttctccctgaagctgagctctgtgaccgctgcggacacggccgtgtattactgtgcgagagaacctctccgtattactatgatagtagtggagcggggggggctcgacccctggggccagggaaccctggtcaccgtctcctca

SEQ ID NO: 8041 - DNA, 387 bp, Artificial Sequence
  Synthetic polynucleotide encoding artificial human antibody VH domain
caggtccagcttgtgcagtctggggctgaggtgaagaagcctggggcctcagtgaaggtttcctgcaaggcttctggatacaccttcactagctatgctatgcattgggtgcgccaggcccccggacaaaggcttgagtggatgggatggatcaacgctggcaatggtaacacaaaatattcacagaagttccagggcagagtcaccattaccagggacacatccgcgagcacagcctacatggagctgagcagcctgagatctgaagacacggctgtgtattactgtgcgagaaggcgtattacgatttttggagtggttattattgacaataggggggactggttcgacccctggggccagggaaccctggtcaccgtctcctca

SEQ ID NO: 8042 - DNA, 372 bp, Artificial Sequence
  Synthetic polynucleotide encoding artificial human antibody VH domain
caggtgcagctggtggagtctgggggaggcgtggtccagcctgggaggtccctgagactctcctgtgcagcctctggattcaccttcagtagctatgctatgcactgggtccgccaggctccaggcaaggggctggagtgggtggcagttatatcatatgatggaagcaataaatactacgcagactccgtgaagggccgattcaccatctccagagacaattccaagaacacgctgtatctgcaaatgaacagcctgagagctgaggacacggctgtgtattactgtgcgatacctcccttggcagctcagaactactactactacggtatggacgtctggggccaagggaccacggtcaccgtctcctca

SEQ ID NO: 8043 - DNA, 381 bp, Artificial Sequence
  Synthetic polynucleotide encoding artificial human antibody VH domain
caggtgcagctggtggagtctgggggaggcgtggtccagcctgggaggtccctgagactctcctgtgcagcgtctggattcaccttcagtagctatggcatgcactgggtccgccaggctccaggcaaggggctggagtgggtggcagttatatcatatgatggaagtaataaatactatgcagactccgtgaagggccgattcaccatctccagagacaattccaagaacacgctgtatctgcaaatgaacagcctgagagctgaggacacggctgtgtattactgtgcgaaagatcgcccctattgtagtggtggtagctgccaagcttacggctggttcgacccctggggccagggaaccctggtcaccgtctcctca

SEQ ID NO: 8044 - DNA, 375 bp, Artificial Sequence
  Synthetic polynucleotide encoding artificial human antibody VH domain
caggtgcagctggtgcagtctggggctgaggtgaagaagcctggggcctcagtgaaggtttcctgcaaggcatctggatacaccttcaccagctactatatgcactgggtgcgacaggcccctggacaagggcttgagtggatgggaataatcaaccctagtggtggtagcacaagctacgcacagaagttccagggcagagtcaccatgaccagggacacgtccacgagcacagtctacatggagctgagcagcctgagatctgaggacacggccgtgtattactgtgcgagagaggagtcgtacggtgactacccctggtctactcgtggtatggacgtctggggccaagggaccacggtcaccgtctcctca

SEQ ID NO: 8045 - DNA, 399 bp, Artificial Sequence
  Synthetic polynucleotide encoding artificial human antibody VH domain
caggtgcagctggtggagtctgggggaggcgtggtccagcctgggaggtccctgagactctcctgtgcagcctctggattcaccttcagtagctatgctatgcactgggtccgccaggctccaggcaaggggctggagtgggtggcagttatatcatatgatggaagcaataaatactacgcagactccgtgaagggccgattcaccatctccagagacaattccaagaacacgctgtatctgcaaatgaacagcctgagagctgaggacacggctgtgtattactgtgcgagagatgtagtggctacgggcgagggtattactatgatttggggggtttactactactactacggtatggacgtctggggccaagggaccacggtcaccgtctcctca

SEQ ID NO: 8046 - DNA, 366 bp, Artificial Sequence
  Synthetic polynucleotide encoding artificial human antibody VH domain
caggtgcagctggtgcagtctggggctgaggtgaagaagcctggggcctcagtgaaggtttcctgcaaggcatctggatacaccttcaccagctactatatgcactgggtgcgacaggcccctggacaagggcttgagtggatgggaataatcaaccctagtggtggtagcacaagctacgcacagaagttccagggcagagtcaccatgaccagggacacgtccacgagcacagtctacatggagctgagcagcctgagatctgaggacacggccgtgtattactgtgcgagagagagtgatagtagtggttaccacgggtggttcgacccctggggccagggaaccctggtcaccgtctcctca

SEQ ID NO: 8047 - DNA, 360 bp, Artificial Sequence
  Synthetic polynucleotide encoding artificial human antibody VH domain
caggtgcagctgcaggagtcgggcccaggactggtgaagccttcggagaccctgtccctcacctgcactgtctctgatgactccatcagcagtaaaaactggtggagttgggtccgccagcccccagggaaggggctggagtggattggagaaatctctcatagtgggaacaccaagtacaacccgtccctcaggagtcgagtctccatatcagtagacaagtcgaagaaccagttctccctggagctggattctgtgaccgccgcggacacggccgtgtattactgtgcgcgagtcagtaattggaactatggcccccttgattactggggccaaggaaccctggtcaccgtctcctca

SEQ ID NO: 8048 - DNA, 369 bp, Artificial Sequence
  Synthetic polynucleotide encoding artificial human antibody VH domain
cagctgcagctgcaggagtcgggcccaggactggtgaagccttcggagaccctgtccctcacctgcactgtctctggtggctccatcagcagtagtagttactactggggctggatccgccagcccccagggaaggggctggagtggattgggagtatctattatagtgggagcacctactacaacccgtccctcaagagtcgagtcaccatatccgtagacacgtccaagaaccagttctccctgaagctgagctctgtgaccgccgcagacacggctgtgtattactgtgcgagacaccagacttactacggtgactacgggggggttgactactggggccagggaaccctggtcaccgtctcctca

SEQ ID NO: 8049 - DNA, 354 bp, Artificial Sequence
  Synthetic polynucleotide encoding artificial human antibody VH domain
gaggtgcagctggtacagtctggagcagaggtgaaaaagcccggggagtctctgaagatctcctgtcagggttctggatacaggtttaccagctactggatcggctgggtgcgccagatgcccgggaaagggctggagtggatggggatcatctatcctggtgactctgacactagatacagcccgtccttccaaggccaggtcaccatctcagccgacaagtccatcagtaccgcctacctgcagtggagcagcctgagggcctcggacaccgccatgtactactgtgcgattcacgactacggtgactacgttgggtactggggccagggaaccctggtcaccgtctcctca

SEQ ID NO: 8050 - DNA, 369 bp, Artificial Sequence
  Synthetic polynucleotide encoding artificial human antibody VH domain
caggtgcaattgatggagtctgggggaggcgtggtccagcctggggggtccctgagactcacatgtgccgcctctgggttcatcttcgaagactattctatccactgggtccgccagactccaggcaaggggccggagtgggtggcagttatcacagatgatggagacattgcttcctacgcagattccgtgcagggccgattcatcatgtcaagagacaattccaacgggacggtgtatctgcacatgaaggacttgagagttgaggacacggctatatattactgtgtgcgagatcgccatggcgggagctactactgggagtacttccaattttggggccaggggaccctggtcaccgtctccgca

SEQ ID NO: 8051 - DNA, 369 bp, Artificial Sequence
  Synthetic polynucleotide encoding artificial human antibody VH domain
caggtgcagctgcaggagtcgggcccaggactggtgaagccttcacagaccctgtccctcacctgcattgtctctggtgactccatcagcagtggtggttactactggagttggatccgccagcacccagtgaagggcctggagtggattggatacatctataacactgggatcacctactacaacccgtccctcgagagtcgagtgaccatctctctagacacgtctaagaaccagttctccctgaaactaagttctgtgactgccgcggacacggccgtgtattattgtgcgagagggaacggcaattcccctagtagttatccttattctccctggggccagggaaccctggtcaccgtctcctca

SEQ ID NO: 8052 - DNA, 354 bp, Artificial Sequence
  Synthetic polynucleotide encoding artificial human antibody VH domain
caggtgcagctgcaggcgtcgggcccaggactggtgcagccttcggagaccctgtcactcacctgcactgtctctgatacgtccctcaggagttactcgttgagttggattcggcagttcgcaggggagagatgggaatggattgggtttgtgtctgacaatgggagaattgcctacaacccctccctcgacggtcgagtcgtcatctcagtggacacgtccaagaaccagttctccctcaaactggcctctgtgaccgccgcggacacggccgtatattactgtgcgaggccaaattggggtgactttgcttttgatatctggagccgcgggacagtggtcactgtctcttca

SEQ ID NO: 8053 - DNA, 387 bp, Artificial Sequence
  Synthetic polynucleotide encoding artificial human antibody VH domain
gaagtgcagctggtggagtctgggggaggcgtggtacagcctggggggtccctgagactctcctgtgcagcctctggattcacctttgatgattatgccatgcactgggtccgtcaagctccagggaagggtctggagtgggtctctcttattagtggggatggtggtagcacatactatgcagactctgtgaagggccgattcaccatctccagagacaacagcaaaaactccctgtatctgcaaatgaacagtctgagaactgaggacaccgccttgtattactgtgcaaaagataaaaggggacccctctacggtgactacggggtttactactactacggtatggacgtctggggccaagggaccacggtcaccgtctcctca

SEQ ID NO: 8054 - DNA, 396 bp, Artificial Sequence
  Synthetic polynucleotide encoding artificial human antibody VH domain
caggtgcagctgcaggagtcgggcccaggactggtgaagccttcacagaccctgtccctcacctgcactgtctctggtggctccatcagcagtggtggttactactggagctggatccgccagcacccagggaagggcctggagtggattgggtacatctattacagtgggagcacctactacaacccgtccctcaagagtcgagttaccatatcagtagacacgtctaagaaccagttctccctgaagctgagctctgtgactgccgcggacacggccgtgtattactgtgcgagaaatggggggggggggggcccccaaatgattacgtttgggggagttatcgggcctttttttgactactggggccagggaaccctggtcaccgtctcctca

SEQ ID NO: 8055 - DNA, 363 bp, Artificial Sequence
  Synthetic polynucleotide encoding artificial human antibody VH domain
caggtgcagctgcaggagtcgggcccaggactggtgcagccttcggagaccctgtctctcacctgtactatctctggtggctccatgagtagttactactggagctggatccggcagcccccagggaagcgactggagtggatcgggtatatctatgacagtgggatcaccaattacaacccctccctcaggagtcgggtcagcatttcagtagacacgtccaagaaccagttctccctgaacctgaggtctgtgaccgctgcggacacggccttttattactgtgcgagggtggactatcatagtagtgggccagttgcccgtgatatctggggccaagggacaatggtcaccgtctcttca

SEQ ID NO: 8056 - DNA, 393 bp, Artificial Sequence
  Synthetic polynucleotide encoding artificial human antibody VH domain
caggtgcagctggtggagtctgggggaggcgtggtccagcctgggaggtccctgagactctcctgtgcagcctctggattcaccttcagtagctatgctatgcactgggtccgccaggctccaggcaaggggctggagtgggtggcagttatatcatatgatggaagcaataaatactacgcagactccgtgaagggccgattcaccatctccagagacaattccaagaacacgctgtatctgcaaatgaacagcctgagagctgaggacacggctgtgtattactgtgcgagagatttgagctacggtgactacgtgtgggagactctagggggttactactactacggtatggacgtctggggccaagggaccacggtcaccgtctcctca

SEQ ID NO: 8057 - DNA, 387 bp, Artificial Sequence
  Synthetic polynucleotide encoding artificial human antibody VH domain
gaggtgcagctgttggagtctgggggaggcttggtacagcctggggggtccctgagactctcctgtgcagcctctggattcacctttagcagctatgccatgagctgggtccgccaggctccagggaaggggctggagtgggtctcagctattagtggtagtggtggtagcacatactacgcagactccgtgaagggccggttcaccatctccagagacaattccaagaacacgctgtatctgcaaatgaacagcctgagagccgaggacacggccgtatattactgtgcgaaagagggtcgacctataaatgggtattacgatattttgactgatccgtactactttgactactggggccaaggaaccctggtcaccgtctcctca

SEQ ID NO: 8058 - DNA, 360 bp, Artificial Sequence; identical to SEQ ID NO: 8032
  Synthetic polynucleotide encoding artificial human antibody VH domain

SEQ ID NO: 8059 - DNA, 357 bp, Artificial Sequence
  Synthetic polynucleotide encoding artificial human antibody VH domain
gaggtgcagctggtggagtctggaggaggcttgatccagcctggggggtccctgagactctcctgtgcagcctctgggttcaccgtcagtagcaactacatgagctgggtccgccaggctccagggaaggggctggagtgggtctcagttatttatagcggtggtagcacatactacgcagactccgtgaagggccgattcaccatctccagagacaattccaagaacacgctgtatcttcaaatgaacagcctgagagccgaggacacggccgtgtattactgtgcgagaggggattgggggatagcagtggctggtacgaaatggggccagggaaccctggtcaccgtctcctca

SEQ ID NO: 8060 - DNA, 348 bp, Artificial Sequence
  Synthetic polynucleotide encoding artificial human antibody VH domain
gaggtgcacctggtggagtctgggggaggcctggcaaagcctggggagccccttagactctcatgtgcagcgtccggattcgttttcactggcgcctggatgagctgggtccgccaggctccagggaaggggctggagtgggtcggccgtgttatgaccaaggctgacggtgggactacggactacgctgcacccgtgaaaggcagattcaccatctcaagagatgattctcaaaacacactgtatctgcatatgaacagcctgaaaaccgaggacacagccgtctattattgcaccgcaggatttggggacgcctggggccaagggaccacggtcaccgtctcctca

SEQ ID NO: 8061 - DNA, 372 bp, Artificial Sequence
  Synthetic polynucleotide encoding artificial human antibody VH domain
gaggtgcagctggtggagtctgggggagcgttggtacagcctggggggtccctgagactctcctgtgcagcctctggattcatcttcagtagttatgaaatgaactgggtccgccagactccagggaaggggctggaatggatctcatatattagtggtagtggtagtagcatatactacgcagactctgtgaggggccggtttatcatctccagagacaacgccaggaagtcactgtatctgcaaatgaacagcctgagagccgcggacacggctatttattattgtgcgagaggtgacgtctggggcggcaccatcccccaggatgcttttgatatgtggggccaagggacaaccgtcgtcgtctcttca

SEQ ID NO: 8062 - DNA, 366 bp, Artificial Sequence
  Synthetic polynucleotide encoding artificial human antibody VH domain
gaggtgcagctggtggagtctgggggaggcttggtccagcctggggggtccctgagactctcctgtgcagcctctggattcagcttaagtaaatattggatgacgtgggtccgccaggctccagggaaggggctggagtgggtggccaacataaagcaaaatggaggagagaaatactatgtggactctgtgaagggccgattcaccatctccagagacaacgccaagaactcactgtatctgcaaatgaacagcctgagagccgaggatacggctgtgtattactgtgcgagaggtttgatagtggtgttagctgatgatgtttttgatatctggggccaagggacaatggtcaccgtctcttca

SEQ ID NO: 8063 - DNA, 387 bp, Artificial Sequence
  Synthetic polynucleotide encoding artificial human antibody VH domain
caaatgcagctggagcaatctgggcctgaggtgaagaagcctgggacctcagtgaaggtcgcctgcaaggcttctggattcacctttattcactctgctatgcagtgggtgcgacaggctcgtggacagcgccctgagtggatagggtggatcgtcgttggcagtggtaacagaaacatcgcaccgaagtttcaagacagagtcatcatcaccagggacatctccacagacacatcttatatggaattgaggagcctgaaatccgaggacacggccgtctactactgtgcgacagatccttgggtcggatataccggctatgattatggagactactattacggtatggacgtctggggccaaggcaccacggtcaccgtctcctca

SEQ ID NO: 8064 - DNA, 393 bp, Artificial Sequence
  Synthetic polynucleotide encoding artificial human antibody VH domain
caggtccagctggtgcaatctggggctgaggtgaagaagcctgggtcctcggtgaaggtctcctgcaaggcttctggaggcaccttcagcacctatactatcagctgggtgcgacaggcccctggacaagggcttgagtggatgggaaggatcatccctatccttggtatagcaaactacgcacagaagttccagggcagagtcacgattaccgcggacaaatccacgagcacagcgtacatggagctgagcagcctgagatctgaggacacggccgtgtattactgtgcgagggggcctgaggtggctacggtggtaaccagaggagaagattactactactactacggtatggacgtctggggccaagggaccacggtcaccgtctcctca

SEQ ID NO: 8065 - DNA, 369 bp, Artificial Sequence
  Synthetic polynucleotide encoding artificial human antibody VH domain
caggtgcagctgcaggagtcgggcccaggactggtgaagccttcggagaccctgtccctcacctgcactgtctctggtggctccatcagtagttactactggagctggatccggcagcccccagggaagggactggagtggattgggtatatctattacagtgggagcaccaactacaacccctccctcaagagtcgagtcaccatatcagtagacacgtccaagaaccagttctccctgaagctgagctctgtgaccgctgcggacacggccgtgtattactgtgcgagagatccgagggggtggctagcagctcccccgggctactttgactactggggccagggaaccctggtcaccgtctcctca

SEQ ID NO: 8066 - DNA, 360 bp, Artificial Sequence
  Synthetic polynucleotide encoding artificial human antibody VH domain
caggtgcagctggtgcagtctggggctgaaatgaggaagcctggggcctcagtgagggtctcctgcgcggcttctgggtataccttcaccgactattatatacactgggtacgacaggcccctggacaagggcttgagtggatgggacggatgaaccctaacagtggtggctcatactttgcgcagaagtttcaggacagggtcaccatgaccagggacacgaccatcagcacagcctacatggacctcaccaggctgcgatctgacgacacggccgtgtatttctgtgcgagagacggggggtctagcgcctcgtcctgggactactggggccagggaaccctggtcaccgtctcctca

SEQ ID NO: 8067 - DNA, 375 bp, Artificial Sequence
  Synthetic polynucleotide encoding artificial human antibody VH domain
caggtacagctgcagcagtcaggtccaggactgatgaagccctcgcagaccctctcacttacctgtgccatctccggggacagtatctctagcgacactgctgcttggaactggatcaggcagtctccatcgagaggccttgagtggctgggaaggacatactacaggtccaactggtataataattatgcagtatctgtgaaaagtcgaataaccatcaaccccgacacatccaagaaccagttctccctacagctggagtctgtgactcccgaggacacggctctgtattattgtgcaaagacgtactacgcaaagagcggagactggtacttcgatctctggggccgtggcaccctggtcactgtctcctca

SEQ ID NO: 8068 - DNA, 378 bp, Artificial Sequence
  Synthetic polynucleotide encoding artificial human antibody VH domain
caggtgcagctgcaggagtcgggcccaggactggtgaagccttcacagaccctgtccctcacatgcactgtctctggtgactccatcagtggtggtgattattattggagctggctccggcagcccgccgggagggcactggagtggattgggcgtatctatcccggtgggagcaccaactacaactcctccctcaagagtcgagtcaccatttcagtagacacgtcgaagaaccagttctccctgaacatagactctgtgaccgccgcagacacggccgtatatttctgtgcgagaggtcgttggggccggcctgtctggcgacagtcatactactttgaccgctggggccagggaacccttgtcaccgtctcctca

SEQ ID NO: 8069 - DNA, 381 bp, Artificial Sequence
  Synthetic polynucleotide encoding artificial human antibody VH domain
gaggtgcagttgttggagtctgggggaggcttggttcagcctggggggtccctgagactctcctgtgtagcctctggatacgtgtttgccaagtatgccatgagctgggtccgcaaggttcctgggaaggggctcgagtgggtcgcaggtgttactggtagtggcaaagggacatactacgcagagtccgtggagggccggttcaccatctccagagacgattccaagaacacagtctacctgcagatgaacagcctgggtgtcgaggacacggccgtatattactgtgcgaaagatatgcagtttgttcttttcgaggcattaatatctccctcctactttgaccactggggcccgggaacccaggtctccgtctcctca

SEQ ID NO: 8070 - DNA, 363 bp, Artificial Sequence
  Synthetic polynucleotide encoding artificial human antibody VH domain
caggtccggctggtacagtctggggctgaggtgaagagacctggggcctcagtgaaggtctcctgcgaggtttccggaaacagtctcagtgatttatccatacactgggtgcggcagggtcctggaaaagggcttgagtggatgggaggtcttgatcctgaaaatggtgaaaaaatctacgcacagaagttccagggcagagtcaccatgaccggggaccttgccacagacacagtgcacatggagctgagcagcctgaaatctgaggactcggccgtctatttctgtgtgacagacctgagtaacaattggtaccgatactttgacatctggggccagggaaccctggtctccgtctcctca

SEQ ID NO: 8071 - DNA, 357 bp, Artificial Sequence
  Synthetic polynucleotide encoding artificial human antibody VH domain
gaggtgcaactggtggagtctgggggaggcttggtccagcctggagggtccctgagactctcctgttcaacctctggattcagtttcagtgaccactacatagactgggtccgccaggctccagggaaggggctggagtgggttggccgaactagaaacagagttgaaggtttcaccacagattacgccgcgtctgtgaagggcagattcaccatctcaagagatgattcaaagaactcagtgtctctgcaaatgaacagtctgaaaagcgacgacacggccgtgtattactgtagtaggtccaactggtgggatttagactactggggccagggaaccctggtcaccgtctcctca

SEQ ID NO: 8072 - DNA, 354 bp, Artificial Sequence
  Synthetic polynucleotide encoding artificial human antibody VH domain
gaggtgcagttggtggagtcggggggaggcttggtccagccgggggggtccctgagactctcctgtgtagcctctggattcagcttcagtaactattggatgagttgggtccgccagtctccagggaagggcctggagtgggtggccaatataaggcaagatggagctgaaaagtattgtgtggactctgtgaggggccgattcaccatctccagagacaacgccaagaactcgctgtatctgcaaatggacagcctgagaaccgaagactcggctgtttactactgtgcgcgagactcgggtgttgtccggtttgaccactggggccagggagcgctggtcaccgtctcctca

SEQ ID NO: 8073 - DNA, 348 bp, Artificial Sequence
  Synthetic polynucleotide encoding artificial human antibody VH domain
caggtgcagctgcaggagtcgggcccaggactggtgaagccttcggagaccctgtccctcacctgcagtgtctctggtcgctccattagtggctcctactggagttggatccggcagcccccagggaagagaccggagtggattgcgtatgtccatgacagtggggacaacaactacaaccccgccctcaggagtcgagtcaccgtggcaatagacacgtccaagaaccagctgtccctgaagttgagtggtgtgaccgctgcggacacggccgtgtattactgtgcgagaggatctactggccagttcgacccctggggccagggaaccctggtcaccgtctcctca

SEQ ID NO: 8074 - DNA, 393 bp, Artificial Sequence
  Synthetic polynucleotide encoding artificial human antibody VH domain
gaggtgcaattggtggagtctggaggaggcttaatccagcctggggagtccctgagactctcctgtgtggcctctgggttcagcgtcactaccacccaaatgaattgggtccgccaggctccagggaaggggctggagtttgtctctaatatttatcgtgggggcagtatatattatggagagtccgtggagggccgagtcaccatctccacagacagttccaagaacactctgtatcttcaattgaggagcctgagactcgaagacacggccgtatactactgtgcgagagccctcgatggctgcgatccttcgagtgggtatcgagggtccgcttgttacttctatggtttggacgtctggggccaagggaccacggtcatcgtctcctca

SEQ ID NO: 8075 - DNA, 393 bp, Artificial Sequence
  Synthetic polynucleotide encoding artificial human antibody VH domain
caggtgcagctggtggagtctgggggaggcgtggtccagcctgggaggtccctgagactctcctgtgcagcctctggattcaccttcagtagctatgctatgcactgggtccgccaggctccaggcaaggggctggagtgggtggcagttatatcatatgatggaagtaataaatactacgcagactccgtgaagggccgattcaccatctccagagacaattccaagaacacgctgtatctgcaaatgaacagcctgagagctgaggacacggctgtgtattactgtgcgagagatcaagcatattgtggtggtgattgctattgggggtggacctactactactacggtatggacgtctggggccaagggaccacggtcaccgtctcctca

SEQ ID NO: 8076 - DNA, 363 bp, Artificial Sequence
  Synthetic polynucleotide encoding artificial human antibody VH domain
gaggtgcagctgttggagtctgggggaggcttggtacagcctggggggtccctgagactctcctgtgcagcctctggattcacctttagtaactatgccatgagctgggtccgccaggctccagggaaggggctggagtgggtctcggcttttagttatgacggtggtagcacattctacgcagactccgtgaagggccgattcaccatctccagagacaattccaagaacacgctgtttttgcaaatgaacagcctgagagccgacgacacggccgtatattactgtgcgaaacgtcagtgggagcgagactggggtgcttttgatgtctggggccaagggacaatggtcaccgtctcttca

SEQ ID NO: 8077 - DNA, 363 bp, Artificial Sequence
  Synthetic polynucleotide encoding artificial human antibody VH domain
caggtgcagctggtggagtctgggggaggcttggtcaagcctggagggtccctgagactctcctgtgcagcctctggatttttcgtcactgagtacgacatgagctggatccgccaggctccagcgaaggggctggagtgggtttcaagcattaggagtagaagtgattacacagactacgcagactctgtgaagggacgattcaccatctccagagacaacgccaaaaagtcagtgtttctgcacatggacagcctgagagacgaagacacggctgtttatttctgtgcgagagagaaagggctgggcgccactacccactttgactactggggccagggagccctggtcaccgtctcctca

SEQ ID NO: 8078 - DNA, 363 bp, Artificial Sequence
  Synthetic polynucleotide encoding artificial human antibody VH domain
caggtgcagctacagcagtggggcgcaggactgttgaagccttcggagaccctgtccctcacctgcgctgtcgatggtgactccctcaatggcttcgactggagttggatccgccagtccccagggaagggcctggagtggattggtgaggtcaatcgtgatggcaccactaagtacaagtcgtccctcaacagtcgagtcaccatctcaggagacgcgtccaagaatcaaatctccctgaagttgacgtcagtaaccgccgcggacacggcgatttatttctgtgcgagggaaggcaggacgtggtatggtcaatactaccttgaacactgggcccagggatacccggtcaccgtctcctca

SEQ ID NO: 8079 - DNA, 372 bp, Artificial Sequence
  Synthetic polynucleotide encoding artificial human antibody VH domain
caggtgcagctgcaggagtcgggcccaggactggtgaagccttcacagaccctgtccctcacctgcagtgtctctggtgactccatcagcattgatggtttctactggagctggatccgccagtcctcagggaagggcctggagtggcttggcgacatctattacactgggagcacccgctacaacccgtccctggagagtcgactaaccatttcggtggacacgtcaaagaatgatttctccctgaagatgacctctatgactgccgcggacacggccgtttatttctgtgcgagagcgcccccgagcagcacctgggccggggactactttgactactggggcccgggaaccccggtcaccgtctcctca

SEQ ID NO: 8080 - DNA, 351 bp, Artificial Sequence
  Synthetic polynucleotide encoding artificial human antibody VH domain
gaggtgcagctggtggaatctgggggagacctggtccagcctggggggtccctgagactctcctgtgcagcctctggattcacgttcagttcctattggatgggctgggtccgccaggctccagggaaggggctggagtgggtggccaacataaagaaggatggaagtacttattactatgtggactctgtgaagggccgattcaccatctccagagacaacgccaagaatttactgtatctgcaaatgaacaacctgagagccgaggacacggctgtgtattattgtgcgaggcacggtgactacgcctttgacgactggggccagggaagcctggtcaccgtctcctca

SEQ ID NO: 8081 - DNA, 345 bp, Artificial Sequence
  Synthetic polynucleotide encoding artificial human antibody VH domain
gaggtgcagctgctagagtctgggggaggattggtccagccgggggggtccctgagactctcctgtgcagcctctggattcacctttagtccctattggatgaggtgggtccgccaggctccagggaagggactggagtgtgtggccagcattaacgaagatggaagtcacaaatactatgtggactctgtgaagggccgattcaccatctccagagacaacaccaagaactcactgtatctacaaatgaacagcctgagagtcgacgacacgtctgtttattactgtgcgagcgaatataccagtggcttgtggggccagggaaccctggtcaccgtctcctca

SEQ ID NO: 8082 - DNA, 381 bp, Artificial Sequence
  Synthetic polynucleotide encoding artificial human antibody VH domain
caggtgcgcctggtggagtctgggggaggcgtggtccaccctgggaagtccctgagactctcctgtgcagcctccagactaagcgtcagcagatatgccatgcactgggtccgccaggctccaggcaaggggctggagtgggtggcagttatttcatacgatggaaccattaaacactatgcagactccgtgcagggccgattctccgtctccagagacaattccgagaacacggtgcatttgcaattgaccagtctgagacctgaggacacggctctctattactgtgcgaaaggaggctatagtagtagctggcagaccgacttctactattacggcatggacgtctggggccaagggaccatggtcaccgtctcgtca

SEQ ID NO: 8083 - DNA, 357 bp, Artificial Sequence
  Synthetic polynucleotide encoding artificial human antibody VH domain
gaggtgcagctggtggagtctgggggaggcttggtccagcctggagggtccctgagactctcctgtgcagcctctggattcatcttcagtgaccactacatggagtgggtccgccaggctccagggaaggggctggagtgggttggccgtagtggaaataagggtttgaattacaggtcagactacgccgcgtctgtgagaggcagatccactatctcgagagatgattcaaagaactcagtgtatctacaaatgaacagcctgagaaccgaggacacggccgtatattattgtactagagaaaattctgggggaaatagggactggggccagggaaccctggtcaccgtctcctca

SEQ ID NO: 8084 - DNA, 369 bp, Artificial Sequence
  Synthetic polynucleotide encoding artificial human antibody VH domain
caggtgcagctgcaggagtcgggcccaggactggtgaagccttcacagaccctgtccctcacctgtactgtctctggtgcctccctcagcagtggtagttattactggagctggatccggcagcccgccgggaagggactggagtggattgggcgtgtctacaccagtgggaccaccaactacaacccctccctcaagagtcgagtcaccatgtcactcgacaggtccaacaaccagttctccctgaacctcaactctgtgaccgccggcgacacggccgtatattactgtgtgcgagaccgaagatatctggagcgcgactggtccttcgatctctggggccgtggcgccctggtcactgtctcctca

SEQ ID NO: 8085 - DNA, 366 bp, Artificial Sequence
  Synthetic polynucleotide encoding artificial human antibody VH domain
caggtgcagctggtgcaatctgggtctgaattgaagaagcctggggcctcagtgaaggtttcctgcaaggcttctggatacaccttcactcgctatgctatgaattgggtgcgacaggcccctggacaagggcttgagtggatgggatggatcaacaccaacactgggaacccaacgtatgcccagggcttcacaggacggtttgtcttctccttggacacctctgtcagtacggcatatctgcagatcagcagcctaaaggctgaggacactgccgtgtattactgtgcgagagcctccagggtctcgccgtggttcagggagtttgactactggggccagggaaccctggtcaccgtctcctca

SEQ ID NO: 8086 - DNA, 351 bp, Artificial Sequence
  Synthetic polynucleotide encoding artificial human antibody VH domain
gaggtgcagctggtggaatctgggggagacttggtccagcctggggggtccctgagactctcctgtgcagcctcgggattcatgtttagttcctcctggatgggctgggtccgccaggctccagagaaggggctggagtgggtggccaacataaagaaggatggaagtacttattactatatggactctgtgaagggccgattcaccatctccagagacaacgccaagaatttactgtatctccaaatgaacaacctgagagccgaggacacggctgtgtattattgtgcgaggcacggtgactacgcctttgacgcctggggccagggaagcctggtcaccgtctcctca

SEQ ID NO: 8087 - DNA, 342 bp, Artificial Sequence
  Synthetic polynucleotide encoding artificial human antibody VH domain
caggtccagctggtgcagtctggggctgaggtgaagaagcctgggtcctcggtgaaggtctcctgcagggcttctggagacaccttcaccaagtatgctttcagctgggtgcgacaggcccctggacacgggcttgagtggatgggaaggatcatccctatccttaatacaccaatctacgtagcgaagttccagggcagagtcaccattaccgcggacgaatccacgagcacagcctacatggagctgagcagcctgagatctgaggacacggccgtgtatttctgtgcgacggatggggggacctactggggccagggaaccctggtcaccgtctcgtca

SEQ ID NO: 8088 - DNA, 396 bp, Artificial Sequence
  Synthetic polynucleotide encoding artificial human antibody VH domain
gaggtgcagctggtgcagtctggagcagaggtgaaaaagccgggggagtctctgaagatctcctgtaagggttctggatacagctttaccagctactggatcggctgggtgcgccagatgcccgggaaaggcctggagtggatggggatcatctatcctggtgactctgataccagatacagcccgtccttccaaggccaggtcaccatctcagccgacaagtccatcagcaccgcctacctgcagtggagcagcctgaaggcctcggacaccgccatgtattactgtgcgagacagaactcgctagccaccggagatagcagcagctggaaccactactactactactactacatggacgtctggggcaaagggaccacggtcaccgtctcctca

SEQ ID NO: 8089 - DNA, 360 bp, Artificial Sequence
  Synthetic polynucleotide encoding artificial human antibody VH domain
caggtgcagctggtggagtctgggggaggcgtggtccagcctggggggtccctgagactctcctgtacagtctctggatttaccttcaccaaccatggcatgcactgggtccggcaggctccaggcaaggggctggagtgggtggcagttatgtggtctgagggaagtaagaagtattatgcagactccgtgaagggccgattcgccatctccagagacaattccaggaacagtctctttctggaaatgagcagtctcagagacgacgacacggctgtttattactgtgcgagagaatctcccgacgggtggctgtactttgaccactggggccggggatccctagtcaccgtctcctca

SEQ ID NO: 8090 - DNA, 360 bp, Artificial Sequence
  Synthetic polynucleotide encoding artificial human antibody VH domain
gaggtgcagatgttggagtctgggggaggcttggtacagcctggggggtccctgagactctcctgtgtggtctctggattcagctttagtagttatgccatgagctgggtccgccaggctccagggaaggggctggagtgggtttcaactgttagtaagaccagtgttggcacatactacgcagactccgtgaggggccggttcaccatctccagagacaattccaagagcaccttctatctgcaaatgaacagcctgagagccgaggacacggccctatattactgtacgaacggaggcgggccattcttagtgtccggttcctactggggccagggaatccagatcaccgtctcctca

SEQ ID NO: 8091 - DNA, 390 bp, Artificial Sequence
  Synthetic polynucleotide encoding artificial human antibody VH domain
caggtgcaaatagaggagtcgggtccacgactggtgaagccttcggggaccctgtccctcacctgcgctgtctctcctggctccataaatttgagtttaaggtggagttgggtccgccagtctccagagagggggctggagtggattggggacatctcttacggtggcagtggcaattacaacccgtccctcaagtctcgagccaccgtgtcaatcgccgcgtccgacaaccgggtctctctgcaactgacctctgtgaccgccgcggacacggccatatattattgtgcccaaatttacataatgaaagaccttgactggtcacgaaaggtcttctggcactatcacatggaagtctggggcgaagggaccacggtcaccgtctcttca

SEQ ID NO: 8092 - DNA, 372 bp, Artificial Sequence
  Synthetic polynucleotide encoding artificial human antibody VH domain
gaggtgcagctggtggagtctgggggacgcttggtgcagcctggggggtccctgagactctcctgtataggctctggattcactttcagttcttatagtatgaactgggtccgccaggctccagcgaaggggctggagtgggttgcacacattaacggcattagtggagccatagaatatgcaggctctgtgaagggccgattcaccatctccacagacaacgccaagaactcagtgtttctgcaaatgaacagcctgagagtcgaagacacggctgtgtattactgtgcgagagatgccaaggcggcttatagtggctacaattacttctttgactactggggccagggaaccgtggtcaccgtctcctca

SEQ ID NO: 8093 - DNA, 375 bp, Artificial Sequence
  Synthetic polynucleotide encoding artificial human antibody VH domain
caggtgcagctggtggagtctgggggaggcgtggtccagcctgggaggtccctgagactctcctgtgcagcgtctggattcaccttcagtagctatggcatgcactgggtccgccaggctccaggcaaggggctggagtgggtggcagttatatggtatgatggaagtaataaatactatgcagactccgtgaagggccgattcaccatctccagagacaattccaagaacacgctgtatctgcaaatgaacagcctgagagccgaggacacggctgtgtattactgtgcgagagaccattgtagtggtggtagctgctatctcgactggtacttcgatctctggggccgtggcaccctggtcactgtctcctca

SEQ ID NO: 8094 - DNA, 384 bp, Artificial Sequence
  Synthetic polynucleotide encoding artificial human antibody VH domain
caggtgcagctgcaggagtcgggcccaggactggtgaagccttcacagaccctgtccctcacctgcactgtctctggtggctccatcagcagtggtgattactactggagttggatccgccagcccccagggaagggcctggagtggattgggtacatctattacagtgggagcacctactacaacccgtccctcaagagtcgagttaccatatcagtagacacgtccaagaaccagttctccctgaagctgagctctgtgactgccgcagacacggccgtgtattactgtgccagagcggggacccgtaggaggatttttggagtggttatagttgaggcttttgatatctggggccaagggacaatggtcaccgtctcttca

SEQ ID NO: 8095 - DNA, 384 bp, Artificial Sequence
  Synthetic polynucleotide encoding artificial human antibody VH domain
caggtgcagctggtgcagtctggggctgaggtgaagaagcctggggcctcagtgaaggtttcctgcaaggcatctggatacaccttcaccagctactatatgcactgggtgcgacaggcccctggacaagggcttgagtggatgggaataatcaaccctagtggtggtagcacaagctacgcacagaagttccagggcagagtcaccatgaccagggacacgtccacgagcacagtctacatggagctgagcagcctgagatctgaggacacggccgtgtattactgtgcgagagaaaaaagtactacagtaactacggggctgccttctgaatactactacatggacgtctggggcaaagggaccacggtcaccgtctcctca

SEQ ID NO: 8096 - DNA, 357 bp, Artificial Sequence
  Synthetic polynucleotide encoding artificial human antibody VH domain
gaggtgcacttggtggggtctggcggacgcttgatccagccgggggggtccctgagactctcctgtgtagcctctggcttcctcgtcacttccaacttcatgacctgggtccgccaggctccagggaagggcctggagtggatctcaattatctatatcaatggtgacacatcctacgcagactccgtgaagggccgattcaccatctccagagacacttccaagaacacagtttatcttcaaatgaataacctgagagccgaagacacggccgtttattactgtgtgaagtctggatatagtggctacgggagacttgagtcctggggccaggaaacccgggtcaccgtctcctca

SEQ ID NO: 8097 - DNA, 384 bp, Artificial Sequence
  Synthetic polynucleotide encoding artificial human antibody VH domain
gaggtgcagctggtggagtctgggggaggcttggtacagcctggagggtccctgagactctcctgtgcagcctctggattcaccttcagtagttatgaaatgaactgggtccgccaggctccagggaaggggctggagtgggtttcatacattagtagtagtggtagtaccatatactacgcagactctgtgaagggccgattcaccatctccagagacaacgccaagaactcactgtatctgcaaatgaacagcctgagagccgaggacacggctgtttattactgtgcgagagaccactcgaacctaattacgatttttggagtggttatctcgcactactttgactactggggccagggaaccctggtcaccgtctcctca

SEQ ID NO: 8098 - DNA, 384 bp, Artificial Sequence
  Synthetic polynucleotide encoding artificial human antibody VH domain
caggtgcagctgcaggagtcgggcccaggactggtgaagccttcacagaccctgtccctcacctgcactgtctctggtggctccatcagcagtggtgattactactggagttggatccgccagcccccagggaagggcctggagtggattgggtacatctattacagtgggagcacctactacaacccgtccctcaagagtcgagttaccatatcagtagacacgtccaagaaccagttctccctgaagctgagctctgtgactgccgcagacacggccgtgtattactgtgccagagaggcctttagtattacgatttttggagtggttacccggtgggggttcgacccctggggccagggaaccctggtcaccgtctcctca

SEQ ID NO: 8099 - DNA, 363 bp, Artificial Sequence
  Synthetic polynucleotide encoding artificial human antibody VH domain
gaggtgcagcgggtggagtctgggggaggcttggtacagcctggcaggtccctgagactctcctgtgcagcctctggattcaccttcagtgaccactacatggactgggtccgccaggctccagggaaggggctggagtgggttgcccgtagtagaaacaaagctaagaggtacagcacacattacgccgcgtccgtgaaaggcagattcaccatctcaagagatgattcaaacaactcactgtatcttcaaatgaacagcctgaaaagcgaggacacggccgtgtatttctgtgtcagtccctcaacgagtgggagcgaatttgactcctggggccagggaaccctggtcaccgtctcctca

SEQ ID NO: 8100 - DNA, 363 bp, Artificial Sequence
  Synthetic polynucleotide encoding artificial human antibody VH domain
gaggtgcagctgatgcagtctggagcagagatgaaaaagcccggggagtctctgaagatttcctgtaggggttctggattccggtttttcaattattggatcggctgggtgcgccagaggcccgggcaaggcctggagtggatggggatcatctatcctggtgactctgataccaaatacagtccgtccttccaaggccaggtcaccatgtcagccgacaagtccatcagtaccgcctacctgcagtggactagcctgaaggtttcggacaccgccacttattactgtgcgagactgggggggagtgatgtgggaaattggttcgacttctggggccagggaaccccggtcatcgtctcctca

SEQ ID NO: 8101 - DNA, 357 bp, Artificial Sequence
  Synthetic polynucleotide encoding artificial human antibody VH domain
caggtgcagctggtggagtctgggggaggcttggtcaagcctggagggtccctgagactctcctgtgcagcctctggattcaccttcagtgactactacatgagctggatccgccaggctccagggaaggggctggagtgggtttcatacattagtagtagtagtagttacacaaactacgcagactctgtgaagggccgattcaccatctccagagacaacgccaagaactcactgtatctgcaaatgaacagcctgagagccgaggacacggccgtgtattactgtgcgagagattgtagtggtggtagctgccttggttactggggccagggaaccctggtcaccgtctcctca

SEQ ID NO: 8102 - DNA, 378 bp, Artificial Sequence
  Synthetic polynucleotide encoding artificial human antibody VH domain
caggtcaccttgagggagtctggtcctgcgctggtgaaacccacacagaccctcacactgacctgcaccttctctgggttctcactcagcactagtggaatgtgtgtgagctggatccgtcagcccccagggaaggccctggagtggcttgcactcattgattgggatgatgataaatactacagcacatctctgaagaccaggctcaccatctccaaggacacctccaaaaaccaggtggtccttacaatgaccaacatggaccctgtggacacagccacgtattactgtgcacggatgtggatacagctatggcccagaaactactactacggtatggacgtctggggccaagggaccacggtcaccgtctcctca

SEQ ID NO: 8103 - DNA, 363 bp, Artificial Sequence
  Synthetic polynucleotide encoding artificial human antibody VH domain
caggtgcaattggtggaatctgggggagacgtggtccggcctgggaggtccctgagactctcctgtgaaacctctggattcgtcttcagtaactttgctatgcactgggtccgccaggctccaggcgaggggctgcagtgggtggcgatcatatcgtatgatggcaccactttatactctggagactccgtgaagggccgattcaccatctctagagacaattccaagaataccttgtttcttcaaatggacagtctgagacctgaggacacggctgtgtattactgtgctaaagaaacggaggaccataccagttcctattttgactcctggggccagggaaccctggtcaccgtctcctca

SEQ ID NO: 8104 - DNA, 369 bp, Artificial Sequence
  Synthetic polynucleotide encoding artificial human antibody VH domain
caggtgcagctggtggagtctgggggaggcgtggtccagcctgggaggtccctgagactctcctgtgcagcctctggattcaccttcagtagctatgctatgcactgggtccgccaggctccaggcaaggggctggagtgggtggcagttatatcatatgatggaagtaataaatactacgcagactccgtgaagggccgattcaccatctccagagacaattccaagaacacgctgtatctgcaaatgaacagcctgagagctgaggacacggctgtgtattactgtgcgagagatcctgatagtggctacgatttggatgatgcttttgatatctggggccaagggacaatggtcaccgtctcttca

SEQ ID NO: 8105 - DNA, 360 bp, Artificial Sequence
  Synthetic polynucleotide encoding artificial human antibody VH domain
cagctgcagctgcaggagtcgggcccaggactggtgaagccttcggagaccctgtccctcacctgcactgtctctggtggctccatcagcaatggtaattactactggggctggatccgccagcccccagggaaggggctggagtggattgggagtttcttttatggtgggagcaccttctacaacccgtccctcaagagtcgagtcgccatatccgtcgacacgtccaaaaacctcttctccctgattctgagctctgtgaccgcctcagacacggctgtgtattactgtgcgagacatgcttcgtcagcagctgggattgacttctggggccagggaaccctggtcaccgtctcctca

SEQ ID NO: 8106 - DNA, 363 bp, Artificial Sequence
  Synthetic polynucleotide encoding artificial human antibody VH domain
gaggtgcaactggtggagtctgggggaggcttggtacagcctggagggtccctgagactctcctgtgcagcctctggattcatcttcgattattatgagatgaactggttccgccaggctccaggggaggggctggagtgggtttcatacattaatagaactgggagtaccctgtactacgcagactctgttaagggccgattcaccatctccagagacaacaccaagaactctctgtatctgcaaatgaacagcctcagagtcgacgacacggctgtttatttctgtgcgagagaccgctgcgatgacgttgactgctactccgactactggggccagggaaccctggtcaccgtctcctca

SEQ ID NO: 8107 - DNA, 360 bp, Artificial Sequence
  Synthetic polynucleotide encoding artificial human antibody VH domain
caggtccagctggtacagtctggggcggaggtgaagaagcctggggcctcagtgaagctctcctgcaaggtttccggatacagcctcactgaagtaggcatgcactgggtgcgacaggctcctgggagagggcttgagtggatgggaggttttgttcctgaagatggtgccacagtcttcgcacagaagttccagggcagagtctccgtgaccgaagacgcatcttcaggcacggcctacatggagctgagcagcctgagatctgaagacacggccgtttactactgcgcaacagcctttcagtaccaggaactccccattagttcctggggcccgggaaccctggtcactgtctcttca

SEQ ID NO: 8108 - DNA, 366 bp, Artificial Sequence
  Synthetic polynucleotide encoding artificial human antibody VH domain
caggtgcagctgcaggagtcgggcccaggactggtgaagccttcacagaccctgtccctcacctgcactgtctctggtggctccatcagcagtggtagttactactggagctggatccggcagcccgccgggaagggactggagtggattgggcgtatctataccagtgggagcaccaactacaacccctccctcaagagtcgagtcaccatatcagtagacacgtccaagaaccagttctccctgaagctgagctctgtgaccgccgcagacacggccgtgtattactgtgcgagaggtccagcggccagctactactacggtatggacgtctggggccaagggaccacggtcaccgtctcctca

SEQ ID NO: 8109 - DNA, 390 bp, Artificial Sequence
  Synthetic polynucleotide encoding artificial human antibody VH domain
caggtgcaactggtgcagtctggggctgaggtgaagaagcctgggtcctcggtgaaggtctcctgcaaggcttctggaggcaccttcagtaattatgcttttaactgggtgcgacaggcccctggacaggggcttgagtgggtgggagggatcattcctgtatttgttatacctgactacgcacagaagttccagggcagagtcaccatttccgcggacaaatccacgaccacagtcaccatggagctcaccaccctgagatccgacgacacggccgtctattactgtgcgagacgccgtactgggagctcccacggattcatcccaagtcttgccatcggcgatggctttgatatctggggccaggggacaagggtcaccgtctcttca

SEQ ID NO: 8110 - DNA, 366 bp, Artificial Sequence
  Synthetic polynucleotide encoding artificial human antibody VH domain
caggtccagttggtacagtctggggctgaggtgaagaagcctggggcctcagtgaaggtctcctgcaaggtttccggatacattctcagtgcattacccatacactgggtgcgacaggctcctggagaagggcttgagtggatgggaaattttgatcctcaaaacggtgaaacaatctccgcacagaagttccagggcagaattaccatgaccgaggacacatctacagacacagcctacatggagctgagcagcctgagatctgaggacacggccgtgtattactgtgcaacagagggggtggtgcctgttgtcatttacgcttttgatgtgtggggccaagggataatggtcaccgtctcctca

SEQ ID NO: 8111 - DNA, 387 bp, Artificial Sequence
  Synthetic polynucleotide encoding artificial human antibody VH domain
gaagtgcagctggtggagtctgggggaggcttggtacagcctggcaggtccctgagactctcctgtgcagcctctggattcacctttgatgattatgccatgcactgggtccggcaagctccagggaagggcctggagtgggtctcaggtattagttggaatagtggtagcataggctatgcggactctgtgaagggccgattcaccatctccagagacaacgccaagaactccctgtatctgcaaatgaacagtctgagagctgaggacacggccttgtattactgtgcaaaagcccattattactatgatagtagtggttattaccggggctactactacggtatggacgtctggggccaagggaccacggtcaccgtctcctca

SEQ ID NO: 8112 - DNA, 378 bp, Artificial Sequence
  Synthetic polynucleotide encoding artificial human antibody VH domain
caggtgcagctgcaggagtcgggcccaggactgttgaagccttcacagaccctgtccctcacctgcactgtctctggtggctccatcagcagtggtgaatattactggagttggatccgccagcccccagggaagggccttgagtggattggctacatctattacagggggagcacctactacaacccgtccctcaagagtcgaacgaccgtatcaatagacacgcccaagaaccagttctccctgacactgagctctgtgactgccgcagacacggccgtgtattactgtgccagagataggcggggatattgtagtgctggtccctgctaccggattgactcctggggccagggaattctggtcaccgtctcctca

SEQ ID NO: 8113 - DNA, 360 bp, Artificial Sequence
  Synthetic polynucleotide encoding artificial human antibody VH domain
caggtgcagctggtggagtctgggggaggcgtggtccagcctgggaggtccctgagactctcctgtgcagcctctggattcaccttcagtagctatggcatgcactgggtccgccaggctccaggcaaggggctggagtgggtggcagttatatcatatgatggaagtaataaatactatgcagactccgtgaagggccgattcaccatctccagagacaattccaagaacacgctgtatctgcaaatgaacagcctgagagctgaggacacggctgtgtattactgtgcgagagggtatagcagtggctggtggtacttcgatctctggggccgtggcaccctggtcactgtctcctca

SEQ ID NO: 8114 - DNA, 366 bp, Artificial Sequence
  Synthetic polynucleotide encoding artificial human antibody VH domain
gaggtgcagctggagcagtctggagcagaggtgcgaaagcccggggagtctctgaagatctcctgtaagggttctggatacagatttagcactcactggatcggctgggtgcgccagatgcccgggaaaggcctggaatggatgggaatcatctatcctggtgattatgatacccggtatagtccgtccttccagggccaggtccacatctcagtcgacaagtccgtcgacaccgcctatttacagtggaatagtctgcaggcctcggacaccgccatgtatttctgtgcgagagccaccactgggacctccaacccctacaactttgactactggggccagggaaccctggtcaccgtctcctca

SEQ ID NO: 8115 - DNA, 372 bp, Artificial Sequence
  Synthetic polynucleotide encoding artificial human antibody VH domain
caggtgcagttgctgcagtctgggactgaggtgaaaaagcctggggcctcagtgaaggtcttctgcaaggcatttggatacaccttcagcagttatttcattcactgggtgcgacaggcccctggagaagggcttgagtggatggcaatgatcaaccctggtggtggtaggccagagtactcacaggagtttcaggccagagtcaccgtgactagagacacgtccacgaacacagtacacatggagatgaggagcctgagatctgaagacacggccgtttattactgtgcgagaggtgattacgtttgggggagtgatcgttatgacgatatggacgtctggggccaagggaccacggtcatcgtctcttca

SEQ ID NO: 8116 - DNA, 372 bp, Artificial Sequence
  Synthetic polynucleotide encoding artificial human antibody VH domain
caggtgcagctggtgcagtctggggctgaggtgaagaagcctggggcctcagtgaaggtttcctgcaaggcatctggatacaccttcaccagctactatatgcactgggtgcgacaggcccctggacaagggcttgagtggatgggaataatcaaccctagtggtggtagcacaagctacgcacagaagttccagggcagagtcaccatgaccagggacacgtccacgagcacagtctacatggagctgagcagcctgagatctgaggacacggccgtgtattactgtgcgagagatcctaacgttgacagctatggttacgtatcttggttcgacccctggggccagggaaccctggtcaccgtctcctca

SEQ ID NO: 8117 - DNA, 348 bp, Artificial Sequence
  Synthetic polynucleotide encoding artificial human antibody VH domain
caggttcagctggtgcagtctggagctgaggtgaagaagcctggggcctcagtgaaggtctcctgcaaggcttctggttacacctttaccagctatggtatcagctgggtgcgacaggcccctggacaagggcttgagtggatgggatggatcagcgcttacaatggtaacacaaactatgcacagaagctccagggcagagtcaccatgaccacagacacatccacgagcacagcctacatggagctgaggagcctgagatctgacgacacggccgtgtattactgtgcgagagggggggatggctacaacccctggggccagggaaccctggtcaccgtctcctca

SEQ ID NO: 8118 - DNA, 366 bp, Artificial Sequence
  Synthetic polynucleotide encoding artificial human antibody VH domain
gaggtgcagctggtggagtctgggggaggcttggtccagcctggggggtccctgagactctcctgtgcagcctctggattcacctttagtagctattggatgagctgggtccgccaggctccagggaaggggctggagtgggtggccaacataaagcaagatggaagtgagaaatactatgtggactctgtgaagggccgattcaccatctccagagacaacgccaagaactcactgtatctgcaaatgaacagcctgagagccgaggacacggctgtgtattactgtgcgagggtctgtgatggtggtagctcctgggatgcttttgatatctggggccaagggacaatggtcaccgtctcttca

SEQ ID NO: 8119 - DNA, 384 bp, Artificial Sequence
  Synthetic polynucleotide encoding artificial human antibody VH domain
gaggtgcatctggtggagtctgggggaggcttggtgaagccgggggagaccctcagactgtcctgtgctgcctctggattcactttcagcatggcctggatgaactgggtccgccaggctccggggaaggggctggagtggattggccgtgtcaaaagcagagttgatggtgggacaacagactacgctgcgcccctcagtggcagattcgccatctcaagagatgattcacagagcactgtatctctacaaataaataacctggaggccgaggacacagccgtatatttctgtaccactttattaacagattactttgatgctagtggagctcgacactactttgactactggggccggggagccctggtcaccgtctcctca

SEQ ID NO: 8120 - DNA, 387 bp, Artificial Sequence
  Synthetic polynucleotide encoding artificial human antibody VH domain
caggtgcagctggtggagtctgggggaggcgtggtccagcctgggaggtccctgagactctcctgtgcagcgtctggattcaccttcagtagctatggcatgcactgggtccgccaggctccaggcaaggggctggagtgggtggcagttatatggtatgatggaagtaataaatactatgcagactccgtgaagggccgattcaccatctccagagacaattccaagaacacgctgtatctgcaaatgaacagcctgagagccgaggacacggctgtgtattactgtgcgagggggggttatatagcagtggctggtaccgggctctactactactactacggtatggacgtctggggccaagggaccacggtcaccgtctcctca

SEQ ID NO: 8121 - DNA, 369 bp, Artificial Sequence
  Synthetic polynucleotide encoding artificial human antibody VH domain
cagctgcagctgcaggagtcgggcccaggactggtgcagccttcggagaccctgaccctcacctgcactgtctctggtgtctccatcagcagtagtcgtgacttttggggctggatccgccagcccccagggatggggccggagtggattgggagtatcttttatagtgggagcacccactacaacccgtccctcaagagtcgagtcaccatttccgtagacacgtccaagaaccagttctccctgaagctgacttctgtgaccgccgcagacacggctgcatattattgtgcgagacatttccttagagggaagaatcccgattactttgactactggggccagggacccctggtcaccgtctcctca

SEQ ID NO: 8122 - DNA, 366 bp, Artificial Sequence
  Synthetic polynucleotide encoding artificial human antibody VH domain
caggtcaccttgagggagtctggtcctgcgctggtgaaacccacacagaccctcacactgacctgcaccttctctgggttctcactcagcactagtggaatgtgtgtgagctggatccgtcagcccccagggaaggccctggagtggcttgcacgcattgattgggatgatgataaattctacagtacatctctgaagaccaggctcaccatctccaaggacacctccaaaaaccaagtggtcctcacaatggccaacatgggccctgtggacacagccacgtattactgtgcgcggacctcgcgagtccaaacatcttacgactttgactattggggccaaggatccctggtcaccgtctcctca

SEQ ID NO: 8123 - DNA, 396 bp, Artificial Sequence
  Synthetic polynucleotide encoding artificial human antibody VH domain
caggttcagctggtgcagtctggagctgaggtgaagaagcctggggcctcagtgaaggtctcctgcaaggcttctggttacacctttaccagctatggtatcagctgggtgcgacaggcccctggacaagggcttgagtggatgggatggatcagcgcttacaatggtaacacaaactatgcacagaagctccagggcagagtcaccatgaccacagacacatccacgagcacagcctacatggagctgaggagcctgagatctgacgacacggccgtgtattactgtgcgagattgggtcatttgagcagctggtacgagaatttggggggcccatcctactactactacggtatggacgtctggggccaagggaccacggtcaccgtctcctca

SEQ ID NO: 8124 - DNA, 384 bp, Artificial Sequence
  Synthetic polynucleotide encoding artificial human antibody VH domain
caggtgcagctggtggagtctgggggaggcgtggtccagcctgggaagtccctgagactctcctgtgcagcgtctggattcaccttcagcagctatggcatgcactgggtccgccaggctccaggcaaggggctggagtgggtggcagctatatggtatgatggaagtgataaatactatgcagattccgtgaagggccgattcaccatctccagagacaattccaagaacacgctgtatctgcaaatgaacagcctgagagccgaggacacgtctgtgtattattgtgcgagagaaggccccacccagggattctatggttcggggagttataataacggacttgactactggggccagggaactttggtcaccgtctcctca

SEQ ID NO: 8125 - DNA, 363 bp, Artificial Sequence
  Synthetic polynucleotide encoding artificial human antibody VH domain
caggtccagctggtgcagtctggggctgaggtgaagaagcctgggtcctcggtgaaggtctcctgcaaggcttctggaggcaccttcagcagtcatgctatcagctgggtgcgacaggcccctggacaagggcttgagtggatgggaagaatcatccctatgcttgatatagcaaactacgcacagaagttccagggcagagtcacgattaccgcggacaaatccacgaccacagccaacatggagctgagcagcctacaatctgaggacacggccgtgtattactgtgcggggggggattattatggttcggggagttggcatgactactggggccagggaaccctggtcaccgtctcctca

SEQ ID NO: 8126 - DNA, 354 bp, Artificial Sequence
  Synthetic polynucleotide encoding artificial human antibody VH domain
cagatcaccttgaaggagtctggtcctacgctggtgagacccacacagaccctcacgctgacctgtaccttctctgggttctcactcagcactagtggagtgagtgtgggctggatccgtcagcccccaggaaaggccctggaatggcttgcactcatttattgggatgatgatgagcgctacaggccctctctgaggagcaggctcaccatctccaaggacacctccaaaaaccaggtggtcctcacaatgaccgacatggaccctgtggacacagccacatattactgtgcacgcagtttaacaaggtactttgactactggggccagggaaccctggtcaccgtctcctca

SEQ ID NO: 8127 - DNA, 363 bp, Artificial Sequence
  Synthetic polynucleotide encoding artificial human antibody VH domain
caggtgcagttggtgcagtctggggctgaggtgaagaagcctggggcctcagtgaacatttcctgcaaggcatctggattcacgttcaacctctactatgtccagtgggtgcgacaggcccctggacaagggcttgagtggatgggactaatcagtcttagtggtggtaaaacaagttattcacagaacttccagggcagagtctcgatgaccagggacacgtccacgagcacagtctacatggaactgagcagcctgacatctgaagatacagccgtatattactgtgcgagagggggtgtgacgtggatagaattgtggtctgacttctggggccagggaaccctggtcaccgtctccgca

SEQ ID NO: 8128 - DNA, 378 bp, Artificial Sequence
  Synthetic polynucleotide encoding artificial human antibody VH domain
cagctgcagctgcaggagtcgggcccaggattggtgaagccttcggagaccctgtccctcacctgcactgtctctggtgactccgtcagcagtagtacttactactggggctggatccgccagtccccagggaagggcctggagtggattgggagtgtctattacagtaggaacacctactacaacccgtccctgaagagtcgagtcaccatatccatagacacgtccaagaaccaattctccctgaagcttttctctgtgaccgccgcagacacggctatgtattactgtgcgagacatggcgccagcagctattacgaggggccacagatgtactttgacaactggggccagggaaccctggtcaccgtctcctca

SEQ ID NO: 8129 - DNA, 360 bp, Artificial Sequence
  Synthetic polynucleotide encoding artificial human antibody VH domain
gaggtgcagctggtggagtctgggggagggttggtgcagccgggggggtccctgagactctcgtgtgcagcctcaggattcaccgtcggtagcagcttcatgaactgggtccgccaggctccagggaaggggctggagtgggtctcagttatttatcccggtgaaagtacatactacgcagactctgtggagggcagattcacgatctccagagacaattccgagaacacactgtctcttcacatgaacagcctgggagccgaggacacggctgtgtatttctgtgcgagagcccttcagtgggggctaccgctcacttgggtctcctggggccagggaaccctggtcaccgtcacctca

SEQ ID NO: 8130 - DNA, 348 bp, Artificial Sequence
  Synthetic polynucleotide encoding artificial human antibody VH domain
gaggtgcagctggtgcagtctggagcagaggtgaaaaagcccggagagtctctgaagatctcctgtaagacttctggatacagctttgtcagcgaccgaatcgactggatacgccaggtgcccgggaaaggcctggaatttatgggggccatcgatcctcgtgactctgaaaccagatacagtgcgcccttccaaggccacgtcaccttctcagccgacaagtctatcagcgccgcctacctgcagtggagtagcctgaaggcctcggacaccgccatctattactgtacgagagccgctagtggctggcccaactggggccagggaaccctggtcaccgtctcctca

SEQ ID NO: 8131 - DNA, 348 bp, Artificial Sequence
  Synthetic polynucleotide encoding artificial human antibody VH domain
gaggtgcagctggtggagtcggggggaggcttggtccaggctggggggtccctgagactctcctgttcaacctctggattcaccttcagtagctatgctatgcactgggtccgccaggctccagggaagggactggaatatgtttcagctattagtagtgggggtaccacgtactacgcagactccgtgaagggccgattcaccatctccagagacaattccaagaacacgctgtatcttcaaatgagcagtctgagagttgaggacacggctatgtaccagtgtgtgaagctcggtagacagtcaaatgactactggggccagggaaccctggtcaccgtctcctca

SEQ ID NO: 8132 - DNA, 363 bp, Artificial Sequence
  Synthetic polynucleotide encoding artificial human antibody VH domain
cagctgcagctgcaggagtcgggcccaggactggtgaggccttcggagaccctgtccctcacctgcactgtctctggtgactccatcggtactaccagttactactggggttggatgcgccagcccccagggaagggtctggagtggattgggactttctattataccagggaaaacttctacaacccgtccctcaagagccgagtcacaatttccgcggacacgtccaagaaccagttctccctggagttgacctctgtgaccgcctcggacacggcagtgtatttctgtgcggggccttttatgcgtcttgaacacatctggggtcactggggccagggagccctggtcaccgtctcctca

SEQ ID NO: 8133 - DNA, 363 bp, Artificial Sequence
  Synthetic polynucleotide encoding artificial human antibody VH domain
gaggtgcaactggtggagtccgggggaggcctagttcagccgggggggtccctgagactctcctgtgcagcctctggactcaccttcaaaaactactggatgcactgggtccgccaagctccagggaaggggctgttatgggtctcacgtattagtagtgatggaagagacacaaactacgcggactccgtgaagggccgattcaccacttccagagacaacgccaagaacacgctctatctgcaaatgaatggtctgacagccgaggacacggctgtgtatttctgtgcaagtgatcgctattggtatgatagtagtggttacgactactggggccagggaaccctggtcaccgtctcctca

SEQ ID NO: 8134 - DNA, 375 bp, Artificial Sequence
  Synthetic polynucleotide encoding artificial human antibody VH domain
caggtacagctgcagcagtcaggtccaggactgctgaagtcctcgcagaccctctcactcacctgtgccatctccggggacagggtctcaagcaacactggtgcttggacctggatcaggcagtcgtcatcgagaggccttgagtggctggggacaacatactacaggtccaggtggaattttgattatgcagattctgaggacggtcgaatagccatcaccccagacacatccgagaaccaggtctccctgcacctgaattctgtgactcccgaggacacggctgtgtattactgtgcaagaggtcgatggctacagtcgaactacttcgctatggacgtctggggccaagggaccacggtcatcgtctcctca

SEQ ID NO: 8135 - DNA, 393 bp, Artificial Sequence
  Synthetic polynucleotide encoding artificial human antibody VH domain
caggttcaactggtgcagtctggggtcgaggtgaagcagcctggggcctcagtgaaggtctcctgcaaggcttctggttacacctttaccacctatggcatcagttgggtgcgacaggccggtggacatgggcttgagtggatgggatggatcagcggtcacaatggtaagacagaatacgcacagaagttccagggcagagtcaccatgaccacagacacatccacgagcacagcctatatggagttgaggagcctgagatcggacgacacggccatatattactgtgcgagagataatcccgaattacaatattttgactggttgcggagcggctactcccacactggcgtggacgtctggggccaagggaccgcggtcaccgtctcctca

SEQ ID NO: 8136 - DNA, 393 bp, Artificial Sequence
  Synthetic polynucleotide encoding artificial human antibody VH domain
caggttcaactggtgcagtctggggttgaggtgaagcagcctggggcctcagtgaaggtctcctgcaaggcttctggttacacctttaccacctatggcatcagttgggtgcgacaggccggtggacaagggcttgagtggatgggatggatcagcggtcacaatggtaagacagaatacgcacagaagttccagggcagagtcaccatgaccacagacacatccacgagcacagcctatatggagttgaggagcctgagatcggacgacacggccatatattactgtgcgagagataatcccgaattacaatattttgactggttgcggagcgactactcccacactggcgtggacgtctggggccaagggaccgcggtcaccgtctcctca

SEQ ID NO: 8137 - DNA, 360 bp, Artificial Sequence
  Synthetic polynucleotide encoding artificial human antibody VH domain
gaggtgcagatgttggaatctgggggaggcttggtacagccgggggggtccctgagactctcctgtgtagcccctgagttcacctttcgcgtctatgacatgaattggatccgccaggctccagggaaggggctggagtgggtctcaactattcacggctgggaagattccacgttctacgcagactccgtgaagggccgattcactatctccagagacagatccaaaaacaccctatttctgcagatgaacagtctgagagccgacgacacggccgtttattactgtgcgaaaggactcactccccagatgaacttctttgactcctggggccagggagccccggtcaccgtctcctca

SEQ ID NO: 8138 - DNA, 357 bp, Artificial Sequence
  Synthetic polynucleotide encoding artificial human antibody VH domain
cagatcaccttgcatgagtctggtcctacgctagtgaaacccacacagaccctcacgctgacctgcaacttctctgggttctcactcagcactagtggagtggctctgggctggatccgtcagcccccaggaaaggccttggagtggcttgcactcattttttgggatgatgataagcgctacagcccatctctgaagagcaggctcactgtcaccaagctcacctccgaaaaccaggtggtccttacaatgaccaacatggaccctgtggacacagccacttatttctgtgcacacagaccgggattacgaccctttgactactggggccagggaaccctggtcaccgtctcctca

SEQ ID NO: 8139 - DNA, 345 bp, Artificial Sequence
  Synthetic polynucleotide encoding artificial human antibody VH domain
gaggtgcatctgttggagtctgggggaggcttggtacagcctggggggtccctgagactctcctgtgccgcctctggattcacctttaacacctttgacatgacctgggtccgccaggcttcagggaaggggctggagtgggtctccactattattggtcatgatggtaccacattctatgcagacgccgtgaagggccggttcaccatctccagggacaattccaagaacaccctatatttgcaaatgagcagcctgagagccgaggacacggccatatatttctgtgtgaaaggtgcctggtgtgacttctggggccagggagccctggtcaccgtctcctca

SEQ ID NO: 8140 - DNA, 345 bp, Artificial Sequence
  Synthetic polynucleotide encoding artificial human antibody VH domain
gaggtgcatctgttggagtctgggggaggcttggtacagcctggggggtccctgagactctcctgtgccgcctctggattcacctttaacacctttgacatgacctgggtccgccaggcttcagggaaggggctggagtgggtctccactattattggtcatgatggtaccacattctatgcagacgccgtgaagggccggttcaccatctccagggacaattccaagaacaccctatatttgcaaatgagcagcctgagagccgaggacacggccatatatttctgtgtgaagggtgcctggtgtgactactggggccagggagccctggtcaccgtctcctca

SEQ ID NO: 8141 - DNA, 366 bp, Artificial Sequence
  Synthetic polynucleotide encoding artificial human antibody VH domain
cagctgcagctgcaggagtcgggcccaggactggtgaggtcctcggagaccctgtctgtcacctgcaatgtctctggtgactccatcagtagtacgagtaactactggggctggatccgcctgtccccagggaaggggctggagtggattggaagtatctattatagtgcgaccacctactacaacccgtccctcaagactcgagtcaccatatctatagacacgtccaagaaacagatctccctgaaactgagctctgtgaccgccgcagacacggctgtttattattgtgcgagaggcttgacagctggtgcgactagcgggttcgacccctggggccagggaaccctggtctccgtctcctca

SEQ ID NO: 8142 - DNA, 357 bp, Artificial Sequence
  Synthetic polynucleotide encoding artificial human antibody VH domain
cagctgcagctacagcagtggggcgcaggactgttgaagccttcggagaccctgtccctcacctgcactgtctctggtgactccatcaccagtagtagttactactggggctggatccgccagcccccagggaaggggctggagtggattgtgagtatctattatagtgggaccacctacaacaacccgtccctcaagagtcgagtcaccatatccgtagacacgtccaagaaccagttctccctgaagttgagttctgtgaccgccgcagacacggctgtgtatttctgtgcgagtagagcagtggcgagaaaccttgagtactggggccagggaaccctggtcaccgtctcctca

SEQ ID NO: 8143 - DNA, 363 bp, Artificial Sequence
  Synthetic polynucleotide encoding artificial human antibody VH domain
caggtgcagctggtggagtctggggggggcgtggtccagcctggggggtccctgagactctcctgtgcagcctctggattcaccttcgccacccatgctatgcactgggtccgccgggctccagccaaggggctggagtgggtggcaattatttcctatgctggaactactaaatataattctgattctgtgaagggccgcttcaccatctccagagacaattccaagaatatattacatctacaaatggacggcctgagaacagaggacaccgctatatatttctgtgccaaagagacttccgaccataccagcagttacttcgactcttggggccagggaaccctggtcaccgtctcctca

SEQ ID NO: 8144 - DNA, 366 bp, Artificial Sequence
  Synthetic polynucleotide encoding artificial human antibody VH domain
gaggtgcagctggtggagtctgggggaggctgggtccagcctggggggtccctgagactcgcctgtgcagcctctggattcagcgtcagtagcaactacatgacctgggtccgccaggctccagggaaggggctggattgggtctcacttatttataccggtggtgatacagaatacgtagactccgtaaggggcagattctccatctccagagacgattccaagaacacgctttatcttcacatgaatagcctgagagccgaggacacggctgtgtattactgtgcgagaggaggtgaccacgtactgcatgacggctggttcttcgatctctggggccgtggcaccctggtcactgtctcctca

SEQ ID NO: 8145 - DNA, 384 bp, Artificial Sequence
  Synthetic polynucleotide encoding artificial human antibody VH domain
cagctgcagctgcaggagtcgggccccgggctcgtgcagccttcggagaccctgtccctcacctgtactgtctctggtgactccatcagcagtagtagttaccactggggctggatccgccagcccccagggaaggggctggagtggattgggagtgtctattacagtgggagcacctactacaacccgtccctcaagagtcgagtcaccatatccgtagacacgtccaagaaccagttctccctgaagctgagctctgtgaccgccgcagacacggctgtgtattactgtgcgagacacttgaggggattttgtagtagtgggagctgctacctgtactactttgaccagtggggccagggaaccctggtcaccgtctcctca

SEQ ID NO: 8146 - DNA, 372 bp, Artificial Sequence
  Synthetic polynucleotide encoding artificial human antibody VH domain
gaggtccagctggtacagtctggggctgaggtgaagaagcctggggctacagtgaaaatctcctgcaaggtttctggatacaccttcaccgactactacatgcactgggtgcaacaggcccctggaaaagggcttgagtggatgggacttgttgatcctgaagatggtgaaacaatatacgcagagaagttccagggcagagtcaccataaccgcggacacgtctacagacacagcctacatggagctgagcagcctgagatctgaggacacggccgtgtattactgtgcaacagtgaagggtacggtgactacgcttggttactacggtatggacgtctggggccaagggaccacggtcaccgtctcctca

SEQ ID NO: 8147 - DNA, 390 bp, Artificial Sequence
  Synthetic polynucleotide encoding artificial human antibody VH domain
cagctgcagctgcaggagtcgggcccaggactggtgaagccttcggagaccctgtccctcacctgcactgtctctggtggctccatcagcagtagtagttactactggggctggatccgccagcccccagggaaggggctggagtggattgggagtatctattatagtgggagcacctactacaacccgtccctcaagagtcgagtcaccatatccgtagacacgtccaagaaccagttctccctgaagctgagctctgtgaccgccgcagacacggctgtgtattactgtgcgagacatgggatgggggagtgggagctactatcccgttttaggtcccgcggttactttgactactggggccagggaaccctggtcaccgtctcctca

SEQ ID NO: 8148 - DNA, 369 bp, Artificial Sequence
  Synthetic polynucleotide encoding artificial human antibody VH domain
gaggtgcagctgttggagtctgggggaggcttggtacagcctggggggtccctgagactctcctgtgcagcctctggattcacctttagcagctatgccatgacctgggtccgccaggctccagggaaggggctggagtgggtctcaactattagtggtagtggtgttagcacatactacgcagactccgtgaagggccgcttcaccatctccagagacaattccaagaacacgctgtatctgcaaatgaacagcctgagagccgaggacacggccttttattactgtgcgagagatttactattatggttcggggaaacgccgggtaaggactacgggggccagggaaccctggtcaccgtctcctca

SEQ ID NO: 8149 - DNA, 357 bp, Artificial Sequence
  Synthetic polynucleotide encoding artificial human antibody VH domain
caggtgcacctacagcagtggggcgcaggactgttgaggccttcggagaccctgtccctcacatgcgctgtctttggtgggtccttcagtggttaccactggacctggatccgccaggtcccagggaaggggctggagtggattggtgaaatccatcatgatggaggcatcaactacaacccgtccctcaagagtcgagtcaccatttcagtagacacgtccaagaaccagttctccctgaacctgaattctgtgaccgccgcggacacggctctttatttttgttcgagaggccaacacgaagaatggcctgtcggggactactggggccaggggaccctggtcaccgtctcctca

SEQ ID NO: 8150 - DNA, 363 bp, Artificial Sequence
  Synthetic polynucleotide encoding artificial human antibody VH domain
gaggtgcagttggtggagtctgggggaggcttggtccagccgggggggtccctgagactctcctgtgcagtctctggattcagtatcagtaattattatatgagttgggtccgccaggctccagggaaggggctggagtgggtggccaacatacatcaaaatggaaatgagaaaaagtatgtgaggtctgtgaagggccgattcaccatctccaaagccgagaatacagtgtatctacaaatgaacagcctgacaaccgaggacacggccgtgtactactgtgcgagattcacgggctggacgtctacaattaaggattgtcttgatttgtggggccgagggacaatggtcaccgtctctcca

SEQ ID NO: 8151 - DNA, 390 bp, Artificial Sequence
  Synthetic polynucleotide encoding artificial human antibody VH domain
gaggtgcacctgttggagtctgggggcggcttggttcagcctggggggtccctgaaactctcctgtgcagcctcaggattcaactttggcacctatgccatgacctggatccgccaggctccagggaaggggctggagtgggtctcagttattggtggtggtggtgctggcacagattacgcagactccatgaagggtcgcatcaccatctccagagacaattccaagaacatgctgtatctgcacatggacagtctgagagccgaggacacggccctgtattactgtgcgagaggaggagggggcttttgtactacaaccacctgctatgaactccgcttcaattactatgactactggggccagggaacccaggtcaccgtctcctca

SEQ ID NO: 8152 - DNA, 384 bp, Artificial Sequence
  Synthetic polynucleotide encoding artificial human antibody VH domain
gaggtgcagctggtgaattctgggggaggcttggtacggtctggagagtccctgagactctcctgttcagcctctggaatcaccttcagttcctatgaaatgaattgggtccgccaggctccagggaagggtctggagtgggtttcctacatcagtgctagtgggaccaccacacactacgcagactgtgtgaagggccgattcaccatctccagagacaacgccgagaactcaatgtatctgcagatgaacagcctgagagacgaggacacggctgtttattactgtgtgacagacagggaagtccccgggactgtaatgatcacacctgcaaactccgcttttgatatctggggccaagggacaagggtcaccgtctcttca

SEQ ID NO: 8153 - DNA, 351 bp, Artificial Sequence
  Synthetic polynucleotide encoding artificial human antibody VH domain
caggtgcagttggtgcagtctggggctgaggtgaagaagcctggggcctcagtgaaggtctcctgcaaggcttctggattcagcttcaccaattacgatatgctctgggcgcgacaggccactggacaagggcttgagtggatgggatggattaaccctactagtggtagcacagacgctgcacagagattccagggcagagtcaccatgactggggatacctccacaagcacagtctacatggagctgagtggcctgagatctgaagacacgggcgtgtactattgcgcgagaggcccccatggctactttgacttctggggccagggaaccctggtcaccgtctcctca

SEQ ID NO: 8154 - DNA, 372 bp, Artificial Sequence
  Synthetic polynucleotide encoding artificial human antibody VH domain
gaggtgcagctgttggagtctgggggagacttggttcagcctggggggtccctgagactctcctgtgcagcctctggattcacctttagtaactatgccatgacctgggtccgccaggctccagggaaggggctggagtgggtctcgactattagtgctagtggtgataatacatactacgcaggctctgtgaagggccaattcgccatctccagagacaattccaagaacacactgtatctgcaaatgaacagcctcagagtcgaggacacggccagatattactgtgcgaaagatctcggctacggtggtaactatgggacgggggcttttgatatctggggccaagggacagtggtcatcgtctcttca

SEQ ID NO: 8155 - DNA, 396 bp, Artificial Sequence
  Synthetic polynucleotide encoding artificial human antibody VH domain
caggtgcagctgcaggagtcgggcccaggactggtgaagccttcggagaccctgtccctcacctgcaccatatctggtgtctccatgagtgggttctactggacctggatgcggcagaccccagggaagcgactggagtggattggaaatatatataatggtggggtcaccaagtacaatccctccctcaagagtcgagtcaccatctcaagagacacgtcgaagaaccagttctccctgaagatgaagtctgtgaccgccgcggacacggccgtgtattattgtgcgagagatcatgggagagaacgtattcctatggttcgcggagagcccgacatagatttctactacggaatggacgtctggggccacgggacctcggtcaccgtctcctca

SEQ ID NO: 8156 - DNA, 375 bp, Artificial Sequence
  Synthetic polynucleotide encoding artificial human antibody VH domain
gaggtgcagctggtggagtctgggggaggcttggcccagcctggagggtccctgagactctcctgtgcagcctctggaatgattttcagtagttatgaaatgaactgggtccgccaggctccagggaagggcctggagtgggtctcatatattagtggtagcggcagtagagtccactacgcagactctgtgaagggccgattcaccatgtccagagagaacggcaagaacacagtgcatttgcaaatgagtggcctgagagccgaggacacggctgtgtattactgtgcgagaggtggcattgcagtgactgggactcgctactactacagtatggacgtctggggccaagggaccgcggtcaccgtctcgtca

SEQ ID NO: 8157 - DNA, 372 bp, Artificial Sequence
  Synthetic polynucleotide encoding artificial human antibody VH domain
caggtgcagctgcgggagtcgggcccaggactggtgaagccctcggagagtctgtccctcacctgcactgtgtctgatatccccatcagatatttcttctggagttggatccggcagtcccccgggaagggactggagtgggttgcctctgtgtctgacagtgggcgctccaaatacaatccctccctcgagagtcgagcctccatttcaggagacacttccaagaaccgtctctccctcaaactggactccatcactgacgcagacacggccgtttattattgtgcgagaggaaattactttgaggctgcttctccgatggcgggatatttcgacccctggggccagggaatccaggtcaccgtctcctca

SEQ ID NO: 8158 - DNA, 363 bp, Artificial Sequence
  Synthetic polynucleotide encoding artificial human antibody VH domain
caggtgcaactgcaggagtcgggcccaggactgctgaggccttcggagaccctgtccctcgcctgctctgtctctggtggctccatcagcggtcactactggagctggatccggcagcccccggggaagggactggagtggattgggtacatccattccagtggggtcaccaactacgacccctcactcaagagtcgagtcaccttttcagttgacacgtccaagaatcatttctccctggccctgaggtctgtgaccgctgccgacacggccatattttactgtgcgcgttatcattgtcctgctgatatatgtgacggttttgatctctggggccaagggacaacggtcaccgtctcttca

SEQ ID NO: 8159 - DNA, 405 bp, Artificial Sequence
  Synthetic polynucleotide encoding artificial human antibody VH domain
gaggtgcagctgggagagtctggggggggcttgacaacaccaggggggtccctgagactctcttgtaaaggctctggattcaacttcggcgattatgctttcaactggtttcgccaggccccagggagggggctggagtgggtggggttcatcagaagtttagcctatggtggaacaactgataccgccgcgtctctgagaggcagatttaccctctcaagggatgattccgagaacatcacgtacctgcaaatggagagactgaaaagcgacgacactgccgtctattattgcacacgagatcagacttatttgaaagggagacaccatgccgtcaagtgcagtggcggcacctgcggcgtgcctggccactggggccacggcaccctggtcaccgtctcttca

SEQ ID NO: 8160 - DNA, 378 bp, Artificial Sequence
  Synthetic polynucleotide encoding artificial human antibody VH domain
caggtgcagctggtggagtctgggggaggcgtggtccagcctgggaggtccctgagactctcctgtgcagcctctggattcaccttcagtagctatggcatgcactgggtccgccaggctccaggcaaggggctggagtgggtggcacttatatcatatgatggaagtaataaatactatgcagactccgtgaagggccgattcaccatctccagagacaattccaagaacacgctgtatctgcaaatgaacagcctgagagctgaggacacggctgtgtattactgtgcgaaagatcagtacgttggtaacccccgggccagctactactacggtatggacgtctggggccaagggaccacggtcaccgtctcctca

SEQ ID NO: 8161 - DNA, 354 bp, Artificial Sequence
  Synthetic polynucleotide encoding artificial human antibody VH domain
gaggtgcagttggtggagtctgggggaggcttggtacagcctggggggtccctgagactctcctgtgcagcctctggattcaacttcagtagtcatgaaatgaactgggtccgccaggctccagggaagggactggagtggctgtcatacattagcaggactggtaggaccatattctacgcagacgctgtgaagggccgattcaccacctccagagacaacggcaggaactcactgtctctgcaaatggacagcctgagagccgaggacacggctgtgtactactgtgcaagagggggttcgggggacgggatgaacgtctggggccaagggaccacggtcaccgtctcctca

SEQ ID NO: 8162 - DNA, 360 bp, Artificial Sequence
  Synthetic polynucleotide encoding artificial human antibody VH domain
gaggtgcagttggtggagtccgggggaggcttagttcagccgggggggtccctgagactctcgtgtgaagtctctggattcatcttaggtaactactggatggactgggtccgccaagttccagggaaggggctggtgtgggtctcaattattaataaagatgggagtaccacaaaatacgcggactccgtgaagggccgattcaccatctccagagacaacgccaagaatatgctgtatctgcaattgaacagtctgagagacgaagatacggctatttattactgtgcaagagatgtgccagaaaccggctacggtatggacgtctggggccacgggaccatggtcaccgtctcctca

SEQ ID NO: 8163 - DNA, 369 bp, Artificial Sequence
  Synthetic polynucleotide encoding artificial human antibody VH domain
caggtgcagctacagcagtggggcgcaggactgttgaggccttcggagaccctgtccctcacctgcggtgtctatggtaggtcattcagtggttatcactattcttggatccgtcagacagcagagaggggcctggagtggattggagaaatcactgaaagaggcagaaccacttacaacccgtcccttaagagtcgagtcaccatctcaggagacacgtcgaagaagcaatattttctgagattgagttctgtgaccgccgcggacacggctgtctattactgtgcgagagggccttcggccgttggcaaggactactacttctacatggacctctggggtagagggaccacagtcaccgtctcctca

SEQ ID NO: 8164 - DNA, 363 bp, Artificial Sequence
  Synthetic polynucleotide encoding artificial human antibody VH domain
gaggtgacgctggtggagtcggggggagacttagtgcagcctggaagatccctgagactctcctgtgcagtctctggattcttcttcagtagttttgaaatgatctgggtccgccaggctccagggaaggggctggagtggcttgcatacattgatagtgctggaactacccagtactacgcagactctgcgaggggccgattcaccatctccagggacaacgccaatgactcactgagcctggaaatgaacagcctgagtgtcgccgacacgggcgtttactattgtgcgagagtcgggggcatcttagtttgggggagttttgacttctgggggccgggaaccccggtcaccgtctcctca

SEQ ID NO: 8165 - DNA, 366 bp, Artificial Sequence
  Synthetic polynucleotide encoding artificial human antibody VH domain
gaggtgcagttgttggagtctgggggaggcttggcacagccgggggggtccctgagactctcctgtgcagcctctggattcccctttagcagttatgtcatgaactgggtccgccaggccccagggaaggggctggagtgggtctcaggtattcgaggcagtggtggaggcacaaactacgcagactccgtgaggggccggttcaccatctccagagacaattccgagaagacgctatatctgcagatgacgagcctgagagtcgaggacacggccatatattactgtgcgaagtattggagtggaggttcccgcccggatgcttttggtatctggggccaagggacaatggtcatcgtctcgtca

SEQ ID NO: 8166 - DNA, 369 bp, Artificial Sequence
  Synthetic polynucleotide encoding artificial human antibody VH domain
caggtgcagctggtgcagtctggggctgaggtgaagaagcctggggcctcagtgaaggtttcctgcaaggcatctggatacaccttcaccaagaactatatacactgggtgcgacaggcccctggacaagggcttgagtggatgggaagaatcaaccctactggtggtggcgcaagctatgcacagaggttccagggcagactcaccatgaccagggacacgtctacgagcacagtctacatggagctgagcagcctgagatctgaggacacggccgtgtattactgtgcgagagatgttgtagaagtaacagctgcttggttctactttgactactggggccagggaaccctggtcaccgtctcctca

SEQ ID NO: 8167 - DNA, 351 bp, Artificial Sequence
  Synthetic polynucleotide encoding artificial human antibody VH domain
caggtgcaccttgtggaatctgggggaggcgtggtccagcctgggaggtccctgagactctcctgtgcagcgtcagaattcgccttcagtatctatgccatgcactgggtccgccaggctccaggcaaggggctggagtgggtggcagttatctcaaaagatggaaggaatgaatactatggagactccgtgaagggccgattcaccatctccagagacacaaacaagagcatgcattacttgcagatgaataacctgagagccgaggacacggctgtatattactgtgcgacagatagtcagggctactttgacaactggggcccgggaaccctggtcaccgtctcctca

SEQ ID NO: 8168 - DNA, 366 bp, Artificial Sequence
  Synthetic polynucleotide encoding artificial human antibody VH domain
cagctgcagctgcaggagtcgggcccaggacaggtgaagccttcggagaccctgtccctcacctgctctgtctctggtggctccatcagcgggagttttttctactggggctggatccgccagccccccgggaagggactcgagtggcttgggagtatctctgattctgagaacacctactacaacccgtcccttaaggatcgactaagcatctccgtggactcttccaagaaccgagtctctttgaccctgacctctgtgaccgccgccgacacggctgtctattactgtgggagaccgcaaagtgttgctcatcgtgatcgttttgggatctggggccgtggaacaagggtcactgtctcctca

SEQ ID NO: 8169 - DNA, 366 bp, Artificial Sequence
  Synthetic polynucleotide encoding artificial human antibody VH domain
gaagtgcagctggtgcagtccggagcagacctgaaagagcccggggagtctctgaggatctcctgtgaggcttctggatacccttttgtcaagcgatttaccaacttctggatcagctgggtgcgccagttgcccgggaaaggcctggagtggatggggcggattgatcccagtgactcttatacccaatataacccgtccttccaaggccacatcatcatctcagccgacaagtccattagcactgcctacctgctgttgaccagcctgaaggccgcggacaccgccatatatttctgtgcaagacacgatgggagttaccactttgactactggggccagggaaccctggtcaccgtctcctca

SEQ ID NO: 8170 - DNA, 387 bp, Artificial Sequence
  Synthetic polynucleotide encoding artificial human antibody VH domain
gaggtgcgactggtggagtctgggggaggcttggtacagcctggagggtccctgagactctcctgtgcaacctctggattcatcttccggacttatgaaatgaactgggtccgccaggctccagggaaggggctggaatggatttcatggatttcatggatgaatggtgatgcatctaatacactgtacgcagactctgtgaagggccgattcaccatcgccagagacaacgccaagaactcactgtatctgcagatgaagcgcctgacagtcgaggacacggccatctactactgtacgagagaaacctacccgccggtaggtggcactcaccacttctacggtttggacgtctggggccaagggactacggtcaccgtttcctca

SEQ ID NO: 8171 - DNA, 375 bp, Artificial Sequence
  Synthetic polynucleotide encoding artificial human antibody VH domain
gaggtgcggctggtggagtccgggggaggcttggtccagccgggggggtccctgaaactctcctgtacagcctctgagttcactttcagtggttctactatacactgggtccgccgggctgccgggagagggctggagtgggttggccgtattagagacaaaactaacacttacgcgacaacatatgctgcgtcggtgagcggcaggttcaccatctccagagatgatgcaaagaccacggcttatctgcaaatgaacagcctgaaaaccgaggacacggccgtctattactgtgctagtaaggagacacttagggacttctcctactattacatggacgtctggggcaaagggaccacggtcaccgtctcctca

SEQ ID NO: 8172 - DNA, 369 bp, Artificial Sequence
  Synthetic polynucleotide encoding artificial human antibody VH domain
caggtgcaactggtggaatctgggggaggcgtggtccagcctgggaggtccctgagactctcttgtgcagcctctggattcgccttcagtttctatggcatggactgggtccgccaggctccagacaaggggctggagtgggtggcggcaatatcatctgatggcactaatgaattctatgcagactccgtgaagggccgattcaccatctccagagacaattccaagaacacactgtatctgcaaatgaacaacctgagaaaagaggacgcggctgtctattactgtacgactgcttattgtggtggtgactgctacccacccttctttgactattggggcccgggaaccctggtcaccgtctcctca

SEQ ID NO: 8173 - DNA, 390 bp, Artificial Sequence
  Synthetic polynucleotide encoding artificial human antibody VH domain
caggtgcagctgcaggagtcgggcccaggactggtgaagacttcggagaccctgtccctcacgtgcactgtctctggtggctccattagtagttttcattggaatcactggaactggatccggcagaccccagggaagggactggagtggattggttacatctactacactgggttcaccgagagcaccctctacaacccctccctcgcgagtcgagtttccatatcactggacatgtccaggaaccagttctccctgacgctgaactctgtgaccgccgctgacacggccgtctattactgtgcgagacgagtcaggtccgatccagtcattagttccgacaactggctcggcccctggggccagggactcctggtcaccgtctcctca

SEQ ID NO: 8174 - DNA, 357 bp, Artificial Sequence
  Synthetic polynucleotide encoding artificial human antibody VH domain
cagctgcagctgcaggagtcgggcccaggactggtgaagccttcggaggccctgtccctcacctgctctgtctctggtgtctccaccagtagtagtgactactactggggctggatccgccagcccccagggaaggctctggagtggcttgggagtatctattatagtgggagcaccctctacaacccgtccctcaagagtcgagtcaccatatccgtagacacgtccaagaatcagttctccctgagggtgagttctgtgaccgcctcagacacggctgtatactactgtgtgagacaaaagggcgcagtggctcctgacttctggggccagggaaccctggtcaccgtctcctca

SEQ ID NO: 8175 - DNA, 363 bp, Artificial Sequence
  Synthetic polynucleotide encoding artificial human antibody VH domain
gaggtgcagctggtggagtctggaggaggcttgatgcagcctggggggtccctgagaatttcctgtgcagcctctgggttcagcgtcagcagtaattacatcagttgggtccgccaggctccagggaaagggctagagtggatctcagttatttatagtgctgatagaacacaatacgcagagtccgtcaagggccgattcaccatctccagagacacttccaagagcacggtgtttcttcaaatggacagcctgagagtcgacgacacggccgtctattactgtgcgagccccgggggccaatgcaatggtggcacctgctacccgtactggggccagggaaccctggtcaccgtctcctca

SEQ ID NO: 8176 - DNA, 363 bp, Artificial Sequence
  Synthetic polynucleotide encoding artificial human antibody VH domain
caggtgcagctggtggagtctgggggaggcgtggtccagcctgggaggtccctgagactctcctgtgcagcgtctggattcaccttcagtagctatggcatgcactgggtccgccaggctccaggcaaggggctggagtgggtggcagttatatggtatgatggaagtaataaatactatgtagactccgtgaagggccgattcaccatctccagagacaattccaagaacacgctgtatctgcaaatgaacagcctgagagccgaggacacggctgtgtattactgtgcgagagaaggtatagtgggagctactacggggttcgacccctggggccagggaaccctggtcaccgtctcctca

SEQ ID NO: 8177 - DNA, 375 bp, Artificial Sequence
  Synthetic polynucleotide encoding artificial human antibody VH domain
gaggtgcagctggtggagtctgggggaggcctggtcaagcctggggggtccctgagactctcctgtgtaggctctggattcaccttcagtgactatagtatgaactgggtccgccgggctccagggagggggctggagtgggtctcatccattagtagtaggagtacttacaaggactacgcagactccgtgaagggccgattcaccatctccagagacaacgccaagaattcactgtatctggaaatgaacaacctgagatccgaggacacggctgtctattactgtgcgcgaaatcatgattactatgatagtagtggttattttctcctcgttgactactggggccagggaacccttgtcaccgtcccctca

SEQ ID NO: 8178 - DNA, 342 bp, Artificial Sequence
  Synthetic polynucleotide encoding artificial human antibody VH domain
caggtccagcttgtgcagtcgggggctgagttgaagcagcctggggcctcagtgaaggtttcctgccaggcttctggattcaccttcacaacgtctaacatctactgggtgcgccaggcccccggacaaaggcttgagtggttgggatggatcaacattgccaatggtcacacaagatattcacagagcttgcagggcagaatcatctttacaagggacacatccgcgaatacagtcttcatggagttgagtagtctgagatctgcagacacggctgtgtacttctgtgcgagaggcaccttaggccactggggccagggaactctggtcaccgtctcttca

SEQ ID NO: 8179 - DNA, 363 bp, Artificial Sequence
  Synthetic polynucleotide encoding artificial human antibody VH domain
caggtgcagctggtggagtctgggggaggcgcggtccagcctgggaagtccctgagactctcctgtgcaacgtctggcttccccttcactgccttgggcatacactgggtccgccaggctccaggcagggggctggagtgggtggctgttttgtggtctgatggaagaaatcattattacgcggactccgtgaaagaccgattcatcgtctccagagacaatttcatgaacacacattacttgcaaatgcacagtctgagagtcgaagacacggctgtatattattgtgcgagagccatgggattccttgcccacgactggttcgacccctggggccaggggacccttgtcaccgtctcctca

SEQ ID NO: 8180 - DNA, 357 bp, Artificial Sequence
  Synthetic polynucleotide encoding artificial human antibody VH domain
caggtgcagctggtgcagtctggggctgaggtgaagaagcctggggcctcagtgaaggtctcctgcaaggcttctggatacaccttcaccggttatgatatcaactgggtgcgacaggccactggacaagggcttgagtggatgggatggatgaaaccttatagtggtaacacaggctatgcacagaagttccagggcagagtcaccatgaccagggacacctccataagcacagcctacatggagctgagcagcctgagatctgaggacacggccgtctattactgtgcgagagagatgagtagcatcaccactacgggccactggggccagggaaccctggtcaccgtctcctca

SEQ ID NO: 8181 - DNA, 372 bp, Artificial Sequence
  Synthetic polynucleotide encoding artificial human antibody VH domain
gaggtgcagctgttggcgtcggggggaggcttggtaccgccgggggggtccctgagactctcctgtgcagcctctggattcacctttagcgactacgccatcagctgggtccgccgcgctccggggaagggcctggagtgggtctcagctatcggtggtaccggtagtagcactttctacgcagattccgtgaagggccggttcaccgtctccaaagaccattccacgaaaactgtgtttctgcaaatggagagcctgacagccgaagactcggccatatattattgtagtggctactgtagaggtgggagctgcgccggtcacgggtcctttgacttctggggccggggaacgctggtcaccgtctcctca

SEQ ID NO: 8182 - DNA, 369 bp, Artificial Sequence
  Synthetic polynucleotide encoding artificial human antibody VH domain
cagctgcagctgcaagagtcgggcccagggctggtgaagccttcggagaccctgtccctcacctgcactgtctctggtggctccgtcaccaatagaacttactactggggctggatccgccagcccccagggaaggggctggagtgtattggaagtatctactatagtgggagtacctactccaacccgtccctcaggagtcgagccaccatatccgtcgacgcgtcgaagaaccagttctccctgaggctgaactctgtgaccgccgcagacacggctgtttattactgtgcgcgacatggcttacgattcggggcgtttgatccttttgatatatggggccaagggacaacggtcaccgtctcttca

SEQ ID NO: 8183 - DNA, 378 bp, Artificial Sequence
  Synthetic polynucleotide encoding artificial human antibody VH domain
caggtgcagctggtggagtctgggggaggcgtggtccagcctggggggtccctgagactctcctgtgcagcgtctggattcaccttcagtaactatggcatgcactgggtccgccaggctccaggcaaggggctggagtgggtgggacttatatggtatgatggacggaataaagagtactcagactccgtgaagggccgattcaccatctccagagaaaattccaagaacacgatgtatctgcaaatgaacagcctgagaggcgaggacacggctgtgtattactgtgcgagagcagagggatatagtggccacaactacgtttattattacggtatggacgtctggggccaagggaccacggtcaccgtctcctca

SEQ ID NO: 8184 - DNA, 354 bp, Artificial Sequence
  Synthetic polynucleotide encoding artificial human antibody VH domain
caggtgcacttggagcaatccggggctgaggtgaagaagcctggggcctcagtgaaggtctcctgcagggtttttggatataccttcaccggctactattttcactgggtgcgacaggcccctggacacgggcttgagtggatgggatggatgaactctaacagtggtgggatcaaccttcgacagaagtttctgggcagggtcaccatgaccagggacacgtccatcaacacagtctacatggaactgaccagcctgacatctgacgacacggccatgtattattgtacttcggggccggggagttttcaaattgactactggggccagggaaccctggtcaccgtctcccca

SEQ ID NO: 8185 - DNA, 384 bp, Artificial Sequence
  Synthetic polynucleotide encoding artificial human antibody VH domain
caggtgcagctacagcagtggggcgcaggactgttgaagccttcggagaccctgtccctcacctgcgctgtctatggtgggtccttcagtggttactactggagctggatccgccagcccccagggaaggggctggagtggattggggaaatcaatcatagtggaagcaccaactacaacccgtccctcaagagtcgagtcaccatatcagtagacacgtccaagaaccagttctccctgaagctgagctctgtgaccgccgcggacacggctgtgtattactgtgcgagagggaaaaggggggcagtggctgggattcttctcccctactactactacggtatggacgtctggggccaagggaccacggtcaccgtctcctca

SEQ ID NO: 8186 - DNA, 363 bp, Artificial Sequence
  Synthetic polynucleotide encoding artificial human antibody VH domain
gaggtgcagctggtggagtctgggggaggcttggtacagcctggggggtccctgagactctcctgtgcagcctctggattcaccttcagttcctacgacatgcactgggtccgccacactatgggaaaaggtctggagtgggtctcaactgttgatactgctggtgacacattctatcgagactccgtgaagggccgattcaccatctccagagacaatgccagggactccttctatcttcaactcaacagcctgacagccggggacacggctgtgtatttctgtgtaagaggcacggttcggggaattatcacgtatagctttcactactggggccagggaaccctggtcaccgtctcctca

SEQ ID NO: 8187 - DNA, 387 bp, Artificial Sequence
  Synthetic polynucleotide encoding artificial human antibody VH domain
cagctgcagctgcaggagtcgggcccaggactggtgaagccttcggagaccctgtccctcacctgcactgtctctggtggctccatcagcagtagtagttactactggggctggatccgccagcccccagggaaggggctggagtggattgggagtatctattatagtgggagcacctactacaacccgtccctcaagagtcgagtcaccatatccgtagacacgtccaagaaccagttctccctgaagctgagctctgtgaccgccgcagacacggctgtgtattactgtgcgagacggcaggcgaatcatattgtgttggtgattgctattctggggggctggttcgacccctggggccagggaaccctggtcaccgtctcctca

SEQ ID NO: 8188 - DNA, 378 bp, Artificial Sequence
  Synthetic polynucleotide encoding artificial human antibody VH domain
gaggtgcagctggtgcagtctggagcagaggtgaaaaagcccggggagtctctgaagatctcgtgtaagggttctggatacagctttaccacccactggatcggctgggtgcgccagaggcccgggaaaggcctggagtggatgggactcatctatcctggtgactctgataccaggtacagtccgtccttcctaggccaggtctccatctcagccgacaagtccatcaacaccgcctacttgcaatggagcagcctgcaggcctcggacaccgccatgtatttctgtgccagacgggcgagggaaagcagccaacaaaagctttactggtactacatggacgtctggggcaaagggacctcggtcgccgtctcctca

SEQ ID NO: 8189 - DNA, 369 bp, Artificial Sequence
  Synthetic polynucleotide encoding artificial human antibody VH domain
cagctgcagctgcaggagtcgggcccaggactggtgaagccttcggagaccctgtccctcagttgctctgtctctggtgactccatcagcactactaattactactggggctggatccggcagcccccaggaaaggggctggagtggattgcgactatcgcatatagtggggccacctactacaacccgtccctcaagagtcgagtcagcatatccattgacacgtccgagaacaggttctccctgagggtgacctctgcgcccgccgcagacaccgccgcagacacggctatgtactactgtgcattgcaacatagtagcggttattggacccactggggccagggaaccctggtcaccgtctcctca

SEQ ID NO: 8190 - DNA, 357 bp, Artificial Sequence
  Synthetic polynucleotide encoding artificial human antibody VH domain
caggtgcagctacagcaatggggcgcaggactgttgaggccttcggagaccctgtccctcacatgcgctgtctttggtgggtccttcagtggttaccactggacctggatccgccagcccccagggaaggggctggagtggattggggaaatccatcatgatggaggcatcaactacaacccgtccctcaagagtcgagtcaccatttcagtagacacgtccaagaaccagttctccctgaacctgaactctgtgaccgccgcggacacggctgtgtactactgtgcgagaggccaacaccaagagtggcctgtcggggactactggggccaggggaccctggtcaccgtctcctca

SEQ ID NO: 8191 - DNA, 345 bp, Artificial Sequence
  Synthetic polynucleotide encoding artificial human antibody VH domain
gaggtgcagctggtggagtccgggggaggcttagttatgccgggggggtccctgagactctcctgcgcagcctctggattcaccttcagtagttattggatgtactgggtccgccaaactccagggaaggggctgatgtacgtctcacatataaatgctgatgggacgagtttcgcctacgcggactcggtgaagggccgcttcaccatatccagagacaacatgaggaacgcgctgtatctggatatgaacagtctcggagccgacgacgcgggtgtttattactgtgcacagttgaccacggtgacgacatggggccagggcaccctggtcaccgtctcctca

SEQ ID NO: 8192 - DNA, 381 bp, Artificial Sequence
  Synthetic polynucleotide encoding artificial human antibody VH domain
cagctgcagctgcaggagtcgggcccaggactggtgaagccctcggacacactgtccctcacctgcaatgtctctggtggctccataagaggtagtcgtgactactggggctggatgcgccagtccccactgaaggggctggaatggcttgggagtatctatcacactgggaccagtcactacaacccgtccctgaagagtcgcgtcgccatctctgtcgacacgtctacgaaccagttctccctgaacctgatttctgtgagcgccgcagacacgggggtctattactgcgcgaaaacatattacaattcattgactgattattataacgtttatcttatggacgtctggggccgggggaccacggtcaccgtctcctca

SEQ ID NO: 8193 - DNA, 357 bp, Artificial Sequence
  Synthetic polynucleotide encoding artificial human antibody VH domain
caggtgcagctggtgcaatctggggctgaggtgaagcagcctggggcctcagtgaaggtctcctgcaaggcttctggatacagcttcaccggctattatctacactgggtgcggcaggtccctggacaagggcttgagtggctgggatggatcaactctaacagcggtgaaacaaactatgcacagaagtttcagggcagggtcaccatgaccagggacacgtccgtcatgacagcctacatggaactgagcaggctgagatccgacgacacggccgtgtattactgtgcgagagaaggaggattgaatacgattgcggactactggggccagggaaccctggtcaccgtctcctca

SEQ ID NO: 8194 - DNA, 381 bp, Artificial Sequence
  Synthetic polynucleotide encoding artificial human antibody VH domain
caggtgcagctggtgcagtctggggctgaggtgaagaagcctggggcctcagtgaaggtctcctgcaaggcttctggatacaccttcaccggctactatatgcactgggtgcgacaggcccctggacaagggcttgagtggatgggatggatcaaccctaacagtggtggcacaaactatgcacagaagtttcagggcagggtcaccatgaccagggacacgtccatcagcacagcctacatggagctgagcaggctgagatctgacgacacggccgtgtattactgtgcgagagacgctttacgatattttgacgggttcggttgggtggaggggtggttcgacccctggggccagggaaccctggtcaccgtctcctca

SEQ ID NO: 8195 - DNA, 357 bp, Artificial Sequence
  Synthetic polynucleotide encoding artificial human antibody VH domain
caggtgcagctacagcagcggggcgaaggactgttgaagccttcggagaccctgtccctcacatgcgctgtgtctggtgggtccttcagtggttaccactggacgtggatccgccagtcaccagggaaggggctggagtggatcggtgaaattcattatgaaggccgtgtcaattacaacccgtctctcgagagccgagccaccatttcagtagacacgtccaaaaaccagttctccctggacctgatctctgtgaccgccgcggacacgggtgaatactactgtgcgcggggtcaatatcaaacatggcctgtcggtgactactggggccaggggaccctggtcaccgtctcctca

SEQ ID NO: 8196 - DNA, 357 bp, Artificial Sequence
  Synthetic polynucleotide encoding artificial human antibody VH domain
gaggtgcagctggaggaatccgggggaggcctggtcgagtctggggggtccctgagactctcctgtgcagcctctggattcaccttcagtagttatagcttcagttgggtccgccaggctccagggaaagggctggagtgggtctcattcattagtgattctggttattacatcttatacgcggactcagtgcagggccgattcaccatctccagagacagcgccaagaattcactgactctgcaaatgaacagcctgagagtcgaggacacggctctctattactgtgcgagagcccggggcaacagctgctacaacgactactggggccagggaaccctggtcaccgtctcctca

SEQ ID NO: 8197 - DNA, 378 bp, Artificial Sequence
  Synthetic polynucleotide encoding artificial human antibody VH domain
cagctgcagctgcaggagtcgggcccaggacaggtgaagccttcggagaccctgtccctcacctgcgctgtttctggtggctccatcaacagaagtagattcttgtggggctggatccgccagcccccagggaagggactggagtggattgggagtatctactatagtgggactacctactacagcccgtccctcgagagtcgagtgacccttgtcgtagacacgtcgaagaaccaattttccctgagactgaggtctgtgaccgccgcagacacggctctatattactgtgcgagaccgggaggatattgtagagggaacaattgccatgatgcttttgatacctggggccaagggacaatggtcaccgtctcttca

SEQ ID NO: 8198 - DNA, 387 bp, Artificial Sequence
  Synthetic polynucleotide encoding artificial human antibody VH domain
gaggtgcgactggtggagtctgggggaggcttggtacagcctggagggtccctgagactctcctgtgcaacctctggattcatcttccggacttatgaaattaactgggtccgccaggctccagggaaggggctggaatggatttcatggatttcatggataaatggtgatgcagctaatacactgtacgcagactctgtgaggggccgattcaccatcgccagacacaccgccaacaactcagtgtctctgcacatggagcgcctgacagtcgaggacacggccatctactactgtacgagagaaacccgcccgccggtaggtggcactcaccacttctacggattggacgtctggggccaagggactacggtcaccgtttcctca

SEQ ID NO: 8199 - DNA, 384 bp, Artificial Sequence
  Synthetic polynucleotide encoding artificial human antibody VH domain
caggtcaccttgaaggagtctggtcctgtgctggtgaaacccacagagaccctcacgctgacctgcaccgtctctgggttctcactcagcaatgctagaatgggtgtgagctggatccgtcagcccccagggaaggccctggagtggcttgcacacattttttcgaatgacgaaaaatcctacagcacatctctgaagagcaggctcaccatctccaaggacacctccaaaagccaggtggtccttaccatgaccaacatggaccctgtggacacagccacatattactgtgcacggatactctttgaaagtgagtggctggtacagtacaactactacgggatggacgtctggggccaagggaccacggtcaccgtctcctca

SEQ ID NO: 8200 - DNA, 354 bp, Artificial Sequence
  Synthetic polynucleotide encoding artificial human antibody VH domain
gaggtgcaactggtggagtctgggggaggcttggtccagcctggggggtccctgagactctcctgtgcaacgtctggattcacctttaacgcctattggatgacctgggtccgccaggctccaggaaaggggctggagtgggtggccagcataaagactgatggaagtgaggaaaagtatgtggaatctgtgaggggccggttcaccatttccagagacaccgccagaaactcactgtatctgcaaatgaacagcctgagagccgaggactcggctgtatattattgtgcgcgacaagtgggatggggacgcttcgacttctggggccagggaatcctggtcaccgtctcttca

SEQ ID NO: 8201 - DNA, 375 bp, Artificial Sequence
  Synthetic polynucleotide encoding artificial human antibody VH domain
caggttcaattggtgcagtctgggcctgaattgaagaagcctggggcctcactggaggtctcctgcaagacttctggatatccctttacagacttcggtctttcttgggtgcgccaggcccccggacaagggcttgagtggttgggttggatcgccccccgcaacgggtggactcactatgcagagaaatttaagggcagagtcaccataaccaccgacacatcaacgggcacagcctttctgaaacttgggggcctgggacctgacgactcggccgtctactactgtgcgacagatattggatccagaagtgggggctacctgtccagggagactgactactggggccagggaaccctggtcaccgtctcctca

SEQ ID NO: 8202 - DNA, 372 bp, Artificial Sequence
  Synthetic polynucleotide encoding artificial human antibody VH domain
gaggtgcagctgttggagtccgggggagatttggtacagccgggggagtccctgagactctcctgtgcagcctctggattcagctttagcttctatgccatgagctgggtccgccagcctccagggaagggtctacaatgggtctcaagtattagtggtggtggtgatgccacgtactacgcagactccgtgaagggccggttctccatctccagagacaattccaagaacatgctgtatctactagtgaataccctgagagccgatgacacggccatatattactgtgcgaaggattgggagaattttcagtcttgtggtagtgactgcctccagtcctggggccagggcaccctggtcaccgtctcctca

SEQ ID NO: 8203 - DNA, 378 bp, Artificial Sequence
  Synthetic polynucleotide encoding artificial human antibody VH domain
gaggtgcagctggtggagtctgggggaggcttggtacagcctggagggtccctgagactctcctgtgcagcctctggattcaccttcagtagttatgaaatgaactgggtccgccaggctccagggaaggggctggagtgggtttcatacattagtagtagtggtagtaccatatactacgcagactctgtgaagggccgattcaccatctccagagacaacgccaagaactcactgtatctgcaaatgaacagcctgagagccgaggacacggctgtttattactgtgcgagaggtgttatctatggttcggggagttatttagcccctagctggttcgactcctggggccaaggaaccctggtcaccgtctcctca

SEQ ID NO: 8204 - DNA, 357 bp, Artificial Sequence
  Synthetic polynucleotide encoding artificial human antibody VH domain
gaggtgcaactggtgcagtctgggggaggcttggtacagccgggggggtctctgagactctcctgtgcagcctctggagtcaccttcactagatatagcattaactgggtccgccaggctccagggaagggtctggagtggctttcatacattagtagtagtagtgataacatatactacgcagactctgtgacgggccgattcaccgtctccagagacaatgccaagaactcagcgattctgcaaatgaacagcctgagagacgaggacacggctgtctattactgtgcgagagggggggacttcggtgactacgggaactactggggccagggaaccctggtcaccgtctcctca

SEQ ID NO: 8205 - DNA, 360 bp, Artificial Sequence
  Synthetic polynucleotide encoding artificial human antibody VH domain
caggtgcaccttcagcagtggggctcaggactggtgaagccttcggagaccgtgtcactaacctgcgctgtttatggtggggccttcagagggcactactggacctgggtccgccagtcgccaggaagggggctggagtggattggggaggtcaaccagaatggaaacaccgcctacaacccgtccgtcgagagtcgagtcactatctcagttgacaggaccaggagtcagttctccctgcgattgacgtctgcgaccggcgcggacacggggatatattattgtgcgaggggaactgtacgagcgcctggggcaccctttgacgagtggggccagggaagccaggtcctcgtctcctca

SEQ ID NO: 8206 - DNA, 351 bp, Artificial Sequence
  Synthetic polynucleotide encoding artificial human antibody VH domain
caggtgcagctgcaggagtcgggcccaggactggtgaagccttcggagaccctgtccctcacctgcactgtctctggtggctccatcagtagttactactggagctggatccggcagcccccagggaagggactggagtggattgggtatatctattacagtgggagcaccaactacaacccctccctcaagagtcgagtcaccatatcagtagacacgtccaagaaccagttctccctgaagctgagctctgtgaccgctgcggacacggccgtgtattactgtgcggagggtggtagtgggagctactttgactactggggccagggaaccctggtcaccgtctcctca

SEQ ID NO: 8207 - DNA, 384 bp, Artificial Sequence
  Synthetic polynucleotide encoding artificial human antibody VH domain
caggtgcagctgcaggagtcgggcccaggactggtgaagccttcacagaccctgtccctcacctgcactgtctctggtggctccatcagcagtggtggttactactggagctggatccgccagcacccagggaagggcctggagtggattgggtacatctattacagtgggagcacctactacaacccgtccctcaagagtcgagttaccatatcagtagacacgtctaagaaccagttctccctgaagctgagctctgtgactgccgcggacacggccgtgtattactgtgcgagagaacacctaggatattgtagtagtaccagctgctatactggtgcttttgatatctggggccaagggacaatggtcaccgtctcttca

SEQ ID NO: 8208 - DNA, 381 bp, Artificial Sequence
  Synthetic polynucleotide encoding artificial human antibody VH domain
caggtgcagctgcaggagtcgggcccaggactggtgaagccttcacagaccctgtccctcacctgcactgtctctggtggctccatcagcagtggtggttactactggagctggatccgccagcacccagggaagggcctggagtggattgggtacatctattacagtgggagcacctactacaacccgtccctcaagagtcgagttaccatatcagtagacacgtctaagaaccagttctccctgaagctgagctctgtgactgccgcggacacggccgtgtattactgtgcgagagctaattactgggtagtagtaccagctgctatccataactggttcgacccctggggccagggaaccctggtcaccgtctcctca

SEQ ID NO: 8209 - DNA, 390 bp, Artificial Sequence
  Synthetic polynucleotide encoding artificial human antibody VH domain
caggtgcagctgcaggagtcgggcccaggactggtgaagccttcacagaccctgtccctcacctgcactgtctctggtggctccatcagcagtggtggttactactggagctggatccgccagcacccagggaagggcctggagtggattgggtacatctattacagtgggagcacctactacaacccgtccctcaagagtcgagttaccatatcagtagacacgtctaagaaccagttctccctgaagctgagctctgtgactgccgcggacacggccgtgtattactgtgcgagagccccaatgcccagtattacgatttttggagtggttattacccattggtacttcgatctctggggccgtggcaccctggtcactgtctcctca

SEQ ID NO: 8210 - DNA, 363 bp, Artificial Sequence
  Synthetic polynucleotide encoding artificial human antibody VH domain
caggtgcagctggtggagtctgggggaggcgtggtccagcctgggaggtccctgagactctcctgtgcagcctctggattcaccttcagtagctatgctatgcactgggtccgccaggctccaggcaaggggctggagtgggtggcagttatatcatatgatggaagcaataaatactacgcagactccgtgaagggccgattcaccatctccagagacaattccaagaacacgctgtatctgcaaatgaacagcctgagagctgaggacacggctgtgtattactgtgcgagatcgagttcggggagttatctaagtgcttttgatatctggggccaagggacaatggtcaccgtctcttca

SEQ ID NO: 8211 - DNA, 381 bp, Artificial Sequence
  Synthetic polynucleotide encoding artificial human antibody VH domain
gaggtgcagctggtggagtctgggggaggcttggtaaagcctggggggtcccttagactctcctgtgcagcctctggattcactttcagtaacgcctggatgagctgggtccgccaggctccagggaaggggctggagtgggttggccgtattaaaagcaaaactgatggtgggacaacagactacgctgcacccgtgaaaggcagattcaccatctcaagagatgattcaaaaaacacgctgtatctgcaaatgaacagcctgaaaaccgaggacacagccgtgtattactgtaccacagaccgggtttatgattacgtttgggggagttatcgtccaagtgactactggggccagggaaccctggtcaccgtctcctca

SEQ ID NO: 8212 - DNA, 399 bp, Artificial Sequence
  Synthetic polynucleotide encoding artificial human antibody VH domain
caggtgcagctacagcagtggggcgcaggactgttgaagccgtcggagaccctgtccctcacgtgcgctgtttatggtgggtccttcagtgattactactggacttggatccgccagcccccaggaaaggggctggagtggattggggaaatcaatcatagtggatacaccaactacatcccgtccctcaagaatcgggtcaccatatcagttgacacgtccaagaatcagttctccctgaagttgaaccatgtgaccgccgcggacacggctgtgtattattgtgtgagaggttcaggcggtcacgatttttggactggtttcattcaaaatcgcccttattatcactattactatatggacgcctggggcaaagggaccacggtcaccgtctcctca

SEQ ID NO: 8213 - DNA, 369 bp, Artificial Sequence
  Synthetic polynucleotide encoding artificial human antibody VH domain
gaggtgcagctggtggagtctggaggaggcttgatccagcctggggggtccctgagactctcctgtgcagcctctgggttcaccgtcagtagcaactacatgagctgggtccgccaggctccagggaaggggctggagtgggtctcagttatttatagcggtggtagcacatactacgcagactccgtgaagggccgattcaccatctccagagacaattccaagaacacgctgtatcttcaaatgaacagcctgagagccgaggacacggccgtgtattactgtgcgagagatacccgtggatacagctatggcctacggggaggtatggacgtctggggccaagggaccacggtcaccgtctcctca

SEQ ID NO: 8214 - DNA, 369 bp, Artificial Sequence
  Synthetic polynucleotide encoding artificial human antibody VH domain
caggtgcagctggtgcagtctggggctgaggtgaagaagcctgggtcctcggtgaaggtctcctgcaaggcttctggaggcaccttcagcagctatgctatcagctgggtgcgacaggcccctggacaagggcttgagtggatgggagggatcatccctatctttggtacagcaaactacgcacagaagttccagggcagagtcacgattaccgcggacgaatccacgagcacagcctacatggagctgagcagcctgagatctgaggacacggccgtgtattactgtgcgtcctatagtggctacgattacgggcccccctacggtatggacgtctggggccaagggaccacggtcaccgtctcctca

SEQ ID NO: 8215 - DNA, 369 bp, Artificial Sequence
  Synthetic polynucleotide encoding artificial human antibody VH domain
gaggtgcagctggtggagtctgggggaggcctggtcaagcctggggggtccctgagactctcctgtgcagcctctggattcaccttcagtagatatgccatgaactgggtccgccaggctccagggaaggggctggagtgggtctcgtccattactggtcgttctactttcatgtattacgcagactcagtgaggggccgattcaccgtctccagagacaacgccaagaactcactgtttctgcaaatggacagcctgagagccgaggacacggctgtgtacttctgtgcgagcggcgactatgggtcggggaattacgagtattactttgacttgtggggccagggaaccctggtcaccgtctcctca

SEQ ID NO: 8216 - DNA, 384 bp, Artificial Sequence
  Synthetic polynucleotide encoding artificial human antibody VH domain
caggttcagctggtgcagtctggagctgaggtgaagaagcctggggcctcagtgaaggtctcctgcaaggcttctggttacacctttaccagctatggtatcagctgggtgcgacaggcccctggacaagggcttgagtggatgggatggatcagcgcttacaatggtaacacaaactatgcacagaagctccagggcagagtcaccatgaccacagacacatccacgagcacagcctacatggagctgaggagcctgagatctgacgacacggccgtgtattactgtgcgaggttttcggaattactatggttcggggagttaacttcgccctactacggtatggacgtctggggccaagggaccacggtcaccgtctcctca

SEQ ID NO: 8217 - DNA, 366 bp, Artificial Sequence
  Synthetic polynucleotide encoding artificial human antibody VH domain
cagctgcagctgcaggagtcgggcccaggactggtgaagccttcggagaccctgtccctcacctgcactgtctctggtggctccatcagcagtagtagttactactggggctggatccgccagcccccagggaaggggctggagtggattgggagtatctattatagtgggagcacctactacaacccgtccctcaagagtcgagtcaccatatccgtagacacgtccaagaaccagttctccctgaagctgagctctgtgaccgccgcagacacggctgtgtattactgtgcgagacatgtacgtggatacagctatggttcgcttgactactggggccagggaaccctggtcaccgtctcctca

SEQ ID NO: 8218 - DNA, 393 bp, Artificial Sequence
  Synthetic polynucleotide encoding artificial human antibody VH domain
caggtcaccttgaaggagtctggtcctgtcctggtgaaacccacagagaccctcacgctgacctgcatcgtctctgggttctcactcagcaatgatagaatgggtgtgggttggatccgtcagcccccaggaaaggccctggagtggcttgcacagattttctcgaatgacgaaaaatcctacagcgcatctctgaagagcaggctcaccatctccaaggacacctccaaaggccaggtggtcctgaccatgaccaatatggaccctgtggacacaggcacatattactgtgcacggatagtttttgacccactgccatatagtagcaactggtaccgggactactacggtttggacgtctggggcccagggaccacggtcaccgtctcctca

SEQ ID NO: 8219 - DNA, 378 bp, Artificial Sequence
  Synthetic polynucleotide encoding artificial human antibody VH domain
gaggtgcagctggtgcagtctggagcagaggtgaaaaagcccggggagtctctgaagatctcctgtaagggttctggatacagctttaccagctactggatcggctgggtgcgccagatgcccgggaaaggcctggagtggatggggatcatctatcctggtgactctgataccagatacagcccgtccttccaaggccaggtcaccatctcagccgacaagtccatcagcaccgcctacctgcagtggagcagcctgaaggcctcggacaccgccatgtattactgtgcgagactttctattgggtatagcagtggctggtactactactacggtatggacgtctggggccaagggaccacggtcaccgtctcctca

SEQ ID NO: 8220 - DNA, 375 bp, Artificial Sequence
  Synthetic polynucleotide encoding artificial human antibody VH domain
cagctgcagctgcaggagtcgggcccaggactggtgaagccttcggagaccctgtccctcacctgcactgtctctggtggctccatcagcagtagtagttactactggggctggatccgccagcccccagggaaggggctggagtggattgggagtatctattatagtgggagcacctactacaacccgtccctcaagagtcgagtcaccatatccgtagacacgtccaagaaccagttctccctgaagctgagctctgtgaccgccgcagacacggctgtgtattactgtgcgagacagggggagatgtgggagctaccgccgtcggactggttcgacccctggggccagggaaccctggtcaccgtctcctca

SEQ ID NO: 8221 - DNA, 354 bp, Artificial Sequence
  Synthetic polynucleotide encoding artificial human antibody VH domain
caggtgcagctacaggggtcgggcccaggactggtgaagccttcggagaccctgtccctcacatgcgctgtgtctggtgcctccgtcagggatgagttctggagctggatccggcagaccccagggaggagactggagtggattgggtggattgcttacagtgggaggtccaattacaaccgctccctcaagagtcgagtctccatttcagtggacacgtccaagaaccagttctccctgaagctgacctctgtgaccgctgcggacacggccttctatttctgtgcgcgaggaggagacagctctaagttctttgactactggggccggggagtcctggtcaccgtctcctca

SEQ ID NO: 8222 - DNA, 381 bp, Artificial Sequence
  Synthetic polynucleotide encoding artificial human antibody VH domain
cagatcaccttgaaggagtctggtcctacgctggtgaaacccacacagaccctcacgctgacctgcaccttctctgggttctcactcagcactagtggagtgggtgtgggctggatccgtcagcccccaggaaaggccctggagtggcttgcactcatttattgggatgatgataagcgctacagcccatctctgaagagcaggctcaccatcaccaaggacacctccaaaaaccaggtggtccttacaatgaccaacatggaccctgtggacacagccacatattactgtgcacacagacattactatgatagtagtggttattactacctcgaggcttttgatatctggggccaagggacaatggtcaccgtctcttca

SEQ ID NO: 8223 - DNA, 366 bp, Artificial Sequence
  Synthetic polynucleotide encoding artificial human antibody VH domain
caggtgcagctggtggagtctgggggaggcgtggtccagcctgggaggtccctgagactctcctgtgtagcctctggattcaccttcacaacatatggcatgcactgggtccgccaggctccaggcaaggggctggagtgggtggcgatgatatcatttgatggagataagagagactacgcagactccgtgaagggccgattcaccatctccagagacaaatccaaaaacaccctgtttctgcaaatgaacagcctgagagatgaggacacggccatctatttctgtgcgctaggaggtgattataccagcgcgtccaggtactttgactactggggccagggaacccgggtcaccgtctcctca

SEQ ID NO: 8224 - DNA, 378 bp, Artificial Sequence
  Synthetic polynucleotide encoding artificial human antibody VH domain
gaggtgcatctgttggagtctgggggagacttggtgcagcctggggggtccctgagactctcctgtgcagcctctggattcacctttagcaactatgccatgagctgggtccgccaggctccagggaaggggctggagtggctctcagttattagtggtacaagtggtactcgtggtaggacattctacgcagactccgtgaaggaccgcttcaccatctccagagacgattccaagaacacactgcatctgcaaatgaacagcctgagagccgaggacacggcgagatattactgtgcgaccctaggaaattgtggtgatacttggtgccatacctttgactactggggccagggaaccctggtcactgtgtcccca

SEQ ID NO: 8225 - DNA, 363 bp, Artificial Sequence
  Synthetic polynucleotide encoding artificial human antibody VH domain
caggtgcagctggtggagtctgggggaggcgtggtccagcctgggaggtccctgagactctcctgtgcagcctctggattcaccttcagtagctatggcatgcactgggtccgccaggctccaggcaaggggctggagtgggtggcagttatatcatatgatggaagtaataaatactatgcagactccgtgaagggccgattcaccatctccagagacaattccaagaacacgctgtatctgcaaatgaacagcctgagagctgaggacacggctgtgtattactgtgcgaaaacctatagtgggagctactttgatgcttttgatatctggggccaagggacaatggtcaccgtctcttca

SEQ ID NO: 8226 - DNA, 399 bp, Artificial Sequence
  Synthetic polynucleotide encoding artificial human antibody VH domain
caggtgcagctacagcagtggggcgcaggactgttgaagccttcggagaccctgtccctcacctgcgctgtctatggtgggtccttcagtgactcctattggacctgggtccgccagtccccagggaagggcctggagtggattggtgaaatcaatcatagtgggggcaccaactacagtccgtcccttaagagtcgagtcaccatctcagtagacacgtccaagaatcagttctccctgaaggtgaggtctctgaccgccgcggactcggctgtatattactgtgcgcgaggttcaggaggtcacgatttttggaccggttttattcaaaatcgaccttattatcactactactatttggacgtctggggcagagggaccacggtcaccgtctcctca

SEQ ID NO: 8227 - DNA, 360 bp, Artificial Sequence
  Synthetic polynucleotide encoding artificial human antibody VH domain
caggtgcagctgcaggagtcgggcccaggactggtgaagccttcacagaccctgtccctcacctgcactgtctctggtggctccatcagcagtggtgattactactggagttggatccgccagcccccagggaagggcctggagtggattgggtacatctattacagtgggagcacctactacaacccgtccctcaagagtcgagttaccatatcagtagacacgtccaagaaccagttctccctgaagctgagctctgtgactgccgcagacacggccgtgtattactgtgccagagagagccgggtatggggctactttgactactggggccagggaaccctggtcaccgtctcctca

SEQ ID NO: 8228 - DNA, 384 bp, Artificial Sequence
  Synthetic polynucleotide encoding artificial human antibody VH domain
caggtgcagctggtggagtctgggggaggcgtggtccagcctgggaggtccctgagactctcctgtgcagcctctggattcaccttcagtagctatggcatgcactgggtccgccaggctccaggcaaggggctggagtgggtggcagttatatcatatgatggaagtaataaatactatgcagactccgtgaagggccgattcaccatctccagagacaattccaagaacacgctgtatctgcaaatgaacagcctgagagctgaggacacggctgtgtattactgtgcgaaagaaggcgccaaggggtatagcagtggctggatctactactactacggtatggacgtctggggccaagggaccacggtcaccgtctcctca

SEQ ID NO: 8229 - DNA, 360 bp, Artificial Sequence
  Synthetic polynucleotide encoding artificial human antibody VH domain
gaggtgcagctggtggagtctgggggaggcctggtcaagcctggggggtccctgagactctcctgtgcagcctctggattcaccttcagtagctatagcatgaactgggtccgccaggctccagggaaggggctggagtgggtctcatccattagtagtagtagtagttacatatactacgcagactcagtgaagggccgattcaccatctccagagacaacgccaagaactcactgtatctgcaaatgaacagcctgagagccgaggacacggctgtgtattactgtgcgagagatgatatgactacttatgatgcttttgatatctggggccaagggacaatggtcaccgtctcttca

SEQ ID NO: 8230 - DNA, 363 bp, Artificial Sequence
  Synthetic polynucleotide encoding artificial human antibody VH domain
gaggtgcagctggtgcagtctggagcagaggtgaaaaagcccggggagtctctgaagatctcctgtaagggttctggatacagctttaccagctactggatcggctgggtgcgccagatgcccgggaaaggcctggagtggatggggatcatctatcctggtgactctgataccagatacagcccgtccttccaaggccaggtcaccatctcagccgacaagtccatcagcaccgcctacctgcagtggagcagcctgaaggcctcggacaccgccatgtattactgtgcgagtgccctgacgtatagcagcagctggggctttgactactggggccagggaaccctggtcaccgtctcctca

SEQ ID NO: 8231 - DNA, 384 bp, Artificial Sequence
  Synthetic polynucleotide encoding artificial human antibody VH domain
caggtgcagctggtgcagtctggggctgaggtgaagaagcctgggtcctcggtgaaggtctcctgcaaggcttctggaggcaccttcagcagctatgctatcagctgggtgcgacaggcccctggacaagggcttgagtggatgggagggatcatccctatctttggtacagcaaactacgcacagaagttccagggcagagtcacgattaccgcggacgaatccacgagcacagcctacatggagctgagcagcctgagatctgaggacacggccgtgtattactgtgcgagaggtcgttacgatattttgactggttattatagctactactactacggtatggacgtctggggccaagggaccacggtcaccgtctcctca

SEQ ID NO: 8232 - DNA, 369 bp, Artificial Sequence
  Synthetic polynucleotide encoding artificial human antibody VH domain
caggtggaactggtgcagtctggggctgaggtgaagaagcctgggtcctcggtgacagtctcctgcagggcttcgggaggcaccttcaacaaatacggcatcagttgggtgcgacaggcccctgggcaaggtcttgagtggatgggagggagcatgcctatgtatggtgcaacacactacgcccagaagttccaggacagagtctcgatcaccgcggacgaatccacgagcactttttacatggaactgagtggcctgacatttgcagacacggccgtgtattattgtgcggaagggaacctcttttacagtggttggtacaactggctcgacccctggggccagggaaccccggtcctcgtctcctca

SEQ ID NO: 8233 - DNA, 372 bp, Artificial Sequence
  Synthetic polynucleotide encoding artificial human antibody VH domain
caggtgcagctggtgcagtctggggctgaggtgaagaagcctgggtcctcggtgaaggtctcctgcaaggcttctggaggcaccttcagcagctatgctatcagctgggtgcgacaggcccctggacaagggcttgagtggatgggagggatcatccctatctttggtacagcaaactacgcacagaagttccagggcagagtcacgattaccgcggacgaatccacgagcacagcctacatggagctgagcagcctgagatctgaggacacggccgtgtattactgtgcgagagagcaagtgggagctactaaccaaggggatttttactttgactactggggccagggaaccctggtcaccgtctcctca

SEQ ID NO: 8234 - DNA, 384 bp, Artificial Sequence
  Synthetic polynucleotide encoding artificial human antibody VH domain
caggtgcagctggtgcagtctggggctgaggtgaagaagcctgggtcctcggtgaaggtctcctgcaaggcttctggaggcaccttcagcagctatgctatcagctgggtgcgacaggcccctggacaagggcttgagtggatgggagggatcatccctatctttggtacagcaaactacgcacagaagttccagggcagagtcacgattaccgcggacgaatccacgagcacagcctacatggagctgagcagcctgagatctgaggacacggccgtgtattactgtgcgagagtaacttcgggcctctatggttcggggagttattccccagtcaactggttcgacccctggggccagggaaccctggtcaccgtctcctca

SEQ ID NO: 8235 - DNA, 354 bp, Artificial Sequence
  Synthetic polynucleotide encoding artificial human antibody VH domain
caggtgcagctggtggcgtctgggggaggcgttgtccagcctgggaggtctctgagactctcctgtgccccgtctggattcagcctcagcagatttggcatgcactgggtccgccaggctccaggcaaggggctggagtgggtggcactcatctattatgatggaagtcgtgaattgtatgctgactccgtgaagggccgattcaccgtctcaagaaggaactccgacaataccttgtatctgcaaatgagtggcctgagagccgaggacacggctctttattactgtgtgagagtggcactggatggccacttagacctctggggccagggaaccctggtcaccgtctcctca

SEQ ID NO: 8236 - DNA, 360 bp, Artificial Sequence
  Synthetic polynucleotide encoding artificial human antibody VH domain
gaggtgcagctggtgcagtctggagcagaggtgaaaaagcccggggagtctctgaagatctcctgtaagggttctggatacagctttaccagctactggatcggctgggtgcgccagatgcccgggaaaggcctggagtggatggggatcatctatcctggtgactctgataccagatacagcccgtccttccaaggccaggtcaccatctcagccgacaagtccatcagcaccgcctacctgcagtggagcagcctgaaggcctcggacaccgccatgtattactgtgcgagacattttgaacatgatagtagtgtgctccagcactggggccagggcaccctggtcaccgtctcctca

SEQ ID NO: 8237 - DNA, 366 bp, Artificial Sequence
  Synthetic polynucleotide encoding artificial human antibody VH domain
gaggtgcagctgttggagtctgggggaagagtggtccagccgggggggtccctgagactctcctgtgtagcctctggattcacctttagtaactatgtcatgagttgggttcgacaggctccagggaagggactggaatgggtctcagccattagcggtcgtggtgaaaacacgtacaacgcagactccctgaagggccggttcaccatctccagagacaattccaggaacacggtgtttctccaaatcgataggctgagggccgaggacacggccgtttattactgtgcaaaaggggactgtactggtgactgctattactactttgacttttggggccacggaacccgggtcaccgtctcgtca

SEQ ID NO: 8238 - DNA, 381 bp, Artificial Sequence
  Synthetic polynucleotide encoding artificial human antibody VH domain
cagctgcagctgcaggagtcgggcccaggactggtgaagccttcggagaccctgtccctcacctgcactgtctctggtggctccatcagcagtagtagttactactggggctggatccgccagcccccagggaaggggctggagtggattgggagtatctattatagtgggagcacctactacaacccgtccctcaagagtcgagtcaccatatccgtagacacgtccaagaaccagttctccctgaagctgagctctgtgaccgccgcagacacggctgtgtattactgtgcgagactccccgtagagggtagcagcagtatctactactactacggtatggacgtctggggccaagggaccacggtcaccgtctcctca

SEQ ID NO: 8239 - DNA, 372 bp, Artificial Sequence
  Synthetic polynucleotide encoding artificial human antibody VH domain
gaggtgcagctgttggagtctgggggaggcttggtacagcctggggggtccctgagactctcctgtgcagcctctggattcacctttagcagctatgccatgagctgggtccgccaggctccagggaaggggctggagtgggtctcagctattagtggtagtggtggtagcacatactacgcagactccgtgaagggccggttcaccatctccagagacaattccaagaacacgctgtatctgcaaatgaacagcctgagagccgaggacacggccgtatattactgtgcgaaagctatgagtgggactctaacatactactactacggtatggacgtctggggccaagggaccacggtcaccgtctcctca

SEQ ID NO: 8240 - DNA, 363 bp, Artificial Sequence
  Synthetic polynucleotide encoding artificial human antibody VH domain
caggtgcagctggtgcaatctgggtctgagttgaagaagcctggggcctcagtgaaggtttcctgcaaggcttctggatacaccttcactagctatgctatgaattgggtgcgacaggcccctggacaagggcttgagtggatgggatggatcaacaccaacactgggaacccaacgtatgcccagggcttcacaggacggtttgtcttctccttggacacctctgtcagcacggcatatctgcagatcagcagcctaaaggctgaggacactgccgtgtattactgtgcgctactcactggcacgcactactactacggtatggacgtctggggccaagggaccacggtcaccgtctcctca

SEQ ID NO: 8241 - DNA, 360 bp, Artificial Sequence
  Synthetic polynucleotide encoding artificial human antibody VH domain
gaggtgcagctggtggagtccgggggaggcttagttcagcctggggggtccctgagactctcttgttcagcctctggattcactttcagcacctaccggatgcactgggtccgccaagctccagggaaggggctaatatgggtctcacgtagtgatgggtctaagagagactacgcggactccgtgaagggccgattcaccgtctccagagacaacgcccagaacacattttttctgcatatgaacagtctgagagtcgacgacacggctgtttattattgtgcaagagatcggggagctggtggccacgattggggctttgactattggggtcagggaaccctggtcaccgtctcctca

SEQ ID NO: 8242 - DNA, 366 bp, Artificial Sequence
  Synthetic polynucleotide encoding artificial human antibody VH domain
caggtccagctggtacagtctggggctgaggtgaagaagcctggggcctcagtgaaggtctcctgcaaggtttccggatacaccctcactgaattatccatgcactgggtgcgacaggctcctggaaaagggcttgagtggatgggaggttttgatcctgaagatggtgaaacaatctacgcacagaagttccagggcagagtcaccatgaccgaggacacatctacagacacagcctacatggagctgagcagcctgagatctgaggacacggccgtgtattactgtgcaagcaactatgcatataactggaaccacaagcactttgactactggggccagggaaccctggtcaccgtctcctca

SEQ ID NO: 8243 - DNA, 363 bp, Artificial Sequence
  Synthetic polynucleotide encoding artificial human antibody VH domain
cagctgcagcttcaggagtccggctcaggactggtggagccctcacagaccctgtccctcacctgcgctgtctcaggtggctccatgagtgggagtggttacacctggagctggctccggcagccaccagggcaggacctggagtggattggttacatctatgatactgggaacacctactacaaaccgtccctcaagagtcgaatcaccatatcaatagacacgtccgacaaccagttctccctgacgctgagctctgtgaccgccgcggacacggccgtttattactgtgccagggggtcgaatattgtggactggtacttcgatctctggggccgtggcaccctggtcactgtctcctca

SEQ ID NO: 8244 - DNA, 360 bp, Artificial Sequence
  Synthetic polynucleotide encoding artificial human antibody VH domain
gaggtgcagctggtggagtctggaggaggcttgatccagcctggggggtccctgagactctcctgtgcagcctctgggttcaccgtcagtagcaactacatgagctgggtccgccaggctccagggaaggggctggagtgggtctcagttatttatagcggtggtagcacatactacgcagactccgtgaagggccgattcaccatctccagagacaattccaagaacacgctgtatcttcaaatgaacagcctgagagccgaggacacggccgtgtattactgtgcgagatatgatagtagtggttatttcaactggttcgacccctggggccagggaaccctggtcaccgtctcctca

SEQ ID NO: 8245 - DNA, 363 bp, Artificial Sequence
  Synthetic polynucleotide encoding artificial human antibody VH domain
cagatcaccttgaaggagtctggtcctacgctggtgaaacccacacagaccctcacgctgacctgcaccttctctgggttctcactcagcactagtggagtgggtgtgggctggatccgtcagcccccaggaaaggccctggagtggcttgcactcatttattgggatgatgataagcgctacagcccatctctgaagagcaggctcaccatcaccaaggacacctccaaaaaccaggtggtccttacaatgaccaacatggaccctgtggacacagccacatattactgtgcacacagaccagctgctatacttggctggttcgacccctggggccagggaaccctggtcaccgtctcctca

SEQ ID NO: 8246 - DNA, 393 bp, Artificial Sequence
  Synthetic polynucleotide encoding artificial human antibody VH domain
caggtcaccttgagggagtctggtcctgcgctggtgaaacccacacagaccctcacactgacctgcaccttctctgggttctcactcagcactagtggaatgtgtgtgagctggatccgtcagcccccagggaaggccctggagtggcttgcactcattgattgggatgatgataaatactacagcacatctctgaagaccaggctcaccatctccaaggacacctccaaaaaccaggtggtccttacaatgaccaacatggaccctgtggacacagccacgtattactgtgcacggaaccccgttagagggttcggggagttgaaccccgatgggtactactactacggtatggacgtctggggccaagggaccacggtcaccgtctcctca

SEQ ID NO: 8247 - DNA, 363 bp, Artificial Sequence
  Synthetic polynucleotide encoding artificial human antibody VH domain
caggtgcagctggtgcagtctggggctgaggtgaagaagcctgggtcctcggtgaaggtctcctgcaaggcttctggaggcaccttcagaaagtatgatttcacctgggtgcgacaggcccctggacaagggcttgagtggatgggagggatcatccctctctttggtaaaccaaactacggacagaggttccagggcagagtcacccttaccgcagacgagtccacgagcacaggctatatggagatgaccaatttgaggtctgaggacacggccgtgtattactgtgcgagaattaactggaacgagggctataactacatagacgtctgggggaaggggaccacggtcaccgtctcctca

SEQ ID NO: 8248 - DNA, 399 bp, Artificial Sequence
  Synthetic polynucleotide encoding artificial human antibody VH domain
caggtgcagttacaacaatggggcgctggacgattgaggccttcggagaccctgtccctcacctgcgctgtgtatggtgggtccttcactgaaaactactgggactgggtccggcagcccccagggaaggggctggagtggattggggaaatcaaccatggtggagctaccagctacaatatgtccctcaagagtcgagtcaccatatcagtggacgcgtccaagagtcagttctccctgaacctgaggtctgtgactgtcgcggatacggctgtttactactgtgtgagagcgcgccgcagcaggtccacgagcagctggtttcagctgtcccccccaaattattactactactacatggatgtctggggcaaggggaccacggtcaccgtctcatca

SEQ ID NO: 8249 - DNA, 357 bp, Artificial Sequence
  Synthetic polynucleotide encoding artificial human antibody VH domain
gaggtgcagctgttggagtctgggggaggcttggtacagcctggggggtccctgagactctcctgtgcagcctctggattcacctttagcagctatgccatgagctgggtccgccaggctccagggaaggggctggagtgggtctcagctattagtggtagtggtggtagcacatactacgcagactccgtgaagggccggttcaccatctccagagacaattccaagaacacgctgtatctgcaaatgaacagcctgagagccgaggacacggccgtatattactgtgcgaaagcaagtggtaactccgccgactttgactactggggccagggaaccctggtcaccgtctcctca

SEQ ID NO: 8250 - DNA, 405 bp, Artificial Sequence
  Synthetic polynucleotide encoding artificial human antibody VH domain
caggtgcagctggtggagtctgggggaggcgtggtccagcctgggaggtccctgagactctcctgtgcagcgtctggattcaccttcagtagctatggcatgcactgggtccgccaggctccaggcaaggggctggagtgggtggcagttatatggtatgatggaagtaataaatactatgcagactccgtgaagggccgattcaccatctccagagacaattccaagaacacgctgtatctgcaaatgaacagcctgagagccgaggacacggctgtgtattactgtgcgagagattctctcgccggggatattgtagtagtaccagctgctatagggatttcaccacttccgcactacggtatggacgtctggggccaagggaccacggtcaccgtctcctca

SEQ ID NO: 8251 - DNA, 381 bp, Artificial Sequence
  Synthetic polynucleotide encoding artificial human antibody VH domain
caggtgcagctggtgcaatctgggtctgagttgaagaagcctggggcctcagtgaaggtttcctgcaaggcttctggatacaccttcactagctatgctatgaattgggtgcgacaggcccctggacaagggcttgagtggatgggatggatcaacaccaacactgggaacccaacgtatgcccagggcttcacaggacggtttgtcttctccttggacacctctgtcagcacggcatatctgcagatcagcagcctaaaggctgaggacactgccgtgtattactgtgcgagaggctacgatattttgactggttattataatgtctactactacggtatggacgtctggggccaagggaccacggtcaccgtctcctca

SEQ ID NO: 8252 - DNA, 390 bp, Artificial Sequence
  Synthetic polynucleotide encoding artificial human antibody VH domain
gaggtgcaactggtggagtctgggggaggcctggtcaagcctggggggtccctgagactctcctgtgcagcctctgggttcaccttcagtagctatagcatgagctgggtccgccaggctccaggggagggtctggagtgggtctcatccattaattctattagtactaacatacactatacagactcagtgaagggccgattcaccatctccagagacaacgccaagaactcactgtttctgcaaatgaacagcctgacagccgacgacacggctgtctattactgtgcgcgagattttgctcggggcagcagctggtatggaggatcggaggactactactacggtctggacgtctggggccaagggaccacggtcaccgtctcctca

SEQ ID NO: 8253 - DNA, 357 bp, Artificial Sequence
  Synthetic polynucleotide encoding artificial human antibody VH domain
caggtgcagttggtggagtcggggggagccctggtcacccctggggggtccctgagactctcgtgtgcagtcaatggactccccctcagtgactcctacatgagttggatccgccaggctcccgggaaggggctggagtgggtcgcattcagtagcagacgagatgacaccagatattatctggactctgtgaagggccgtttcaccatatccaaggactacgccaagaacacgctgattctgcaaatgaacagcctaagagccgaggacacggccgtctactactgtgcgagagctcttagtggctacaatttctttgacttttggggccagggaactctggtcaccgtctcctca

SEQ ID NO: 8254 - DNA, 363 bp, Artificial Sequence
  Synthetic polynucleotide encoding artificial human antibody VH domain
gaggtgcagctgttggagtctgggggaggcttggtacagcctggggggtccctgagactctcctgtgcagcctctggattcacctttagcagctctgccatgagctgggtccgccaggttccagggaaggggctggagtgggtcgcaagtattagtagtagagattccaccacaccctacacagagtccgtgaaggggcggttcaccatctccagagacaattccaagaacatgttgtatctccaaatgaacggcctgagagccgaggacacggccgtatattattgtgcgaagtgtaccagtttctgccaatataagtggttcgaggcctggggccagggaaccctggtcaccgtctcctca

SEQ ID NO: 8255 - DNA, 354 bp, Artificial Sequence
  Synthetic polynucleotide encoding artificial human antibody VH domain
gaggtgcagctggtggagtctgggggaggcttggtacagcctggggggtccctgagactctcctgtgcagcctctggattcaccttcagtagctatagcatgaactgggtccgccaggctccagggaaggggctggagtgggtttcatacattagtagtagtagtagtaccatatactacgcagactctgtgaagggccgattcaccatctccagagacaatgccaagaactcactgtatctgcaaatgaacagcctgagagacgaggacacggctgtgtattactgtgcgagagcggggagctactacccttttgactactggggccagggaaccctggtcaccgtctcctca

SEQ ID NO: 8256 - DNA, 402 bp, Artificial Sequence
  Synthetic polynucleotide encoding artificial human antibody VH domain
caggtgcagctggtgcagtctggggctgaggtgaagaagcctggggcctcagtgaaggtttcctgcaaggcatctggatacaccttcaccagctactatatgcactgggtgcgacaggcccctggacaagggcttgagtggatgggaataatcaaccctagtggtggtagcacaagctacgcacagaagttccagggcagagtcaccatgaccagggacacgtccacgagcacagtctacatggagctgagcagcctgagatctgaggacacggccgtgtattactgtgcgagagatcttgaagcacctgttagttacgatttttggagtgtcatggaggggggctactactactactacatggacgtctggggcaaagggaccacggtcaccgtctcctca

SEQ ID NO: 8257 - DNA, 375 bp, Artificial Sequence
  Synthetic polynucleotide encoding artificial human antibody VH domain
gaagtgcagctggtggagtctgggggaggcttggtacagcctggcaggtccctgagactctcctgtgcagcctctggattcacctttgatgattatgccatgcactgggtccggcaagctccagggaagggcctggagtgggtctcaggtattagttggaatagtggtagcataggctatgcggactctgtgaagggccgattcaccatctccagagacaacgccaagaactccctgtatctgcaaatgaacagtctgagagctgaggacacggccttgtattactgtgcaaaagtatatagcagcagctggtggggagtagcagtggctggctatgactactggggccagggaaccctggtcaccgtctcctca

SEQ ID NO: 8258 - DNA, 360 bp, Artificial Sequence
  Synthetic polynucleotide encoding artificial human antibody VH domain
gaggtgcagctgttggagtctgggggaggcttggtacagcctggggggtccctgagactctcctgtgcagcctctggattcacctttagcagctatgccatgagctgggtccgccaggctccagggaaggggctggagtgggtctcagctattagtggtagtggtggtagcacatactacgcagactccgtgaagggccggttcaccatctccagagacaattccaagaacacgctgtatctgcaaatgaacagcctgagagccgaggacacggccgtatattactgtgcgaaagtggagggagctacttctacagggtttgactactggggccagggaaccctggtcaccgtctcctca

SEQ ID NO: 8259 - DNA, 381 bp, Artificial Sequence
  Synthetic polynucleotide encoding artificial human antibody VH domain
gaggtgcagctgttggagtctgggggaggcttggtacagcctggggggtccctgagactctcctgtgcagcctctggattcacctttagcagctatgccatgagctgggtccgccaggctccagggaaggggctggagtgggtctcagctattagtggtagtggtggtagcacatactacgcagactccgtgaagggccggttcaccatctccagagacaattccaagaacacgctgtatctgcaaatgaacagcctgagagccgaggacacggccgtatattactgtgcgaaagtgaacgatttttggagtggttatccttactactactactactacatggacgtctggggcaaagggaccacggtcaccgtctcctca

SEQ ID NO: 8260 - DNA, 393 bp, Artificial Sequence
  Synthetic polynucleotide encoding artificial human antibody VH domain
gaggtgcagctggtggagtctgggggaggcttggtacagcctggggggtccctgagactctcctgtgcagcctctggattcaccttcagtagctatagcatgaactgggtccgccaggctccagggaaggggctggagtgggtttcatacattagtagtagtagtagtaccatatactacgcagactctgtgaagggccgattcaccatctccagagacaatgccaagaactcactgtatctgcaaatgaacagcctgagagacgaggacacggctgtgtattactgtgcgagagaaccccctaggggatattgtagtagtaccagctgggctaggctttgttactacggtatggacgtctggggccaagggaccacggtcaccgtctcctca

SEQ ID NO: 8261 - DNA, 360 bp, Artificial Sequence
  Synthetic polynucleotide encoding artificial human antibody VH domain
caggtgcagctggtgcagtctggggctgaggtgaagaagcctggggcctcagtgaaggtctcctgcaaggcttctggatacaccttcaccggctactatatgcactgggtgcgacaggcccctggacaagggcttgagtggatgggatggatcaaccctaacagtggtggcacaaactatgcacagaagtttcagggcagggtcaccatgaccagggacacgtccatcagcacagcctacatggagctgagcaggctgagatctgacgacacggccgtgtattactgtgcgaccgctagtaccagctggcgacactggttcgacccctggggccagggaaccctggtcaccgtctcctca

SEQ ID NO: 8262 - DNA, 381 bp, Artificial Sequence
  Synthetic polynucleotide encoding artificial human antibody VH domain
caggtgcagctggtggagtctgggggaggcgtggtccagcctgggaggtccctgagactctcctgtgcagcgtctggattcaccttcagtagctatggcatgcactgggtccgccaggctccaggcaaggggctggagtgggtggcagttatatggtatgatggaagtaataaatactatgcagactccgtgaagggccgattcaccatctccagagacaattccaagaacacgctgtatctgcaaatgaacagcctgagagccgaggacacggctgtgtattactgtgcgagagatcagcgcggggattacgatattttgaccagctactactacggtatggacgtctggggccaagggaccacggtcaccgtctcctca

SEQ ID NO: 8263 - DNA, 360 bp, Artificial Sequence
  Synthetic polynucleotide encoding artificial human antibody VH domain
caggtgcaactggtgcagtctggggctgaggtgaagaagcctggggcctcagtgaaggtctcctgcaaggcttctggattcaccttcaccgactattatatgcactggttgcgacaggcccctggacaagggcttgaatgggtgggatgcacccaccccaacagtagaggcgcaacttttgcaccgaactttcagggcagggtcaccgtgaccgaggacacgtccatcaacacagtctacatggagctgaacagcctgacatccgacgacacggccatttttttctgtgcgagagaagaattccatgccaataaagcctttgactactggggccagggaacccgggtcaccgtctcctca

SEQ ID NO: 8264 - DNA, 363 bp, Artificial Sequence
  Synthetic polynucleotide encoding artificial human antibody VH domain
gaggtgcagctgttggagtctgggggaggcttggtacagcctggggggtccctgagactctcctgtgcagcctctggattcacctttagcagctatgccatgagctgggtccgccaggctccagggaaggggctggagtgggtctcagctattagtggtagtggtggtagcacatactacgcagactccgtgaagggccggttcaccatctccagagacaattccaagaacacgctgtatctgcaaatgaacagcctgagagccgaggacacggccgtatattactgtgcgaaggaccttggaggttactatggttcggggcgtgactactggggccagggaaccctggtcaccgtctcctca

SEQ ID NO: 8265 - DNA, 372 bp, Artificial Sequence
  Synthetic polynucleotide encoding artificial human antibody VH domain
gaggtgcagctggtggagtctgggggaggcctggtcaagcctggggggtccctgagactctcctgtgcagcctctggattcaccttcagtagctatagcatgaactgggtccgccaggctccagggaaggggctggagtgggtctcatccattagtagtagtagtagttacatatactacgcagactcagtgaagggccgattcaccatctccagagacaacgccaagaactcactgtatctgcaaatgaacagcctgagagccgaggacacggctgtgtattactgtgcgagagagccccatagcagcagctggtacataaagtactactttgactactggggccagggaaccctggtcaccgtctcctca

SEQ ID NO: 8266 - DNA, 390 bp, Artificial Sequence
  Synthetic polynucleotide encoding artificial human antibody VH domain
caggtgcagctgcaggagtcgggcccaggactggtgaagccttcacagaccctgtccctcacctgcactgtctctggtggctccatcagcagtggtggttactactggagctggatccgccagcacccagggaagggcctggagtggattgggtacatctattacagtgggagcacctactacaacccgtccctcaagagtcgagttaccatatcagtagacacgtctaagaaccagttctccctgaagctgagctctgtgactgccgcggacacggccgtgtattactgtgcgagagattcagccggccgttacgatattttgactggttatatcaaggacaactggttcgacccctggggccagggaaccctggtcaccgtctcctca

SEQ ID NO: 8267 - DNA, 387 bp, Artificial Sequence
  Synthetic polynucleotide encoding artificial human antibody VH domain
cagctgcagctgcaggagtcgggcccaggactggtgaggccttcggagaccctgtccctcacctgcactgtctctggtggctccatcagcagtagtaatcactactggggctgggtccgccagcccccagggaaggggctggagtggattgggactgtctattatagtggaagcacctactacaacccgtccctcaagagtcgagtcaccatatccgtagacacgtccaagaaccagttctccctgaacctgagctctttgaccgccgcagacacggctgtttatcactgtgcgagacagcgagatacatattaccatggttcgcagacatattttttggactactttgacttctggggccagggaaccccggtcaccgtctcctca

SEQ ID NO: 8268 - DNA, 375 bp, Artificial Sequence
  Synthetic polynucleotide encoding artificial human antibody VH domain
caggtgcagctgcaggagtcgggcccaggactggtgaagccttcacagaccctgtccctcacctgcactgtctctggtggctccatcagcagtggtggttactactggagctggatccgccagcacccagggaagggcctggagtggattgggtacatctattacagtgggagcacctactacaacccgtccctcaagagtcgagttaccatatcagtagacacgtctaagaaccagttctccctgaagctgagctctgtgactgccgcggacacggccgtgtattactgtgctagaaattactatgatagtagtggttattacttctacggtatggacgtctggggccaagggaccacggtcaccgtctcctca

SEQ ID NO: 8269 - DNA, 384 bp, Artificial Sequence
  Synthetic polynucleotide encoding artificial human antibody VH domain
caggtgcagctggtggagtctgggggaggcgtggtccagcctgggaggtccctgagactctcctgtgcagcctctggattcaccttcagtagctatgctatgcactgggtccgccaggctccaggcaaggggctggagtgggtggcagttatatcatatgatggaagcaataaatactacgcagactccgtgaagggccgattcaccatctccagagacaattccaagaacacgctgtatctgcaaatgaacagcctgagagctgaggacacggctgtgtattactgtgcgagagataatttccaaccactaggatattgtagtagtaccagctgctatgggttggactactggggccagggaaccctggtcaccgtctcctca

SEQ ID NO: 8270 - DNA, 393 bp, Artificial Sequence
  Synthetic polynucleotide encoding artificial human antibody VH domain
caggtgcagctggtggagtctgggggaggcgtggtccagcctgggaggtccctgagactctcctgtgcagcctctggattcaccttcagtagctatgctatgcactgggtccgccaggctccaggcaaggggctggagtgggtggcagttatatcatatgatggaagcaataaatactacgcagactccgtgaagggccgattcaccatctccagagacaattccaagaacacgctgtatctgcaaatgaacagcctgagagctgaggacacggctgtgtattactgtgcgagagatggtggggggcgatattgtagtggtggtagctgctacgtctactactactacggtatggacgtctggggccaagggaccacggtcaccgtctcctca

SEQ ID NO: 8271 - DNA, 363 bp, Artificial Sequence
  Synthetic polynucleotide encoding artificial human antibody VH domain
gaggtgcaaatggtggaatctgggggaggcctggtcaagcctggggggtccctgagactctcctgtacagcctctggattcagattcagtctctatagcatgagttgggtccgccaggctccagggaaggggctggagtgggtctctgccatcagtgacagtagtaatttcatctactacgccgactcagtgaggggccgattcaccctctccagagacaacgccaagaatgcactgtatctgcaaatggacagcctgagggccgaggacacggctgtgtattattgtgcgagagatcgtggaggctacccgctttacgtctttgacctctggggcctgggagccctggtcaccgtctcctca

SEQ ID NO: 8272 - DNA, 360 bp, Artificial Sequence
  Synthetic polynucleotide encoding artificial human antibody VH domain
caggtgcagttggtggagtctgggggaggcgtggtccagcctgggaggtccctgagactctcctgtgtagcctctggactcacctttagtcgctatgctatgcactgggtccgccaggctccaggcaagggcctggagtggctggcagttatatcatatgagggaagcactaaaaattatccagactccgtgaagggccgattcagcatctccagagaaaactccaagaacacgctgtatctggaaatgaagagcctcagagttgaggacacggcagtgtattactgtgcgagaggggctagcaacagcaataatgcatttgatacgtggggcctagggacaatggtgaccgtctcttca

SEQ ID NO: 8273 - DNA, 354 bp, Artificial Sequence
  Synthetic polynucleotide encoding artificial human antibody VH domain
gaggtgcagctgttggagtctgggggaggcctggtacagtcgggggggtccctgagactctcctgtacagcctctgaattcatctttaacaactatgccatgagctgggtccgccaggctccaggggagggcctggagtgggtctcaactattagttctactggtgataacacatattatgcagactccgtgaagggccgcttcaccatctccagagacaattccaaaaacactctggttttgcaaatgagtagtctgagagtcgaggacacggccgtgtattactgtatgaagggcggctggggaaccgtcattgaccactggggccagggcaccctggtctccgtctcctca

SEQ ID NO: 8274 - DNA, 390 bp, Artificial Sequence
  Synthetic polynucleotide encoding artificial human antibody VH domain
gaggtgaagttggtggagtctgggggaggcttggtaaagcctggggggtcccttagactctcctgtgcagcctctggattcagtttcgataacgcctggatgagctgggtccgccaggctccagggaaggggctggagtgggtcggccgtattgaaaccgaagctgatggtgggacaacagagtacgctgcacccgtgaaaggcagattcaccatctctagagatgattcaaaaaacacactgtatctgcaaatgaacagcctgaaagccgaggacacagccgtgtattactgtaccacagatggcctaaccctggctacattttgcagtggtgaaaactgcccctggaatatctactggggccagggaaccctggtcaccgtctcctca

SEQ ID NO: 8275 - DNA, 375 bp, Artificial Sequence
  Synthetic polynucleotide encoding artificial human antibody VH domain
caggtgcagctggtgcagtctggggctgaggtgaagaagcctgggtcctcggtgaaggtctcctgcaaggcttctggaggcaccttcagcagctatgctatcagctgggtgcgacaggcccctggacaagggcttgagtggatgggagggatcatccctatctttggtacagcaaactacgcacagaagttccagggcagagtcacgattaccgcggacgaatccacgagcacagcctacatggagctgagcagcctgagatctgaggacacggccgtgtattactgtgcgagagatggaatgggggtgttgggtattaccccctcgaactggttcgacccctggggccagggaaccctggtcaccgtctcctca

SEQ ID NO: 8276 - DNA, 360 bp, Artificial Sequence
  Synthetic polynucleotide encoding artificial human antibody VH domain
caggtgcagctggtgcagtctggggctgaggtgaaggagcctggggcctcagtgaaggtctcctgcaaggcttctggattcaccctcaccggctattatatgcactggatgcgacaggcccctggacaagggcttgagtgggtgggatgcacccaccctaatagtggaggcgcaacttatgcaccgaagtttcagggcagggtcaccgtgaccgaggacacgtccatcagcacagtctacatggagctgagcagcctgagatctgacgacacggccctttattactgtgcgagagaagtagtaattgccaacaaagcctttgactactggggccagggaaccctggtcaccgtctcctca

SEQ ID NO: 8277 - DNA, 369 bp, Artificial Sequence
  Synthetic polynucleotide encoding artificial human antibody VH domain
gaggtgcagttgttggagtctgggggaggcttgggacagcctggatggtccctgagactctcctgtggagcctctggattcaggtttagaagttatgccatgagttgggtccgccgggctccagggaaggggcttgagtgggtctcaactattagcagtggtggtggtagtacattctacgcagagtccgtgaagggccggttcaccatctccagagacaactccaacaacacactgtatctgcagatggacggcctgagagccgaggacacggccatttatcagtgtgtcaaaaacagatatagtggaggcgattcgagggactactttgactcctggggccagggaaccctggtcaccgtgtcctca

SEQ ID NO: 8278 - DNA, 366 bp, Artificial Sequence
  Synthetic polynucleotide encoding artificial human antibody VH domain
gaggtgcagctggtggagtctgggggaggcctggtcaagcctggggggtccctgagactctcctgtgcagcctctggattcaccttcagtagctatagcatgaactgggtccgccaggctccagggaaggggctggagtgggtctcatccattagtagtagtagtagttacatatactacgcagactcagtgaagggccgattcaccatctccagagacaacgccaagaactcactgtatctgcaaatgaacagcctgagagccgaggacacggctgtgtattactgtgcgagagatgagtattacgatattttgactggttattattcctactggggccagggaaccctggtcaccgtctcctca

SEQ ID NO: 8279 - DNA, 363 bp, Artificial Sequence
  Synthetic polynucleotide encoding artificial human antibody VH domain
caggtgcagctgcaggagtcgggcccaggactggtgaagccttcacagaccctgtccctcacctgcactgtctctggtggctccatcagcagtggtggttactactggagctggatccgccagcacccagggaagggcctggagtggattgggtacatctattacagtgggagcacctactacaacccgtccctcaagagtcgagttaccatatcagtagacacgtctaagaaccagttctccctgaagctgagctctgtgactgccgcggacacggccgtgtattactgtgcgagaagtatagtgggagctacttggtactttgactactggggccagggaaccctggtcaccgtctcctca

SEQ ID NO: 8280 - DNA, 351 bp, Artificial Sequence
  Synthetic polynucleotide encoding artificial human antibody VH domain
gaggtgcagctggtggagtctgggggaggcttggtacagcctggggggtccctgagactctcctgtgcagcctctggattcaccttcagtagctatagcatgaactgggtccgccaggctccagggaaggggctggagtgggtttcatacattagtagtagtagtagtaccatatactacgcagactctgtgaagggccgattcaccatctccagagacaatgccaagaactcactgtatctgcaaatgaacagcctgagagacgaggacacggctgtgtattactgtgcgagagatataggtggctactttgactactggggccagggaaccctggtcaccgtctcctca

SEQ ID NO: 8281 - DNA, 396 bp, Artificial Sequence
  Synthetic polynucleotide encoding artificial human antibody VH domain
caggtgcagctgcaggagtcgggcccaggactgctgaagccttcggagtccctgtccctcacctgcactgtctctggcgactccatcaatcagtaccagtggagctggatccggcagcccccagggaagggactggagtggattgggcatatctctaacagtgggagcaccaactccaacccctccctcgagagtcgagtcaccatgtcagtagacacgtccagcaaccacttctccctgtggctgagttctgtgaccgctgcggacacggccgtgtattactgtgcgagaatgatggcggggggggggacgaatatggttcggggacgtcttattgacttctactatcactacgtggacgtctggggcaaagggaccacggtcaccgtctcctca

SEQ ID NO: 8282 - DNA, 384 bp, Artificial Sequence
  Synthetic polynucleotide encoding artificial human antibody VH domain
caggttcaactggtgcagtctggaggtgaagtgaagaagcctggggcctcagtgaaggtctcctgtaagacttctggttacacgttttccacctttggcatcacctgggtgcgacaggcccctggacaagggcttgagtggatgggatggatcagcccttacagtggtgtcacaaagtccgcacagagttttcagggcagagccaccatgaccacagacaaatccacgcgcacagtgtacatggaactgaggagtctgagatctgacgacacggccatttactactgtgcgcgagatcggtcaggaggttcgggaaattatctcgatcttagtacctactactttgacttttggggccagggaaccctggtcaccgtctcatca

SEQ ID NO: 8283 - DNA, 387 bp, Artificial Sequence
  Synthetic polynucleotide encoding artificial human antibody VH domain
cagctgcagctgcaggtgtcgggcccaggactggtgaagccttcggagaccctgtccctcacctgcactgtctctggtggctccatcagcattaataatcactactggggctggatccgccagcccccagggaagggtctggagtggattgggactatctattatagtgggagcacctactacaacccgtccctcaagagtcgagtcaccatgtccgtagacacgtccaagaaccagttctccctgaagctgagctctttgaccgccgcagacacggctatttattactgtgcgagacagcgagatacctattactatggttcgcagaattattttttggactactttgaccactggggccagggaaccctggtcaccgtctcctca

SEQ ID NO: 8284 - DNA, 366 bp, Artificial Sequence
  Synthetic polynucleotide encoding artificial human antibody VH domain
cagctgcagctgcaggagtcgggcccaggactggtgaagccttcggagaccctgtccctcacctgcactgtctctggtggctccatcagcagtagtagttactactggggctggatccgccagcccccagggaaggggctggagtggattgggagtatctattatagtgggagcacctactacaacccgtccctcaagagtcgagtcaccatatccgtagacacgtccaagaaccagttctccctgaagctgagctctgtgaccgccgcagacacggctgtgtattactgtgcgagccccccatattgtagtggtggtagctgccgagactactggggccagggaaccctggtcaccgtctcctca

SEQ ID NO: 8285 - DNA, 369 bp, Artificial Sequence
  Synthetic polynucleotide encoding artificial human antibody VH domain
gaagtgcagctggtggagtctgggggagtcgtggttcaacctggggggtccctgagactctcctgtgcagcgtccggattcacttttgatgattataccatgcagtgggtccgtcaagctccggggaagggtctggagtgggtctctcttattacttggaatggtggtagcacatcctatgcagactctgtgaagggccgattcaccatctccagagacaatagcaaaaactccctgtatctggaaatgaacagtctgagaattgaggacaccgccgtatattactgtgtaaaagaggccagagatgcctactatgctgtggactactttgactactggggccagggaacccaggtcaccgtctcgtca

SEQ ID NO: 8286 - DNA, 369 bp, Artificial Sequence
  Synthetic polynucleotide encoding artificial human antibody VH domain
caggtgcagctgcaggagtcgggcccaggactggtgaagccttcacagaccctgtccctcacctgcactgtctctggtggctccatcagcagtggtggttactactggagctggatccgccagcacccagggaagggcctggagtggattgggtacatctattacagtgggagcacctactacaacccgtccctcaagagtcgagttaccatatcagtagacacgtctaagaaccagttctccctgaagctgagctctgtgactgccgcggacacggccgtgtattactgtgcgagatcgtatagtggctacgattcggatgatgcttttgatatctggggccaagggacaatggtcaccgtctcttca

SEQ ID NO: 8287 - DNA, 363 bp, Artificial Sequence
  Synthetic polynucleotide encoding artificial human antibody VH domain
gaggtgcagttgggggagtctgggggaggcctggtcaagccgggggggtccctgagactctcctgtgcagcctctggattcaccttcagtagttataatatgaactgggtccgccagactccagggagggggctggagtgggtctcatccattagtgggagtggaagtcatgtgtactacgcaaaatcgctgaagggccgagtcaccatctccagagacaacgccaagaacgcgttatatctgcaaatttacagtctgagagccgaggacacggccgtgtattactgtgccccgtcatttggagtgggatcagggttcgacatggacgtctggggcaaagggaccacggtcaccgtctcctca

SEQ ID NO: 8288 - DNA, 372 bp, Artificial Sequence
  Synthetic polynucleotide encoding artificial human antibody VH domain
caggtgcagctggtgcagtctggggctgaggtgaagaagcctggggcctcagtgaaggtttcctgcaaggcatctggatacaccttcaccagctactatatgcactgggtgcgacaggcccctggacaagggcttgagtggatgggaataatcaaccctagtggtggtagcacaagctacgcacagaagttccagggcagagtcaccatgaccagggacacgtccacgagcacagtctacatggagctgagcagcctgagatctgaggacacggccgtgtattactgtgcgagagatacatccgattgtagtggtggtagctgctactggtttgactactggggccagggaaccctggtcaccgtctcctca

SEQ ID NO: 8289 - DNA, 384 bp, Artificial Sequence
  Synthetic polynucleotide encoding artificial human antibody VH domain
gaggtgcagctggtggagtctgggggaggcttggtaaagcctggggggtcccttagactctcctgtgcagcctctggattcactttcagtaacgcctggatgagctgggtccgccaggctccagggaaggggctggagtgggttggccgtattaaaagcaaaactgatggtgggacaacagactacgctgcacccgtgaaaggcagattcaccatctcaagagatgattcaaaaaacacgctgtatctgcaaatgaacagcctgaaaaccgaggacacagccgtgtattactgtaccacagatcctcaaaaggtgtattgtagtagtaccagctgctatatctgggactactggggccagggaaccctggtcaccgtctcctca

SEQ ID NO: 8290 - DNA, 360 bp, Artificial Sequence
  Synthetic polynucleotide encoding artificial human antibody VH domain
caggtgcagctgcaggagtcggggccaggactggtgaagccttcggagaccccgtccctcacctgcactgtctctggcggctccattagttcttacctctggaactgggtccggcagccccccggcaaagagttggagtggattggatattcccattacagtgggagcagcaactataacccctctctcaagagtcgagtcaccatatcactagacacgtccaagaaccaagtctccctgaaggtgaagtctgtgaccgctgaagactcggccgtttattactgcgcgagaggcggctacaccgctggccccaatgcttttgatatctggggcccagggacaacggtcctcgtttcttca

SEQ ID NO: 8291 - DNA, 399 bp, Artificial Sequence
  Synthetic polynucleotide encoding artificial human antibody VH domain
caggtgcagctggtggagtctgggggaggcgtggtccagcctgggaggtccctgagactctcctgtgcagcctctggattcaccttcagtagctatgctatgcactgggtccgccaggctccaggcaaggggctggagtgggtggcagttatatcatatgatggaagcaataaatactacgcagactccgtgaagggccgattcaccatctccagagacaattccaagaacacgctgtatctgcaaatgaacagcctgagagctgaggacacggctgtgtattactgtgcgagagatatcacgtattacgatattttgactggttatttccagcccgcttactactactactatggtatggacgtctggggccaagggaccacggtcaccgtctcctca

SEQ ID NO: 8292 - DNA, 348 bp, Artificial Sequence
  Synthetic polynucleotide encoding artificial human antibody VH domain
caggtgcagctggtggagtctgggggaggcgtggtccagcctgggaggtccctgagactctcctgtgcagcctctggattcaccttcagtagctatgctatgcactgggtccgccaggctccaggcaaggggctggagtgggtggcagttatatcatatgatggaagcaataaatactacgcagactccgtgaagggccgattcaccatctccagagacaattccaagaacacgctgtatctgcaaatgaacagcctgagagctgaggacacggctgtgtattactgtgcgagaggcggtccctggttcgacccctggggccagggaaccctggtcaccgtctcctca

SEQ ID NO: 8293 - DNA, 366 bp, Artificial Sequence
  Synthetic polynucleotide encoding artificial human antibody VH domain
caggtgcagctggtggagtctgggggaggcgtggtccagcctgggaggtccctgagactctcctgtgcagcctctggattcaccttcagtagctatggcatgcactgggtccgccaggctccaggcaaggggctggagtgggtggcagttatatcatatgatggaagtaataaatactatgcagactccgtgaagggccgattcaccatctccagagacaattccaagaacacgctgtatctgcaaatgaacagcctgagagctgaggacacggctgtgtattactgtgcgaaaggggaactaccagctgctatgacggtaggctttgactactggggccagggaaccctggtcaccgtctcctca

SEQ ID NO: 8294 - DNA, 363 bp, Artificial Sequence
  Synthetic polynucleotide encoding artificial human antibody VH domain
caggtgcagctggtgcaatctgggtctgagttgaagaagcctggggcctcagtgaaggtttcctgcaaggcttctggatacaccttcactagctatgctatgaattgggtgcgacaggcccctggacaagggcttgagtggatgggatggatcaacaccaacagtgggaacccaacgtatgcccagggcttcacaggacgctttgtcttctccttggacacctctgtcagcacggcatatctgcagatcagcagcctagagtctgaggacactgccgtgtattactgtgcgagaggaggggggcgcatagcagcaactgtggtcggctactggggccagggaaccctggtcaccgtctcctca

SEQ ID NO: 8295 - DNA, 381 bp, Artificial Sequence
  Synthetic polynucleotide encoding artificial human antibody VH domain
caggtgcaactggtggagtctgggggaggcgtggtccaccctgggaggtcactgagactctcctgtgcagcctctggattcaccttcaccagccatggcctgcactgggtccgccaggctccaggcaagggtctggagtgggtggcttcgatttcctttgatggcaagaagatacactatgcagactccgcgcagggccgattcaccatctcgagagacaatcccaagaacaccttctatctgcagacgaccaacctgagacctgaggacacggctgtctattactgtgcgaaagacgggattaaaagtgttcggggagctgtctattataactatggcttgaacgtctggggccaagggacctcggtcatcgtctcctca

SEQ ID NO: 8296 - DNA, 411 bp, Artificial Sequence
  Synthetic polynucleotide encoding artificial human antibody VH domain
caggtgcagctggtggagtctgggggaggcgtggtccagcctgggaggtccctgagactctcctgtgcagcctctggattcaccttcagtagctatgctatgcactgggtccgccaggctccaggcaaggggctggagtgggtggcagttatatcatatgatggaagcaataaatactacgcagactccgtgaagggccgattcaccatctccagagacaattccaagaacacgctgtatctgcaaatgaacagcctgagagctgaggacacggctgtgtattactgtgcgagaagctcgacccgggccccctcgacaatagattgtagtggtggtagctgctatccaaagcccctctactactacggtatggacgtctggggccaagggaccacggtcaccgtctcctca

SEQ ID NO: 8297 - DNA, 372 bp, Artificial Sequence
  Synthetic polynucleotide encoding artificial human antibody VH domain
caggtgcagctacagcagtggggcgcaggactgttgaagccttcggagaccctgtccctcacctgcgctgtctatggtgggtccttcagtggttactactggagctggatccgccagcccccagggaaggggctggagtggattggggaaatcaatcatagtggaagcaccaactacaacccgtccctcaagagtcgagtcaccatatcagtagacacgtccaagaaccagttctccctgaagctgagctctgtgaccgccgcggacacggctgtgtattactgtgcgagattcccgtatagcagctcgtcggacccctactactactacatggacgtctggggcaaagggaccacggtcaccgtctcctca

SEQ ID NO: 8298 - DNA, 387 bp, Artificial Sequence
  Synthetic polynucleotide encoding artificial human antibody VH domain
cagctgcagctgcaggagtcgggcccaggactggtgaagccttcggagaccctgtccctcacctgcactgtctctggtgactccatcagcagtagtagttactactggggctggatccgccagcccccagggaaggggctggagtggattgggactatctcttatagtgggagcacctattacaacccgtccctgaagagtcgagtcaccatgtccatagacacgtccaagaaccagttttccctgaaattgagctctgtgaccgccgcagacacggctgtacattactgtgcgagacagcgaggtacatattactatggctcggggacttcttatttggattactttgactactggggccagggaaccctggtcaccgtctcctca

SEQ ID NO: 8299 - DNA, 372 bp, Artificial Sequence
  Synthetic polynucleotide encoding artificial human antibody VH domain
gaggtgcaactggtggaatccgggggaggcttagttcagcctggggggtccctgagactctcctgtgcagcctctggattcagcatcagtaactacgagatgcactgggtccgccaagctcccgggaaggggcttgagtgggtctcacgcattagtagtgatgggagaagcacaaggtacgcagccgccgtgcagggccgattcactgtctccggagacagcgccaagaacacgctgtttctgcaaataagccgtctgggagccgaggacacggctctttattactgtgcgagggggtcggggcgacaattgtactactacttctcctacatggacgtctggggcaaagggaccacggtcaccgtctcctca

SEQ ID NO: 8300 - DNA, 369 bp, Artificial Sequence
  Synthetic polynucleotide encoding artificial human antibody VH domain
caggtgcagctggtgcagtctggggctgaggtgaagaagcctgggtcctcggtgaaggtctcctgcaaggcttctggaggcaccttcagcagctatgctatcagctgggtgcgacaggcccctggacaagggcttgagtggatgggagggatcatccctatctttggtacagcaaactacgcacagaagttccagggcagagtcacgattaccgcggacgaatccacgagcacagcctacatggagctgagcagcctgagatctgaggacacggccgtgtattactgtgcgagaggggggtggaccaggaactactactactactacatggacgtctggggcaaagggaccacggtcaccgtctcctca

SEQ ID NO: 8301 - DNA, 360 bp, Artificial Sequence
  Synthetic polynucleotide encoding artificial human antibody VH domain
caggtgcagctggtgcaatctgggtctgagttgaagaagcctggggcctcagtgaaggtttcctgcaaggcttctggatacaccttcactagctatgctatgaattgggtgcgacaggcccctggacaagggcttgagtggatgggatggatcaacaccaacactgggaacccaacgtatgcccagggcttcacaggacggtttgtcttctccttggacacctctgtcagcacggcatatctgcagatcagcagcctaaaggctgaggacactgccgtgtattactgtgcgagaagcgggtatagcagcagctggcactttgactactggggccagggaaccctggtcaccgtctcctca

SEQ ID NO: 8302 - DNA, 372 bp, Artificial Sequence
  Synthetic polynucleotide encoding artificial human antibody VH domain
caggtgcagctggtggagtctgggggaggcgtggtccagcctgggaggtccctgagactctcctgtgcagcgtctggattcaccttcagtagctatggcatgcactgggtccgccaggctccaggcaaggggctggagtgggtggcagttatatggtatgatggaagtaataaatactatgcagactccgtgaagggccgattcaccatctccagagacaattccaagaacacgctgtatctgcaaatgaacagcctgagagccgaggacacggctgtgtattactgtgcgagagatttgccggtagtgggagctactgcttccgatgcttttgatatctggggccaagggacaatggtcaccgtctcttca

SEQ ID NO: 8303 - DNA, 387 bp, Artificial Sequence
  Synthetic polynucleotide encoding artificial human antibody VH domain
cagctgcagctgcaggagtcgggcccaggactggtgaggccttcggggaccctgtccctcacctgcactgtctctggtggctccatcagcagtaataatcactactggggctgggtccgccagcccccagggaaggggctggagtggattgggactgtctattatagtggaagcacgtactacaacccgtccctcaagagtcgagtcaccatatccgtcgacacgtccaagaaccagttctccctgaacctgagctctttgaccgccgcagacacggctgtttatcactgtgcgagacagcgagatacgtattaccatggttcgcagagatattttttggactactttgactactggggccagggaaccccggtcaccgtctcctca

SEQ ID NO: 8304 - DNA, 375 bp, Artificial Sequence
  Synthetic polynucleotide encoding artificial human antibody VH domain
caggtgcagctggtggagtctgggggaggcgtggtccagcctgggaggtccctgagactctcctgtgcagcctctggattcaccttcagtagctttggcatgcactgggtccgccaggctccaggcaaggggctggagtgggtggcagttatattatatgatggaagaaataaatattatgtagactccgtgaagggccgattcaccatctccagagacaattccaagaacacgctgtatctgcaaatgaacagcctgagagctgaggacacggctgtgtattactgtgcgaaagatcgattaggatattgtagtagtaccagctgccatagactcgacccctggggccagggaaccctggtcaccgtctcctca

SEQ ID NO: 8305 - DNA, 390 bp, Artificial Sequence
  Synthetic polynucleotide encoding artificial human antibody VH domain
caggtgcagctggtgcaatctgggtctgagttgaagaagcctggggcctcagtgaaggtttcctgcaaggcttctggatacaccttcactagctatgctatgaattgggtgcgacaggcccctggacaagggcttgagtggatgggatggatcaacaccaacactgggaacccaacgtatgcccagggcttcacaggacggtttgtcttctccttggacacctctgtcagcacggcatatctgcagatcagcagcctaaaggctgaggacactgccgtgtattactgtgcgaccccgctatattgtagtggtggtagctgctaccgctacggggaatactactacggtatggacgtctggggccaagggaccacggtcaccgtctcctca

SEQ ID NO: 8306 - DNA, 369 bp, Artificial Sequence
  Synthetic polynucleotide encoding artificial human antibody VH domain
caggtgcagttggtggagtcggggggaggcgtggtccagcctgggatgtccctgagactctcctgtacagcgtctggattcgctttcagtgattattccatgcactgggtccgccaggctccaggcaaggggctggagtgggtggcggtaatttggtttgacggaactaatagatatcacgcagactccgtggagggacgattcaccatctccagagacaactccaagagcacgctgtatttggaaatgaacagcctgagagtcgaagacacggctctatattactgtggcaaagcgagtcccagtgtcgatatagcagcagctggaattgactactggggccagggaaccctggtcatcgtctcctca

SEQ ID NO: 8307 - DNA, 363 bp, Artificial Sequence
  Synthetic polynucleotide encoding artificial human antibody VH domain
caggtccaattggtgcaatctgcgtctgaggtgaaaaaccctgggtcctcggtgaaggtctcctgtaagattttaggagacagcttctccaccttgaggctcaactgggtgcggcaggtccaaggacatggacttgagtggctgggggggatcatccccatcgtacacattaccacctacgcagagaacttccaggacagagtcaccattaccgcggacgactccacgaccacactgtacatggagattagaggcctgacatctgacgacacggccgtctattactgtgcgacctccggctatttccaagatattagtggtgacgacttttggggccagggaactctggtctccgtctcctca

SEQ ID NO: 8308 - DNA, 381 bp, Artificial Sequence
  Synthetic polynucleotide encoding artificial human antibody VH domain
caggttcagctggtgcagtctggagctgaggtgaagaagcctggggcctcagtgaaggtctcctgcaaggcttctggttacacctttaccagctatggtatcagctgggtgcgacaggcccctggacaagggcttgagtggatgggatggatcagcgcttacaatggtaacacaaactatgcacagaagctccagggcagagtcaccatgaccacagacacatccacgagcacagcctacatggagctgaggagcctgagatctgacgacacggccgtgtattactgtgcgagacaagttgacggtgactacgtgggggactgggactactactacggtatggacgtctggggccaagggaccacggtcaccgtctcctca

SEQ ID NO: 8309 - DNA, 390 bp, Artificial Sequence
  Synthetic polynucleotide encoding artificial human antibody VH domain
cagctgcagctgcaggagtcgggcccaggactggtgaagccttcggagaccctgtccctcacctgcactgtctctggtggctccatcagcagtagtagttactactggggctggatccgccagcccccagggaaggggctggagtggattgggagtatctattatagtgggagcacctactacaacccgtccctcaagagtcgagtcaccatatccgtagacacgtccaagaaccagttctccctgaagctgagctctgtgaccgccgcagacacggctgtgtattactgtgcgagagagacgtattactatggttcggggagctatccccaatactactactacggtatggacgtctggggccaagggaccacggtcaccgtctcctca

SEQ ID NO: 8310 - DNA, 387 bp, Artificial Sequence
  Synthetic polynucleotide encoding artificial human antibody VH domain
cagctgcagctgcaggagtcgggcccaggactggtgaggccttcggagaccctgtccctcacctgcactgtctctggtggctccatcagtagtagtaatcactactggggctggatccgccagcccccagggaaggggctggagtggattgggactgtctattatagtggaagcacctactacaacccgtccctcaagagtcgagtcaccatatccgtagacacgtccaacaaccagttctccctcgacctgagctctttgaccgccgcagacacggctgtttatcactgtgcgagacagcgagatacgtattaccatggttcgcagaaatattttttggacttctttgactactggggccagggaaccccggtcaccgtctcctca

SEQ ID NO: 8311 - DNA, 390 bp, Artificial Sequence
  Synthetic polynucleotide encoding artificial human antibody VH domain
caggtgaagctggtgcagtctggggctgaggtgaagaagcctgggtcctcggtgagggtctcctgcaaggcttctggaggcgacttcaacaactatgctattagttgggtgcgacaggcccctggacaaggccttgagtggatgggagggatcatccctatgtttggtactccaaattacgcacagaagttccagggcagagtcacatttatcgcggacgtatcgtcgaatacagcctacatggagttgagcagcctgagatctgaggacacggccgtatatttttgtgcgagaacgacctatttctctgatgataatggtcactctcgttattactactactactacatggacgtctggggcaaagggaccacggtcaccgtctcgtca

SEQ ID NO: 8312 - DNA, 393 bp, Artificial Sequence
  Synthetic polynucleotide encoding artificial human antibody VH domain
gaggtgcagctggtggagtctgggggaggcttggtaaagcctggggggtcccttagactctcctgtgcagcctctggattcactttcagtaacgcctggatgagctgggtccgccaggctccagggaaggggctggagtgggttggccgtattaaaagcaaaactgatggtgggacaacagactacgctgcacccgtgaaaggcagattcaccatctcaagagatgattcaaaaaacacgctgtatctgcaaatgaacagcctgaaaaccgaggacacagccgtgtattactgtaccacagggaggggttcggggaatttttttgggggggagtactactactactacggtatggacgtctggggccaagggaccacggtcaccgtctcctca

SEQ ID NO: 8313 - DNA, 351 bp, Artificial Sequence
  Synthetic polynucleotide encoding artificial human antibody VH domain
caggtgcagctggtggagtctgggggaggcgtggtccagcctgggaggtccctgagactctcctgtgcagcctctggattcaccttcagtagctatgctatgcactgggtccgccaggctccaggcaaggggctggagtgggtggcagttatatcatatgatggaagcaataaatactacgcagactccgtgaagggccgattcaccatctccagagacaattccaagaacacgctgtatctgcaaatgaacagcctgagagctgaggacacggctgtgtattactgtgcgagatgggagggggggggtatggacgtctggggccaagggaccacggtcaccgtctcctca

SEQ ID NO: 8314 - DNA, 375 bp, Artificial Sequence
  Synthetic polynucleotide encoding artificial human antibody VH domain
caggtgcagctggtggagtctgggggaggcgtggtccagcctgggaggtccctgagactctcctgtgcagcctctggattcaccttcagtagctatggcatgcactgggtccgccaggctccaggcaaggggctggagtgggtggcagttatatcatatgatggaagtaataaatactatgcagactccgtgaagggccgattcaccatctccagagacaattccaagaacacgctgtatctgcaaatgaacagcctgagagctgaggacacggctgtgtattactgtgcgggggattacgatattttgactggttattactgggtgtatgcttttgatatctggggccaagggacaatggtcaccgtctcttca

SEQ ID NO: 8315 - DNA, 366 bp, Artificial Sequence
  Synthetic polynucleotide encoding artificial human antibody VH domain
gaggtgcagctggtgcagtctggagcagaggtgaaaaagcccggggagtctctgaagatctcctgtaagggttctggatacagctttaccagctactggatcggctgggtgcgccagatgcccgggaaaggcctggagtggatggggatcatctatcctggtgactctgataccagatacagcccgtccttccaaggccaggtcaccatctcagccgacaagtccatcagcaccgcctacctgcagtggagcagcctgaaggcctcggacaccgccatgtattactgtgcgagacatgggcgtggatacagctatgatctgccgttcgacccctggggccagggaaccctggtcaccgtctcctca

SEQ ID NO: 8316 - DNA, 369 bp, Artificial Sequence
  Synthetic polynucleotide encoding artificial human antibody VH domain
caggtgcaactggtggagtctgggggaggcgtggtccagcctgggaggtccctgagactctcctgtgcagcgtctggattcagtttcagtgattattccatgcactgggtccgccaggctccaggcaaggggctggagtgggtggcagttatatggtatgatggaagtcatgaatattatgcagactccgtgaagggacgattcaccatctccaaagacaattccaaaaacacgctgtatttgcaaatggacagcctgagagtcgaagacacggctatctattactgtgggaaagcgagtcccagtgtcgatatagcagcagctggaattgactactggggccagggaaccctggtcaccgtctcctca

SEQ ID NO: 8317 - DNA, 375 bp, Artificial Sequence
  Synthetic polynucleotide encoding artificial human antibody VH domain
gaggtgcagctgttggagtctgggggaggcttggtacagcctggggggtccctgagactctcctgtgcagcctctggattcacttttagcaactatgccatgagctgggtccgcctggctccagggaaggggctggagtgggtctcaagtattcgtgacagtggtggcagcacaaagtacgcagagtccgtgaagggccggttcaccgtctccagagacgattccaagaacacgctgtttctggaaatgaacagcctgagaggcgaggacacggccgtatattactgtgcgatgcccccccacggatatgtcagtaactggtacacctactggtttgacttctggggccagggaaccctggtcaccgtctcctca

SEQ ID NO: 8318 - DNA, 387 bp, Artificial Sequence
  Synthetic polynucleotide encoding artificial human antibody VH domain
gaggtgcagttggtagaggctgggggaggcttggtccagtcgggggggtccctgagactctcctgtgcggcctctggattcacctttattaattattggatgacctgggtccgccaggctccagggggggggctggagtgggtggccaatatagatcaacatggaactgagatgtattttgtggagtccgtgaagggccgattcaccatttccagagacaacgccaagaatttagtgtatctgcagatgaacagtgtgagagacgaagacacggctgtttactattgtgcgagagatggcccccattacgatgctttgaccgcctcatggacatatgttggtatttttgatgtctggggccaagggacaatggtcaccgtctcttca

SEQ ID NO: 8319 - DNA, 342 bp, Artificial Sequence
  Synthetic polynucleotide encoding artificial human antibody VH domain
gaggtgcagctggtggagtctgggggaggcctggtcaagcctggggggtccctgagactctcctgtgcagcctctggattcaccttcagtagctatagcatgaactgggtccgccaggctccagggaaggggctggagtgggtctcatccattagtagtagtagtagttacatatactacgcagactcagtgaagggccgattcaccatctccagagacaacgccaagaactcactgtatctgcaaatgaacagcctccaccaagggcccatcggtcttccccctggcaccctcctccaagagcacctctgggggcaagggaccacggtcaccgtctcctca

SEQ ID NO: 8320 - DNA, 366 bp, Artificial Sequence
  Synthetic polynucleotide encoding artificial human antibody VH domain
caggtgcagctggtgcagtctggggctgaggtgaagaagcctggggcctcagtgaaggtctcctgcaaggcttctggatacaccttcaccggctactatatgcactgggtgcgacaggcccctggacaagggcttgagtggatgggatggatcaaccctaacagtggtggcacaaactatgcacagaagtttcagggcagggtcaccatgaccagggacacgtccatcagcacagcctacatggagctgagcaggctgagatctgacgacacggccgtgtattactgtgcgagagagggggagatggctacaaggaatgatgcttttgatatctggggccaagggacaatggtcaccgtctcttca

SEQ ID NO: 8321 - DNA, 375 bp, Artificial Sequence
  Synthetic polynucleotide encoding artificial human antibody VH domain
caggtgcagctggtggaatctgggggaggcgtggtccagcctggggggtccctgagactctcctgtgcagcctctggattcaccttcaataactatggcatgcactgggtccgccaggctccaggcaaggggctggagtgggtggcaattatatcatatgagggaagtaagaaatactatataaattccgtgaagggccgattcaccatctccagagacagttccaagaaaacgctatatctgcaaatgaacagcctgagacctgaggacacggctgtgtattactgtgcgaaaagagacgttatattttggttgggcgagtcacaaggggcttttgatatctggggccaagggacaatggtcatcgtctcttca

SEQ ID NO: 8322 - DNA, 378 bp, Artificial Sequence
  Synthetic polynucleotide encoding artificial human antibody VH domain
gaggtgcagctggtggagtctgggggaggcctggtcaagcctggggggtccctgagactctcctgtgcagcctctggattcaccttcagtagctatagcatgaactgggtccgccaggctccagggaaggggctggagtgggtctcatccattagtagtagtagtagttacatatactacgcagactcagtgaagggccgattcaccatctccagagacaacgccaagaactcactgtatctgcaaatgaacagcctgagagccgaggacacggctgtgtattactgtgcgaggttatattgtagtagtaccagctgctataactactactactacatggacgtctggggcaaagggaccacggtcaccgtctcctca

SEQ ID NO: 8323 - DNA, 351 bp, Artificial Sequence
  Synthetic polynucleotide encoding artificial human antibody VH domain
gaggtgcaactcttggagtctgggggaggcttgatccagcctggggggtccctgagactctcttgtgtagcctctggattcacgtttggagactattccataagttggctccgccaggccccaggaaagggcctggagtgggtcgctcatattgataaggatgtctctcgaacacactacgcagactccgtggtgggccggttcaccgtctccagagacaattccaagcatacagtgtatcttcaaatgtacaccctgaggcccgaggacacggccctatattattgtgcgacctggatttcagcgcattttgacaactggggccagggaaccccggttactgtctcctca

SEQ ID NO: 8324 - DNA, 354 bp, Artificial Sequence
  Synthetic polynucleotide encoding artificial human antibody VH domain
gaggtgcacctggtggagtccgggggaggcttagttcagcctggggggtccctgagactctcctgtgcaggctctggattcaccttcagtgcttacaatatacactgggtccgccaggctccagggcaggggctggtgtggctctccaaaattaacgatgatgggagttctccaatctacgcggattccgtgaggggccgattcaccacctccagagacaactccaagaacgtggtgtatctgcaaatgaacagtctgagagtcgaggacacggctgtctatttctgtgcaagggacagagactgggaaatctttgacttttggggcctgggaaccctggtcaccatctcctca

SEQ ID NO: 8325 - DNA, 345 bp, Artificial Sequence
  Synthetic polynucleotide encoding artificial human antibody VH domain
gaggtgcaactggtggagtcggggggaggcttggtacagccgggggggtccctaagactctcctgtacaacttctggattccttctcgattcctattacatgaattgggtccgccagtctccagggaaggggctggactggattgcatacattagtggtagtagtaagaatatatattacgcagactctgtgaagggccgcttcatcatctccagagacagcgccaagaagtcagtgtttttacaaatgaacagcctgagagccgaggacaccggtctctattactgtgtcagaggacttgatattgactattggggccagggaaccgtggtcaccgtctcctca

SEQ ID NO: 8326 - DNA, 360 bp, Artificial Sequence
  Synthetic polynucleotide encoding artificial human antibody VH domain
gaggtgcagctgttggagtctgggggaggcttggtacagcctggggggtccctgagactctcctgtgcagcctctggattgacctttagcacctttggcatgacttgggtccgccaggctccggggaaggggctggagtgggtctcaggtattagtagtttttatagcacatattacgcagactccctgaagggccggttcaccatctccagagacaatgccaagaacacgctgtatctgcacatgagcagcctgagagccgaggacacggccgtatattattgtgcgaccaagggtggggagaatggttattactactggacctattggggccagggaaccctggtcaccgtctcctca

SEQ ID NO: 8327 - DNA, 360 bp, Artificial Sequence
  Synthetic polynucleotide encoding artificial human antibody VH domain
gaggtgcagctggtggaatctgggggacagttggtagagcctggggggtccctgagactctcctgtgcagcctctggattcaactttaacacttacaacatgcagtgggtccgccaggctccagggaagggcctggagtgggtggcatacctgagtgatattagtaccaccatatactactcagactctttggagggccgattcaccgtctccagagacaacgcccagaactctctgtttctgcaaatggacagtctgagagtcgaggacacggctgtctatttctgtgcgagatccagggtcggaaggtgggagttacccgactactggggccagggaaccctggtcaccgtctcctca

SEQ ID NO: 8328 - DNA, 378 bp, Artificial Sequence
  Synthetic polynucleotide encoding artificial human antibody VH domain
gaggtgcagttggtggagtctgggggaggcttggtaaagcctggggggtcccttagactctcctgtgcagcctctggactcaccttcagtctcgcctggatgacctgggtccgccaggctccagggaaggggctggagtgggtcggccgtattaaaagcaaagctagtggcgggacaatagactacgctgcgcccgtgaaaggcagattcaccatctcaagagatgattcaaaatacacactgtatctccaaatgaacagcctgaaaaccgaggacacagccgtttattattgtgcccatatcgtttcttctacggtgactgacccagacctctactttaaaacctggggccagggaaccctggtcaccgtctcctca

SEQ ID NO: 8329 - DNA, 378 bp, Artificial Sequence
  Synthetic polynucleotide encoding artificial human antibody VH domain
gaagtgcaattggtggagtctgggggaggcttggtgcagcctggcaggtccctaagactggcctgtgtaggctctggattcaactttgatgaccatgccatgcactgggtccggcaagttccagggaagggcctggagtggatcacaggaattagctggaatagtgtaaatgtagcctatgggggctctgtgaagggccgattcaccgtctccagagacaacgccaagaactccttgtttttggaaatgaacagtctgagacctgaggacacggccctgtattattgcgcaagggatatggtggcagtgtccgactcaagtgttggagaaggttggtttgacaactggggccagggaaccctggtcaccgtctcctca

SEQ ID NO: 8330 - DNA, 366 bp, Artificial Sequence
  Synthetic polynucleotide encoding artificial human antibody VH domain
gaggtgcagctgttggagtctgggggaggcttggtacagcctggggggtccctgagactctcctgtgcagcctctggactcacctttaagaagtatgccataagctggttccgccaggctccagggaaggggctggagtgggtctcaagtattaatgctgatggtgctggcacatactacgcagagtccgtgaagggccggttcaccatctccagagacaattccaagagcacactgtatctgcaaatgaacagcctgagagccgaggacacggccgtatattactgtgccaaagatcctaacggtgactaccctttggggtcctccgactactggggcccgggaaccctggtcaccgtctcctca

SEQ ID NO: 8331 - DNA, 354 bp, Artificial Sequence
  Synthetic polynucleotide encoding artificial human antibody VH domain
gaggtgcagctggtggagtccgggggagggttagttcagccgggggggtccctgacactctcctgtgtagcctctggattcacctttagtaattataatatgcattgggtccgccaagttccagggaaggggctggtttggctctcaaaaattaatgatgacggaactggtccagtctacgcggactccgtgaagggccggttcaccaccttcagagacaacgccaaggacacggtatttctgcaaatgtacagtctgagagccgaagacacgggtgtctattattgtgcaagagatcgtgcctggcagatatatgactactggggcccgggaaccctggtcaccgtctcctca

SEQ ID NO: 8332 - DNA, 345 bp, Artificial Sequence
  Synthetic polynucleotide encoding artificial human antibody VH domain
gaggtgcagctgttggagtctgggggggacctggtagagccgggggggtccctgagactctcttgtcaggctactggggacacctttcgaaactttgaaatgaactgggtccgtcaggttccagggaaggggctgcagtgggtctctagtgtaagtgccagcggtgctctcacaaattacgcagactctctgaggggccgcttcatcgtctccagagacaattccaggaactccgtctctctgcaaatgaatgggctgagagtcgacgacacggccgtttattattgtgtgacggtccatgattcgccctcttggggccaaggaaccctggtcatcgtctccgca

SEQ ID NO: 8333 - DNA, 366 bp, Artificial Sequence
  Synthetic polynucleotide encoding artificial human antibody VH domain
gaggtgcagctggtggagtctgggggaggcctggtcaagcctggggggtccctgagactctcctgtgcagcctctggcttcaccctcagtagctataccatgaactgggtccgccaggctccagggagggggctggagtgggtctcttccatttatactagtcctgtttccatatactacgcagactcagtgaagggccgattcaccatttccagggacaacgccaagagctcactgtatctgcaaatgaacagcctgagagccgaggacacggctatgtattactgtgcgagagaacggatatacagctattcctcacgctcctttgactgctggggccagggaaccctggtcaccgtctcctca

SEQ ID NO: 8334 - DNA, 351 bp, Artificial Sequence
  Synthetic polynucleotide encoding artificial human antibody VH domain
gaggtgcacctggtggagtctgggggcggcttggtccagcctggggggtccctgagactctcctgtgcagcctctggattcacgtttaagaacttttggatgacctggatccgccaggctccagggaagggactggagtgggtggccaatataaaggaaagtggaagtgagaaatcctatgtggactctctgaagggccgattcaccatctccagagacaacaccaaaaactcagtgtatctgcaaatgaacgacctgagagtcgaggacacggccgtatattactgttcggcagtatcgtggctggcctttgactactggggccagggaacccgggtcaccgtctcctca

SEQ ID NO: 8335 - DNA, 384 bp, Artificial Sequence
  Synthetic polynucleotide encoding artificial human antibody VH domain
gaggtgcagctggtgcagtctggagcagaggtgaaaaagcccggggagtctctgaagatctcctgtaagggttctggatacagctttaccagctactggatcggctgggtgcgccagatgcccgggaaaggcctggagtggatggggatcatctatcctgatgactctgataccagatacagcccgtccttccaaggccaggtcaccatctcagccgacaagtccatcagcaccgcctacctgcagtggagcagcctgaaggcctcggacaccgccatgtattactgtgcgagaacggggctatatatagtgggacctacctgggactactactactacggtatggacgtctggggccaagggaccacggtcaccgtctcctca

SEQ ID NO: 8336 - DNA, 363 bp, Artificial Sequence
  Synthetic polynucleotide encoding artificial human antibody VH domain
gaggtgcagctggtggagtctgggggacgtttggtccagcctggggggtccctgagactctcctgtgaagcctctggattcatttttggtacttattggatgacctgggtccgccaggctccagggaaggggctggagtgggtggccaacataaatggagatggaagtgaggaaaactatgtggactctgtgaagggccgattcaccatcttcagagacaacgccaagaattcactgtacctgcaaatgaacagcctgagagtcgacgacacggccgtgtatttctgtgcgagagggtggtgtagtccccactgctacggtatgggcgtctggggccaagggagcacggtcatcgtctcctca

SEQ ID NO: 8337 - DNA, 360 bp, Artificial Sequence
  Synthetic polynucleotide encoding artificial human antibody VH domain
caggtgcagctggtgcagtctggggctgaggtgaagaagcctggggcctcagtgaaggtctcctgcaaggcttccggatacactttcaccagttatgatatcaactgggtgcgacaggccactggacaagggcttgagtggatgggatggatgaaccctaatagtggtaacacaggctatgcacagaagttccagggcagagtcaccatgaccaggaacacctccataagcacagcctacatggagctgagcagcctgagatatgaggacacggccgtgtattactgtgcgagagtgcgtgggaggtactcctacggtatggacgtctgggggcaagggaccacggtcaccgtctcctca

SEQ ID NO: 8338 - DNA, 369 bp, Artificial Sequence
  Synthetic polynucleotide encoding artificial human antibody VH domain
gaggtgcagctggtggactctgggggaggcttggtgcagccagggcggtccctgagactctcctgtgcagcttctggattcacctttggtgattatgctttgacctggttccgccaggctccattgaggggcctggagtgggtggctttcattagagccaagacatttggttcgacaacagaatacgccgcattcgcgcaaggcagattctccgtctcaagggatgattccaagagcatcgcctatcttcaaatgaaccgcctgaagaccgacgacacaggcgtgtatttctgtactagaggtgatagtgacagctactacgacttctctgcctattggggccagggaaccctggtcaccgtctcctca

SEQ ID NO: 8339 - DNA, 387 bp, Artificial Sequence
  Synthetic polynucleotide encoding artificial human antibody VH domain
cagctgcagctgcaggagtcgggcccaggactggtgaagccttcggagaccctgtccctcacctgcactgtctctggtggctccatcagcagtagtagttactactggggctggatccgccagcccccagggaaggggctggagtggattgggagtatctattatagtgggagcacctactacaacccgtccctcaagagtcgagtcaccatatcaatagacacgtccaagaaccagttctccctgaagctgagctctgtgaccgccgcggacacggccgtgtattactgtgcgagagatccggtggcgagtattacgatttttggagtggttacccgctacggtatggacgtctggggccaagggaccacggtcaccgtctcctca

SEQ ID NO: 8340 - DNA, 363 bp, Artificial Sequence
  Synthetic polynucleotide encoding artificial human antibody VH domain
cagctgcagctgcaccagtcgggcccaggactgttggggccttcggagaccctgtccctcatttgttctgtctctggtggctccgtcagcgatagtacttactactggggctggatacgccagaccccagggaagggactggagtggattgggagtatctattatagtgggagcacctactacaacccgtccctacagagtcgaggcaccatatccgtggacacgtccaggaaccaattctccctgaggctgacctctgtgaccgccgcagacacggcggtttatttttgtgcgagacaagcaatcacctggtacaattattttgacatgtggggccagggtaccctggtcaccgtctcctca

SEQ ID NO: 8341 - DNA, 366 bp, Artificial Sequence
  Synthetic polynucleotide encoding artificial human antibody VH domain
gaggtgcaattgttggagtctgggggaggcttggtacagcctggggggtccctcagactctcctgtgcagcctctggactcacctttggcaactatgccatgcattggctccgccaggctccagggaagggactggagtgggtctcaggtattactggtagtggtactgccacatactacgcagagtccgtcaagggccggttcaccatctccagagacaattccaagaacactctgtatctgcaaatgaacaacctgagagccgaggacgcggccgtatattattgtgcgaaagaccctaacggcgactatgtcttggggtcctccgactcgtggggccagggaaccctggtcaccgtctcctca

SEQ ID NO: 8342 - DNA, 378 bp, Artificial Sequence
  Synthetic polynucleotide encoding artificial human antibody VH domain
cagctgcagctgcatgagtcgggccgaggactggtgaagccttcggagaccctgtccctcacctgcaatgtctctggtgactccatcagcagtcgttctttctactgggcctggatccgccagcccccagggaaggggctggagtggattgggaatatcttttatcgtgggaccacctactacaacgcgtccctcgagagtcgagtcaccatgtccatagacacgtccaagaatcagttttccctgaaggtgacttccgtgaccgccgcggacacggctgtctacttctgtgcgagacagagggactacaccgcctcgtccggcgggggctggtacttcgatctctggggccgcggcaccctggtcactgtctcctca

SEQ ID NO: 8343 - DNA, 393 bp, Artificial Sequence
  Synthetic polynucleotide encoding artificial human antibody VH domain
cagctgcagctgcaggagtcgggcccacgactggtgaagccttcggagaccctgtcgctcacctgcactgtctctgggggctccattagcagtagtagttactactgggcctggatccgccagcccccagggaagggactggagtggattgggagtgtctattatagtgggagcacctactacagcccgtccctcaagagtcgagtcagtctgtcagttgacacgtccaagaaccagttctccctgaaactgagttttgtgaccgccgcggacacggccgtttattactgtgcgaccgaaggaactacatatgacgatttttggggtggacaaccccgtcttaacaactggttcgacccctggggccagggaaccctggtcaccgtctcctca

SEQ ID NO: 8344 - DNA, 363 bp, Artificial Sequence
  Synthetic polynucleotide encoding artificial human antibody VH domain
caggtgcagctggtggagtctgggggaggcgtggtccagcctgggaggtccctgagactctcctgtgcagcctctggattcaccttcagtacctatgctatgcactgggtccgccaggctccaggcaaggggctggagtgggtggcagttatatcatatgatggaagtaataaatactacccagactccgtgaagggccgattcaccatctccagagacaattccaagaacacgctgtatctgcaaatgaacagcctgagagctgaggacacggctgtgtattactgtgcgaggggactacgcggcaactactactacggtatggacgtctggggccaaggggccacggtcaccgtctcctca

SEQ ID NO: 8345 - DNA, 375 bp, Artificial Sequence
  Synthetic polynucleotide encoding artificial human antibody VH domain
gaggtgcagctggtggaatccgggggagacttggtaaagccgggggggtcccttaaactctcctgtgcagcctctggattcagttttagtaacgcctggatgagctgggtccgccaggctcctgggaaggggctggagtgggttgcccgcatcaaaagaaaaagtgacggtgggacatcagactacccttcagtcgtggaaggcagattcaccatctcaagagatgattcaaaaaacacactgtacctgcaaatgaacaacctgagaaacgaggacacaggcgtctattactgtgtcacagggcagcccagaatcagtggctggtggggtgcttatgatatgtggggcccagggacaatggtcaccgtctcttca

SEQ ID NO: 8346 - DNA, 345 bp, Artificial Sequence
  Synthetic polynucleotide encoding artificial human antibody VH domain
gaggtgcaattgttggagtctgggggaggcttggtacagcctggggggtccctgagactctcctgtgcagcctctggattcacctttagcagctatgccatgaactgggtccgccaggctccagggaagggactggagtgggtctcaactcttagtggtagtgctattagcacatactacgcagactccgtgaagggccgattcaccatctccagagacaattccaagaacacgctgtctctgcaaatgaacagcctgagagccgaggacacggccgtatatttctgtgcgaaatcaatggaccttgactactggggcccgggaaccctggtcaccgtctcctca

SEQ ID NO: 8347 - DNA, 369 bp, Artificial Sequence
  Synthetic polynucleotide encoding artificial human antibody VH domain
caggtgcaactggtgcagtctggggctgaggtgaagaagcctggggcctcagtgaaggtctcctgcaaggcttctggattcaccttcaccgactactttttacactgggtccgacaggcccctggacaagggcttgagtggatgggacggatcaaccctaacactggtgccacaaactatgcacagaagtttctgggcagggtcaccgtgaccaggaatacgtccatcaacacagcctacatggaggtgaggaggctgagatctgacgacacggttgtctatttctgtgcgagaggaaggcccccctttttcaccagccctgatgtttttgatctttggggccaagggacagtggtcaccgtctcttca

SEQ ID NO: 8348 - DNA, 357 bp, Artificial Sequence
  Synthetic polynucleotide encoding artificial human antibody VH domain
cagatcaccttgaaggagtctggtcctacgctggtgaaacccacacagaccctcacgctgacctgcaccttctctgggttctcactcaccactagtggagtgggtgtgggctggatccgtcagcccccaggaaaggccctggagtggcttgcactcatttattgggatgatgataagcgctacagcccatctctgaagagcaggctcaccatcaccaaggacacctccaaaaaccaggtggtccttacagtgaccaacatggaccctgtggacacagccacatattactgtgcacaccatacaataactacggtctttgactactggggccagggaaccctggtcaccgtctcctca

SEQ ID NO: 8349 - DNA, 381 bp, Artificial Sequence
  Synthetic polynucleotide encoding artificial human antibody VH domain
gaggtgcagttgttggagtctgggggaggccgggtacagccgggggggtccctgagactctcttgtgtaacctcgggattcagcttcagttcttatggcatgagttgggtccgccaggctccagggaaggggctggagtgggtctcaggtatcagtggtagtggtggcagtacataccacgtagagtccgtgaagggccggttcaccatctccagagacaattccaggaacacgttgaatttgcaaatggagagcctgagagtcgaagacacggccgtttatttctgtgccaaacgggccgaagacggacggtatggcaagtttggttatcacggggcttggggctcctggggccagggaaccctggtcaccgtctcttca

SEQ ID NO: 8350 - DNA, 366 bp, Artificial Sequence
  Synthetic polynucleotide encoding artificial human antibody VH domain
gaggtgcaactggtggaatctgggggaggcctggtcaagcctggggggtccctgagactctcctgtgaagcctctggcttcaccctcagtagctattccatgaactgggtccgccgggctccagggagagggctggagtgggtcgcatccatttttactagtggtgtttccgtgtactacgcagactcagtgaagggccgattcaccatctcccgagacaacgccaagaactcactgtctctgcaaatgaacagcctaagagccgaggacacggctgtatattactgtgcgagagaccggagactcacctactcttcacgctactttgactactggggccggggaaccctggtcaccgtctcctca

SEQ ID NO: 8351 - DNA, 366 bp, Artificial Sequence
  Synthetic polynucleotide encoding artificial human antibody VH domain
gaggtgcaactgttggagtctgggggaggcttggtacagcctggggggtccctgagactctcctgtgcagcctctggactcaccattagcacctatgccatgacctggttccgccaggctccagggaaggggctggactgggtctcctctattactggtaatggtgatggcacatactatgcagactccgtgaagggccggttcaccatctccagagacaattccaagaacacattgtacctgcagatgaacaacctgagagccgacgacacggccgtgtattactgtgggaaagatcctaatgggaactatgttttggggtcctccgactactggggccagggaaccctggtcaccgtctcctca

SEQ ID NO: 8352 - DNA, 351 bp, Artificial Sequence
  Synthetic polynucleotide encoding artificial human antibody VH domain
gaggtgcagctggtggagtctgggggaggcttggtacagcctggggggtccctgagactctcctgtgcagcctctggattcatcttcagacactatgccatgaattgggtccgccaggctccagggaaggggctggagtggatttcacacatttatagtgctactgattccatatattacgcagactctgtgaagggccggctcaccatctccagagacaatgccaaggacacactgtatctgcaaatggatagcctgagagacgaggacacggctgtgtattactgtgcgagagatcttgactgggcttttgactactggggccagggaaccctggtcaccgtctcctca

SEQ ID NO: 8353 - DNA, 369 bp, Artificial Sequence
  Synthetic polynucleotide encoding artificial human antibody VH domain
gaggtgaacgtcttggaatctgggggaggcttggtactgcctggggggtccctgaggctctcctgttcagcctctggattcacctttaatagttttgccataaattgggtccgccaggctccagggaaggggctggagtgggtcgcaggtattagtggaggaagaggaaccacatactacgcagactccgtgaggggccggttcatcatctccagagacaattccaagcgtgttgtatatctccaaatgaacagcctgacagccgacgacgcggccgtatatcactgtgcgaaagattccgggggggacccaaggatggcctactggttcgacccctggggccagggaaccctggtcaccgtctcctca

SEQ ID NO: 8354 - DNA, 360 bp, Artificial Sequence
  Synthetic polynucleotide encoding artificial human antibody VH domain
caggtgcagctggtggagtctgggggaggcttggtcaagcctggagggtccctgagactctcctgtgcagcctctggattccccttcagtgattactacatgagctggatccgccagcctccagggaaggggctggaatggatttcatacattagtagtcgtagtcgttccacattctacgctgactctgtgaagggccgattcaccatctccagagacaacgccaacaactcactcttcttacacatgaacagcctgagagccgaggacacggctctctattactgtgcgcgaggcgtggtgggagctgaagatgcttttgatctctggggccaagggacaatggtcaccgtctcttca

SEQ ID NO: 8355 - DNA, 363 bp, Artificial Sequence
  Synthetic polynucleotide encoding artificial human antibody VH domain
gaggtgcagctggtggagtctgggggaggcctggtcaagccgggggggtccctgagactctcctgtgcagcctctggattcagtttcagtaactatgccatgaactgggtccgccaggctccaggggaggggctggagtgggtctcatccattagtagaagtagtagttacatcttttacgcagactcagtgaagggccgattcaccatctccagagacaacgccaacaacttactgtatcttcaaatcaacagcgtgagagccgaggacacggctgtatattactgtgcgaggcagtatagcagttcgtcgggacgacactttgactactggggccagggaaccctggtcaccgtctcctca

SEQ ID NO: 8356 - DNA, 387 bp, Artificial Sequence
  Synthetic polynucleotide encoding artificial human antibody VH domain
gaggtgcacctgttggagtccgggggaggcttggtacagcctggggggtccctgagactctcctgcataacgtctggattcacctttagaagccatgccatgagctgggtccgccaggctccagggaaggggctgcagtgggtctcagctattagtgggaatggttttaccacactttacgcagactccgtgaagggccggttcaccatctccagagacaattccaacgacacactgtatcttcaaatacacagcctgagagccgacgacacggccgtctattactgtgcgaaagatgcgttctattttggttactgtagtggcggtgtttgccctaatgatgctttagatgtctggggccaagggacaacggtcaccgtctcttca

SEQ ID NO: 8357 - DNA, 354 bp, Artificial Sequence
  Synthetic polynucleotide encoding artificial human antibody VH domain
caggtccaacttgtgcagtctggggctgaggtgaaaaagcctggggcctcagtgagggtttcctgcaaggcttctggatacaccttcagtagttatgccatccattgggtgcgccaggcccccggacaagggcttgagtggatgggatggatcaacgttgacaatggtaacacaaaatactcacagaagttccagggcagagtcacctttaagagggacacatccgcgagtacagtgtacatggacttgagcagcctaagatctgaagacacggctgtcttttattgtgcgagagggagtggtttgcgggggatcgacccgtggggccagggaaccctggtcaccgtctcctca

SEQ ID NO: 8358 - DNA, 357 bp, Artificial Sequence
  Synthetic polynucleotide encoding artificial human antibody VH domain
caggtgcagctgcaggagtcgggcccaggactagtgaagccttcggagaccctgtccctcacctgcactgtctctggtggctccatgagttattcctactggacctggatcaggcagcccccagggaagggactggagttcattgggtatatctccaaaactgggaggaccaactacaacccctccctcaagagccgagtcaccatatcaggagacacgtccaagaaccacttctccctgaaactgacctctgtgagcgctgcggacacggccgtgtattactgtgcgagagagagtggatacagctatggagtctttgactactggggccagggaaccctggtcaccgtctcctca

SEQ ID NO: 8359 - DNA, 369 bp, Artificial Sequence
  Synthetic polynucleotide encoding artificial human antibody VH domain
gaggtgcagttgttggagtctgggggaggcttgatacagcctggggggtccctgagactctcctgtgcagcctctggattcacctttcaaacctatcccatgagctgggtccgccaggctccagggaaggggctggagtgggtctcaagtattagtggaagtggtggtcgcacatattacgcagactccgtgaagggccggttcaccgtctccagagacaaggacaacaatatgctgtacatggagatggacagcctgcgagacgatgacacggccacatattactgtgcgaaagattacatggcacacactagtaggccctgggcttttgatgtctggggccgagggacattggtcacggtctcttca

SEQ ID NO: 8360 - DNA, 363 bp, Artificial Sequence
  Synthetic polynucleotide encoding artificial human antibody VH domain
gaggtgcaactggtggagtctgggggaggcttggtccagccgggggggtcccggaaactctcctgtgtagtctctgggttcaccttcagtggtgctgctatgcactgggtccgccagcctccagggaagggactggaatatgtttcggctattactactactgggcgtaccacactttatgcagactctgtgaagggcagattcaccgtctccagagacaattccaagaacaccctgtatcttcaaatgggcagcctgagacctgaggacacggctgtgtattactgtgcgagagacttcccagggggtggctggtcttactttgactactggggccagggaaccctggtcgccgtctcatca

SEQ ID NO: 8361 - DNA, 363 bp, Artificial Sequence
  Synthetic polynucleotide encoding artificial human antibody VH domain
gaggtgcagctggtggagtctgggggaggcttggtccagcctggagggtccctgagactctcctgtgcaacctctggattcaccttcagtgactacttcatggactgggtccgccaggctccagggaaggggctggagtggcttggccgtactagaaataaatttagcagtgacaccacatactacgccgcgtctgtgaaaggcagattcaccatctcagcagatgattcgaagagctcactgtatctgcaaatgaacagcctgaaaatcgaggacacggccgtctattattgtgctagaggagggcccatagatggctacaatccctactggggccagggaaccctggtcaccgtctcctca

SEQ ID NO: 8362 - DNA, 387 bp, Artificial Sequence
  Synthetic polynucleotide encoding artificial human antibody VH domain
gaggtgcagctggtggagtctgggggaggcttggtacagcctggggggtccctgagactctcctgtgcagcctctggattcaccttcagtagctatagcatgaactgggtccgccaggctccagggaaggggctggagtgggtttcatacattagtagtagtagtagtaccatatactacgcagactctgtgaagggccgattcaccatctccagagacaacgccaagaactcactgtatctgcaaatgaacagcctgagagccgaggacacggctgtgtattactgtgcgagaaaatacacaatagcagcagctggtatcctactaccctcctattactacgttatggacgtctggggccaagggaccacggtcaccgtctcctca

SEQ ID NO: 8363 - DNA, 354 bp, Artificial Sequence
  Synthetic polynucleotide encoding artificial human antibody VH domain
caggtgcggctgcaggagtcgggcccaggactggtgaagccttcggagaccctgtccctcacctgttttgtctctggtgactccatcatcagttggactcactattatagctggatccgccagccccccgggagggggctggagtggatcggggaagtccatcatactggagctaccaaatacaatccgtccctcaggagtcgagtcaccgtctcagtggacacgtccaagagccagttttccctgagtctgacttctgtgaccgccgcggacacggctgtctattactgtgcgagaggctctggctttacctggaatatcggggaccagggaatcctggtcaccgtctcttca

SEQ ID NO: 8364 - DNA, 363 bp, Artificial Sequence
  Synthetic polynucleotide encoding artificial human antibody VH domain
gaggtgcagttggtggagtctggggggggctcagtaaagcctggggggtccctcagactctcctgtgcagcctctggattcgttttcaagaccgcctggatggactgggtccgccaggctccagggaagggcctggagtggattgcccaaattaaaagcgaaagagatggtgcgacagcggactaccctgcagccgtgagaggcagattcatcatctcaagagacgattcaaaaaacacactgtatctggaaatgaacagcctaaaaaccgacgacactgccatgtattattgtacgacgggtgtttcagcagctgcccacgatggctactggggccagggaaccctggtcagcgtctcctca

SEQ ID NO: 8365 - DNA, 390 bp, Artificial Sequence
  Synthetic polynucleotide encoding artificial human antibody VH domain
caggtgcaactggtgcagtctggggctgaggtgaagaagcctgggtcctcggtgaaggtctcctgcaaggcttctggaggcaccttcaccagttatgctatcaactgggtgcgacaggcccctggacaagggcctgagtggatgggagcgatcatccctgcccttggtacaacagactacgcacagaagttccagggcagagtcacgatgaccgcggacgagtccaccggcacagcgtacatggacctgagcagcctgaggtctgaggacacggccgtatattactgtgcgaggccgggatattgtagtggtggtagctgctacatcggatactacacatactacggattggacgtctggggccaagggaccacgctcaccgtctcgtca

SEQ ID NO: 8366 - DNA, 363 bp, Artificial Sequence
  Synthetic polynucleotide encoding artificial human antibody VH domain
caggtgcagttgaaagtgaggggcgcaggacttttgaagccttcggacaccctgtccctcacttgcgagattgacggtgcgtcgatcggtgactacttgtggacctggatccgacaggcccctgggaagggcctggaatgggttggacagatcaatcgtcgatcagagttcaactccaacccgaccctcaagagtcgagttgccttctcagtgggctcgtccgccactcatgtctccatgactctggagtctgtgaccgccgcggacacgggtctatatttctgtgccagaggcgtcgtttctggtgtggttttgcattatttggacctctgggcccagggagtcctggtcaccgtctccgca

SEQ ID NO: 8367 - DNA, 387 bp, Artificial Sequence
  Synthetic polynucleotide encoding artificial human antibody VH domain
gaggtgcagctggtgcagtctggagcagaggtgaaaaagtccggggagtctctgaagatctcctgtcagggttctggatacagctttagcaactaccacatcgtctgggtgcgccagatgcccgggaaaggcctggagtggatggggatcatctatcctggtgactctaaaaccgcatatagcccgtcctttcaaggccaggtcaccatctcagtcgacaagtccatcaataccgcctacctgcagtggagcggcctgaaggcctcggacaccgccatgtattactgtgcgaggcgagcttattgtggtggttcttgtacccggaatcactaccaatatttcggtatggacgtctggggccaagggaccaaggtcaccgtctcctca

SEQ ID NO: 8368 - DNA, 381 bp, Artificial Sequence
  Synthetic polynucleotide encoding artificial human antibody VH domain
caggtgcagctggtggagtctgggggaggcgtggtccagcctggggggtccctgagactctcctgtgcagcgtctggattcacgtttagtagatatggcatgtactgggtccgccaggctccaggcaaggggctggagtgggtgggaggcatatggtatgatggaagtgaaaaatattatgcagactccgtgaggggccgatgcaccatttccagagacaatctcaagaacacactttatcttcaagtgaacaacctgagaaccgaggacacggctatttattactgtgcgagagatccgcggctggacgattattggagtggttatatcccggggtattctgactcctggggccagggaaccctggtcaccgtctcctca

SEQ ID NO: 8369 - DNA, 387 bp, Artificial Sequence
  Synthetic polynucleotide encoding artificial human antibody VH domain
cagctgcagctgcaggagtcgggcccaggactggtgaagccttcggagaccctgtccctcacctgcactgtctctggtggctccatcagcagtagtagttactactggggctggatccgccagcccccagggaaggggctggagtggattgggagtatctattatagtgggagcacctactacaacccgtccctcaagagtcgagtcaccatatccgtagacacgtccaagaaccagttctccctgaagctgagctctgtgaccgccgcagacacggctgtgtattactgtgcgaggaccaccattgcgaaaattacgatttttggagtggttccccggtactactttgactactggggccagggaaccctggtcaccgtctcctca

SEQ ID NO: 8370 - DNA, 357 bp, Artificial Sequence
  Synthetic polynucleotide encoding artificial human antibody VH domain
gaggtgcagctggtggagtctgggggaggcttggtccagcctggggggtccctgagactctcctgtgcagcctccggattcacatttagtaactattggatgagttgggtccgccaggctccagggaaggggctggagtgggtggccaacataaagcaagatggaagtgagaaatactatgtggaccctgtgaagggccgattcaccatcttcagagacaacgccaagaactcactgttactgcaaatgagcagcctgagagtcgaggacacggctgtctactactgtgcgagagatgggggcaggtcgaccgactttgagtactggggccagggaaccctggtcaccgtctcctca

SEQ ID NO: 8371 - DNA, 357 bp, Artificial Sequence
  Synthetic polynucleotide encoding artificial human antibody VH domain
gaagtgcagttggtggagtctgggggaggcttggtacagcctggcaggtccctgagactctcctgtgtagcctctggattcgagtttgatgcttatgccatgcactgggtccggcaacgtccagggaagggcctggagtgggtctcaggtattagttggaatagtggtaccataggctatgtggactctgtgaagggccgcttcaccatctccagagacaacgccaagaattccctgtatctgcaaatgaatagtctgagacctgaggacacggccttctatcactgtgtaaaggataacagtgggtggtactactttgactcctggggcccgggaacccgggtcaccgtctcctca

SEQ ID NO: 8372 - DNA, 387 bp, Artificial Sequence
  Synthetic polynucleotide encoding artificial human antibody VH domain
gaggtgcacctcttggagtccgggggaggcttggtacggcctggggattcccttaaactctcctgcatagcgtctggattcacctttagaagccatgccatgagctgggtccgccaggctccagggcaggggcttcagtgggtctcagctatcagtgggagtggtttgaccacgttttacgcagactccgtgcagggccgattcaccatctccagagacaattccaacaacacactgtttcttcaaatacacagcctgagagccgacgacacggccgtctattactgtgcgaaagattcgttcttttttggttactgtcgtaacggtgtatgccctaatgatgcttttgatgtctggggccaagggacagtggtcaccgtctcttca

SEQ ID NO: 8373 - DNA, 357 bp, Artificial Sequence
  Synthetic polynucleotide encoding artificial human antibody VH domain
gaggtgcaactggtggagtctgggggagccttggtccagcctggagggtccctaagactctcctgtgttgcgtctgggtacaccttcggtgcccactacatggactgggtccgccaggctccagggaagggcctggagtgggttagtcgaactacaaaccaaattgacacctacaccacacaatatgccgcgtctgtgaaaggcagattcaccgtctcaagagatcacgcaacgaactcactgtatctacaaatgaacagtctgaaagtcgaggacacggccgtgtattattgtggcagagatactgcagcttctgtggacgtgtggggccaagggaccacagtcaccgtctcctca

SEQ ID NO: 8374 - DNA, 378 bp, Artificial Sequence
  Synthetic polynucleotide encoding artificial human antibody VH domain
caggtgcggctacaacagtggggcgcaggactgttgaggccttcggagaccctgtccctcacctgcgctgtctatgctgaggccttcaatggttactactggagctggatccgccagtccccagggaagggactggagtggattggagaaatcagtcatcctggacgcgccaagtacaacccttccctcaagagtcgactcaccatatcagtagacacgtacaggaagcaattctccctgaaactgagttctgtgaccgccgcggacacggctgtgtattactgtgcgagaggcccatatcgcaggatcctagtagtggtttcacccatgtactactttgactactggggccggggaaccctggtcaccgtctcctca

SEQ ID NO: 8375 - DNA, 387 bp, Artificial Sequence
  Synthetic polynucleotide encoding artificial human antibody VH domain
gaggtgcagctggtggagtctgggggaggcttggtccagcctggagggtccctgagactgtcctgtgtagcctctggattcaccttcagtaaccactacatggactgggtccgccaggctccacagaaggggctggagtgggttggccgcattagacacaaagtccacagttacaccacagaatacgccgcgtctgtgaaagggagattcaccatctcaagagatgattcgaagaactcagtgtatctgcaactgaacagcctgaaaaccgaggacacggccgtctactactgtgttagacatgtttcccattactatgaaggtcgtggttggcacggacatgcttttgatagctggggccaagggacagtggtcaccgtctcttca

SEQ ID NO: 8376 - DNA, 372 bp, Artificial Sequence
  Synthetic polynucleotide encoding artificial human antibody VH domain
caggtgcagctggtacaatctgggtctgagttgaagaagcctggggcctcagtgaaggtttcctgcaagtcttctggatataccttcactaattatgctatgtattgggtgcgacaggcccctggacaagggcttgagtgggtgggaaggatcaacaccaacactgggaaatcaacgtttgccccgggcttcacaggacgctttgtcttgtccttggacaaatatgtcagtacgacatatatagagattactgccctaagggcggaagacactgccatgtattactgtgcgcgagatgcattcgagtgggagttaccagctcgagggccggcagactactggggccagggaaccctgatcaccgtctcctca

SEQ ID NO: 8377 - DNA, 363 bp, Artificial Sequence
  Synthetic polynucleotide encoding artificial human antibody VH domain
caggtgcagctggtggagtctgggggaggcgtggtccagcctgggaggtccctgagactctcctgtgcagcctctggattcaccttcagtagctatgctatgcactgggtccgccaggctccaggcaaggggctggagtgggtggcagttatatcatatgatggaagtaataaatactacgcagactccgtgaagggccgattcaccatctccagagacaattccaagaacacgctgtatctgcaaatgaacagcctgagagctgaggacacggctgtgtattactgtgcgagaggggttcacggtggctggtacagtctttttgactactggggccagggaaccctggtcaccgtctcctca

SEQ ID NO: 8378 - DNA, 369 bp, Artificial Sequence
  Synthetic polynucleotide encoding artificial human antibody VH domain
gaggtgcagttggtgcagtctggagtagaggtgaaaaagcccggggagtctctgaagatctcctgtaaggcttctggatacaacttcaacacctactggatcggctgggtgcgccaggtgcccgggaaaggcctagaatccatgggcatcatctatccgcataagtctgatacgagatatagtccgtccttccaaggccaagtcagcatctcagccgacaagtccatcagcaccgcctacctgcagtggagcagcctgcaggcctcggacaccgccatttattactgtgcgagacgggcagattgtagcaccaccacttgccaacactatgacttctggggccagggaaccctggtcaccgtctcctca

SEQ ID NO: 8379 - DNA, 357 bp, Artificial Sequence
  Synthetic polynucleotide encoding artificial human antibody VH domain
caggtgcagttggtgcagtctggggctgaggtgaaggagcctggggcctcagtgaagctttcctgcaaggcatctggatactccttcagcacttactatatccactgggtgcgacaggcccctggacaagggcttcagtggatgggaagaatttaccctaaaggtggtagcacaagctactcacagaggttccaggacagagtcaccatgagcagggacacttccacgaacacagtctacatggagatgagaagtctcagatccgaggacacggccacttacttttgtgcgagaagtatagcagcaactggtagggctgactactggggccagggatcacaggtcaccgtctcctca

SEQ ID NO: 8380 - DNA, 360 bp, Artificial Sequence
  Synthetic polynucleotide encoding artificial human antibody VH domain
gaggtgcagctggtggagtccgggggaggcttagttcagcctggggggtccctgagactctcctgtgcagcctctggattcaccttcagtacctactggatgcactgggtccgccaagctccagggaaggggctggtgtgggtctcacgtattgatagtgatggcagtacgacaacctacgcggactccgtgaagggccgattcaccatctccagagacaacgccaagaacacactgtttctgcaaatgaacaatctgagagccgaggacacggctgtctattactgtgcaagaggttatataggagcgccggggcacggtgactactggggcctgggaaccctggtcaccgtctcctca

SEQ ID NO: 8381 - DNA, 351 bp, Artificial Sequence
  Synthetic polynucleotide encoding artificial human antibody VH domain
caggtgcagctggtggagtctgggggaggcgtggtccagcctgggaggtccctgagactctcctgtgcagcgtctggattcaccttcagtagctatggcatgcactgggtccgccaggctccaggcaaggggctggagtgggtggcagttatatggtatgatggaagtaataaatactatgcagactccgtgaagggccgattcaccatctccagagacaattccaagaacacgctgtatctgcaaatgaacagcctgagagccgaggacacggctgtgtattactgtgcgaaagatttccgggatgcttttgatatctggggccaagggacaatggtcaccgtctcttca

SEQ ID NO: 8382 - DNA, 360 bp, Artificial Sequence
  Synthetic polynucleotide encoding artificial human antibody VH domain
gaggtgcagttgttgcagtcggggggaggcttggtccagcctggggggtccctgagactctcctgtgaagcctctggattcacctttgccagttatgccatgacctgggtccgccaggctccagggaaggggctggagtgggtctcagctatcagttatactggtactatcacatattacgcagactccgtgaggggccgcttcagcatctccagagacaattccaaaaacactctgcatctgcaaatggacagcctgagagccgacgacacggccgtctattactgtgcgaaatgcggtgggagcttcgcctggccctttgagtattggggccagggaaccctcgtcatcgcctcctca

SEQ ID NO: 8383 - DNA, 375 bp, Artificial Sequence
  Synthetic polynucleotide encoding artificial human antibody VH domain
caggtgcagctgcaggagtcgggcccaggactggtgaagccttcacagaccctgtccctcacctgcactgtctctggtggctccattagcagtggtggttactactggagctggatccgccagcacccagggaagggcctggagtggattgggtacatctattacagtgggagcacctactacaacccgtccctcaagagtcgagttaccatatcagtagacacgtctaagaaccagttctccctgaagctgagctctgtgactgccgcggacacggccgtgtattactgtgcgagagcaggacgtattacgatttttggagtggttaaccactttgactactggggccagggaaccctggtcaccgtctcctca

SEQ ID NO: 8384 - DNA, 387 bp, Artificial Sequence
  Synthetic polynucleotide encoding artificial human antibody VH domain
gaggtgtacctgttggagtctgggggaggcttggtacagcctggggggtccctgagactctcctgtacagcctcaggattcagctttagaaaccatgccatgagttgggtccgccaggctccagggacggggctgcagttcctctcatctattagtgcttctggttttaatacattctacgcagactccgtgaagggccggttcaccatctccagagacaattccaacaacacactgtatcttcagatcttcaacctgagagacgacgacacggccgtgtattactgtgcgaaagatgcggtccattttggttactgtcctaatggtatatgtcctaatgatgcttttgatatctggggccaagggacaatggtcaccgtctcttca

SEQ ID NO: 8385 - DNA, 381 bp, Artificial Sequence
  Synthetic polynucleotide encoding artificial human antibody VH domain
caggtgcagctgcaggagtcgggcccaggactggtgaagccttcggagaccctgtccctcacctgcactgtctctggtggctccgtcagcagtgataattactactggagttggattcggcagcccccagggaagggactggagtggattgggtatatgtattacagtgggagcaccaactacaacccgtctctcaagagtcgagtcaccatttcagtggtcacgtccaagaaccagttctccctgaagctgagctctgtgaccgctgcggacacggccctgtattattgtgcgagattgttgttctttggttcgcggaaaacagccccaacgcatgcttttgatatctggggccaagggacaatggtcaccgtctcttca

SEQ ID NO: 8386 - DNA, 354 bp, Artificial Sequence
  Synthetic polynucleotide encoding artificial human antibody VH domain
gaggtgcaactggtggagtctgggggaggcttggtccagccgggggggtccctgagactctcctgtgcagtctctggcttcagcgtcagtgacctctacatgacctgggtccgccaggctccagggaaggggctggagtgggtctcacttatgtataacactgggagaacgcaatacgccgactccgtgaagggcagattcaccatctccggagacagttccaagaacatggtgtatcttcaaatgaacaacctgagagccgaagacacggctgtgtattactgtgcgggagacactgcgagcccttctaggtcagacttctggggccagggaaccctggtcaccgtctcctca

SEQ ID NO: 8387 - DNA, 363 bp, Artificial Sequence
  Synthetic polynucleotide encoding artificial human antibody VH domain
gaagtggagctggtgcagtccggagcagaattgaaaaagcccggggagtctctgacgatctcctgtaaggcctctggatacagcattcgcagcttctggatcacctgggtgcgccagatgcccgggaaaggcctggagtggatgggaagaattaaccccagtgactcttacatcaattacagtccgtccttcgagggccacgtcaccatctccgttgacaagtccatcaacactgcctacctccagtggcgcagcctgaaggcctcggacaccgccatctattactgtgcgagacgatggggttattacgagactagtggttattattactggggccagggtaccctggtcaccgtgtcctca

SEQ ID NO: 8388 - DNA, 375 bp, Artificial Sequence
  Synthetic polynucleotide encoding artificial human antibody VH domain
gaggtggaagtggtggagtctgggggaggcttggtccagcctggggggtccctcaaactctcctgtgcggcctctggattcaccttcagtgcctctgagattcactgggtccgccaggcttccgagagagggctggagtgggttggtcgtgttagaatgaaagctttcaattacgcgacggtatatggtgcgtcgatggaaggcaggttctccatctccagagatgactccaagaacacggcgtatctgcacctgaacagcctgaggaccgacgacacggccgtgtattattgttctatttcgtatggggggcctggtctaccagcaggtggcctcgggtactggggccagggagccctggtcatcgtctcctca

SEQ ID NO: 8389 - DNA, 384 bp, Artificial Sequence
  Synthetic polynucleotide encoding artificial human antibody VH domain
caggtgctgcttcaggagtcgggcccaggactgctgaagccttcggagaccctgtccctcacatgcagtgtctctggtgacgactccatgaaaagctactactggagctggattcggcagcccccagggaggagactggagtggattggctatgtctttcacggtgggatcgccaactcccacccctccctcaagagtcgagtcgccatgtcagtagacacgtccaagaggcagttctccctgaagttgacgtctatgaccgctgcggacacggccgtctattattgtgcgagagtttttaagttaagtttttcggagtggccgcaaatcttcgattttgggtttgactactggggccagggaatcctagtcaccgtctcctca

SEQ ID NO: 8390 - DNA, 345 bp, Artificial Sequence
  Synthetic polynucleotide encoding artificial human antibody VH domain
gaggtgcaactggtggagtctgggggaggcttagtacagccgggggggtccctaagactctcctgcacaacttctggattccttctcagttcctattacatgaactgggtccgccagtctccagggaaggggctggaatggatttcatacattagtggcagtggtaagaacatatattacgcagactctgtgaagggccgcttcaccatttacagagacagcgccaagaagtcagtgtatttacaaatgaacagcctgagagccgaggacacgggtctctattattgtgtcagaggacttgatattgactattggggccagggaaccgtggtcaccgtctcctca

SEQ ID NO: 8391 - DNA, 357 bp, Artificial Sequence
  Synthetic polynucleotide encoding artificial human antibody VH domain
caggtgcagttgctggagtcggggggaggcgtggttcagcctggggggtccttgagactctcctgtgcagcctctggattcagcttcaataattatgttgtccactgggtccgccagcctccaggcaagggactggagtgggtctcagttatttcatacgaaggaagaaataaatattatacaggctccgtgaagggccgattcaccatctccagggacaattccaacaacaccgttcatctgcaaatggacagcctgacacttcacgacacggctgtctacttctgtgtgagaggggagactttttggagtggcctagactactggggtcagggaaccctggtcaccgtctcctca

SEQ ID NO: 8392 - DNA, 357 bp, Artificial Sequence
  Synthetic polynucleotide encoding artificial human antibody VH domain
caaatgcacctggtgcagtcggggcctgaggtgaagaagcctggggcctcagtgaaggtctcctgcgaggcctctggattcaccttcagcaactccgttgtgcattgggtgcgacaggctcgtggacaacgccttgagtggatgggatggatcgtcgttggcagcggtaacacagactatgcacagaaattccaggacagagttactattaccagggacctgtccacaaaaactgcccacatggaattgaccagcctgagatccgaagacacggccctgtattactgtgtggcggggatgttagtggaaacgacgtttgactattggggccggggaaccctggtcaccgtctcctca

SEQ ID NO: 8393 - DNA, 369 bp, Artificial Sequence
  Synthetic polynucleotide encoding artificial human antibody VH domain
gaggtgcaactgttggagtctgggggaggcttggtacagccgggggggtccctgagactctcctgtgcagcctctggattcacctttagtaattatgccatgagctgggtccgccaggctccagggaaggggctggagtgggtgtcaggtcttattgagaatggtgtcgacagatactacgcagactccgtgaggggccggttcaccatctccagagacaattccaggaacaccctgtatctacaaatgaacagcctgaaagtcgaggacacggccctgtattactgtgtgaaagattatactgtgaaaacactggccgaacccatgtttgagttctggggccagggaaccctggtcaccgtctcctca

SEQ ID NO: 8394 - DNA, 357 bp, Artificial Sequence
  Synthetic polynucleotide encoding artificial human antibody VH domain
gaagtgcagctggtggagtctgggggaggcatgctacagcctggcaggtccctgagactctcctgtgcagcctctggattccagtttgaagctttcgccatgcactgggtccgacaagctccagggaagggtctggagtgggtctcaggcattagttggaatagtggtaccaaaggatatgcggactctgtgaggggccgattcaccatctccagagacaacgccaagaacttcctgtatttagacatcgaaactctgagacctgaggacacggccttctattactgtgtaaaagataacagtgggtggtactactttgacaactggggccagggaaccctggtcaccgtctcctca

SEQ ID NO: 8395 - DNA, 363 bp, Artificial Sequence
  Synthetic polynucleotide encoding artificial human antibody VH domain
gaagtgctgctggtggagtctgggggaggcttagtacaacctggcaggtccctgagactctcctgtggagcctctggattcagttttcatgattatgccatgcactgggtccggcaacgtccagggaagggcctcgagtgggtctcaggtattaggtggaataatggtcccatagggtatgtggactctgtgaagggccgattcgtcgtctccagagacaacgccgagaactccctttatctggaaatgaacagtctgaaagttgaggacacggccatatatttttgtgcaaaagccttttattctggtgcgggggtcggcatggacgtctggggccaggggatcgcggtcatcgtctcctca

SEQ ID NO: 8396 - DNA, 366 bp, Artificial Sequence
  Synthetic polynucleotide encoding artificial human antibody VH domain
gaggtgcagctgttggagtctgggggaggcttggtacagccgggggggtccctgagactctcctgtgcagcctctggactcacctttaggaactatgccatgagctggttccgccaggctccagggaaggggctggagtgggtctcaagtattactggtgacggaattggtacatactacgcagagtccgtgaagggccgggtcaccatctccagagacaattccaggaccacactgtatctgcaaatgaacagcctgagagccgatgacacggccgtatattactgtgggaaagatcctaatggtgactacgttttggggtcctccgactactggggccagggaaccctggtcaccgtttcctca

SEQ ID NO: 8397 - DNA, 384 bp, Artificial Sequence
  Synthetic polynucleotide encoding artificial human antibody VH domain
caggtgcagctacagcagtggggcgcaggactgttgaagccttcggagaccctgtccctcacctgcgctgtctatggtgggtccttcagtggttactactggagctggatccgccagcccccagggaaggggctggagtggattggggaaatcaatcatagtggaagcaccaactacaacccgtccctcaagagtcgagtcaccatatcagtagacacgtccaagaaccagttctccctgaagctgagctctgtgaccgccgcggacacggctgtgtattactgtgcgagaggcgttcgaagagcagcagctggttttctgttaccggtctactactacggtatggacgtctggggccaagggaccacggtcaccgtctcctca

SEQ ID NO: 8398 - DNA, 372 bp, Artificial Sequence
  Synthetic polynucleotide encoding artificial human antibody VH domain
gaggtgcagttggtggagtctgggggaggcttggtacagcctggggggtccctgagactctcctgtgcagcctctggattcaccttcaagagtaatgatatgagttgggtccgccaggctcccgggaaggggctggagtgggtttcatacattagtggtagtggtactaccatatactacgcagactctgtgaagggccgattcaccatctccagagacaacgccaaggactcactgtatctgcaaatgaacagcctgagagccgacgacacggctgtgtactactgtgcgacagtttttggtagcagtggctgggtttggaggtactattttgattactggggccagggaaccctggtcaccgtctcctca

SEQ ID NO: 8399 - DNA, 381 bp, Artificial Sequence
  Synthetic polynucleotide encoding artificial human antibody VH domain
caggttcaggtggtgcagtctggaggtgaggtgaagaagcctggggcctcagtgaaggtctcctgcaaggcttctggttacacctttatcagctatggtatcagttgggtgcgacaggcccctggacaagggctggagtggatgggatggatcagtatttataatggtaacacaaactatgcacagaaattccagggcagagtcactatgaccacagacacatccacgactacagcctacatggagctgaggggcctgagatctgacgacacggccacgtattattgttcgacctcggacccatcacgaaattttgactggtttagttatgacttcggcatgcacgtctggggccaagggaccacggtcaccgtctcctca

SEQ ID NO: 8400 - DNA, 378 bp, Artificial Sequence
  Synthetic polynucleotide encoding artificial human antibody VH domain
caggtgcagctgcaggagtcgggcccaggactggtgaagccttcggagaccctgtccctcacctgcactgtctctggtggctccatcagtagttactactggagctggatccggcagcccccagggaagggactggagtggattgggtatatctattacagtgggagcaccaactacaacccctccctcaagagtcgagtcaccatatcagtagacacgtccaagaaccagttctccctgaagctgagctctgtgaccgctgcggacacggccgtgtattactgtgcgagagccggcgattattacgatattttgactggttattataaagcctactttgactactggggccagggaaccctggtcaccgtctcctca

SEQ ID NO: 8401 - DNA, 351 bp, Artificial Sequence
  Synthetic polynucleotide encoding artificial human antibody VH domain
gaggtgcagctgttggagtctgggggaggcttagtacagcctggggggtccctgagactctcctgtgcagcctctggattcacctttagaaactttgccatgatctgggtccgccgggctccagggaaggggctggagtgggtctcaactattgatggccctaccaccaacacacactacgcagactccgtgaagggccggttcaccatctccagagacaattccaagaacacagtgtatctgcaaatggacaccctgagagccgaagacacggccgtatattactgttcaacctggctcgtatcccattttgactactggggccagggaaccctggtcaccgtcccctca

SEQ ID NO: 8402 - DNA, 357 bp, Artificial Sequence
  Synthetic polynucleotide encoding artificial human antibody VH domain
gaggtgcaactggtggagtctgggggaggcctggtcaagactggggggtccctgagactctcctgtgcagcctctggattcaccttcagtggcttttccatgatctgggtccgccaggctccagggaagggtctggagtgggtctcgttcatcacgagtaatagtaagtacatatattatggagactcagtgaagggtcgattcaccatctccagagataacgccaagaactcactttttctgcaaatgaatagcctgagagtcgaagacacggctgtgtattactgtgtgagagtttttcagaagcagtcccttcctgcgttttggggccagggagccctggtcaccgtctcgtca

SEQ ID NO: 8403 - DNA, 369 bp, Artificial Sequence
  Synthetic polynucleotide encoding artificial human antibody VH domain
caggtgcaactggtggagtcggggggaggcgtggtccggcctggggcgtccctcagactctcctgtgcagcctctggattcttattcaaggtctactctatgaactgggtccgccaggctccaggcaaggggctggagtgggtggcaggtatctcatatgctggatctggtggaagtgatgagtactatgcaaactccgtgaagggccgattctccatctcgagaaacgatgccaagagcacggtgactctacaaatggacagtctgagagtagaggactcgggtctctactactgtgtgagagaccgcggcagcacctggtggttctttgactcctggggccagggatccctggtcaccgtctcctca

SEQ ID NO: 8404 - DNA, 378 bp, Artificial Sequence
  Synthetic polynucleotide encoding artificial human antibody VH domain
gaggtgcagctggtggagtctgggggaggcttggtacagcctggagggtccctgagactctcctgtgcagcctctggattcaccttcagtagttatgaaatgaactgggtccgccaggctccagggaaggggctggagtgggtttcatacattagtagtagtggtagtaccatatactacgcagactctgtgaagggccgattcaccatctccagagacaacgccaagaactcactgtatctgcaaatgaacagcctgagagccgaggacacggctgtttattactgtgcgagagattttagttacgtagccctagtggttatccgacactacggtatggacgtctggggccaagggaccacggtcaccgtctcctca

SEQ ID NO: 8405 - DNA, 378 bp, Artificial Sequence
  Synthetic polynucleotide encoding artificial human antibody VH domain
gaggtgcagctgttggaatcggggggaggctcggtagagcctggggggtccctgagactctcctgcgcaggctctggattcacatttaacaactatgccatgagctgggtccgccaggctccagggaaggggctggagtgggtctcaattatttacagcggtggtggtggcacatactatgcggactccgtgaagggccggttcaccgtctccagagatgattccaagagcacggtgtatttacaaatgaacagcctgacagccgaggattcggccgtatattactgtgcgtccgatgatcgaacgacttactctgaaaatagtggtcattctaactttgactactggggcctgggaaccctggccaccgtctcctca

SEQ ID NO: 8406 - DNA, 363 bp, Artificial Sequence
  Synthetic polynucleotide encoding artificial human antibody VH domain
gaggtgcacctggtggagtccgggggaggcttggtacagcctggagggtccctgagactctcctgtgtaggctctggattcactttcaacatttatgaaatgaactgggtccgccaggctccagggaaggggccggagtgggtttcatacattaacagtggtgctgataagatatattacgcagactctgtgaagggccgcttcaccatctccagagacaacgccaggaattcactgtatctgcagatggacagtctgagagtcgaggacacggctgtttattactgtgccagtcgccctccgcagtcggaagtaattgtctttgactactggggcccgggaatcctggtcaccgtctcctca

SEQ ID NO: 8407 - DNA, 366 bp, Artificial Sequence
  Synthetic polynucleotide encoding artificial human antibody VH domain
caggtgcacctggtggagtctgggggaggcgtggtccagcctggggggtccctgagactctcctgtgcagtgtctgaattcacgttcggaaattccgttatacactgggtccgccaggctccaggcaaggggctggagtgggtggcggctatgtcacatgatggtttcagtaaatattatgcagactccgtgaagggccgattcaccatctccagagacagttccgccaagacggtgaatgtgcagatgaacagactgacagctgaggacacggctatgtattattgtgcgagagaaggaggaactagtggaaagtgcggctactttgactactggggccagggaaccctggtcaccgtctcctca

SEQ ID NO: 8408 - DNA, 366 bp, Artificial Sequence
  Synthetic polynucleotide encoding artificial human antibody VH domain
caggtgcaactacagcagtggggcgcaggactgttgaagccttcggagaccctgtccctcacatgcgctgtctatggtgggtccttcagtggttaccactggagctggatccgccagtccccagggaagggactggagtggattggagacatcaatcatagtggaagcaccacctacaacccgtccctcaagagtcgagtcactatatcactagacacgtccaagaatcagttctccctgaacctgggctctctgaccgccgcggacacggctgtgtattactgtacgagaggacctttttcatcggtgactgagtttgcctggttcgacccctggggccagggaacccaggtcaccgtctcctca

SEQ ID NO: 8409 - DNA, 363 bp, Artificial Sequence
  Synthetic polynucleotide encoding artificial human antibody VH domain
caggttcaattggaacagtctcgatctaaattacagaggcctcctgggtcgtcagtgacggtctcctgtcaggccactggattcatccttcggaggcttggtgtcacctgggtgcgacaggcccccggtcagggacttgagtggatggggtgggccggttttagcaatgacgacagaaagtatggagaaaatttcatgggcagaatcagaatgaccttagacgtgtccgcaaacatagcctacttggagatcaacagcctgaggtccgacgacacggccctctatttttgtgccagctccatgattcctcctcacacccgcatggacgtctggggccaggggaccaccgtcatcgtctcctca

SEQ ID NO: 8410 - DNA, 378 bp, Artificial Sequence
  Synthetic polynucleotide encoding artificial human antibody VH domain
gaggtgcagctgttggaatctgggggaggcttggtacagcctggggggtccctgagactctcctgtgcagcctccggactcacctttgccagctatgccatgagctgggcccgccagggtccagggaaggggctggagtgggtctcaattatttatagcagtgatggtagcacatactatgcagactccgtgcagggccggttcaccatctccagagataattccaagaacaccctatatctgcaaatgaacagcctgagagccgaggacacggccgtatatttctgtgcgtccgatgatcgaacaaattactttgtcaatagtggttattctaactttgactactggggccagggaaccctggtcaccgtctcctca

SEQ ID NO: 8411 - DNA, 360 bp, Artificial Sequence
  Synthetic polynucleotide encoding artificial human antibody VH domain
gaggtgcagctggtggagtctgggggaggcctggtcaagcctggggggtccctgagactctcctgtgcagcctctggattcaccttcagtaactataacatgaactgggtccgccaggctccagggaaggggctggagtgggtctcatccattagtagtagtagtagttacatatactacgcagactcagtgaagggccgattcaccatctccagagacaacgccaagaactcactgtatctgcaaatgaacagcctgagagccgaggacacggctgtgtattactgtgcgagaggccgagatagtagtggttattactactgctactggggccagggaaccctggtcaccgtctcctca

SEQ ID NO: 8412 - DNA, 378 bp, Artificial Sequence
  Synthetic polynucleotide encoding artificial human antibody VH domain
caggtgcaactggtggagtctgggggcggcgtggtccagcctgggaggtccctgagactctcctgtacagcctctggattcaccttcaatacctatggcatgcactgggtccgccagactccaggcaagggactggagtgggtgggcgttatcttctatgatggaactgatggattttatggagactccgtgaagggccgattcaccatttccagagacaactccaagaacacgttgtatctgcaaatgaacaacctgagacttgaagatacggctgtctactactgtgcgaaagattcgtcacctacaagggggggagttatcgtccccactcctttcgactcttggggccagggaaccctggtcaccgtctcctca

SEQ ID NO: 8413 - DNA, 366 bp, Artificial Sequence
  Synthetic polynucleotide encoding artificial human antibody VH domain
gaggtgcaattggtggagtctgggggaggcttcgtacagactggagggtccctgagactctcctgtgcagcctctggattcaccttcaaaagttatgaaatgaactgggtccgccaggctccagggaaggggctggagtgggtttcatatgtcagtagtaatggtgataccatctactacgcagactctgtgaagggccgattcaccgtctccagagacaacgccaagaactcactgtatctgcagatgaacagcctgagagccgaggacacggctgtttattactgtgcgagagattataaattcgcggactttttttatggtatggacgtctggggccaagggaccacggtcaccgtctcctca

SEQ ID NO: 8414 - DNA, 372 bp, Artificial Sequence
  Synthetic polynucleotide encoding artificial human antibody VH domain
caggtgcagctggtgcagtctggggctgaggtgaagaagcctggggcctcagtgaaggtttcctgcaaggcatctggttacaccttcagcatctactatatgcactgggtgcgacaggcccctggacaagggcttgagtggatgggaataatcaaccctggtgatggtagaaccacctacgcacagaagttccagggcagagtcaccctgaccagggacacgtccacaagcacagtctacatggaactgagcagcctgagatctggtgacacggccgtgtattactgtgcgagagggcctcgtgccaactttcggggagttatgtttgcttttgatatctggggccaagggacaaaggtcaccgtctcttca

SEQ ID NO: 8415 - DNA, 399 bp, Artificial Sequence
  Synthetic polynucleotide encoding artificial human antibody VH domain
gaggtgcaactggtggagtctgggggaggcctggtcaagcctggggggtccctgagactctcctgtgcagcctctggattcaccttccgaggttatgccatgaactgggtccgccaggctccagggaaggggctggagtgggtctcatccattagtgctagtagtacttacgtctactacgcagactcagtgaagggccgattcaccatttccagagacaacgccaagaactcgctgtatctgcaaatgaacagcctgagagccgaagacacggctgtgtacaaatgtgcgagaggggggccgataggttcggagagttatcacatgaaatcaaatgggggcctttactactacaatgtggacgtctggggccaagggaccacggtcaccgtctcgtca

SEQ ID NO: 8416 - DNA, 375 bp, Artificial Sequence
  Synthetic polynucleotide encoding artificial human antibody VH domain
gaggtgcagttgttgcaatctgggggaggcttcgtacagccgggggggtccctgcgactctcctgtgcagcttctggattcaccttcaacgaccatgccattcactgggtccgccagattccggggaaggggctggagtgggtctcaacagttagtcccagtggtgtgaccaaattctacgcagcgtccgtggagggccgattcaccatctccagagacaattccaagaacacggtgtctctgcagataaatatcctgagagtcgaagacacggccatttattactgtgcgagagaatttaggaccggaggtccgtgggtccggcagctagccctagaccactggggccagggaaccctggtaaacgcctcctca

SEQ ID NO: 8417 - DNA, 378 bp, Artificial Sequence
  Synthetic polynucleotide encoding artificial human antibody VH domain
gaggtgcagctgttggaatcggggggaggctcggtagagcctggggggtccctgagactctcctgcgcaggctctggattcacatttaacaactatgccatgagctgggtccgccaggctccagggaaggggctggagtgggtctcaattatttacagcggtggtggtggcacatactatgcggactccgtgaagggccggttcaccgtctccagagatgactccaagagcacggtgtatctgcaaatgaacagcctgacagccgaggattcggccgtatattactgtgcgtccgatgatcgaacgacttactctgaacatagtggtcattctaactttgactactggggccagggaaccctggccaccgtctcctca

SEQ ID NO: 8418 - DNA, 348 bp, Artificial Sequence
  Synthetic polynucleotide encoding artificial human antibody VH domain
gaggtgcagctggtggagtctgggggaggcttggtaaagcctggggggtcccttagactctcgtgtgcaacgtctggatttagtttcagtaattcctggatgaattgggtccgccaggctccagggaaggggctggagtgggttggccgtgttaaaaggagaactgatggtgggacaatagactacgctgcattcgcaaaaggcagattcaccatttcaagagacgattcagaaagcactctgtatctgcaaatgagcggcctgaaaatcgaggacacagccgtttattactgtgccacacgggagttactattgtggggccagggaaccctggtcagcgtctcctca

SEQ ID NO: 8419 - DNA, 363 bp, Artificial Sequence
  Synthetic polynucleotide encoding artificial human antibody VH domain
caggtgcagctggtgcagtctgggggaggcgtggtcaaacctggagggtccctgagactctcctgtgcagcctctgggttcatcttcagtgactactacatgagctggatccgccaggctccagggaagggactggagtgggtttcattgattagtagtagtggtagtatcatatcctacgcagactctgtgaagggccgattcaccatctccagggacaacgccaagaactcactgtatctgcaaatgaacagcctgagagccgaggacacggctgtgtattactgtgcgagagatagacatattgtggtggtgaccggcgttgactcctggggccagggaaccctggtcaccgtctcctca

SEQ ID NO: 8420 - DNA, 378 bp, Artificial Sequence
  Synthetic polynucleotide encoding artificial human antibody VH domain
gaggtgcagctgttggaatctgggggaggcttggtacagccgggggggtccctgagactctcctgtgcagcctctgaattcacctttagcaactatgtcatgagctgggtccgccaggctccagggaaggggctggagtgggtctcaatattatatagcgatgatagtagcacatactatgcagactccgtgaggggccggttcaccatctccagcgatagtttcctaaacacactatatctgcagatggacagcctgagagccgaggacacggccgtatatttctgtgcgtccgatgatcgaacgaattactttgataacagtggttattctaactttgactactggggccagggaaccctggtcaccgtctcctca

SEQ ID NO: 8421 - DNA, 378 bp, Artificial Sequence
  Synthetic polynucleotide encoding artificial human antibody VH domain
gaggtgcagctgttggagtctgggggaggcttggtacagcctggggggtccctgagactctcctgtgcagcctctggactcacctttagcagctatgccatgagctgggtccgccaggctccagggaaggggctggagtgggtctcaattatttatagcggtgatagtagcacatactatgcagactccgtgcagggccggttcaccatctccagagataattccaagaacacgctatatctgcaaatgaacagcctgagagccgaggacacggccgtatatttctgtgcgtccgatgatcgaacaaattactatgataatagtggttattctaactttgactactggggccagggaaccctggtcaccgtctcctca

SEQ ID NO: 8422 - DNA, 384 bp, Artificial Sequence
  Synthetic polynucleotide encoding artificial human antibody VH domain
caggtcaccttgagggagtctggtcctgcgctggtgaaacccacacagaccctcacactgacctgcaccttctctgggttctcactcagcactagaggaatgtctgtgacctggatccgtcagcccccagggaaggccctggagtggcttgcacgcattgattgggatgatgataaatactatagcacatctctgaagaccaggctcaccatctccaaggacacctccaaaaacctggtagttcttacaatgactaacatggaccccgtggacacagccacgtactactgtgcacggctcgtgggaacgtgtactactgtcagttgcttcagacggggctggttcgactcctggggccagggaaccccggtcaccgtctcctca

SEQ ID NO: 8423 - DNA, 360 bp, Artificial Sequence
  Synthetic polynucleotide encoding artificial human antibody VH domain
caggtgcacctggtgcaatctgggtctgagttgaagaggcctgggggctcagtgaagatttcctgcaaggcttctggatacaccttcaaaaattatataatgaattgggtacgacaggtccctggacaagggcttgagtggatgggatggaccagctcctatactgggaacccaacatatgcccagggcttcacaggacgctttgtcttctccttggacacctctgacagcacggcatatctgcagattttcagcctaaaggctgacgacactgccgtttatttctgtgccaaagcgggggatgccagcagctctcactttgacctctggggccagggaaccctggtcaccgtctcctca

SEQ ID NO: 8424 - DNA, 381 bp, Artificial Sequence
  Synthetic polynucleotide encoding artificial human antibody VH domain
caggtgcagctgcaggagtcgggcccaggactggtgaagccttcggagaccctgtccctcacctgcactgtctctggtggttcattcaatagttactactggagctggatccggcagcccccagggaagggactggagtggattggagatttttataatagtgggagcaccaactacaacccctccctcaagagtcgagtcaccatttcaggagacacgtccaagaaccaattctccctgaagctgacctctgtgaccgctgcggacacggccatatattactgtgcgacagccccttatagtgggccctactacgctgggggttgggggccatactactttgattcgtggggccagggaaccctggtcaccgtctcctca

SEQ ID NO: 8425 - DNA, 375 bp, Artificial Sequence
  Synthetic polynucleotide encoding artificial human antibody VH domain
gaggtgcagctgttggagtctgggggagagttggtacagactgggcagtccctgagactctcctgtgcagcctctggattcaactttaatctctatgccatgagctgggtccgccaggctccagggaaggggctggagtgggtctcagggattagtggtagtggttatacgtcataccacgcagactccgtgatgggccggttcaccatctccagagacaattccaagaacacgctgtatctgcagatgaacagcctgagagacgacgacacggccgtttattactgtgcgaaagatcgcggccttaccggacgctactactggtggtactactttgactcctggggccagggaacccaggtcaccgtctcctca

SEQ ID NO: 8426 - DNA, 363 bp, Artificial Sequence
  Synthetic polynucleotide encoding artificial human antibody VH domain
caggtgcagctggtggagtctgggggaggcgtggtccagcccgggaggtccctgagactctcctgtacagtctcaggattccccttcggtaacattattactcactgggtccgccaggccccaggcaaggggctggagtgggtgtcagcgatatcacacgatgatagtaaatactatatagactccgtgaagggccgattcaccatctccagagacaattcccggaacacagtgaatctgcaaatggacagcctgagacctgaggacacggctgtatattattgtgcgagagagggggaaagcagtggtcgggccggaatttttgatgtttggggccaagggacaggggtcaccgtctcttca

SEQ ID NO: 8427 - DNA, 369 bp, Artificial Sequence
  Synthetic polynucleotide encoding artificial human antibody VH domain
caggtgcagctggtggagtctgggggaggcgtggtccagcctgggaggtccctgagactctcctgtgcagcctctggattcaccttcagtagctatgctatgcactgggtccgccaggctccaggcaaggggctggagtgggtggcagttatatcatatgatggaagcaataaatactacgcagactccgtgaagggccgattcaccatctccagagacaattccaagaacacgctgtatctgcaaatgaacagcctgagagctgaggacacggctgtgtattactgtgcgagagatctcgcgtcatggttcggggagttaccctcttttgggatctggggccaagggacaatggtcaccgtctcttca

SEQ ID NO: 8428 - DNA, 369 bp, Artificial Sequence
  Synthetic polynucleotide encoding artificial human antibody VH domain
cagatgcagctggctcagtctgggtctgaggtgaagaagcctgggtcctcagtgaagatctcctgtacggcttccggatggacctttacgtacccctatctccactgggtgcgacaggcccccggacaagcgcttgagtggatgggatggatcacaccttacaatggtaacaccaactatgctcagacattccagggcagagtcaccatcaccagggccgcgtctctgcagacaacctacctggaggtgcgcagtttgacctttgaagacacagccatgtattactgtgcaagatccaatttggacgcctctgttagcactgagtcttttgattcctggggccagggaaccctggtcaccgtctcctca

SEQ ID NO: 8429 - DNA, 357 bp, Artificial Sequence
  Synthetic polynucleotide encoding artificial human antibody VH domain
caggtgcacctgcaggagtcgggcccaggactggtgaagccttcggagaccctgtccctcacctgcactgtctctggtggctccctcagtagttactactggagctggatccggcagcccccagggaagggactggagtgggttggatatatctattacagtgggagcaccaactacaacccctccctcgagagtcgagtcaccatatcagtagacacgtccaagaaccacttctccctgaagctgaactctgtgaccgccgcagacacggccgtctattactgtgcgagacagtctaggggtttagcagcagctgctgactactggggccagggaaccctggtcaccgtctcctca

SEQ ID NO: 8430 - DNA, 372 bp, Artificial Sequence
  Synthetic polynucleotide encoding artificial human antibody VH domain
gaggtgctcctggtggagtctgggggaggcttggtccagcctggagggtccctgagactctcctgtgcagtttcaggattcaccctgagcgaccactacatggactgggtccgccaggctccagggaaggggctggagtgggttggccgttcaagaaacaaaggtaggagttacaccacagaatacgccgcgtctgtggaaggccgattcagcatctcaagagatgattctgacaactcactttatctgcaaatgaacagcctgaaatccgaggacacggccgtgtattactgtggtagtgctagagttgaaagtggtggtcactatttccttgattactggggccagggagccctggtcaccgtctcctca

SEQ ID NO: 8431 - DNA, 366 bp, Artificial Sequence
  Synthetic polynucleotide encoding artificial human antibody VH domain
gaagtgcagctggtggagtctgggggaggcttggtacagcctggcaggtccctgagactctcctgtgcagcctctggattcacctttgatgattatgccatgcattgggtccggcaagctccagggaagggcctggagtgggtctcaggtattagttggaatagtaatatcataggctatgcggactctgtgaagggccgattcaccatctccagagacaacgccaagaactccctgtctctgcaaatgctcagtctgagagctgaggacacggccttatattactgtgcaaaaggccaatataccagcatttggtacgggggcattgactcctggggccagggaaccctggtcaccgtctcctca

SEQ ID NO: 8432 - DNA, 378 bp, Artificial Sequence
  Synthetic polynucleotide encoding artificial human antibody VH domain
gaggtgcagctgttggaatctgggggaggcttggtacagcctggggggtccctgagactctcctgtgcagcctctggactcacctttagcagctatgccatgagctgggtccgccaggctccagggaaggggctggagtgggtctcaattatttatagcggtgatagtagtacacactatgcagactccgtgaagggccggttcaccatctccagagataattccaagaacacgctatatctgcaaatgaacagcctgagagccgacgacacggccgtatatttctgtgcgtccgatgatcgaactaattactattataatagtggttattctaactttgactactggggccagggaaccctggtcaccgtctcctca

SEQ ID NO: 8433 - DNA, 378 bp, Artificial Sequence
  Synthetic polynucleotide encoding artificial human antibody VH domain
gaggtgcagttgttggaatctgggggaggcttggtacagcctggggggtccctgagactctcctgtgcagcctctggactcacctttagcaaatttgccatgagctgggtccgccgggcccctgggaaggggctggaatgggtctcaattctctatagcgatgatggtgcgacataccacgcagactccgtgaagggccggttcaccatctccagagataattccaagaacacgatatatctgcaaatgaacagcctgcgagtcgatgacacgggcgtgtatttctgtgcggccgatgatcgaaggacttactatgagaacagtggttatgctaactttgactattggggccagggaaccctggtcaccgtctcctca

SEQ ID NO: 8434 - DNA, 354 bp, Artificial Sequence
  Synthetic polynucleotide encoding artificial human antibody VH domain
gaggtgcaggtagtggagtctgggggaggcttagtacagccagggcggtccctcagactctcctgcacaacttctggattcaactttggtgaagatgctatgagttggttccgccaggctccagggaaggggctggagtgggtcagtttcattaggagcaaagcttttgattggacaacagaatatgccgcgtctgtgagaggcagattcaccatctcaagagatgattccaaaagcatcgtctatttacaaatgaacagcctgaaaaccgaggacacaggcgtgtattactgtgctcgaagggccctctcacctagttcctggggccagggaaccctggtcaccgtctcctca

SEQ ID NO: 8435 - DNA, 360 bp, Artificial Sequence
  Synthetic polynucleotide encoding artificial human antibody VH domain
caggtgcacctgcaggagtcgggcccaggactggtgaagccttcggagaccctgtcgctcacctgcactgtctctggtggctccgtcgatggttacttctggagctggatccggcagccccccgggaagggactggaatggattgggtatatctattacagtgggagcaccaactacaacccctccctcaacagtcgagtcaccatatcggtagacaggtcgaacaaccacttctccctgaaactgaactcgctgaccgccgcagacacggccgtatattactgtacgagacatctgggacgccaacgagactacggttgggacgcctggggcctagggaccccggtcaccgtctcctca

SEQ ID NO: 8436 - DNA, 363 bp, Artificial Sequence
  Synthetic polynucleotide encoding artificial human antibody VH domain
gaagtgcagctggtggagtctgggggaggcttggtacagcctggcaggtccctgagactctcctgtgcagcctctggattcgcctttgatgattctgccatgcactgggtccggcaagctccagggaagggcctggagtgggtgtcaggtattacttggaacagtggtaatataggctatgcggactctgtgaagggccgattcaccatctccagagacaatgccaagaattccctatatctgcacatgaacagcgtgagagctgaggacacggccctgtattactgtgtaaaagatagaggagtttcatatcatctctactttgactactggggccagggaaccctggtcaccgtctcctca

SEQ ID NO: 8437 - DNA, 381 bp, Artificial Sequence
  Synthetic polynucleotide encoding artificial human antibody VH domain
cagctgcagctgcaggagtcgggcccaggactggtgaagccttcggagaccctgtccctcacctgcactgtctctggtggctccatcagcagtagtagttactactggggctggatccgccagcccccagggaaggggctggagtggattgggagtatctattatagtgggagcacctactacaacccgtccctcaagagtcgagtcaccatatcagtagacacgtccaagaaccagttctccctgaagctgagctctgtgaccgccgcggacacggccgtgtattactgtgcgggaggcaagaagcagtggctggtccttaatagggaggtccactggttcgacccctggggccagggaaccctggtcaccgtctcctca

SEQ ID NO: 8438 - DNA, 366 bp, Artificial Sequence
  Synthetic polynucleotide encoding artificial human antibody VH domain
caggtgcacctggtggagtctgggggaggcgtggtccagccgggggggtccctgagactctcctgtgcagtctctcaattcacaatccagaattccattatacactgggtccgccaggctccaggcaaggggctggagtgggtggcggctatgtcacatgatggcatcagtaaatattacgcagactccgtgaagggccgattaaccatctccagagacagttccgccaaaacggtggatgtgcatatggacagcctgacacctgaggacacggccatctattactgtgcgacagagggggggagcagtggaaagtgcggctactttgactactggggccagggaaccctggtcaccgtctcctca

SEQ ID NO: 8439 - DNA, 354 bp, Artificial Sequence
  Synthetic polynucleotide encoding artificial human antibody VH domain
caggtgcagctgcaggagtcgggcccaggactggtgaagccttcggagaccctgtccctcacctgcactgtctctggtggctccatcagtagttactactggagctggatccggcagcccccagggaagggactggagtggattgggtatatctattatagtgggaccaccaactacaacccctccctcaagagtcgagtcaccatttcagtagacacgtccaagaaccagttctccctgaagctgagctctgtgaccgccgcagacacggccgtgtattactgtgcgagatcgtatagtaatggccaatcccctggctactggggccagggaaccctggtcaccgtctcctca

SEQ ID NO: 8440 - DNA, 360 bp, Artificial Sequence
  Synthetic polynucleotide encoding artificial human antibody VH domain
caggtgcaactggtgcaatctgggcctgaggtaaagaggcctggggcctcagtgaaggtctcctgcaagtcttccggataccccttcaccggctattatattgactgggtgcgacaggcccctggccacggccttgagtggatggggcggatcaaccctaatggtggtgacacaaattatgcagagaagtttcggggcttcgtcaccatgaccagggacacgtccatcaatacggcctacctggagttggccggcttgacatctgacgacacggccatgtattattgtgcgagacaccggggtggctacgattcgcgcctaccctactggggccagggaaccctggtcaccgtctcctca

SEQ ID NO: 8441 - DNA, 363 bp, Artificial Sequence
  Synthetic polynucleotide encoding artificial human antibody VH domain
caggtgcagctggtggagtctgggggaggcgtggtccagcctgggaggtccctgagactctcctgtgcagcctctggattcaccttcagtagctatggcatgcactgggtccgccaggctccaggcaaggggctggagtgggtggtacttatatcatatgatggaagtaataaatactatgcagactccgtgaagggccgattcaccatctccagagacaattccaagaacacgctgtatctgcaaatgaacagcctgagacctgaggacacggctgtgtattactgtgctgctgggcacaaggggaactactactacggtatggacgtctggggccaagggaccacggtcaccgtctcctca

SEQ ID NO: 8442 - DNA, 375 bp, Artificial Sequence
  Synthetic polynucleotide encoding artificial human antibody VH domain
gaggtgcagctggtggagtctggggggggcctggtcaagcctggggagtccctgagactctcctgtgtagcctctggattcacctttagcggttatagtatgaactgggtccgccaggctccagggaaggggctggagtgggtctcatcccttagtcttagtagtgggaccccctactacgcagactcagtgaagggccgattcaccatctccagagacaacgccaagaacacactgtatctgcatatgagtagcctgagagccgaggacacggctctatattactgtgcgagagatctatatttctatgatgataatattggttattacgtacaggattactggggccagggagccctggtcaccgtctcctca

SEQ ID NO: 8443 - DNA, 366 bp, Artificial Sequence
  Synthetic polynucleotide encoding artificial human antibody VH domain
cagctgcagttgcaggagtcgggcccaggacgggtgaagccttcggagaccctgtccctcacctgcagtgtctctggtgactccatcaccaggagacattcctactgggcctggatccgtcagcccccaggaaaggggctggagtggcttggaagtttcgattatactgggagccccttctacaacccgtccctcaagagtcgcgtcaccatattcgcagacgggtccgagacgcagttctccctgaaggtgacctctgtgaccgccgctgacacggctgtttattattgtgcgcgacatctgaaaaaaagtggcatataccagtttgattattggggcccgggaaaccttgtcagcgtctcctca

SEQ ID NO: 8444 - DNA, 369 bp, Artificial Sequence
  Synthetic polynucleotide encoding artificial human antibody VH domain
gaggtgcagctggtggagtctggaggaggcttgatccagccgggggggtccctgagactctcctgtgcagcctctgggttcaccgtcagtagcagctacatgagttgggtccgccaggctccagggaaggggctggagtgggtctcaattatttatagcggtggtagtacatattacgcagactccgtgaagggccgattcaccatctccagagacaattccaagaacacgctctatcttcaaatcaacagcctgcgagacgaggacacggccatgtattactgtgcgagatcccgcggatatagtggctatcggggtggatattactttgagtactggggccggggagccctggtcaccgtctcctca

SEQ ID NO: 8445 - DNA, 351 bp, Artificial Sequence
  Synthetic polynucleotide encoding artificial human antibody VH domain
gaggtgcaggtgttgcagtcagggggaggcttggcacaacctggggggtccctgagactctcctgtgtagcctctggactcacctttagcggctttaccatgagctgggtccgccaccctccagggaaggggctggagtgggtctcagatattagtggaggcggtgtcacaaactacgcagattttgtgaggggccggttcatcatctccagagagaattccaagaacacgctctatctgcaaatgaacagcctgagagccgaggacacggccgtatattactgtgtccctcgctatactaaccattggtttgacaactggggccagggaaccctggtcaccgtctcctca

SEQ ID NO: 8446 - DNA, 369 bp, Artificial Sequence
  Synthetic polynucleotide encoding artificial human antibody VH domain
caggtgcagctggtgcagtctggggctgaggtgaagaagcctgggtcctccgtgaaggtctcctgcaaggcttctggaggcagcttcagtaactatgttatcaactgggtgcgacaggcccctggacaagggcttgagtggatgggagggatcatgcctatctttgggacaacaaactacgcacagaagttccagggcagactcacgattaccgcggacggatccacgaccacagcctacatggagctgggcagcctgagatctgaggacacggccgtttatttctgtgcgagagcattatacagtagtaactggttcaaggatgcctttgatatctggggccaagggacaaacgtcaccgtctcttca

SEQ ID NO: 8447 - DNA, 363 bp, Artificial Sequence
  Synthetic polynucleotide encoding artificial human antibody VH domain
gaggtgtcggtggtggagtctgggggaggcctggtcaagccgggggggtcgctgagactctcctgtacaacttctaagtttggcttcactacctctggcctgagctgggtccgccaggctcctgggaagggtctggagtgggtctcttccattgatgcaacttccacttacacatactacacagcgtctgcgagcggccgatttaccgtctccagagacaacaccaagaactcagtctttctgcagatgaattctctggcagacgaagacacgggtgtctatttttgtgcgagagatctggggaggaggttctattacggcatggacgtctggggccaggggatcacagtcaccgtctcctca

SEQ ID NO: 8448 - DNA, 369 bp, Artificial Sequence
  Synthetic polynucleotide encoding artificial human antibody VH domain
caggtgcaactggtggagtctgggggaggcgtggtccagcctggggggtccctgagactctcctgtgcagcctctggattcaccctcagtaactgtggcatgcactgggtccgccaggctccaggcaaggggctggagtgggtggcagtgatatcatatgatggaagtaaaaaatggtttgcagagtccgtgaagggccgattcaccatctccagagacaaatcccagaacacgctgtttctgcaaatgaacagcctgagacatgaggacacggctgtgtattactgtgcgaaagatctgtttcgagcatcgtcggagctgcgtgctttagactactggggccagggaatcctggtcaccgtctcctca

SEQ ID NO: 8449 - DNA, 363 bp, Artificial Sequence
  Synthetic polynucleotide encoding artificial human antibody VH domain
caggtccagcttgtgcagtctggggctgaactgaggcagcctggggcctcagtgaaggtttcctgtcaggcttctggatacaccttcactagacatgctatccattgggtgcgccaggcccccggacaaaggcttgagtggatgggatggatcatcactgacagtggtaacacaaaatattcacagaagttccagggcagggtcacctttactcgggacacatccgcgaccacggtctatatggaggcgagcagcctcacatctgaagacacggctgtgtattattgttcgaaagggggggctgccccgccggggaactggttcgaccgttggggccagggaaccctggtcaccgtctcctca

SEQ ID NO: 8450 - DNA, 372 bp, Artificial Sequence
  Synthetic polynucleotide encoding artificial human antibody VH domain
caggtggaactggtggagtcggggggaggaatggtcgcgcctgggacgtcactgagactctcctgtggagaccctgcattaaatttcacaaaagatgcgacgcagtgggtccgccaggctccaggcagggggctagagtggatgggagttattgcacatgatggacatcaaatatactatgcggagtccgtgaagggccgagtctccatttccagagacacttccggcgatagggtgtatttccaattgaacagtctgagacctgaagacacggctgtctatttttgtgcgaaagtccactggcacagcagcaatccttattggggcggtctcgacccctggggccaggggactctggtcaccgtgtcctca

SEQ ID NO: 8451 - DNA, 360 bp, Artificial Sequence
  Synthetic polynucleotide encoding artificial human antibody VH domain
caggtgcaactggtgcaatctgggtctgagttgaagaagcctggggcctcagtgaaggtttcctgcaaggcctctggatacagcttcactagctattctatgaattgggtgcgacaggcccctggacaggggcttgagtggatgggatggatcaaccccgacactgggtacgcaagatatgcccggggcttcacaggacgctttgtcttctccttggacacctctgtcagcacggcatatctgcagatcagcgacctaaaggctgacgacactgccgtgtattattgtgcgagaggaaatcgtataggtggaacaagcgggcactactggggccagggaacccgggtcaccgtctcctca

SEQ ID NO: 8452 - DNA, 351 bp, Artificial Sequence
  Synthetic polynucleotide encoding artificial human antibody VH domain
gaggtgcaggtgttgcagtcagggggaggcttggcacaacctggggggtccctgagactttcctgtgtagcctctggactcacctttagcggctttaccatgagttgggtccgccacgctccagggaagggactggagtgggtctcagatattagtggaagcggtgtcacagactacggaaacttcgtgaagggccggttcaccatctccagagagaattccaagaacacactctatctgcaaatgaacagcctgagagtcgacgacacggccgtatattactgtgtccctcgctatactagccattggtttgacaactggggccagggaaccttggtcaccgtctcctca

SEQ ID NO: 8453 - DNA, 366 bp, Artificial Sequence
  Synthetic polynucleotide encoding artificial human antibody VH domain
gaggtgcaggtggtggagtctggaggaggcttgattcagcctggggggtctctgagactctcctgtgcagtgtctggagtcaccgtcagtcaccactacgcggcctgggtccgccaggctccagggaaggggctggagtgggtctcagttatctacagcagtggtcccacatactacgcagagtccgtgaggggccgattcgacatctccagagacaattccaagaacacggtgtatcttcaaatgaacagcctgagcgccgaggacacggccgtctactactgtgcgataaaaactgcatattgtgggagtgactgctatcggtttgaccactggggccagggagctctggtcaccatctcctca

SEQ ID NO: 8454 - DNA, 357 bp, Artificial Sequence
  Synthetic polynucleotide encoding artificial human antibody VH domain
caggtccagcttgtgcagtctggggctgaggtgacgaagcctggggcctcagtgaaggtttcctgcaaggcttctggatacaccttcactaccagtcctttacattgggtgcgccaggcccccggacaaagccttgagtggatgggatggatcaacgctggcgatggtcacacacattattcacagacgttccgtgacagactcacctttacgagggacacatccgcgagcactgccttcatggagctgagcagcctgacatctgcagacacggctatatattactgtgcgcgagatggccactatggctgggcttttgatatctggggccaggggactatgatcaccgtctcttca

SEQ ID NO: 8455 - DNA, 351 bp, Artificial Sequence
  Synthetic polynucleotide encoding artificial human antibody VH domain
caggtgcaactggtgcagtctggggctgaggtggcgaggcctggggcctcagtgaggctttcctgcacgacgtctggacactcattcaactactactttatacactgggtgcgacaggcccctggacagggacttgagtggctggggagaatcaaccctagagatggcgacaccgacttcgcacagcatctccagggcagactcaccttgaccagggacacgtccacaagtacagtctacatgttgttgagcggcctgaaatctgacgacacggccgtctattattgtgcgcgtcaccgatcggtgactcttgacttctggggccagggagccctggtcaccgtctcctca

SEQ ID NO: 8456 - DNA, 363 bp, Artificial Sequence
  Synthetic polynucleotide encoding artificial human antibody VH domain
caggtccagcttgtgcagtctggggctgaggtgaagaagcctggggcctcagtgaagatttcctgcaaggcttctggatacaacttctttaatcatgccatacattgggtgcgccaggcccccggacaaaggcttgagtggatgggatggatcatcactggcaatggtgagacaaaatactcacagaacttccagggcgcagtcaccattaccagggacacatccgcgaccacggtctacatggagatgagcagcctgagttcaaaagacacggctatgtattattgtgcgagaggggggagtgccccgccggggaactggttcgccgcctggggccagggaactctggtcaccgtctcctca

SEQ ID NO: 8457 - DNA, 381 bp, Artificial Sequence
  Synthetic polynucleotide encoding artificial human antibody VH domain
gaggtgcaagtggtggagtctgggggaggcttggtgaagccgggggggtccctcagactctcctgcacagcctctggagtccctttcagtaacgcctggatgagttggttccgccaggctccaggaaaggggctggagtgggttggccgtattagaagtaaatctgatggtgagaaagtggaccacgttgcacccgtggaaggcagattcaccatctcaagagatgattcaagaaacacgttgtatctgcaaatgaacagcctgaaaaccgaggacacaggcgtctattattgtaccactgatcgcggtataagagtcggggagtatcactactacggcatggacgtctggggccaagggaccacggtcatcgtctcctca

SEQ ID NO: 8458 - DNA, 345 bp, Artificial Sequence
  Synthetic polynucleotide encoding artificial human antibody VH domain
gaggtgcggctggtggagtctggaggaggcttgatccagcctggggggtccctgagactctcctgtgcagcctctggcttcaccgtcactagcaactacatgagctgggtccgccaggctccagggaaggggctggagtgggtctcaattatttatagcggtggtaccacatactacgcagactccgtgaagggccgattcaccatctccagagacaattccaagaacacgctgtatcttcaaatgaacagcctgagagccgaggacacggccgtgtattactgtgcgagagatttttggagtggtctctactggggccagggaaccctggtcaccgtctcctca

SEQ ID NO: 8459 - DNA, 375 bp, Artificial Sequence
  Synthetic polynucleotide encoding artificial human antibody VH domain
cagatcaccttgaaggagtctggtcctgcgctggtgaaacccacacagaccctcacgctgacctgcaccttctctgggttctcactcacgactagtggagtgggtgtgggctggatccgtcagccccctggagaggccctggactggcttgcagtcatttattgggatgatgataagcgctacaacccatctctacagaacagactcaccctcaccaaggacacttccaacaacctggtggtcctcacaatgaccaacatggaccccgtggacacagccacatattactgtgcacacagactgatgagtgggagtccctggccttggggttactttgactactggggccagggaaggttggtcaccgtctcctca

SEQ ID NO: 8460 - DNA, 360 bp, Artificial Sequence
  Synthetic polynucleotide encoding artificial human antibody VH domain
caggtgcaactggtgcaatctgggtctgagttgaagaagcctggggcctcagtgaaggtttcctgcaaggcttccgggtacaccttcagtgactattctatgaattgggtgaggcaggcccctggacaggggcttgagtggatgggatggatcaaccccgacactgggtacacaagatatgcccggggcctcacaggacgctttgtcttctcgttggacacctctgtcagcaccgtatacttgcagatcagtgacctcagggctgacgacactgccgtatatttttgtgcgagaggagctcgtataggtggaacagccgggcactactggggccagggatcccgggtcaccgtctcctca

SEQ ID NO: 8461 - DNA, 354 bp, Artificial Sequence
  Synthetic polynucleotide encoding artificial human antibody VH domain
gaggtgtacctggtggagtctgggggaggcctggtcaagcctggggggtccctgagactctcctgtgcagcctctggattcaccttcagtagttatagcatgaactgggtccgccaggctccagggagggggctggagtgggtctcattcattactgctagtagtgcttatatagactacgcagactcactgaagggccgattcaccatctccagagacaacgccaagaactcactgtatctccaaatgcacaacctgagagccgaggacacggctgtctattactgtgcgagcgatccgagaacgacgttgtttgactactggggccagggaaccctggtcaccgtctcctca

SEQ ID NO: 8462 - DNA, 369 bp, Artificial Sequence
  Synthetic polynucleotide encoding artificial human antibody VH domain
gaggtgcaactggtgcagtctggaacagaggtgaaagagcccggggagtctctgagcctctcctgtaagacttctggatacacctttaccgattattggatcggctgggtgcgccagctgcccgggaaaggcctggagtggatggggatcatccatggtggtgactctgataccatatacagcccgtccctccaaggccacgtcaccctctcggccgacaagtccatcaccaccgcctacctgcactgtagcagcctgaaggcctccgacaccgccatgtattactgtgcgagacttcttccactggaggggccagctgcccccaactttgactactggggccagggaaccctggtcaccgtctcctca

SEQ ID NO: 8463 - DNA, 396 bp, Artificial Sequence
  Synthetic polynucleotide encoding artificial human antibody VH domain
caggtgcagttggtgcagtctggggctgaggtgaagacgcctggggcctcaatgaagatttcctgcagggcatctggatacaccttcaccaactactatattcactgggtgcgacaggcccctggacacgggcttgagtggatgggaataatcgaccctagtggtgggagcacaagccacccacagagcttccagggcagactcaccatgaccagggacacgtctacaaatacagtgtacttggagctgagcagtctgagatctgacgacacggccgtctattactgtgcgagatcgtccctctcctctcgtcttgccttgataatagtggttaattacccaaatttttactactttgactcctggggccagggatccctactcaccgtctcctca

SEQ ID NO: 8464 - DNA, 366 bp, Artificial Sequence
  Synthetic polynucleotide encoding artificial human antibody VH domain
gaggtgcagctggcggagtccgggggaggcttagttcagcctggggggtccctgagactctcctgtgcactctctgggtccaccatcagtggctactggatgcactgggtccgccaagctccagggaaggggctggtgtgggtctcacgtagtgatgggagtagaacgagttacgcggagtccgtgaagggccgattcaccatctccagagacgacgccaagcacacggtgtatctgcacatgaacagcctgagagccgaggacacggcggtctattactgtgctaggtcccattatgtaggttcggagagttatagggatgcgcttgatatctggggccatgggacaatggtcaccgtctcttca

SEQ ID NO: 8465 - DNA, 360 bp, Artificial Sequence
  Synthetic polynucleotide encoding artificial human antibody VH domain
gaggtgcaacttttggagtctgggggaggcctggtacagccgggggggtccctgagactctcctgtgcagcctctggattcaccttcaacaactgtgccatgacttgggtccgccaggctcccggcaagggcctggagtgggtgtcagggattactaatagtggagatttgacatactacacagactccgttaggggccggttcaccatctccagagacaattccaagaacacactttttctacaaatgaacaacctgagagccgaagacacggccacatattattgtgcgaaacttattggggcattgcgaggagctacagaccactggggccagggaaccctggtcaccgtctcctca

SEQ ID NO: 8466 - DNA, 366 bp, Artificial Sequence
  Synthetic polynucleotide encoding artificial human antibody VH domain
gaggtgcaactgttggagtctgggggaggcttggtacagcctggggggtccctgagactctcctgtgcagccgctggattcaattttagtaactttgccatgggctgggtccgccaggctccggggaaggggctggagtgggtctcagttattagaattgttagtcctattggtggaagcacattctacgcagactccgtgaagggccggttcaccatctccagagacaattccaagaacacggtgcatctgcaaatgaacaacctgagagccgaggacacggccatctattactgtgcgaaaactcatataagtgggtggtgctttgactattggggccagggaacccaggtcaccgtctcctca

SEQ ID NO: 8467 - DNA, 387 bp, Artificial Sequence
  Synthetic polynucleotide encoding artificial human antibody VH domain
gaggtgcggttgttggagtctgggggaggcttggtacagccgggggggtccctaagactctcctgtgcagtctctggactcagttttagtaggaggtatgccatgagctgggtccgccaggctcccgggaaggggctggagtgggtctccggtattagtgatagtggtgtcggcacatattatgtagactccgtgaagggccggttcaccatctccagagacaatgccaagaatgtggtgtatctgcaaatgaacagcctgagagccgaggacacggccacatattactgcgcgaaagaaagtgctgcattgttatgggtcggggccgaaaagaaaggaaactggttcgacccctggggccagggaaccctggtcaccgtcgcctca

SEQ ID NO: 8468 - DNA, 363 bp, Artificial Sequence
  Synthetic polynucleotide encoding artificial human antibody VH domain
caggtccagcttgtgcagtctggggctgaactgaggcagcctggggcctcagtgaagatttcctgtcaggcttctggatacaccttcagtagacattctatccattgggtgcgccaggcccccggacaaaggcttgagtggatgggatggatcatcattgacagtggtgaaacaaagtattcacagaagttccagggcagggtcacctttactcgggacacatccgcgaacacagtctatatggagtcgaacagcctcacatctgaagacacggctgtgtattattgttcgaaagggggggctgccccgccggggaactggttcgaccgttggggccagggaaccctggtcaccgtctcctca

SEQ ID NO: 8469 - DNA, 363 bp, Artificial Sequence
  Synthetic polynucleotide encoding artificial human antibody VH domain
gaggtgcagctggtggagtctgggggaggcttggtccagcctgggaggtccctgagactctcctgtgcagcctctggattcacctttagtacttattggatgaactgggtccgccaggctccagggaaggggctggagtgggtggccaatataaagcaagatggaagtgagaaataccatgtggactctgtgaagggccgattcaccatctccagagacaacgccaagaactcactgtatctgcaaatgaacaacctgagaggcgaggacacggccgtgtattactgtgcgagaggattaagatggttcggggagttagagttcgacccctggggccagggaaccctggtcaccgtctcctca

SEQ ID NO: 8470 - DNA, 372 bp, Artificial Sequence
  Synthetic polynucleotide encoding artificial human antibody VH domain
gaggtgcagctgttggagtctgggggagccttggtacagcctggggggtccctcagactctcctgtacagtctctggattcacctttagcgactatgccatgagctgggtccgccagactccagggaaggggctggagtgggtctcaagtattagtggaagtggtcttatgacatactatgcagactccgtgaagggccggttcaccatctccagggacaattccaaggacacgatgaatctctatataaacatcgtgagagccgaggacacggccatatattattgtgcgaaaggtcccgggctacgatgggagctggtacgccgctactttgaacgctggggccagggaaccctggtcagcgtctcctca

SEQ ID NO: 8471 - DNA, 360 bp, Artificial Sequence
  Synthetic polynucleotide encoding artificial human antibody VH domain
gaggtgcagctggtggagtccgggggaggcttagttcagcctggggggtccctgagactctcctgtgcagcctctggattcaccttcagtacatactggatgcactgggtccgccaagctccagggaaggggctggtgtgggtctcacgtattaatagtgatgggactaccacaaactacgcggactccgtgcagggccgattcaccatctccagagacagcgccaagagcacgctgtatctgcacatgaacagtctgggagccgaggacacggctgtctattactgtacaagagattcggcgggagctactcccgcatttgacttctggggccagggaaccctggtcaccgtctcctca

SEQ ID NO: 8472 - DNA, 381 bp, Artificial Sequence
  Synthetic polynucleotide encoding artificial human antibody VH domain
gaggtgcagctggtggagtctgggggaggcctggtcaagcctggggggtccctgagactctcctgtgcagcctctggattcaccttcagtagctatagcatgaactgggtccgccaggctccagggaaggggctggagtgggtctcatacattagtagtagtagtagttacatatactttgcagactcagtgaagggccgattcaccatctccagagacaacgccaagaactcactgtatctgcaaatgaacagcctgagagccgaggacacggctgtgtattactgtgcgagagacggtcgattacatttgggggagttatcgttatactggccctcctttgactactggggccagggaaccctggtcaccgtctcctca

SEQ ID NO: 8473 - DNA, 366 bp, Artificial Sequence
  Synthetic polynucleotide encoding artificial human antibody VH domain
gaggtgcaactgttggagtctgggggaggcttggtacagcctggggggtccctgagactctcctgtgcagcctctggattcacctttcgcaactatgccatgagttgggtccgccaggctccagggaaggggctggagtgggtctcaacttttagtggtagtggtggtaacacatactacgcagactccgtgaagggccggttcaccatctccagagacaattccaagaacacgctgtatctgcaaatgaacagcctgagagccgaggacacggccgtatattactgtgcgaaagtcagagtggttattactcccaatgatggttttgatatctggggccaagggacaatggtcaccgtctcttca

SEQ ID NO: 8474 - DNA, 372 bp, Artificial Sequence
  Synthetic polynucleotide encoding artificial human antibody VH domain
gaggtgcgactggtggagtccgggggaggcttagttcagcctggggggtccctgagactctcctgtacagcctctggattcaccttcgctggctactggatgcactgggtccgccaaagtccacggaagggactattgtgggtctcacgcattaatcgtggtgggaccagaataagttatgcggactccgtgaagggccgattcatcatctccagagacgacgccagaaacacgctgtttctgcaaatgaacagcctgagagacgaggacacggctgtctattactgtgtaaggtctcactatgaaggttcggagagttttagggatgcgtttgatatctggggccatgggacaatggtctccgtctcttca

SEQ ID NO: 8475 - DNA, 366 bp, Artificial Sequence
  Synthetic polynucleotide encoding artificial human antibody VH domain
caggttcagttggtgcagtctgcagctgaggtgaagaagcctggggcctcagtgaaagtctcctgtaaggcttctggttacacgtttaccaactatggtgtcagctggctgcgacaggcccctggacaagggcttgagtgggtggcatggatcagcgcttataatggtaagacaaactatgcacagaacgtccagggcagagtcaccatgaccacagacacatcctcgagcacagcctacatggagctgaggagcctgagatctgacgacacggccgtgtattactgtgcgagagacgggcccgactacggtgactacgtgaacttcgactactggggccaggggaccctggtcaccgtctcctca

SEQ ID NO: 8476 - DNA, 378 bp, Artificial Sequence
  Synthetic polynucleotide encoding artificial human antibody VH domain
gaggtgcagctgttggagtctgggggagacttggtacagccgggggggtccctgagactctcctgtgcagcctccggattcacatttagcagctatgccatggactgggtccgccaggctccagggaaggggctggagtgggtctcatctatcagtcctattggtgattacatatactatgcagactccgtgaagggccgcttcaccagctccagggacaactccaagaacacgctgtttctgcaaatggacagcctgagagccgaagacacggccttatattactgtgcgaaacggaggggtaatctggttcggggacgtgtaactggtgacggtatggacgtctggggccaagggaccacggtcaccgtctcctca

SEQ ID NO: 8477 - DNA, 360 bp, Artificial Sequence
  Synthetic polynucleotide encoding artificial human antibody VH domain
caggtgcagctggtgcagtctggggctgaggtgaagaagcctggggcctcagtgcaggtctcctgcaagacttctggatacaccttcaccgactactttatacactgggtgcgacaggcccctgggcaagggtttgagtggatgggacggatcaagatcacccctcacagtggtgacacacactatgcacagaagtttcagggcagggtcaccatgaccagggacacgtccattagtacagcctacatggaactgaacaggctgacatctgacgacacggccgtgtattactgtgcgagagatggacaatggtttgaccttgactactggggccagggaaccctggtcaccgtctcctca

SEQ ID NO: 8478 - DNA, 372 bp, Artificial Sequence
  Synthetic polynucleotide encoding artificial human antibody VH domain
gaggtgcttttattggagtctgggggaggattggtacaaccgggggggtccctgagactctcctgtacagcctccggattcaattttaatagttatgccatgagctgggtccgccaggctccaggaaaggggctggagtgggtcgcaattataagttctactggttctactacctactacccagactccgtgcagggccggttcaccatctccagagaccagaccacaaacactctttttctgcaaatgaacagtctgagagtcgaagacacggccattttttactgtgtgaaagatctgcggggtggtatagcagaccgagacagtgtttttcatctttggggccacgggacaacggtcaccgtgtcttca

SEQ ID NO: 8479 - DNA, 375 bp, Artificial Sequence
  Synthetic polynucleotide encoding artificial human antibody VH domain
gaggtgcagctgttggagtctgggggaggcttggtacagccgggggggtccctgagactctcctgtgcagcctctggattcacctttagaacctacgacatgacctgggtccgccaggctccagggaaggggctggagtgggtctcagctattgttggtagtggtgatatcacattctacgcagactccgtgaagggccggttcaccatctccagagacaattccaagaacactctgtatctgctaatgaacaccctgagagccgaggacacggccgtatattactgtgcgaaagggctgactgggttacgatattctccgtcgccacagtacttccagcactggggccagggcaccctggtcaccgtctcctca

SEQ ID NO: 8480 - DNA, 366 bp, Artificial Sequence
  Synthetic polynucleotide encoding artificial human antibody VH domain
gaggtgcagttggtggagtctgggggaatgctagtgaagccgggggggtcccttagactctcctgtgaggtgtccggattcaccttttcgaacaccttgatgagttgggtccgccaggctccagggaaggggccagaatgggttgggcgtattaaaaggaaaagtgatggtgagacaacagactacgctgcacccgtgaaaggcagattcaccatctcaagagacgactcacagaatatgttatttctgcaactgaccaacctgaaaagcgacgacacagccgtctattattgtaccacagggctggctgcaagtacttactacgttgattactggggccggggaaccctggtcaccgtctcctca

SEQ ID NO: 8481 - DNA, 351 bp, Artificial Sequence
  Synthetic polynucleotide encoding artificial human antibody VH domain
gaggtgcaggtgctgcagtcagggggaggcttggcacaccctggggggtccctgagactctcctgtgtagcctctggactcacctttagcggctttaccatgagttgggtccgccacgctccagggaaggggctggagtgggtctcagatatcagtggaggcggtgtcacagactacgcagactccgcgaagggccggttcaccatctccagagagaattccaagaacacgctctttctgcaaatgaacagcctgagagccgaggacacggccatgtattattgtgtccctcgctatactaaccattggtttgacaagtggggccagggaaccctggtcaccgtctcctca

SEQ ID NO: 8482 - DNA, 357 bp, Artificial Sequence
  Synthetic polynucleotide encoding artificial human antibody VH domain
caggtccagcttgtgcagtctggggctgaggtgaggaagcctggggcctcagtgaaaatttcctgcaaggcttctggatacaccttcaccaggaatcctttacattgggtgcgccaggcccccggacaaagccttgagtggatgggatgggtcaacgctggcgatggtgccacaaaatattcacagacgttccagaacagagtcacgtttaccagagacacatccgcgagcacggccttcatggaactgaccagcctgacatctgaagacacggctgtgtattactgtgcgagagatggccagtacggctgggcttttgatatctggggccaggggactatggtcaccgtctcttca

SEQ ID NO: 8483 - DNA, 363 bp, Artificial Sequence
  Synthetic polynucleotide encoding artificial human antibody VH domain
gaggtgcagttggaggagtctgggggcggcctggtcacgcctgggggttccctgagactgtcctgtgcagcctctggattcccgttcagcacctctgatatgagttgggtccgccaggctccagggaagggacttgagtgggtctcatccattactcagagtagtagtttcacatattacactgagtctgtgaggggccgattcaccatctccagagacgacgccaagaacactctgtatctgcagatgagtagcctgagagtcgaggacatgggtcactattactgtgcgagagatttggggaggaggttcttctacggcatggaaatctggggccaagggaccgcggtcatcgtctcctca

SEQ ID NO: 8484 - DNA, 363 bp, Artificial Sequence
  Synthetic polynucleotide encoding artificial human antibody VH domain
cagatcaccttgaaggagtctggtcctacgctggtgaaacccacacagaccctcacgctgacctgcaccttctctgggttctcactcagcactagtggagtgggtgtgggctggatccgtcagcccccaggaaaggccctggagtggcttgcactcatttattgggatgatgataagcgctacagcccatctctgaagagcaggctcaccatcaccaaggacacctccaaaaaccaggtggtccttacaatgaccaacatggaccctgtggacacagccacatattactgtgcacagggggtcgggggatggaacccctggttcgacccctggggccagggaaccctggtcaccgtctcctca

SEQ ID NO: 8485 - DNA, 366 bp, Artificial Sequence
  Synthetic polynucleotide encoding artificial human antibody VH domain
caggtgcagctggtggagtctgggggaggcgtggtccagcctgggaggtccctgagactctcctgtgcagcgtctgaattcaccttcagtaactatggcatgcactgggtccgccaggctccaggcaaggggctggagtgggtggcacttatatggtatgatggaagtaataaatactatgcagactccgtgaagggccgattcaccatctccagagacaattccaagaacacgctgtatctgcaaatgaacagcctgagagccgaggacacggctgtgtattactgtgcgagagatgtttatagcagcacctgggattactactttgactactggggccagggaaccctggtcaccgtctcctca

SEQ ID NO: 8486 - DNA, 369 bp, Artificial Sequence
  Synthetic polynucleotide encoding artificial human antibody VH domain
caggtgcagttggtgcaatctgcgtctgacttgaagaagcctggggcctcagtgacggtgtcctgcaaggcttctggatacaccctcactagttatgctattaattgggtgcgacaggcccctggacaagggcttgagtggatgggatggatcaacaccaacaccgggaacccaacgtatgcccagggcttcacaggacggtttgccttttcctcggacacctctgtcagcacggcatatctgcagatcaccagcctaaaggctgatgacactgccgtgttttattgtgtgagagatcggaccaactcttatggcctcggttctaacgcggtctactggggccagggaaccctggtcaccgtctcctca

SEQ ID NO: 8487 - DNA, 372 bp, Artificial Sequence
  Synthetic polynucleotide encoding artificial human antibody VH domain
gaggtgcagctggtggagtccgggggagccttagttcagcctggggggtccctgagactctcctgtgtagcctctggattcaccctcagtgcctactggatgcactgggtccgccaagttccagggaaggggctggtgtgggtctcacgtattagaagtgatgtgggtatcacaaactacgcggactccgtgaagggccgattcaccgtctccagagacagcgccaagaacacggtgtatctgcaaatgaacagtctgagagtcgaggacacggctgtctattactgtacgaggtcccattactctgggtcggagagttatagggattctcttgatatctggggccaagggacaatggtcaccgtctcttca

SEQ ID NO: 8488 - DNA, 351 bp, Artificial Sequence
  Synthetic polynucleotide encoding artificial human antibody VH domain
caggtgcagccggtgcagtctggggccgaggtgaggcagcctggggcctcagtgaaggtctcctgcaaggcacctgaatacacctccaccggcgactatgtgcactgggtgcgacaggcccctggacaaggccttgagtggatgggagtggtcacccccagtggtgaaaactcaggccaggcacagaagttccagggcagaaccaccatgaccagggacatgtccacgaatacagtccacgtggagatgagcagcctgacatatgaggacacggccgtctattactgtgcgagaggggggcggtaccaatttgactcctggggccagggaacccgggtcaccgtctcctca

SEQ ID NO: 8489 - DNA, 357 bp, Artificial Sequence
  Synthetic polynucleotide encoding artificial human antibody VH domain
caggtccagcttgtgcagtctggggctgaggtgaggaagcctggggcctcagtgaaggtttcctgcaaggcttctggatacaccttcactaacaatcctttacattgggtgcgccaggcccccggacaaagccttgagtggatgggatggatcaaccctggcgctggtgacataagatattcacagacgttgcaggacagagtcacttttaccaaggacacatccgcgagcacagccttcatggagctgagcagcctgacatctgaagacacggctgtttattattgtgcgagagatggccgctacggctgggcttttgatatgtggggccaggggaccagggtcaccgtctcttca

SEQ ID NO: 8490 - DNA, 372 bp, Artificial Sequence
  Synthetic polynucleotide encoding artificial human antibody VH domain
gaggtgcagctgttggaatctgggggaggcttagtacagcctggggggaccctgagactctcctgtgcagcctctggattcacctttaacaactttgccatggcctgggtccgccaggctccaggggaggggctgcagtgggtctcaagtatttttggtagtggcagtggtacatacttcgcagactccgtgaagggccgattcaccatctccagagacaattccaagaacatgctgtatttggagatgaacagcctgagagccgaggacacggccgtctattactgtgcgaaacaatccggtccggggaatttcatcgtttactggtacttcgatctctggggccgtggcacccaggtcactgtctcctca

SEQ ID NO: 8491 - DNA, 363 bp, Artificial Sequence
  Synthetic polynucleotide encoding artificial human antibody VH domain
caggtccagcttgtgcagtctggggctgaggtgaagaagcctggggcctcagtgaaggtttcctgcaaggcctctggatacaccttcactaaccatgccatacattgggtgcgccaggcccccggacaaaggcttgagtggatgggatggatcatcactggcaatggtgagacaaaatattcacagaacttccagggcgcagtcaccattaccagggacacatccgcgaccacagtctacatggaactgagcagcctgagatctaaagacacggctatctattactgtgcgagaggggggagtgccccgccggggaactggttcgccgcctggggccagggaactctggtcaccgtctcctca

SEQ ID NO: 8492 - DNA, 378 bp, Artificial Sequence
  Synthetic polynucleotide encoding artificial human antibody VH domain
gaggtgcagctggtggagtcggggggaggcttggtgaagccgggggggtccctcagactctcctgtgtagcctctggattcagtttcgataaagtgtggatgagttgggtccgccaggctccaggaaaggggctggagtgggttggccgtatcaaaagtaaaagtgatggtggaacaacagactatgctgcacccgtgaaaggcagattcaccatctcaagagatgattcaaaaaatacactgtatctgcaactgaaccgcctgaaaaccgaggacacagccgtgtatcactgtcagtcgggaccaacaggaactccaaactactactactacgatatggacgtctggggccaagggaccacggtcaccgtctcctca

SEQ ID NO: 8493 - DNA, 363 bp, Artificial Sequence
  Synthetic polynucleotide encoding artificial human antibody VH domain
caggtgcagctggtggagtctgggggaggcgtggtccagcctgggaggtccttgagagtctcctgtgcagcgtctggattcaccttcagtcatcatgccatgcactgggtccgccaggctccaggcaaggggctggagtgggtaggcattatctggtttgatggaagtaatacatattatggagaatccgtgaagggccgattcaccatctccagagacaattccaagaacacgctatatcttcaaatgaacagcctgagagacgaggacacggctgtctattattgtgcgcgagagtcgcgggatgtagcagcggctggctatgacttctggggccagggaacccgggtcaccgtcgcctca

SEQ ID NO: 8494 - DNA, 372 bp, Artificial Sequence
  Synthetic polynucleotide encoding artificial human antibody VH domain
caggtccagcttgtgcagtctggggctgaggtgaagaagcctggggcctcagtgaaggtttcctgcaaggcttctgaatacaccttcactgactatgctatgcattgggtgcgcctggcccccggacaagggtttgagtggatgggatggatcaacgctgccaatggtaacacaaagtattcacagaagttccagggcagagtcaccattaccagggacacatccgcgagcacagcctacatggaactgagtcgcctgagatctgaagacagggctgtgtattactgtgcgagaggctgctatagcagtggctgtgggcgtctcaaggaatttgactactggggccagggaaccctggtcaccgtctcctca

SEQ ID NO: 8495 - DNA, 345 bp, Artificial Sequence
  Synthetic polynucleotide encoding artificial human antibody VH domain
caggtgcagttggtggagtctgggggaggcgtggcccagcctgggaggtccctgagactctcctgtgcagcgtctggattctccttcagtagctttggcatgcactgggtccgccaggctccaggcaaggggctggagtgggtggcactcatatggtatcgtggaatttattatgcagactccgtgaggggccgattcaccatctccagagacaattcgaagaacacactgtatctgcaaatgaacagcctgagagtcgaggacacggctgtttattattgtgcgagattagaaagtggcttccttgacttatggggccagggaaccctggtcaccgtctcctca

SEQ ID NO: 8496 - DNA, 375 bp, Artificial Sequence
  Synthetic polynucleotide encoding artificial human antibody VH domain
gaggtgcagctggtgcagtctggagcagagatgaagaagcccggggagtctctgaagatctcctgtaagggctctggatacacctttaccaactactggatcggctgggtgcgccagttgcccgggaaaggcctggagtggatggggatcatctttgcttatgactctgataccagatatagtccgtcgttccaaggccaggtcaccatctcagtcgacaagtccatcaacaccgcctacctgcactggaacagcctggagggctcggacaccgccatgtattattgtgcgagggggagttacggtgactccctcaggcccgtcggagactactttgactcctggggccagggaaccctggtcaccgtctcctca

SEQ ID NO: 8497 - DNA, 378 bp, Artificial Sequence
  Synthetic polynucleotide encoding artificial human antibody VH domain
gaggtgcagttggtggagtccgggggaggcttagttcagcctggggggtccctgagactctcctgtgaagcctctggattcaccctcagtggctactggatgcactgggtccgccaggctccagggaaggggctggtgtgggtctcacgtattgatggtgatggtgatgggagcagaaccaactacgcggactccgtgaagggccgattcaccatctccagagacaacgccaagaacaccctgtatctgcaaatgaacagtctgagagacgaggacacggctgtctattactgtgcaaggtcccattacgttggttccctgaattttagggatgcgcttgatatctggggccaagggacaatggtcaccgtctcttca

SEQ ID NO: 8498 - DNA, 360 bp, Artificial Sequence
  Synthetic polynucleotide encoding artificial human antibody VH domain
caggtgcagttacagcagtggggcgcaggactgttgaagccttcggagaccctgtccctcacctgcgctgtctatggtgggtccttcagtgattaccactggacctggatccgccagcccccagggaagggactggagtggattggggaaatcaatcagagtggaaccaccaactacagcccgtccctcaagagtcgattcaccatatcactagacacgtccaacaaccagttctccctgacgctgagctctgtgaccgccgcggacacggctatatattactgtgcgagagcaaaaagtggctggcgaccctacgctgtggacgtctggggccaagggaccacggtcaccgtctcctca

SEQ ID NO: 8499 - DNA, 366 bp, Artificial Sequence
  Synthetic polynucleotide encoding artificial human antibody VH domain
gaggtgcagctgttggagtctgggggaggcttggtacagcctggggggtccctgagactctcctgtgcagcctctggattcaactttagcaactatgccatgggctgggtccgccaggctccggggaaggggctggagtgggtctcagttattagaattattagtcctactggtggtagcacattctacgcagactccgtgaagggccggttcaccatctccagagacaattccaagaacacggtgtatctgcaaatgaacaacctgagagccgaggacacggccatctattactgtgcgaaaactcatataagtggctggtgctttgactactggggccagggaaccctggtcaccgtctcctca

SEQ ID NO: 8500 - DNA, 363 bp, Artificial Sequence
  Synthetic polynucleotide encoding artificial human antibody VH domain
caggtccagcttgtgcagtctggggctgaactgaggcagcctggggcctcagtgaaggtttcctgcaaggcttctggatacaccttcactaacaatgctatccattgggtgagccaggcccccggacaaaggcttgagtggatgggatggatcatcactgacagtggtcgcacaaaatattcacagaagttccaggacagagtcaccattacccgggacacttccgcgaacatagtctacatggagctgaacagcctcagatctgaagacacggctgtctattattgtgcgagagggggggctgccccgccggggaactggttcgaccgttggggccagggaaccctggtcatcgtctcctca

SEQ ID NO: 8501 - DNA, 354 bp, Artificial Sequence
  Synthetic polynucleotide encoding artificial human antibody VH domain
gaggtgcaattggtggagtccgggggaggcatagttcagccgggggggtctttgagactctcttgtgcagcctctgggttcaccttcagcacctactggatgcactgggtccgccaagttccagggaaggcactggagtgggtctcacgtattaatgatgacgccacggacacaacctacgcggactccgtgaagggccgcttcatcgtctccagagacaacgtcaagaacactttggatctgcagatgaacagtctgagagaggacgacacggctttatattactgtggcagagatgggatggttacgggtattgacaactggggccagggaaccctggtcaccgtctcctca

SEQ ID NO: 8502 - DNA, 369 bp, Artificial Sequence
  Synthetic polynucleotide encoding artificial human antibody VH domain
caggtgcagctgcaggagtcgggcccaggactggtgaagccttcacagaccctgtcgctcacctgcactgtctctggtgcctccatcggcagtgggggttactactggacctggatccgccagcacccagaaaagggcctggagtggcttggctacatctggtacagtgggagtaccaactacaacccgtccctcacgagtcgactgagcatctcagcagacaggtctaaaaaccatttctccctgaagctgacctctgtgacggccgcggacacggccgtgtattattgtgcgagagaaagagggacttattctccccttggagcctttgatatctggggccaaggattaatggtcaccgtctcttca

SEQ ID NO: 8503 - DNA, 357 bp, Artificial Sequence
  Synthetic polynucleotide encoding artificial human antibody VH domain
gaggtgcaactggtggagtctggaggaggcttgatccagcctggggggtccctgagactctcttgtgcagcctctgggttcagcgtcagtgccacctacatggcctgggtccgccaggctccagggagggggctggagtccatctcaattattggaggtcccacatattatgcagaatccgtgaagggccgattcatcatttccagagacacttacacgaacacgctggatcttcagatgaacagtctcagaggcgaggacacggccatatatttctgtgcgagattttgtgggacctacaattccccatgtggatttgattcttggggccagggtaccctggtcaccgtctcctca

SEQ ID NO: 8504 - DNA, 372 bp, Artificial Sequence
  Synthetic polynucleotide encoding artificial human antibody VH domain
gaggtgcacctggtggagtccgggggaggcttagttcagccgggggggtccctgagactctcctgtgcaggctctggattcaacttcagaaactactggatgcactgggtccgccaagctccagggaaggggctggtatgggtctcacgtatgacgagtgatgtgagtcgcgcaagttacgcggactccgtgaagggccgatttaccatctccagagacgacgccaagaacacgctgtatctgcaaatgaacagtctgagagccgaggacacggctgtgtattactgtgcaaggtcccattactctggttcggagagttatagggatgcttttgatttctggggccaagggacagtggtcaccgtctcttca

SEQ ID NO: 8505 - DNA, 378 bp, Artificial Sequence
  Synthetic polynucleotide encoding artificial human antibody VH domain
cagctgcagctgcaggagtcgggcccaggactggtgaagccttcggagaccctgtccctcacctgcactgtctctggtggctccatcagcagtagtagttactactggggctggatccgccagcccccagggaaggggctggagtggattgggagtatctattatagtgggagcacctactacaacccgtccctcaagagtcgagtcaccatatccgtagacacgtccaagaaccagttctccctgaagctgagctctgtgaccgccgcagacacggctgtgtattactgtgcgagacatataggactaacgaaggatagcagcagctggtacaaaattgactactggggccagggaaccctggtcaccgtctcctca

SEQ ID NO: 8506 - DNA, 357 bp, Artificial Sequence
  Synthetic polynucleotide encoding artificial human antibody VH domain
caggtgcagctgcaggagtcgggcccaggactggtgaagccttcacagaccctgtccctcacctgcactgtctctggtggctccatcagcagtggtaattactactggagctggatccgccagcacccagggaagggcctggagtggattgggtacatctattacagtgggagcacctactacaacccgtccctcaagagtcgagttaccatatcagtagacacgtctaagaaccagttctccctgaagctgagctctgtgactgccgcggacacggccgtgtattactgtgcgagagcaattagatacaactggttcgacccctggggccagggaaccctggtcaccgtctcctca

SEQ ID NO: 8507 - DNA, 381 bp, Artificial Sequence
  Synthetic polynucleotide encoding artificial human antibody VH domain
gaggtgcagctggtggagtctgggggaggcttggtaaagcctggggggtcccttagactctcctgtgcagcctctggattcactttcagtgacgcctggatgagctgggtccgccaggctccagggaaggggctggagtgggttggccgtattaaaaccaaacctgaaggtgggaccctagactacgcagcacccgtgaaaggcagattcaccgtctcaagagatgattcaaaaaacatgctgtatctgcaaatgaacaccctgacaaccgaggacacagccgtctattattgtactacagatcgcgtggggacgaattgtggtggtgactgctaccagttccagcactggggccagggcaccctggtcaccgtctcctca

SEQ ID NO: 8508 - DNA, 354 bp, Artificial Sequence
  Synthetic polynucleotide encoding artificial human antibody VH domain
gaggtgcagctgttggagtctgggggaggcttggttccgcctggggggtccctgagactcttgtgtgcagcctctggactcacctttgacaactttgccatgagctgggtccgccaggctccagggaaggggctggagtgggtctcatatattagtgatcgcggttttgacacatactacgcagactccgtgaagggccggttcgccgtctccagagacaattccaagaaaacaatgtctctgcagatgaacagcctgggacccgaggacacggccatatattactgtgcgaaaatccctccacggggcccttttgctatctggggccaagggacaatggtcaccgtctcttca

SEQ ID NO: 8509 - DNA, 366 bp, Artificial Sequence
  Synthetic polynucleotide encoding artificial human antibody VH domain
gaggtgcaactattggagtctgggggagacttggtccagccgggggggtccctgagactctcctgtgcagcctctggattcacctttaatacttatgccatgcactgggtccgccaggctccagggaaggggccggagtgggtgtcggctattagtggaagtggtactagtacacaaaccgcagactccgtgaagggccggttcgccatttccagagacaattccaagaacacgatgtatctgcaaatgaacagcctcagagccgaggacacggccatatattactgtgcgaaaggggccactggctggtacgtttcacactattatgacttctggggccagggaaccctggtcaccgtctcctca

SEQ ID NO: 8510 - DNA, 366 bp, Artificial Sequence
  Synthetic polynucleotide encoding artificial human antibody VH domain
gaggtgcaactgttggagtctgggggaggcttggtacagcctggggggtccctgagactctcctgtgcagcctctggattcacctttagcaactatgccatgagctgggtccgccaggctccagggaaggggctggagtgggtctcaagttttagtggtagtggtggtaacacatactacgcagactccgtgaagggccggttcaccatctccagagacaattccaagaacacgctgtatctgcagatgaacagcctgagagccgaagacacggccttatattactgtgcgaaacttcgagcggtggtgactgtcattgaggcattcgacttctggggccagggaaccctggtcaccgtctcctca

SEQ ID NO: 8511 - DNA, 393 bp, Artificial Sequence
  Synthetic polynucleotide encoding artificial human antibody VH domain
caggtccagcttgtgcagtctggggctgaggtgaagaagcctggggcctcagtgaaggtttcctgcaaggcttctggatacaccttcactagctatgctatgcattgggtgcgccaggcccccggacaaaggcttgagtggatgggatggatcaacgctggcaatggtaacacaaaatattcacagaagttccagggcagagtcaccattaccagggacacatccgcgaacacagcctacatggagctgagcagcctgagatctgaagacacggctgtgtattactgtgcgagaggctcagggagcgcgtattacgatttttggagtggttattcccaccacatagcgccctttgactactggggccagggaaccctggtcaccgtctcctca

SEQ ID NO: 8512 - DNA, 363 bp, Artificial Sequence
  Synthetic polynucleotide encoding artificial human antibody VH domain
caggtgcagctggagcagtcgggcccgggactggtaaggccttcggagaccctgaccctcacctgctctgtctctggagactccgtcaccagtcatttttactactggagctggatccggcagcccccggggaggggactgcagtggcttggatatgtctattacagtggaagaaccaactacaacccttccctcaagagtcgtctcaccatttcagctgacacgtcccagaaccacttttccctcaaactgacctctgtaaccgctgcggacacggccgtttattattgtgcccgtgaaagggagttgttaactaagggtctggacgtctggggccaagggaccacggtcaccgtctcctca

SEQ ID NO: 8513 - DNA, 351 bp, Artificial Sequence
  Synthetic polynucleotide encoding artificial human antibody VH domain
caggtgcagctggtgcagtctggggctgaggtgaagaagcctggggcctcagtgaaggtctcctgcaaggcttctggatacaccttcaccggctactatatgcactgggtgcgacaggcccctggacaagggcttgagtggatgggacggatcaaccctaacagtggtggcacaaactatgcacagaagtttcagggcagggtcaccatgaccagggacacgtccatcagcacagcctacatggagctgagcaggctgagatctgacgacacggccgtgtattactgtgcgagagatgcggaaggtgggttcgacccctggggccagggaaccctggtcaccgtctcctca

SEQ ID NO: 8514 - DNA, 381 bp, Artificial Sequence
  Synthetic polynucleotide encoding artificial human antibody VH domain
cagctgcccctgcgggagtcgggcccaggactggtgaagccttcggagaccctgtccctcgcctgcactgtgtctggtgcctccatcagaagttctagttactactggacctggatccgccagtccccagggcagggcctcgagtggattggaaatctctactttaatgggggcaccgactataacctgtccctcaagagtcgagtcaccatctcgatagacacgtccatgaatcagatcgccttcaagctgaggtctctgaccgccgcagacacggctgtgtattactgtgtcctcgggccatattaccagcacaatagtggtcagcgagtgggtgcttctgacgtctggggccaagggactttggtcaccgtctcttca

SEQ ID NO: 8515 - DNA, 357 bp, Artificial Sequence
  Synthetic polynucleotide encoding artificial human antibody VH domain
gaggtgcagctggtggagtctggaggaggcttgatccagcctggggggtccctgacactcgcctgtgcagcctctgggttcaccgtcatggacacctacatggcctgggtccgccaggctccagggaaggggctggagtgggtctcagtaattggtggtgccgaatattacgcagactccgtgaggggccggttcatcatttacagagacaggtccaagaacagtgtgtatcttgaaatgaacagcctgacaagcgaggacacggccctctactactgtgcgagagtgtgtgggagttacaactccccatgcggatttgactcctggggccagggagccttggtcaccgtctcctca

SEQ ID NO: 8516 - DNA, 360 bp, Artificial Sequence
  Synthetic polynucleotide encoding artificial human antibody VH domain
caggtgcaactggtgcagtctgggtctgagttgaagaagcctggggcctcagtgaaggtttcctgcaaggcttctggatacactttcactaaatattctctgaattgggtgcgacaggcccctggacaggggcttgagtggatgggatggatcaaccccgacactgggtacgcaagatatgcccggggcttcacaggacgctttgtcttctccttggacacctctgtcagcacggcatatctgcagatcaacgacctaaaggctgacgacactgccgtgtattattgtgcgagaggaaatcgtataggtggaactagcgggcactactggggccagggaacccgggtcaccgtctcctca

SEQ ID NO: 8517 - DNA, 378 bp, Artificial Sequence
  Synthetic polynucleotide encoding artificial human antibody VH domain
gaggtgcagctggtggagtctgggggaggcttagtaaagccagggcggtccctgagactctcctgtacaacttctggattcacctttcgtgattatgctatgagctggttccgccaggctcctgggaaggggctggagtgggttgcacacatcgctcaaagtaatatcaatattttctacggaggctctgtgctgggccgattcaccatctccagagacgacgccaagaattcactgtatctgcaaatgaacagcctgagagacgaggacacggctgtgtattattgtgcgagagatgggggttgttttaccagctccagctgctatggatacggtatggacgtctggggccaagggaccacggtcaccgtctcctca

SEQ ID NO: 8518 - DNA, 381 bp, Artificial Sequence
  Synthetic polynucleotide encoding artificial human antibody VH domain
gaggtgcagctggtggagtctgggggaggcctggtcaagcctggggggtccctgagactctcctgtgcagcctctggattcaccttcagtagctatagcatcaactgggtccgccaggctccagggaaggggctggagtgggtctcatccattagtagtagtagtatttacatatactacgcagactcagtgaagggccgattcaccatctccagagacaacgccaagaactcactgtatctgcaaatgaacagcctgagagtcgaggacacggctgtgtattactgtgcgagacaggcccgggaccgcagtatagcagctcgtccgttctctgggggctttgactactggggccagggaaccctggtcaccgtctcctca

SEQ ID NO: 8519 - DNA, 384 bp, Artificial Sequence
  Synthetic polynucleotide encoding artificial human antibody VH domain
caggtgcagctacagcagtggggcgcaggactgttgaagccttcggagaccctgtccctcacctgcgctgtctatggtgggtccttcagtggttactacgggggctggatccgccagcccccagggaaggggctggagtggattggggaaatcaatcatagtggaagcaccaactacaacccgtccctcaagagtcgagtcaccatatcagtagacacgtccaagaaccagttctccctgaagctgagctctgtgaccgccgcggacacggctgtgtattactgtgcgagagttaagggctcgtattacgatttttggagtggacgatatcgggtctacggtatggacgtctggggccaagggaccacggtcaccgtctcctca

SEQ ID NO: 8520 - DNA, 366 bp, Artificial Sequence
  Synthetic polynucleotide encoding artificial human antibody VH domain
gaggtgcagctggtggagtccgggggaggcttagttcagcctggggggtccctgagactctcctgtgcactctctgggtccaccatcagtggctactggatgcactgggtccgccaagctccagggaaggggctggtgtgggtctctcgtagtgatgggagtagaacgagttacgcggagtccgtggagggccgattcaccatctccagagacgacgccaagcacacggtgtatctgcacatgaacagcctgagagccgaggacacggcggtctattactgtgctaggtctcattatgtaggttcggagagttatagggatgcgcttgatatctggggccatgggacaatggtcaccgtctcttca

SEQ ID NO: 8521 - DNA, 372 bp, Artificial Sequence
  Synthetic polynucleotide encoding artificial human antibody VH domain
gaggtgcagctgttggagtctgggggaggcctggtagagccgggggggtccctgagactctcctgtgcagcctctggattcacctttagcatctacgccatgagctgggtccgccaggctccagggagggggccggagtgggtctcagctattagtgctaataccaagaacacctactaccgggactccgtgaagggccggttcaccatctccagagacaattccaagaacacactgtatctgcaaatgaacagcctgagagccgaggacacggccgtatattactgtgcgaaagatttgccgaggcctggtaatgcttattactttgcgaatgattactggggccagggaaccctggtcaccgtctcctca

SEQ ID NO: 8522 - DNA, 366 bp, Artificial Sequence
  Synthetic polynucleotide encoding artificial human antibody VH domain
caggtgcagctggtggagtctgggggaggcgtggtccagcctgggaggtccctgagactctcctgtgcagcctctggattcaccttcagtagttatggcatgcactgggtccgccaggttccaggcaaggggctggagtggctggcagtcatatcaaatgatggaaatactaaaacgtatgccgactccgtgaagggccgattcaccatctccagagacaattctaagagcacgctgtttctgcagatgaacagcctgagcgctgaggacacggctttgtactactgtacaaaagcctgcgcgggtggttctagatgctatctgattgacttctggggccagggaacccaggtcatcgtctcctca

SEQ ID NO: 8523 - DNA, 384 bp, Artificial Sequence
  Synthetic polynucleotide encoding artificial human antibody VH domain
gaggtgcagttggtggagtctgggggaggcttggtagagccgggggggtccctgagactctcctgtgtagcctctggattcacctttggcgattttgccatcaactgggtccgccaggctccagggcaggggctagaatgggtctcagttattagtggcagtggtgatagcactttcagcacatactacgcagactccgtgaagggccggttcaccgtctctagagacaattccaggaacacagtgcacctgcaaatgaacagcctgagggccgaggacacggccacatactactgtgcgaaagcccgggcctatagcaggtcctccgtctttttcttcgtcaacagccactggggccagggaaccctggtcaccgtctcctca

SEQ ID NO: 8524 - DNA, 357 bp, Artificial Sequence; identical to SEQ ID NO: 8454
  Synthetic polynucleotide encoding artificial human antibody VH domain

SEQ ID NO: 8525 - DNA, 369 bp, Artificial Sequence
  Synthetic polynucleotide encoding artificial human antibody VH domain
caggtgcacctgcaggagtcgggcccaggactggtgaagccttcggagaccctgtccctcacctgcactgtctctggtgtctccgtcagcagtccttcttactactggagctggatccggcagcccccagggaagggactggagtggattgggtatttccattccagtgggaccaccatctccaggccctccttacagagtcgagtcaccttatcgctagacgcgtccgagaatcagttctccctgaggcttgcctctgtgaccgctgcggacacggccgtgtattactgtgcgagaggtccgtggataagcgtttggcagggcggcttcgactactggggccggggaaccctggtcaccgtctcctca

SEQ ID NO: 8526 - DNA, 366 bp, Artificial Sequence
  Synthetic polynucleotide encoding artificial human antibody VH domain
gaggtgcagctgtgggagtctgggggaggcttggtacagcctggggggtccctcagactctcctgtgcagcctctgaactcagctttagcaactatgtcatgggctgggtccgccaggctccagggaaggggctggagtgggtctcagctttggctcctagtggtggcacaagctacgcggactccgtgaagggccggttcaccatctccagagacaattccaagaacgcgctgtatttgcaaatgatcactctgagagtcgacgacacggccgtatattactgtgcgaagggcgggcgagacggtgggggtccctacacctactttgactactggggccagggaaccctggtcaccgtctcctca

SEQ ID NO: 8527 - DNA, 381 bp, Artificial Sequence
  Synthetic polynucleotide encoding artificial human antibody VH domain
gaggtgcagctggtggagtctgggggaggcttggtaaagcctggggggtcccttagactctcctgtgcagcctctggattcactttcagtgacgcctggatgagctggatccgccaggctccagggaaggggctggagtgggttggccgtattaaaagcaacagtgaaggtgggacaacagactacgctgcagccgtgaaaggcagattcaccatctcaagagatgattcaaaaaacacgctgtatctgcaaatgaacagcctgaaaaccgaggacacagccgtgtattactgtaccacagatcgcgtggggacaaattgtgatggttactgctaccagttccagcactggggccagggcaccctggtcaccgtctcctca

SEQ ID NO: 8528 - DNA, 360 bp, Artificial Sequence
  Synthetic polynucleotide encoding artificial human antibody VH domain
caggtgcagctgcaggagtcgggcccaggactggtgaagccttcggggaccctgtccctcacctgcgctgtctctggtggctccatcagcagtagtaactggtggagttgggtccgccagcccccagggaaggggctggagtggattggggaaatctatcatagtgggagcaccaactacaacccgtccctcaagagtcgagtcaccatatcagtagacaagtccaagaaccagttctccctgaagctgagctctgtgaccgccgcggacacggccgtgtattactgtgcgagagatcccaaaaccttacgatttggcgtggacgtctggggccaagggaccacggtcaccgtctcctca

SEQ ID NO: 8529 - DNA, 351 bp, Artificial Sequence
  Synthetic polynucleotide encoding artificial human antibody VH domain
gaggtgcaggtgttgcagtcagggggaggcttggcacaacctggggggtccctgagactctcctgtgtagcctctggactcacctttagcggctttaccatgagctgggtccgccacgctccagggaaggggctggagtgggtctcagatattagtggaggcggtgtcacagactacgcagactccgtgaagggccggttcaccatctccagagagaattccaagaacacgctctttctgcaaatgaacagcctgagagccgaggacacggccgtatattattgtgtccctcgctatactaaccattggtttgacaagtggggccagggaaccctggtcaccgtctcctca

SEQ ID NO: 8530 - DNA, 375 bp, Artificial Sequence
  Synthetic polynucleotide encoding artificial human antibody VH domain
caggtgcagttggtggagtctgggggaggcgtggtccagcctgggaggtccctgagactctcctgtgcaggctctggattcatcttcagcaactatggcatgcactgggtccgccaggctccaggcaaggggctggagtgggtggcagttatatcatatgatggaagtaaaaaacattatgcagactccgtgaagggccgattcagcatctctaaagacaattccaagaacactctagatctgcaaatgaacagcctgagagctgaggacacggctgtgtattactgtgcgagagacaggggaccctggtctatagcagcatctggtacccactttgacttctggggccagggaaccctggtcaccgtctcctca

SEQ ID NO: 8531 - DNA, 360 bp, Artificial Sequence
  Synthetic polynucleotide encoding artificial human antibody VH domain
caggtgcagctggtggagtctgggggaggcgtggtccagcctgggaggtccctgagactctcctgtgcagcctctggattcaccttcagtggctatggcatgcactgggtccgccaggctccgggcaaggggctggagtggctggcaattatagcatatgacggaaatactatacactatgcagactccgtgaagggccgattcaccatctccagagacaactccaagaatacactgtatctgcaaatgaacagcctgagagctgaggacacggctgtgtattactgtgcgaaagctataactatatttggctactatcttgacttctggggccacggaaccccggtcaccgtctcctca

SEQ ID NO: 8532 - DNA, 390 bp, Artificial Sequence
  Synthetic polynucleotide encoding artificial human antibody VH domain
gaggtgcagctgttggagtctgggggaggcttggtacagcctggggggtccctgagactctcctgtgcagcctctggattcacctttagcagctatgccatgagctgggtccgccaggctccagggaaggggctggagtgggtctcagctattagtggtagtggtggtagcacatactacgcagactccgtgaagggccggttcaccatctccagagacaattccaagaacacgctgtatctggaaatgaacagcctgagagccgaggacacggccgtatattactgtgcgaaagatgcagagtgggggacgatttttggagtggttattataagtcctgggaatgcttttgatatctggggccaagggacaatggtcaccgtctcttca

SEQ ID NO: 8533 - DNA, 375 bp, Artificial Sequence
  Synthetic polynucleotide encoding artificial human antibody VH domain
caggtgcagctgcaggagtcgggcccaggactggtgaagccttcggagaccctgtccctcacctgctttgtctctggaggctccgtcactagttactactggagctggctccggcagcccccagggaagggactggagtggattggatatgtgtattacagtgggatcaccaactacaacccctccctcaagagtcgagtcaccatttcagtagacacgtccaagaaccagttctccctgaacctgagctctgtgaccactgcggacacggccatgtattactgtgcgagagaataccctttttatagcggcagctggtacggggggcatgtttttgatatctggggccaagggacaatggtcaccgtctcttca

SEQ ID NO: 8534 - DNA, 381 bp, Artificial Sequence
  Synthetic polynucleotide encoding artificial human antibody VH domain
gaggtgcaactggtggagtctgggggaggcttggtgaagccgggggggtccctcagactctcctgcacagcctctggagtccccgtgagtaacgcctggatgagttggttccgccaggctccaggaaaggggctggagtgggttggccgcattagaagtgaatctgatggtgagaaagtggaccacgttgcacccgtggaaggcagattcaccatctcaagagataattcaaaaaacacgttgtatctgcaaatgaacagcctgaaaaccgaggacacaggcgtctattattgtaccactgatcgcggtatgagaggcggggagtatcactactacggcatggacgtctggggccaagggacctcggtcatcgtctcctca

SEQ ID NO: 8535 - DNA, 360 bp, Artificial Sequence
  Synthetic polynucleotide encoding artificial human antibody VH domain
caggtgcagctgcaggagtcgggcccaggactggtgaagccttcggagaccctgtccctcacctgcactgtctctggtggctccatcattaattacttttggagctggatccggcagtccccagggaagggactggagtggattgggtgtagccgttacaacgggaacaccttctacaacccgtccctcaagagtcgagtcaccctatcagtagacccgtccaagaaccagttctccctgaggctgagctctgtgaccgccgcagacacggccgtattttattgtgcgagacacgttggcagtaactggtactgggcttttgactactggggccagggaaacctggtcaccgtctcctca

SEQ ID NO: 8536 - DNA, 375 bp, Artificial Sequence
  Synthetic polynucleotide encoding artificial human antibody VH domain
cagctgcagctgcaggagtcgggcccaggactggtgaagccttcggagaccctgtccctcacctgcgctgtctctggtggctccatcagcagtagtggttatttctgggtctggatccgccagcccccagggagggggctggaatggattgggagtatctattatagtgggaacacctactacaatccgtccctcaagagtcgggtcaccatatccgtcgacacgtccaagagtcagttctccctgaagctaaagtctgtgaccgccacagacacggctgtgtattactgtgcgagacatgggcgacccggtatagtgggaggtacttactactttgaatattggggccagggaaccctggtcaccgtctcctca

SEQ ID NO: 8537 - DNA, 387 bp, Artificial Sequence
  Synthetic polynucleotide encoding artificial human antibody VH domain
gaggtgcagctggtggagtctgggggaggcttggtagagcctggggggtcccttagactctcctgcgcagcctctggattcactgtcagtgacgcctacatgagctggttccgtcaggctccagggaaggggctggagtgggttggccgtgttaaaagtatagctgatactggggcgagagagaccgccgcatccctgagagacagattcagcgtctcaagagatgattcaacaagcaccctgtttttgcaaatgaacagtctgagaaccgaagacacagccgtctattattgtgccacagatcggagacctggggtttgtcgtgacacctgctataactggttccccgatctctggggccggggcaccctggtcacggtctccgca

SEQ ID NO: 8538 - DNA, 369 bp, Artificial Sequence
  Synthetic polynucleotide encoding artificial human antibody VH domain
caggtgcagctggtgcagtctggggctgaggtgaagaagcctggggcctcattgaaggtctcctgtaagtcttctggatacaccttcaccgactactatattcactgggcgcgacaggcccctggacaacgacttgagtggatgggatggatcaacccttacagtggtggcacaaactacgcacagaactttcagggcagggtcaccatgaccggggacacgtccatcggcacggcctacatggaactgaccggactaggatctgacgacacggccatttactactgtgcgagggcggagcctatagtggcgaccactatttattactatgactattggggccagggaaccctggtcaccgtctcctca

SEQ ID NO: 8539 - DNA, 387 bp, Artificial Sequence
  Synthetic polynucleotide encoding artificial human antibody VH domain
caggtgcagctggtgcagtctggggcggaggtgaggaagcctggggcctcagtgaaggtctcctgcgaggcctctggatacaactttaacaattttgacatcaactgggtgcgacaggcccctggacaaggacttgagtgggtgggatggttgaaccctcttaatggtaaggcagagtattcacagaagtttcagggcagagtcaccatgaccaggaacacgtccataagtacagactacatggagttgagcaacttgagatctgacgacacggccgtgtatttctgtgcgagaggcctccatgataattcggggagatattatgattattactattcatatggtctggacgtctggggccaagggaccacggtcaccgtctcctca

SEQ ID NO: 8540 - DNA, 357 bp, Artificial Sequence
  Synthetic polynucleotide encoding artificial human antibody VH domain
gaggtgcagctggtggagtctgggggaggcttggtaaagccgggggggtcccttagactttcctgtgcaggctccggattcactttcagtgatacctacattaactgggtccgccaggctccagggaaggggctggagtgggttggccgtattaagagcaagtctgagggtgagacaatagacttcgctgcacccgtcaaaggcagattcagtatctcgagggatgactcaagagacacggtgtatctgcaaatgaccagcctgcaaatcgaggacacaggcctttattattgtaccatgtcccgtgaggcgctgtttgaccactggggccagggaacccaggtcatcgtctcctca

SEQ ID NO: 8541 - DNA, 360 bp, Artificial Sequence
  Synthetic polynucleotide encoding artificial human antibody VH domain
caggtgcagctggtggagtctgggggaggcgtggtccagcctgggacatccctgagactctcctgtgcaccatctggattcagcttcagtaactctgtcatacactgggtccgccaggctccagacaaggggctggagtggctggcagctatatggtatgatggcaaaaatgaaaactctgtggaccccgcgaagggccgattcaccatctccagagacaattccaagaacactgtgtatctgcaaatggccagcctgagagtcgaggacacggctgtgtattactgtgtgggagagagggaccgaaactcttatcgctttgactactggggccagggaaccctggtcgccgtctcctca

SEQ ID NO: 8542 - DNA, 387 bp, Artificial Sequence
  Synthetic polynucleotide encoding artificial human antibody VH domain
gaggtgcagctggtggagtctgggggaggcttggtaaagccgggggggtccctgagactctcctgcgcagcctcaggatttcgtttcagagacgcctggatgacctgggtccggcaggctccagggaaggggctggagtgggtcggccaaattaaaagtgatattaacggcgggacaaccgactacgctgctgccgtgaaaggcagattcgtcatttcgagagatgactcagaaagtactttgactctagaaatgaatcgcctgaaggacgaggacaccgccgtgtattattgttccacgtcgcccctttttgactggactctatacgcttccttttactggtatctcgaagtgtgggggcgcggcaccctggtcacggtctcctca

SEQ ID NO: 8543 - DNA, 351 bp, Artificial Sequence
  Synthetic polynucleotide encoding artificial human antibody VH domain
gaggtgcagctggtggagtctgggggaggcttggtacagcctggggggtccctgagactctcctgtgcagcctctggattcaccttcagtgtcttcagcatgaactgggtccgccaggctccaggtaaggggctggagtggatttcatacattactggtaatagtaaaaccataaactacgcagacgccgtgaggggccgattcaccgtctccagagacaatgccaagaattctctctatctccaaatgaacagcctgagagacggggacacggctgtgtacttctgtgcgacatcccgcaactggtacttggagtcttggggccagggaaccctggtcaccgtctcctca

SEQ ID NO: 8544 - DNA, 354 bp, Artificial Sequence
  Synthetic polynucleotide encoding artificial human antibody VH domain
gaggtgcagctggtggagtctggaggaggcttgatccagcctggggggtccctgagactctcctgtgcagcctctgggttgaccgtcagtaacagctacatgcattgggtccgccaggctccagggaaggggctggagtgggtctcagttctttacagcgatggtagagcatactacgcagactccgtgaagggccgattcaccatctccagagacaactccaagaacacactgtatcttcagatgtacagcctgagagccgaggacacggccatgtattactgtgtgaggagtccaagcgacatttacggcatggacgtctggggccaagggaccacggtcaccgtctcctca

SEQ ID NO: 8545 - DNA, 366 bp, Artificial Sequence
  Synthetic polynucleotide encoding artificial human antibody VH domain
caggtgcagctggtgcagtctggggctgaggtgaagaagcctggggcctcagtgaaggtctcctgcaaggcttctggatacaccttcaccggctactatatgcactgggtgcgacaggcccctggacaagggcttgagtggatgggatggatcaaccctaacagtggtggcacaaactatgcacagaagtttcagggcagggtcaccatgaccagggacacgtccatcagcacagcctacatggagctgagcaggctgagatctgacgacacggccgtgtattactgtgcgaggtcattgtcattactatggttcggggaaaactttgactactggggccagggaaccctggtcaccgtctcctca

SEQ ID NO: 8546 - DNA, 363 bp, Artificial Sequence
  Synthetic polynucleotide encoding artificial human antibody VH domain
gaggtgcagctgttggagtctgggggaggcttggtacagcctggggggtccctgagactctcttgtgaagcctctggattctactttacgaactacgccatgagctgggtccgccaggctccagggaaggggctggagtgggtctcagatattagtggtggtggcgataacacatactacgcagactccgtgaagggccggttcaccatctccagagacaattcgaagaacatggtgtatctgcaaatgaattccctgagagtcgaggacacggccatttattactgtgcgaaagatgatacaattgcgggtgctgatgcttttgatatctggggccaagggacaatggtcaccgtctctgca

SEQ ID NO: 8547 - DNA, 363 bp, Artificial Sequence
  Synthetic polynucleotide encoding artificial human antibody VH domain
gaggtgcagctgttggagtctgggggaggcttggtacagcctggggggtccctgagactctcctgtgaagcctctggattcacctttagtgactttgccatggcctgggcccgccaggctccaggaaaggggctggagtgggtctcagtcgttaatcctcgtggtgaccgtacgtggtccatagactccgtgaagggccggttcaccatctccagggacaactccaagaatatggtatatctgcaaatgaacagcctgagagccgaggacacggccgttttttattgtgcgaaagatatcgaggggggaaaaaatgggggttatgacgaatggggccagggaaccctggtcaccgtctcctca

SEQ ID NO: 8548 - DNA, 384 bp, Artificial Sequence
  Synthetic polynucleotide encoding artificial human antibody VH domain
caggtgcagctggtggagtctgggggaggcgaggtccagcctgggaggtccctgagactctcctgtgcgggctctgcattcaccttcagaaactttggcatgcactgggtccgccaggctccaggcaaggggctggagtgggtggcagctatatcatatgatggagaaaataaatactatggagactccgtgaagggccgtttcgacatctccagagacaattccaagagcacgctgtatctgcaaatgaacagcctgagacctgaggacacggctgtgtattactgtgggaaagatgaagagcaatgtactggtggcagttgcttttcggcctactacgctctggacgtctggggccaagggaccacggtcaccgtctcctca

SEQ ID NO: 8549 - DNA, 378 bp, Artificial Sequence
  Synthetic polynucleotide encoding artificial human antibody VH domain
caggtgcagctgcaggagtcgggtcccggactggtgaagcctgcggagaccctgtccctcacgtgcactgtctctggtgactccatgactggttactactggaactggctccggcggccccccgggaagggactggagtggataggctttatgcattccggtgagaatataaattacagtccctccctgaggagtcgagtcaccgtgtcaatagacgcctccgcgaacaccttctccctccacttgacgtctgtgaccgctgcggacacggccacatattactgtgcgagagggtcgtcggggaacccgttttgcagcggtgactgtcccctctattttgactcctggggcaagggagccctagtcaccgtctcctca

SEQ ID NO: 8550 - DNA, 348 bp, Artificial Sequence
  Synthetic polynucleotide encoding artificial human antibody VH domain
caggtgcagctggtgcagtctggggctgaggtgaagaagcctggggcctcagtgaaagtctcctgcaaggcttctggatacaccttcaccggctactatatgcactgggtgcgacaggcccctggacaagggcttgagtggatgggatggatcaaccctaacagtggtggcacaaactatgcacagaagtttcagggcagggtcatcatgaccagggacacgtccatcagcacagcctacatggaactgagcaggctgagatctgacgacacggccgtgtattactgtgcgaattctcgcagcagctggctctactggggccagggaaccctggtcaccgtctcctca

SEQ ID NO: 8551 - DNA, 378 bp, Artificial Sequence
  Synthetic polynucleotide encoding artificial human antibody VH domain
caggtgcagctacagcagtggggcgcaggactgttgaagccttcggagaccctgtccctcacctgcgctgtctatggtgggtccttcagtggttactactggagctggatccgccagcccccagggaaggggctggagtggattggggaaatcaatcatagtggaagcaccaactacaacccgtccctcaagagtcgagtcaccatatcagtagacacgtccaagaaccagttctccctgaagctgagctctgtgaccgccgcggacacggctgtgtattactgtgcgagggcccagagtatagcagctcgtcagtggtttcgctactactactttatggacgtctggggccaagggaccacggtcaccgtctcctca

SEQ ID NO: 8552 - DNA, 372 bp, Artificial Sequence
  Synthetic polynucleotide encoding artificial human antibody VH domain
cagctgcagctgcaggagtcgggcccaggactgctgaagccttcggagaccctgtccctcacctgcattgtctctggtgactccgtcagcaatactaattactactggggctggatccgccagcccccagggaagggactggagtggattggtcatagttattatgatgatgccacctactacaacccgtccctcaagagtcgggtcaccatatcaattgacacgtccaggaaccaattctccctgaggttgaggtctgtgaccgccgcggacacggccgtatattactgtgcgagagatcggggaaggacctctgacgactactacggtatggatgtctggggccaagggaccacggtcaccatctcctca

SEQ ID NO: 8553 - DNA, 357 bp, Artificial Sequence
  Synthetic polynucleotide encoding artificial human antibody VH domain
caggttcagctggtacagtctggaagtgaggtgaagaagcctggggcctcagtgaaggtctcctgccaggctactggttacacctttagtgcttccggcatcgcctgggtgcgccaggcccctggacagggccttgagtggatggcatggatcagcgctcacaacggtgacacaaaatacgcgcagaagtttcagggcagagtcaccgtgaccacagatacatccacgagtttagcctacatggagctgaggagcctgagatctgacgacacggccgtatatttctgtgcgagggatccaattggcgaggacggtctggacgtctggggacaggggaccacggtcatcgtctcctca

SEQ ID NO: 8554 - DNA, 369 bp, Artificial Sequence
  Synthetic polynucleotide encoding artificial human antibody VH domain
caggtgcagctacagcagtggggcgcaggactgttgaagccttcggagaccctgtccctcacctgcgctgtctatggtgggtccttcagtggttattactggagctggatccgccagcccccagggaaggggctggagtggattggggaaatcaatcatagtggaagcaccaactacaacccgtccctcaagagtcgagtcaccatttcagaagacacgaaccagttctccctgaagctgagctctgtgaccgccgcggacacggctgtgtattactgtgcgagagccgggtatagcagtagctggtattcgccccctgtccactggttcgacccctggggccagggaacgctggtcaccgtctcctca

SEQ ID NO: 8555 - DNA, 387 bp, Artificial Sequence
  Synthetic polynucleotide encoding artificial human antibody VH domain
caggtgcagctggtgcagtctggggctgaggtgaagaagcctgggtcctcggtgaaggtctcctgcaaggcttctggaggcaccttcagcagctatgctatcagctgggtgcgacaggcccctggacaagggcttgagtggatgggagggatcatccctatctttgatacagcaaactacgcacagaagttccagggcagagtcacgattaccgcggacgaatccacgagcacagcctacatggacctgagcagcctgagatctgaggacacggccgtgtattactgtgcgagagatcgtggggagtaccagctgctcatacgcccggccgcctactactacggtatggacgtctggggccaagggaccacggtcaccgtctcctca

SEQ ID NO: 8556 - DNA, 372 bp, Artificial Sequence
  Synthetic polynucleotide encoding artificial human antibody VH domain
gaggtgcagttgttggagtcggggggaggcttggtgccgccgggggggtccctgagactctcctgtgcagcctctggattcaccttcagtaactatgccatgacttgggtccgccaggctccagggaaggggctggagtgggtctcaggcattagtgttagaggtggtgatatatactacgcagactccgtgaagggccggttcaccatctccagagacaattccaagagcacgctgtatctgcagttgaacagcctgagagccgaggacacggccgtatatttctgtgcgaaagatagagatggcagcggctggtatgggaggaacttctttgacggctggggccagggaaccctggtcatcgtctcctca

SEQ ID NO: 8557 - DNA, 366 bp, Artificial Sequence
  Synthetic polynucleotide encoding artificial human antibody VH domain
gaggtgcagctgttggagtctgggggaggcttggtacagccgggggggtccctgagactctcctgtgcagcgtctgaatccagctttagcattaaagccatgagctgggtccgccaggctccagggaaggggctggagtgggtcgcaaccatttgtagtactggggattgcacatactacgcagactccgtgaagggccgattcaccatctccagagacaattccaagaacacgctgtacctgcaaatggacagcctgagagccgacgacacggccgtatattactgtgcgaaagacggtcataactggaacttgtttcgatacttcgatctctggggccgtggcaccctggtcactgtctcctca

SEQ ID NO: 8558 - DNA, 363 bp, Artificial Sequence
  Synthetic polynucleotide encoding artificial human antibody VH domain
caggtgcagctgatggagtcggggggaggcttggtcaaccctggagggtccctgagactctcctgtgtagtctctggatttcccttcagtgagtactatatgggttggatccgccaggctcctgggaaggggctggaatgggtttcattcatcactagtagaggagaatatacaagttacgcagactctgtgaagggccgattcaccgtctccagagacaacgcgaagaactcagtgtatctgcagatgaacagtctgagactcgaggacacggctacatattattgtgtgagagagggtcggggctccatagcatcatttgggcaccactggggccggggaaccctggtcaccgtctcctca

SEQ ID NO: 8559 - DNA, 363 bp, Artificial Sequence
  Synthetic polynucleotide encoding artificial human antibody VH domain
gaggtgcagctggtggagtctgggggaggcttggtccagcctggggggtccctgagactctcctgtgcagcctctggattcaccgtcagtagcaactacatgagctgggtccgccaggctccagggaaggggctggagtgggtctcagttatttatagcggtggtagtacatactacgcagactccgtgaagggccgattcaccatctccagagacaattccaagaacacgctgtatcttcaaacgaacagcctgagagctgaggacacggctgtgtattactgtgcgactctagtactaccagcggccggagggtactactttgactactggggccagggaaccctggtcaccgtctcctca

SEQ ID NO: 8560 - DNA, 375 bp, Artificial Sequence
  Synthetic polynucleotide encoding artificial human antibody VH domain
caggttcagctggtgcagtctggagctgaggtgaagaagcctggggcctcagtgaaggtctcctgcaaggcttctggttacacctttaccagctatggtatcagctgggtgcgacaggcccctggacaagggcttgagtggatgggatggatcagcgcttacaatggtaacacaaactatgcacagaagctccagggcagagtcaccatgaccacagacacatccacgagcacagcctacatggagctgaggagcctgagatctgacgacacggccgtgtattactgtgcgagagattggaatagtggctacattttttactactactacggtatggacgtctggggccaagggaccacggtcaccgtctcctca

SEQ ID NO: 8561 - DNA, 375 bp, Artificial Sequence
  Synthetic polynucleotide encoding artificial human antibody VH domain
gaggtgcagctggtggagtctgggggaggcttggttcaccctggggggtccctgagactctcctgtgcagcctctggattcaccttcagtacttctaacatgaactgggtccgccaggctccagggaaggggctggagtgggtttcatacattggccctagtagtactcccatactctacgcagactcagtgaggggccgattcaccatctccagagacaatgccaagaactcactgtatctggaaatgaacagtctgagagccgaagacacggctctatattactgtgcgaggacaccatatagcagttcgtccggttactactactacggtatggacgtctggggccaagggaccacggtcaccgtctcctca

SEQ ID NO: 8562 - DNA, 381 bp, Artificial Sequence
  Synthetic polynucleotide encoding artificial human antibody VH domain
gaggtgcagctggtggagtctgggggaggcttggtagagccagggcggtccctgagactctcctgtacagcttcgggattcaactttggtgaatatgctataagctggttccgccaggctccagggaaggggctggagtgggtaggtttcattagaagccaaccttatggtgagacaacagaatacgccgcgtctgtgaaaggcaggttcagcatctcaagagatgattccaacagtatcgcctatctgctaatgaacagcctgaaaaccgaggactcaggcgtgtatttttgtactagagggggatattgtagtaccaccacgtgcgattgggtgatcagtgacttctggggccagggaaccctggtcaccgtctcctca

SEQ ID NO: 8563 - DNA, 363 bp, Artificial Sequence
  Synthetic polynucleotide encoding artificial human antibody VH domain
caggtgcagttggtgcagtctggggcagaggtgaagaagcctggggcctcagtgaaggtctcctgtaaggcctctggatacaggttcagcgactattttatacattgggtgcgacaggcccctggacaagggcttgagtggatgggatggatcagcggtaacaacggtggcccaacgattgcccagaagtttcagggcagggtcaccatgaccagggagacgtccatcaacacagtctacatggaagtgagaagcctgagaactgacgacacggccatgtattactgtgtgagagatgaagcggcaacaggatctaatgaatatgatgtgtggggccaagggacaatggtcaccgtctcttca

SEQ ID NO: 8564 - DNA, 390 bp, Artificial Sequence
  Synthetic polynucleotide encoding artificial human antibody VH domain
caggttcagctggtgcagtctggagctgaggtgaagaagcctggggcctcagtgaaggtctcctgcaaggcttctggttacacctttaccagctatggtatcagctgggtgcgacaggcccctggacaagggcttgagtggatgggatggatcagcgcttacaatggtaacacaaactatgcacagaagctccagggcagagtcaccatgaccacagacacatccacgagcacagcctacatggagctgaggagcctgagatctgacgacacggccgtgtattactgtgcgagagatcttgcactaactacgatttttggagtggttattatagactactactacggtatggacgtctggggccaagggaccacggtcaccgtctcctca

SEQ ID NO: 8565 - DNA, 378 bp, Artificial Sequence
  Synthetic polynucleotide encoding artificial human antibody VH domain
caggtgcagctgcaggagtcgggcccaggactggtgaagccttcacagaccctgtccctcacctgcactgtctctggtggctccatcagcagtggtagttactactggagctggatccggcagcccgccgggaagggactggagtggattgggcgtatctataccagtgggagaaccaactacaacccctccctcaagagtcgagtcaccatatcagtagacacgtccaagaaccagttctccctgaagctgagctctgtgaccgccgcagacacggccgtgtattactgtgcgagagcaccatttcattacgatttttggagtggcccaaactggttcgacccctggggccagggaaccctggtcaccgtctcctca

SEQ ID NO: 8566 - DNA, 366 bp, Artificial Sequence
  Synthetic polynucleotide encoding artificial human antibody VH domain
gaggtgcagttggtggagtccgggggaggcttagttcagccgggggggtcccaaagactctcctgtgcagcctccggattcaccctcacaacgttctggatgcactgggtccgccaagttccagggcacggactggtgtgggtcgcacgaattaacagtgatgggactgtcgtgacctatgcggactccgtgaggggccgattcatcatcgccagagacaactccaggaacactctgtcgctacaaatgaacagtctaagacccgaggacacggctgtctattattgtgcaagaggggatggttatgttgataatagtggtgaacttgactactggggccagggagtcctggtcaccgtctcctca

SEQ ID NO: 8567 - DNA, 375 bp, Artificial Sequence
  Synthetic polynucleotide encoding artificial human antibody VH domain
caggtgcagctggtgcagtctggggctgaggtgaagaagcctgggtcctcggtgaaggtctcctgcaaggcttctggaggcaccttcagcaactatgctatcagctgggtgcgacaggcccctggacaagggcttgagtggatgggagggatcatccctatctttggtacaacaaactacgcacagaagttccagggcagagtcacgattaccgcggacgaatccacgagcacagcctacatggagctgagcagcctgagatctgaggacacggccgtgtattactgtgcgagaaattactatggttcggggaattattataaaccctatgcttttgatatctggggccaagggacaatggtcaccgtctcttca

SEQ ID NO: 8568 - DNA, 375 bp, Artificial Sequence
  Synthetic polynucleotide encoding artificial human antibody VH domain
gaggtgcagctggtggagtctgggggaggcctggtcaagcctggggggtccctgagactctcctgtgcagcctctggattcaccttcagtagctatagcatgaactgggtccgccaggctccagggaaggggctggagtgggtctcatccattagtagtagtagtagttacatatactacgcagactcagtgaagggccgattcaccatctccagagacaacgccaagaactcactgtatctgcaaatgaacagcctgagagccgaggacacggctgtgtattactgtgcgagccacccagcagcagctgatactacgtactactactacggtatggacgtctggggccaagggaccacggtcaccgtctcctca

SEQ ID NO: 8569 - DNA, 387 bp, Artificial Sequence
  Synthetic polynucleotide encoding artificial human antibody VH domain
caggtcaccttgagggagtctggtcctgcgctggtgaaacccacacagaccctcacactgacctgcaccttctctgggttctcactcagcactagtgaaatgtgtgtgagctggatccgtcagcccccagggaaggccctggagtggcttgcactcattgattgggatgatgataaatactacagcacatctctgaagaccaggctcaccatctccaaggacacctccaaaaaccaggtggtccttacaatgaccaacatggaccctgtggacacagccacgtattactgtgcacggatacccgtaacgttcggggagttattaggggactactactactacggtatggacgtctggggccaagggaccacggtcaccgtctcctca

SEQ ID NO: 8570 - DNA, 384 bp, Artificial Sequence
  Synthetic polynucleotide encoding artificial human antibody VH domain
caggtgcagctggtggagtctgggggaggcgtggtccagcctgggaggtccctgagactctcctgtgcagcctctggattcaccttcagtagctatggcatgcactgggtccgccaggctccaggcaaggggctggagtgggtggcagttatatcatatgatggaagtaataaaaactatgcagactccgtgaagggccgattcaccatctccagagacaattccaagaacacgctgtatctgcaaatgaacagcctgagagctgaggacacggctgtgtattactgtgcgaaagatcaaataagagggtatagcagtggctggacgtactactactacggtatggacgtctggggccaagggaccacggtcaccgtctcctca

SEQ ID NO: 8571 - DNA, 366 bp, Artificial Sequence
  Synthetic polynucleotide encoding artificial human antibody VH domain
caggttcagctggtgcagtctggacctgaggtgaagaaacctggggcctcagtgaaggtctcctgcaagacttctggttacatttttagtaactatgttgtcagctgggtgcggcaggcccctggacaagggtttgagtggatgggctggatcagcggtgacaagggtaacacggactatgcacagaagttccagggcagagtcaccatgaccacagacacatccacgagcacagcctacctggaggtgaggagcctgagatctgacgacacggccgtgttttactgtgcgagagaccagccaactgggcggggctacggcctctttgacttctggggccagggaacccaggtcaccgtctcctca

SEQ ID NO: 8572 - DNA, 366 bp, Artificial Sequence
  Synthetic polynucleotide encoding artificial human antibody VH domain
gaggtgcagctggtggagtctgggggaggcctggtcaagcctggggggtccctgagactctcctgtgcagcctctggattcaccttcagtagctatagcatgaactgggtccgccaggctccagggaaggggctggagtgggtctcatccattagtagtagttttaattacatatactacgcagactcagtgaagggccgattcaccatctccagagacaacgccaagaactcactgtatctgcaaatgaacagcctgagagccgaggacacggctgtgtattactgtgcgagagagttggctgctatatttggttcctacggtatggacgtctggggccaagggaccacggtcaccgtctcctca

SEQ ID NO: 8573 - DNA, 381 bp, Artificial Sequence
  Synthetic polynucleotide encoding artificial human antibody VH domain
gaggtgcaactgctggaatccgggggaggcttggtgcagcctggggggtccctgagactctcgtgtgcaggctccggattcacatatagtagtcacgccttgaactgggtccgccaggctcccgggagggggctggagtgggtctcacgtgtaagtggtagtggtggtggcaaatcatatgcagactccgtgaagggccgcttcaccatctccagagacaaccctacgatgacactttatctgcaaatgaacaacctgagagtcgaagacacggccgtatatttttgtgcgaaagaacgggcctattattatgacagtggcggttatcggtcccacggcttggacgtctggggccaagggaccacggtcgtcgtctcctca

SEQ ID NO: 8574 - DNA, 357 bp, Artificial Sequence
  Synthetic polynucleotide encoding artificial human antibody VH domain
caggtgcagctacagcagtggggcgcaggactgttgaagccttcggagaccctgtccctcacctgcgctgtctatggtgggtccttcagtggttactactggagctggatccgccagcccccagggaaggggctggagtggattggggaaatcaatcatagtggaagcaccaactacaacccgtccctcaagagtcgagtcaccatatcagtagacacgtccaagaaccagttctccctgaagctgagctctgtgaccgccgcggacacggctgtgtattactgtgcgagagggtggtcatcattactatatggtatggacgtctggggccaagggaccacggtcaccgtctcctca

SEQ ID NO: 8575 - DNA, 366 bp, Artificial Sequence
  Synthetic polynucleotide encoding artificial human antibody VH domain
caggtgcaactggtgcagtctgggcctgaggtgaagaagcctggggcctcagtgaaggtctcctgcaaggcttctggatacaccttcaccagttttgatatcaactgggtgcgacaggccactggacaagggcttgagtggatgggatggatgaaccctaacagtggtaacacaggctgtgcacagaagtttcagggcagagtcaccatgaccaggaacacctccataagcacagcctacatggagctgagcagcctgagatctgaggacacggccatgtattactgtgcgagagggccaacttggagtggcggcccgtactactttgactactgggcccagggaaccctggtcaccgtctcctca

SEQ ID NO: 8576 - DNA, 381 bp, Artificial Sequence
  Synthetic polynucleotide encoding artificial human antibody VH domain
cagctgcagctgcaggagtcgggcccaggactggtgaagccttcggagaccctgtccctcacctgcactgtctctggtggctccatcagcagtaggagttactactggggctggatccgccagcccccagggaaggggctggagtggattgggagtatcttttatagtgggagcacctactacaacccgtccctcaagagtcgagtcaccatatccgtagacacgtccaagaaccagttctccctgaagctgagctctgtgaccgccgcagacacggctgtgtattactgtgcgagacaacggatctattgtagtggtggtagctgctactcaaactggttcgacccctggggccagggaaccctggtcaccgtctcctca

SEQ ID NO: 8577 - DNA, 384 bp, Artificial Sequence
  Synthetic polynucleotide encoding artificial human antibody VH domain
gaggtgcaagttttggaatctgggggagggttgggtcagccgggggggtccctgagactctcctgtacagcctctgaattcacatttgcgaactctgccatgacgtgggtccgccaggctccagggcggggtctggagtgggtctcaagtatcagtgggaatggtggcaacataaactacgcatcctccgtgaggggtcgattcttcatctccagagacaattccaagaacaccctctatctgcaactgacgagtctgagagccgacgacacggccaaatattactgtgcgaaactaatgaatttggggacaattcaccccgacggctattatttctacgctctggacgtctggggccaagggaccgcggtcaccgtctcctca

SEQ ID NO: 8578 - DNA, 375 bp, Artificial Sequence
  Synthetic polynucleotide encoding artificial human antibody VH domain
caggtgcagttggtggagtctgggggaggcgtggtccagcctggaaggtccctgagactctcgtgtgcagcctctggattcagcttcaataactatgccatgcattgggtccgccaggctccaggcaaggggctggagtgggtggcacttatatcatatgaaggaagtattaaatactatgcagactccgtgaagggccgattcaccgtctccagagacaatttcaagagcacggtgaatctggagatgagcagcctgagacctgacgacacggcgatatattactgtgccaaaacgaccgccatcttccacatatcagtagctggcagggcccttgactattggggccggggaaccctggtcaccgtctcctca

SEQ ID NO: 8579 - DNA, 354 bp, Artificial Sequence
  Synthetic polynucleotide encoding artificial human antibody VH domain
caggtgcaactgcaggagtcgggcccaggactggtgaagccttcggagaccctgtccctcacttgcattgtctctggtggctccttcagtagttactactggacctggatccggcagcccccggggaagggactggagtggattgggtatatctattacagtagtgggggcaccagctacaacccctccctcaagagtcgagtcaccatatcagtagacacgtccaagaaccagttctccctgaatctgaggtctgtgaccgctgcggacacggccgtttattactgtgtgagatcgggtgattattataacgacgccttgtggggccagggaaccctggtcaccgtctcctca

SEQ ID NO: 8580 - DNA, 351 bp, Artificial Sequence
  Synthetic polynucleotide encoding artificial human antibody VH domain
gaggtgcagctggtggagtctgggggaggcttggtccagcctggggggtccctgagactctcctgtgcagcctctggattcaggtttactggttattggatgagttgggtccgccaggctccggggaaggggctggagtgggtggccaacgtcaagactgatggaagtgacaaatactatgtggagtctgtgaagggccgctttaccatctccagggacaacgccaagaactcagtttatttgcaaatgaacagcctgaggggcgaagacacggccgtctattactgtgcgcgagatggggggtatagtgcagactactggggccagggaaccctggtcaccgtctcgtca

SEQ ID NO: 8581 - DNA, 387 bp, Artificial Sequence
  Synthetic polynucleotide encoding artificial human antibody VH domain
cagctgcagctgcaggagtcgggcccaggactggtgaagccttcggagaccctgtccctcacctgcactgtctctggtggctccatcagcagtagtagttactactggggctggatccgccagcccccagggaaggggctggagtggattgggagtatctattatagtgggagcacctactacaacccgtccctcaagagtcgagtcaccatatccgtagacacgtccaagaaccagttctccctgaagctgagctctgtgaccgccgcagacacggctgtgtattactgtgcgagacagggggtgtattttgactggttattatcgcctattcccggccccggtatggacgtctggggccaagggaccacggtcaccgtctcctca

SEQ ID NO: 8582 - DNA, 360 bp, Artificial Sequence
  Synthetic polynucleotide encoding artificial human antibody VH domain
caggtgcagctggtggagtctgggggaggcgtggtccagcctgggaggtccctgagactctcctgtgcagcctctggattcaccttcagtagctatggcatgcactgggtccgccaggctccaggcaaggggctggagtgggtggcagttatatcatatgatggaagtaataaatactatgcagactccgtgaagggccgattcaccatctccagagacaattccaagaacacgctgtatctgcaaatgaacagcctgagagctgaggacacggctgtgtattactgtgctcgcacgggtagtgggaactacattccccttgactactggggccagggaaccctggtcaccgtctcctca

SEQ ID NO: 8583 - DNA, 366 bp, Artificial Sequence
  Synthetic polynucleotide encoding artificial human antibody VH domain
caggtgcagctggtgcagtccggggctgaggtgaagaagcctggggcctcagtgaaggtctcctgcaaggcttctggatacaccttcacgggctaccatctgcactgggtgcgacaggcccctggacaagggctggagtggatgggatggatcaaccctaatagtggtggcacaaactatgcacagaagtttcagggcagggtcaccatgaccagggacacgtccataagcacagcccacctggagctgagtagactacgatctgacgacacggccttttattactgtgcgagaaacggcggttcggggagttatcttaattggttcgacccctggggccagggaaccctggtcaccgtctcctca

SEQ ID NO: 8584 - DNA, 384 bp, Artificial Sequence
  Synthetic polynucleotide encoding artificial human antibody VH domain
caggtgcagctggtggagtctgggggaggcgtggtccagcctgggaggtccctgagactctcctgtgcagcctctggattcaccttcagtagctatggcatgcactgggtccgccaggctccaggcaaggggctggagtgggtggcagttatatcatatgatggaagtaataaaaactatgcagactccgtgaagggccgatttagcatctccagagacaattccaagaacacgctgtatctgcaaatgaacagcctgagagctgaggacacggctgtgtattactgtgcgaaagatcaaataagagggtatagcagtggctggacgtactactactacggtatggacgtctggggccaagggaccacggtcaccgtctcctca

SEQ ID NO: 8585 - DNA, 381 bp, Artificial Sequence
  Synthetic polynucleotide encoding artificial human antibody VH domain
gaggtgcacctggtggagtctgggggaggcctggtcaagcctggggggtccctgagactctcctgtgcagcctctggattcaccttcagtagctatagcataaactgggtccgccaggctccagggaaggggctggagtgggtctcatccattagtagtaggagtagttacatatactacgcagactcagtgaagggccgattcaccatctccagagacaacgccaagaactcactgtatctgcaaatgaacagcctgagagccgaggacacggctgtgtattactgtgcgagagagaggagaatcacttacgatttttggagtacttatcccgatgcttttgatatctggggccaagggacaatggtcaccgtctcttca

SEQ ID NO: 8586 - DNA, 357 bp, Artificial Sequence
  Synthetic polynucleotide encoding artificial human antibody VH domain
caggtgcacttggtggaatcgggtggaacattggtccactctggggggtccctgagactctcctgtgacgcctctggattcatcttcagtgactactacatgatctggattcgccagacgccagggagggggctggaatggatttcatatatcggcagtgccagtcgccatatatattatgccgactctgtgaagggccgattcactgtctccagggacaataccaagcagtccatggatctccaaatggacaacttaagagtcgacgacacggccgtctatttttgtgcgagaaacagtggcttcggagacggtctagacgtctggggccaagggactacggttaccgtctcctca

SEQ ID NO: 8587 - DNA, 348 bp, Artificial Sequence
  Synthetic polynucleotide encoding artificial human antibody VH domain
caggtgcaactggtggagtctgggggaggcgtggtccagcctgggaggtcccggagactctcctgtgcagcctctggattcatgttcagtatctatgctatgcactgggtccgccaggctccaggcaaggggctggagtgggtggcatctatttcatatgatggaagctatgaattctatgcggactccatgaagggccgcttcaccatctccagagacaattccaagaaaatacttcatctgcaaatgaactccctgagacctgaggacacggctgtctattactgtgcgagagaaactggggcgtttgactactggggccagggaaccctgctaatcgtctccgca

SEQ ID NO: 8588 - DNA, 375 bp, Artificial Sequence
  Synthetic polynucleotide encoding artificial human antibody VH domain
caggtgcagctgcaggagtcgggcccaggactggtgaagccttcacagaccctgtccctcacctgcactgtctctggtggctccatcagcggtggtgattactactggagttggatccgccagcccccagggaggggcctggagtggattgggtacatctattacagtggggacacctactacaacccgtccctcaagagtcgagttaccatatcagtagacacgtccaagaaccagttctccctgaagctgacctctgtgactgccgcagacacggccgtgtattactgtgccagagccctttcgcattactatggtagaggtggttatttatgtgactactggggccagggaaccctggtcaccgtctcctca

SEQ ID NO: 8589 - DNA, 351 bp, Artificial Sequence
  Synthetic polynucleotide encoding artificial human antibody VH domain
gaggtgcagctggtggagtctgggggaggcttggtaaagcctggggggtcccttagactctcctgtgcagcctctggattcactttcagtaacacctggatgagctgggtccgccagtctccagggaaggggctggagtgggttggccatattaaaaggaaagttgacggtgggtcaacagactacgctgcacccgtgaaaggcagattcaccatctcaagagatgattcaaaaaacacggtgtatctgcaaataaacggcctgaaaaccgaggacacagccgtgtattactgcaccggtaactggaactgtgactactggggccagggaaccctgatcaccgtctcctca

SEQ ID NO: 8590 - DNA, 384 bp, Artificial Sequence
  Synthetic polynucleotide encoding artificial human antibody VH domain
caggtgcagctacagcagtggggcgcaggactgttgaagccttcggagaccctgtccctcacctgcgctgtctatggtgggtccttcagtggttactcctggagctggatccgccagcccccagggaaggggctggagtggattggggaaatcaatcatagtggaagcaccaactacaacccgtccctcaagagtcgagtcaccatatcagtagacacgtccaagaaccagttctccctgaagctgagctctgtgaccgccgcggacacggctgtgtactactgtgcgagaccggtggggtattactatggttcggggagttacgttcggcccagaacgagtatggacgtctggggccaagggaccacggtcaccgtctcctca

SEQ ID NO: 8591 - DNA, 387 bp, Artificial Sequence
  Synthetic polynucleotide encoding artificial human antibody VH domain
caggtgcagctacagcagtggggcgcaggactgttgaagccttcggagaccctgtccctcacctgcgctgtctatggtgggtccttcagtggttactactggagctggatccgccagcccccagggaaggggctggagtggattggggaaatcaatcatagtggaagcaccaactacaacccgtccctcaagagtcgagtcaccatatcagtagacacgtccaagaaccagttctccctgaagctgagctctgtgaccgccgcggacacggctgtgtattactgtgcgagaggcgccgggggagcactggctggggttctcgtcaccgtatactactactacggtgtggacgtctggggccaagggaccacggtcaccgtctcctca

SEQ ID NO: 8592 - DNA, 393 bp, Artificial Sequence
  Synthetic polynucleotide encoding artificial human antibody VH domain
caggtgcaactgcaggagtcgggtccaggactggtgaggccctcacagaccctgtccctcacctgcactgtctccggtggctccatcatcagcggaagcaagtactggagttggatccggcagcccgccgggaaggggctggagtggattgggcgtatccacaccagtggacccacctcatacacggcctccctcaagagtcgcgtcaccatatcagtcgacacgtctgtaaatcagttctccctgacgctgacctctgtgaccgtcgcagacacggccatttattactgtgcgcgggagtcgggggagtcttatgaaagtagacaattaacgttcaccgagcctggtgctttcgacatctggggccaagggacagtggtcaccgtctcttca

SEQ ID NO: 8593 - DNA, 363 bp, Artificial Sequence
  Synthetic polynucleotide encoding artificial human antibody VH domain
caggtccagttgatacaatctggggctgaggtgaaaaaccctggggcctcagtgaaggtctcctgcaaggtttccggatacaccctcagtgaattatccatgcactgggtgcgacaggctcctggaaaagggcttgagtggatgggaggttttcatcctgaagacggtgaaagattctacgtccagaagttccagggcagagtcaccatgaccgaggacacatctacagacacagcctacatggagctgagcagcctgacatctgaggacacggccgtatattattgtgcaacagacggcatatatagcaaccctggatggttcgacccctggggccagggaaccctggtcaccgtctcctca

SEQ ID NO: 8594 - DNA, 369 bp, Artificial Sequence
  Synthetic polynucleotide encoding artificial human antibody VH domain
caggtgcagctgcgggagtcgggcccaggactggtaaagccttcggagaccctgtccctcacctgctctgtctctagtggctccgtcatctctttctactggagttggctccggcagcccccagggaagggactggagttaattagttttatgtatttcactgggaccgccaaatgcaacccctccctcaagagtcgagtcaccatgtcagttgacacgtccaagaaccagttctccctgaatctgacttctgtgaccgctgcagacacggccgtttacttctgtgcgagagccccgggggtaccttttccacctgccatagcagcctttgacttctggggccacggaaccctggtcaccgtctcctca

SEQ ID NO: 8595 - DNA, 348 bp, Artificial Sequence
  Synthetic polynucleotide encoding artificial human antibody VH domain
gaggtgcaggtggtggagtcggggggagacttggtccagcctggggggtccctgagactctcctgtgcagcctctggattcaactttattaactattggatgaactgggtccgccaggctccagggaaggggctggagtgggtggccaatatgaagccagatggaagtgagaaacggtttgtggactctgtgaagggccgattcatcatgtccagagacaacgccaagaattcactgtatctgcaaatgaacagcctgagagtcgaggacacggctgtgtattactgtgtggcatggggtggctccgatgcctactggggccagggagccctggtcaccgtctcctca

SEQ ID NO: 8596 - DNA, 369 bp, Artificial Sequence
  Synthetic polynucleotide encoding artificial human antibody VH domain
gaggtgcagctgttggagtctgggggaggcttggtacagcctggggggtccctgagactctcctgtgcagcctctggattcacctttagcagctatgccatgagctgggtccgccaggctccagggaaggggctggagtgggtctcagctattagtggtggtggtggtagcacatactacgcagactccgtgaagggccggttcaccatctccagagacaattccaagaacacgctgtatctgcaaatgaacagcctgagagccgaggacacggccgtatattactgtgcgaaagcggcgattgtagtggtggtagctgctactgagcttgactactggggccagggaaccctggtcaccgtctcctca

SEQ ID NO: 8597 - DNA, 369 bp, Artificial Sequence
  Synthetic polynucleotide encoding artificial human antibody VH domain
caggtgcaggtggtggagtctgggggaagcgtggcccagcctgggacgtccctgagactctcttgtgcagcgtctggattcactttcagcaattatggcatgcactgggttcgccaggctccaggcaaggggctggaatgggtggcactgatatggtttgatggaagtcatcaatactatggagagtccgtgaagggccgattcaccatctccagagacaactccaggaacatggtgtttctggaaatgaacagcctgagagtcgaggactcggctgtgtatttctgtgcgagagtcggggacgtggctcgaacggttaacaactggttggacccctggggccagggaaccctggtcaccgtctcctca

SEQ ID NO: 8598 - DNA, 360 bp, Artificial Sequence
  Synthetic polynucleotide encoding artificial human antibody VH domain
gaggtgcagctggtggagtctgggggaggcctggtcaagcctggggggtccctgagactctcctgtgcagcctctggattcaccttcagtagctatggcatgaactgggtccgccaggctccagggaaggggctggagtgggtctcatccattagtagtagtagtagttacatatactacgcagactcagtgaagggccgattcaccatctccagagacaacgccaagaactcactgtatctgcaaatgaacagcctgagagccgaggacacggctgtgtattactgtgcgagagatggggttctcttcggggaccttggtgactactggggccagggaaccctggtcaccgtctcctca

SEQ ID NO: 8599 - DNA, 360 bp, Artificial Sequence
  Synthetic polynucleotide encoding artificial human antibody VH domain
caggtgcagctgcaggagtcgggcccaggactggtgaagccttcggagaccctgtccctcacctgcactgtctctggtggctccatcaatggttactactggaactggatccggcagtccccaggaaagggactggagtggattgggtatatctattacagtgggagcaccagctacaacccctccctcgagagtcgagtcaccatgtcagtagtcacctccaagaaccaattctccctgaagctgagttctgtgactgctgcggacacggccgtatattattgtgcgggaagtactaaaagtgactggtcttggcacttcgatctctggggccgtggcgcccgggtcactgtctcctca

SEQ ID NO: 8600 - DNA, 363 bp, Artificial Sequence
  Synthetic polynucleotide encoding artificial human antibody VH domain
caggtgcagctggtgcagtctggggctgaggtgaagaagcctggggcctcagtgaacgtttcctgcaagccatctggatacaccttcaccaacttctttatacactgggtgcgacaggcccctggagaagggcttgagtggatgggaataatcaaccctggtgttggtagcacaaactacgcacagaagttccagggcagagtcaccatgaccagggacacgtccacgagcacattctccatggagttgagcagcctgagatctgaggacacggccatatatttctgtgcgaggggggggcacttcggtggtactgagggctttgactattggggccagggaaccctggtcaccgtctcctca

SEQ ID NO: 8601 - DNA, 372 bp, Artificial Sequence
  Synthetic polynucleotide encoding artificial human antibody VH domain
caggtgcagctacagcagtggggcgcaggactattgaagccttcggagaccctgtccctcacctgcgctgtctatggtagttccttcagtttttactactggacttggatccgccactccccagggaaggggctggagtggattggggaaatcaatcatagtggaagcaccaactacaacccgtccctcaagagtcgagtcaccatatcgattgacacgtccaaaaaccagttctccctgaagctgacctctgtgaccgccgcggacacggctgtgtattcctgtgcgagaggggggccgcagtaccaggtgcgtcttcgcccgattttctttggcctttggggccagggaaccctggtcaccgtctcctca

SEQ ID NO: 8602 - DNA, 360 bp, Artificial Sequence
  Synthetic polynucleotide encoding artificial human antibody VH domain
gaggtgcagttgttggagtctgggggaggcttggtacagcctggggggtccctgagagtctcctgtgcagcctccggattcatgtttagcaactatgccatgagttgggtccgccaggctccagggaaggggctggagtgggtctcaattattagtggtagtatcacaaactacgcagactccgtgaagggccggttcaccatctccaaagacaattccaagaacacgctgtatctgcaaatgaacagcctgagagccgaggacacggccgtatattactgtgcgagcagactcggagattgtagaggtaccagctgccccatctactggggccagggaaccctggtcaccgtctcctca

SEQ ID NO: 8603 - DNA, 366 bp, Artificial Sequence
  Synthetic polynucleotide encoding artificial human antibody VH domain
cagatcaccttgaaggagtctggtcctacgctggtgaaacccacacagacggtcacgctgacctgcagtttctctggcttctcactcagcaacattggagtcggtgtggcctggatccgtcagccccccggaaaggccctggagtggcttgcactcatttattgggatgatgataagcgctacaacccatctctgaagaccaggctcaccatcaccaaggacacctccaaagaccaggtggtccttacaatgaccaacatggaccctgtggacacagccacatattactgtgcacacagtaaatattattatgattggtcatggttcgacccctggggccagggacttctggtcaccgtctcctca

SEQ ID NO: 8604 - DNA, 381 bp, Artificial Sequence
  Synthetic polynucleotide encoding artificial human antibody VH domain
caggtgcagctggtgcagtctggggctgaggtgaagaagcctggggcctcagtgaaggtctcctgcaaggcttctggatacaccttcaccggcaactatatgcactgggtgcgacaggcccctggacaagggcttgagtggatgggatggatcaaccctaacagtggtgccacaaactatgcacagaagtttcatggcagggtcaccatgaccagggacacgtccgtcagcacagcctacatggagctgcgcaggctgagatctgacgacacggccgtgtattactgtgcgagaaatgaagaccgcgtcaccatactcgtcttatctcgtcactacggtatggacgtctggggccaagggaccacggtcaccgtctcctca

SEQ ID NO: 8605 - DNA, 360 bp, Artificial Sequence
  Synthetic polynucleotide encoding artificial human antibody VH domain
caggtgcagctggtggagtctgggggaggcgtggtccagcctgggaggtccctgagactctcctgtgcagcctctggattcaccttcagtagctatggcatgcactgggtccgccaggctccaggcaaggggctggagtgggtggcagttatatcatatgatggaagtaagaaatactatgcagactccgtgaagggccgattcaccatctccagagacaattccaagaacacgctgtatctgcaaatgaacagcctgagagctgaggacacggctgtgtattactgtgcgaaagagtttgactactactactacggtatggacgtctggggccaagggaccacggtcaccgtctcctca

SEQ ID NO: 8606 - DNA, 378 bp, Artificial Sequence
  Synthetic polynucleotide encoding artificial human antibody VH domain
caggtgcagctggtggagtctgggggaggcttggtcaaggttggagggtccctgagagtctcctgtgcagcctctggattcaccttcagtgatcattacatgaattggatccgccaggctcctgggaaggggctggagtggatttcatatgtcagttcttttggtagttacacaaactatgcagactctgtgaagggccgattcacaatctccagagacaacgccaagaactctctgtatctgcaaatgaacagcctgagagccgacgacacggccgtctattactgtgcgaggagcagccccagagaatatagttctggtttggaggttgcctggttcgactcctggggccagggaacattggtcaccgtctcctca

SEQ ID NO: 8607 - DNA, 369 bp, Artificial Sequence
  Synthetic polynucleotide encoding artificial human antibody VH domain
cagctgcagctgcaggagtcgggcccaggactggtgaagccttcggagaccctgtccctcacctgcactgtctctggtgactccatcagcagtagtagttactactggggctgggtccgccagcccccagggaaggggctggaatggattgggagtatctcttatagtgggagcacctactacaacccgtccctcaagagtcgagtcaccatatccgtagacacgtccaagaaccagttctccctgaagctgagctctgtgaccgccgcagacacggctgtgtattactgtgcgagacggttcggtgactatcagtacgggtactactttgactactggggccagggaaccctggtcaccgtctcctca

SEQ ID NO: 8608 - DNA, 390 bp, Artificial Sequence
  Synthetic polynucleotide encoding artificial human antibody VH domain
cagctgcagctgcaggagtcgggcccaggactggtgaagccttcggagaccctgtccctcacctgcactgtctctggtggctccatcagcagtaggagttactactggggctggatccgccagcccccagggaaggggctggagtggattgggagtatctattatagtgggagcacctactacaacccgtccctcaagagtcgagtcaccatatccgtagacacgtccaagaaccagttctccctgaagctgagctctgtgaccgccgcagacacggctgtgtattactgtgcgagacgccccttacagggtatttccctttttggagtggttacctataacaactggttcgacccctggggccagggaaccctggtcaccgtctcctca

SEQ ID NO: 8609 - DNA, 360 bp, Artificial Sequence
  Synthetic polynucleotide encoding artificial human antibody VH domain
caggtgcagctggtgcagtctggggctgaggtgaagaagcctggggcctcagtgaaggtctcctgcaaggcttctggatacaccttcaccagctatgatatcaactgggtgcgacaggccactggacaagggcttgagtggatgggatggatgaaccctaacagtggtaacacaggctatgcacagaagttccagggcagagtcaccatgaccaggaacacctccataagcacagcctacatggagctgagcagcctgagatctgaggacacggccgtgtattactgtgcgagacgtatagcagcagctggcacagctgttggatactggggccagggaaccctggtcaccgtctcctca

SEQ ID NO: 8610 - DNA, 351 bp, Artificial Sequence
  Synthetic polynucleotide encoding artificial human antibody VH domain
gaagtgcagctggtggagtctgggggaggcgtggtacagcctggggggtccctgagactctcctgtgcagcctctggattcacctttgatgattatgccatgcactgggtccgtcaagctccagggaagggtctggagtgggtctctcttattagtggggatggtggtagcacatactatgcagactctgtgaagggccgattcaccatctccagagacaacagcaaaaactccctgtatctgcaaatgaacagtctgagaactgaggacaccgccttgtattactgtgccgtgggggagtgggagctacttgactactggggccagggaaccctggtcaccgtctcctca

SEQ ID NO: 8611 - DNA, 354 bp, Artificial Sequence
  Synthetic polynucleotide encoding artificial human antibody VH domain
caggtgcagctggtggagtctgggggaggcgtggtccagcctgggaggtccctgagactctcctgtgcagcgtctggattcaccttcaatacctctggcatgcactgggtccgccaggctccaggcaaggggctggagtgggtggcagttatgtggtctgatgtaaataacaaatactatgcagactccgtgaagggccgcttcaccatctccagagacaattccaagaacactctgtatctgcaaatgaacagcctgagagccgaggacacggctgtctattactgtgcgagagattatgatagcagctcgcttgactactggggccagggaaccctggtcaccgtctcctca

SEQ ID NO: 8612 - DNA, 375 bp, Artificial Sequence
  Synthetic polynucleotide encoding artificial human antibody VH domain
caggtgcagctggtggagtctgggggaggcgtggtccagcctgggaggtccctgagactctcctgtgcagcctctggattcaccttcagtagctatggcatgcactgggtccgccaggctccaggcaaggggctggagtgggtggcagttatatcatatgatggaagtaataaatactatgcagactccgtgaagggccgattcaccatctccagagacaattccaagaacacgctgtatctgcaaatgaacagcctgagagctgaggacacggctgtgtattactgtgcgaaagaaggcgggggatacagctatggttcggacggcgaaacgggggccgtctggggccaagggaccacggtcaccgtctcctca

SEQ ID NO: 8613 - DNA, 384 bp, Artificial Sequence
  Synthetic polynucleotide encoding artificial human antibody VH domain
caggtgcggctgcaggagtcgggcccaggactggtgaagccttcacagacactgtccctcacctgctctgtctctggtgcctccatcaacactgggccttattactggaactggatccggcagcccgccggggggggactgcagtggattggccgtacctataccactgggagcaccaagtacaacccctccctcaacagtcgagtcaccatatctttagacacgtccaagaaccaattctccctgaggttgacctctgtgaccgccgcagacacgggcgtttatttttgtgcgagagagggggatgacggtgacttcgagaggggattcttctactacgcaatggacgtctggggcccagggaccacggtcaccgtctcctca

SEQ ID NO: 8614 - DNA, 384 bp, Artificial Sequence
  Synthetic polynucleotide encoding artificial human antibody VH domain
gaggtgcagctggtggagtctgggggaggcttggtccagcctggggggtccctgagactctcctgtgcagcctctggattcaccttcagtagctatgctatgcactgggtccgccaggctccagggaagggactggaatatgtttcagctattagtagtagtgggggtagcacatattatgcaaactctgtgaagggcagattcaccatctccagagacaattccaagaacacgctgtatcttcaaatgggcagcctgagagctgaggacatggctgtgtattactgtgcgagaaggtcggggcagcagctggtatctaaagggagctactactactacggtatggacgtctggggccaagggaccacggtcaccgtctcctca

SEQ ID NO: 8615 - DNA, 378 bp, Artificial Sequence
  Synthetic polynucleotide encoding artificial human antibody VH domain
gaggtgcagctggtggaatctgggggagatttggtccagcctggggggtccctgagactttcctgtgcagcctctcaattcacttttagtttgtattggatgacctgggtccgccgggctccagggaaggggctggagtgggtggccaacataaggccagatggagctgttcaattttatgttgattctgtgaagggccgattcaccatctccagagataacgccaagaattcactgtatcttcaaatgaacgacctgagaaccgaggacacggccatttattactgtgcgagagagaattgtgtcaaaccaagtagggactaccactactacggaatggacgtctggggccaagggaccacggtcaccgtcgcctca

SEQ ID NO: 8616 - DNA, 357 bp, Artificial Sequence
  Synthetic polynucleotide encoding artificial human antibody VH domain
caggtccagctggtgcaatctgggcctgaggtgaagatgcctgggtcctcggtgaaggtctcctgcaaggcttctggaggcaaccccacttacaccttcgcctgggtgcgacaggcccctggacaagggcttcagtggatgggaaggatcgtccctatcgttggcttagcgaactatgcccagactttgaaggacagactcacgattgtcgcggacaaatccacgggcaccacctacatgcaattgagcagcctgagatctgacgacacgggcgtctattattgcgcgagaggggcatctgtcggtgacttttattttgattattggggccagggaaccctggtcaccgtctcctca

SEQ ID NO: 8617 - DNA, 387 bp, Artificial Sequence
  Synthetic polynucleotide encoding artificial human antibody VH domain
caggtgcagctggtggagtctgggggaggcgtggtccagcctgggaggtccctgagaatctcttgttccggttttggattcaccttcaataactatgccatgcactgggtccgccaggctccaggcaaggggctagagtgggtggcgactataacacatgatggaggtgttcaatattatgcggactccgtgaggggccgattcaccatctccagagacaactccaagaacaccctctatctgcaaatgcggagcctgagagttgaggattcggctatttattactgtgcgaaagatcatcaatatctttatagcgccacgtggtataggggttctgctctgggctttgactcccggagccagggaacccttgtcaccgtctcctca

SEQ ID NO: 8618 - DNA, 354 bp, Artificial Sequence
  Synthetic polynucleotide encoding artificial human antibody VH domain
gaggtgctgctggtggagtctgggggaggcttggtccaacctggagggtccctgagactctcctgtgtagcctctggattcaactttaaagactcttggatgacctgggtccgcctggctccagggaaggggctggagtgggtggccgacatgaaccaggatggaagtgtgagatcttatgtggactctgtgaggggccgattcagcatctccagagacaacgccgagaactcattctttctgcaaatgaacagcctgagagtcgaagacacggccgtatattactgtgcgagagaccccgccttcggggcgcttgacttctggggccagggaaccctggtcaccgtctcctca

SEQ ID NO: 8619 - DNA, 360 bp, Artificial Sequence
  Synthetic polynucleotide encoding artificial human antibody VH domain
caggtgcaactggtgcagtctggggctgaggtgaagaagcctggggcctcagtgaaggtctcctgcagggcttctggatacactttcgccgcctactatattcactgggtgcgacaggcccctggacaaggtcttgaatggatgggatggatgaaccctaacaatggtggcacaaattatgcaccgaagtttcagggccgggtcaccatgaccagagacacctccatcagcacagcctacatggaactgagcaggctgacatctgacgacacggccgtctactactgtgcgagagctttgatcggggagcgtgtggcgttcgccccctggggccagggaaccctggtccccgtctcctca

SEQ ID NO: 8620 - DNA, 354 bp, Artificial Sequence
  Synthetic polynucleotide encoding artificial human antibody VH domain
caggtgcagctggtggcgtctgggggaggcttggtcaaagttggagggtccctgagactctcctgtgcagcctctggattcaccttcagtgactactacatgacctggatccgtcaggctccagggaaggggctggagtggatttcatacgttagtcgtggcggtgattacacaaattatacagactctgtgaagggccgattcaccatctccagagacaacgccaagaattcactttttctgcaaatgaacagcctgagagccgaggacacggccgtttactattgtgtgagagacggggggaggggcctctttgactgctggggccagggaaccctggtcactgtctcctca

SEQ ID NO: 8621 - DNA, 372 bp, Artificial Sequence
  Synthetic polynucleotide encoding artificial human antibody VH domain
caggtgcagctggtggagtctgggggaggcgtggtccagccggggaggtccctgagactctcctgtgcagcctctggattcactttcggtaactatggcatgcactgggtccgccaggctccaggcaaggggccggagtggctgacagttatatcatatgatggaagtcgaacatggtatgcagactccgtgaagggccggctcaccgtctccagagacaactccaagaacacggtgtccctgcaagtggacagtctgggacctgaggacacgggtgtgtattactgtgcgaaagatgtgaacggtctaagagatggcaaccaatatgccgcggaccactggggccagggaaccctggtcaccgtctcctca

SEQ ID NO: 8622 - DNA, 375 bp, Artificial Sequence
  Synthetic polynucleotide encoding artificial human antibody VH domain
caggtgcagctgcaggagtcgggcccaggactggtgaagccttcggagaccctgtccctcacctgcactgtctctggtgactccgccagcaatcataattatttctggacctggcttcggcagcccccagggaaggggctggagtggattgggtataggacttatactgggaacatccataagaacccctctctccagagtcgagtcactatatcaatagacacgtccaagaaccagttctccctgaaagtgacctctgtgaccgctgcggacacggccatatattattgtgcgagaggctctaattactacgatactagtggggaggactacctcgacccctggggccagggaatcctggtcagcgtctccgca

SEQ ID NO: 8623 - DNA, 348 bp, Artificial Sequence
  Synthetic polynucleotide encoding artificial human antibody VH domain
caggtgcagctgctggagtcgggcccaggactgctgaagccgtcggagaccctgtccctcacctgcaatgtgtctggtgcctccatcgatagttattactggagctggatccggcagtccccagggaagggacttgagtggattggatacatctattacagagggggcaccagctacaacccctccctcaagagtcgagtcctcatatcactaggcgcgtctagggatcatttctccctgaggctgagttctgtgaccgccgcagacacggccgtctattactgtgcgagacaccccaatacagctatcgacttctggggccagggaatcctggtcaccgtctcctca

SEQ ID NO: 8624 - DNA, 357 bp, Artificial Sequence
  Synthetic polynucleotide encoding artificial human antibody VH domain
caggtgcagctacaagagtcgggcccaggactggtgaggccttcggagaccctgtccctcacctgcgttgtctctggtggctccatggacagtcataattggtggagttgggtccgccagtccccagagaaggggctggagtggattggtgaaatctatcagagtgggcgcaccacctacaacccgtcccttcagagtcgggtcaccatttcaggagacacatccaagaacctattctccctgaagttgagttctgtgaccgccgcggacacggccgtctattactgtgcgcgagtggttcctgtggggtggtactgcgatctctggggccgtggcaccctggtcactgtctcttca

SEQ ID NO: 8625 - DNA, 360 bp, Artificial Sequence
  Synthetic polynucleotide encoding artificial human antibody VH domain
gaggtgcagctggtggagtccgggggaggcttagttcagccgggggggtccctgagactctcctgtggagcctctggattcaccttcagtagttactggatgcactgggtccgccaagctccagggaaggggctggtgtgggtctcacgtattaatagtgatgggagaactacaagctatgcggactccgtgaagggccgattcaccatctccagagacaacgccaagaacaccctgtatctgcaaatgaacagtctgagagccgaggacacggctgtatattactgtgcaaaaactgggctgcctgggcccctcgcttttgatatctggggccaggggacaatggtcaccgtctcttca

SEQ ID NO: 8626 - DNA, 354 bp, Artificial Sequence
  Synthetic polynucleotide encoding artificial human antibody VH domain
caggtgcagctgcaggagtcgggcccaggagtggtgaagccctcggagaccctgtccctcacctgcactgtctccagtttctccatcagcagtggttactactgggcctggatccggcagcccccagggaaggggatggagtggattgggagcatctttcataatggaaacacctactacaacccgtccctcaagagtcgagtcaccatatcagtagacacgtccaagaaccagttctccctgaagctgacctctgtgaccgccgcagacacggccatctattactgtgcgagagactattattatgatagtagtggctactggggccagggaaccctggtcaccgtctcctca

SEQ ID NO: 8627 - DNA, 366 bp, Artificial Sequence
  Synthetic polynucleotide encoding artificial human antibody VH domain
gaggtgcagctgttggaatctgggggagacttggtacagcctggggggtccctgagactctcttgtgcagcctctggattcacctttggcagctttgccatgaactgggtccgccaggctccagggaaggggctggagtgggtctcaggtattagtggcagtggaggtagtacacactacgcagactccgtgaagggccgcttcaccatctccagagacaattccaggaacacagtgtacctgcaaatgaacagcctgagagccgacgacacggccctatattactgtgcgaaagggagcagtggctggtaccagagttactactttgactactggggccagggtaccctggtcaccgtctcctca

SEQ ID NO: 8628 - DNA, 372 bp, Artificial Sequence
  Synthetic polynucleotide encoding artificial human antibody VH domain
cagctgcagctgcaggagtcgggcccaggactggtgaagccttcggagaccctgtccctcacctgcactgtctctggtggctccatcagcagtagtagttactactggggctggatccgccagcccccagggaaggggctggagtggattgggagtatctattatagtgggagcacctactacaacccgtccctcaagagtcgagtcaccatatcagtggacacgtccaagaaccagttctccctgaagctgagctctgtgaccgccgcggacacggccgtgtattactgtgcgagaggcgccccaagagtgtggcagtggctggactactttgactactggggccagggaaccctggtcaccgtctcctca

SEQ ID NO: 8629 - DNA, 363 bp, Artificial Sequence
  Synthetic polynucleotide encoding artificial human antibody VH domain
gaggtgcagatgttggagtctgggggaggcttggtacagcctggggggtccctgagactctcctgtgcagcctctggattcacctatagcacctatgccatgacctgggtccgccaggctccagggaaggggctggagtgggtctcaactcttgaccgtactggtagtttaacgttctacgcagactccgtgaagggccggttcaccgtctccagagacaattccaagaacacgatgtatctgcaaatgaacagcctgagagccgaggacacggccatatattactgtgcgaaaacgccctccggtaactacgaggcatactaccagaactggggccagggcaccctggtcaccgtctcctca

SEQ ID NO: 8630 - DNA, 351 bp, Artificial Sequence
  Synthetic polynucleotide encoding artificial human antibody VH domain
gaggtgcagttggtggagtccgggggaggcttagttcagcctggggggtccctgagactctcatgtgcagcctctggattcaccttcagtacctcctggatgcactgggtccgccaagctccagggaagggactggtgtgggtctcacgtcttaagagtgatgggagtagcacaaactacgcggactccgtgaagggccgattcaccatctccagagacaacgccaagaacacgctgtatctgcaaatgaacagtctgagagtcgaggacacggctgtctattactgtgcaagtctgcagggtagtgcgccccgcgcctggggccagggtaccctggtcaccgtctcctca

SEQ ID NO: 8631 - DNA, 381 bp, Artificial Sequence
  Synthetic polynucleotide encoding artificial human antibody VH domain
cagctgcttctccaggagtcgggcccaggactggtgaagccttcggagacactgtccctcaactgctctgtctcaggtgactccatcaccactaccggtttcttctggggctggatccgccaagtcccaggcgtgggtctggagtggcttgggagtgtctattatactggaagtacttattataatccgaccctcaaaagtcgccttgtcatttccgtcgacacgtccaataatcagttctccctcagtctcacttctgtgaccgccgcagacgcgggcttttactactgtgcgcgacggtcgtcaatcggactcaagacaaatggacgtctgcgcgtctttgacacatggggccggggaacccgggtcaccgtctcctca

SEQ ID NO: 8632 - DNA, 351 bp, Artificial Sequence
  Synthetic polynucleotide encoding artificial human antibody VH domain
caggtccagcttgtgcagtctggggctgaggtgaagaaccttggggcctcagtgaaggtgtcctgcaaggcctctgggttcaccttcactagtttctcaatacactggctgcgccaggcccccggacaagggcttgagtggatgggatggatcaacgttggcactggtgagacaaaattttcacagagttcccagggcagagtcacctttagcaccgacacatccgcgagcacagcctacatggagttgaggagtctgaaatctgaagacacggctgtatatttctgtgcgagagttagttttggcgactacgcggtgtggggccagggaactcaggtcaccgtctcctca

SEQ ID NO: 8633 - DNA, 366 bp, Artificial Sequence
  Synthetic polynucleotide encoding artificial human antibody VH domain
gaggtgcagttgttggagtctgggggaggcttggcacagcctggggggtccctgagactctcctgtgcaggctctggattcagttttggtcgctatggcatgggctggattcgccaggctccagggaagggactggagtgggtctgcgttatcagtagcatctctgacacgtcacagtgcgcagagtccgtgtcgggccgattcatcgtctccagagacaactccaggaacaccttatttttggaaatgaatagcctgagagccgaagacacggccacatattattgtgtgaaggatgacgatgccagtactgattggtatgcggctgactcctggggccagggaaccctggtcgtcgtctcgtca

SEQ ID NO: 8634 - DNA, 357 bp, Artificial Sequence
  Synthetic polynucleotide encoding artificial human antibody VH domain
caggttcagctggtgcagtctggagctgaggtgaagaagcctggggcctcagtggaggtctcctgcaaggcttctggttacacctttaccagctatggtatcaactgggtgcgacaggcccctggacaagggcttgagtggatgggatggatcagcgctttcaatggtaacacaatctatgcacagaagttccagggcagtgtcaccatgaccacagacacatccacgagcacagcctacttggccctgaggagcctgagatctgacgacacggccgtctattactgtgcgagaggggcatcacctcgctccagaactgactactggggccagggcaccctggtcaccgtctcctca

SEQ ID NO: 8635 - DNA, 366 bp, Artificial Sequence
  Synthetic polynucleotide encoding artificial human antibody VH domain
gaggtgcagctgttggagtctgggggaggcttggtacagccggggggatccctgagactctcttgtgcagcctctggattcacctttaacaactttgccatgaactgggtccgccagagtccagggaaggggctggagtgggtctcaggtatcagtggtagtggcggtgattcccagtatgcagactccgtgaagggccggttcgccatctccagagacaactccaagaaaacgctgtatctgcaaatgagcagcctgagagccgaggacacggccgtatattactgtgcgaaagggtccagtggctggtatatgagttactattttgactactggggccggggaaccctggtcaccgtctcctca

SEQ ID NO: 8636 - DNA, 378 bp, Artificial Sequence
  Synthetic polynucleotide encoding artificial human antibody VH domain
cagctgcagttacaggagtcgggcccaggactggtgaagccttcggagaccctgtccctcagctgcactgtctctggtgactcccttagtagtacaagttattcctgggcctggatccgccagcccccagggaaggggctggagtggattgggactatgtattatcgtgggagcacctcgtacatcccgtccctcaagggtcgcgtcagcatatccgtagacacgtccaagaaccagttctccctgaagctctactctgtgacggccgcggacacggccctatattactgtgcgagaggaggcgctccttatagtgttgggtgggacgacaactggttcgacccctggggccagggcaccctggtctccgtctcttca

SEQ ID NO: 8637 - DNA, 366 bp, Artificial Sequence
  Synthetic polynucleotide encoding artificial human antibody VH domain
gaggtgcagctgttggagtctgggggaggcttggtacagccgggggggtccctgagactctcctgtgcagcctctggattcacctttagcacctatgccatgaactgggtccgccaggctccagggaaggggctggaatgggtctcaggtattagtggtagtagtggtagcacacagaacgcagactccgtgaagggccggttcagcatctccagagacaattccaagaatatgttgtatctgcaaatgaacagcctgagagccgaggacacggccgtatattactgtgcgaaagggagcagtggctggtaccgaaattactactttgactattggggccagggaaccctggtcaccgtctcctca

SEQ ID NO: 8638 - DNA, 366 bp, Artificial Sequence
  Synthetic polynucleotide encoding artificial human antibody VH domain
gaggtgcaggtggtgcagtctggagcagaggtgaaaaagcccggggagtctctgaagatctcctgtaaggcatctggatacagctttaccaaccactggatcggctgggtgcgccagatgcccgggaaaggcctggagtggttggggatcatccatcctagtgactctgaaaccacatacagcccgtccttccaaggccgggtcaccatctcagtcgacaagtccatcagtgccgcctacctgcagtggagcggcctggaggcctcggacagcgccatctattactgtgcgagacggggtggtggtggctacccctactactacttcgatctctggggccgtggcaccccggtcactgtctcctca

SEQ ID NO: 8639 - DNA, 366 bp, Artificial Sequence
  Synthetic polynucleotide encoding artificial human antibody VH domain
gaggtgcacctgttggagtctgggggaggcgtggtacagcctggggggtccctgagactctcctgtgcagcctctggattcacctttaacaactatgccatgaattgggtccgccgggctccagggaaggggctggagtgggtctcaggtattagtgggagtggtggtgacacagcctacccagactccgtgaagggccggttcaccatctccagagacaattccaagaacactctgtctctgcaaatgaacagcctgagagacgaggacacggccgtatattactgtgcaagagggagcagtggctggtactcggcatactactttgactactggggccagggaaccctggtcaccgtctcctca

SEQ ID NO: 8640 - DNA, 357 bp, Artificial Sequence
  Synthetic polynucleotide encoding artificial human antibody VH domain
gaggtgcagctggtggagtctgggggaggcctggtcaagccgggggggtccctgagactctcttgctcagcctctggattcaccttcttcacctatacaatgaactgggtccgccaggctccaggggagggactggagtgggtctcatcaattacctccggtagcacttatctacactacgcagactcagtgaaggcccgattcaccatctccagagacaacgcgaagagttcgctgtatctgcaaatgaactccctgagcgccgaggacacggctgtgtattattgtgtgaggggggcctccgggattggggtgactcgctactggggccagggaaccctggtcaccgtctcctca

SEQ ID NO: 8641 - DNA, 363 bp, Artificial Sequence
  Synthetic polynucleotide encoding artificial human antibody VH domain
gaggtgcaactgttggagtctgggggaggcttggtacagcctggggggtccctgagactctcctgtgcagcctctggattcacctttaaaaactatgccatgagttgggtccgccaggctccagggaaggggctggagtgggtctcagctattagtggtagtggtggtagcacatactacgcagactccgtgaagggccggttcaccatctccagagacaattccaagaacacactgtatctgcaaatgaacagcctgagagccgaggacacggccgtatattactgtgcgaaatccccagtgagtggttattacaactactttgactactggggccagggaaccctggtcaccgtctcctca

SEQ ID NO: 8642 - DNA, 387 bp, Artificial Sequence
  Synthetic polynucleotide encoding artificial human antibody VH domain
gaggtgcagctggtggagtctggaggaggcttggtccagcctggggggtccctgagactctcgtgtgcagcctctgggttcaccgtcagtagcagctacatgacctgggtccgccaggctccagggaaggggctggagtgcgtctcagttatttatggcggtggtagcacatattacgcagactccgtgaagggccgcttcaccatctccagacacttttccaagaacacagtatatcttcaaatgaacagcctgggagccggggacacggccgtgtactattgtgcgagatgggagagggagtatcgtgtcttcgagtataacaaaacgccaattggttggtacttcgatctctggggccgtggcaccctggtcactgtctcctca

SEQ ID NO: 8643 - DNA, 408 bp, Artificial Sequence
  Synthetic polynucleotide encoding artificial human antibody VH domain
caggtgcagctggtgcaatctgggactgaggtgaagaagcctggggcctcagtgacggtctcctgcaaggcttctggatacaccttcaccaactatgatatcaactgggtgcgacaggccactggacaggggcttgagtggatgggatggatgaaccctagcagtggtaacagaggctatgcacagaagttccagggcagagtcaccatgaccaggaacacctccacaaacacagcctacatggagctgagcagcctgagatcagaggacgcggccgtgtattactgtgcgagaggtggaactccaacgagctactacgatattttgactggtcattatcccgctccacccgacttctactacggtatggacgtctggggccaagggaccacggtcaccgtctcctca

SEQ ID NO: 8644 - DNA, 369 bp, Artificial Sequence
  Synthetic polynucleotide encoding artificial human antibody VH domain
gaagtgcagctggtgcagtctggagcagaggtgaaaaagcccggggagtctctgaggatctcctgtaagggttctggatacagctttaccagctactggatcagctgggtgcgccagatgcccgggaaaggcctggagtggatggggaggattgatcctagtgactcttataccaactacagcccgtccttccaaggccacgtcaccatctcagctgacaagtccatcagcactgcctacctgcagtggagcagcctgaaggcctcggacaccgccatgtattactgtgcgagactatcgctagattactatgatagtagtggttaccatgactactggggccagggaaccctggtcaccgtctcctca

SEQ ID NO: 8645 - DNA, 357 bp, Artificial Sequence
  Synthetic polynucleotide encoding artificial human antibody VH domain
gaggtgcagttgttggagtctgggggaggcttggtacagcctggagggtcccttagactctcctgtgcagcctctggattcacctttaacaattatgccatgacgtggatccgtcaggctccagggaagggactggagtgggtctcatctgttactaatactggctccacatattacgcaggctccgcgaagggccggttcaccatctccagagacaactccaacaacacggtgtttctgcacatgaacagcctgagagccgaggacacggccatttactactgtgcgaaggatcaggccttatggttcgatacttttgaccactggggccagggagccctggtcaccgtctcctca

SEQ ID NO: 8646 - DNA, 351 bp, Artificial Sequence
  Synthetic polynucleotide encoding artificial human antibody VH domain
gaggtgcaggtggtggagtctgggggaggcttggtccagccgggggggtccctaagactctcctgtgcagcctctggatttagttttagtaactattggatgagctggatccgccaggctccagggaaggggctggagtgggtggccactataaaggaagatggaagtgacaaatactatgtggactctgtgaagggccgcttcaccatctccaaagacaacgcccagaacacactgtctctgcaaatgaacagcctgagagccgaggacacggctgtctatttctgtacgagagggggtggctggactactgagtactggggccagggaaccctggtcaccgtctcctca

SEQ ID NO: 8647 - DNA, 360 bp, Artificial Sequence
  Synthetic polynucleotide encoding artificial human antibody VH domain
caggtgcagttggtggagtctgggggaggcgtggtccagcctgggaggtccctgagactctcctgtgcagcgtctggatttatcttcagtgactatgccatgcactgggtccgccaggctccaggcaaggggctagagtgggtggcaattataagaaatgatggaagtgataataattatgcagattccgtaaagggacgattcgccatctccagagacaattccaagaacacggcgtatatggaaatgaatagcctgagagtcgaggacacggctgtctattactgtgcgaaagcgacaaatgtgtatggcttctattttgacttctggggccagggagcccaggtcaccgtctcttca

SEQ ID NO: 8648 - DNA, 351 bp, Artificial Sequence
  Synthetic polynucleotide encoding artificial human antibody VH domain
gaggtgcagctggtggagtctgggggaggcttggtacagcctggggggtccctgagactctcctgtgcaacctccggcttcaggttcagtgactctagcatgaactgggtccgccaggctccagggaaggggctggagtgggtttcacacatttggattagtagcagcaccacacactacgcagactctgtgaagggtcgattctccgtctccaccgacaacgccaagaactcactgtatctgcaaatgaacagcctgagagccgaggacacggctgtctattactgtgtgggagatcgggcctatgcctttgatatctggggccaagggacaatggtcaccgtctcttca

SEQ ID NO: 8649 - DNA, 357 bp, Artificial Sequence
  Synthetic polynucleotide encoding artificial human antibody VH domain
gaggtgcagttggtggagtctgggggaggcttggtccagcctggggggtccctgagactctcctgtgcggcctctggattcacgttcagtaccaaccacttgtactgggtccgccaggctccagggaagggactggagtgggtctcagtcatctataacgatggtggcacatcctacgcagactccgtgcagggccgtttcgccatctccagagacaactcccggagtacgttgtatcttcaaatgaatagtctgagacctgaggacacggctgtgtattactgttcgagagtcgaagcggcgccaaacaattggttcgacccctggggccagggaactcgggtcaccgtctcctca

SEQ ID NO: 8650 - DNA, 366 bp, Artificial Sequence
  Synthetic polynucleotide encoding artificial human antibody VH domain
gaggtgcagctgttggcgtctgggggaggcttgctacagcctggggggtccctgagactctcctgtgcagcctctggattcacctttagcaactacgccatgagctgggtccgccaggctccagaaacggggctggagtgggtctcaggtgtgagtggtagtggtggtagtacacactacgcagactccgtgaagggccggttcaccatctccagagacaattccaagaacacgctgtatctgcaaatgagtagcctgagagccgacgacacggccgtgtattactgtgcgaaaggcagcagtggctggtaccagagtcatgtttttgatatgtggggcccagggacaatggtcaccgtctcttca

SEQ ID NO: 8651 - DNA, 360 bp, Artificial Sequence
  Synthetic polynucleotide encoding artificial human antibody VH domain
gaggtgcagctggtggagtctgggggaggcttggtccagcctggggggtccctgaaactctcctgtgcagcctctgggttcaccttcagtggctctgctatgcactgggtccgccaggcttccgggaaagggctggagtgggttggccgtattagaagcaaagctaacagttacgcgacagcatatgctgcgtcggtgaaaggcaggttcaccatctccagagatgattcaaagaacacggcgtatctgcaaatgaacagcctgaaaaccgaggacacggccgtgtattactgtactagagggctggctgactggtacttcgatctctggggccgtggcaccctggtcactgtctcctca

SEQ ID NO: 8652 - DNA, 372 bp, Artificial Sequence
  Synthetic polynucleotide encoding artificial human antibody VH domain
caggtgcacctacaggagtcgggcccaggagtggtgaagccttcacagaccctgtccctcacctgcactgtctctggtgtctccgtcaccagtattggctactattggggctgggttcgccaacacccagggatgggcctggagtggatagggcacacgttttatactgggaatacctactacaacccgtccctgaagagccgactctccatttcattagacgagcctaagaatcaattctccctgaggttgaattctgtgactgccggggacacggccgtgtacttctgtgcgagggtcgtcaacgccaactatccaccgaataactacttcgacgcctggggccagggatcgctggtcaccgtctcctca

SEQ ID NO: 8653 - DNA, 360 bp, Artificial Sequence
  Synthetic polynucleotide encoding artificial human antibody VH domain
caggtgcagctgcaggagtcgggcccaggactggtgaagccttcacagaccctgtccctcacctgcactgtctctggtgcctccgtcagcagtgttgattcccactggagttggatccggcagcccccagggaggggcctggagtggcttgggtacatctcttacactgcgggcacctcctacagtccgaccctcaagagtcgagttaccatttccgcagacccgtccaagaatcaggtctctctaagtctgacctctatgactgccgctgacacggccctatattactgtgtccgagcgaggactgggacaagtgcttttgatatctggggccaagggacaatggtcactgtctcatca

SEQ ID NO: 8654 - DNA, 354 bp, Artificial Sequence
  Synthetic polynucleotide encoding artificial human antibody VH domain
gaggtgcaactggtggagtctgggggaggcttggtaaagcctggggggtccctgagactctcctgttcagcctcaggcttcacattcactacatatcccatgaattgggtacgccaggctccagggaaggggctggaatggatttccaatatcagaactactcgtgaaagcggcacatattacgcagactctgtgaggggccgattcaccatctccagagacgacgccaagaactcagtgtctctgcacatgaacaatttgagagccgaggacacggctatctactattgtgtgagagattatgcctacgcttttgatgtctggggccaaggggccatggtcaccgtctcttca

SEQ ID NO: 8655 - DNA, 357 bp, Artificial Sequence
  Synthetic polynucleotide encoding artificial human antibody VH domain
gaggtgcaattagtggaatctgggggacgcttcgtaaagcctggggggtccctcagactctcctgtgcagcctctggattcagtgtcagtagtgcctggatgagttgggtccgtcaggcaccagggaaggggctggagtgggttggccgtattaaaaagaagagtgatggttcgacaattgactacgctgcacccgtgagaggcagattcaccatctcaagagatgattcaaaaaacatactatatctacaaatgaatggcctgagaatcgacgacacagcggtttattattgtatgacacaccaggggtcaccccacccagagggggcccaagggaccttggtcaccgtctcctca

SEQ ID NO: 8656 - DNA, 357 bp, Artificial Sequence
  Synthetic polynucleotide encoding artificial human antibody VH domain
caggtgcaactgcaggagtcgggcccaggactggtgaagccttcggggaccctgtccctcacctgcgctgtgtctggtgtctccatcagcagtagtaactggtggagttgggtccgccagcccccagggaaggggctggagtggattggggaaatctttcatagtgggaccaccaactgcaacccgtccctcaagagtcgagtcaccatatcactcgacaagtccaagaaccagttctccctgaatctgagctctctgaccgccgcggacacggccgtgtattactgtgcgaggattcccgggtatagcagcactatggacgtctggggccaagggaccacggtcaccgtctcctca

SEQ ID NO: 8657 - DNA, 375 bp, Artificial Sequence
  Synthetic polynucleotide encoding artificial human antibody VH domain
gaggtgcaactggtgcagtctgggggaggcttggtccagccgggggggtccctgagactctcctgtgcagcgtctggattcagttttaatagccattggatggactgggtccgccaggctccagggaaggggctggagtgggtggccaacataaagtatgatggaagtgtccaatactatggggactctgtgaagggccgattcaccatctccagagacaacgccaacaactcactgtatctgcaaatgaacagcctgagagccgaggacacggctgtgtattactgtgcgagagatcgggggtattacagtgatggtggttggtatacccttttggactactggggccagggaatcctggtcaccgtctcctca

SEQ ID NO: 8658 - DNA, 372 bp, Artificial Sequence
  Synthetic polynucleotide encoding artificial human antibody VH domain
gaggtgcagttggtgcagtctggagcagaggtgaagaggcccggggagtctctgaagatctcctgtgagggttctggatacagatttaccagtttctggatcggctgggtgcgccaggtgcccgggaaaggcctggagtggattggtatcatctatcccagtgactctgataccagatacaatccgtccttccaaggccaggtcaccatctcagccgacaagtccaacagctccgcctacctgcagtggggcaggctgaaggcctcggacagcggcatctattattgtgtgagacgaaactacgatgttttcactggatcttatctcgggttcgacccctggggccagggaaccctggtcaccgtctcctca

SEQ ID NO: 8659 - DNA, 360 bp, Artificial Sequence
  Synthetic polynucleotide encoding artificial human antibody VH domain
caggtgcaactggtgcagtctggggctgaggtgaagaagcctggggcctcagtgaaggtctcctgtaagacttctggatacagcttcaccggccacctaatacactgggtgcgacaggcccctggacaagggtttgagtggatgggatggatcgaccctaggagtgacgccacgaggtacggacagaggtttcagggcaggatcaccatgaccagggacacgtccatcagcacagtccacatggagttgactggcctgaaaagtgatgacatggccatatattactgtgtgagagaatttcggagtgggacgtattatagtgactattggggccagggaaccctggtcaccgtctcctca

SEQ ID NO: 8660 - DNA, 357 bp, Artificial Sequence
  Synthetic polynucleotide encoding artificial human antibody VH domain
caggttcagctggtgcagtctgaagctgaggtgaagaagcctggggcctcagtgaaggtctcctgcgaggcttctggttacacctttaccagctatggtatcaactgggtgcgacaggcccctggacaagggcttgagtggatgggatggatcagcgcttacaatggaaacacacactatgcacagaaattccaggacagagtcaccttgaccacagtcacatccgcgagagcagcctacatggagctgaggagcctaagatctgacgacacggccgtgtattactgtgcgagaggggcgtcacctcgctccagaactgactactggggccagggaaccctggtcaccgtctcctca

SEQ ID NO: 8661 - DNA, 372 bp, Artificial Sequence
  Synthetic polynucleotide encoding artificial human antibody VH domain
gaggtgcagctggtggagtctgggggaggcctggtcaagccgggggggtccctgagactctcctgtgcagcctccggattcattttcagcaaatatgccatgaattgggtccgccaggctccagggaagggcctggagtgggtctgttccatcagttatagtagtaatcagatatactgcgcagactcagtgaagggccgattcaccgtttccagagacaacgccgagaactcactgtatctacaaatgaacagcctgagagccgaggacacggctgtctattactgtgcgagagaggggatctggtataacagtggctgggacgagtacttccagctctggggccagggcaccctggtcaccgtctcctca

SEQ ID NO: 8662 - DNA, 339 bp, Artificial Sequence
  Synthetic polynucleotide encoding artificial human antibody VH domain
gaggtgcagttggtggagactgggggaggcttggtccagcctggggggtccctgagactctcctgttcagcctctggattcaccttcagtaccaatactatgcactgggtccgccaggctccaggtaagggactggaatatgtttcagctattagtagtagtgggggcaccacattgtacacagactcagtgaagggcagattcaccgtctccagagacaattccaagaacacgctgtatcttcaaatgagcagtctaagacctgaggacacggctgtctattactgtctgagaccctatgactactggggccagggaaccctggtcaccgtctcctca

SEQ ID NO: 8663 - DNA, 360 bp, Artificial Sequence
  Synthetic polynucleotide encoding artificial human antibody VH domain
caggtgcagctgcaggagtcgggcccaggactggtgaagccttcggggaccctgtccctcacctgcgctgtctctggtggctccatcaccagtacttactggtggagttgggtccgccagcccccagggaagggcctggagtggattggggaaatctatcatagtgggagcaccaactacaacccgtccctcaagagtcgagtcaccatatcagcagacaagtccaagaaccagttctccctgaagttgacctctgtgaccgccgcggacacggccgtgtattactgtgcgagaggggtggttcggaataagaactggttcgacccctggggccagggaaccctggtcaccgtctcctca

SEQ ID NO: 8664 - DNA, 372 bp, Artificial Sequence
  Synthetic polynucleotide encoding artificial human antibody VH domain
caggtgcaactggtggagtctgggggaggcgtggtccagcctggggggtccctgagactctcctgtgcagcctctggattcacattcagttcctatgctatgcactgggtccgccaggctccaggcaaggggctggagtgggtggcagttacttcatatgatggaaccattaaatattacgcagactccgtgaggggccgattcgccatctccagagacaattccgagagtacggtgttaacgctgtttctacaaatgaacagcctgagaactgaggacacggctgtgtattactgtgcgaggactgacggggggaattatatggcctactttgactactggggccagggaagcctggtcaccgtctcctca

SEQ ID NO: 8665 - DNA, 354 bp, Artificial Sequence
  Synthetic polynucleotide encoding artificial human antibody VH domain
gaggtgcagctgttggagtctgggggaggcttggtacagcctggggggtccctgaaactctcctgtgcagcctctggattcacctttagcagctatgccatgagctgggtccgccaggctccagggaaggggctggaatgggtctcaactattagtcctagtgctgttagcacatacttcgcagactccgtgaagggccggttcaccatctcccgagacaattccaagaacacgctgtatctgcaaatgaacagcctgagagccgaggacacggccgtatattactgtgcgaggtatctcagcaggcgtgaatttgactgctggggccagggaaccctggtcaccgtctcctca

SEQ ID NO: 8666 - DNA, 369 bp, Artificial Sequence
  Synthetic polynucleotide encoding artificial human antibody VH domain
gaagtgcagctggtgcagtctggagcagaggtgaaaaagcccggggagtctctgaggatctcctgtaagggttctggatacacctttactacctactggatcagttgggtgcgccagatgcccgggaaaggcctggagtggatggggaacattgatcctaatgactctaaaaccaactacagcccgtccttccaaggccacgtctccatctcggctgacaagtccattaccactgcctacctgcagtggagcagcctgaaggcctcggacaccgccatatattactgtgcgagacacttaactggaagcaagtcgactcacgactggttcgacccctggggccagggaaccctggtcaccgtctcctca

SEQ ID NO: 8667 - DNA, 366 bp, Artificial Sequence
  Synthetic polynucleotide encoding artificial human antibody VH domain
cagctgcagctgcaggagtccggctcaggactggtgcagccttcacagaccctgtccctcacctgcgccgtctctggtggctccattagtagtagtggttactcctggagctgggtccggcaggcaccagggaagggcctggagtggattgggtacatctataacagtgggaacacccgctacaacccgtccctcgagagtcgagtcaccctatcagaagacacgtccaagaaccagttctccctgaagatgacctctgtgaccgccgcggacacggccgtgtattactgtaccagagaatctatagccccctactccttctacatggacgtctggggcaaagggaccacggtcaccgtctcctca

SEQ ID NO: 8668 - DNA, 366 bp, Artificial Sequence
  Synthetic polynucleotide encoding artificial human antibody VH domain
gaggtgcagctggtggagtctgggggaggcttagtagagcctggggggtccctgagactctcctgtgaagcctctggattcactttaggaaatgcctggatgagttgggtccgccaggctccagggaaggggctggagtggattgcccgtattaaaagagaagatgatggtgggacaatagactacactgcacccgtgaaagaccgattcactgtctcaagagatgattcaacaaacacgctgtttctgcaaatgaacaacctgaaagtcgaggacacagccgtatattcctgtaccacgcgaagtagcagttggtccgcgtcgtttgatcactggggccagggaaccctggtcaccgtctcctca

SEQ ID NO: 8669 - DNA, 357 bp, Artificial Sequence
  Synthetic polynucleotide encoding artificial human antibody VH domain
caggtgcagctggtgcagtctggggctgaggtgaagaagcctgggtcctcggtgaaggtctcctgcacggcttctggagacaccctcagaaattatgctatcagctggatccgacaggcccctggacaagggcttgagtggatgggagggaacatccctatgtacggtacaggaaactacgcacaaaagttcaagggcagagtcacgataagcgcggacgactccacgaggacagtgtacatggaactgaggagcctgagacctgaggacacagccgtttactactgtgcgagaggccctacggtgacagggtggttcgacccctggggccagggaaccctggtcaccgtctcctca

SEQ ID NO: 8670 - DNA, 399 bp, Artificial Sequence
  Synthetic polynucleotide encoding artificial human antibody VH domain
cagctgcagctgcaggagtcgggcccaggactggtgaagccttcggagaccctgtccctcacctgcactgtctctggtggctccatcagcagtaggagttactactggggctggatccgccagcccccagggaaggggctggagtggattgggagtatctattatagtgggagcacctactacaacccgtccctcaagagtcgagtcaccatatccgtagacacgtccaagaaccagttctccctgaagctgagctctgtgaccgccgcagacacggctgtgtattactgtgcgagaggagccctagtgggaactactttctcttggggacctaaaacccccggcaggaccagctggttcgacccctggggccagggaaccctggtcaccgtctcctca

SEQ ID NO: 8671 - DNA, 366 bp, Artificial Sequence
  Synthetic polynucleotide encoding artificial human antibody VH domain
gaggtgcagctggtggagtcggggggaggcttggtgcagcctggagggtccctgagactctcctgtgaagcctctggattcaccttcagtgatttcgaaatgaattgggtccgccaggctccagggaaggggctagattgggtttcatactttagtcgtgatggtaccgtgtactattcagactctgtgaagggccgattcaccatctccagagacaacgccaagaactcactgtatctccaaatgaacagcctgagagccgaggacacggctatttattactgtgcgcgagtcccccctacgaccagtggctgggatcactactttgaccactggggccagggagccctggtctccgtctcctca

SEQ ID NO: 8672 - DNA, 363 bp, Artificial Sequence
  Synthetic polynucleotide encoding artificial human antibody VH domain
caggtcaccctgagggagtctggtcctgcgctggtgaagcccacacagaccctcacactgacgtgtaccgtctctggcttctcactagacacacctaaaatgtctgtaaattggatccgtcagccccctgggggggccctggagtggcttgcacgcattgattgggataatgaaaagttctatggttcgtctctgcagaccagactcgccgtctacaaggacacctccagaaaccaagtggtcctcacagtgagtcacgtgggccctggggacacaggcacatatttttgtgcacgcaaaacgacctccatggattattataccgaagtctggggccagggaaccctggtcaccgtctcccca

SEQ ID NO: 8673 - DNA, 384 bp, Artificial Sequence
  Synthetic polynucleotide encoding artificial human antibody VH domain
caggtgcagctggtgcagtctggggctgaggtgaagaagcctgggtcctcggtgaaggtctcctgcaaggcttctggaggcaccttcagcagctatgctatcagctgggtgcgacaggcccctggacaagggcttgagtggatgggagggatcatccctatctttggtacagcaaactacgcacagaagttccagggcagagtcacgattaccgcggacgaatccacgagcacagcctacatggagctgagcagcctgagatctgaggacacggccgtgtattactgtgcgtccaaatattacgatattttgactggtcatcaagtggtctactactacggtatggacgtctggggccaagggaccacggtcaccgtctcctca

SEQ ID NO: 8674 - DNA, 363 bp, Artificial Sequence
  Synthetic polynucleotide encoding artificial human antibody VH domain
caggtgcagctggtggagtctgggggaggcgtggtccagcctgggaggtccctgagactctcctgtgcagcgtctggattcaccttcagtaaatatggcatgcactgggtccgccaggctccaggcaaggggctggagtgggtggcatttatatggtatgatggaagtaacaaatcctatgcagactccatgaggggccgattcaccatctccagagacaattccagggacacgctctatctgcaaatgaacagcctgagagccgacgacacggctgtgtattactgtgcgagagaggtcgagggtagtagtgcggactggttcgacccctggggccagggaaccctggtcaccgtctcctca

SEQ ID NO: 8675 - DNA, 372 bp, Artificial Sequence
  Synthetic polynucleotide encoding artificial human antibody VH domain
gaagtgcggctggtggagtcggggggaggcgtggtgcagcctggggggtccgtgagactctcctgtgcagcctctggattcacctttgataattatgccatacactgggtccgtctgcctccagggaagggtctggagtgggtctctcttattggtgggggtggtgatgacaaattatatggagcttctgtgaggggccgattcaccatctccagagacaacttcaaaaactccgtctatttgcaaatggacagtctgagaactgacgacaccgccctctactactgtgcaaaagatctggacggtagcgccacctggaacttggatgcttttgatatctggggccgggggacaatggtcaccgtctcttca

SEQ ID NO: 8676 - DNA, 342 bp, Artificial Sequence
  Synthetic polynucleotide encoding artificial human antibody VH domain
gaggtgcagctggtggagtctgggggaggcttggtacagccagggcggtccctgagactctcctgtacagcttctggattcacctttggtgattatgctatgagctgggtccgccaggctccagggaaggggctggagtgggtaggtttcattagaagcaaagcttatggtgggacaacagaatacgccgcgtctgtgaaaggcagattcaccatctcaagagatgattccaaaagcatcgcctatctgcaaatgaacagcctgaaaaccgaggacacagccgtgtattactgtactagatcggactactggggccagggaaccctggtcaccgtctcctca

SEQ ID NO: 8677 - DNA, 366 bp, Artificial Sequence
  Synthetic polynucleotide encoding artificial human antibody VH domain
gaggtgcaactggtggagtcggggggagacttggtccagcccggggggtccctgagactcgcctgtgcagtctctggattcaccgtcagtagtaactacatgagctgggtccgccaggctccagggaaggggctggaatgggtctcggttctttatagcgatggttccaccttctacaccgactccgtaaagggcagattcgtcatctccagagacaactctacgaatatgctgtttcttcaaatgaacagcctgagagtcgaggacacggctctatattattgtgcgagagattattacgccaacggtgaatacgagacgatctttgagtattggggccagggaaccccggtcaccgtctccaca

SEQ ID NO: 8678 - DNA, 366 bp, Artificial Sequence
  Synthetic polynucleotide encoding artificial human antibody VH domain
gaggtgcacctggtggagtctgggggagacttggtccagtccggggggtccctgagactcgcctgtgcagtctctggagtcagcgtcagtgctaactacatgagctgggtccgccagactccagggaaggggctggagtgggtctcggttatttatagcgatggcagcacatactacacagactccgtaaagggcagattcatcatctccagagacaactcccagaacacactgtttcttcaaatgaacagcctgagagccgaggacacggctctatattactgtgcgagagattattacgccaacggtgactacgagacgatctttgagtactggggccagggaaccccggtcaccgtctcctca

SEQ ID NO: 8679 - DNA, 369 bp, Artificial Sequence
  Synthetic polynucleotide encoding artificial human antibody VH domain
gaggtgcagctggtgcagtctggagcagaggtgaaaaagcccggggagtctctgaagatctcctgccacggttctgggtacagatttcacacctattgtatcggatgggtgcgccagatgcccgggaaaggcctcgagtggatggggattatctgtcctgggacctctgatcccaaatttagtccgtccttccgaggccggattagcatctcaatggacgtgtccgtcaccaccgccttcctgcagtggagcagtctggaggcctcggacaccgccatttattactgtgcgagagcgaaatttgatgttgatggttttacccctttctttgactcctggggccagggagccctagtcaccgtctcctca

SEQ ID NO: 8680 - DNA, 357 bp, Artificial Sequence
  Synthetic polynucleotide encoding artificial human antibody VH domain
gaggtgcagttgttggagtctgggggaggcctggtacagcctggggggtccctgagactctcctgtgcagcctctggattcagctttagcatctacggcgtgacctgggtccgccaggctccagggaaggggctggagtgggtctcttctattgatggtgttactggtcatttacactacgcagactccgtgaagggccggttcaccatctctcgtgacaattccaggaacacattctttctgcaaatcaacagcgtgagagccgaggacacggccgtttatttctgtgcgagagccagcatttggggaaattactttgactactggggcccgggaaccctggtcaccgtctcctca

SEQ ID NO: 8681 - DNA, 369 bp, Artificial Sequence
  Synthetic polynucleotide encoding artificial human antibody VH domain
gaggtgcagttgttggagtctgggggaggcctggtacagcggggggggtccctcagactctcctgttcagcctccaaattcacgtttagcgactatgccatgagctgggtccgccaggctccagggaaggggctggagtgggtctcagctgttagtggtaatggtgacaacacctattacgcagactccgtgaagggccggttcaccatctccagagacaattccaagaacacgctgtatctgcaaatggacagcctgacacccgacgacacggccatgtattactgtgcgaaacagggttacagcggtgcctggcccgaagttgcttttgatctctggggccaaggaacaatggtcaccgtctcttca

SEQ ID NO: 8682 - DNA, 360 bp, Artificial Sequence
  Synthetic polynucleotide encoding artificial human antibody VH domain
gaggtgcagctggtggagtctgggggaggcctggtcaagcctggggggtccctgagactctcctgtgcagcctctggattcaccttcagtagctatagcatgaactgggtccgccaggctccagggaaggggctggagtgggtctcatccattagtagtactagtatttacatatactatgcagactcagtgaagggccgattcaccatctccagagacaacgccaagaactcactgtatctgcaaatgaacagcctgagagccgaggacacggctgtttattactgtgcgactagtggcagctggttcaggcagccttttgactactggggccagggaaccctggtcaccgtctcctca

SEQ ID NO: 8683 - DNA, 405 bp, Artificial Sequence
  Synthetic polynucleotide encoding artificial human antibody VH domain
caggtgcagctgcaggagtcgggcccaggactggtgaagccttcacagaccctgtccctcacctgcactgtctctggtggctccatcagcagtggtggttactactggagctggatccgccagcacccagggaagggcctggagtggattgggtacatctattacagtgggagcacctactacaacccgtccctcaagagtcgagttaccatatcagtagacacgtctaagaaccagttctccctaaagctgagctctgtgactgccgcggacacggccgtgtattactgtgcgagcgtcaaggggagactggagcacccaagaggattttgtagtggtggtagctgctactcggattggaggttcgacccctggggccagggaaccctggtcaccgtctcctca

SEQ ID NO: 8684 - DNA, 369 bp, Artificial Sequence
  Synthetic polynucleotide encoding artificial human antibody VH domain
gaggtgcagttagtggagtctgggggaggcttgattcagcctggggggtccctgagactctcctgtgtagcctctggattcacttttagtgcccatgccatgacttgggtccgccaggctccagggaagggactcgagtgggtctcagtttttactggttccagtgctggtaccacatcttacgcagactccgtgaagggccggttcaccatttccagagacatttccaggaacacactttttttggaaatgaacagcctgagagtcgaagacacggccgtatattactgtgcgagagatgaatcattgactggttttcgggggacccttgattcctggggccagggaacccaggtcaccgtctcctca

SEQ ID NO: 8685 - DNA, 378 bp, Artificial Sequence
  Synthetic polynucleotide encoding artificial human antibody VH domain
gaggtgaagctggtgcagtctgggggagggttggtccagcctggcgggtccctaacaatgtcttgtgaatcctctggattcacctttagtaatttttacatgacgtgggtccgccaggcaccagggagcgggccggagtgggtggcccacataaagggagatggaagcgacagctactatgcggactctgtgaagggccgattcttcgtctccagagacaacgtcaagaactcactgtatctacaaatgaacagcctgacagccgaggacaccgccgtatattattgtgcgagagtggatgccacggtgcattgtgccggtgggaggtgcgcctattttgactactggggccagggaagcctgctcaccgtctcctca

SEQ ID NO: 8686 - DNA, 366 bp, Artificial Sequence
  Synthetic polynucleotide encoding artificial human antibody VH domain
gaggtgcgactggtggagtctgggggaggcttggtccagccgggggggtccctgagactctcctgtgaagcctctggaatcaccgtcagtctgaactacatgagttgggtccgccaggctccagggagggggctggagtggctctcagttatgtatagcgacgggagcacatattatacagactccgtgaagggcagattcaccatctccagagacacttccaaggacacgctgtacctccaaatgaacagcctgacagtcgaggacagcggtttatactactgtgcgagggattattacgtctccggtgactacgaaacgatctttcaacactggggccaaggagccctggtcaccgtctcctca

SEQ ID NO: 8687 - DNA, 372 bp, Artificial Sequence
  Synthetic polynucleotide encoding artificial human antibody VH domain
gaggtgctgctgttggaatctggaggaggcttggtacagcctgggaggtccctgagactctcctgtgcagcctctggattcacctttagcaactatgccatgacctgggtccggcaggctccagggaaggggctggagtgcgtctcaggtattagtggtggtggtgataggacacactacgcagactccgtgaggggccggttcaccatctccagagacaattccaagaacatgctgtatctgcaaatgaacagcctgagagccgaggacacggccgtatattactgtgcgaaagtcccaagcagcagctggtactccgggtctcgctggttcgacccctggggccagggagccctggtcaccgtctcctca

SEQ ID NO: 8688 - DNA, 363 bp, Artificial Sequence
  Synthetic polynucleotide encoding artificial human antibody VH domain
gaggtgcacctggtggagtctgggggaggctgggtccagccgggggggtccctgagactctcctgttcagcctctggattcaccttcaatgattacgctatgcagtgggtccgccaggctccagggaagggattggaatttgtttcagccattagtcatactggacatgagacatattacacggactcagggaagggcagattcaccatctccagagacaattccaagaatatggtgtatcttcaaatgagcagtctgagaactgaggacacggctatgtattactgtgtgaaagaccgcttttattatggttcggaacaaacggactcctggggccagggaaccctggtcaccgtctcctca

SEQ ID NO: 8689 - DNA, 399 bp, Artificial Sequence
  Synthetic polynucleotide encoding artificial human antibody VH domain
caggtgcagctgcaagagtcgggcccaggactggtgaagccttcacagaccctgtccctcacctgcactgtctctggtggctccatcaccagtgatggttactactggaactggatccgccagcacccagggaagggcctggagtggattgggtatatgtattacactgggagcaccgactacaacccgtccctcaagggtcgagttaccatatcagtcgacacgtctaagaaccagctctccctggagctgacctccgtgactgccgcggacacggccgtgtattactgtgcgagagatcgccccccctccactttttactctactataagtggttcttactacgagcctgatgcttttgatatctggggccaagggacagtggtcaccgtctcttca

SEQ ID NO: 8690 - DNA, 375 bp, Artificial Sequence
  Synthetic polynucleotide encoding artificial human antibody VH domain
caggtgcacctggcgcagtctggggctgaggtgaagaagcctggggcctcagtgaaggtctcctgcaaggcttctggatacaccttcagcgactactacatacactgggtgcgacaggcccctggacaagggcttgagtggatgggatgggtcaaccctaacaatggtgacacatattatgcacagaagtttcagggcagggtcaccatgacctgggacacgtccatcagtacagcctatatggagctgaacaggctgacatcagacgacacggccgtgtattattgtgcgagagaaggctcggatatagtggtgcctggtaccataggatggttcgacccctggggccagggaaccctggtcaccgtctcctca

SEQ ID NO: 8691 - DNA, 357 bp, Artificial Sequence
  Synthetic polynucleotide encoding artificial human antibody VH domain
caggtgcacctgcaggagtcgggcccaggactggtgaagccttcggggaccctgtccctcacctgcgaggtctctaatggctctgttagcaataataattggtggacttgggtccgccaggccccagggaagggactggagtggattggggaaatctaccatagtgggaccaccaacttcaatccgtcactcaagagtcgactctatatgtcagtggacaagtccaagaaccaggtgtccctgaagctgacctccgcgaccgccgcggacacggccgtatattattgtgcgaaagcaggagtggggggggggtggttcgacccctggggccagggagccctggtcaccgtctcctca

SEQ ID NO: 8692 - DNA, 351 bp, Artificial Sequence
  Synthetic polynucleotide encoding artificial human antibody VH domain
gaggtgcagctggtggagtctgggggaggcttggtacagcctggggggtccctgagactctcctgtgcagcctctggattcaccttcagtagctacgacatgcactgggtccgccaagctacaggaaaaggtctggaatgggtctcagctattggtactgctggtgacacatactatccaggctccgtgaagggccgattcaccatctccagagaaaatgccaagaactccttgtatcttcaaatgaacagcctgagagccggggacacggctgtgtattactgtgcaagagatatcggaggcggtgcttttgatatctggggccaagggacaatggtcaccgtctcttca

SEQ ID NO: 8693 - DNA, 366 bp, Artificial Sequence
  Synthetic polynucleotide encoding artificial human antibody VH domain
gaggtgcagctggtggagtccgggggaggcttagttcagcctggggggtccctgagactctcctgtgcagcctctggattcaccttcagtagctactggatgcactgggtccgccaagctccagggaaggggctggtgtgggtctcacatattagtgatgatgggattatcacaagctacgcggactccgtgaagggccgattcaccatctccagagacaacgccaagaacacactatatctgcaaatgaatagtctgacagtcgaggacacggctgtgtattactgtgctagagccgccggagctggtaccgggtacaactggttcgacccctggggccagggaaccctggtcaccgtctcctca

SEQ ID NO: 8694 - DNA, 360 bp, Artificial Sequence
  Synthetic polynucleotide encoding artificial human antibody VH domain
gaggtgcaactggtggagtctggaggaggcttgatccagcctggggggtccctgagactctcctgtgcagcctctgggttcaccgtcagttcctactacatgacctgggtccgccaggctccggggaagggtttggagtgcgtcgccattatgtacatcgatggtaggacatacttcgcagactccgtgaagggccgattcaccctctccagagacgattccaagagcacactgtatcttcaaatgaacagcctgagagtcgaagacacggccatatattattgtgcgagggatgggacaacgggagtgttggctgcctttgacatctggggccaagggacaatggtcaccgtctcttca

SEQ ID NO: 8695 - DNA, 375 bp, Artificial Sequence
  Synthetic polynucleotide encoding artificial human antibody VH domain
caggtgcagctgcaggagtcgggcccaggactggtgaagccttcacagaccctgtccctcacctgcactgtctctggtggctccatcagcagtggtggttactactggagctggatccgccagcacccagggaagggcctggagtggattgggtacatctattacagtgggagcacctactacaacccgtccctcaagagtcgagttaccatatcagtagacacgtctaagaaccagttctccctgaagctgagctctgtgactgccgcggacacggccgtgtattactgtgcgagagctcgggttactatgatagtgaggctcgtaaatgcttttgatatctggggccaagggacaatggtcaccgtctcttca

SEQ ID NO: 8696 - DNA, 393 bp, Artificial Sequence
  Synthetic polynucleotide encoding artificial human antibody VH domain
caggttcagctggtgcagtctggagctgaggtgaagaagcctggggcctcagtgaaggtctcctgcaaggcttctggttacacctttaccagctatggtatcagctgggtgcgacaggcccctggacaagggctggagtggatgggatggatcagcggttacaatggtaacacaaactatgcacagaagctccagggcagagtcaccatgaccacagagacatccacgagcacagcctacatggagctgaggagcctgagatctgacgacacggccgtgtattactgtgcgagagatccccgcctgcggttcggggagttattccgagcccctttcaaatactactacggtatggacgtctggggccaagggaccacggtcaccgtctcctca

SEQ ID NO: 8697 - DNA, 375 bp, Artificial Sequence
  Synthetic polynucleotide encoding artificial human antibody VH domain
caggtgcagctgcaggagtcgggcccaggactggtgaagccttcggagaccctgtccctcacctgcgctgtctctggtggctccatcagtcattactactggagttggatccggcagcccccagggaagggactggagtggattgggaatatctattacagcgggaagaccgactacaacccctccctcaagagtcgagtcaccatatcagtagacacgtccaagaaccagttctccctgaggctgaggtctgtgaccgctgcggacacggccatgtattattgtgcgagagattttgatgtctggaccgacgaagggcccgactactacggcatggacgtctggggccaagggacgacggtcaccgtctcctca

SEQ ID NO: 8698 - DNA, 372 bp, Artificial Sequence
  Synthetic polynucleotide encoding artificial human antibody VH domain
cagctgcagctgcaggagtcgggcccaggactggtgaagccttcggagaccctgtccctcacctgcactgtctctggtggctccatcagcagtagtagttactactggggctggatccgccagcccccagggaaggggctggagtggattgggagtatctattatagtgggagcacctactacaacccgtccctcaagagtcgagtcaccatatccgtagacacgtccaagaaccagttctccctgaagctgagctctgtgaccgccgcagacacggctgtgtattactgtgcgagactgagacgacgggatatggttcggggagtgaactttgactactggggccagggaaccctggtcaccgtctcctca

SEQ ID NO: 8699 - DNA, 366 bp, Artificial Sequence
  Synthetic polynucleotide encoding artificial human antibody VH domain
caggtccagctggtgcagtctggggctgaggtgaagaagcctgggtcctcggtgaaggtctcctgcaaggcttctggatacatcttcaatcgttatgctatcaactgggtgcggcgggcccctggacaagggcttgagtggatgggaaggatcatccccagcgctcacacagaaaactacgcacagaggttccagggcagagtcacgattaccgcggacaaatccacgagcacagcctacatggaattgagcagcctgagatctgaggacgcggccatatattactgtgcggcaggaggcggtgggtacggtgactcctaccgtatggacgtctggggccaagggaccacggtcaccgtctcctca

SEQ ID NO: 8700 - DNA, 378 bp, Artificial Sequence
  Synthetic polynucleotide encoding artificial human antibody VH domain
gaggtgcagctattggagtctgggggaggcttggtacagcggggggggtccctgagactctcctgtgcagcctcgggattcagttttagcagctatgccatgaactgggtccgccaggctccagggaaggggctggagtgggtctcaggtattagtgatagtggttataatacatattacgcagactccgtgaagggccggtgcaccatttccagagacaattccgagaacgcgctgtatctgcaaatgcacagcctgagagccgaggacacggccacatattactgtgcaaaagtgcccactaacgattttttgattggttactcctctgatgcttttgacatctggggccaagggacaatggtcaccgtctcttca

SEQ ID NO: 8701 - DNA, 369 bp, Artificial Sequence
  Synthetic polynucleotide encoding artificial human antibody VH domain
caggtgcgactggtggagtctgggggaggcgtggtccagcctgggaggtccctgagactctcctgtgcagcctctggattcagcttcaatatttatgctatgcactgggtccgccaggctccaggcaaggggctggagtgggtggcaattttgtcatatgatggaatcaataaatactatgcagactccgtgaagggccgcttcaccatctccagagacaattccaaggacaccctgtatctgcaaatgaacgggctgacagctgaggacacggctgtatattactgtgcgaaagatggggattttggtgggagttactcgttctactttgacaactggggccagggaaccctggtcaccgtctcctca

SEQ ID NO: 8702 - DNA, 384 bp, Artificial Sequence
  Synthetic polynucleotide encoding artificial human antibody VH domain
caggtgcagctggtggagtctgggggaggcgtagtccagcctgggaggtccctgagactctcctgcgcagcctctggattcaccttcagtcgctatggtatgcactgggtccgccaggctccaggcaagggactggagtgggtgacacttatctcatctgatggaagcaataaatactacgccgactccgtgaagggccgactctccatctccagagacaatttcgacaacacgctatatctgcaaatgaacagcctgagagttgaggacacggctgtttattactgtgcgcgaagttcgtatgggctcagggagtttgggggagttctccctttgggggactttgactactggggccagggaaccctggtcaccgtctcctca

SEQ ID NO: 8703 - DNA, 378 bp, Artificial Sequence
  Synthetic polynucleotide encoding artificial human antibody VH domain
caggtgcaactggtgcagtctggggctgaggtgacgaagcctggggcctcagtgaagatctcctgcaaggcttctggattcaccttcgtcgactactacatacactgggtgcgacgggtccctggacaagggcttgagtggatgggacggattaatcctaagagtggtggcgcaaactttgcacagaagtttcaggactgggtcaccatgaccagggacacgtccatcagcacagtccatatggagttgcggaaactgagatctgacgacacggccgtgtattattgtgcgagaatctcgcgggttttttacgatctttggagtgatggttatgtactggacgtctggggccaagggaccacggtcaccgtctcctca

SEQ ID NO: 8704 - DNA, 399 bp, Artificial Sequence
  Synthetic polynucleotide encoding artificial human antibody VH domain
gaggtgcagctggtggagtccgggggaggcttagttcagcctggggggtccctgagactctcctgtgcagcctctggattcaccttcagtagctactggatgcactgggtccgccaagctccagggaaggggctggtgtgggtctcacgtattaatagtgatgggagtagcacaagctacgcggactccgtgaagggccgattcaccatctccagagacaacgccaagaacacgctgtatctgcaaatgaacagtctgagagccgaggacacggctgcgtattactgtgcaagaggatcgatggttcggggagttatttatgcgcgggggccctccgaccccccggactactacggtatggacgtctggggccaagggaccacggtcaccgtctcctca

SEQ ID NO: 8705 - DNA, 369 bp, Artificial Sequence
  Synthetic polynucleotide encoding artificial human antibody VH domain
caggtgcagctggtgcaatctgggtctgagttgaagaagcctggggcctcagtgaaggtttcctgcaaggcttctggatacacgttcactagatatgctatgaattgggtgcgacaggcccctggacaagggcttgagtggatgggatggatcaacaccaacactgggaacccaacgtatgcccagggcttcacaggacggtttgtcttctccttggacacctctgtcagcacggcatatctgcagatcagcagcctaaaggctgaggacactgccgtgtattactgtgcgagagagtatgtagtagtatcagctgctatgggtgggttcgacccctggggccagggaaccctggtcaccgtctcctca

SEQ ID NO: 8706 - DNA, 381 bp, Artificial Sequence
  Synthetic polynucleotide encoding artificial human antibody VH domain
caggtccacctgggacagtctggggctgacgtgaagaagcctggggcctcagtgaaggtctcctgcaaggtttccggactcaccctcaatgatttatccatacactgggtgcgccaggctcctggaaaagggcttgagtggatgggaggctttgatcttgaagaaggtgtgacaattttcgcagagaagttccagggcagagtcaccatgaccgaggacacctctgcagacacagcctacatggacctgaccagtctgcaatatgatgacacggccatttattactgtgtcgcggcgacgtcaccgactgattttttagcagcacgtggtcgaactgcttttgatgtctggggcgcagggacaatggtcatcgtctcttca

SEQ ID NO: 8707 - DNA, 375 bp, Artificial Sequence
  Synthetic polynucleotide encoding artificial human antibody VH domain
caggtgcagctggagcagtctggggctgaggtgatgaagcctggggcctcagtgaaggtctcctgcaaggcctctggatacaccttcaccagttatgatctcacctgggtgcgacaggcccctgggcaacggcctgagtggatgggatgggtgaggcctaccactggtgacactttctatgcacagaagttccagggcagagtcaccatgaccaggaacatctccataagcacagtctacatggagttgagcagcctgagtcctggagacacggccgtatatttctgtgcgagacgcagggtgggatattgtaagggaggcagctgctactcgtgggtccactggggccagggaaccttggtcaccgtctcctca

SEQ ID NO: 8708 - DNA, 375 bp, Artificial Sequence
  Synthetic polynucleotide encoding artificial human antibody VH domain
caggtgcagctggtggagtctgggggaggcgtggtccagcctgggaggtccctgagactctcctgtgcagcctctggattcaccttcagtagctatgctatgcactgggtccgccaggctccaggcaaggggctggagtgggtggcagttatatcatatgatggaagtaataaatactacgcagactccgtgaagggccgattcaccatctccagagacaattccaagaacacgctgtatctgcaaatgaacagcctgagagctgaggacacggctgtgtattactgtgcgagagccccccgtacggtggtaactggggactactactacggtatggacgtctggggccaagggaccacggtcaccgtctcctca

SEQ ID NO: 8709 - DNA, 363 bp, Artificial Sequence
  Synthetic polynucleotide encoding artificial human antibody VH domain
gaggtgcagctggtggagtctgggggaggcttggtaaagcctggggggtcccttagactctcctgtgcagcctctggattcactttcagttacgcctggctgagctgggtccgccaggctccagggaaggggctggagtgggttggccgtattaaaagcaaaactgatggtgggacaacagactacgctgcacccgtgaaaggcagattcaccatctcaagagatgattcaaaaaacacgctgtatctgcaaatgaacagcctgaaaaccgaggacacagccgtgtattactgtaccacagacctacatgactacggtgactctgactactggggccagggaaccctggtcaccgtctcctca

SEQ ID NO: 8710 - DNA, 363 bp, Artificial Sequence
  Synthetic polynucleotide encoding artificial human antibody VH domain
gaggtgcaattattggagtctgggggaggcttggtgcagtctggggggtccctgagactctcctgtgcagcctctggatttacctttagcaactttggcatgagttgggtccgcctggccccagggcaggggctggaatgggtctcgactattgatagtgtaggtcgaagaacatattatgcagactccgtgaagggccggttcaccatttctagagacaattcccagaacaaggtgtatctgcaaatgaacagcctgagagtcgacgacacggccgtttattactgcacgaaactcccttttgactacggggcttactggttcgacccctggggccagggaacccgggtcatcgtctcgtca

SEQ ID NO: 8711 - DNA, 381 bp, Artificial Sequence
  Synthetic polynucleotide encoding artificial human antibody VH domain
caggtgcagttgcaggagtcgggccctggactggtgaagccttcacagaccctgtccctcacctgcagtgtctctggcgactccatcatcagtgacgatgactactggacgtggatccgccaacacccactgaagggcctggagtggattgggtacatccactacggtggggccacacattacaacccgtccctcaagagtcgccttgctctctccattgacacgtcgaagaaccagtttttcctgagactgaactctgtgactgccgcggacacggccatctattactgtgcgagaatttttggttcggggtacctcggtcttgtgtcctatcattggttcgacccctggggccggggaaccctcgtcaccgtctcctca

SEQ ID NO: 8712 - DNA, 354 bp, Artificial Sequence
  Synthetic polynucleotide encoding artificial human antibody VH domain
caggtgcagctggtgcagtctggggctgaggtgaagaagcctggggcctcagtgaaggtttcctgcaaggcatctggatacaccttcaacagttactatatacattgggtgcgacaggcccctggaccaggtcttgagtggatgggaataatcaatcctggtgttggtagcacaaccctcgcacagaagttccagggcagagtcaccatgaccagggacacgtccacgagcacagtctacatggagctgaggagcctgagatctgaggacacggccgtatattactgtgcgagaggggactggttccgctactttgactactggggccagggatccctggtcaccgtctcctca

SEQ ID NO: 8713 - DNA, 360 bp, Artificial Sequence
  Synthetic polynucleotide encoding artificial human antibody VH domain
gaggtgcagctgttggagtctgggggaggcttggtgaggcctggggggtccctcaggctctcgtgtacagtctctggattcatattcagtgatgtctggatgaattgggtccgccaggctccagggaagggactggagtggattggccgtctcaaaaggaaggttgatggtgggacaacagagtatgctctacacgtgagaggcagattcaccatctcaggggatgattcagaaaacacgatatatctgcaaatgaacaccctgaaaaccgaggactcagccctttatttctgtaccacagatccgggtatagaacttcgggggcattggggccagggaaccctggtcaccgtctcctca

SEQ ID NO: 8714 - DNA, 384 bp, Artificial Sequence
  Synthetic polynucleotide encoding artificial human antibody VH domain
cagctgcagcttcaggagtcgggcccaggactggtgaagccttcggagaccctgtccctcacctgcactgtctctggtgtctccatcaccagtggaagttactcctggggctggatccgccagcccccagggaagggactggagtggattgggagtatctattatactgggagcacctactacaacccgtccctcaagagtcgagtcaccatgtccgtagacacgtccaagaacgaagtctccctgaagctcaggtctctgaccgccgcagacacggctgtgtattactgtgcgagagtctcggattggagttgtactggtggaacctgctacggaaactggttcgacccctggggccagggtaccctggtcaccgtctcctca

SEQ ID NO: 8715 - DNA, 384 bp, Artificial Sequence
  Synthetic polynucleotide encoding artificial human antibody VH domain
caggtgcagctggtggagtctgggggaggcgtggtccagtctgggaggtccctgagactctcctgtctagtctctggattcatgtccagtagttatgctatgcattgggtccgccaggctccaggcaaggggctggagtgggtaggttctatatcacaggatggaagtcatgaggaatatggacacttcgtgaaggaccgattcaccatctccagagacgaatcgaagaacacagtctatctccaaatgaacagcctgcgaactgaagacggggctgtttattattgtgcgagaccgataagaggtggctacaattacgggactcgggacttctactatggtatggacctctggggccaagggaccacggtcaccgtctcctca

SEQ ID NO: 8716 - DNA, 399 bp, Artificial Sequence
  Synthetic polynucleotide encoding artificial human antibody VH domain
caggtgcagctggtggagtctgggggaggcgtggtccagcctgggaggtccctgagactctcctgtgcagcctctggattcaccttcagtagctatggcatgcactgggtccgccaggctccaggcaaggggctggagtgggtggcagttatgtcatatgatggaagtaataaatactacgcagactccgtgaagggccgattcaccatctccagagacaattccaagaacacgctgtatctgcaaatgaacagcctgagagctgcggacacggctgtgtattactgtgcgaaagatcgtgggaaaaactacgatttttggagtgcttattatacgggccgagattactactacggtatggacgtctggggccaagggaccacggtcaccgtctcctca

SEQ ID NO: 8717 - DNA, 378 bp, Artificial Sequence
  Synthetic polynucleotide encoding artificial human antibody VH domain
gaggtgcaactggtggactctgggggagccttggtccagccgggggggtccctgaagctctcctgtgcaggctctggattcagtttcgttgattctgctatacactgggtccgccaggcttccgggagagggctggagtgggttggccgcattagaagcaaggctaatacttacgcgacagcatatactgcgtcggtgcaaggcaggttcaccatctcgagagatgattcaaagaatacggcgtatctgcaaatgaacagcctgaaaaccgaggacacggccgtctattactgtaccaggccccgggcggagggatatgatagtggttatttcgactttgaatattggggccagggaaccctggtcaccgtctcctca

SEQ ID NO: 8718 - DNA, 366 bp, Artificial Sequence
  Synthetic polynucleotide encoding artificial human antibody VH domain
gaggtgcagctggtggagtctgggggagacttggtccagtccggggggtccctgagagtcgcctgtgcagtctctggattaaccgtcagttctaactacatgagctgggtccgccagagtccagggaaggggctggagtgggtctcggttatttatagcgatgggagcacatactacacagactccgtaaagggcagattcaccatctccagagacgactccaagaacacgctgtttcttcaaatgaacagcctgagagccgaggacacggctctatattactgtgcgagagattactacgccaaaggtgactacgagacgatctttgagtattggggccagggaaccccggtcaccgtctcctca

SEQ ID NO: 8719 - DNA, 345 bp, Artificial Sequence
  Synthetic polynucleotide encoding artificial human antibody VH domain
caggtgcagctggtgcaatctgggtctgagttgaagaagcctggggcctcagtgaaggtttcctgcaaggcttctggatacaccttcactagccatgctttgaattgggtgcgacaggcccctggccaagggcttgagttcatgggatggatcaaccccagcactgggatcccaacgtacgcccagggcttcacaggacggtttgtcttctccttggacacctctgtcaacacggcatatctgcagatcagcagcctacaggctgacgacactgccgtatattactgtgcgagatcaccctggttcgacccctggggccagggaaccctggtcaccgtctcctca

SEQ ID NO: 8720 - DNA, 363 bp, Artificial Sequence
  Synthetic polynucleotide encoding artificial human antibody VH domain
caggtcaccttgagggagtctggtcctgcgctggtgaaaccctcacagaccctcacactgacctgcaccttctctgggttctcactcacctctagtggagtgtgtgtgacctggatccgtcagcccccagggaaggccctggagtggctcgcactcattgattgggatgatgataaagactacaccccatctctgaagaccagactcaccatctcgaaggacacttccaaaaaccaggtggtccttacaatgaccaacatggaccctgtggacacagccacgtattactgtgcacgactggcagctcgtccttacgatgcttttgatatctggggccaagggacaatggtcaccgtctcttca

SEQ ID NO: 8721 - DNA, 369 bp, Artificial Sequence
  Synthetic polynucleotide encoding artificial human antibody VH domain
gaggtgcggttggtggagtctgggggaggcttggtccagccgggggggtccctgagactctcctgtgcagcctccggattcagcttcagtagctatgccttacactgggtccgccaggctccagggaagggactggaatatgttgcaggtatcagtaagaatggggataacacacactatgcaaagtttgtggagggcagattcaccatctccagagacaattccaagaacacggtgtatctccaaatgggcaacctgagagttgaggacatggctgtgtattcttgtgcgagagattcggcttcgggcacctattatatgactttcttcgactactggggccagggagccctggtcaccgtctcctca

SEQ ID NO: 8722 - DNA, 354 bp, Artificial Sequence
  Synthetic polynucleotide encoding artificial human antibody VH domain
caggtgcaggtggtacagtctggggctgaggtgaagaggcctggggcctcactgcaggtttcctgcgagccatctgaatataacttcaacacctactatgttcactgggtgcgacaggcccctggacaggggcttgagtggatgggaatgatccagcctggtggagatgacacaatctatgcacagaatttccagggcagagtcaccatgaccagcgacacgtccacgaacacggtctacatggaactgaataggctgacatcagaggacacggccgtctattattgtgcgagagccctgggcacagtttcccggggggactggggccagggaaccctggtcaccgtctcctca

SEQ ID NO: 8723 - DNA, 354 bp, Artificial Sequence
  Synthetic polynucleotide encoding artificial human antibody VH domain
cagctgcagctgcaggagtcgggcccaggactggtgaagccttcggagaccctgtccctcacctgcactgtctctggtggctccgtcagcagtagtgattactactggggctggatccgccagcccccagggaaggggctggagtggattgggagtatctattatagtgggcgcacctactacaacccgtccctgaagagtcgaatcaccatgtccgtagacacgtccaagaaccagttctccctgaagctgaggtctgtgaccgccgcagacacggctgtgtattattgtgcgagacatcgggacggtgacgttgactactggggccagggaaccctggtcaccgtctcctca

SEQ ID NO: 8724 - DNA, 369 bp, Artificial Sequence
  Synthetic polynucleotide encoding artificial human antibody VH domain
gaggtgcagctgttggagtctgggggaggcttggtacagcctggggggtccctgagactctcctgtgcagcctctggattcacctttagcagctatgccatgagctgggtccgccaggctccagggaaggggctggagtgggtctcagctattagtggtagtggtggtagcacatactacgcagactccgtgaagggccggttcaccatctccagagacaattccaagaacacgctgtatctgcaaatgaacagcctgagagccgaggacacggccgtatattactgtgcgaaagacccttattacgatttttggagtggttattattatgactactggggccagggaaccctggtcaccgtctcctca

SEQ ID NO: 8725 - DNA, 378 bp, Artificial Sequence
  Synthetic polynucleotide encoding artificial human antibody VH domain
caggtgcagctggtggagtctgggggaggcgtggtccagcctgggaggtccctgagactctcctgtgcagcctctggattcaccttcagtagctatgctatgcactgggtccgccaggctccaggcaaggggctggagtgggtggcagttatatcatatgatggaagtaataaatactacgcagactccgtgaagggccgattcaccatctccagagacaattccaagaacacgctgtatctgcaaatgaacagcctgagagctgaggacacggctgtgtattactgtgcgagagatcaatggattactatgatagtagtggccccatatgatgcttttgatatctggggccaagggacaatggtcaccgtctcttca

SEQ ID NO: 8726 - DNA, 381 bp, Artificial Sequence
  Synthetic polynucleotide encoding artificial human antibody VH domain
caggtgcagctgcaggagtcgggcccaggactggtgaagccttcggagaccctgtccctcacctgcactgtctctggtggctccatcagtagttactactggagctggatccggcagcccccagggaagggactggagtggattgggtatatctattacagtgggagcaccaactacaacccctccctcaagagtcgagtcaccatatcagtagacacgtccaagaaccagttctccctgaagctgagctctgtgaccgctgcggacacggccgtgtattactgtgcgagaggtggggcgcagtgggagctactggggcgcccttactactactacggtatggacgtctggggccaagggaccacggtcaccgtctcctca

SEQ ID NO: 8727 - DNA, 375 bp, Artificial Sequence
  Synthetic polynucleotide encoding artificial human antibody VH domain
gaggtgcagttggtggaatctgggggaggcttggtccagccgggggggtccctgagactctcctgttcagcctctggattcaccttcaggacccatgctatgcactgggtccgccaggctctagggaaggaaccggaacatatttcagctatcactagtagtgggagtggaacatactatgcagactcagtgagggacagattcaccgtctccagagacaattccaagagcacactgtatcttcaactgagcagtctgagagctgaggacacggctatatattactgtgtcaaagagacccccatgaagatttttggagtcggcttcagttgcttcgacccctggggccagggaaccctggtcaccgtctcctca

SEQ ID NO: 8728 - DNA, 369 bp, Artificial Sequence
  Synthetic polynucleotide encoding artificial human antibody VH domain
caggtgcagctggtgcagtctggggcagaggtgaggaagcctggggccccagtgaaggtttcctgcaaggcatctggatacacattcaccaattactatatccactgggtgcgacaggcccctggacaagggcttgagtggatgggaatgatcaatcctagtggtggtagcacaacctacgcacagaagttccagggcagagtctccgtgaccagggacacgtccacgagcacagtctacatggagatgagcagcctgagattggcagacacggccctctatttctgtgcgcgctcggcgcgaattccaatcactgccactgatgcctttgatatctggggccaggggacaaggatcaccgtctcttca

SEQ ID NO: 8729 - DNA, 363 bp, Artificial Sequence
  Synthetic polynucleotide encoding artificial human antibody VH domain
gaagtgcagctggtggagtctgggggaggcttggtgcaggctggcgggtccctgagactcacctgctcaggctctacattcaagtttcgtgtttatgggatgcactgggtccggcaagctccagggaagggcctggagtgggtctcaagtattagttgggatagtggctcaatttcttatgcggaccctgtgaagggccgattcaccatcgccagagacaacgcccagagctccctatctctacaattgaatagtctgagacctgacgacacggccttgtattactgtgcaaaagacagcagtgcttacacccatacctggatcgactcctggggccagggaaccctggtctccgtctcctca

SEQ ID NO: 8730 - DNA, 393 bp, Artificial Sequence
  Synthetic polynucleotide encoding artificial human antibody VH domain
gaggtgcagctgttggagtctgggggaggcttggtacagcctggggggtccctgagactctcctgtgcagcctctggattcacctttagcagctatgccatgagctgggtccgccaggctccagggaaggggctggagtgggtctcagctattagtggtagtggtggtcgcacatactacgcagactccgtgaagggccggttcaccatctccagagacaatcccaagaacacgctgtatctgcaaatgaacagcctgagagccgaggacacggccgtatattactgtgcgaaagatcagagctccggatacagctatggttcaggatggggctactactactactacggtatggacgtctggggccaagggaccacggtcaccgtctcctca

SEQ ID NO: 8731 - DNA, 363 bp, Artificial Sequence
  Synthetic polynucleotide encoding artificial human antibody VH domain
gaagtgcagttggcggagtctgggggaggcttcgtacggcctggcgggtccctgagactctcctgtttagcctctggattcacctttcatgattatgccatgcactgggtccgggagaccccagggcagggcctggagtgggtcgcaggtatttcttcgaatagtcttaatatagcatatgcggactctgtgaagggccggttcaccctctccagagacaacgcaaagaactccctgtctctggaaatgaatagactgagacgtgaagacaagggccgatatttctgtgcaaaaggttggggtaccctgatcaatcttcccattggcttctggggcccgggaaccctggtcaccgtctcctca

SEQ ID NO: 8732 - DNA, 378 bp, Artificial Sequence
  Synthetic polynucleotide encoding artificial human antibody VH domain
cagctgcagctgcaggagtcgggcccaggactggtgaagccttcggagaccctgtccctcacctgcactgtctctggtggctccatcagcaataatagtttccactggggctggatccgccagcccccagggaagggactggagtggattgggagtatgtattatagtgggagcacctattacaacccgtccctcaagggtcgagtcaccatatccgtagacacgtccaggaaccagttctccctgaaactgagctctgtgaccgccgcagacacggctgtctattattgtgggagactcatcataagcagtggctggtaccaatactactacggtatggacgtctggggccaagggaccacggtcaccgtctcctca

SEQ ID NO: 8733 - DNA, 378 bp, Artificial Sequence
  Synthetic polynucleotide encoding artificial human antibody VH domain
caggtgcacctggtggagtctgggggaggcgtggtccagcctgggaggtccctgagactctcctgtgcagcgtctggcttcaacttcgctacccatggcatgcactgggtccgccaggctccaggcaagggcctggagtgggtggcaatgatatggtatgatggagtcactaagaaatatcttccctccgtgaagggccgattcaccatctccagagcaaattccaacagtacgatgtatctacaaataagcagcctgagaaccgaggacagtgctatttattactgtgtgagagatttggggagctccagtcggggcctttactacttccacgggatggacgtttggggccaagggaccacggtcatcgtctcctca

SEQ ID NO: 8734 - DNA, 354 bp, Artificial Sequence
  Synthetic polynucleotide encoding artificial human antibody VH domain
caggtgcagctggtggagtctgggggagacttggtcaagcctggagggtccctgagactctcctgtgcagcctctggattcaccttcagtgactactacatgaactggatccgccagactccagggatggggctggagtgggtttcatacatcggcagtagtagtagtgacacaaactacgcagactctgtgaagggccgattcaccatctccagagacaacgccaagagcgcactgtatctgcagatgaacagcctgagagccgaggacacggccgtctattactgtgcgagctatgatagtagtgcttatttaggctactggggccggggaaccctggtcaccgtctcctca

SEQ ID NO: 8735 - DNA, 375 bp, Artificial Sequence
  Synthetic polynucleotide encoding artificial human antibody VH domain
gaggtgcagctggtggagtccgggggaggcttagttcagcctggggagtccctgagactctcctgtacagcctctggattcagtctcagtacctactggatgtactgggtccgccaagctccagggaaggggctggtgtgggtctcacgttttaacactggtgggactgtcacaagctacgcggactccgtgaagggccgattcaccatctccagagacaacgccaagaacacactgtatctacaaatgaacagtctgagagccgaggactcggctgtgtattactgtgcaagaggcttatgtagtggtggtaggtgcgactactatttcggtatggacgtctggggccaagggaccacggtcaccgtctcctca

SEQ ID NO: 8736 - DNA, 354 bp, Artificial Sequence
  Synthetic polynucleotide encoding artificial human antibody VH domain
gaggtgcaggtgttggagtctgggggaggcttggtacagcctggggggtccctgagactctcctgtgcagcctctggattcacctttagagactatgccatgagctgggtccgccaggctccagggaaggggctggagtgggtctcaggtattagtcctagcgctggtgcctcatactacgcagactccgtgaagggccggttcaccatctccagagacaattccaagaacacgctgtatctgcagatggacagcctgagagccgaggacacggccctatattattgtataagaggggggtggggatcgcgctttgacttctggggccagggaaccctggccaccgtctccgca

SEQ ID NO: 8737 - DNA, 375 bp, Artificial Sequence
  Synthetic polynucleotide encoding artificial human antibody VH domain
caggtcaccttgagggagtctggtcctgcgctggtgaaacccacacagaccctcacactgacctgcaccttctctgggttctcactcagcactagtggaatgtgtgtgagctggatccgtcagcccccagggaaggccctggagtggcttgcacgcattgattgggatgatgataaatactacagcacatctctgaagaccaggctcaccatctccaaggacacctccaaaaaccaggtggtccttacaatgaccaacatggaccctgtggacacagccacgtattactgtgcacggtcttcttacgatattttgactggttattctacagagtttgactactggggccagggaaccctggtcaccgtctcctca

SEQ ID NO: 8738 - DNA, 387 bp, Artificial Sequence
  Synthetic polynucleotide encoding artificial human antibody VH domain
gaggtgcagctggtggagtctgggggaggcctggtcaagcctggggggtccctgagactctcctgtgcagcctctggattcaccttcagtagctataccatgaactgggtccgccaggctccagggaaggggctggagtgggtctcatccattagtagtagtagtagttacatatactacgcagactcagtgaagggccgattcaccatctccagagacaacgccaagaactcactgtatctgcaaatgaacagcctgagagccgaggacacggctgtgtattactgtgcgagagataaggcagtggctggtattctctcccgggcgccaaactactactacggtatggacgtctggggccaagggaccacggtcaccgtctcctca

SEQ ID NO: 8739 - DNA, 387 bp, Artificial Sequence
  Synthetic polynucleotide encoding artificial human antibody VH domain
caggtgcagctggtgcagtctggggctgaggtgaagaagcctggggcctcagtgaaggtctcctgcaaggcttctggatacaccttcaccggctactatatgcactgggtgcgacaggcccctggacaagggcttgagtggatgggatggatcaaccctaacagtggtggcacaaactatgcacagaagtttcagggctgggtcaccatgaccagggacacgtccatcagcacagcctacatggagctgagcaggctgagatctgacgacacggccgtgtattactgtgcgagaggggtagagtggatacagctatggtcccgcaatccaaaaaagtacaactggttcgacccctggggccagggaaccctggtcaccgtctcctca

SEQ ID NO: 8740 - DNA, 402 bp, Artificial Sequence
  Synthetic polynucleotide encoding artificial human antibody VH domain
gaggtgcagctgttggagtctgggggaggcttggtacagcctggggggtccctgagactctcctgtgcagcctctggattcacctttagcagctatgccatgagctgggtccgccaggctccagggaaggggctggagtgggtctcagctattagtggtagtggtggtagcacatactacgcagactccgtgaagggccggttcaccatctccagagacaattccaagaacacgctgtatctgcaaatgaacagcctgagagccgaggacacggccgtatattactgtgcgaaaggggatattgtagtagtaccagctgctataagctggtcacgttatgaacgagaagccctctactactttgactactggggccagggaaccctggtcaccgtctcctca

SEQ ID NO: 8741 - DNA, 348 bp, Artificial Sequence
  Synthetic polynucleotide encoding artificial human antibody VH domain
caggtgcagctgcaggagtcgggcccgggactggtgaagccttcggagaccctgtccctcacttgcactgtctctgggggctccatcggtaactcttactggagctggatccggcagccccccgggaagggactggaatgggttgcatatatcttttacactgggagcgccaaatacaacccctccctcaagagtcgagtcaccatttcaattgacacgtccaagaagcagttctccctgaaactgaactctgtgaccgccacagacacggccgtctattactgtgcgagacggggtccggaggcttttgactattggggccagggaaccctggtcaccgtctcctca

SEQ ID NO: 8742 - DNA, 357 bp, Artificial Sequence
  Synthetic polynucleotide encoding artificial human antibody VH domain
caggtgcagctgcaggagtcgggcccaggactggtgaagccttcggggaccctgtccctcacctgcgaggtcgctaatggctccattagcagtagtaactggtggacttgggtccgccaggccccagggaagggattggagtggattggggaaatctatcatagtgggaccaccaacttcaatccgtcactcaagagtcgactttatatgtcagtggacaagtccaagaatcaggtgtccctgaagctgacctctgcgaccgccgcggacacggccgtgtattattgtgcgaaagcaggagtggggggggggtggttcgacccctggggccagggagccctggtcaccgtctcctca

SEQ ID NO: 8743 - DNA, 348 bp, Artificial Sequence
  Synthetic polynucleotide encoding artificial human antibody VH domain
caggtgcagctgcaggagtcgggcccaggactggttaagccttcggagaccctctccctcacctgctctgtctctggtgactccatcagtagattctactggagttggatccggcagtccccagggagggggctggagtggattggatatatcgtatacagtgggaacaccagttacaccccctccctcgagagtcgggtcaccatttcagtagacacgtccaagaatcaattctccctgaacctgcgctctgtgaccgccgcagacacggccgtctatttctgtgcgagacataagggggcctcctttgactcctggagccagggaaccctcgtcaccgtctcctca

SEQ ID NO: 8744 - DNA, 387 bp, Artificial Sequence
  Synthetic polynucleotide encoding artificial human antibody VH domain
gaggtgcagctggtggagtctgggggaggcctggtcaggcctggggggtccctgacactctcatgtgcggcctcttatttcgccttcgagacctattacataaactgggtccgccaggctccagggaaggggctagagtggatctcatgcattagtcatgatggtgttcagacgttctacacagactctgtgaggggccgcttcaccatctccagagacaacgccaaggagtcggtgtttttggaaatgagtgatctgagggccgaggacacggccgtatattactgtgcgagggaccgttccccgattgtagttgttccggctcttggacactggcactacggtatggacgtctggggccaggggaccaccgtcgccgtctcctca

SEQ ID NO: 8745 - DNA, 378 bp, Artificial Sequence
  Synthetic polynucleotide encoding artificial human antibody VH domain
caggtgcagctggtgcaatctggggctgaagtgaggaagcctggaacctcagtgaagatttcctgcaaggcatctggatacactttcaccaactactttatgcactgggtgcgacaggcccctggccaagggcttgagtgggtgggaataatccagccttctgctgggaagacagtctccgcacagaaattccagggcaggctcaccatgaccagagacacgtccacgactacattctacatggagctgagcagcctgacatccgaagacacggccgtgtattactgtacgagagacttggagcccagtgtagaaggcgctgacttcgcccctacccatgactgctggggccagggaaccctggtcaccgtctcctca

SEQ ID NO: 8746 - DNA, 381 bp, Artificial Sequence
  Synthetic polynucleotide encoding artificial human antibody VH domain
caggtgcagctggtgcagtctggggctgaggtgaagaagcctgggtcctcggtgaaggtctcctgcaaggcttctggaggcaccttcagcagctatgctatcagctgggtgcgacaggcccctggacaagggcttgagtggatgggagggatcatccctatctttggtacagcaaactacgcacagaagttccagggcagagtcacgattaccgcggacgaatccacgagcacagcctacatggagctgagcagcctgagatctgaggacacggccgtgtattactgtgcgagaacggggtggagcacggatggttcggggagttatcggtatgatgcttttgatatctggggccaagggacaatggtcaccgtctcttca

SEQ ID NO: 8747 - DNA, 363 bp, Artificial Sequence
  Synthetic polynucleotide encoding artificial human antibody VH domain
gaggtgcagttggtggagtccgggggaggcttacttcagcctggggggtccctgagactctcctgtgcagcctctggattcaccttcagtgagtattggatgcactgggtccgccaagctccagggaaggggctggtgtgggtctcacgtattgatagagatgggagtacgacaaggtacgcggactccgtgaagggccgattcaccatctccagagacaacgccaagaacacgttgtatctgcaaatgaacagtctgagagccgaggacacggctgtgtattattgtgcaagagaaacaccgtttgggggagttatcgtcatagacaactggggccagggaaccctggtcaccgtctcctca

SEQ ID NO: 8748 - DNA, 369 bp, Artificial Sequence
  Synthetic polynucleotide encoding artificial human antibody VH domain
caggtgcagctggtggagtctgggggaggcttggtcaagcctggagggtccctgagactctcctgtgcagcctctggattcaccttcagtgactactacatgagctggatccgccaggctccagggaaggggctggagtgggtttcatacattagtagtagtggtagtaccatatactacgcagactctgtgaagggccgattcaccatctccagggacaacgccaagaactcactgtatctgcaaatgaacagcctgagagccgaggacacggccgtgtattactgtgcgagagattactctcttaatgtaggtggctacgattcccccaactactggggccagggaaccctggtcaccgtctcctca

SEQ ID NO: 8749 - DNA, 360 bp, Artificial Sequence
  Synthetic polynucleotide encoding artificial human antibody VH domain
caggtgcagctggtggagtctgggggaggcgtggtccagcctgggaggtccctgagactctcctgtgcagcctctggattcaccttcagtagctatgctatgcactgggtccgccaggctccaggcaaggggctggagtgggtggcagttatatcatatgatggaagcaataaatactacgcagactccgtgaagggccgattcaccatctccagagacaattccaagaacacgctgtatctgcaaatgaacagcctgagagctgaggacacggctgtgtattactgtgcgagagattatggtacggtgactacgtatcctgactactggggccagggaaccctggtcaccgtctcctca

SEQ ID NO: 8750 - DNA, 342 bp, Artificial Sequence
  Synthetic polynucleotide encoding artificial human antibody VH domain
gaggtgcagctggtggagtctgggggaggcttggtacagccagggcggtccctgagactctcctgtacagcttctggattcacctttggtgattatgctatgagctgggtccgccaggctccagggaaggggctggagtgggtaggtttcattagaagcaaagcttatggtgggacaacagaatacgccgcgtctgtgaaaggcagattcaccatctcaagagatgattccaaaagcatcgcctatctgcaaatgaacagcctgaaaaccgaggacacagccgtgtattactgtactagacaagacgtctggggccaagggaccacggtcaccgtctcctca

SEQ ID NO: 8751 - DNA, 330 bp, Artificial Sequence
  Synthetic polynucleotide encoding artificial human antibody VL domain
cagtctgtgctgactcagccaccctcagcgtctgggacccccgggcagagggtcaccatctcttgttctggaagcagctccaacatcggaagtaatactgtaaactggtaccagcagctcccaggaacggcccccaaactcctcatctatagtaataatcagcggccctcaggggtccctgaccgattctctggctccaagtctggcacctcagcctccctggccatcagtgggctccagtctgaggatgaggctgattattactgtgcagcatgggatgacagactgaatggcgtggtattcggcggagggaccaagctgaccgtccta

SEQ ID NO: 8752 - DNA, 315 bp, Artificial Sequence
  Synthetic polynucleotide encoding artificial human antibody VL domain
gaaattgtgttgacacagtctccggccaccctgtctttgtctccaggggatggagccaccctctcctgcagggccagtcagagtgttcggagccacttagcctggtaccaacacaaacctggccaggctcccaggctcctcatctatggtgcatccagcagggccactggcatcccagacaggttcagtggcagtgggtctgggacagacttcactctcaccatcagcagactggagcctgaagattttgcagtgtattactgtcagcagtatggtagctcacttttcggcggagggaccaaggtggagatcaaa

SEQ ID NO: 8753 - DNA, 324 bp, Artificial Sequence
  Synthetic polynucleotide encoding artificial human antibody VL domain
gacatccagatgacccagtctccttccaccctgtctgcatctgtaggagacagagtcaccatcacttgccgggccagtcagactattattgactggttggcctggtatcagcagaaaccagggaaagcccctaagctcctgatctatgatgcctccagtttggaaagtggggtcccatcaaggttcagcggcagtggatctgggacagaattcactctcaccatcagcagcctgcagcctgatgattttgcaacttattactgccaacagtataatagttattctccgtggacgttcggccaagggaccaaggtggaaatcaaa

SEQ ID NO: 8754 - DNA, 321 bp, Artificial Sequence
  Synthetic polynucleotide encoding artificial human antibody VL domain
gacatccagatgacccagtctccttccaccctgtctgcatctgtaggagacagagtcaccatcacttgccgggccagtcagactattattgactggttggcctggtatcagcagaaaccagggaaagcccctaagctcctgatctatactgcatccagtttgcaaagtggggtccagtcaaggttcagtggcagtggatctgggacagatttcactctcaccatcagcagcctgcagcctgaagattttgcaatctattactgccaacagtataaaaatcatccgatcaccttcggccaagggacacgactggagattaaa

SEQ ID NO: 8755 - DNA, 324 bp, Artificial Sequence
  Synthetic polynucleotide encoding artificial human antibody VL domain
gacatccagatgacccagtctccttccaccctgtctgcatctgtaggagacagagtcaccatcacttgccgggccagtcagactattattgactggttggcctggtatcagcagaaaccagggaaagcccctaagctcctgatctatgatgcctccagtttggaaagtggggtcccatcaaggttcagcggcagtggatctgggacagaattcactctcaccatcagcagcctgcagcctgatgattttgcaacttattactgccaacagtataatagttattctccctacacttttggccaggggaccaagctggagatcaaa

SEQ ID NO: 8756 - DNA, 324 bp, Artificial Sequence
  Synthetic polynucleotide encoding artificial human antibody VL domain
gacatccagatgacccagtctccttccaccctgtctgcatctgtaggagacagagtcaccatcacttgccgggccagtcagactattattgactggttggcctggtatcagcagaaaccagggaaagcccctaagctcctgatctatactgcatccagtttgcaaagtggggtccagtcaaggttcagtggcagtggatctgggacagatttcactctcaccatcagcagcctgcagcctgatgattttgcaacttattactgccaacagtataatagttattctccgtggacgttcggccaggggaccaaggtggaaatcaaa

SEQ ID NO: 8757 - DNA, 318 bp, Artificial Sequence
  Synthetic polynucleotide encoding artificial human antibody VL domain
gacatccagatgacccagtctccttccaccctgtctgcatctgtaggagacagagtcaccatcacttgccgggccagtcagactattattgactggttggcctggtatcagcagaaaccagggaaagcccctaagctcctgatctatgatgcctccagtttggaaagtggggtcccatcaaggttcagcggcagtggatctgggacagaattcactctcaccatcagcagcctgcagcctgatgattttgcaacttattactgccaacagtataatagttattcgacgttcggccaggggaccaaggtggaaatcaaa

SEQ ID NO: 8758 - DNA, 330 bp, Artificial Sequence; identical to SEQ ID NO: 8751
  Synthetic polynucleotide encoding artificial human antibody VL domain

SEQ ID NO: 8759 - DNA, 321 bp, Artificial Sequence
  Synthetic polynucleotide encoding artificial human antibody VL domain
gaaattgtgttgacacagtctccagccaccctgtctttgtctccaggggaaagagccaccctctcctgcggggccagtcagagtgtcagcagccacttagcctggtaccaacagaaacctggccaggctcccaggctcctcatctatgatgcatccaacagggccactggcatcccagccaggttcagtggccgtgggtctgggacagacttcactctcaccatcagcagcctagagcctgaagattttgcagtttattactgtcagcagcgtagcaactggcctctcactttcggcggagggaccaaggtggagatcaaa

SEQ ID NO: 8760 - DNA, 324 bp, Artificial Sequence
  Synthetic polynucleotide encoding artificial human antibody VL domain
gaaattgtgttgacgcagtctccaggcaccgtgtctttgtctccaggggaaagagccaccctctcctgcggggccagtcagagtcttagcagcagctacttagcctggtaccagcagaaacctggccaggctcccaggctcctcatctatgatgcatccaccagggccactggcatcccagacaggttcagtggcagtgggtctgggacagacttcactctcaccatcagcagactggagcctgaagattttggagtgtattactgtcagcactatggtagctcacctcgcacttttggccaggggaccaaactggagatcaaa

SEQ ID NO: 8761 - DNA, 330 bp, Artificial Sequence
  Synthetic polynucleotide encoding artificial human antibody VL domain
cagtctgccctgactcagcctgcctccgtgtctgggtctcctggacagtcgatcaccatctcctgcactggaaccagcagtgacattggtggttatgactatgtctcctggtaccagcaacacccaggcaaagcccccaaactcatgatttatgatgtcacttaccggccctcaggggtttcttatcgcttctctgcctctaagtctggcaacacggcctccctgaccatctctgggctccaggctgaggatgaggctgattattactgctgctcatatgcaggcagctacacttatgtcttcggatctgggaccaaggtcaccgtccta

SEQ ID NO: 8762 - DNA, 330 bp, Artificial Sequence
  Synthetic polynucleotide encoding artificial human antibody VL domain
cagtctgccctgactcagcctgcctccgtgtctgggtctcctggacagtcgatcaccatctcctgcactggaaccagcagtgacgttggtggttataattatgtctcctggtaccaacagtacccagggaaagcccccaaagtcatgatttatgatgtcactaagcggccctcaggggtccctgatcgcttctctgcctctaagtctggcaacacggcctccctgaccatctctgggctccaggctgaggatgaggctgattattactgctgctcatatgcaggcagctacacttatgtcttcggatctgggaccaaggtcaccgtccta

SEQ ID NO: 8763 - DNA, 333 bp, Artificial Sequence
  Synthetic polynucleotide encoding artificial human antibody VL domain
gatattgtgatgactcagtctccactctccctgcccgtcacccctggagagccggcctccatctcctgcaggtctagtcagagcctcctgcatagtaatggatacaactatttggattggtacctgcagaagccagggcagtctccacagctcctgatctatttgggttctaatcgggcctccggggtccctgacaggttcagtggcagtggatcaggcacagattttacactgaaaatcagcagagtggaggctgaggatgttggggtttattactgcatgcaaggtacacactggcgaacttttggccaggggaccaagctggagatcaaa

SEQ ID NO: 8764 - DNA, 336 bp, Artificial Sequence
  Synthetic polynucleotide encoding artificial human antibody VL domain
gatgttgtgatgactcagtctccactctccctgcccgtcacccttggacagccggcctccatctcctgcaggtctagtcaaagcctcgtacacagtgatggaaacacctacttgaattggtttcagcagaggccaggccaatctccaaggcgcctaatttataaggtttctaaccgggactctggggtcccagacagattcagcggcagtgggtcaggcactgatttcacactgaaaatcagcagggtggaggctgaggatgttggggtttattactgcatgcaagctctacaaatcgcgctcactttcggcggagggaccaaggtggagatcaaa

SEQ ID NO: 8765 - DNA, 321 bp, Artificial Sequence
  Synthetic polynucleotide encoding artificial human antibody VL domain
gacatccagatgacccagtctccatcctccctgtctgcatctgtaggagacagagtcaccatcacttgccgggcaagtcagagcattagcagctatttaaattggtatcagcagaaaccagggaaagcccctaagctcctgatctatgctgcatccagtttgcaaagtggggtcccatcaaggttcagtggcagtggatctgggacagatttcactctcaccatcagcagtctgcaacctgaagattttgcaacttactactgtcaacagagttacagtaccccgtacacttttggccaggggaccaagctggagatcaaa

SEQ ID NO: 8766 - DNA, 321 bp, Artificial Sequence
  Synthetic polynucleotide encoding artificial human antibody VL domain
gaaattgtgttgacacagtctccagccaccctgtctttgtctccaggggaaagagccaccctctcctgcagggccagtcagagtgttagcagctacttagcctggtaccaacagaaacctggccaggctcccaggctcctcatctatgatgcatccagcagggccactgccatcccagccaggttcagtggcagtgggtctgggacagacttcactctcaccatcagcagcctagagcctgaagattttggcgtttattactgtcagcagcatagtacctggcctctcaccttcggccaagggacacgactggagattaaa

SEQ ID NO: 8767 - DNA, 330 bp, Artificial Sequence
  Synthetic polynucleotide encoding artificial human antibody VL domain
cagtctgccctgactcagcctgcctccgtgtctgggtctcctggacagtcgatcaccatctcctgcactggaaccagcagtgacgttggtggttataactatgtctcctggtaccaacagcacccaggcaaagcccccaaactcatgatttatgatgtcactaatcggccctcagggatttctaatcgcttctctggctccaagtctggcaacacggcctccctgaccgtctctgggctccaggctgaggatgaggctgattattactgcagctcatatgcaggcagcaacaatgtggtattcggcggagggaccaagctgaccgtccta

SEQ ID NO: 8768 - DNA, 333 bp, Artificial Sequence
  Synthetic polynucleotide encoding artificial human antibody VL domain
cagcctgtgctgactcaatcatcctctgcctctgcttccctgggatcctcggtcaagctcacctgcactctgagcagtgggcacagtaactacatcatcgtatggcatcagcagcagccagggaaggcccctcggtacttgatgaaccttgaaggtagtggaacctacaacaaggggagcggagttcctgatcgcttctcaggctccagctctggggctgaccgctacctcaccatctccaacctccagtctgaggatgaggctgattattactgtgaggcctgggacagtaacactgtggtgttcggcggagggaccagtctgaccgtccta

SEQ ID NO: 8769 - DNA, 330 bp, Artificial Sequence
  Synthetic polynucleotide encoding artificial human antibody VL domain
cagtctgccctgactcagcctgcctccgtgtctgggtctcctggacagtcgatcaccatctcctgcactgcaaccggcagtgatgttgggagttatagccttgtctcctggtaccaacagaacccaggcaaagcccccaaactcataatttatgaagacagcaagcggccctcaggggtttctaatcgcttctctggctccaagtctggcaacacggcctccctgacaatctctgggctccaggctgaggacgaggttgattattactgctgctcatatgcaggtagtaacacttgggtgttcggcggagggaccaaggtgaccgtccta

SEQ ID NO: 8770 - DNA, 324 bp, Artificial Sequence
  Synthetic polynucleotide encoding artificial human antibody VL domain
tcctatgtggtgactcagtcaccctcggagtcagtggccccagggaggacggccaggattacctgtgaagcatctaatattggaagtaaaagtgtgcactggcaccagcagaagccaggccaggcccctgtgttggtcgtctatgatgatagcgaccggccctcagggatccctgagcgattctctggctccaattctggaaacatggccaccctgaccatcagcagggtcgaagccggggatgaggccgactatgtttgtctggtgtgggatagcagtagtgatcattgggtgttcggcggagggaccaagctgaccgtccta

SEQ ID NO: 8771 - DNA, 330 bp, Artificial Sequence
  Synthetic polynucleotide encoding artificial human antibody VL domain
cagtctgccctgactcagcctgcctccgtgtctgggtctcctggacagtcgatcaccatctcctgcagtggaaccagcagagacattggtggttatatgtctgtctcctggtaccaacaacacccaggcaaagcccccaaactcatgatttatgatgtcaataagcggccctcaggggtttctgagcgcttctctggctccaagtctggcaacacggcctccctgaccatctctgggctccaggcggaggacgaggctgattactactgcagctcatatacaagcagcagcacttatgtcttcgggactgggaccaaggtcagcgtccta

SEQ ID NO: 8772 - DNA, 330 bp, Artificial Sequence
  Synthetic polynucleotide encoding artificial human antibody VL domain
cagtctgccctgactcagcctgcctccgtgtctgggtctcctggacagtcgatcaccatctcctgcactggaaccagcagtgacattggtagttctaactttgtctcctggtaccaacaacacccaggtaaggcccccaaagtcatgatttttgatgtcagcaatcggccctcaggggtttctgatcgcttctctggctccaagtctggcaacacggcctccctgaccatctctggactccaggctgaggacgaggctagttatcactgcacctcacatacaatctacggcacccgggtcttcggcgggggcaccaaggtgaccgtccta

SEQ ID NO: 8773 - DNA, 327 bp, Artificial Sequence
  Synthetic polynucleotide encoding artificial human antibody VL domain
gaaattgtgttgacgcagtctccaggcaccctgtctttgtctccaggggaaagagccaccctctcctgcagggccagtcagagtgttagcagcagctacttagcctggtaccagcagaaacctggccaggctcccaggctcctcatctatggtgcatccagcagggccactggcatcccagacaggttcagtggcagtgggtctgggacagacttcactctcaccatcagcagactggagcctgaagattttgcagtgtattactgtcagcagtatggtagctcaccgaggtacacttttggccaggggaccaagctggagatcaaa

SEQ ID NO: 8774 - DNA, 336 bp, Artificial Sequence
  Synthetic polynucleotide encoding artificial human antibody VL domain
cagtctgccctgactcagcctgcctccgtgtctgggtctcctggacagtcgatcaccatctcctgcactggaaccagcagtgacgttggtggttataactatgtctcctggtaccaacagcacccaggcaaagcccccaaactcatgatttatgatgtcagtaagcggccctcaggggtttctaatcgcttctctggctccaagtctggcaacacggcctccctgaccatctctgggctccaggctgaggacgaggctgattattactgcagctcatatacaagcagcagcactttcggctgggtgttcggcggagggaccaagctgaccgtccta

SEQ ID NO: 8775 - DNA, 327 bp, Artificial Sequence
  Synthetic polynucleotide encoding artificial human antibody VL domain
cagtctgccctgactcagcctgcctccgtgtctgggtctcctggacagtcgatcaccatctcctgcactggaaccagcagtgatgttgggagttataaccttgtctcctggtaccaacagcacccaggcaaagcccccaaactcatgatttatgaggtcagtaagcggccctcaggggtttctaatcgcttctctggctccaagtctggcaacacggcctccctgacaatctctgggctccaggctgaggacgaggctgattattactgctgctcatatgcaggtagtagcaggatattcggcggagggaccaagctgaccgtccta

SEQ ID NO: 8776 - DNA, 321 bp, Artificial Sequence
  Synthetic polynucleotide encoding artificial human antibody VL domain
gaaattgtgttgacgcagtctccaggcaccctgtctttgtctccaggggaaagagccaccctctcctgcagggccagtcagagtgttagcagcagctacttagcctggtaccaatataaacctggccagtctcccaggctcctcatctatggtgcatccagcagggccactggcatcccagacaggttcagtggcagtgggtctgggacagacttcactctcaccatcagcagactggagcctgaagattttgcagtgtattactgtcagcagtatggtagcccgtggacgttcggccaagggaccaaggtggaaaccaaa

SEQ ID NO: 8777 - DNA, 321 bp, Artificial Sequence
  Synthetic polynucleotide encoding artificial human antibody VL domain
gacatccagatgacccagtctccatcctccctgtctgcatctgttggagacagagtcaccatcacttgccgggcaagtcagagcattgacttttacttaaattggtatcaccagaaaccagggaaagccccaacactcctgatctatcctccatccagtctccaaagtgaggtcccatcaaggctcagtggcggtggatctgggacagagttcagtctaaccatcagcagtctgcaacctgaagactccggaacttactactgtcaacagagttacgttactccctacacttttggccaggggaccaagctggagatcaaa

SEQ ID NO: 8778 - DNA, 348 bp, Artificial Sequence
  Synthetic polynucleotide encoding artificial human antibody VL domain
cagcctgtgctgactcagccaccttctgcatcagcctccctgggagcctcggtcacactcacctgcaccctgagcagcggctacagtaattataaagtggactggtaccagcagagaccagggaagggcccccggtttgtgatgcgagtgggcactggtgggattgtgggatccaagggggatggcatccctgatcgcttctcagtcttgggctcaggcctgaatcggtacctgaccatcaagaacatccaggaagaggatgagagtgactaccactgtggggcagaccatggcagtgggagcaacttcctcgtggtattcggcggagggaccaagctgaccgtccta

SEQ ID NO: 8779 - DNA, 321 bp, Artificial Sequence
  Synthetic polynucleotide encoding artificial human antibody VL domain
gccatccggatgacccagtctccatcctcattctctgcatctacaggagacagagtcaccatcacttgtcgggcgagtcagggtattagcagttatttagcctggtatcagcaaaaaccagggaaagcccctaagctcctgatctatgctgcatccactttgcaaagtggggtcccatcaaggttcagcggcagtggatctgggacagatttcactctcaccatcagctgcctgcagtctgaagattttgcaacttattactgtcaacagtattatagttacccgctcactttcggcggagggaccaaggtggagatcaaa

SEQ ID NO: 8780 - DNA, 333 bp, Artificial Sequence
  Synthetic polynucleotide encoding artificial human antibody VL domain
cagcttgtgctgactcaatcgccctctgcctctgcctccctgggagcctcggtcaagctcacctgcactctgagcagtaggcacggcaactacgccatcgcgtggcatcagcagcagccagagaagggccctcgatacttgatgaaggttaacagtgatggcagccacaataagggggacgggatccctgatcgcttctcaggctccagttctggggctgagcgctacctcaccatctccagcctccagtctgaggatgaggctgactattactgtcagacctggggcactggcatgcagatgttcggcggggggaccaaggtgaccgtccta

SEQ ID NO: 8781 - DNA, 327 bp, Artificial Sequence
  Synthetic polynucleotide encoding artificial human antibody VL domain
gaaattgtgttgacgcagtctccaggcaccctgtctttgtctccaggggaaagagccaccctctcctgcagggccagtcagagtgttagcagcagctacttagcctggtaccagcagaaacctggccaggctcccaggctcctcatctatggtgcatccagcagggccactggcatcccagacaggttcagtggcagtgggtctgggacagacttcactctcaccatcagcagactggagcctgaagattttgcagtgtattactgtcagcagtatggtagctcacctccgctcactttcggccctgggaccaaagtggatatcaaa

SEQ ID NO: 8782 - DNA, 321 bp, Artificial Sequence
  Synthetic polynucleotide encoding artificial human antibody VL domain
gacatccagatgacccagtctccaccctccctgtctgcatctgtaggagacagagtcaccatcacttgccgggcaagtcagggcattagaaatgatttaggctggtatcaacagaaaccagggaaagcccctaagcgcctgatctatggtgcatcccgtttgcaaagtggggtcccatcaaggttcagcggcagtggatctgggacagaattcactctcacaatcagcagcctgcagcctgaagattttgcaacttattactgtctacagaataatcgttacccccgaacgttcggccaagggaccagggtggaaatcaaa

SEQ ID NO: 8783 - DNA, 324 bp, Artificial Sequence
  Synthetic polynucleotide encoding artificial human antibody VL domain
gaaattgtgttgacacagtctccagccaccctgtctttgtctccaggggaaagagccaccctctcctgcagggccagtcagagtgttagcagctacttagcctggtaccaacagaaacctggccaggctcccaggctcctcatctatgatgcatccaacagggccactggcatcccagccaggttcagtggcagtgggtctgggacagacttcactctcaccatcagcagcctagagcctgaagattttgcagtttattactgtcagcagcgtagcaactggcctccgtggacgttcggccaagggaccaaggtggaaatcaaa

SEQ ID NO: 8784 - DNA, 324 bp, Artificial Sequence
  Synthetic polynucleotide encoding artificial human antibody VL domain
tcctatgagctgacacagccaccctcggtgtcagtgtccccaggacagacggccaggatcacctgcactggagatgcattgccaaagcaatatgcttactggtaccagcagaagccaggccaggcccctattctgctcatatatgcagacattgagaggccctcagggatcccagagcgattctctggctccagctcagggactacattcacgttgaccattagtggagtccaggcagaagacgaggctgactattactgtcagtcagcagacagcagtggtactttttacgtcttcggcggagggaccaggctgaccgtccta

SEQ ID NO: 8785 - DNA, 321 bp, Artificial Sequence
  Synthetic polynucleotide encoding artificial human antibody VL domain
gacatccagatgacccagtctccatcttccctgtctgcatctgtgggagacacagtcaccatcacttgccgggcgagccagggcattagcgattttttagcctggtatcagcagagaccaggaaaagttcctgaactcctgatctacgcagcatccaccctgcagccaggggtcccatctcggttcagcggcagtggatctgggaccgatttcactctcaccatcagcagcctacagcctgaagatgttgcaacttattactgtcaaaagtataacagtgccccatggacgttcggccaagggaccaaggtggaaatcaaa

SEQ ID NO: 8786 - DNA, 324 bp, Artificial Sequence
  Synthetic polynucleotide encoding artificial human antibody VL domain
gccatccagttgacccagtctccgtcctccctgtctgcatctgtaggagacagagtctccatcacttgccgggcaagtcagggcattagcactgctttggcctggtatcagcagaggccaggaaaacctcctagactcctgattcatgatgtctccagtttggaaagaggggtcccatcaaggttcagcggcagtggatccgggacagatttcactctcaccatcaccaccctgcagcctgaagattctgcaacttatttctgtcaacagttttataatttccccttcttcactttcggccctgggaccaaagtggatatcaaa

SEQ ID NO: 8787 - DNA, 324 bp, Artificial Sequence
  Synthetic polynucleotide encoding artificial human antibody VL domain
gaaatagtgatgacgcagtctccagccaccctgtctgtgtctccaggggaaagagccaccctctcctgcagggccagtcagagtgttagcagcaacttagcctggtaccagcagaaacctggccaggctcccaggctcctcatctatggtgcatccaccagggccactggtatcccagccaggttcagtggcagtgggtctgggacagagttcactctcaccatcagcagcctgcagtctgaagattttgcagtttattactgtcagcagtataataactggcccccgtacacttttggccaggggaccaagctggagatcaaa

SEQ ID NO: 8788 - DNA, 321 bp, Artificial Sequence
  Synthetic polynucleotide encoding artificial human antibody VL domain
gacatccagatgacccagtctccatcctccctgtctgcatctgtaggagacagagtcaccatcacttgccgggcaagtcagggcattagaaatgatttaggctggtatcagcagaaaccagggaaagcccctaagcgcctgatctatgctgcatccagtttgcaaagtggggtcccatcaaggttcagcggcagtggatctgggacagaattcactctcacaatcagcagcctgcagcctgaagattttgcaacttattactgtctacagcataatagttacccgctcactttcggcggagggaccaaggtggagatcaaa

SEQ ID NO: 8789 - DNA, 324 bp, Artificial Sequence
  Synthetic polynucleotide encoding artificial human antibody VL domain
tcctatgtgctgactcagccaccctcagtgtcagtggccccaggaaagacggccaggattacctgtgggggaaacaacattggaagtaaaagtgtgcactggtaccagcagaagccaggccaggcccctgtgctggtcatctattatgatagcgaccggccctcagggatccctgagcgattctctggctccaactctgggaacacggccaccctgaccatcagcagggtcgaagccggggatgaggccgactattactgtcaggtgtgggatagtagtagtgatcatggagtgttcggcggagggaccaagctgaccgtccta

SEQ ID NO: 8790 - DNA, 342 bp, Artificial Sequence
  Synthetic polynucleotide encoding artificial human antibody VL domain
gacatcgtgatgacccagtctccagactccctggctgtgtctctgggcgagagggccaccatcaactgcaagtccagccagagtgttttatacagctccaacaataagaactacttagcttggtaccagcagaaaccaggacagcctcctaagttggtcatttactgggcatctacccgggaatccggggtccctgaccgattcagtggcagcgggtctgggacagatttcactctcaccatcagcagcctacaggctgaagatgcggcagtttattactgtcagcaatattacagtactcccccatacacttttggccaggggaccaagctggagatcaaa

SEQ ID NO: 8791 - DNA, 330 bp, Artificial Sequence
  Synthetic polynucleotide encoding artificial human antibody VL domain
cagtctgccctgactcagcctgcctccgtgtctgggtctcctggacagtcgatcaccatctcctgcactggaaccagcagtgacgttggtggttataactatgtctcctggtaccaacagcacccaggcaaagcccccaaactcatgatttatgatgtcagtaagcggccctcaggggtttctaatcgcttctctggctccaagtctggcaacacggcctccctgaccatctctgggctccaggctgaggacgaggctgattattactgcagctcatatacaagcagcagcacttatgtcttcggaactgggaccaaggtcactgtccta

SEQ ID NO: 8792 - DNA, 330 bp, Artificial Sequence
  Synthetic polynucleotide encoding artificial human antibody VL domain
cagtctgccctggctcagcctgcctccgtgtctgcgtctcctggacagtcgatcaccatctcctgcactggctcccgcagtgacattggtgcatataattatgtctcctggtaccagcaacaaccaaacaaagcccccaaggtcgtgatgtatgatgtaagtcgtcggccctcaggaattcctggtcgattctctggctctaagtccggcaacacggcctccctgaccatctctggcctccaggctgccgatgaggctgattattactgctgctcatacacagacaggttctcctatgtcttcggaagcgggaccagggtcaccgtccta

SEQ ID NO: 8793 - DNA, 330 bp, Artificial Sequence
  Synthetic polynucleotide encoding artificial human antibody VL domain
cagtctgccctgactcagcctgcctccgtgtctgggtctcctggacagtcgatcaccatctcctgcactggaaccagcagtgatgttgggagttataaccttgtctcctggtaccgacagcacccaggcgaagcccccaaactcctgatttatgaggtcactaagcggccctcaggcatttctaatcgcttctctggctccaagtctggcaactcggcctccctgacaatctctgggctccaggctgaggacgaggctgattattactgctgctcatttgcaggtagtagtacttatgtcttcggaagtgggaccaaggtcaccgtccta

SEQ ID NO: 8794 - DNA, 321 bp, Artificial Sequence
  Synthetic polynucleotide encoding artificial human antibody VL domain
gaaatagtgatgacgcagtctccagccaccctgtctgtgtctccaggggaaagagccaccctctcctgcagggccagtcagagtgttagcagcaacttagcctggtaccagcagaaacctggccaggctcccaggctcctcatctatggtgcatccaccagggccactggtaccccagccaggttcagtggcagtgggtctgggacagagttcactctcaccatcagcagcctgcaggctgaagattttgcagtttattactgtcagcagtataataactggcctcggacgttcggccaagggaccaaggtggaaatcaaa

SEQ ID NO: 8795 - DNA, 321 bp, Artificial Sequence
  Synthetic polynucleotide encoding artificial human antibody VL domain
tcttctgagctgactcaggaccctgctgtgtctgtggccttgggacagacagtcaggatcacatgccaaggagacagcctcagaagctattatgcaagctggtaccagcagaagccaggacaggcccctgtacttgtcatctatggtaaaaacaaccggccctcagggatcccagaccgattctctggctccagctcaggaaacacagcttccttgaccatcactggggctcaggcggaagatgaggctgactattactgtaactcccgggacagcagtggtaaccaggtattcggcggagggaccaagctgaccgtccta

SEQ ID NO: 8796 - DNA, 336 bp, Artificial Sequence
  Synthetic polynucleotide encoding artificial human antibody VL domain
gatattgtgatgacccagactccactctctctgtccgtcacccctggacagccggcctccatctcctgcaagtctagtcagagcctcctgcatagtgatggaaagacctatttgtattggtacctgcagaagccaggccagcctccacagctcctgatctatgaagtttccaaccggttctctggagtgccagataggttcagtggcagcgggtcagggacagatttcacactgaaaatcagccgggtggaggctgaggatgttggggtttattactgcatgcaaagtatacagcttcccctggggttcggccaagggaccaaggtggaaatcaaa

SEQ ID NO: 8797 - DNA, 315 bp, Artificial Sequence
  Synthetic polynucleotide encoding artificial human antibody VL domain
gaaattgtattgacgcagtctcctggcaccctgtctttgtctcccgggggaagagccaccctctcctgcagggccagtcagagtgttagtagcagctacttggcctggtaccagcagaagcctggccaggctcccaggctcctcatatctggtgcatccaccagggccgctggcatttcagaccggttcagtgtcagtgggtctgggacagacttcactctcatcatcagcagactggaggctgaagactctgcagtgtactattgtcagcgctctaggggctcttttggccaggggaccaagctggagataaaa

SEQ ID NO: 8798 - DNA, 327 bp, Artificial Sequence
  Synthetic polynucleotide encoding artificial human antibody VL domain
gaaatactgatgacgcagtctccagccaccctgtctctgtctccaggggaaagagccaccctctcctgcagggccagtcaaagtcttaggaacaccttagcctggtaccagcagaaacctggccaggctcccaggctcctcatctatggtgtatccaccagggccactggtatcccagccaggttcagtggcagtgggtctgggacagagttcactctcaccatcagcagcctgcagtctgaagattttgcagtttattactgtcaacagtatgatgactggcctctggggatcactttcggccctgggaccaaagtggatatcaaa

SEQ ID NO: 8799 - DNA, 333 bp, Artificial Sequence
  Synthetic polynucleotide encoding artificial human antibody VL domain
cagtctgtgctgacgcagccgccctcagtgtctggggccccagggcagagggtcaccatctcctgcactgggagcacctccaacatcggggcagattatgatgtacactggtaccagcaccttccaggaacagcccccaaactcctcatctatcgtaacaacaatcggccctcaggggtccctgaccgattctctggctccaagtctggcacctcagcctccctggccatcactggcctccaggctgaagatgaggctgattattactgccagtcctatgacagcagcctgagtggttctgtcttcggaactgggaccaaggtcaccgtccta

SEQ ID NO: 8800 - DNA, 339 bp, Artificial Sequence
  Synthetic polynucleotide encoding artificial human antibody VL domain
gacatcttgatgacccagtctccagactccctggctgtgtctctgggcgagagggccaccatcaactgcaagtccaaccagagtctctcatacagctccaagtataagaactacttagcttggtaccagcagaaaccaggacagcctcctaaattgctcatttactgggcatctacccgggaatccggggtccctgaccgattcagtggcagcgggtctgcgacagatttcactctcaccatcagcagcctgcaggctgaggatgtggcagtttatttctgtcagcagtattatagtattccctacacttttggccaggggaccaagcttgagatcaaa

SEQ ID NO: 8801 - DNA, 333 bp, Artificial Sequence
  Synthetic polynucleotide encoding artificial human antibody VL domain
cagtctgccctgactcagcctccctccgtgtccggctctcctggacagtcagtcaccatctcctgcactggaaccagcagtgacattggtggttatgaccgtgtcgcctggtaccagcagtccccaggcacagcccccaaactcttaatttatgaggtcactaatcggccctcaggggtcccttatcgcttctttgggtccaagtctgccaacacggcctccctgaccatctctgggctccaggctggggacgaggctgattattactgctactcatatacaagcaccactaatcgttatgtcttcggtagcgggaccaaggtcaccgtccta

SEQ ID NO: 8802 - DNA, 339 bp, Artificial Sequence
  Synthetic polynucleotide encoding artificial human antibody VL domain
cagtctgtgctgactcagccaccctcagcgtctgggacccccgggcagagggtcaccatctcttgttctggaagcagctccaacatcggaagtaattatgtatactggtaccagcagctcccaggaacggcccccaaactcctcatctataggaataatcagcggccctcaggggtccctgaccgattctctggctccaagtctggcacctcagcctccctggccatcagtgggctccggtccgaggatgaggctgattattactgtgcagcatgggatgacagcctgagtggtcgggccatttgggtgttcggcggagggaccaagctgaccgtccta

SEQ ID NO: 8803 - DNA, 330 bp, Artificial Sequence
  Synthetic polynucleotide encoding artificial human antibody VL domain
cagtctgtgctgacacagccaccctcagcgtcggggacccccgggcagagggtctccatctcttgctctgggcgcaggtccaacatcggaagtaatgctgtgaactggtaccagcacctcccaggaacggcccccaaactcctcatctatagtaataatcagcggccctcaggggtccctgaccgattctctggctccaactctggcacctcagcctccctggccatcagtgaggtcctggctgaggatgagggtgattattactgtgcatcttgggatgacagcctgaagggtgtggtaatcggcggagggaccaagctgagcgtccta

SEQ ID NO: 8804 - DNA, 330 bp, Artificial Sequence
  Synthetic polynucleotide encoding artificial human antibody VL domain
cagtctgtgttgacgcagccgccctcagtgtctgcggccccaggacagaaggtcaccatctcctgctctggaagcagctccaacattgggaataattatgtatcctggtaccagcagctcccaggaacagcccccaaactcctcatttatgacaataataagcgaccctcagggattcctgaccgattctctggctccaagtctggcacgtcagccaccctgggcatcaccggactccagactggggacgaggccgattattactgcggaacatgggatagcagcctgagtgcttgggtgttcggcggagggaccaagctgaccgtccta

SEQ ID NO: 8805 - DNA, 324 bp, Artificial Sequence
  Synthetic polynucleotide encoding artificial human antibody VL domain
tcttctgagctgactcaggaccctgctgtgtctgtggccttgggacagacagtcaggatcacatgccaaggagacagcctcagaagctattatgcaagctggtaccagcagaagccaggacaggcccctgtacttgtcatctatggtaaaaacaaccggccctcagggatcccagaccgattctctggctccagctcaggaaacacagcttccttgaccatcactggggctcaggcggaagatgaggctgactattactgtaactcccgggacagcagtggtaaccattgggtgttcggcggagggaccaagctgaccgtccta

SEQ ID NO: 8806 - DNA, 327 bp, Artificial Sequence
  Synthetic polynucleotide encoding artificial human antibody VL domain
gaaattgtgttgacgcagtctccaggcaccctgtctttgtctccaggggaaagagccaccctctcctgcagggccagtcagagtattaacaggaacttcttagcctggtaccagcagaaacccggccagactcccaggctcctcttgtatggtacatccaccagggccactggcatcccagacaggttcagtggcagtgggtctgggacagacttcactctcaccatcagcagactggagcctgaagattttgcagtgtattactgtcagcagtatgatgcctcagctctgtggacgttcggccaagggaccaaggtggaaatcaaa

SEQ ID NO: 8807 - DNA, 324 bp, Artificial Sequence
  Synthetic polynucleotide encoding artificial human antibody VL domain
gacatccagatgacccagtctccatcctccctgtctgcatctgtaggagacagagtcaccatcacttgccgggcaagtcagagcattagcagctatttaaattggtatcagcagaaaccagggaaagcccctaagctcctgatctatgctgcatccagtttgcaaagtggggtcccatcaaggttcagtggcagtggatctgggacagatttcactctcaccatcagcagtctgcaacctgaagattttgcaacttactactgtcaacagagttacagtacccctcggatcaccttcggccaagggacacgactggagattaaa

SEQ ID NO: 8808 - DNA, 324 bp, Artificial Sequence
  Synthetic polynucleotide encoding artificial human antibody VL domain
tcctatgagctgacacagccaccctcggtgtcagtgtccccaggacagacggccaggatcacctgctctggagatgcattgccaaagcaatatgcttattggtaccagcagaagccaggccaggcccctgtgctggtgatatataaagacagtgagaggccctcagggatccctgagcgattctctggctccagctcagggacaacagtcacgttgaccatcagtggagtccaggcagaagacgaggctgactattactgtcaatcagcagacagcagtggtaccctttgggtgttcggcggagggaccaagctgaccgtccta

SEQ ID NO: 8809 - DNA, 336 bp, Artificial Sequence
  Synthetic polynucleotide encoding artificial human antibody VL domain
gatattgtgatgacccagactccactctctctgtccgtcacccctggacagccggcctccatctcctgcaagtctagtcagagcctcctgcatagtgatggaaagacctatttgtattggtacctgcagaagccaggccagcctccacagctcctgatctatgaagtttccaaccggttctctggagtgccagataggttcagtggcagcgggtcagggacagatttcacactgaaaatcagccgggtggaggctgaggatgttggggtttattactgcatgcaaagtatacagctcgcgctcactttcggcggagggaccaaggtggagatcaaa

SEQ ID NO: 8810 - DNA, 321 bp, Artificial Sequence
  Synthetic polynucleotide encoding artificial human antibody VL domain
gacatccagatgacccagtctccatcttccctgtctgcatctgtgggggacagagtcaccatcacttgccgggcgagtcagggcattaccaatcatttagcctggtatcagcagaaaccagggaaagttcctaagctcctgatctatgctgcatccactttgcaatcaggcgtcccatctcggttcagtggcagtggatctgggacagatttcactctcaccatcagcagcctgcagcctgaagacgttgcaacttattactgtcaaaagtataacaatgccccgtggacgttcggccaagggaccaaggtggatctcaaa

SEQ ID NO: 8811 - DNA, 318 bp, Artificial Sequence
  Synthetic polynucleotide encoding artificial human antibody VL domain
tcctatgagctgactcagccaccctcagtgtccgtgtccccaggacagacagccagcatcacctgctctggagataaattgggggataaatatgcttgctggtatcagcagaagccaggccagtcccctgtgctggtcatctatcaagatagcaagcggccctcagggatccctgagcgattctctggctccaactctgggaacacagccactctgaccatcagcgggacccaggctatggatgaggctgactattactgtcaggcgtgggacagcagcactgtggtattcggcggagggaccaagctgaccgtccta

SEQ ID NO: 8812 - DNA, 324 bp, Artificial Sequence
  Synthetic polynucleotide encoding artificial human antibody VL domain
tcctatgagctgacacagccaccctcggtgtcagtgtccccaggacaaacggccaggatcacctgctctggagatgcattgccaaaaaaatatgcttattggtaccagcagaagtcaggccaggcccctgtgctggtcatctatgaggacagcaaacgaccctccgggatccctgagagattctctggctccagctcagggacaatggccaccttgactatcagtggggcccaggtggaggatgaagctgactactactgttactcaacagacagcagtggtaatcattgggtgttcggcggagggaccaagctgaccgtccta

SEQ ID NO: 8813 - DNA, 336 bp, Artificial Sequence
  Synthetic polynucleotide encoding artificial human antibody VL domain
gatattgtgatgactcagtctccactctccctgcccgtcacccctggagagccggcctccatctcctgcaggtctagtcagagcctcctgcatagtaatggatacaactatttggattggtacctgcagaagccagggcagtctccacagctcctgatctatttgggttctaatcgggcctccggggtccctgacaggttcagtggcagtggatcaggcacagattttacactgaaaatcagcagagtggaggctgaggatgttggggtttattactgcatgcaagctctacaaaccccgatcaccttcggccaagggacacgactggagattaaa

SEQ ID NO: 8814 - DNA, 339 bp, Artificial Sequence
  Synthetic polynucleotide encoding artificial human antibody VL domain
gatattgtgatgacccagactccactctccctgcccgtcacccctggagagccggcctccatctcctgcaggtctagtcagagcctcttggatagtgatgatggaaacacctatttggactggtacctgcagaagccagggcagtctccacagctcctgatctatacgctttcctatcgggcctctggagtcccagacaggttcagtggcagtgggtcaggcactgatttcacactgaaaatcagcagggtggaggctgaggatgttggagtttattactgcatgcaacgtatagagtttccgtggacgttcggccaagggaccaaggtggaaatcaaa

SEQ ID NO: 8815 - DNA, 333 bp, Artificial Sequence
  Synthetic polynucleotide encoding artificial human antibody VL domain
gatattgtgatgactcagtctccactctccctgcccgtcacccctggagagccggcctccatctcctgcaggtctagtcagagcctcctgcatagtaatggatacaactatttggattggtacctgcagaagccagggcagtctccacagctcctgatctatttgggttctaatcgggcctccggggtccctgacaggttcagtggcagtggatcaggcacagattttacactgaaaatcagcagagtggaggctgaggatgttggggtttattactgcatgcaagctctacaaccgtacacttttggccaggggaccaagctggagatcaaa

SEQ ID NO: 8816 - DNA, 330 bp, Artificial Sequence
  Synthetic polynucleotide encoding artificial human antibody VL domain
cagtctgccctgactcagcctgcctccgtgtctgggtctcctggacagtcgatcaccatctcctgcactggaaccagcagtgacattggtgcttataactatgtctcttggagccagcagcacccaggcaaagcccccaaactcatgatttatgatgtcaataagcggccctcaggggtttctaatcgcttctctggctccaagtcaggcaacacggcctccctgaccatctctgggctccaggctgaggacgaggctgattattactgcagcacatttacaagcagcaccactttagtcttcggaactgggaccaaggttaccgtccta

SEQ ID NO: 8817 - DNA, 324 bp, Artificial Sequence
  Synthetic polynucleotide encoding artificial human antibody VL domain
gaaattgtgttgacgcagtctccaggcaccctgtctttgtctccaggggaaagagccaccctctcctgcagggccagtcagagtgttagcagcagctacttagcctggtaccagcagaaacctggccaggctcccaggctcctcatctatggtgcatccagcagggccactggcatcccagacaggttcagtggcagtgggtctgggacagacttcactctcaccatcagcagactggagcctgaagattttgcagtgtattactgtcagcagtatggtagctcactcttcactttcggccctgggaccaaagtggatatcaaa

SEQ ID NO: 8818 - DNA, 330 bp, Artificial Sequence
  Synthetic polynucleotide encoding artificial human antibody VL domain
caggcagggccgactcagccaccctcggtgtccaagggcttgagacagaccgccacactcacctgcactgggaacagcaacaatgttggcaaccaaggagcagcttggctgcagcagcaccagggccaccctcccaaactcctatcctacaggaatcacaaccggccctcagggatctcagagagattttctgcatccaggtcaggaaacacagcctccctgaccattactggactccagcctgaggacgaggctgactattattgtttagcgtgggacgacagcctcactgcttgggtcttcggcggagggaccaggttgaccgtccta

SEQ ID NO: 8819 - DNA, 339 bp, Artificial Sequence
  Synthetic polynucleotide encoding artificial human antibody VL domain
gacatcgtgatgacgcagtctccagactccctggctgtgtctctgggcgagagggccaccatcagctgcaagtccagccagagtgtcttatacacccccaacaataagaactacttagcttggtaccaacacaaaccagggcagcctcctaagctgctcatttactgggcatctacccgggaatccggggtccctgcccgattcagaggcagcgggtctgggacagatttcactctcaccatcagcggcctgcaggctgaagatgtggcagtttattactgtcagcaatacttcgctcctcctcagaccttcggccaagggaccaaggtggaaatcaaa

SEQ ID NO: 8820 - DNA, 318 bp, Artificial Sequence
  Synthetic polynucleotide encoding artificial human antibody VL domain
gaaatagtgatgacgcagtctccagccaccctgtctgtgtctccaggggaaagagccaccctctcctgcagggccagtcagagtgttagcagcaacttagcctggtaccagcagaaacctggccaggctcccaggctcctcatctatggtgcatccaccagggccactggtatcccagccaggttcagtggcagtgggtctgggacagagttcactctcaccatcagcagcctgcagtctgaagattttgcagtttattactgtcagcagtataataactggtacacttttggccaggggaccaagctggagatcaaa

SEQ ID NO: 8821 - DNA, 330 bp, Artificial Sequence
  Synthetic polynucleotide encoding artificial human antibody VL domain
cagtctgtgctgactcagccaccctcagcgtctggggcccccgggcagagggtcaccatctcttgttctggaagcagctccaacatcggaggtaatactgtaaactggtaccagcaagtcccaggaacggcccccaaactcctcatctttagtgataatcagaggccctcaggggtccctgaccgaatctctggctccaagtctggcacctcagcctccctggccatcagtgggctccagtctgaggatgaggctgattattactgtgcactatgggatgacagcctgactggttatgtcttcggaactgggaccaaggtcaccgtccta

SEQ ID NO: 8822 - DNA, 321 bp, Artificial Sequence
  Synthetic polynucleotide encoding artificial human antibody VL domain
gaaatagtgatgacgcagtctccagccaccctgtctgtgtctccaggggaaagagccaccctctcctgcagggccagtcagactattaataacaacttagcctggtaccagcagaaacctggccaggctcccaggctcctcatttatggtgcatcgaccagggccacgggtctcccagccaggttcagtggcactgagtctgggacagagttcactctcaccatcagcagcctgcagtctgaagattttgcagtttattactgtcagcagtatcatgactggccgctcactttcggcggagggaccaaggtggagatcaaa

SEQ ID NO: 8823 - DNA, 330 bp, Artificial Sequence
  Synthetic polynucleotide encoding artificial human antibody VL domain
cagtctgccctgactcagcctgcctccgtgtctgggtctcctggacagtcgatcaccatctcctgcactggaaccagcagtgatgttgggagttataaccttgtctcctggtaccaacagcacccaggcaaagcccccaaactcatgatttatgaggtcagtaagcggccctcaggggtttctaatcgcttctctggctccaagtctggcaacacggcctccctgacaatctctgggctccaggctgaggacgaggctgattattactgctgctcatatgcaggtagtagcactttcgtcttcggaactgggaccaaggtcaccgtccta

SEQ ID NO: 8824 - DNA, 333 bp, Artificial Sequence
  Synthetic polynucleotide encoding artificial human antibody VL domain
cagtctgtgctgactcagccaccctcagcgtctgggacccccgggcagagggtcaccatctcttgttctggaagcagctccaacatcggaagtaattatgtatactggtaccagcagctcccaggaacggcccccaaactcctcatctataggaataatcagcggccctcaggggtccctgaccgattctctggctccaagtctggcacctcagcctccctggccatcagtgggctccggtccgaggatgaggctgattattactgtgcagcatgggatgacagcctgagtggggatgtggtattcggcggagggaccaagctgaccgtccta

SEQ ID NO: 8825 - DNA, 321 bp, Artificial Sequence
  Synthetic polynucleotide encoding artificial human antibody VL domain
gacatccaaatgacccagtctccatcctccctgtctgcatctgtaggagacagagtcaccatgacttgccgggcgagtcaaggcattggcaacaagttacattggtatcaacagaaaccagggaaagcccctaaactcctcatatacgatgcatccactttggaaagaggggtcccatcaaggttcagtggaagtggatctgggacatattttactttaaccatcagcggactgcagccggaagatatttcaacattttactgtcaacagtatgacatcctccctataacttatggccaggggaccaagctggagatcaaa

SEQ ID NO: 8826 - DNA, 330 bp, Artificial Sequence
  Synthetic polynucleotide encoding artificial human antibody VL domain
caggctgtggtgactcaggagccctcactgactgtgtccccaggagggacagtcactctcacctgtggctccagcactggagctgtcaccagtggtcattatccctactggttccagcagaagcctggccaagcccccaggacactgatttatgatacaagcaacaaacactcctggacacctgcccggttctcaggctccctccttgggggcaaagctgccctgaccctttcgggtgcgcagcctgaggatgaggctgagtattactgcttgctctcctatagtggtgctcggccggtgttcggcggagggaccaagctgaccgtccta

SEQ ID NO: 8827 - DNA, 324 bp, Artificial Sequence
  Synthetic polynucleotide encoding artificial human antibody VL domain
gccatccagttgacccagtctccgtcctccctgtctgcatctgtaggagacagagtctccatcacttgccgggcaagtcagggcattagcactgctttggcctggtatcagcagaagccaggaaaagcacctgaactcctgattcatgatgtctcctctttgcaaagtggggtcccatcaaggttcagcggcagtggatccgggacagatttcactctcaccatcagcagcctgcagcctgaagattttgcaacttattactgtcaacacttttataattaccccttcttcactttcggccctgggaccaaggtgcatatcaaa

SEQ ID NO: 8828 - DNA, 339 bp, Artificial Sequence
  Synthetic polynucleotide encoding artificial human antibody VL domain
gatattgtgatgactcagtctccactctccctgcccgtcacccctggagagccggcctccatctcctgcaggtctagtcagagcctcctgcatagtaatggatacaactatttggattggtacctgcagaagccagggcagtctccacagctcctgatctatttgggttctaatcgggcctccggggtccctgacaggttcagtggcagtggatcaggcacagattttacactgaaaatcagcagagtggaggctgaggatgttggggtttattactgcatgcaagctctacaaactcctcggctcactttcggcggagggaccaaggtggagatcaaa

SEQ ID NO: 8829 - DNA, 333 bp, Artificial Sequence
  Synthetic polynucleotide encoding artificial human antibody VL domain
cagcttgtgctgactcaatcgccctctgcctctgcctccctgggagcctcggtcaagctcacctgcactctgagcagtgggcacagcagctacgccatcgcatggcatcagcagcagccagagaagggccctcggtacttgatgaagcttaacagtgatggcagccacagcaagggggacgggatccctgatcgcttctcaggctccagctctggggctgagcgctacctcaccatctccagcctccagtctgaggatgaggctgactattactgtcagacctggggcactggcctgtgggtgttcggcggagggaccaagctgaccgtccta

SEQ ID NO: 8830 - DNA, 321 bp, Artificial Sequence
  Synthetic polynucleotide encoding artificial human antibody VL domain
gacatccagatgacccagtctccatcctccctgtctgcatctgtaggagacagagtcaccatcacttgccgggcaagtcagggcattagaaatgatttaggctggtatcagcagaaaccagggaaagcccctaagcgcctgatctatgctgcatccagtttgcaaagtggggtcccatcaaggttcagcggcagtggatctgggacagaattcactctcacaatcagcagcctgcagcctgaagattttgcaacttattactgtctacagcataatagttacccgtacacttttggccaggggaccaagctggagatcaaa

SEQ ID NO: 8831 - DNA, 336 bp, Artificial Sequence
  Synthetic polynucleotide encoding artificial human antibody VL domain
gatattgtgatgactcagtctccactctccctgcccgtcacccctggagagccggcctccatctcctgcaggtctagtcagagcctcctgcatagtaatggatacaactatttggattggtacctgcagaagccagggcagtctccacagctcctgatctatttgggttctaatcgggcctccggggtccctgacaggttcagtggcagtggatcaggcacagattttacactgaaaatcagcagagtggaggctgaggatgttggggtttattactgcatgcaagctctacaaactcctctcactttcggcggagggaccaaggtggagatcaaa

SEQ ID NO: 8832 - DNA, 321 bp, Artificial Sequence
  Synthetic polynucleotide encoding artificial human antibody VL domain
gacatccagatgacccagtctccatcctccctgtctgcatctgtaggagacagagtcaccatcacttgccgggcaagtcagagcattagcagctatttaaattggtatcagcagaaaccagggaaagcccctaagctcctgatctatgctgcatccagtttgcaaagtggggtcccatcaaggttcagtggcagtggatctgggacagatttcactctcaccatcagcagtctgcaacctgaagattttgcaacttactactgtcaacagagttacagtaccccctacacttttggccaggggaccaagctggagatcaaa

SEQ ID NO: 8833 - DNA, 318 bp, Artificial Sequence
  Synthetic polynucleotide encoding artificial human antibody VL domain
gacatccagatgacccagtctccttccaccctgtctgcatctgtaggagacagagtcaccatcacttgccgggccagtcagagtattagtagctggttggcctggtatcagcagaaaccagggaaagcccctaagctcctgatctataaggcgtctagtttagaaagtggggtcccatcaaggttcagcggcagtggatctgggacagaattcactctcaccatcagcagcctgcagcctgatgattttgcaacttattactgccaacagtataatagttattggacgttcggccaagggaccaaggtggaaatcaaa

SEQ ID NO: 8834 - DNA, 321 bp, Artificial Sequence
  Synthetic polynucleotide encoding artificial human antibody VL domain
gacatccagatgacccagtctccatcctccctgtctgcatctgtaggagacagagtcaccatcacttgccgggcaagtcagagcattagcagctatttaaattggtatcagcagaaaccagggaaagcccctaagctcctgatctatgctgcatccagtttgcaaagtggggtcccatcaaggttcagtggcagtggatctgggacagatttcactctcaccatcagcagtctgcaacctgaagattttgcaacttactactgtcaacagagttacagtacccctcgagccttcggccaagggacacgactggagattaaa

SEQ ID NO: 8835 - DNA, 336 bp, Artificial Sequence
  Synthetic polynucleotide encoding artificial human antibody VL domain
gatattgtgatgactcagtctccactctccctgcccgtcacccctggagagccggcctccatctcctgcaggtctagtcagagcctcctgcatagtaatggatacaactatttggattggtacctgcagaagccagggcagtctccacagctcctgatctatttgggttctaatcgggcctccggggtccctgacaggttcagtggcagtggatcaggcacagattttacactgaaaatcagcagagtggaggctgaggatgttggggtttattactgcatgcaagctctacaaaccccgtacacttttggccaggggaccaagctggagatcaaa

SEQ ID NO: 8836 - DNA, 324 bp, Artificial Sequence
  Synthetic polynucleotide encoding artificial human antibody VL domain
gaaattgtgttgacacagtctccagccaccctgtctttgtctccaggggaaagagccaccctctcctgcagggccagtcagagtgttagcagctacttagcctggtaccaacagaaacctggccaggctcccaggctcctcatctatgatgcatccaacagggccactggcatcccagccaggttcagtggcagtgggtctgggacagacttcactctcaccatcagcagcctagagcctgaagattttgcagtttattactgtcagcagcgtagcaactggcctccgctcactttcggcggagggaccaaggtggagatcaaa

SEQ ID NO: 8837 - DNA, 330 bp, Artificial Sequence
  Synthetic polynucleotide encoding artificial human antibody VL domain
cagtctgccctggctcagcctgcctccgtgtctgggtctcctggacagtcgatcaccatctcctgcactgggacccgcagtgacattggtagttataattatgtctcctggtaccaacaacacccaggcagggcccccagagtccttatttatgatgtaagtcgtcggccctcaggagttcccaatcgcttctctgcctctaagtctggctacacggccttcctgaccatctctggactccggcctgaagatgaggctgattattattgctgctcatacacaagcagtctttcctatgtctttggaagtgggaccaaggtcaccgtccta

SEQ ID NO: 8838 - DNA, 324 bp, Artificial Sequence
  Synthetic polynucleotide encoding artificial human antibody VL domain
tcctatgagctgacacagccaccctcggtgtcagtgtccccaggacagacggccaggatcacctgctctggagatgcattgccaaagcaatatgcttattggtaccagcagaagccaggccaggcccctgtgctggtgatatataaagacagtgagaggccctcagggatccctgagcgattctctggctccagctcagggacaacagtcacgttgaccatcagtggagtccaggcagaagacgaggctgactattactgtcaatcagcagacagcagtggtacttatgtggtattcggcggagggaccaagctgaccgtccta

SEQ ID NO: 8839 - DNA, 339 bp, Artificial Sequence
  Synthetic polynucleotide encoding artificial human antibody VL domain
gatgttgtgatgactcagtctccactctccctgcccgtcacccttggacagccggcctccatctcctgcaggtctagtcaaagcctcgtatacagtgatggaaacacctacttgaattggtttcagcagaggccaggccaatctccaaggcgcctaatttataaggtttctaaccgggactctggggtcccagacagattcagcggcagtgggtcaggcactgatttcacactgaaaatcagcagggtggaggctgaggatgttggggtttattactgcatgcaaggtacacactggcctcggctcactttcggcggagggaccaaggtggagatcaaa

SEQ ID NO: 8840 - DNA, 321 bp, Artificial Sequence
  Synthetic polynucleotide encoding artificial human antibody VL domain
tcctatgtgctgactcagccaccctcagtgtcagtggccccaggaaagacggccaggattacctgtgggggaaacaacattggaagtaaaagtgtgcactggtaccagcagaagccaggccaggcccctgtgctggtcatctattatgatagcgaccggccctcagggatccctgagcgattctctggctccaactctgggaacacggccaccctgaccatcagcagggtcgaagccggggatgaggccgactattactgtcaggtgtgggatagtagtagtgattatgtcttcggaactgggaccaaggtcaccgtccta

SEQ ID NO: 8841 - DNA, 321 bp, Artificial Sequence
  Synthetic polynucleotide encoding artificial human antibody VL domain
gacatccagatgacccagtctccatcttccgtgtctgcatctgtgggggacacagtcaccttcacttgtcgggcgagtcaagatgttggcgcctacatagcctggtatcaacaaaggccagggcagccccctaaactcctgatctacgctgcatccgctttgcacgatggggtcccatcgaggttcatcggcaggagatctgggacagattacactctcaccatcaggagcctgcaggctgacgatttcgcaacttactattgtcaacagggttaccttttcccatacactttcggccctgggaccacagtagatatcaaa

SEQ ID NO: 8842 - DNA, 330 bp, Artificial Sequence
  Synthetic polynucleotide encoding artificial human antibody VL domain
cagtctgccctgactcagcctgcctccgtgtctgggtctcctggacagtcgatcaccatctcctgcactggagccagcggtaatgttgggcgttataaccttgtctcctggttccaacaggaaccaggcaaagcccccaaactcatggtttatgaggtcagtaggcggccctcaggagtttctgatcgcttctctggctccaagtctggcaacacggcctccctgacaatctctgggctccaggctgaggacgaggctgattattactgctggtcatatgcgggtggaagcgattgggtgttcggcggagggaccaaactgaccgtccta

SEQ ID NO: 8843 - DNA, 336 bp, Artificial Sequence
  Synthetic polynucleotide encoding artificial human antibody VL domain
gatattgtgatgacccagactccactctcctcacctgtcacccttggacagccggcctccatctcctgcaggtctagtcagagcctcgtacacagagatggaaacacccacctgagttggcttcagcagaggccaggccagtctccaagactcctaatttataagatttctaaccggttcactggggtcccagacagattcactggcagtggggcagggacagatttcacactgcacatcagcagggtggaagctgaggatgtcggaatttattactgcatgcaagctacacaatttccatacacttttggccaggggaccaagttggacatcaaa

SEQ ID NO: 8844 - DNA, 321 bp, Artificial Sequence
  Synthetic polynucleotide encoding artificial human antibody VL domain
gacatccagatgacccagtctccatcctccctgtctgcatctgtaggagacagagtcaccatcacttgccgggcaagtcagagcattagcagctatttaaattggtatcagcagaaaccagggaaagcccctaagctcctgatctatgctgcatccagtttgcaaagtggggtcccatcaaggttcagtggcagtggatctgggacagatttcactctcaccatcagcagtctgcaacctgaagattttgcaacttactactgtcaacagagttacagtacccctctcactttcggcggagggaccaaggtggagatcaaa

SEQ ID NO: 8845 - DNA, 318 bp, Artificial Sequence
  Synthetic polynucleotide encoding artificial human antibody VL domain
gacatccagatgacccagtctccatcttccgtgtctgcatctgtaggagacagagtcaccatcacttgtcgggcgagtcagggtattagcagctggttagcctggtatcagcagaaaccagggaaagcccctaagctcctgatctatgctgcatccagtttgcaaagtggggtcccatcaaggttcagcggcagtggatctgggacagatttcactctcaccatcagcagcctgcagcctgaagattttgcaacttactattgtcaacaggctaacagtttccctcgattcggccctgggaccaaagtggatatcaaa

SEQ ID NO: 8846 - DNA, 339 bp, Artificial Sequence
  Synthetic polynucleotide encoding artificial human antibody VL domain
gacatcgtgatgacccagtctccagactccctgactctgtctctgggcgagagggccaccatcaactgcaggtccagccagagtgttttatacacctccaataataaggactacttagcttggtaccagcagaaaccaggacagcctcctaaattgctcatttactgggcatctacacgggaatccggggtccctgaccgattcagtggcagcgggtctgggacagatttcactctcaccatcagcagcctgcaggctgaagatgtggcagtttattactgtcagcaatattatggtagtcctctcgctttcggcggagggaccaaggtggagatcaaa

SEQ ID NO: 8847 - DNA, 321 bp, Artificial Sequence
  Synthetic polynucleotide encoding artificial human antibody VL domain
gacatccagatgacccagtctccatcctccctgtctgcatctgtaggagacagagtcaccatcacttgccaggcgagtcaggacattagcaactatttaaattggtatcagcagaaaccagggaaagcccctaagctcctgatctacgatgcatccaatttggaaacaggggtcccatcaaggttcagtggaagtggatctgggacagattttactttcaccatcagcagcctgcagcctgaagatattgcaacatattactgtcaacagtatgataatctcccgtacacttttggccaggggaccaagctggagatcaaa

SEQ ID NO: 8848 - DNA, 327 bp, Artificial Sequence
  Synthetic polynucleotide encoding artificial human antibody VL domain
gaaattgtgttgacgcagtctccaggcaccctgtctttgtctccaggggaaagagccaccctctcctgcagggccagtcagagtgttagcagcagctacttagcctggtaccagcagaaacctggccaggctcccaggctcctcatctatggtgcatccagcagggccactggcatcccagacaggttcagtggcagtgggtctgggacagacttcactctcaccatcagcagactggagcctgaagattttgcagtgtattactgtcagcagtatggtagctcccctatgtacacttttggccaggggaccaagctggagatcaaa

SEQ ID NO: 8849 - DNA, 327 bp, Artificial Sequence
  Synthetic polynucleotide encoding artificial human antibody VL domain
gaaattgtgttgacgcagtctccaggcaccctgtctttgtctccaggggaaagagccaccctctcctgcagggccagtcagagtgttagcagcagctacttagcctggtaccagcagaaacctggccaggctcccaggctcctcatctatggtgcatccagcagggccactggcatcccagacaggttcagtggcagtgggtctgggacagacttcactctcaccatcagcagactggagcctgaagattttgcagtgtattactgtcagcagtatggtagctcacccccattcactttcggccctgggaccaaagtggatatcaaa

SEQ ID NO: 8850 - DNA, 336 bp, Artificial Sequence
  Synthetic polynucleotide encoding artificial human antibody VL domain
gatattgtgatgactcagtctccactctccctgcccgtcacccctggagacccggcctccttctcctgtaagtctagccagagcctcctacatagtaatggatacaactatttggactggtacgtccagaagccaggtcagtctcctcagctcctgatctttttggggtccagtcgggcctccggggtccctgacaggttcagtggcagtgggtcagccacagattttacactgaagatcagcagagtggaagctgaagatgttggcgtttattactgcatgcaagctattcaaagtcctggtacttttggccaggggaccaaactagagatcaaa

SEQ ID NO: 8851 - DNA, 330 bp, Artificial Sequence
  Synthetic polynucleotide encoding artificial human antibody VL domain
cagtctgtgctgactcagccaccctcagcgtctgggacccccgggcagagggtcaccatctcttgttctggaagcagctccaacatcggaagtaattatgtatactggtaccagcagctcccaggaacggcccccaaactcctcatctataggaataatcagcggccctcaggggtccctgaccgattctctggctccaagtctggcacctcagcctccctggccatcagtgggctccggtccgaggatgaggctgattattactgtgcagcatgggatgacagcctgagtggacatgtcttcggaactgggaccaaggtcaccgtccta

SEQ ID NO: 8852 - DNA, 330 bp, Artificial Sequence
  Synthetic polynucleotide encoding artificial human antibody VL domain
cagtctgccctgactcagcctcgctcagtgtccgggtctcctggacagtcagtcaccatctcctgcactggaaccagcagtgatgttggtggttataactatgtctcctggtaccaacagcacccaggcaaagcccccaaactcatgatttatgatgtcagtaagcggccctcaggggtccctgatcgcttctctggctccaagtctggcaacacggcctccctgaccatctctgggctccaggctgaggatgaggctgattattactgctgctcatatgcaggcagctacacttatgtcttcggaactgggaccaaggtcaccgtccta

SEQ ID NO: 8853 - DNA, 321 bp, Artificial Sequence
  Synthetic polynucleotide encoding artificial human antibody VL domain
gccatccagatgacccagtctccatcctccctgtctgcatctataggagacagagtcaccatcacttgccgggcaagtcaggccattcgagatgaattagggtggtatcaggtgaaaccagggaaagcccctaaactcctgatctatgctacatccagtttacagggtggggtcccatcaaggttcagcggcagtggatctggcaccaatttcactctcaccatcagtagcctgcagcctgaagattttgcaacttattactgtctacaagatcacaattacttgtggactttcggccacgggaccacggtggaagccaaa

SEQ ID NO: 8854 - DNA, 321 bp, Artificial Sequence
  Synthetic polynucleotide encoding artificial human antibody VL domain
gacatccaggtgacccagtctccatcctccctgtctgcatctgtaggagacagagtcaccatcacttgccggacaagtcagagcattagtatgtatctgaactggtatcaacagagaccagggacagcccctaacctcctgatctatgctgcatccagtttgcaaagtggggtcccaacaaggttcagtggcagtggatctgggacagatttcactctcaccatcagcagtctgcaacctgaagattctgcaacttactactgtcaacagagttacggtaacccgtacacttttggccaggggaccaagctggagatcaaa

SEQ ID NO: 8855 - DNA, 321 bp, Artificial Sequence
  Synthetic polynucleotide encoding artificial human antibody VL domain
gacatccagatgacccagtctccatccaccctgtctgcatctgtaggagacagagtcaccatgacttgccgggcaagtcagagtattagtggctttctaaattggtatcagcagaaacccggcaaagcccctaggctcctgatctctggtgcaaccagtctggaaagtggggtcccatcaaggttcagtggcagtggatctgggacagagttcactctcaccatcagcagtctgcaacctgaagatttcgcaacttactactgtcaacagagtgtccgtgcccctctcagtttcggcggggggaccaaggttgagatcaaa

SEQ ID NO: 8856 - DNA, 330 bp, Artificial Sequence
  Synthetic polynucleotide encoding artificial human antibody VL domain
cagtctgccctgactcagcctgcctccgtgtctgggtctcctggacagtcgatcaccatctcctgcactggaaccagcagtgacgttggtggttataactatgtctcctggtaccaacaacacccaggcaaagcccccaaactcatgatttatgatgtcagtgatcggccctcaggggtttctcatcgcttctctggctccaagtctggcaccacggcctccctgaccatctctgggctccaggctgaggacgaggctgattattactgcagctcatatacaagcagcaccactcttgtcttcggaactgggaccaaggtcaccgtccta

SEQ ID NO: 8857 - DNA, 321 bp, Artificial Sequence
  Synthetic polynucleotide encoding artificial human antibody VL domain
gaaattgtgttgacacagtctccagccaccctgtctttgtctccaggggaaagagccaccctctcctgcagggccagtcagagtgttagcagctacttagcctggtaccaacagaaacctggccaggctcccaggctcctcatctatgatgcatccaacagggccactggcatcccagccaggttcagtggcagtgggtctgggacagacttcactctcaccatcagcagcctagagcctgaagattttgcagtttattactgtcagcagcgtagcaactggcctctcactttcggcggagggaccaaggtggagatcaaa

SEQ ID NO: 8858 - DNA, 321 bp, Artificial Sequence
  Synthetic polynucleotide encoding artificial human antibody VL domain
gccatccagatgacccagtctccatcctccctgtctgcatctgtaggagacagagtcaccatcacttgccgggcaagtcagggcattagaaatgatttaggctggtatcagcagaaaccagggaaagcccctaagctcctgatctatgctgcatccagtttacaaagtggggtcccatcaaggttcagcggcagtggatctggcacagatttcactctcaccatcagcagcctgcagcctgaagattttgcaacttattactgtctacaagattacaattaccctcggacgttcggccaagggaccaaggtggaaatcaaa

SEQ ID NO: 8859 - DNA, 321 bp, Artificial Sequence
  Synthetic polynucleotide encoding artificial human antibody VL domain
gaaattgtgttgacacagtctccagccaccctgtctttgtctccaggggaaagagccaccctctcctgcagggccagtcagagtgttggcagcttcttaggctggtaccaacagaaagttggccaggctcccaggctcctcatctatgatgcatccaacagggccaccggcatcccagccaggttcagtggcagtgggtctgggacagacttcactctcacgatcagcagcctagagcctgaagattttgcagtttattactgtcagcagcgtagcagctggcctctcactttcggcggagggaccaaggtggagatcaaa

SEQ ID NO: 8860 - DNA, 336 bp, Artificial Sequence
  Synthetic polynucleotide encoding artificial human antibody VL domain
gatgttgtgatgactcagtctccactctccctgcccgtcacccttggacagccggcctccatctcctgcaggtctagtcaaagcctcgtatacagtgatggaaacacctacttgaattggtttcagcagaggccaggccaatctccaaggcgcctaatttataaggtttctaaccgggactctggggtcccagacagattcagcggcagtgggtcaggcactgatttcacactgaaaatcagcagggtggaggctgaggatgttggggtttattactgcatgcaaggtacacactggccgtacacttttggccaggggaccaagctggagatcaaa

SEQ ID NO: 8861 - DNA, 327 bp, Artificial Sequence
  Synthetic polynucleotide encoding artificial human antibody VL domain
tcttctgagctgactcaggaccctgctgtgtctgtggccttgggacagacagtcaggatcacatgccaaggagacagcctcagaagctattatgcaagctggtaccagcagaagccaggacaggcccctgtacttgtcatctatggtaaaaacaaccggccctcagggatcccagaccgattctctggctccagctcaggaaacacagcttccttgaccatcactggggctcaggcggaagatgaggctgactattactgtaactcccgggacagcagtggtaaccataattatgtcttcggaactgggaccaaggtcaccgtccta

SEQ ID NO: 8862 - DNA, 330 bp, Artificial Sequence
  Synthetic polynucleotide encoding artificial human antibody VL domain
cagtctgccctgactcagcctcgctcagtgtccgggtctcctggacagtcagtcaccatctcctgcactggaaccagcagtgatgttggtggttataactatgtctcctggtaccaacagcacccaggcaaagcccccaaactcatgatttatgatgtcagtaagcggccctcaggggtccctgatcgcttctctggctccaagtctggcaacacggcctccctgaccatctctgggctccaggctgaggatgaggctgattattactgctgctcatatgcaggcagctacacttgggtgttcggcggagggaccaagctgaccgtccta

SEQ ID NO: 8863 - DNA, 336 bp, Artificial Sequence
  Synthetic polynucleotide encoding artificial human antibody VL domain
gatgttgtgatgactcagtctccactctccctgcccgtcacccttggacagccggcctccatctcctgcaggtctagtcaaagcctcgtatacagtgatggaaacacctacttgaattggtttcagcagaggccaggccaatctccaaggcgcctaatttataaggtttctaaccgggactctggggtcccagacagattcagcggcagtgggtcaggcactgatttcacactgaaaatcagcagggtggaggctgaggatgttggggtttattactgcatgcaaggtacacactggccgctcactttcggcggagggaccaaggtggagatcaaa

SEQ ID NO: 8864 - DNA, 333 bp, Artificial Sequence
  Synthetic polynucleotide encoding artificial human antibody VL domain
cagtctgccctgactcagcctcgctcagtgtccggttctcctggacagtcagtcaccatctcctgcagtggaagcagcagtgatgttggtgcttatatctatgtctcctggtaccaacaacaccccggcaaagcccccaaattcatcatttatgatgtcaataagcggccctcaggtgtccctgatcgcttctctggctccaagtctggcaacacggcctccctgaccatctctgggctccaggctgaggatgaggctgattattactgctgctcatatgcaggcacctacacttccgtgctattcggcggagggaccaagctgaccgtccta

SEQ ID NO: 8865 - DNA, 333 bp, Artificial Sequence
  Synthetic polynucleotide encoding artificial human antibody VL domain
cagtctgtgctgacgcagccgccctcagtgtctggggccccagggcagagggtcaccatccactgcactgggggcagctccaatatcggggcacgttatgatgtatattggtaccggcagcttccaggaacagcccccaaactcctcatctatggtaacaacaatcggccctcaggggtccctgaccgattctccggctccaagtctggcacctcagcctccctggccatcactgggctccaggctgaggatgaggctgattattattgccagtcgtatgacagccgcctgagtggttgggtgttcggcggagggaccaagctgaccgtctta

SEQ ID NO: 8866 - DNA, 321 bp, Artificial Sequence
  Synthetic polynucleotide encoding artificial human antibody VL domain
gacatccagatgacccagtctccatcatccgtgtctgcatctgtcggagacagagtcaccatcacttgtcgggcgagtcagggtattaacaactggttagcctggtatcaacacaaaccagggaaaatccctaaactcctgatctctgctgcatccaatttgcgtggtgggatcccatcaaggttcaacggcagtggatctgggacagacttcactctcaccatcagcagcctgcagcctgaagattttgcaacttactattgtcaacagggtcacagtttcccactcactttcggcggagggaccaaggtggagatcaaa

SEQ ID NO: 8867 - DNA, 330 bp, Artificial Sequence
  Synthetic polynucleotide encoding artificial human antibody VL domain
cagtctgtgttgacgcagccgccctcagtgtctgcggccccaggacagaaggtcaccatctcctgctctggaagcagctccaacattggaaagaattatgtttgctggtaccagcaactcccaggaacagcccccaaagccctcatttatgacaattataggcgacccttagggattcctgaccgattctctggctccaagtccggcacgtcagccaccctggccatcaccggactccagactggggacgaggccgactacttctgcggaacatgggatagcagtctgaatgctgtactcttcggcggagggaccaagctgaccgtccta

SEQ ID NO: 8868 - DNA, 330 bp, Artificial Sequence
  Synthetic polynucleotide encoding artificial human antibody VL domain
cagtctgccctgactcagcctccctccgcgtccgggtctcctggacagtcagtcaccatctcctgcactggaaccagcagtgacgttggtggttataactatgtctcctggtaccaacaacacccaggcaaaacccccaaactcataatttatgaggtcactcagcggccctcaggggtccctaatcgcttctctggctccaagtctggcaacacggcctccctgaccgtctctgggctccaggctgaggatgaggctgattattactgcagctcatatgcagacacctacacttatgtcttcggaactgggaccaaggtcaccgtccta

SEQ ID NO: 8869 - DNA, 318 bp, Artificial Sequence
  Synthetic polynucleotide encoding artificial human antibody VL domain
gacatccagatgacccagtctccttccaccctgtctgcatctgtaggagacagagtcaccatcacttgccgggccagtcagagtattagtagctggttggcctggtatcagcagaaaccagggaaagcccctaaactcctgatctataaggcgtctactttagaaagtggggtcccatcaaggttcagcggcagtggatctgggacagaattcactctcaccatcagcagcctgcagcctgatgattttgcaacttatttctgccaacagtatagtacttctaagacgttcggccaagggaccaaggtggaaatcaaa

SEQ ID NO: 8870 - DNA, 321 bp, Artificial Sequence
  Synthetic polynucleotide encoding artificial human antibody VL domain
gaaattgtgttgacgcagtctccagccaccctgtctttatctctgggggaaagagccaccctctcctgtagggccagtcacagtattagcggctacgtggcctggtaccaacagaaaagtggccaggcacccagactcctcatctacgacacatccaggccggtcactgggatcccagtcaggttcagtggcagtgggtctgggacacagttcactctcaccattagcagcctagagcctgacgattttgcagtttattattgtcagcagcgtagtcactggcctccaaccttcggccaggggacacgactggatattaaa

SEQ ID NO: 8871 - DNA, 330 bp, Artificial Sequence
  Synthetic polynucleotide encoding artificial human antibody VL domain
cagtctgccctgactcaacctccctccgcgtccgggtctcctggacagtcagtcaccatctcctgcactggaaccagcagtgacgttggtggttataactatgtctcctggtaccaacaacacccaggcaaagcccccaaactcttgatttatgaggtcactcagcggccctcaggggtccctaatcgcttctctggctccaagtctggcaacacggcctccctgaccgtctctgggctccaggctgaggatgaggctgattattactgcagctcatatgcagacacctacaattatgtcttcggaactgggaccaaggtcaccgtccta

SEQ ID NO: 8872 - DNA, 321 bp, Artificial Sequence
  Synthetic polynucleotide encoding artificial human antibody VL domain
gacatccagatgacccagtctccttccaccctgtctgtatctgtaggagacagagtcaccatcacttgccgggccagtcagaatattaataactggttggcctggtatcagcagaaaccagggaaagcccctaagttcctgatctataaggcatctcgtttagaaggtggggtcccatcaaggttcagcggcagtggatctggggcagatttcactctcaccatcagcagcctgcagcctgatgattttggaacttattactgccaacagtataatacttatccgtggacgttcggccaagggaccaaggtggaaatcaaa

SEQ ID NO: 8873 - DNA, 333 bp, Artificial Sequence
  Synthetic polynucleotide encoding artificial human antibody VL domain
cagtctgccctgactcagcctgcctccgtgtctgggtctcctggacagtcgatcaccatctcctgcactggaaccagcagtgacgttggtggttataactatgtctcctggtaccaacaacacccaggcaaagcccccaaactcatgatttatgatgtcagtaatcggccctcaggggtttctaatcgcttctctggctccaagtctggcaacacggcctccctgaccatctctgggctccaggctgaggacgaggctgattattactgcagctcatatacaagcagcagcacccctgtggtattcggcggagggaccaagctgaccgtccta

SEQ ID NO: 8874 - DNA, 330 bp, Artificial Sequence
  Synthetic polynucleotide encoding artificial human antibody VL domain
cagtctgtgctgactcagccaccctcagcgtctggggcccccgggcagagggtcagcatctcttgttctggaaacgcctccaacatcggaagtaatcttgtttactggtaccagcaattcccaggaacggcccccaaactcctcatctattatactgaccagcggccctcaggggtccctggccgattctctggctccaagtctggcacctcagcctccctggccgtcactgggctccggtccgaagatgaggctgactattactgtgcatcatacgatgccaccctgaggggttatgtcttcggaactgggaccaaggtcaccgtccta

SEQ ID NO: 8875 - DNA, 330 bp, Artificial Sequence
  Synthetic polynucleotide encoding artificial human antibody VL domain
cagtctgtgctgacgcagccgccctcagtgtctggggccccagggcagagggtcaccatctcctgcactgggagcagctccaacatcggggcaggttatgatgtacactggtaccagcagcttccaggaacagcccccaaactcctcatctatggtaacagcaatcggccctcaggggtccctgaccgattctctggctccaagtctggcacctcagcctccctggccatcactgggctccaggctgaggatgaggctgattattactgccagtcctatgacagcagcctgagtgtggtattcggcggagggaccaagctgaccgtccta

SEQ ID NO: 8876 - DNA, 339 bp, Artificial Sequence
  Synthetic polynucleotide encoding artificial human antibody VL domain
gacatcgtgatgacccagtctccagactccctggctgtgtctctgggcgagagggccaccatcaactgcaagtccagccagagtgttttatacagctccaacaataagaactacttagcttggtaccagcagaaaccaggacagcctcctaagctgctcatttactgggcatctacccgggaatccggggtccctgaccgattcagtggcagcgggtctgggacagatttcactctcaccatcagcagcctgcaggctgaagatgtggcagtttattactgtcagcaatattatagtactccgtacacttttggccaggggaccaagctggagatcaaa

SEQ ID NO: 8877 - DNA, 330 bp, Artificial Sequence
  Synthetic polynucleotide encoding artificial human antibody VL domain
cagtctgtgctgactcagccaccctcagcgtctgggacccccgggcagagggtcaccatctcttgttctggaagcagctccaacatcggaagtaatactgtaaactggtaccagcagctcccaggaacggcccccaaactcctcatctatagtaataatcagcggccctcaggggtccctgaccgattctctggctccaagtctggcacctcagcctccctggccatcagtgggctccagtctgaggatgaggctgattattactgtgcagcatgggatgacagtctgaatggtccagtgttcggcagagggaccaagctgaccgtccta

SEQ ID NO: 8878 - DNA, 324 bp, Artificial Sequence
  Synthetic polynucleotide encoding artificial human antibody VL domain
gaaatagtgatgacgcagtctccagccaccctgtctgtgtctccaggggaaagagtaatcctctcctgcagggccagtcggagtgttaacagaaacctagcctggtaccagcagagacctggccagcctcccaggctcctcatctatgaggcatcgaccagggccactgctatcccagccagattcagtggtagtgggtttgggacagacttcactctcaccatcagcagcctgcagtctgaagattttgcaatttattactgtcagcaatataataactggcctccgctcactttcggcggagggaccaaggtggagatcaaa

SEQ ID NO: 8879 - DNA, 324 bp, Artificial Sequence
  Synthetic polynucleotide encoding artificial human antibody VL domain
tcttctgaactgactcaggaccctgctgtgtctgtggccttgggacagacagtcaggatcacatgccaaggagacagcctcagaagctattatgcaagctggtaccagcagaagccaagacaggcccctatacttgtcatctatggtaaaaacaatcgaccctcagggatcccggaccgattctctggctcctactcaggaagcacagcttccttactcatcactggggctcaggcggacgatgaggctgactattattgtaactcccgggacagcagtggtaaccatcgagtgttcggcagagggaccacggtgaccgtgcta

SEQ ID NO: 8880 - DNA, 321 bp, Artificial Sequence
  Synthetic polynucleotide encoding artificial human antibody VL domain
gacatccagttgacccagtctccatccttcctgtctgcatctgtaggcgacagagtcaccatcacttgccgggccagtcagggcattagcacttctttagcctggtatcagcaaaatccagggaaagcccctaacttcttgctctgtacttcttccattttacaaagtggggccccagcaaggttccgcgccagtggatctgggacagaattcactctcacaatcaccagtctgcagcctgaagactttgccacttattactgtcagcaacttaatacttatccgctcactttcggcggagggaccaaggtggagatcaaa

SEQ ID NO: 8881 - DNA, 324 bp, Artificial Sequence
  Synthetic polynucleotide encoding artificial human antibody VL domain
tcctatgagctgacacagccaccctcggtgtcagtgtccccaggacagacggccaggatcacctgctctggagatgcattgccaaagcaatatgcttattggtaccagcagaagccaggccaggcccctgtggtggtgatatataaagacagtgagaggccctcagggatccctgagcgattctctggctccagctcagggacaacagtcacgttgaccatcagtggagtccaggcagaagacgaggctgactattactgtcaatcagcagacagcagtggtacttatgtggtattcggcggagggaccaagctgaccgtccta

SEQ ID NO: 8882 - DNA, 318 bp, Artificial Sequence
  Synthetic polynucleotide encoding artificial human antibody VL domain
tcctatgagctgactcagccaccctcagtgtccgtgtccccaggacagacagccagcatcacctgctctggagataaattgggggataaatatgcttgctggtatcagcagaagccaggccagtcccctgtgctggtcatctatcaagatagcaagcggccctcagggatccctgagcgattctctggctccaactctgggaacacagccactctgaccatcagcgggacccaggctatggatgaggctgactattactgtcaggcgtgggacagcagcggtgtggtattcggcggagggaccaagctgaccgtccta

SEQ ID NO: 8883 - DNA, 330 bp, Artificial Sequence
  Synthetic polynucleotide encoding artificial human antibody VL domain
cagtctgtgttgacgcagccgccctcagtgtctgcggccccaggacagaaggtcaccatctcctgctctggaagcagctccaacattgggaataattatgtatcctggtaccagcagctcccaggaacagcccccaaactcctcatttatgacaataataagcgaccctcagggattcctgaccgattctctggctccaagtctggcacgtcagccaccctgggcatcaccggactccagactggggacgaggccgattattactgcggaacatgggatagcagcctgagtgtttgggtgttcggcggagggaccaagctgaccgtccta

SEQ ID NO: 8884 - DNA, 324 bp, Artificial Sequence
  Synthetic polynucleotide encoding artificial human antibody VL domain
tcttctgagctgactcaggaccctgctgtgtctgtggccttgggacagacagtcaggatcacatgccaaggagacaacctcaaactcttttatacagactggtaccagcagaagccaggccaggcccccctacttgtcatccatggtaaaaacaaccggccctcagggatcccagaccgcttctctggctccagttcagcgtacaccacttccttgaccatcattggggctcaggcggaggatgaggctgactattactgtagctctcgcgacagaagtggtgaccgtgttatattcggcggagggaccaaggtgaccgtccta

SEQ ID NO: 8885 - DNA, 324 bp, Artificial Sequence
  Synthetic polynucleotide encoding artificial human antibody VL domain
gacatcgagatgacccagtctccatcctccctgtctgcatctgtaggagacagagtcaccatcacttgccgggcaagtcagagtattagcacgtatttaaattggtatcaacagaagccagggaaagcccctagactcctgatccatgctgcatccagtttgcagagtggggtcccatcaaggttcactggcagtggatctgggacagatttcactctcaccatcatcagtctgcaacctgaagattttgcaacttactattgtcaacagagtttcagtactcctcgggtcactttcggcggagggaccaaggtggacatcaaa

SEQ ID NO: 8886 - DNA, 330 bp, Artificial Sequence
  Synthetic polynucleotide encoding artificial human antibody VL domain
cagtctgtgctgactcagccaccctcagcgtctgggacccccgggcagagggtcaccatctcttgttctggaagcagctccaacatcggaagtaattatgtatactggtaccagcagctcccaggaacggcccccaaactcctcatctataggaataatcagcggccctcaggggtccctgaccgattctctggctccaagtctggcacctcagcctccctggccatcagtgggctccggtccgaggatgaggctgattattactgtgcagcatgggatgacagcctgagtggtgtggtattcggcggagggaccaagctgaccgtccta

SEQ ID NO: 8887 - DNA, 330 bp, Artificial Sequence
  Synthetic polynucleotide encoding artificial human antibody VL domain
cagtctgccctgactcagcctgcctccgtgtctgggtctcccggacagtcgatcaccatctcctgcgctggaacctggactgacattggtctttttaaccatgtctcctggtaccagcaacacccaggcaaagcccccaaactcatcatttatgatgtcactgagcggccctcaggggtttctaatcgcttctctgcgtccaagtctggcaacacggcctccctgagcatctctgggctccagactgaggacgaggctgactattactgcaactcatatacaatcaccggggcttatgtcttcggaactgggaccgaggtcaccgtccta

SEQ ID NO: 8888 - DNA, 324 bp, Artificial Sequence; identical to SEQ ID NO: 8838
  Synthetic polynucleotide encoding artificial human antibody VL domain

SEQ ID NO: 8889 - DNA, 324 bp, Artificial Sequence
  Synthetic polynucleotide encoding artificial human antibody VL domain
tcttctgagctgactcaagaccctgctgtgtctgtggccttgggacagacagtcaggatcacatgccaaggagacagcctcagaatctattatgcaagctggtaccagcagaaaccaggacaggcccctatacttgtcatttatggtaaaaacaaccggccctcaggaatcccagaccgattctctggctccacttcactaagcacagcttccttgaccatcactggggctcaggcggcagacgaggctgactatttctgtagctcccgggacagcagtgatcatcttctggtattcggcggagggaccaggctgaccgtccta

SEQ ID NO: 8890 - DNA, 321 bp, Artificial Sequence
  Synthetic polynucleotide encoding artificial human antibody VL domain
gaaattgtgttgacacagtctccagccaccctgtctttgtctccaggggaaagagccaccctctcctgcagggccagtcagagtgttagcagctacttagcctggtaccaacagaaacctggccaggctcccaggctcctcatctatgatgcatccaacagggccactggcatcccagccaggttcagtggcagtgggtctgggacagacttcactctcaccatcagcagcctagagcctgaagattttgcagtttattactgtcagcagcgtagcaactggccattcactttcggccctgggaccaaagtggatatcaaa

SEQ ID NO: 8891 - DNA, 324 bp, Artificial Sequence
  Synthetic polynucleotide encoding artificial human antibody VL domain
tcttctgagctgactcaggaccctgctgtgtctgtggccttggggcagacagtcaggatcacatgccaaggagacagcctcaaactcttctatacaaactggtaccagcagaagccaggccaggcccccgtacttgtcattcatggtaaaaacagccggccctcagggatcccagaccgattctctggctccagttcagggtacaccacttccttgaccatcattggggctcaggcggaagatgaggctgactattactgtagctctcgcgacagaagtggtgaccatgttatattcggcggagggaccaaggtgaccgtccta

SEQ ID NO: 8892 - DNA, 324 bp, Artificial Sequence
  Synthetic polynucleotide encoding artificial human antibody VL domain
tcctatgagctgacacagccaccctcggtgtcagtgtccccaggacagacggccaggatcacctgctctggagatgcattgccaaaacaatatgcttattggtaccagcagaagccaggccaggcccctatactggtgatatataaagacagtgagaggccctcagggatccctgagcgattctctggctccagctcagggacaacagtcacgttgaccatcagtggagtccaggcagaagacgaggctgaatattactgtcaatcagcagacaacagtgatacttatcaggtattcggcggcgggaccaagctgaccgtccta

SEQ ID NO: 8893 - DNA, 339 bp, Artificial Sequence
  Synthetic polynucleotide encoding artificial human antibody VL domain
gacatcgtgatgacccagtctccagactccctggctgtgtctctgggcgagagggccaccatcaactgcaagtccagccagagtgttttatacagctccaacaataagaactacttagcttggtaccagcagaaaccaggacagcctcctaagctgctcatttactgggcatctacccgggaatccggggtccctgaccgattcagtggcagcgggtctgggacagatttcactctcaccatcagcagcctgcaggctgaagatgtggcagtttattactgtcagcaatattatagtactcccctcactttcggcggagggaccaaggtggagatcaaa

SEQ ID NO: 8894 - DNA, 318 bp, Artificial Sequence
  Synthetic polynucleotide encoding artificial human antibody VL domain
tcctatgagctgacacagccaccctcggtgtcagtgtccccaggacagacggccacgatcacctgctctggagatgtattgccaaagcaacatgcatattggtatcagcagaagccaggccagggccctgtgttggtgatatatagagacactgagaggccctcagggatccctgagcgattctctggctccagctcagggacaacagtcacgttgaccatcagtggagtccaggcagaagacgaggctgactattactgtcaatcagcagacatcagtggtagggtgttcggcggagggaccaagctgaccgtccta

SEQ ID NO: 8895 - DNA, 321 bp, Artificial Sequence
  Synthetic polynucleotide encoding artificial human antibody VL domain
gacatccagatgacccagtctccaccctccctgtctgcatctgttggagacagagtcaccatcacttgccgggcaagtcagagcattaacaggtatttaaattggtatcggcagacaccaggtaaagcccctaagctcctgatcttttctgcatccagtttgcaagttggggtcccatcacggttcagtggcagcggatctgggacagatttcactctcaccatcagcagtctgcaacctgaagattttgcaacttactactgtcaacagagttacagtacccccctcactttcggctctgggaccagagtggacatcaaa

SEQ ID NO: 8896 - DNA, 321 bp, Artificial Sequence
  Synthetic polynucleotide encoding artificial human antibody VL domain
tcctatgaggtgactcaggcaccctcggtgtccgtgttcccaggacagacactcaccatcacctgctctggagataaattgggggataaatatgcttcctggtatcagcagaagccaggccagtcccctgtagtggtcatctatcacaataccatgcggccctcagggatccctgagcgattctctggctccaactctgggaacacagccactctgaccatcgacgggacccaggctatggatgaggctgtctatttctgtcaggcgtgggacaccattagtcatgtcgtactcggcggagggaccaaggtgaccgtccta

SEQ ID NO: 8897 - DNA, 321 bp, Artificial Sequence
  Synthetic polynucleotide encoding artificial human antibody VL domain
gaaattgtgttgacacagtctccagccaccctgtctttgtctccaggggaaagagccaccctctcctgcagggccagtcagagtgttagcacctacttagcctggtaccaacagaaacctggccaggctcccaggctcctcatctatgatgcatccaacagggccactggcatcccagccaggttcagtggcagtgggtctgggacagacttcactctcaccatcagcagcctagagcctgaagattttgcggtttatcactgccagcagcgtagcaactggcctccgacgttcggccaagggaccaaggtggaaatcaaa

SEQ ID NO: 8898 - DNA, 321 bp, Artificial Sequence
  Synthetic polynucleotide encoding artificial human antibody VL domain
gacatccagatgacccagtctccatcctccctgtctgcatctgtaggggacagagtcaccatcacttgccgggcaagtcagaagattgccacgtatttaaattggtatcaacagaaaccaggaaaagcccctaagctcctgatctttgaagcatccactttgcatactggggtcccatcaaggttcagtggcggtgggtctgggacagacttcactctcagcatcagcagtctgcaacctgaagatttcgcaacgtactactgtcaacagagttacagaactccgatcaccttcggccaagggacacgactggagattaaa

SEQ ID NO: 8899 - DNA, 315 bp, Artificial Sequence
  Synthetic polynucleotide encoding artificial human antibody VL domain
gaaattgtgttgacgcagtctccaggcaccctgtctttgtctccaggggaaagagccaccctctcctgcagggccagtcagagtgttaacagcgattacttagcctggtaccagcagaaacctggccaggctcccaggctcctcatctatggtgcatccagcagggccattggcatcccagacagattcagtggcagtgggtctgggacagacttcactctcaccatcagcagactggagcctgaagattttgcagtgtattactgtcagctgtatggtaacactttcggcggagggaccaaggtggagatcaaa

SEQ ID NO: 8900 - DNA, 324 bp, Artificial Sequence
  Synthetic polynucleotide encoding artificial human antibody VL domain
tcttctgagctgactcaagaccctgctgtgtctgtggccttgggacagacagtcaggatcacatgccaaggagacagcctcaggatctattatgcaacctggtaccagcagaagccaggacaggcccctatagttgtcatttatggtaaaaataaccggccctcaggaatcccagaccgattctctggctccacttcactaaccacagcttccttgaccatcactggggctcaggcggaagacgaggctgactatttctgtagctcccgggacagcagtgataatcttctgatgttcggcggagggaccaggctgaccgtccta

SEQ ID NO: 8901 - DNA, 327 bp, Artificial Sequence
  Synthetic polynucleotide encoding artificial human antibody VL domain
tcttctgagctgactcaggaccctgctgtgtctgtggccttgggacagacagtcaggatcacatgccaaggagacagcctcagaagctattatgcaagctggtaccagcagaagccaggacaggcccctgtacttgtcatctatggtaaaaacaaccggccctcagggatcccagaccgattctctggctccagctcaggaaacacagcttccttgaccatcactggggctcaggcggaagatgaggctgactattactgtaactcccgggacagcagtggtaacctcaatgtggtattcggcggagggaccaagctgaccgtccta

SEQ ID NO: 8902 - DNA, 324 bp, Artificial Sequence
  Synthetic polynucleotide encoding artificial human antibody VL domain
tcttctgagctgactcaggaccctgctgtgtctgtggccttgggacagacagtcaagatcacatgccaaggagacagcctcacactcttttatacaaactggtaccggcagaagccaggccaggcccccgtacttgtcatccatggtaaaaacaaccggccctcagggatcccagaccgattctctggctccagttcagcgtacaccacttccttgaccatcattggggctcaggcggaggatgaggctgactattactgtagctctcgcgacagaagtggtgatcgtgttatattcggcggagggaccaaggtgaccgtccta

SEQ ID NO: 8903 - DNA, 330 bp, Artificial Sequence
  Synthetic polynucleotide encoding artificial human antibody VL domain
cagactgtggtgacccaggagccatcgttctcagtgtcccctggagggacagtcacactcacttgtggcttgagctctggctcagtctctactagttactaccccagctggtaccagcagaccccaggccaggctccacgcacgctcatctacagcacaaacactcgctcttctggggtccctgatcgcttctctggctccatccttgggaacaaagctgccctcaccatcacgggggcccaggcagatgatgaatctgattattactgtgtgctgtatatgggtagtggcatttgggtgttcggcggagggaccaagctgaccgtccta

SEQ ID NO: 8904 - DNA, 324 bp, Artificial Sequence
  Synthetic polynucleotide encoding artificial human antibody VL domain
tcttctgagctgactcaggaccctgctgtgtctgtggccttgggacagacagtcaggatcacatgccaaggagacaacctcaaactcttttatacaaactggtaccagcagaagccaggccaggcccccgtacttgtcatccatggtaaaaacaaccggccctcagggatcccagaccgattctctggctccagttcagcgtacaccacttccttgaccatcattggggctcaggcggaggatgaggctgactattattgtaactctcgcgacagaagtggtgaccgtgttatattcggcggagggaccaaggtgaccgtccta

SEQ ID NO: 8905 - DNA, 339 bp, Artificial Sequence
  Synthetic polynucleotide encoding artificial human antibody VL domain
gacatcgtgatgacccagtctccagactccctgactgtgtctctgggcgagagggccaccatcacctgcaagtccagccagagcattttatataactccaacagtaagaactacttagcttggtaccagcagaaatcaggacagccccctaaactgctcatttcctgggcatctacccgggaattcggggcccctgaccgattcagcggcagcgggtctgggacagatttcactctcaccgtcaacaacctgcaggctgaagatgtggcagtttatttttgtcagcaatattatactattccgtacacttttggccaggggaccaagctggagatcaaa

SEQ ID NO: 8906 - DNA, 330 bp, Artificial Sequence
  Synthetic polynucleotide encoding artificial human antibody VL domain
cagtctgccctgactcagcctgcctccgtgtctgggtctcctggacagtcgatcaccatctcctgcactggaaccaacagtgacgttggtacttataactttgtctcctggtaccaacaacacccaggcaaagcccccaaactcataattcttgatgtcagtgaccggccctcaggggtttcttttcgcttctctggctccaagtctggcaacacggcctccctgaccatctctgggctccaggctgaggacgaggctgattattactgcagctcatatacaagcagcagcactttgattttcggcggggggaccaaactgaccgtccta

SEQ ID NO: 8907 - DNA, 330 bp, Artificial Sequence; identical to SEQ ID NO: 8875
  Synthetic polynucleotide encoding artificial human antibody VL domain

SEQ ID NO: 8908 - DNA, 324 bp, Artificial Sequence
  Synthetic polynucleotide encoding artificial human antibody VL domain
tcctatgagctgacacagccaccctcggtgtcagtgtccccaggacagacggccaggatcacctgctctggagatgcattgccaaagcaatatgcttattggtaccagcagaagccaggccaggcccctgtgctggtgatatataaagacagtgagaggccctcagggatccctgagcgattctctggctccagctcagggacaacagtcacgttgaccatcagtggagtccaggcagaagacgaggctgactattactgtcaatcagcagacagcagtggtacttattgggtgttcggcggagggaccaagctgaccgtccta

SEQ ID NO: 8909 - DNA, 330 bp, Artificial Sequence
  Synthetic polynucleotide encoding artificial human antibody VL domain
cagtctgtgctgacgcagccgccctcagtgtctggggccccagggcagagggtcaccatctcctgcactgggagcggctccaacatcggggcaacttatgatgtacactggtaccagcaacttccaggaacagcccccaaactcctcatctttggtaataccaatcggccctcaggagtccctgaccgattctctggctccaagtctggcacctcagcctccctggccatcactgggctccaggctgaggatgagggtgattattactgccagtcttatgacagcaccctgagtgctgtcttcggcggagggaccaagctgaccgtccta

SEQ ID NO: 8910 - DNA, 330 bp, Artificial Sequence
  Synthetic polynucleotide encoding artificial human antibody VL domain
cagtctgccctgactcagcctgcctccgtgtctgggtctcctggacagtcgatcaccatctcctgcactggagccagcgattcggttggtggttataattatgtctcctggtaccaacaccacccaggcaaagtccccaaactcttgattaatgatgtcagtcagcggccctcaggggtttctcttcgtttctctggctccaagtctggcaacacggcctacttggccatctctgggctccaggctgaggacgaggctgattattattgtagctcatatacaagcagaagtactttagtcttcggcggagggaccaagttgaccgtccta

SEQ ID NO: 8911 - DNA, 330 bp, Artificial Sequence
  Synthetic polynucleotide encoding artificial human antibody VL domain
cagtctgccctgactcagcctgcctccgtgtctgggtctcctggacagtcgatcaccatctcctgcactggaaccagcagtgacgttggtggttataactatgtctcctggtaccaacagcacccaggcaaagcccccaaactcatgatttatgatgtcagtaagcggccctcaggggtttctaatcgcttctctggctccaagtctggcaacacggcctccctgaccatctctgggctccaggctgaggacgaggctgattattactgcagctcatatacaagcagcagcacttatgtcttcggaactgggaccaaggtcaccgtccta

SEQ ID NO: 8912 - DNA, 321 bp, Artificial Sequence
  Synthetic polynucleotide encoding artificial human antibody VL domain
gacatccagatgacccagtctccatcctccctgtctgcatctgtaggagacagagtcaccatcacttgccgggcaagtcagagcattgccacctatttaaattggtatcagcagaaaccagggaaagcccctaatctcctgatatatgaagcatctactttgcatactgaggtcccgtcaaggttcagtggcagtgggtctgggactgacttcactctcaccatcagcagtctgcaacctgaagattttgcaacgtactactgtcaacagagttacagtaccccgatcaccttcggccaagggacacgactggagattaaa

SEQ ID NO: 8913 - DNA, 327 bp, Artificial Sequence
  Synthetic polynucleotide encoding artificial human antibody VL domain
gaaattgtgttgacacagtctccagccaccctgtctttgtctccaggggaaagagcctccctctcctgcagggccagtcagagtattagcagcaacttagcctggtaccaattaagacctggccaggctcccaggctcctcatctatgatgcctctatcagggccactggcatcccagccaggttcactggcagtgggtctgggacagacttcactctcaccatcagcggcctagagcctgaagattttgcactttattactgtcagcaacgtagcagctggcctccgcggatcaccttcggccaagggacacgactagacattaaa

SEQ ID NO: 8914 - DNA, 336 bp, Artificial Sequence; identical to SEQ ID NO: 8835
  Synthetic polynucleotide encoding artificial human antibody VL domain

SEQ ID NO: 8915 - DNA, 324 bp, Artificial Sequence
  Synthetic polynucleotide encoding artificial human antibody VL domain
tcttctgagctgactcaggaccctgccgtgtctgtggccttgggacagacagtcaagatcacatgccagggagacagcctcagactcttctatacaaactggtaccagcagaagccaggccaggcccccgtacttgtcatccatggtaaaaacagccggccctcagggatcccagaccgattctctggctccagttcagggtacaccgcttccttgaccatcattggggctcaggcggaagatgaggctgactattactgtagctctcgcgacagaagtggtgaccatgttatattcggcggggggaccaaggtgaccgtccta

SEQ ID NO: 8916 - DNA, 318 bp, Artificial Sequence
  Synthetic polynucleotide encoding artificial human antibody VL domain
tcctatgaactgactcagccaccctcagtgtccgtgtccccagggcagacagccagcgtcacctgctctggagagggcttgggcgcaaagtatgtttcctggtatcagcagaagccaggccagtcccctgtcatggtcatctatcaagataccaagcgaccctcagggatccctgagcgattctctggctccaactctgggaacatagccactctgaccatcagcgggacccaggctatggatgaggctgactattactgtcagtcgtgggacagtatcactggggtgttcggcggagggaccaagctgaccgtccta

SEQ ID NO: 8917 - DNA, 324 bp, Artificial Sequence
  Synthetic polynucleotide encoding artificial human antibody VL domain
tcttctgagctgactcaggacccagctgtgtctgtggccttgggacagacagtcaggatcacatgccaaggagacagcctcaaactcttttatacaaactggtaccagcagaagccaggacaggcccccgttcttgtcatccatggtaaaaacaaccggccctcagggatcccagaccgattctctggctccagttcagggtacacctcttccttgaccatcattggggctcaggcggaagatgaggctgactattactgtagctctcgcgacagaagtggtgaccgtgttctattcggcggagggaccaaggtgaccgtccta

SEQ ID NO: 8918 - DNA, 324 bp, Artificial Sequence
  Synthetic polynucleotide encoding artificial human antibody VL domain
tcttctgagctgactcaggaccctgctgtgtctgtggccttgggacagacagtcaggatcacatgccaaggagacaccctcacactctattatataaattggtaccagcagaagccaggacaggcccctgtacttgtcatccatggtaaaaacaaccggccctcagggatcccagaccgattctctgcctccagctcagggagcaccgcttccttgaccatcattggggctcaggcggatgatgaggctgactattactgtaactcccgggacagaagtggtgaccatgtggttttcggcggagggaccaagctgaccgtccta

SEQ ID NO: 8919 - DNA, 327 bp, Artificial Sequence
  Synthetic polynucleotide encoding artificial human antibody VL domain
gaaattgtgttgacgcagtctccaggcaccctgtctttgtctccaggggaaagagccaccctctcttgcagggccagtcagagtgttagcagcggctacttagcctggtaccagcagaaacctggccaggttcccaggctcctcatctatgctgcatccagcagggccactggcaccccagacaggttcagtggcagtgggtctgggacagacttcactctcaccatcaccagactggagcctgaagattttgcagtctattactgtcaacagtatggtagctcacccttattcaccttcggccctgggaccaaagtggatatcaaa

SEQ ID NO: 8920 - DNA, 324 bp, Artificial Sequence
  Synthetic polynucleotide encoding artificial human antibody VL domain
tcttctgagctgactcaggaccctgctgtatctgtggccttgggacagacagtcaggatcacatgccaaggagacagcctcaaactcttctatacaaactggtaccagcagaagccaggccaggcccccctacttgtcatccatggtaaaaacacccggccctcagggatcccagaccgattctctggctccagttcagggtactccgcttccttgaccatcattggggctcaggcggaagatgaggctgactattactgtagctctcgcgacagaagtggtgaccttgttctcttcggcggggggaccaaggtgaccgtccta

SEQ ID NO: 8921 - DNA, 330 bp, Artificial Sequence
  Synthetic polynucleotide encoding artificial human antibody VL domain
cagtctgccctgactcagcctccctccgcgtccgggtctcctggacagtcagtcaccatctcctgcactggaaccagcagtgacgttggtggttataactatgtctcctggtaccaacagcacccaggcaaagcccccaaactcatgatttatgaggtcagtaagcggccctcaggggtccctgatcgcttctctggctccaagtctggcaacacggcctccctgaccgtctctgggctccaggctgaggatgaggctgattattactgcggctcatatacaggcagcaacaagaatgtcttcggaactgggaccaaggtcaccgtccta

SEQ ID NO: 8922 - DNA, 330 bp, Artificial Sequence
  Synthetic polynucleotide encoding artificial human antibody VL domain
aattttatgctgactcagccgcactctgtgtcggcgtctccggggaagacagtcaccatctcctgcacccgcagcaatggcggcattgccagcaactatgtgcagtggtaccagcagcgcccgggcagtgcccccaccattgtgatctatgaagatagtcaaagaccatctggggtccctgatcggttctctgcctccatcgacagctcctccaattctgcctccctcaccatctctgcactgaagcctgaggacgaggctgactactattgtcagtcttatgatagaactaatgtgatcttcggcggagggaccaagctgaccgtccta

SEQ ID NO: 8923 - DNA, 321 bp, Artificial Sequence
  Synthetic polynucleotide encoding artificial human antibody VL domain
tcctatgaattgactcagccaccctcagtgtccgtgtccccaggacagacagccagcatcacctgctctggagataaattggggaataaatatgctaactggtatcaacagaagccaggccagtcccctattctggtcatctatcaagataccaagcggccctcagggatccctgagcgattctctggctccaactctgggaacacagccactctgaccatcagcgggacccaggctctggatgaggctgactattactgtcaggcgtgggagagcagcactgttgtggttttcggcggagggaccaacctgaccgtccta

SEQ ID NO: 8924 - DNA, 327 bp, Artificial Sequence
  Synthetic polynucleotide encoding artificial human antibody VL domain
cagtctgtgttgacgcagccgccctcagtgtctgcggccccaggacagaaggtcaccatctcctgctctggaagcagctccaacattgggaataattatgtatcctggtaccagcagctcccaggaacagcccccaaactcctcatttatgacaataataagcgaccctcagggattcctgaccgattctctggctccaagtctggcacgtcagccaccctgggcatcaccggactccagactggggacgaggccgattattactgcggaacatgggatagcagcctgagtgctctattcggcggagggaccaagctgaccgtccta

SEQ ID NO: 8925 - DNA, 330 bp, Artificial Sequence
  Synthetic polynucleotide encoding artificial human antibody VL domain
cagtctgccctgactcagcctgcctccgtgtctgggtctcctggacagtcgatcaccatctcctgcactggaaccagcagtgatgttgggagttataaccttgtctcctggtaccaacagcacccaggcaaagcccccaaactcatgatttatgaggtcagtaagcggccctcaggggtttctaatcgcttctctggctccaagtctggcaacacggcctccctgacaatctctgggctccaggctgaggacgaggctgattattactgctgctcatatgcaggtagtagcactttggtattcggcggagggaccaagctgaccgtccta

SEQ ID NO: 8926 - DNA, 327 bp, Artificial Sequence
  Synthetic polynucleotide encoding artificial human antibody VL domain
gaaattgtgttgacgcagtctccaggcaccctgtctttgtctccaggggaaagagccaccctctcctgcagggccagtcagagtgttagcagcagctacttagcctggtaccagcagaaacctggccaggctcccaggctcctcatctatggtgcatccagcagggccactggcatcccagacaggttcagtggcagtgggtctgggacagacttcactctcaccatcagcagactggagcctgaagattttgcagtgtattactgtcagcagtatggtagctcactcccgatcaccttcggccaagggacacgactggagattaaa

SEQ ID NO: 8927 - DNA, 324 bp, Artificial Sequence
  Synthetic polynucleotide encoding artificial human antibody VL domain
tcttctgagctgactcaggaccctgctgtgtctgtggccttgggacagacagtcacgatcacatgccagggagacaacctcaaactcttttatacaaactggtaccagcagaagccaggccaggcccccgtacttgtcatccatggtaaaaacagtcggccctcagggatcccagaccgattctctggctccagttcagggtttaccacctccttgaccatcattggggctcaggcggaagatgaggctgactattactgtaactctcgcgacagaagtggtgaccatgttatattcggcggagggaccaaggtgaccgtccta

SEQ ID NO: 8928 - DNA, 333 bp, Artificial Sequence
  Synthetic polynucleotide encoding artificial human antibody VL domain
gacatccacttgacccagtctccatccttcctgtctgcatctgtgggagacagagtcaccatcacttgccgggccagtcagcacatgagcggttattttgcctggtatcagcaaaaaccagggagagcccctaaactcctgatctacgctgcatcccaattgcaaagtggagtcccgtctagggtcccatcaaggttcagcggcagtgcatcagggacagaattcactctcacaatcaacaccctgcagcctgaggattttgcaacttattactgtcaacagtttgatagctatccgctcactttcggcggagggaccacgattgagatcaaa

SEQ ID NO: 8929 - DNA, 342 bp, Artificial Sequence
  Synthetic polynucleotide encoding artificial human antibody VL domain
gacatcgtgatgacccagtctccagactccctggctgtgtctctgggcgagagggccaccatcaactgcaggtccagccagagtcttttgtacaggtccaacaataagaactacttagcttggtaccagcagaaaccaggacaggctccgaagctgctcattaactgggcatctacccgggaatccggggtccctgaccgattcagtggcagcgggtctgggacagatttcactctcaccatcagcagcctgcaggctgaagatgtggcagtttattactgtcagcaatattatactactcctgggatcactttcggccctgggaccaaagtgcatatcaaa

SEQ ID NO: 8930 - DNA, 330 bp, Artificial Sequence
  Synthetic polynucleotide encoding artificial human antibody VL domain
gacatccagatgacccagtctccatcctccctgtctgcatctgtaggagacagagtcaccatcacttgccaggcgagtcaggacattagcaactatttaaattggtatcagcagaaaccagggaaagcccctaagctcctgatctacgatgcatccaatttggaaacaggggtcccatcaaggttcagtggaagtggatctgggacagattttactttcaccatcagcagcctgcagcctgaagatattgcaacatattactgtcaacagtatgataatctccctcccaacttcttcactttcggccctgggaccaaagtggatatcaaa

SEQ ID NO: 8931 - DNA, 321 bp, Artificial Sequence
  Synthetic polynucleotide encoding artificial human antibody VL domain
gacatccagatgacccagtctccatcctccctgtctgcatctgtaggggacagagtcaccatcacttgccgggcaagtcagaagattgccacgtatttaaattggtatcagcagaaaccagggaaagcccctaacctcctgatctttgaagcatccactttgcatactggggtcccatcaaggttcagtggcggtgggtctgggacagacttcactctcaccattagcagtctgcaacctgaagatttcgcaacgtactactgtcaacagagttacagtactccgattaccttcggccaagggacacgactggagattaaa

SEQ ID NO: 8932 - DNA, 321 bp, Artificial Sequence
  Synthetic polynucleotide encoding artificial human antibody VL domain
tcctatgaattgactcagccaccctcagtgtccgtgtccccaggacagacagccagcatcacctgctctgcagataaattgggggataaatatgcttgctggtatcagcagaagccaggccagtcccctgtgctggtcatctatcaagataacaagcggccctcagggatccctgagcgattctctggctccaactctgggaacacagccactctgaccatcagcgggacccagactatggatgaggctgactattactgtcaggcgtgggacagcagcactgatgtggtattcggcggagggaccaagctgaccgtccta

SEQ ID NO: 8933 - DNA, 318 bp, Artificial Sequence
  Synthetic polynucleotide encoding artificial human antibody VL domain
aattttatgctgactcagccccactctgtgtcggagtctccggggaagacggtaaccatctcctgcaccggcagcagtggcagcattgccagcaactatgtgcagtggtaccagcagcgcccgggcagtgcccccaccactgtgatctatgaggataaccaaagaccctctggggtccctgatcggttctctggctccatcgacagctcctccaactctgcctccctcaccatctctggactgaagactgaggacgaggctgactactactgtcagtcttatgaggtattcggcggagggaccaagctgaccgtccta

SEQ ID NO: 8934 - DNA, 330 bp, Artificial Sequence
  Synthetic polynucleotide encoding artificial human antibody VL domain
cagtctgtgttgacgcagccgccctcagtgtctgcggccccaggacagaaggtcaccatctcctgctctggaagcagctccaacattgggaataattatgtatcctggtaccagcagctcccaggaacagcccccaaactcctcatttatgacaataataagcgaccctcagggattcctgaccgattctctggctccaagtctggcacgtcagccaccctgggcatcaccggactccagactggggacgaggccgattattactgcggaacatgggatagcagcctgagtgctggggtattcggcggagggaccaagctgaccgtccta

SEQ ID NO: 8935 - DNA, 330 bp, Artificial Sequence
  Synthetic polynucleotide encoding artificial human antibody VL domain
cagtctgccctgactcagcctgcctccgtgtctgggtctcctggacagtcgatcaccatctcctgcactggaaccagcagtgacgttggtggttataactatgtctcctggtaccaacaacacccaggcaaagcccccaaactcatgatttatgatgtcagtaatcggccctcaggggtttctaatcgcttctctggctccaagtctggcaacacggcctccctgaccatctctgggctccaggctgaggacgaggctgattattactgcagctcatatacaagcagcagcactcttgtcttcggaactgggaccaaggtcaccgtccta

SEQ ID NO: 8936 - DNA, 333 bp, Artificial Sequence
  Synthetic polynucleotide encoding artificial human antibody VL domain
cagtctgtgctgacgcagccgccctcagtgtctggggccccagggcagagggtcaccatctcctgcactgggagcagctccagcatcggggcaggttatgatgtacactggtaccagcagcttccaggaacagcccccaaactcctcatgtatgctaacagcgatcggccctcaggggtccctgaccgattctctggctccaagtctggcacctcagcctccctggccatcactgggctccaggctgaggacgaggctgattattactgccagtcctatgacaacagcctgagtggttgggtgttcggcggagggaccaagttgaccgtccta

SEQ ID NO: 8937 - DNA, 333 bp, Artificial Sequence
  Synthetic polynucleotide encoding artificial human antibody VL domain
cagtctgccctgactcagcctgcctccgtgtctgggtctcctggacagtcgatcaccatctcctgcactggaaccagcagtgacgttggtggttataactatgtctcctggtaccaacaacacccaggcaaagcccccaaactcatgatttatgatgtcagtaatcggccctcaggggtttctaatcgcttctctggctccaagtctggcaacacggcctccctgaccatctctgggctccaggctgaggacgaggctgattattactgcagctcatatacaagcagcagcactctcgaggtgttcggcggagggaccaagctgaccgtccta

SEQ ID NO: 8938 - DNA, 324 bp, Artificial Sequence
  Synthetic polynucleotide encoding artificial human antibody VL domain
gaaattgtgttgacgcagtctccaggcaccctgtctttgtctccaggtgaaagagccaccctctcctgcagggccagtcagagtgttagcatcacctccttagcctggtaccagcagaaacctggccaggctcccagcctcctcatctatggtgcatccagcagggccactggcatcccacacaggttcagtggcagtgggtctgggacagacttcactctcaccatcagcagactggagcctgaagattttgcagtgtattactgtcagcagtatggtaggtcccctcggacgttcggccaagggaccaaggtggaaatcaaa

SEQ ID NO: 8939 - DNA, 330 bp, Artificial Sequence
  Synthetic polynucleotide encoding artificial human antibody VL domain
cagtctgtgctgactcagccaccctcagcgtctgggacccccgggcagagggtcaccatctcttgttctggaagcagctccaacatcggaagtcattatgtatactggtaccagcagctcccaggaacggcccccaaactcctcatctataggaataatcagcggccctcaggggtccctgaccgattctctggctccaagtctggcacctcagcctccctggccatcagtgggctccggtccgaggatgaggctgattattactgtgcagcatgggatgacagcctgcgtggtctggtattcggcggcgggaccaagctgaccgtccta

SEQ ID NO: 8940 - DNA, 321 bp, Artificial Sequence
  Synthetic polynucleotide encoding artificial human antibody VL domain
gaaattgtgttgacgcagtctccaggcaccctgtctttgtctccaggggaaagagccaccctctcctgcagggccagtcagagtgttagcagcagctacttagcctggtaccagcagaaacctggccaggctcccaggctcctcatctatggtgcatccagcagggccactggcatcccagacaggttcagtggcagtgggtctgggacagacttcactctcaccatcagcagactggagcctgaagattttgcagtgtattactgtcagcagtatggtagctcctacacttttggccaggggaccaagctggagatcaaa

SEQ ID NO: 8941 - DNA, 342 bp, Artificial Sequence
  Synthetic polynucleotide encoding artificial human antibody VL domain
gacatcgtgatgacccagtctccagactccctggctgtgtctctgggcgagagggccaccatcaactgcaagtccagccagagtgttttgtacaggtccaacaataagaactacttagcttggtaccagcagaaaccaggacaggctccgaagctgctcattaagtgggcatctacccgggaatccggggtccctgaccgattcagtggcagcgggtctgggacagatttcactctcaccatcagcagcctgcaggctgaagatgtggcagtttattactgtcagcaatattacagtattcctgggatcactttcggccctgggaccaaagtgcatatcaaa

SEQ ID NO: 8942 - DNA, 321 bp, Artificial Sequence
  Synthetic polynucleotide encoding artificial human antibody VL domain
gacatccagatgacccagtctccatcttccgtgtctgcatctgtaggagacagagtcaccatcacttgtcgggcgagtcagggtattagcagctggttagcctggtatcagcagaaaccagggaaagcccctaagctcctgatctatgctgcatccagtttgcaaagtggggtcccatcaaggttcagcggcagtggatctgggacagatttcactctcaccatcagcagcctgcagcctgaagattttgcaacttactattgtcaacaggctaacagtttcccgtggacgttcggccaagggaccaaggtggaaatcaaa

SEQ ID NO: 8943 - DNA, 330 bp, Artificial Sequence
  Synthetic polynucleotide encoding artificial human antibody VL domain
cagtctgtgttgacgcagccgccctcagtgtctgcggccccaggacagaaggtcaccatctcctgctctggaagcagctccaacattgggaataattatgtttcctggtaccagcagctcccaggaacagcccccaaactcctcatttctgacaataataagcgaccctcagggattcctgaccgattctctggctccaagtctggcacgtcagccaccctgggcatcaccggactccagactggggacgaggccgattattactgcggaacatgggatagcagcctgagtgctgaagtgttcggcggagggaccaagctgaccgtccta

SEQ ID NO: 8944 - DNA, 318 bp, Artificial Sequence
  Synthetic polynucleotide encoding artificial human antibody VL domain
gaaattgtgttgacacagtctccagccaccctgtctttgtctccaggggaaagagccaccctctcctgcagggccagtcagagtgttagcagctacttagcctggtaccaacagaaacctggccaggctcccaggctcctcatctatgatgcatccaacagggccactggcatcccagccaggttcagtggcagtgggtctgggacagacttcactctcaccatcagcagcctagagcctgaagattttgcagtttattactgtcagcagcgtagcaactggcccactttcggcggagggaccaaggtggagatcaaa

SEQ ID NO: 8945 - DNA, 321 bp, Artificial Sequence
  Synthetic polynucleotide encoding artificial human antibody VL domain
gacatccagatgacccagtctccatcctccctgtctgcatctgtaggagacagagtcaccatcacttgccgggcgagtcagggcattagcaattatttagcctggtatcagcagaaaccaggtaaagttcctaacctcctgatctatgctgcatccactttgcaatcaggggtcccatctcggttcagtggcagtggatctgggacagatttcactctcaccatcagcagcctgcagcctgaagatgttgcaacttattactgtcaaaagtataacagtgtcccgtggacgttcggccaggggaccaaggtggaaatcaaa

SEQ ID NO: 8946 - DNA, 330 bp, Artificial Sequence
  Synthetic polynucleotide encoding artificial human antibody VL domain
cagtctgtgttgacgcagccgccctcagtgtctgcggccccaggacagaaggtcaccatctcctgctctggaagcagctccaacattgggaataattatgtatcctggtaccagcagctcccaggaacagcccccaaactcctcatttatgacaataataagcgaccctcagggattcctgaccgattctctggctccaagtctggcacgtcagccaccctgggcatcaccggactccagactggggacgaggccgattattactgcggaacatgggatagcagcctgagtgttgtggtattcggcggagggaccaagctgaccgtccta

SEQ ID NO: 8947 - DNA, 339 bp, Artificial Sequence
  Synthetic polynucleotide encoding artificial human antibody VL domain
gacatcgtgctgacccagtctccagactccctggctgtgtctctgggcgagagggccaccatcaactgcaggtccagccggagtgttttttacagctccggaaataagaattacttagcttggtaccagcagaaaccaggacagcctcctaagctgctcatctactgggcatctgaccgggaatccggggtccctgaccgattcagtggcagcgggtctgggacagaattcactctcaccatcagcagcctgcaggctgaagatgtggcagtttattactgtcagcaatattatagtactcctctcactttcggcggagggaccagggtggagatcaaa

SEQ ID NO: 8948 - DNA, 327 bp, Artificial Sequence
  Synthetic polynucleotide encoding artificial human antibody VL domain
cagtctgtgctgactcagccaccctcagcgtctgggacccccgggcagagggtcaccatctcttgttctggaagcagctccaacatcggaagtaatactgtaaactggtaccagcagctcccaggaacggcccccaaactcctcatctatagtaataatcagcggccctcaggggtccctgaccgattctctggctccaagtctggcacctcagcctccctggccatcagtgggctccagtctgaggatgaggctgattattactgtgcagcatgggatgacagcctgacttatgtcttcggaactgggaccaaggtcaccgtccta

SEQ ID NO: 8949 - DNA, 327 bp, Artificial Sequence
  Synthetic polynucleotide encoding artificial human antibody VL domain
cagtctgccctgactcagcctcgctcagtgtccgcgtctcctggacagtcagtcaccatctcctgcactggaagcagcagtgctattggtggttataaccttgtctcctggtaccagcaccacccaggcaaagcccccaaactcttgatttatactgtcgataagcggcccccaggggtccctgatcgcttctctggctccaagtctggcgacatggcctccctgaccatctctgggctccaggctgaggatgaggctgattatttctgctcacaatcaggcagcgacgctgtgttattcggcggagggaccaagctgaccgtccta

SEQ ID NO: 8950 - DNA, 318 bp, Artificial Sequence
  Synthetic polynucleotide encoding artificial human antibody VL domain
tcctatgacctgactcagccaccctcagtgtccgtattgcctggacagacagccagcatcacctgctctggagataaattgggggagaaatttgcttgctggtatcagcagaagtcaggccagtcccctgttctggtcatttatcaagatacgaagcggccctcagggatccctgagcgattctctggctccaactcagggaacacagccactctgaccatcagcgggacccaggctatggatgaggctgactattactgtcaggtgtgggactacgacggagtgacattcggcggagggaccaagctgaccgtccta

SEQ ID NO: 8951 - DNA, 321 bp, Artificial Sequence
  Synthetic polynucleotide encoding artificial human antibody VL domain
tcctatgagctgacacagccaccctcggtgtcagtgtccccaggacagacggccaggatcacctgctctggagatgcattgccaaagcaatatgcttattggtaccagcagaagccaggccaggcccctgtgctggtgatatataaagacagtgagaggccctcagggatccctgagcgattctctggctccagctcagggacaacagtcacgttgaccatcagtggagtccaggcagaagacgaggctgactattactgtcaatcagcagacagcagtggtacttgggtgttcggcggagggaccaagctgaccgtccta

SEQ ID NO: 8952 - DNA, 342 bp, Artificial Sequence
  Synthetic polynucleotide encoding artificial human antibody VL domain
gacatcgtgatgacccagtctccagactccctggctgtgtctctgggcgagagggccaccatcaactgcaagtccagccagagtgttttatacagctccaacaataagaactacttagcttggtaccagcagaaaccaggacagcctcctaagctgctcatttcctgggcatctacccgggactccggggtccctgaccgattcagtggcagcgggtctgggacagatttcactctcaccatcagcagcctgcaggctgaagatgtggcagtttattactgtcagcaatattatagtgctccggggttcacttttggccaggggaccaagctggagatcaaa

SEQ ID NO: 8953 - DNA, 336 bp, Artificial Sequence
  Synthetic polynucleotide encoding artificial human antibody VL domain
gatattgtgatgactcagtctccactctccctgcccgtcacccctggagagccggcctccatctcctgcaggtctagtcagagcctcctgcatagtaatggatacacacttttggattggtacgtgcagaagccagggcagtctccacagttagtgatctatatggcttctattcgggtctccggggtccctgacaggttcagtggcagtggatcaggcacagattttacactgaaaatcagcagagtggaggctgaggatgttggggtttattactgcatgcaagctcgacaaattcctcagacttttggccaggggaccaagttggagatcaaa

SEQ ID NO: 8954 - DNA, 324 bp, Artificial Sequence
  Synthetic polynucleotide encoding artificial human antibody VL domain
tcttctgagctgactcaagaccctgctgtgtctgtggccttgggacagacagtcaggatcacgtgccaaggagacagcctcagaatctattatgcaagctggtaccagcagaagccaggacaggcccctatacttgtcatttatggtaaaaacaaccggccctcaggaatcccagaccgattctctggctccacttcactaagcacagcttccttgaccatcactggggctcaggcggaagacgaggctgactatttctgtagttcccgggacagcagtgatagtcttctggtgttcggcggagggaccaggctgaccgtccta

SEQ ID NO: 8955 - DNA, 333 bp, Artificial Sequence
  Synthetic polynucleotide encoding artificial human antibody VL domain
cagtctgccctgactcagcctgcctccgtgtctgggtctcctggacagtcgatcaccatctcctgcactggaaccagcagtgacgttggtggttataactatgtctcctggtaccaacagcacccaggcaaagcccccaaactcatgatttatgatgtcagtaagcggccctcaggggtttctaatcgcttctctggctccaagtctggcaacacggcctccctgaccatctctgggctccaggctgaggacgaggctgattattactgcagctcatatacaagcagcagcactttcagggtcttcggaactgggaccaaggtcaccgtccta

SEQ ID NO: 8956 - DNA, 336 bp, Artificial Sequence
  Synthetic polynucleotide encoding artificial human antibody VL domain
gatgttgtgatgactcagtctccgctctacctgcccgtcacccttgggcagccggcctccatctcctgcaggtctagtcaaagcctcgtatacagtgatggaaacacttacttgaattggtttcagcagaggccaggccaatctccaaggcgcctcatctacaaggtttctacccgggactctggggtcccagacagattcagcggcagtgggtcaggcactgatttcacactgaaaatcagcagggtggaggctgaggatgttgggctttattattgcatgcaaggtatatactggccattcactttcggccctgggaccaaagtggatatcaaa

SEQ ID NO: 8957 - DNA, 321 bp, Artificial Sequence
  Synthetic polynucleotide encoding artificial human antibody VL domain
tcctatgtgctgactcagccaccctcagtgtcagtggccccaggaaagacggccaggattacctgtgggggaaacaacattggaagtaaaagtgtgcactggtaccagcagaagccaggccaggcccctgtgctggtcatctattatgatagcgaccggccctcagggatccctgagcgattctctggctccaactctgggaacacggccaccctgaccatcagcagggtcgaagccggggatgaggccgactattactgtcaggtgtgggatagtagtagtgatagtgtcttcggaactgggaccaaggtcaccgtgcta

SEQ ID NO: 8958 - DNA, 318 bp, Artificial Sequence
  Synthetic polynucleotide encoding artificial human antibody VL domain
gaaatagtgatgacgcagtctccagccaccctgtctgtgtctccaggggctagagtcaccctctcctgcagggccagtcagagtgttggcagcaacttagcctggtaccagcaaaaacctggccaggctcccaggctcctcatctatgaaacatcgaccagggccactggcatcccagccaggttcagcggcagtgggtctgggacagagttcactctcaccatcagcagcctgaggtctgaagattttgcagtttattactgtcagcagtataatgactggtggacgttcggccaagggaccaaggtggaaatcaaa

SEQ ID NO: 8959 - DNA, 330 bp, Artificial Sequence
  Synthetic polynucleotide encoding artificial human antibody VL domain
tcttctgagctgactcaggaccctgctgtgtctgtggccttgggacagacagtcaggatcacatgccaaggagacagcctcagaagctattatgcaagctggtaccagcagaagccaggacaggcccctgtacttgtcatctatggtaaaaacaaccggccctcagggatcccagaccgattctctggctccagctcaggaaacacagcttccttgaccatcactggggctcaggcggaagatgaggctgactattactgtaactcccgggacagcagtggtaaccatctaaggggtgtcttcggaactgggaccaaggtcaccgtccta

SEQ ID NO: 8960 - DNA, 336 bp, Artificial Sequence
  Synthetic polynucleotide encoding artificial human antibody VL domain
gatattgtgatgactcagtctccactctccctgcccgtcacccctggagagccggcctccatctcctgcaggtctagtcagagcctcctgcatagtaatggatacaactatttggattggtacctgcagaagccagggcagtctccacagctcctgatctatttgggttctaatcgggcctccggggtccctgacaggttcagtggcagtggatcaggcacagattttacactgaaaatcagcagagtggaggctgaggatgttggggtttattactgcatgcaagctctacaaactcctccggctttcggcggagggaccaaggtggagatcaaa

SEQ ID NO: 8961 - DNA, 336 bp, Artificial Sequence
  Synthetic polynucleotide encoding artificial human antibody VL domain
gatattgtgatgactcagtctccactctccctgcccgtcacccctggagagccggcctccatctcctgcaggtctagtcagagcctcctgcatagtaatggatacaactgtttggattggtacctgcagaagccagggcagtctccacagctcctgatctatttgggttctaatcgggcctccggggtccctgacaggttcagtggcagtggatcaggcacagattttacactgaaaatcagcagagtggaggctgaggatgttggcgtttattactgcatgcaagctctacaaacccccctcactttcggcggagggaccaaggtggagatcaaa

SEQ ID NO: 8962 - DNA, 315 bp, Artificial Sequence
  Synthetic polynucleotide encoding artificial human antibody VL domain
gaaattgtcttgacgcagtctccaggcaccctgtctgcgtccgccgggacaagagccaccctctcctgcagggccagtcagagtgtcagcagcacctacttggcctggtaccagcagaagcctggccaggctcccaggctcctcatatctggtgcatccaccagggccgctggcatttcagaccggttcagtgtcagtgggtctgggacagacttcactctcatcatcaacagactggaggctgaagactctgcagtgtactattgtcaccactctaggggcccttttggccaggggaccaagctggagataaaa

SEQ ID NO: 8963 - DNA, 330 bp, Artificial Sequence
  Synthetic polynucleotide encoding artificial human antibody VL domain
cagtctgtgctgactcagtcaccctcagcgtctgggacccccggacagagggtcaccatctcttgttctggaagcagctccaacatcggaagtaatcctgtaaactggtaccagcagctcccaggaacggcccccaaatacctcatccataataataatcagcggccctcaggggtccctgaccgattctctggctccaagtctggcacctcagcctccctggccatcagtgggctccagtctgaggatgaggctcaatattactgtgcagcatgggatgacagcctgaatgggtgggtgttcggcggagggaccaagctgaccgtcgta

SEQ ID NO: 8964 - DNA, 324 bp, Artificial Sequence
  Synthetic polynucleotide encoding artificial human antibody VL domain
gaaattgtgttgacgcagtctccaggcaccctgtctttgtctccaggggaaagagccaccctctcctgcagggccggtcagagtcttagcagtcgttacttagcctggtaccagcggaaacctggccaggctcccaggctcctcatctatggtgcatccaacagggccactggcatcccagacaggttcagtggcagtgggtctgggacagacttcactctcaccatcagcagactggaacctgaagattctgcagtgtattactgtcagcagtatggtagctcaccgctcactttcggcggagggaccaaggtggagatcaaa

SEQ ID NO: 8965 - DNA, 330 bp, Artificial Sequence
  Synthetic polynucleotide encoding artificial human antibody VL domain
cagactgtggtgacccaggagccatcgttctcagtgtcccctggagggacagtcacactcagttgtggcttgagctctggctcagtctctactagtcactaccccagctggtaccagcagaccccaggccaggctccacgcacgctcatctacagcacaaacactcgctcttttggggtccctgatcgcttctctggctccatccttgggaacaaagctgccctcaccatcacgggggcccaggcagatgatgagtctgattattactgtgtcctgtatatgggtagtggcatttgggtgttcggaggaggcacccagctgaccgtcctc

SEQ ID NO: 8966 - DNA, 330 bp, Artificial Sequence
  Synthetic polynucleotide encoding artificial human antibody VL domain
cagtctgtgctgactcagccaccctcagcgtctgggacccccgggcagagggtcaccatctcttgttctggaagtagctccaacatcggaagtaatactgtaaactggtaccagcagctcccaggaacggcccccaaactcctcatctatagaaataatcagcggccctcaggggtccctggccgattctctggctccaagtctggcacctcagcctccctggccatcagtgggctccagtctgaagatgaggctgactattactgtgcagcatgggatgacagcctgagtggtggagtattcggcggagggaccaagctgaccgtccta

SEQ ID NO: 8967 - DNA, 321 bp, Artificial Sequence
  Synthetic polynucleotide encoding artificial human antibody VL domain
tcctatgaactgactcagccaccctctgagtccgtgtccctaggacagacagccagcatcacctgctctggacataacttggacgaaaagtatgtttcgtggtatcagcagaagccaggccagtcccctgtcttagtcatgtatgaagataagaagcggccgtcagggatccctgcccgattttctggctccaattctggggacacagccactctgaccatcggctggatccagactgtggatgaggctgactattactgtcaggcgtgggacagcaggagaactgtggtcttcggtggagggaccaggctgaccgtccta

SEQ ID NO: 8968 - DNA, 330 bp, Artificial Sequence
  Synthetic polynucleotide encoding artificial human antibody VL domain
cagtctgccctgactcagcctgcctccgtgtctgggtctcctggacagtcgatcaccatctcctgcgctggaaccagcagtgacgttggtgcttataactatgtctcctggtaccaacaacacccactcaaagcccccaaactcatggtttatgatgtcaataatcggtcctcaggggtttcttatcgcttctctggctccaagtctggcaacacggcctccctgaccatctctgggctccgggctgacgacgaggctgattattactgcacctcatatacaaccagcggcactctcgtcttcggcactgggaccaaggtcaccgtccta

SEQ ID NO: 8969 - DNA, 330 bp, Artificial Sequence
  Synthetic polynucleotide encoding artificial human antibody VL domain
cagtctgtgctgactcagccaccctcagcgtctgggacccccgggcagagggtcaccatctcttgttctggaagcagctccaacatcggaagtaattatgtatactggtaccagcagctcccaggaacggcccccaaactcctcatctataggaataatcagcggccctcaggggtccctgaccgattctctggctccaagtctggcacctcagcctccctggccatcagtgggctccggtccgaggatgaggctgattattactgtgcagcatgggatgacagcctgagtggtccggtgttcggcggagggaccaagctgaccgtccta

SEQ ID NO: 8970 - DNA, 321 bp, Artificial Sequence
  Synthetic polynucleotide encoding artificial human antibody VL domain
gacatccagatgacccagtcgccatcctccctggctgcgtctgtgggagacagagtcaccatcacttgccgggcaagtcagaacttttacagttatttaaattggtatcagcaaacaccagggaaagcccctaagctcctgatctctgctgcttctactttgcacagtggggtcccatcaaggttcagtggcagtgggtctgggacagatttcactctcaccatcagcagtctgcaacctgaagattttgcaacttactactgtcaacagacttacaatatcccgtggacgttcggccaagggaccaaggtggaaatcaaa

SEQ ID NO: 8971 - DNA, 324 bp, Artificial Sequence
  Synthetic polynucleotide encoding artificial human antibody VL domain
tcttctgagctgactcaggaccctgctgtgtctgtggccttgggacagacagtcaggatcacatgccacggagacagcctcagaagatattatgcaacctggtaccagcagaagccaggacaggcccctgtacttgtcgtctatggtaaaaaccaccggccctcagggatcccagaccgcttctctggctccagttcactaaacacagcttccttgaccatcactggggctcaggcggaagatgagggtgactattactgttactcccgggacagtagtggtaatcatggggtgttcggcggagggaccaagctgaccgtccta

SEQ ID NO: 8972 - DNA, 330 bp, Artificial Sequence
  Synthetic polynucleotide encoding artificial human antibody VL domain
cagtctgccctgactcagcctgcctccgtgtctgggtctcctggacagtcgatcaccatctcctgcgctggaaccagcagtgacgttggtgcttataactatgtctcctggtaccgacaacacccaggcaaagcccccaaactcatgatttatgatgtcaataatcggccctcaggagtttctgagcgcttctctggctccaagtcaggcaacacggcctccctgaccatctctgggctccaggctgacgacgcggctgattattactgctcttcatatacaattaggaacactctcgtcttcggaactgggaccacggtcaccgtccta

SEQ ID NO: 8973 - DNA, 315 bp, Artificial Sequence
  Synthetic polynucleotide encoding artificial human antibody VL domain
gacatccagatgactcagtctccttcctccctgtctgcatctgtgggagacacagtcagtatcacttgccggtcaagtcaaaatattgacagttacttaggttggtatcaacaaaaaccagggaaagcccctaaactcctgatccatcctgcatccaatttgcaaagtggcgtcccctcaaggttcagaggcagtggatttgggacagatttcactctcaccatcagtagtctgcaacctgaagactttgcaacttactactgtcaatcgacttacagtagtgcttttggccaggggaccaaactggacatcaaa

SEQ ID NO: 8974 - DNA, 330 bp, Artificial Sequence
  Synthetic polynucleotide encoding artificial human antibody VL domain
cagtctgtgctgactcagccaccctcagcgtctgggacccccgggcagagggtcaccatctcttgttctggaagcagctccaacatcggaagtaatactgtaaactggtaccagcagctcccaggaacggcccccaaactcctcatctatagtaataatcagcggccctcaggggtccctgaccgattctctggctccaagtctggcacctcagcctccctggccatcagtgggctccagtctgaggatgaggctgattattactgtgcagcatgggatgacagcctgaatggtcctgtcttcggaactgggaccaaggtcaccgtccta

SEQ ID NO: 8975 - DNA, 324 bp, Artificial Sequence
  Synthetic polynucleotide encoding artificial human antibody VL domain
tcttctgagctgactcaggaccctgctgtgtctgtggccttgggacagacagtcaggatcacatgccaaggagacaccctcagaatgtattatgcaacctggtaccagcaaaagccaggacaggcccctgtgcttgtcatctatggcaacaacaaccgaccctcagggatcccagaccgattctctggctccgcctcaggaagcacagcttccttgaccatcactggggctcaggcggaagatgaggctgaatatttctgtaattcccgggacagcagtgggacccaagtggtattcggcggagggaccaaggtgaccgtccta

SEQ ID NO: 8976 - DNA, 321 bp, Artificial Sequence
  Synthetic polynucleotide encoding artificial human antibody VL domain
gaaatagtgatgacgcagtctccagccgccctttctgtgtctccaggggaaccagccaccctctcctgcagggccagtcagactgtcaacatcaacctagcctggtaccagcagatccctggccaggcccccaaactcctcatctacgatgtttccaccagggccgctggcatcccagccaggttcagtggcagtgggtctgcgacagacttcactctcaccatcagcagcctgcagtctgaggattttgcagtttattactgtcagcaatataatgattggccgctcactttcggcggagggaccaaggtggagatcaaa

SEQ ID NO: 8977 - DNA, 324 bp, Artificial Sequence
  Synthetic polynucleotide encoding artificial human antibody VL domain
gacatccagatgacccagtctccatcctccctgtctgcatctgtaggagacagagtcaccatcacttgccaggcgagtcaggacattagcaactatttaaattggtatcagcagaaaccagggaaagcccctaagctcctgatctacgatgcatccaatttggaaacaggggtcccatcaaggttcagtggaagtggatctgggacagattttactttcaccatcagcagcctgcagcctgaagatattgcaacatattactgtcaacagtatgataatctcctcccgatcaccttcggccaagggacacgactggagattaaa

SEQ ID NO: 8978 - DNA, 321 bp, Artificial Sequence
  Synthetic polynucleotide encoding artificial human antibody VL domain
gacatccagttgacccagtctccatccttcctgtctgcatctgtaggagacagagtcaccatcacttgccgggccagtcagggcattagcagatatttagcctggtatcagcaaaaaccagggaaagcacctaacctcctgatctatgctgcatccactttgcaaagtggggtcccatcaaggttcagcggcagtggatctgggacagaattcactctcacaatcagcagcctgcagcctgaagattttgcaacttattactgtcaacagcttaatagttaccccctcactttcggcggagggaccaaggtggagatcaaa

SEQ ID NO: 8979 - DNA, 333 bp, Artificial Sequence
  Synthetic polynucleotide encoding artificial human antibody VL domain
cagtctgtgttgactcagccaccctcagcgtctgggacccccgggcagcgggtcaccatctcttgttctggaagaagttccaacatcggaagtaattttgtttactggtaccaacagctcccaggagcggcccccaaactcctcatccatagcaatagtcttcggccctccggggtccctgagcgattctctggctccaagtctggcacctcagcctccctggccatcagtgggctccggtccgaggatgaggctgattatttctgtgcatcatgggatgacagtctcaatggccatgtggttttcggcggcgggaccaagctgaccgtccta

SEQ ID NO: 8980 - DNA, 336 bp, Artificial Sequence
  Synthetic polynucleotide encoding artificial human antibody VL domain
gatattgtgatgacccagacccccctctcctcacctgtcacccttggacagccggcctccatctcctgcaggtctagtcaaagcctcgttcacagtgatggaaacacctacttgagttggcttcagcagaggccgggccagcctccaagactcctaatttataagatttctaaccggttctctggggtcccagacagattcagtggcagtggggcagggacagatttcacactgaaaatcagcagggtggaagctgaggatgtcggggtttattactgcatgcaagctacacaaatcccgtggacgttcggccaagggaccaagttggaaatcaaa

SEQ ID NO: 8981 - DNA, 315 bp, Artificial Sequence
  Synthetic polynucleotide encoding artificial human antibody VL domain
tcctatgagctgactcagccaccctcagtgtccgtgtccccaggacagacagccagcatcacctgctctggagataaattgggggataaatatgcttgctggtatcagcagaagccaggccagtcccctgtgctggtcatctatcaagatagtaagcggccctcagggatccctgagcgattctctggctccaactctgggaacacagccactctgaccatcagcgggacccaggctatggatgaggctgactattactgtcaggcgtgggacagcagcgtggtattcggcggagggaccaagctgaccgtccta

SEQ ID NO: 8982 - DNA, 324 bp, Artificial Sequence
  Synthetic polynucleotide encoding artificial human antibody VL domain
tcttctgagctgactcaggaccctgctgtgtctgtggccttgggacagacagtcaggatcacatgccaaggagacagtctcagaagctattatgcaagttggtaccagcagaagccaggacaggcccctgcacttgtcatttatggtaaaaacagccggccctcggggatcccagaccgattctctggctccagctcaggaaacacagcttccttgaccatcactggggctcaggcggaagatgaggctgactattactgtaactcccgcgacagcagtggtaaccatctggtattcggcggagggaccaagctgaccgtccta

SEQ ID NO: 8983 - DNA, 333 bp, Artificial Sequence
  Synthetic polynucleotide encoding artificial human antibody VL domain
gatattgtgatgacccagactccactctctctgtccgtcacccccggacagccggcctccatgtcctgcaattctagtcagagcctccttcacagtgatggaaagacctacttgacttggttcctgcagaagccaggccagtctccaaaggccctaattaatgaagtttccaggcggtgctctggagtgccagacaggttcagtggcaccgggtcagggacagatttcacactgaaaatcagccgggtggaggctgaggatgttggcctttattactgcctgcaagccgtccacccttggacgttcggccaagggaccaaggtggaaatcaaa

SEQ ID NO: 8984 - DNA, 321 bp, Artificial Sequence
  Synthetic polynucleotide encoding artificial human antibody VL domain
gacatccagatgacccagtctccatcctccgtgtctgcatctgtgggagacagagtcaccatcacttgccgggcgagtcaggccatctcctcttatttagcctggtatcagcagaaaccagggaaggttcctaaactcctgatctatgctgcttccactttacagtcaggggtcccatctcgtttcagtggcagtgggtctgggacagatttcactctcaccatccacagcctgcaacctgaagatgttgcaacttattactgtcaaaagtataatggtgcccccttctctttcggccctgggaccacagtggatctcaaa

SEQ ID NO: 8985 - DNA, 336 bp, Artificial Sequence
  Synthetic polynucleotide encoding artificial human antibody VL domain
gatattgtgatgacccagactccactctcctcacccgtcacccttggacagccggcctccatttcctgcaggtctaatcaaagcctcgtacacagtgatggaaacacctacttgagttggcttcagcagaggccaggccagcctccaagactcctaatttataagatttctaaccggttctctggggtcccagacagattcagtggcagtggggcagggacagatttcacactgaaaatcagcagggtggaagctgaggatgtcggggtgtattactgcacgcaagctacacaatttcctcacacttttggccaggggaccaagctggagatcaaa

SEQ ID NO: 8986 - DNA, 318 bp, Artificial Sequence
  Synthetic polynucleotide encoding artificial human antibody VL domain
tcctatgacctgactcagccaccctcggtgtccgtgtccccaggacagactgccaccatcacctgctctggagataagttgggggatttacttgcctcctggtatcagcagaagccaggccagtcccctatactggtcatctatcaagataataagcggccctcaggaattcctgagcgattctctggctccaactctgggagcacagccactctgaccatcagcgggacccaggctatggatgacgctgactattactgtcaggcgtgggacagcaccactgtggttttcggcggagggaccaagctgaccgtccta

SEQ ID NO: 8987 - DNA, 321 bp, Artificial Sequence
  Synthetic polynucleotide encoding artificial human antibody VL domain
gaaatagtgatgacgcagtctccagccaccctgtctgtgtctccaggggacagagccaccctctcctgcagggccagtcagatttttaacaacaacttagcctggtaccagcagaaacctggccaggctcccaggctcctcatctatggcgcatcaaccagggccactggcatcccaggcaggttcagtggcagtgggtctgggacagagttcactctcaccatcagcagcctgcagtctgaagattttgcagtctattactgtcagcagtataatgagtggccactcactttcggcggagggaccagggtgcagatcaaa

SEQ ID NO: 8988 - DNA, 336 bp, Artificial Sequence
  Synthetic polynucleotide encoding artificial human antibody VL domain
gatgttgtgatgactcagtctccactctccctgcccgtcacccttggacagccggcctccatctcctgcaggtctagtcaaagcctcgtacacagtgatggaaacacctacttgaattggtttcagcagaggccaggccaatctccaaggcgcctaatttataaggtttctaaccgggactctggggtcccagacagattcagcggcagtgggtcaggcactgatttctcactgaaaatcagcagggtggaggctgaggatgttggggtttattactgcatgcaaggtacacactggccgtggacgttcggccaagggaccaaggtggaaatcaaa

SEQ ID NO: 8989 - DNA, 330 bp, Artificial Sequence
  Synthetic polynucleotide encoding artificial human antibody VL domain
cagtctgtgttgacgcagccgccctcagtgtctgcggccccaggacagaaggtcaccatctcctgctctggaagcagctcgaatattgggaacaatcatgtatcgtggtatcagcaattcccaggaacagcccccaaaatcctcatttttggcactaataagcgaccctcagggattcctgaccgattctctggctccaggtctggcacgtcggccaccctggacatcaccggactccagactggggacgaggccgattattactgcgagacatgggatagcagtctgaattctgtgctgttcggcggagggaccaagctgaccgtccta

SEQ ID NO: 8990 - DNA, 321 bp, Artificial Sequence
  Synthetic polynucleotide encoding artificial human antibody VL domain
gacatccagatgacccagtctccatcctccctgtctgcatctgtaggagacagagtcaccatcacttgccgggcaagtcagagcattagcaactatttacattggtatcagcagaaaccagggaaagcccctaagctcctgatctatgctgcatccagtttgcaacctggggtcccgtcaaggttcagtggcagtggatctgggacagatttcactctcaccatcagcagtctgcaacctgaagattttgcaagttattactgtcaacagagttacagtaccctccccactttcggcggagggaccaaggtggagatcaaa

SEQ ID NO: 8991 - DNA, 336 bp, Artificial Sequence
  Synthetic polynucleotide encoding artificial human antibody VL domain
gatattgtgatgactcagtctccactctccctgcccgtcacccctggagagccggcctccatctcctgcaggtctagtcagagcctcctgcatagtaatggatacaactatttggattggtacctgcagaagccagggcagtctccacagctcctgatctatttgggttctaatcgggcctccggggtccctgacaggttcagtggcggtggatcaggcacagattttacactgaaaatcagcagagtggaggctgaggatgttggggtttattactgcatgcaagctctacaaactccgtacacttttggccaggggaccaagctggagatcaaa

SEQ ID NO: 8992 - DNA, 333 bp, Artificial Sequence
  Synthetic polynucleotide encoding artificial human antibody VL domain
cagtctgtgctgactcagccaccctcagcgtctgggacccccgggcagagggtcaccatctcttgttctggaagcagctccaacatcggaagtaattatgtatactggtaccagcagctcccaggaacggcccccaaactcctcatctataggaataatcagcggccctcaggggtccctgaccgattctctggctccaagtctggcacctcagcctccctggccatcagtgggctccggtccgaggatgaggctgattattactgtgcagcatgggatgacagcctgagtggttctgtggtattcggcggagggaccaagctgaccgtccta

SEQ ID NO: 8993 - DNA, 336 bp, Artificial Sequence
  Synthetic polynucleotide encoding artificial human antibody VL domain
cagtctgtgttgacgcagccgccctcagtgtctgcggccccaggacagaaggtcaccatctcctgctctgaaagcagctccaacattggaggtaattatgtgtcctggtaccagcagttcccagggacagcccccaaactcctcatttatgacaataataagcgagcctctgggcttcctgaccgattctctggctccaagtctggcacgacagccaccctgggcatcagcggactccagactggggacgaggccgattattactgcgcaacatgggatggcagtgtggaccttggctcttatgtcttcggaactgggaccaaggtcaccgtccta

SEQ ID NO: 8994 - DNA, 333 bp, Artificial Sequence
  Synthetic polynucleotide encoding artificial human antibody VL domain
cagtctgtgttgacgcagccgccctcagtgtctggggccccagggcagagggtcaccatttcctgcacagggagcagctccaacatcgggtcaggttatgatgtaaactggtatcagcagcttccgggaacagcccccaaactcctcatccatggtaacagcaatcggccctcaggggtccctgcccgattctctggctccaagtctggcacctcaggctccctggccatcgctgggctccaggctgaggatgaggctgactattactgccagtcctatgacagcagcctgggcggtccggttttcggcggagggaccagggtgaccgtccta

SEQ ID NO: 8995 - DNA, 336 bp, Artificial Sequence
  Synthetic polynucleotide encoding artificial human antibody VL domain
gatgttgtgatgactcagtctccactctccctgcccgtcacccttggacagccggcctccatctcctgcaggtctagtcaaagcctcgtacacagtgatggaaacacctacttgaattggtttcagcagaggccaggccaatctccaaggcgcctaatttataaggtttctaaccgggactctggggtcccagacagattcagcggcagtgggtcaggcactgatttcacactgaaaatcagcagggtggaggctgaggatgttggggtttattactgcatgcaaggttcacactggcctctcactttcggcggagggaccaaggtggagatcaaa

SEQ ID NO: 8996 - DNA, 324 bp, Artificial Sequence
  Synthetic polynucleotide encoding artificial human antibody VL domain
tcctatgagctgacacagccaccctcggtgtcagtgtccccaggacagacggccaggatcacctgctctggagatgcattgccaaagcaatatgcttattggtaccagcagaagccaggccaggcccctgtgctggtgatatataaagacagtgagaggccctcagggatccctgagcgattctctggctccagctcagggacaacagtcacgttgaccatcagtggagtccaggcagaagacgaggctgactattactgtcaatcagcagacagcagtggtacttatctagtattcggcggagggaccaagctgaccgtccta

SEQ ID NO: 8997 - DNA, 333 bp, Artificial Sequence
  Synthetic polynucleotide encoding artificial human antibody VL domain
cagtctgtgctgactcagccaccctcagcgtctgggacccccgggcagagggtcaccatctcttgttctggaagcagctccaacatcggaagtaatagtgtgagctggttccagcagctcccaggaacggcccccaaactcctcatatatagtaatgatcagcggccctcaggggtccctgcccgattctctggctccaggtctggcacctcggcctccctggccatcagtgggctccagcctgaagatgaggctgtttattactgtgcagcatgggatgacagcctgaatggttctaatgtcttcggaactgggaccacggtcaccgtccta

SEQ ID NO: 8998 - DNA, 321 bp, Artificial Sequence
  Synthetic polynucleotide encoding artificial human antibody VL domain
tcctatgaggtgactcagccaccctcagtgtccgtgtccccaggacagacagccagcatcacctgctctggaggtcagttggcagataaatatgcttcgtggtatcaacagaagccaggccagtcccctctgttagtcatctttcaggattacaagcggccctcagggatccctgagcgattctctggctccaagtctgggaacacagtcactctgaccatcagcgggacacaggctatggatgaggctgactattactgtcagacgtgggacagtaggaatgggggggtcttcggaactgggaccaaagtcaccgtccta

SEQ ID NO: 8999 - DNA, 342 bp, Artificial Sequence
  Synthetic polynucleotide encoding artificial human antibody VL domain
gacatcgtgatgacccagtctccagactccctggctgtgtctctgggcgagagggccaccatcaactgcaagtccagccagagtgttttatccagctccaacaataagaactacttagcttggtaccagcagaaaccacgacagcctcctaagctgctcatttactgggcatctacccgggaatccggggtccctgaccgattcagtggcagcgggtctgggacagatttcactctcaccatcagcagcctgcaggctgaagatgtggcagtttattactgtcagcagtattatattactcttgcgctcactttcggcggagggaccaaggtggagatcaaa

SEQ ID NO: 9000 - DNA, 321 bp, Artificial Sequence
  Synthetic polynucleotide encoding artificial human antibody VL domain
gacatccagatgacccagtctccatcctccctggctgcatctgtaggagacagagtcaccatcacttgccgggcaagtcagagcatcgatatctttataaattggtatcagaagaaaccagggaaagcccctaaactcctgatctacgcagcatccactttgcaaagtggggtcccatcaaggttcagtggcggtggatctgggacagacttcactctctccatcagcaatctgcaggctgacgattttgcagcttactactgtcaacagagtcacagtacccctatgacttttggccaggggaccaagttggacattaaa

SEQ ID NO: 9001 - DNA, 324 bp, Artificial Sequence
  Synthetic polynucleotide encoding artificial human antibody VL domain
gaaattgtgttgacgcagtctccaggcaccctgtctttgtctccaggggaaagagccaccctctcctgcagggccagtcagagtgttagcagcagctacttcgcctggtaccagcagaaacctggccaggctcccaggctcctcatctatgctgcatccagcagggccactggcatcccagacaggatcagtggcagtgggtctgggacagacttcactctcaccatcagcagactggagcctgaagattttgcagtgtattactgtcagcagtatggtacctcaccgtacacttttggccaggggaccaagctgcagatcaaa

SEQ ID NO: 9002 - DNA, 321 bp, Artificial Sequence
  Synthetic polynucleotide encoding artificial human antibody VL domain
gacatccagatgacccagtctccttccaccctgtctgcatctgtaggagacagagtcaccatcacttgccgggccagtcagagtattagtagctggttggcctggtatcagcagaaaccagggaaagcccctaagctcctgatctataaggcgtctagtttagaaagtggggtcccatcaaggttcagcggcagtggatctgggacagaattcactctcaccatcagcagcctgcagcctgatgattttgcaacttattactgccaacagtataatagttatccacggacgttcggccaagggaccaaggtggaaatcaaa

SEQ ID NO: 9003 - DNA, 333 bp, Artificial Sequence
  Synthetic polynucleotide encoding artificial human antibody VL domain
gatattgtgatgacccagactccactctctctgtccgtcacccctgcacagccggcctccatctcctgcaagtctagtcagagcctcctgcatagtgatggaaggacctatttgtattggtacctgcagaggccaggccagtctccacaactcctaatctatgaagtttccaaccggttctctggagtgccagataggttcagtggcagcggatcaggaacagatttcacactgaacatcagccgggtggaggctgaggattttggggtttattactgcatgcaaggtacataccttcggacgttcggcctagggaccaaggtggaaatcaaa

SEQ ID NO: 9004 - DNA, 321 bp, Artificial Sequence
  Synthetic polynucleotide encoding artificial human antibody VL domain
gaaatagtggtgacgcagtctccagtcaccctgtctacgtctccaggggaaagagccaccctctcctgcagggccagtcagagtgttggcagcgacttagcctggtatcagcagaaacctggccaggctcccaggctcctcatctatggtgcatccaccagggccactggtgttccagtcaggttcagtggcagtgggtctgggactgacttcactctcaccatcagcagcccacagtctgaagatgttggagtttattactgtcagcactatcatgggtggcctctcactttcggcggagggaccaaggtggacatcaaa

SEQ ID NO: 9005 - DNA, 321 bp, Artificial Sequence
  Synthetic polynucleotide encoding artificial human antibody VL domain
gacatccagatgacccagtctccatcctccctgtctgcatctgtcggagacagagtcaccatcacttgccgggcaagtgagaacattaacaactttgttaattggtatcagcagaaaccagggaaagcccctaagctcctgatctatgctgcctccggtttgcaaagtggggtcccgtcgaggttcagcggcggtgggtctgggacacatttcactctcaccatcagcagtctgcaacctgaagattttgcagtttactcctgtcagcagagtctcactatcccgctcactttcggcggagggaccaaggtggagatcaaa

SEQ ID NO: 9006 - DNA, 330 bp, Artificial Sequence
  Synthetic polynucleotide encoding artificial human antibody VL domain
cagtctgtgctgactcagccaccctcagcgtctgggacccccgggcagagggtcaccatctcttgttctggaagcagctccaacatcggaagtaatactgtaaactggtaccagcagctcccaggaacggcccccaaactcctcatctatagtaataatcagcggccctcaggggtccctgaccgattctctggctccaagtctggcacctcagcctccctggccatcagtgggctccagtctgaggatgaggctgattattactgtgcagcatgggatgacagcctgaatggtgtggtattcggcggagggaccaagctgaccgtccta

SEQ ID NO: 9007 - DNA, 324 bp, Artificial Sequence
  Synthetic polynucleotide encoding artificial human antibody VL domain
tcctatgacctgacacagccaccctcggtgtcagtgtccccaggacagacggccaggatcacctgctctggagatgcattgacaaagcaatatggttattggtaccaacagaagccaggccaggcccctatattgttaatatataaagacactgagaggccctcagggatccctgagcgattctctggctccagctcagggacaacagtcacgttgaccatcagtggagtcgaggcggcagacgaggctgactattattgtcaatcagcagacaccagtggtagtcctgtggttttcggcggagggaccaagctgaccgtccta

SEQ ID NO: 9008 - DNA, 321 bp, Artificial Sequence
  Synthetic polynucleotide encoding artificial human antibody VL domain
gccatccagatgacccagtttccatcctccctgtctgcgtctgtaggagacagagtcaccatcacttgccgggcaagtcagggcattagagatgatttaggctggtatcagcagaaaccagggaaagcccctaacctcctgatctatactgcatccaatttacaaggtggggtcccatcaaggttcagcggcagtggatttggcacagagttcactctcaccatcagcagcctgcagcctgaagattttgcaacttattattgtctacaacattacaattacccgtacacttttggccaggggaccaagctgcagatcaaa

SEQ ID NO: 9009 - DNA, 318 bp, Artificial Sequence
  Synthetic polynucleotide encoding artificial human antibody VL domain
tcctatgagctgacacagccaccctcggtgtcagtgtccccaggacagacggccacgatcacctgctctggagatgcattgccaaagcaatatgcttattggtaccagcagaagccaggccaggcccctgtgctggtgatatataaagacagtgagaggccctcagggatccctgagcgattctctggctccagctcagggacaacagtcacgttgaccatcagtggagtccaggcagaagacgaggctgactattactgtcaatcagcagacagcagtggtactgtattcggcggagggaccaagctgaccgtccta

SEQ ID NO: 9010 - DNA, 330 bp, Artificial Sequence
  Synthetic polynucleotide encoding artificial human antibody VL domain
cagtctgtgctgacgcagccgccctcagtgtctggggccccagggcagagggtcaccatctcctgcactgggagcagctccaacatcggggcaggttatgatgtacactggttccagcagcttccaggaacagcccccaaactcctcatctatgttaccaacaaacggccctcaggagtccctgaccgattctctggctccaagtctggcacctcagcctccctggccatcactgggctccagcctgaggatgaggctgattattactgccagtcctatgacatcaccctaagttttgtcttcggaactgggaccaaggtcaccgtccta

SEQ ID NO: 9011 - DNA, 324 bp, Artificial Sequence
  Synthetic polynucleotide encoding artificial human antibody VL domain
gaaattgtgttgacgcagtctccaggcaccctgtctttgtctccaggggaaagagccaccctctcctgcagggccagtcagagtgttagcagcagctacttagcctggtaccagcagaaacctggccaggctcccaggctcctcatctatggtgcatccagcagggccactggcatcccagacaggttcagtggcagtgggtctgggacagacttcactctcaccatcagcagactggagcctgaagattttgcagtgtattactgtcagcagtatggtagctcaccgctcactttcggcggagggaccaaggtggagatcaaa

SEQ ID NO: 9012 - DNA, 327 bp, Artificial Sequence
  Synthetic polynucleotide encoding artificial human antibody VL domain
tcctatgtcctgactcagcccccgtctctgtcagtggccccagaagagacggccaacattccctgtgggggaaagagtattggcagcaaaaatgtccactggtaccaacagaggccaggccaggcccctctactggtcatccgttatgatagtgaccggccctcagggatccctgcgcgattctctggctccaactctgggaacacggccaccctgaccatcagcagtgtcgaagccgcggatgaggccgtctattattgtcaaatgtgggatccttttggtgatcatcctgtggttttcggcggagggaccaggctgaccgtccta

SEQ ID NO: 9013 - DNA, 321 bp, Artificial Sequence
  Synthetic polynucleotide encoding artificial human antibody VL domain
gacatccagttgacccagtctccatcctccctgtctgcatctgtaggagacagagtcaccatcacttgccgggccagtcagggcattagcagttatttagcctggtatcagcaaaaaccagggaaagcccctaagctcctgatctatgctgcatccactttgcaaagtggggtcccatcaaggttcagcggcagtggatctgggacagatttcactctcaccatcagcagcctgcagcctgaagattttgcaacttattactgtcaacagcttaatagttaccctatcaccttcggccaagggacacgactggagattaaa

SEQ ID NO: 9014 - DNA, 321 bp, Artificial Sequence
  Synthetic polynucleotide encoding artificial human antibody VL domain
gaaatattgatgacacagtctccagtcaccctgtccgtgtctccaggggaaggagtcaccctctcctgcaggaccagtcaaactgtgaggagtaaattatcctggtaccagttcaaacctggccaggctcccaggctcgtcgtgtatgatgtttccgccagggcctctggcgtcccggccaggttcagtggcagggggtctgggacagagttcactctcaccatcagcggcctgcagtctgaggattttggcgtgtattattgtcagcagtctgatgactggccgttaactttcggcggagggaccaaggtggagatcaaa

SEQ ID NO: 9015 - DNA, 321 bp, Artificial Sequence
  Synthetic polynucleotide encoding artificial human antibody VL domain
gaaattgtgttgacgcagtctccaggcaccctgtctttgtctccaggggaaagagccaccctctcctgcagggccagtgagagtgttagcaggagctacttagcctggtaccagcagaaacctggccaggctcccaggctcctcatctttggaggctccagcagggccactggcatcccagacaggttcagcggcggtgggtctgggacagacttcactctcaccatcagcagactggaacctgaagattttgcagtgtattactgtcagcagtatagtacttcacctctttttggccaggggaccaagctggagatcaaa

SEQ ID NO: 9016 - DNA, 336 bp, Artificial Sequence
  Synthetic polynucleotide encoding artificial human antibody VL domain
gatattgtgatgacccagactccactctcctcacctgtcacccttggacagccggcctccatctcctgcaggtctagtcaaagcctcgtgcacagtgatggaaacacctacttgagttggcttcagcagaggccaggccagcctcctagactcctaatttataagatttctaaccggttctctggggtcccagacagattcagtggcagtggggcagggacagacttcacactgagaatcagcagggtggaagctgaggatgtcggagtttattactgcatgcaagctacacaatttcctcagacgttcggccaagggaccaaggtggaaatcaaa

SEQ ID NO: 9017 - DNA, 330 bp, Artificial Sequence
  Synthetic polynucleotide encoding artificial human antibody VL domain
cagactgtggtgacccaggagccatcgttctcagtgtcccctggagggacagtcacgctcacttgtggcttgagttctggctcagtctctactagtcactaccccagctggtaccagcagaccccaggccaggctccacgcacgctcatctacagcacagacactcgttcttctggggtccctgatcacttctctggctccatccttgggaacaaagctgccctcactatcacgggggcccaggcagatgatgaatctgattattactgtgtgctgtatatgggtggtggcatttgggtgttcggcggagggaccaagctgaccgtccta

SEQ ID NO: 9018 - DNA, 324 bp, Artificial Sequence
  Synthetic polynucleotide encoding artificial human antibody VL domain
tcctatgagctgacacagccaccctcggtgtcagtgtccccaggacaaacggccaggatcacctgctctggagattcattgccaaaaaaatatgcttattggtaccagcagaagtcaggccaggcccctgtgctggtcatctatgaggacaacaaacgaccctccgggatccctgagagattctctggctccagctcagggacattggccaccttgactatcagtggggcccaggtggaggatgaagctgactactactgttattcaacagacagcagtggtaatcgttgggtgtttggcggagggaccaagctgaccgtccta

SEQ ID NO: 9019 - DNA, 321 bp, Artificial Sequence
  Synthetic polynucleotide encoding artificial human antibody VL domain
gacatccagatgacccagtctccatcctccctgtctgcctctgtgggagacagagtcaccatcacttgccgggcaagtcagagcattagcacctatttaaattggtatcaacagaaacccggtaaagcccctaacctcctcatctatggtgcatccagtttgcaaactggggtcccatcgaggttcactggcagtgggtctgggacaggtttcactctcaccatcaacactctgcaacctgaggattttgcaacttactactgtcaacagacttacagtgcccctcggacgttcggccaggggaccaaggtggaaatcaaa

SEQ ID NO: 9020 - DNA, 321 bp, Artificial Sequence
  Synthetic polynucleotide encoding artificial human antibody VL domain
tcctatgagttgattcagccaccctcagtgtcagtgtctccgggacagacagccaacatcacatgctcaggagatgggctgacaagaaaatatgttcggtggttccaacagaagccaggccaggcccctgtgtcggtgatttatagagacattgagcggccctcagggatccctgagcgattcgccggctctaggtcagggaacacagtcacgttgaccatctccggggcccacgttgacgatgaggctgactactactgttattcttggactgacaacaatttaggacttttcggcggagggaccaaggtgactgtccta

SEQ ID NO: 9021 - DNA, 321 bp, Artificial Sequence; identical to SEQ ID NO: 8984
  Synthetic polynucleotide encoding artificial human antibody VL domain

SEQ ID NO: 9022 - DNA, 333 bp, Artificial Sequence
  Synthetic polynucleotide encoding artificial human antibody VL domain
cagtctgccctgactcagcctgcctccgtgtctgggtctcctggacagtcgatcaccatctcctgcactggaaccagcagtgacgttggtggttataactttgtctcctggtaccaacaacacccaggcaaagcccccaaactcatgatttatgatgtcagtaatcggccctcaggggtttctaatcgcttctctggctccaagtctggcaacacggcctccctgaccatctctgggctccaggctgaggacgaggctgattattactgcagctcatatacaaacagcagcactctaagggtattcggcggagggaccaagctgaccgtccta

SEQ ID NO: 9023 - DNA, 330 bp, Artificial Sequence
  Synthetic polynucleotide encoding artificial human antibody VL domain
cagtctgtgctgacgcagccgccctcagtgtctggggccccaggacagagggtcaccatctcctgcactgggaccagctccgacctcggggcaggttatgatgtacactggtaccagtcccttccaggaacagcccccaaactcctcatctatgataccaacactcggccctcaggggtccctgaccgattctctggctccaagtctggcacctcagcctccctggccatcgctggactccaggctgaggatgaggctgattatttctgccagtcctttgacagcagcccgcaagtggtgttcggcggagggaccaagctgaccgtccta

SEQ ID NO: 9024 - DNA, 327 bp, Artificial Sequence
  Synthetic polynucleotide encoding artificial human antibody VL domain
cagactgtggtgactcaggagccctcactgactgtgtccccaggagggacagtcactctcacgtgtgcttccaatatgggaccagtcaccacttcttactatacaaactggttccagcagaagcctggacaaagacccagggcactcatttatactacgaataaggcacactcctggacccctgtccgcttctcaggctccctccttggggacaaggctgccctgacagtgtcagatgtgcagcccgaagacgaggccgactattactgcctgctcttttacggtggaatatggatgttcggcggggggaccaagttgaccgtccta

SEQ ID NO: 9025 - DNA, 336 bp, Artificial Sequence
  Synthetic polynucleotide encoding artificial human antibody VL domain
gatattgtgatgactcagtctccactctccctgcccgtcacccctggagagccggcctccatctcctgcaggtctagtcagagcctcctgcatagtaatggatacaactatttggattggtacctgcagaagccagggcagtctccacagctcctgatctatttgggttctaatcgggcctccggggtccctgacaggttcagtggcagtggatcaggcacagattttacactgaaaatcagcagagtggaggctgaggatgttggggtttattactgcatgcaagctctacaaactgggtacacttttggccaggggaccaagctggagatcaaa

SEQ ID NO: 9026 - DNA, 324 bp, Artificial Sequence
  Synthetic polynucleotide encoding artificial human antibody VL domain
tcttctgagctgactcaggaccctgctgtgtctgtggccttgggacagacagtcaggatcacatgccaaggagacagcctcagaagctattatgcaagctggtaccagcagaagccaggacaggcccctgtacttgtcatctatggtaaaaacaaccggccctcagggatcccagaccgattctctggctccagctcaggaaacacagcttccttgaccatcactggggctcaggcggaagatgaggctgactattactgtaactcccgggacagcagtggtaaccatcaagtattcggcggagggaccaagctgaccgtccta

SEQ ID NO: 9027 - DNA, 330 bp, Artificial Sequence
  Synthetic polynucleotide encoding artificial human antibody VL domain
cagtctgccctgactcagcctgcctccgtgtctgggtctcctggacagtcgatcaccatctcctgcactggaaccagcagtgatgttgggagttataaccttgtctcctggtaccaacagcacccaggcaaagcccccaaactcatgatttatgagggcagtaagcggccctcaggggtttctaatcgcttctctggctccaagtctggcaacacggcctccctgacaatctctgggctccaggctgaggacgaggctgattattactgctgctcatatgcaggtagtagcactttggtattcggcggagggaccaagctgaccgtccta

SEQ ID NO: 9028 - DNA, 321 bp, Artificial Sequence
  Synthetic polynucleotide encoding artificial human antibody VL domain
gaaattgtgttgacacagtctccagccaccctgtctttgtctccaggggaaagagccaccctctcctgcagggccagtcggagtgttagcagctccttagcctggtaccaacagaaacctggccaggctcccaggctcctcatctatgatgcatccaacagggccactggcatcccagccaggttcagtggcactgggtctgggacagacttcactctcaccatcagcagcctagagcctgaagattttgcagtttattactgtcaacaacgtagcaactggccattcactttcggccctgggaccaaagtggatatcaaa

SEQ ID NO: 9029 - DNA, 321 bp, Artificial Sequence
  Synthetic polynucleotide encoding artificial human antibody VL domain
gacatccagatgacccagtctccatcttccgtgtctgcatctgtaggagacagagtcaccatcacttgtcgggcgagtcagggtattagcggctggttaggctggtatcagcagaaaccagggaaagcccctaagctcctgatctatgctgcatccagtttgcaaagtggggtcccatcaaggttcagcggcagtggttctgggacagatttcactctcaccatcagcagcctgcagcctgaagattttgcaacttactattgtcaacaggctaacagtttcccgtacacttttggccaggggaccaagctggagatcaaa

SEQ ID NO: 9030 - DNA, 312 bp, Artificial Sequence
  Synthetic polynucleotide encoding artificial human antibody VL domain
cagtctgccctgagtcaacctgcctccgtgtctgcatctcctggacagtcggtcaccatttcatgcaccggagccaggggtgacgatgtctcctggtaccacctttcccctggcaaggcccccaagttccttatttatgatgtcagtgtgaatccctcgggggtttctaatcgcttctctggctccaagtctggcgacacggcctccctgaccatctctggcctccaggctgacgacgagggtgattatttctgcagttcatatgaaattgattcttggctgttcggcggagggaccactctgaccgtccta

SEQ ID NO: 9031 - DNA, 315 bp, Artificial Sequence
  Synthetic polynucleotide encoding artificial human antibody VL domain
tcctatgggttgactcaaccaccctcagtgtccgtgtccccgggacagacagccaccatctcctgctctggatatgaagtgggaaatgcaaatacttgttggtatcagcagaagccaggccagtcccctgtcttggtcatctatcaaaatactaaacggccctttgggatccctgagcggttctctggctccaattctggggtcacagccactctgaccatcagcgggattcaggctccggatgaggctgtctattactgtcaggcgtggggcagccgcgtggttttcggcggagggaccaagctgaccgtccta

SEQ ID NO: 9032 - DNA, 321 bp, Artificial Sequence
  Synthetic polynucleotide encoding artificial human antibody VL domain
gacatccagatgacccagtctccatctgtcatgtctgcatctgtaggagacagggtcaccatcacttgtcgggcgagtcaggacattagcaattatgtagcctggtttcagcagaaaccggggaaagtccctaagcgcctgatttatgttgcatccaatttacaaagtggggtcccagcgaggttcagcggcagtggatctgggacagaattcactctcacaatcagcagcctgcagcctgaggattttgcgacttattactgtttacagcatgacagtttccctcgaacgttcggccaagggaccaaggtggaaatcaaa

SEQ ID NO: 9033 - DNA, 315 bp, Artificial Sequence
  Synthetic polynucleotide encoding artificial human antibody VL domain
gacatccagatgacccagtctccttccaccctgtctgcctctgtaggagacagaatcaccatgacttgccgggccagtcagagtgttagtaggtggttggcctggtatcaggagaaaccagggaaagccccgaagctcctcatctatcaggcgtctactttacagagtggggtcccatcaaggttcagaggcagtggatctgggacagacttcagtctctccatcagcagcctgcagcctgatgactttgcaacctattactgccaacaatataagacccatacattcggccaagggaccaaggtggaaatcaaa

SEQ ID NO: 9034 - DNA, 324 bp, Artificial Sequence
  Synthetic polynucleotide encoding artificial human antibody VL domain
gaaattgtgttgacgcagtctccaggcaccctgtctttgtctccaggggaaagagccaccctctcctgcagggccagtcagagtgttagcagcaattacttagcctggtaccagcagaaacctagccaggctcccaggctcctcatctatggtgcatccagcagggccactggcatcccagacaggttcagtggcagtgggtctgggacagacttcactctcaccatcagtagactggagcctgaagattttgcagtgtattactgtcagcagtctggtagttcacctaagacgttcggccaagggaccaaggtggaaatcaaa

SEQ ID NO: 9035 - DNA, 330 bp, Artificial Sequence
  Synthetic polynucleotide encoding artificial human antibody VL domain
cagtctgccctgactcagcctccctccgtgtccgggtctcttggacagtctgtcaccatctcctgctctggaagcaatagcgacatttatggttatgcccgtgtctcctggtaccaacagttcccaggcacagcccccaaagtcttggtttatgaggtcactaatcggccctcaggggtccctgatcgcttctctgggtccaagtctggccacacggcctccctgacaatctctgggctccaggctgaggacgaggctgattattactgcgcctcatatacaactagtggcactgtggttttcggcggagggaccaagctgaccgtccta

SEQ ID NO: 9036 - DNA, 330 bp, Artificial Sequence
  Synthetic polynucleotide encoding artificial human antibody VL domain
cagtctgtgctgactcagccaccctcagcgtctgggacccccgggcagagggtcaccatctcttgttctggaagcagctccaacatcggaagtaattatgtatactggtaccagcagctcccaggaacggcccccaaactcctcatctataggaataatcagcggccctcaggggtccctgaccgattctctggctccaagtctggcacctcagcctccctggccatcagtgggctccggtccgaggatgaggctgattattactgtgcagcatgggatgacagcctgagtggtccggtattcggcggagggaccaagctgaccgtccta

SEQ ID NO: 9037 - DNA, 324 bp, Artificial Sequence
  Synthetic polynucleotide encoding artificial human antibody VL domain
gaaattgtgttgacgcagtctccaggcaccctgtctttgtctccaggggaaagagccaccctctcctgcagggccagtcagagtgttagcagcagctacttagcctggtaccagcagaaacctggccaggctcccaggctcctcatctatggtgcatccagcagggccactggcatcccagacaggttcagtggcagtgggtctgggacagacttcactctcaccatcagcagactggagcctgaagattttgcagtgtattactgtcagcagtatggtagctcatcgctcactttcggcggagggaccaaggtggagatcaaa

SEQ ID NO: 9038 - DNA, 339 bp, Artificial Sequence
  Synthetic polynucleotide encoding artificial human antibody VL domain
cagtctgtgctgacgcagccgccctcagtgtctggggccccagggcagagggtcaccatctcctgcactgggagcagctccaacatcggggcaggttatgatgtacactggtaccagcagcttccaggaacagcccccaaactcctcatctatggtaacagcaatcggccctcaggggtccctgaccgattctctggctccaagtctggcacctcagcctccctggccatcactgggctccaggctgaggatgaggctgattattactgccagtcctatgacagcagcctgagtggttggcatgtggtattcggcggagggaccaagctgaccgtccta

SEQ ID NO: 9039 - DNA, 330 bp, Artificial Sequence; identical to SEQ ID NO: 9027
  Synthetic polynucleotide encoding artificial human antibody VL domain

SEQ ID NO: 9040 - DNA, 327 bp, Artificial Sequence
  Synthetic polynucleotide encoding artificial human antibody VL domain
cagactgtggtgactcaggagccctcagtgactgtgtccccaggagggacagtaactctcacctgtgcttccaacactggaacaatcaccagtctgtactatgcaagctggttccagcagaaacctggacaacctcccaggccactaatttataacacacaagacagacactcttggacccctgcccgcttttcaggcttcctccttgggggcaaagctgccctgatgctgtcagatgtggtgcctgaggacgaggcagattattattgcctcttttattatcgagcctcttatgtcttcgggcctggaaccagggtctccgtccta

SEQ ID NO: 9041 - DNA, 321 bp, Artificial Sequence
  Synthetic polynucleotide encoding artificial human antibody VL domain
gaaattgtgttgacacagtctccagccaccctgtctttgtctccaggggaaagagccaccctctcctgcagggccagtcagactattagcagctacttagcctggtaccaacagaaacctggccaggctcccaggctcctcatctatgatgcatccaacagggccactggcatcccagccaggttcagtggcagtgggtctgggacagacttctctctcaccatcagcagcctagagcctgaagattttgcagtttattactgtcagcagcgtagcgactggccgatcaccttcggccaagggacacgactggagattaaa

SEQ ID NO: 9042 - DNA, 330 bp, Artificial Sequence; identical to SEQ ID NO: 8934
  Synthetic polynucleotide encoding artificial human antibody VL domain

SEQ ID NO: 9043 - DNA, 333 bp, Artificial Sequence
  Synthetic polynucleotide encoding artificial human antibody VL domain
gatattgtggtgactcagtctccaccctccctgcccgtcacccctggagagccggcctccatctcctgcaggtctagtcagagcctcttggatagaaatggccacaactgtttggattggtacctgcagaagccagggcagtctccacaagtcctgatctatttggcctctaatcgggcccccggggtccctgacaggttcagtggcagtggatcaggcaaagattttacactgaaaatcagcagagtggaggctgaggatgttgggatttattactgcgttcaatctctacaatcgtggacgttcggccaagggaccaaggtggaaatcaaa

SEQ ID NO: 9044 - DNA, 330 bp, Artificial Sequence
  Synthetic polynucleotide encoding artificial human antibody VL domain
cagtctgccctgactcagcctgcctccgtgtctgggtctcctggacagtcgatcaccatctcctgcactggaaccagcagtgatgttgggagttataaccttgtctcctggtaccaacagcacccaggcaaagcccccaaactcatgatttatgaggtcagtaagcggccctcaggggtttctaatcgcttctctggctccaagtctggcaacacggcctccctgacaatctctgggctccaggctgaggacgaggctgattattactgctgctcatatgcaggtagtagcacttatgtcttcggaactgggaccaaggtcaccgtccta

SEQ ID NO: 9045 - DNA, 321 bp, Artificial Sequence
  Synthetic polynucleotide encoding artificial human antibody VL domain
gacatccagatgacccagtctccttccaccctgtctgcatctgtaggagacagagtcaccatcacttgccgggccagtcagagtattagtagctggttggcctggtatcagcagaaaccagggaaagcccctaagctcctgatctataaggcgtctagtttagaaagtggggtcccatcaaggttcagcggcagtggatctgggacagaattcactctcaccatcagcagcctgcagcctgatgattttgcaacttattactgccaacagtataatagttactctcggacgttcggccaagggaccaaggtggaaatcaaa

SEQ ID NO: 9046 - DNA, 324 bp, Artificial Sequence
  Synthetic polynucleotide encoding artificial human antibody VL domain
tcctatgtgctgactcagccaccctcggtgtcagtggccccaggaaagacggccaggattacctgtgggggaaacaacattggaagtaaaagtgtgcactggtaccagcagaagccaggccaggcccctgtgctggtcgtctatgatgatagcgaccggccctcagggatccctgagcgattctctggctccaactctgggaacacggccaccctgaccatcagcagggtcgaagccggggatgaggccgactattactgtcaggtgtgggatagtagtagtgatcaagtggtattcggcggagggaccaagctgaccgtccta

SEQ ID NO: 9047 - DNA, 321 bp, Artificial Sequence
  Synthetic polynucleotide encoding artificial human antibody VL domain
gacatccagatgacccagtctccttccaccctgtctgcatctgtaggagacagagtcaccatcacttgccgggccagtcagagtattagtagctggttggcctggtatcagcagaaaccagggaaagcccctaagctcctgatctataaggcgtctagtttagaaagtggggtcccatcaaggttcagcggcagtggatctgggacagaattcactctcaccatcagcagcctgcagcctgatgattttgcaacttattactgccaacagtataatagttattctaggacgttcggccaagggaccaaggtggaaatcaaa

SEQ ID NO: 9048 - DNA, 324 bp, Artificial Sequence
  Synthetic polynucleotide encoding artificial human antibody VL domain
gaaattgtgttgacacagtctccagccaccctgtctttgtctccaggggaaagagccaccctctcctgcagggccagtcagagtgttagcagctacttagcctggtaccaacagaaacctggccaggctcccaggctcctcatctatgatgcatccaacagggccactggcatcccagccaggttcagtggcagtgggtctgggacagacttcactctcaccatcagcagcctagagcctgaagattttgcagtttattactgtcagcagcgtagcaactggccttcgatcaccttcggccaagggacacgactggagattaaa

SEQ ID NO: 9049 - DNA, 321 bp, Artificial Sequence; identical to SEQ ID NO: 8765
  Synthetic polynucleotide encoding artificial human antibody VL domain

SEQ ID NO: 9050 - DNA, 327 bp, Artificial Sequence
  Synthetic polynucleotide encoding artificial human antibody VL domain
caggctgtgctgactcaggagccctcattgactgtgtccccaggagggacagtcactctcacctgtgactccagcactggaactgtcaccagtggtcattatccctactggatccagcagaagcctggccaagcccccaggacactgatttatgatacaaacaacaaacactcctggacacctgcccggttctctggctccctccttgggggcaaacctgtcctgaccctttcggatgcgcagcctgaggatgaggctgagtattactgcttgctctcctttggtactgctcgggtatttggcggagggaccaagcttaccgtccta

SEQ ID NO: 9051 - DNA, 336 bp, Artificial Sequence
  Synthetic polynucleotide encoding artificial human antibody VL domain
gatattgtgatgacccagactccactctcctcacctgtcacccttggacagccggcctccatctcctgcaggtctagtcaaagcctcgtacacagtgatggaaacacctacttgagttggcttcagcagaggccaggccagcctccaagactcctaatttataagatttctaaccggttctctggggtcccagacagattcagtggcagtggggcagggacagatttcacactgaaaatcagcagggtggaagctgaggatgtcggggtttattactgcatgcaagctacacaatttcccctcaccttcggccaagggacacgactggagattaaa

SEQ ID NO: 9052 - DNA, 321 bp, Artificial Sequence
  Synthetic polynucleotide encoding artificial human antibody VL domain
gacatccagatgacccagtctccgtcctccctgtctgcatccataggagacagagtcaccatcacttgccaggcgagtcaggacattaggagatatttaaattggtatcagcagaaaccagggaaagcccctaagctcctgatctacgatgtgtctattttggaaagaggggtcccatcaaggttcagtggaagtgggtccgggacagattttagtctcactatcagcagcctgcaggctgaagattttgcaacatatttttgtcaacactatgatagtctgcctccaactttcggcggggggaccaaggtggagatcaaa

SEQ ID NO: 9053 - DNA, 333 bp, Artificial Sequence
  Synthetic polynucleotide encoding artificial human antibody VL domain
cagtctgccctgactcagcctccctccgcgtccgggtctcctggacagtcagtcaccatctcctgcactggaaccagcagtgacgttggtggttataactatgtctcctggtaccaacagcacccaggcaaagcccccaaactcatgatttatgaggtcagtaagcggccctcaggggtccctgatcgcttctctggctccaagtctggcaacacggcctccctgaccgtctctgggctccaggctgaggatgaggctgattattactgcagctcatatgcaggcagcaacaatcccgtggtattcggcggagggaccaagctgaccgtccta

SEQ ID NO: 9054 - DNA, 330 bp, Artificial Sequence; identical to SEQ ID NO: 8852
  Synthetic polynucleotide encoding artificial human antibody VL domain

SEQ ID NO: 9055 - DNA, 318 bp, Artificial Sequence; identical to SEQ ID NO: 8811
  Synthetic polynucleotide encoding artificial human antibody VL domain

SEQ ID NO: 9056 - DNA, 330 bp, Artificial Sequence; identical to SEQ ID NO: 8925
  Synthetic polynucleotide encoding artificial human antibody VL domain

SEQ ID NO: 9057 - DNA, 321 bp, Artificial Sequence
  Synthetic polynucleotide encoding artificial human antibody VL domain
gaaattgtgttgacgcagtctccaggcaccctgtctttgtctccaggggaaggagccaccctctcctgcagggccagtgaagttgtgactaataattacttagcctggtatcagcagagatctggccagcctcccaggctcctcatctatgctacatcccgcaggcccagtggcatcccagacaggttcagtggcagtgggtccggaactgacttcactctcaccatcagcagactggagcccgaggactttgcagtttattactgtcaacagtatggtagttcacggacgttcggccaggggaccaaggtggaaatcaaa

SEQ ID NO: 9058 - DNA, 330 bp, Artificial Sequence
  Synthetic polynucleotide encoding artificial human antibody VL domain
cagtctgccctgactcagcctgcctccgtgtctgggtctcctggacagtcgatcaccatctcctgcactggatccaacagtgacattggtgcttatgactatgtctcctggtaccagcaacacccaggcagagcccccagagtcatgatttatgatgtcagtgatcggccctcaggggtttctcatcgcttctctggctccaagtctggcatcacggcctccctgaccatctctggcctccagcctgaagacgaggctgactattactgctgctcatatacaagcagcagcacttgggtgttcggcggagggaccaggctgaccgtccta

SEQ ID NO: 9059 - DNA, 339 bp, Artificial Sequence
  Synthetic polynucleotide encoding artificial human antibody VL domain
gacatcgtgatgacccagtctccagactccctggctgtgtctctgggcgagagggccaccatcaactgcaagtccagccagagtgttttatacagctccaacaataagaactacttagcttggtaccagcagaaaccaggacagcctcctaagctgctcatttactgggcatctacccgggaatccggggtccctgaccgattcagtggcagcgggtctgggacagatttcactctcaccatcagcagcctgcaggctgaagatgtggcagtttattactgtcagcaatattatagtactcctcagacgttcggccaagggaccaaggtggaaatcaaa

SEQ ID NO: 9060 - DNA, 330 bp, Artificial Sequence
  Synthetic polynucleotide encoding artificial human antibody VL domain
cagtctgtgttgacgcagccgccctcagtgtctgcggccccaggacagaaggtcaccatctcctgctctggaagcagctccaacattgggaataattatgtatcctggtaccagcagctcccaggaacagcccccaaactcctcatttatgacaataataagcgaccctcagggattcctgaccgattctctggctccaagtctggcacgtcagccaccctgggcatcaccggactccagactggggacgaggccgattattactgcggaacatgggatagcagcctgagtgctgtggtattcggcggagggaccaagctgaccgtccta

SEQ ID NO: 9061 - DNA, 330 bp, Artificial Sequence
  Synthetic polynucleotide encoding artificial human antibody VL domain
cagtctgccctgactcagcctcgctcagtgtccgggtctcctggacagtcagtcaccatctcctgcactggaaccagcagtgatgttggtggttataactatgtctcctggtaccaacagcacccaggcaaagcccccaaactcatgatttatgatgtcagtaagcggccctcaggggtccctgatcgcttctctggctccaagtctggcaacacggcctccctgaccatctctgggctccaggctgaggatgaggctgattattactgctgctcatatgcaggcagctacactttcgtattcggcggagggaccaagctgaccgtccta

SEQ ID NO: 9062 - DNA, 339 bp, Artificial Sequence
  Synthetic polynucleotide encoding artificial human antibody VL domain
gacatcgtgatgacccagtctccagactccctggctgtgtctctgggcgagagggccaccatcaactgcaagtccagccagagtgttgtatacagctccaacaataagaactacttagcttggtaccagcagaaaccaggacagtctcctaagctgctcatttacggggcaggaaaccgggaatccggggtccctgaccgattcagtggcagcgggtctgggacagatttcactctcaccatcagcagcctgcagactgaagatgtggcagtttattactgtcagcaatattctagtactccattcactttcggccctgggaccaaagtagaaatcaaa

SEQ ID NO: 9063 - DNA, 330 bp, Artificial Sequence
  Synthetic polynucleotide encoding artificial human antibody VL domain
cagtctgccctgactcagcctgcctccgtgtctgggtctcctggacagtcgatcaccatctcctgcactggaaccagcagtgatgttgggagttataaccttgtctcctggtaccaacagcacccaggcaaagcccccaaactcatgatttatgaggtcagtaagcggccctcaggggtttctaatcgcttctctggctccaagtctggcaacacggcctccctgacaatctctgggctccaggctgaggacgaggctgattattactgctgctcatatgcaggtagtagcactgtggtattcggcggagggaccaagctgaccgtccta

SEQ ID NO: 9064 - DNA, 330 bp, Artificial Sequence
  Synthetic polynucleotide encoding artificial human antibody VL domain
cagtctgccctgactcagcctgcctccgtgtctgggtctcctggacagtcgatcaccatctcctgcactggaaccagcagtgacgttggtggttataactatgtctcctggtaccaacaacacccaggcaaagcccccaaactcatgatttatgatgtcaataatcggccctcagggctttctaatcgcttctctggctccaagtctggcaacacggcctccctgaccatctctgggctccaggctgaggacgaggctgattattactgcggctcatatacaagcagcagcactctgctcttcggaactgggaccaaggtcaccgtccta

SEQ ID NO: 9065 - DNA, 321 bp, Artificial Sequence
  Synthetic polynucleotide encoding artificial human antibody VL domain
gacatccagatgacccagtctccttccaccctgtctgcatctgtaggagacagagtcaccatcacttgccgggccagtcagagtattagtagctggttggcctggtatcagcagaaaccagggaaagcccctaagctcctgatctataaggcgtctagtttagaaagtggggtcccatcaaggttcagcggcagtggatctgggacagaattcactctcaccatcagcagcctgcagcctgatgattttgcaacttattactgccaacagtataatagttatgaggggacgttcggccaagggaccaaggtggaaatcaaa

SEQ ID NO: 9066 - DNA, 321 bp, Artificial Sequence
  Synthetic polynucleotide encoding artificial human antibody VL domain
gacatccagatgacccagtctccatcctccctgtctgcatctgtcggagacagagtcaccatcacttgccggacaagtcagagcattagcaggtatttaaattggtatcagcagaggcctggaaaagcccctaaactcctgatctatcaaacatccaatttgcaaagtggggtcccatcaaccttcagtggcagtggatatgggacagatttcactctcaccatcagaagtctgcaacctgaagattttgcaacttactactgtcaacagagttacagtacccccttcactttcggccctgggaccaaagtggatatcaaa

SEQ ID NO: 9067 - DNA, 321 bp, Artificial Sequence
  Synthetic polynucleotide encoding artificial human antibody VL domain
gacatccagatgacccagtctccatcctccctgtctgcatctgttggagacagagtcaccatcacttgccgggcaagtcagcacattagacatgatttaggctggtttcagcagaagccagggaaagcccctgagcgcctgatctatgctgcatccactttgcaaagtggagtcgcatcaaggttcagcggcagtggatctgggacagaattcactctcacaatcagcagcctacagcctgaagattttgcaacttattactgtctacagcataatacttaccctcggacgttcggccaagggaccaaggtggaaatcaaa

SEQ ID NO: 9068 - DNA, 321 bp, Artificial Sequence
  Synthetic polynucleotide encoding artificial human antibody VL domain
gacatccagatgacccagtctccttccaccctgtctgcatctgtaggagacagagtcaccatcacttgccgggccagtcagagtattagtagctggttggcctggtatcagcagaaaccagggaaagcccctaagctcctgatctataaggcgtctagtttagaaagtggggtcccatcaaggttcagcggcagtggatctgggacagaattcactctcaccatcagcagcctgcagcctgatgattttgcaacttattactgccaacagtataatagttattcgtacacttttggccaggggaccaagctggagatcaaa

SEQ ID NO: 9069 - DNA, 333 bp, Artificial Sequence
  Synthetic polynucleotide encoding artificial human antibody VL domain
gacatcgtgatgacccagtctccagactccctggctgtgtctctgggcgagagggccaccatcaactgcaagtccagccagagtgttttagacggctccaacaataacttagcttggtaccagcagaaaccaggacagcctcctaagctgctcatttactgggcatctacccgggaatccggggtccctgaccgattcagtggcagcgggtctgggacagatttcactctcaccatcagcagcctgcaggctgaagatgtggcagtttattactgtcagcaatattatagtaggccttggacgttcggccaagggaccaaggtggaaatcaaa

SEQ ID NO: 9070 - DNA, 324 bp, Artificial Sequence
  Synthetic polynucleotide encoding artificial human antibody VL domain
gaaattgtgttgacgcagtctccaggcaccctgtctttgtctccaggggaaagagccaccctctcctgcagggccagtcagagtgttagcagcagctacttagcctggtaccagcagaaacctggccaggctcccaggctcctcatctatggtgcatccagcagggccactggcatcccagacaggttcagtggcagtgggtctgggacagacttcactctcaccatcagcagactggagcctgaagattttgcagtgtattactgtcagcagtatggtagctcattgtggacgttcggccaagggaccaaggtggaaatcaaa

SEQ ID NO: 9071 - DNA, 321 bp, Artificial Sequence
  Synthetic polynucleotide encoding artificial human antibody VL domain
gaaattgtgttgacacagtctccagccaccctgtctttgtctccaggggaaagagccaccctctcctgcagggccagtcagagtattagcagctacttagcctggtaccaacagaaacctggccaggctcccaggctcctcatctatgatgcatccaacagggccactggcatcccagccaggttcagtggcagtgggtctgggacagacttcactctcatcatcagcagcctagagcctgaagattttgcagtttattactgtcagcagcgtagcaactggccgctcactttcggcggagggaccaaggtggagatcaaa

SEQ ID NO: 9072 - DNA, 327 bp, Artificial Sequence
  Synthetic polynucleotide encoding artificial human antibody VL domain
gaaattgtgttgacgcagtctccaggcaccctgtctttgtctccaggggaaagagccaccctctcctgcagggccagtcagagtgttaacaggaactacttagcctggtaccagcagaaacctggccaggctcccaggctcctcatctatggtgcatccagcagggccactggcatcccagacaggttcagtggcagtgggtctgggacagacttcactctcaccatcagcagactggagcctgaagattttgcagtatattactgtcagcagtatggtacctcacccccgtggacgttcggccaagggaccaaggtggaaatcaaa

SEQ ID NO: 9073 - DNA, 339 bp, Artificial Sequence
  Synthetic polynucleotide encoding artificial human antibody VL domain
gacatcgtgatgacccagtctccagactccctggctgtgtctctgggcgagagggccaccatcaactgcaagtccagccagagtgttttatacagctccaacaataagaactacttagcttggtaccagcagaaaccaggacagcctcctaagctgctcatttactgggcatctacccgggaatccggggtccctgaccgattcagtggcagcgggtctgggacagatttcactctcaccatcagcagcctgcaggctgaagatgtggcagtttattactgtcagcaatattttagtactccgctcactttcggcggagggaccaaggtggagatcaaa

SEQ ID NO: 9074 - DNA, 330 bp, Artificial Sequence
  Synthetic polynucleotide encoding artificial human antibody VL domain
cagtctgccctgactcagcctgtctccgtgtctgggtctcctggacagtcgatcaccatctcctgcactggaaccagcagtgacgttggtggttataagtatgtctcctggttccagcaacacccaggcaaagcccccaaactcatgatttatgatgtcagtaatcggccctcaggggtttctaatcgcttctctggctccaagtccggcaacacggcctccctgaccatctctgggctccaggctgaggacgaggctgattattactgcagctcatgtacaagcagtagcactctcgtattcggcggagggaccaagctgaccgtccta

SEQ ID NO: 9075 - DNA, 330 bp, Artificial Sequence
  Synthetic polynucleotide encoding artificial human antibody VL domain
cagtctgttttgacgcagccgccctcagtgtctgcggccccaggacagaaggtcaccatctcctgctctggaggcaactccaacattgggagtaattatgtttcctggtaccaacaactcccaggaacagcccccagacttctcatttatgacacaaataatcgaccctcaggaattcctgaccgattctctggctccaagtctggcacctcagccaccctgggcatcaccggactccagactggggacgaggccgattattactgcggaacatgggatagtagcctgagtgcttatgtcttcggaactgcgaccaaggtcaccgtccta

SEQ ID NO: 9076 - DNA, 324 bp, Artificial Sequence
  Synthetic polynucleotide encoding artificial human antibody VL domain
tcctatgagctgacacagccaccctcggtgtcagtgtccccaggacaaacggccaggatcacctgctctggagatgcattgccaaaaaaatatgcttattggtaccagcagaagtcaggccaggcccctgtgctggtcatctatgaggacagcaaacgaccctccgggatccctgagagattctctggctccagctcagggacagtggccaccttgactatcagtggggcccaggtggaggatgaagctgactactactgttactcaacagacagcagtggtaatcatagggtgttcggcggagggaccaagctgaccgtccta

SEQ ID NO: 9077 - DNA, 324 bp, Artificial Sequence
  Synthetic polynucleotide encoding artificial human antibody VL domain
gaaattgtgttgacacagtctccagccaccctgtctttgtctccaggggaaagagccaccctctcctgcagggccagtcagagtgttagcagctacttagcctggtaccaacagaaacctggccaggctcccaggctcctcatctatgatgcatccaacagggccactggcatcccagccaggttcagtggcagtgggtctgggacagacttcactctcaccatcagcagcctagagcctgaagattttgcagtttattactgtcagcagcgtagcaactggcctccactcactttcggcggagggaccaaggtggagatcaaa

SEQ ID NO: 9078 - DNA, 324 bp, Artificial Sequence
  Synthetic polynucleotide encoding artificial human antibody VL domain
gaaattgtgttgacgcagtctccaggcaccctgtctttgtctccaggggaaagagccaccctctcctgcagggccagtcagagtgttagcagcagctacttagcctggtaccagcagaaacctggccaggctcccaggctcctcatctatggtgcatccagcagggccactggcatcccagacaggttcagtggcagtgggtctgggacagacttcactctcaccatcagcagactggagcctgaagattttgcagtgtattactgtcagcagtatggtagctcaccgtggacgttcggccaagggaccaaggtggaaatcaaa

SEQ ID NO: 9079 - DNA, 339 bp, Artificial Sequence
  Synthetic polynucleotide encoding artificial human antibody VL domain
gacatcgtgatgacccagtctccagactccctgactgtgtctctgggcgagagggccaccatcaactgcaagtccagccagagtgtcttaaacagctccaacaataagaactacttagtttggtaccagcagaaaccaggacagcctcctaagctgctcctttactgggcatccacccgggaatccggggtccctgaccgattcagtggcagcgggtctgggacagatttcactctcaccatcagcagcctgcaggctgaagatgtggcaatttattactgtcagcaatattatagtcgtcctctgacgttcggccaagggaccaaggtggaaatcaaa

SEQ ID NO: 9080 - DNA, 336 bp, Artificial Sequence
  Synthetic polynucleotide encoding artificial human antibody VL domain
gatattgtgctgacccagactccactctctctgtccgtcacccctggacagccggcctccatctcctgcaagtctagtcagagcctcctgcatagtgatggaaagacctatttgtattggtacctgcagaagccaggccagtctccacagctcctgatctatggagtttccaaccggttctctggagtgccagataggttcagtgtcagcgggtcagggacagatttcacactgaaaatcagccgggtggaggctgaggatgttggggtttattactgcatgcaaactaaacagcttcctcttactttcggcggagggaccaaggtggagatcaaa

SEQ ID NO: 9081 - DNA, 336 bp, Artificial Sequence
  Synthetic polynucleotide encoding artificial human antibody VL domain
gatattgtgatgacccagactccactctcctcacctgtcacccttggacagccggcctccatctcctgcaggtctagtcaaagcctcgtacacagtgatggaaacacctacttgagttggcttcagcagaggccaggccagcctccaagactcctaatttataagatttctaaccggttctctggggtcccagacagattcagtggcagtggggcagggacagatttcacactgaaaatcagcagggtggaagctgaggatgtcggggtttattactgcatgcaagctacacaatttcctctcactttcggcggagggaccaaggtggagatcaaa

SEQ ID NO: 9082 - DNA, 324 bp, Artificial Sequence; identical to SEQ ID NO: 8805
  Synthetic polynucleotide encoding artificial human antibody VL domain

SEQ ID NO: 9083 - DNA, 321 bp, Artificial Sequence
  Synthetic polynucleotide encoding artificial human antibody VL domain
gacatccagatgacccagtctccatcctccctgtctgcatctgtaggagacagagtcaccatcacttgccgggcaagtcagggcattagaaatgacttggggtggtatcagcagaagccagggagagcccctaagagcctgatctatcttgcatccaatttgcaaagtggggtcccatcaaggttcagcggcagtggagctgggacagaattcactctcacaatcagcagcctgcagcctgaagattctgcaacttattactgtctgcagtataatacttaccctcggacgttcggccaagggaccaaggtggaaatcaaa

SEQ ID NO: 9084 - DNA, 318 bp, Artificial Sequence
  Synthetic polynucleotide encoding artificial human antibody VL domain
tcctatgagctgactcagccaccctcagtgtccgtgtccccaggacagacagccagcatcacctgctctggagataagttggggcataaaaatgcttgctggtatcagcagaagccaggccagtcccctgtgctggtcatctatgaagataccaagcggtcctcagggatccctgagcgattctctggcaccaactctgggaacacagccactctgaccatcagcgggacccaggctgtggatgaggctgactatcattgtcaggcgtgggacagcagcactgtggtattcggcggagggaccaagctgaccgtccta

SEQ ID NO: 9085 - DNA, 318 bp, Artificial Sequence
  Synthetic polynucleotide encoding artificial human antibody VL domain
gaaattgtgttgacacagtctccagccaccctgtctttgtctccaggggaaagagccaccctctcctgcagggccagtcagagtgttagcagctacttagcctggtaccaacagaaacctggccaggctcccaggctcctcatctatgatgcatccaacagggccactggcatcccagccaggttcagtggcagtgggtctgggacagacttcactctcaccatcagcagcctagagcctgaagattttgcagtttattactgtcagcagcgtagcaactggctcactttcggcggagggaccaaggtggagatcaaa

SEQ ID NO: 9086 - DNA, 330 bp, Artificial Sequence
  Synthetic polynucleotide encoding artificial human antibody VL domain
cagtctgccctgactcagcctgcctccgtgtctgggactcctggacagtcgatcaccatcgcctgcacgggaactagcggagacattggtgcctataactttgtctcctggtaccaaaaacaccccggcaaagcccccagagtcatcatttatgatgtcagtgatcggccctcaggcatttctgatcgcttctctggctccaagtctggcaacacggcctccctgaccatctctgggctccaggctgaggacgaggctgattatttctgctgttcatatacgaccagtggcccttttgtcttcggaactgggaccacggtcaccgtccta

SEQ ID NO: 9087 - DNA, 321 bp, Artificial Sequence
  Synthetic polynucleotide encoding artificial human antibody VL domain
gacatccagatgacccagtctccttccacccagtctgcatctgtaggagacagagtcactatcacttgccgggccagtcagagtattagtagttggttggcctggtatcagcagaaaccagggaaagcccctaagctcctgatctataaggcgtctactttagaaagtggggtcccatcaaggttcagcggcagtgggtctgggacagaattcactctcaccatcagcagcctgcagcctgatgattttgcaacttattactgccaacagtataatagttattcgtggacgttcggccaagggaccaaggtggaaatcaaa

SEQ ID NO: 9088 - DNA, 321 bp, Artificial Sequence
  Synthetic polynucleotide encoding artificial human antibody VL domain
gacatccagatgacccagtctccatcctccctgtctgcatctgtaggagacagagtcaccatcacttgccaggcgagtcaggacattagcaactatttaaattggtatcagcagaaaccagggaaagcccctaagctcctgatctacgatgcatccaatttggaaacaggggtcccatcaaggttcagtggaagtggatctgggacagattttactttcaccatcagcagcctgcagcctgaagatattgcaacatattactgtcaacagtatgataatctcccattcactttcggccctgggaccaaagtggatatcaaa

SEQ ID NO: 9089 - DNA, 330 bp, Artificial Sequence
  Synthetic polynucleotide encoding artificial human antibody VL domain
cagtctgtgctgacgcagccgccctcagtgtctggggccccagggcagagggtcaccatctcctgcactgggagcagctccaacatcggggcaggttatgatgtgcactggtaccaacagcttccaggaactgcccccaaactcctcatccatggtaacaacaatcggccctcaggggtccctgaccgattctctggctccaagtctggcacctccgcctccctggccatcactgggctccaggctgaagatgaggctgattattactgccagtcctatgacagaagcctgagtcaagtcttcggaactgggaccaaggtcaccgtccta

SEQ ID NO: 9090 - DNA, 336 bp, Artificial Sequence
  Synthetic polynucleotide encoding artificial human antibody VL domain
gacatcgtgatgacccagtctccagactccctggctgtgtctctgggcgagagggccaccatcaactgcaagtccagccagactattttacacagttccactaagaagactcacttagcttggtaccagcacaaaccaggacagcctcctaagctgctcatttactgggcatctacccgggaatccggggtccctgaccgattcagtggcagcgggtctgggacagatttcactctcaccatcagcagcctgcaggctgacgatgtggcaatgtattactgtcaccaatatcatagtattccgacgttcggccacgggaccaaggtggaaatcaaa

SEQ ID NO: 9091 - DNA, 330 bp, Artificial Sequence
  Synthetic polynucleotide encoding artificial human antibody VL domain
cagtctgccctgactcagcctgcctccgtgtctgggtctcctggacggtcgatcaccatctcctgcactggaaccagcagtgacgttggtggttataactgtgtctcctggtaccaacaacacccaggcaaagcccccaaactcatgatttatgatgtcactaatcggccctcaggggtttctaagcgcttctctggctccaagtctggcaacacggcctccctgaccatctctgggctccaggctgaggacgaggctgattattactgcagctcatatacaagcagtaccactgtggtattcggcggagggaccaagctgaccgtccta

SEQ ID NO: 9092 - DNA, 336 bp, Artificial Sequence
  Synthetic polynucleotide encoding artificial human antibody VL domain
gatattgtgatgacccagactccactctcctcacctgtcacccttggacagccggcctccatctcctgcaggtctagtcaaagcctcgtacacagtgatggaaacacctacttgagttggcttcagcagaggccaggccagcctccaagactcctaatttataagatttctaaccggttctctggggtcccagacagattcagtggcagtggggcagggacagatttcacactgaaaatcagcagggtggaagctgaggatgtcggggtttattactgcatgcaagctacacaatttcccttcaccttcggccaagggacacgactggagattaaa

SEQ ID NO: 9093 - DNA, 324 bp, Artificial Sequence
  Synthetic polynucleotide encoding artificial human antibody VL domain
tcctatgtgctgactcagccaccctcggtgtcagtggccccaggaaagacggccaggattacctgtgggggaaacaacattggaagtaaaagtgtgcactggtaccagcagaagccaggccaggcccctgtgctggtcgtctatgatgatagcgaccggccctcagggatccctgagcgattctctggctccaactctgggaacacggccaccctgaccatcagcagggtcgaagccggggatgaggccgactattactgtcaggtgtgggatagtagtagtgatcatccggtgttcggcggagggaccaagctgaccgtccta

SEQ ID NO: 9094 - DNA, 324 bp, Artificial Sequence
  Synthetic polynucleotide encoding artificial human antibody VL domain
gaaattgtgttgacgcagtctccaggcaccctgtctttgtctccaggggaaagagccaccctctcctgcagggccagtcagagtgttagcagcagctacttagcctggtaccagcagaaacctggccaggctcccaggctcctcatctatggtgcatccagcagggccactggcatcccagacaggttcagtggcagtgggtctgggacagacttcactctcaccatcagcagactggagcctgaagattttgcagtgtattactgtcagcagtatggtagctcaccttacacttttggccaggggaccaagctggagatcaaa

SEQ ID NO: 9095 - DNA, 321 bp, Artificial Sequence
  Synthetic polynucleotide encoding artificial human antibody VL domain
gacatccagatgacccagtctccatcctccctgtctgcatctgtaggagacagagtcaccatcacttgccgggcaagtcagggcattagaaatgatttaggctggtatcagcagaaaccagggaaagcccctaagcgcctgatctatgctgcatccagtttgcaaagtggggtcccatcaaggttcagcggcagtggatctgggacagaattcactctcacaatcagcagcctgcagcctgaagattttgcaacttattactgtctacagcataatagttacccattcactttcggccctgggaccaaagtggatatcaaa

SEQ ID NO: 9096 - DNA, 321 bp, Artificial Sequence; identical to SEQ ID NO: 9068
  Synthetic polynucleotide encoding artificial human antibody VL domain

SEQ ID NO: 9097 - DNA, 324 bp, Artificial Sequence
  Synthetic polynucleotide encoding artificial human antibody VL domain
tcttctgagctgactcaggaccctgctgtgtctgtggccttgggacagacagtcaggatcacatgccaaggagacagcctcagaagctattatgcaagctggtaccagcagaagccaggacaggcccctgtacttgtcatctatggtaaaaacaaccggccctcagggatcccagaccgattctctggctccagctcaggaaacacagcttccttgaccatcactggggctcaggcggaagatgaggctgactattactgtaactcccgggacagcagtggtaaccatctggtgttcggcggagggaccaagctgaccgtccta

SEQ ID NO: 9098 - DNA, 324 bp, Artificial Sequence
  Synthetic polynucleotide encoding artificial human antibody VL domain
gaaattatgttgacgcagtctccaggcaccctgtctttgtctccaggggaaagagccaccctctcctgcagggccagtcagagtgttagcagcagctactttgcctggtaccagcagaaacctggccaggctcccaggctcctcatctatggtgcatccagcagggccactggcatcccagacaggttcagtggcagtgggtctgggacagacttcactctcaccatcagcagactggagcctgaagattttgcagtgtattactgtcagcactatggtaactcaccgtacacttttggccaggggaccaagctggagatcaaa

SEQ ID NO: 9099 - DNA, 321 bp, Artificial Sequence; identical to SEQ ID NO: 8847
  Synthetic polynucleotide encoding artificial human antibody VL domain

SEQ ID NO: 9100 - DNA, 330 bp, Artificial Sequence
  Synthetic polynucleotide encoding artificial human antibody VL domain
aattttatgctgactcagccccactctgtgtcggagtctccggggaagacggtaaccatctcctgcaccggcagcagtggcagcattgccagcaactatgtgcagtggtaccagcagcgcccgggcagtgcccccaccactgtgatctatgaggataaccaaagaccctctggggtccctgatcggttctctggctccatcgacagctcctccaactctgcctccctcaccatctctggactgaagactgaggacgaggctgactactactgtcagtcttatgatagcagcaatcaggtattcggcggagggaccaagctgaccgtccta

SEQ ID NO: 9101 - DNA, 318 bp, Artificial Sequence
  Synthetic polynucleotide encoding artificial human antibody VL domain
gacatccagatgacccagtctccatcctccctgtctgcatctgtaggagacagagtcaccatcacttgccgggcaagtcagagcattagcagctatttaaattggtatcagcagaaaccagggaaagcccctaagctcctgatctatgctgcatccagtttgcaaagtggggtcccatcaaggttcagtggcagtggatctgggacagatttcactctcaccatcagcagtctgcaacctgaagattttgcaacttactactgtcaacagagttacagtaccctcactttcggcggagggaccaaggtggagatcaaa

SEQ ID NO: 9102 - DNA, 336 bp, Artificial Sequence
  Synthetic polynucleotide encoding artificial human antibody VL domain
gatgttgtgatgactcagtctccactctccctgcccgtcacccttggacagccggcctccttctcctgcaggtctagtcaaagcctcgtacacagtgatggaaacacctacctgaattggtttcagcagaggccaggccaatctccaaggcgcctaatttataaggtttctaaccgggactctggggtcccagacagattcagcggcagtgggtcaggcactgatttcacactgaaaatcagcagggtggaggctgaggatgttggggtttattactgcatgcaaggtacacactggtcctacacttttggccaggggaccaagctagagatcaaa

SEQ ID NO: 9103 - DNA, 321 bp, Artificial Sequence; identical to SEQ ID NO: 8857
  Synthetic polynucleotide encoding artificial human antibody VL domain

SEQ ID NO: 9104 - DNA, 324 bp, Artificial Sequence
  Synthetic polynucleotide encoding artificial human antibody VL domain
tcttctgagctgactcaggaccctgctgtgtctgtggccttgggacagacagtcaggatcacatgccaaggagacagcctcagaagctattatgcaagctggtaccagcagaagccaggacaggcccctgtacttgtcatctatggtaaaaacaaccggccctcagggatcccagaccgattctctggctccagctcaggaaacacagcttccttgaccatcactggggctcaggcggaagatgaggctgactattactgtaactcccgggacagcagtggtaaccatctggtattcggcggagggaccaagctgaccgtccta

SEQ ID NO: 9105 - DNA, 330 bp, Artificial Sequence
  Synthetic polynucleotide encoding artificial human antibody VL domain
cagtctgtgttgacgcagccgccctcagtgtctgcggcccgaggacagaaggtcaccatctcctgttctggaagcagctccaacattggcagtaatgatgtttcgtggtaccagcgcttcccaggaacagcccccaaagtcctcctttatgacattaataaccgaccctcagggattcctgatcgattctctggctccaagtctgctacgtccgccaccctggccatcaccgggctccagactggggacgaggccgattactattgcggaacatgggataccagcctgagtgagtatgtcttcggaactgggaccaaggtcaccgtccta

SEQ ID NO: 9106 - DNA, 330 bp, Artificial Sequence
  Synthetic polynucleotide encoding artificial human antibody VL domain
cagtctgtgctgactcagccaccctcagcgtctgggacccccgggcagagggtcaccatctcttgttctggaagcagctccaacatcggaagtaattatgtatactggtaccagcagctcccaggaacggcccccaaactcctcatctatagtaataatcagcggccctcaggggtccctgaccgattctctggctccaagtctggcacctcagcctccctggccatcagtgggctccggtccgaggatgaggctgattattactgtgcagcatgggatgacagcctgagtggtgtggtattcggcggagggaccaagctgaccgtccta

SEQ ID NO: 9107 - DNA, 330 bp, Artificial Sequence; identical to SEQ ID NO: 8934
  Synthetic polynucleotide encoding artificial human antibody VL domain

SEQ ID NO: 9108 - DNA, 324 bp, Artificial Sequence
  Synthetic polynucleotide encoding artificial human antibody VL domain
gaaattgtgttgacgcagtctccaggcaccctgtctttgtctccaggggaaagagccaccctctcctgcagggccagtcagagtgttagcagcagctacttagcctggtaccagcagaaacctggccaggctcccaggctcctcatctatggtgcatccagcagggccactggcatcccagacaggttcagtggcagtgggtctgggacagacttcactctcaccatcagcagactggagcctgaagattttgcagtgtattactgtcagcagtatggtagctcaacgggaacgttcggccaagggaccaaggtggaaatcaaa

SEQ ID NO: 9109 - DNA, 321 bp, Artificial Sequence
  Synthetic polynucleotide encoding artificial human antibody VL domain
gccatccagatgacccagtctccatcctccctgtctgcatttgtgggagacagagtcaccatcacttgccgggcaagtcagggcattagaaatgatttagcctggtatcagcagaaacaagggaaagcccctagcctcctgatctatggtgcatccgatttacaaagaggggtcccatcaaggttcagcggcaatggttctggcacagctttcactctcaccatcagcagcctgcagccggaagattttgcaacttactactgtctacaagattaccagtacccgctcactttcggcggagggaccaaggtggagatcaaa

SEQ ID NO: 9110 - DNA, 336 bp, Artificial Sequence
  Synthetic polynucleotide encoding artificial human antibody VL domain
cagtctgtgctgacgcagccgccctcagtgtctggggccccagggcagagggtcaccatctcctgcgctgggagcagctccaacatcggggcaggttatgaggttcactggtaccagcaccttcctgggacagcccccaaactcctcatctatggtaccttcaatcggccctcaggagtccctgaccgattctctggctccaagtctggcacctcagcctccctggccatcactgggctccaggctgaggatgaggctgattattactgccagacctatgacaccagactgagtggttcttatgtcttcggcactgggaccaaggtcaccgtccta

SEQ ID NO: 9111 - DNA, 321 bp, Artificial Sequence
  Synthetic polynucleotide encoding artificial human antibody VL domain
gacatccagatgacccagtctccatcctccctgtctgcatctgtaggagacagagtcaccatcacttgccgggcgagtcagggcattagcagttatttagcctggtatcagcagaaaccagggaaagttcctaagctcctgatctatgctgcctccactttgcaatcaggggtcccatttcggttcagtggcagtggatctgggacagatttcactctcaccatcacctccctgcagcctgaagatgttgcaacttattactgtcaaaagtataacagtgccccctggacgttcggccaagggaccaaggtggaaatcaaa

SEQ ID NO: 9112 - DNA, 321 bp, Artificial Sequence
  Synthetic polynucleotide encoding artificial human antibody VL domain
gacatccagatgacccagtctccatcttccctatctgcatctgtgggagacagagtcaccatcacttgtcgggcgagtcagggtattgacagctggttagcctggtatcagcagaaaccagggaaagcccctaatctcctgatctatgctgcatccagtttgcaaagtggggtcccatcaaggttcagcggcagtggatctgggacagatttcactctcaccatcagcaacctgcagcctgaagattttgcaatttattattgtcaacagactaaaactttcccgtacacttttggccaggggaccaagctggagatcaaa

SEQ ID NO: 9113 - DNA, 330 bp, Artificial Sequence
  Synthetic polynucleotide encoding artificial human antibody VL domain
cagtctgccctgactcagcctgcctccgtgtctgggtctcctggacagtcgatcaccatctcctgcactggaaccagcagtgacgttggtggttataactatgtctcctggtaccaacagcacccaggcaaagcccccaaactcatgatttatgatgtcagtaatcggccctcaggggtttctaatcgcttctctggctccaagtctggcaacacggcctccctgaccatctctgggctccaggctgaggacgaggctgattattactgcagctcatatacaagcagcagcactgtggtattcggcggagggaccaagctgaccgtccta

SEQ ID NO: 9114 - DNA, 318 bp, Artificial Sequence
  Synthetic polynucleotide encoding artificial human antibody VL domain
tcctatgagctgactcagccaccctcagtgtccgtgtccccaggacagacagccagcatcacctgctctggagataaattgggggataaatatgcttgctggtatcagcagaagccaggccagtcccctgtgctggtcatctatcaagatagcaagcggccctcagggatccctgagcgattctctggctccaactctgggaacacagccactctgaccatcagcgggacccaggctatggatgaggctgactattactgtcaggcgtgggacagcagctctgtggtattcggcggagggaccaagctgaccgtccta

SEQ ID NO: 9115 - DNA, 336 bp, Artificial Sequence
  Synthetic polynucleotide encoding artificial human antibody VL domain
cagtctgtgctgacgcagccgccctcagtgtctggggccccagggcagagggtcaccatctcctgcactgggagcagctccaacatcggggcaggttatgatgtacactggtaccagcagcttccaggaacagcccccaaactcctcatctatggtaacagcaatcggccctcaggggtccctgaccgattctctggctccaagtctggcacctcagcctccctggccatcactgggctccaggctgaggatgaggctgattattactgccagtcctatgacagcagcctgagtggttgggtggtattcggcggagggaccaagctgaccgtccta

SEQ ID NO: 9116 - DNA, 324 bp, Artificial Sequence
  Synthetic polynucleotide encoding artificial human antibody VL domain
gaaattgtgttgacgcagtctccaggcaccctgtctttgtctccaggggagagagccaccctctcctgcagggccagtcagagtgttagcagaaactacttagcctggtaccagcagaaacctggccaggctcccaggctcctcatctatggtgcatccagcagggccactggcatcccagacaggttcagtggcagtgggtctgggacagacttcactctcaccatcagcagactggagcctgaagattttgcagtgtattactgtcagcagtatgataactcccctcgcactttcggcggagggaccaaggtggagatcaaa

SEQ ID NO: 9117 - DNA, 336 bp, Artificial Sequence
  Synthetic polynucleotide encoding artificial human antibody VL domain
gatattgtgatgacgcaggccccactcccatcacctgtcgccctcggacaaccggcctccatctcctgcaggtctagtcaaagcctcgtacacagtgatggaaacacctacttcaactggcttcaccagaggccaggccagcctccaagactcctaatttatcagatatctctccgggtctctggggtcccagacagattcagtggcagtggggcagggacagatttcacactgacgatcagcagggtggaacctgaagatgtcgggatctattactgcatgcaggcaacacattttcctcggacgttcggccaagggaccaaggtggaaatcaaa

SEQ ID NO: 9118 - DNA, 321 bp, Artificial Sequence
  Synthetic polynucleotide encoding artificial human antibody VL domain
gacatccagatgacccagtctccatcttctgtgtctgcatctgtgggagacagagtcaccatcacttgtcgggcgagtcagggtattagcagctggttagcctggtatcagcagaaaccagggaaagcccctaagctcctgatctatgctgcatccagtttgcaaagtggggtcccatcaaggttcagcggcagtggatctgggacagatttcactctcactatcagcagcctgcagcctgaagattttgcaacttactattgtcaacagactaacagtttcccgtacacttttggccaggggaccaagctggggatcaaa

SEQ ID NO: 9119 - DNA, 327 bp, Artificial Sequence
  Synthetic polynucleotide encoding artificial human antibody VL domain
cagactgtggtgactcaggagccctcactgactgtgtccccaggagggacagtcactctcacctgtgcttccagcactggagcagtcaccagtggttactatccaaactggttccagcagaaacctggacaagcacccagggcactgatttatagtacaagcaacaaacactcctggacccctgcccggttctcaggctccctccttgggggcaaagctgccctgacactgtcaggtgtgcagcctgaggacgaggctgagtattactgcctgctctactatggtggtgcttgggtgttcggcggagggaccaagctgaccgtccta

SEQ ID NO: 9120 - DNA, 321 bp, Artificial Sequence
  Synthetic polynucleotide encoding artificial human antibody VL domain
gaaattgtgttgacgcagtctccaggcaccctgtctttgtctccaggggaaagagccaccctctcctgcagggccagtcagagtgttagcaggttaggctggtaccagcagaaacctggccaggctcccaggctcctcatctatggtgcatccaagagggcccctggcatcccagtcaggttcagtggcagtgggtctgggacagacttcactctcaccatcagcagactggagcctgaagattttgcagtgtattactgtcagcagtttggtagctcacctttgtacacctttggccaggggaccaaactggagatcaaa

SEQ ID NO: 9121 - DNA, 339 bp, Artificial Sequence; identical to SEQ ID NO: 8876
  Synthetic polynucleotide encoding artificial human antibody VL domain

SEQ ID NO: 9122 - DNA, 318 bp, Artificial Sequence
  Synthetic polynucleotide encoding artificial human antibody VL domain
gacatccagatgacccagtctccctccaccctgtctgcatctgttggagacagagtcaccatcacttgccgggccagtgagagtattggtggttggttggcctggtatcagcagaaaccagggaaagcccctaacctcctgatcaatcaggcctctagcttacaaagtggagtcccatcaaggttcagcggcagtggatctgggacagaattcactctcaccatcagcggcctgcagcctgatgactttgcaacctattactgcctgcagtataaaagttcttattgttttggccaggggaccaaagtggagatcaaa

SEQ ID NO: 9123 - DNA, 324 bp, Artificial Sequence
  Synthetic polynucleotide encoding artificial human antibody VL domain
gaaatagtgatgacgcagtctccagccaccctgtctgtgtctccaggggaaagagccaccctctcctgcagggccagtcagagtgttagcagcaacttagcctggtaccagcagaaacctggccaggctcccaggctcctcatctatggtgcatccaccagggccactggtatcccagccaggttcagtggcagtgggtctgggacagagttcactctcaccatcagcagcctgcagtctgaagattttgcagtttattactgtcagcagtataataactggcctccgatcaccttcggccaagggacacgactggagattaaa

SEQ ID NO: 9124 - DNA, 324 bp, Artificial Sequence; identical to SEQ ID NO: 9076
  Synthetic polynucleotide encoding artificial human antibody VL domain

SEQ ID NO: 9125 - DNA, 324 bp, Artificial Sequence
  Synthetic polynucleotide encoding artificial human antibody VL domain
tcctatgagctgactcagccaccctcagtgtccgtgtccccaggacagacagccagcatcacctgctctggagataaattgggggataaatatgcttgctggtatcagcagaagccaggccagtcccctgtactggtcatctatgaagataccaagcggccctcagggatccctgagcgattctctggctccaactctgggaacacagccactctgaccatcagcgggacccaggctatggatgaggctgactattactgtcaggcgtgggacggcagcattgagggttatgtcttcggaactgggaccaaggtcaccgtccta

SEQ ID NO: 9126 - DNA, 324 bp, Artificial Sequence; identical to SEQ ID NO: 8838
  Synthetic polynucleotide encoding artificial human antibody VL domain

SEQ ID NO: 9127 - DNA, 330 bp, Artificial Sequence
  Synthetic polynucleotide encoding artificial human antibody VL domain
cagtctgtcctgactcagcctgcctccgtgtccgggtctcctggacaggcgatcaccatctcctgcactggaaccagcggtgatgttgggaggtatgaccttgtctcctggtaccaacagcacccaggcaaagcccccaaactcttgattcatgaggtcaggacgcggccctcaggggtttctgatcgcttctctggctccaagtctggcaacacggcctccctgacaatctctgggctccaggctgaggacgaggctgattattactgctgctcatatgcaggtagcatcacttatgtcttcggaactgggaccacggtcaccgtccta

SEQ ID NO: 9128 - DNA, 321 bp, Artificial Sequence
  Synthetic polynucleotide encoding artificial human antibody VL domain
gaaattgtgttgacgcagtctccaggcaccctgtctttgtctccaggggaaagagccaccctctcctgcagggccagtcagagtgttagcagcagctacttagcctggtaccagcagaaacctggccaggctcccaggctcctcatctatggtgcatccagcagggccactggcatcccagacaggttcagtggcagtgggtctgggacagacttcactctcaccatcagcagactggagcctgaagattttgcagtgtattactgtcagcagtatggtagctcgtacacttttggccaggggaccaagctggagatcaaa

SEQ ID NO: 9129 - DNA, 321 bp, Artificial Sequence
  Synthetic polynucleotide encoding artificial human antibody VL domain
gaaatagtgatgacgcagtctccagcccccctgtctgtgtctccaggggaaagagtcaccctctcctgcagggccagtcagagtgttagcagcaacttagcctggtaccagcagaaacctggccagggtcccaggctcctcatctatgatgcatccaccagggccactgatgtcccagccaggttcagtggcagtgggtctgggacagagttcactctcaccatcagcagcctgcagtctgaagattttgcagtttattactgtcaacaatatgatgactggccgctcactttcggcggagggaccaaggtggagatcaaa

SEQ ID NO: 9130 - DNA, 324 bp, Artificial Sequence
  Synthetic polynucleotide encoding artificial human antibody VL domain
tcctatgtgctgactcagtcaccctcagtgtcagtggccccaggaaagacggccaggattatctgcgggggcaacaacatcggaagtaaaagtgtgcactggtaccagcagaagccgggccaggcccctgtggtggtcatctattatgagaacgaccggccctcagggatccctgagcgattctcgggctccaactctgggaacacggccaccctgaccatcaccagggtcgaagccggggatgaggccgactattactgtcaggtgtgggatagtagtagtgatcatgtggtattcggcggagggaccaagctgaccgtccta

SEQ ID NO: 9131 - DNA, 336 bp, Artificial Sequence
  Synthetic polynucleotide encoding artificial human antibody VL domain
gatattgtgatgactcagtctccactctccctgcccgtcacccctggagagccggcctccatctcctgcaggtctagtcagagcctcctgcatagtaaaggatacaactatttggattggtacctgcagaagccagggcagtctccacagctcctgatctatttgggttctaatcgggcctccggggtccctgacaggttcagtggcagtggatcaggcacagactttacactgaaaatcagcagagtggaggctgaggatgttggggtttattactgcatgcaagctctacaaactccgtggacgttcggccaagggaccaaggtggaaatcaaa

SEQ ID NO: 9132 - DNA, 330 bp, Artificial Sequence
  Synthetic polynucleotide encoding artificial human antibody VL domain
cagtctgtgttgacgcagccgccctcagtgtctgcggccccaggacagaaggtcaccatctcctgctctggaagcagctccaacattgggaataattatgtatcctggtaccagcagctcccaggaacagcccccaaactcctcatttatgacaataataagcgaccctcagggattcctgaccgattctctggctccaagtctggcacgtcagccaccctgggcatcaccggactccagactggggacgaggccgattattactgcggaacatgggatagcagcctgagtgctggggtgttcggcggagggaccaagctgaccgtccta

SEQ ID NO: 9133 - DNA, 333 bp, Artificial Sequence
  Synthetic polynucleotide encoding artificial human antibody VL domain
aattttatgctgactcagccccactctgtgtcggagtctccggggaagacggtaaccatctcctgcaccggcagcagtggcagcattgccagcaactatgtgcagtggtaccagcagcgcccgggcagtgcccccaccactgtgatctatgaggataaccaaagaccctctggggtccctgatcggttctctggctccatcgacagctcctccaactctgcctccctcaccatctctggactgaagactgaggacgaggctgactactactgtcagtcttatgatagcagcaatcctgtggtattcggcggagggaccaagctgaccgtccta

SEQ ID NO: 9134 - DNA, 318 bp, Artificial Sequence; identical to SEQ ID NO: 8811
  Synthetic polynucleotide encoding artificial human antibody VL domain

SEQ ID NO: 9135 - DNA, 330 bp, Artificial Sequence
  Synthetic polynucleotide encoding artificial human antibody VL domain
cagtctgtgctgactcagccaccctcagcgtctgggacccccgggcagagggtcaccatctcttgttctggaagcagctccaacatcggaagtaattatgtatactggtaccagcagctcccaggaacggcccccaaactcctcatctatagtaataatcagcggccctcaggggtccctgaccgattctctggctccaagtctggcacctcagcctccctggccatcagtgggctccggtccgaggatgaggctgattattactgtgcagcatgggatgacagcctgagtggtcgggtgttcggcggagggaccaagctgaccgtccta

SEQ ID NO: 9136 - DNA, 330 bp, Artificial Sequence
  Synthetic polynucleotide encoding artificial human antibody VL domain
aattttatgctgactcagccccactctgtgtcggagtctccggggaagacggtaaccatctcctgcaccggcagcagtggcagcattgccagcaactatgtgcagtggtaccagcagcgcccgggcagtgcccccaccactgtgatctatgaggataaccaaagaccctctggggtccctgatcggttctctggctccatcgacagctcctccaactctgcctccctcaccatctctggactgaagactgaggacgaggctgactactactgtcagtcttatgatagcagcaatgtggtattcggcggagggaccaagctgaccgtccta

SEQ ID NO: 9137 - DNA, 321 bp, Artificial Sequence
  Synthetic polynucleotide encoding artificial human antibody VL domain
tcctatgagctgacacagccatcctcagtgtcagtgtctccgggacagacagccaggatcacctgctcaggagatgtactggcaaaaaaatatgctcggtggttccagcagaagccaggccaggcccctgtgctggtgatttataaagacagtgagcggccctcagggatccctgagcgattctccggctccagctcagggaccacagtcaccttgaccatcagcggggcccaggttgaggatgaggctgactattactgttactctgcggctgacaacaatctaggggtattcggcggagggaccaagctgaccgtccta

SEQ ID NO: 9138 - DNA, 324 bp, Artificial Sequence
  Synthetic polynucleotide encoding artificial human antibody VL domain
tcttctgagctgactcaggaccctgctgtgtctgtggccttgggacagacagtcaggatcacatgccaaggagacagcctcagaagctattatgcaagctggtaccagcagaagccaggacaggcccctgtacttgtcatctatggtaaaaacaaccggccctcagggatcccagaccgattctctggctccagctcaggaaacacagcttccttgaccatcactggggctcaggcggaagatgaggctgactattactgtaactcccgggacagcagtggtaaccattatgtcttcggaactgggaccaaggtcaccgtccta

SEQ ID NO: 9139 - DNA, 318 bp, Artificial Sequence; identical to SEQ ID NO: 8811
  Synthetic polynucleotide encoding artificial human antibody VL domain

SEQ ID NO: 9140 - DNA, 321 bp, Artificial Sequence
  Synthetic polynucleotide encoding artificial human antibody VL domain
gacatccagatgacccagtctccatcttccgtgtctgcatctgtaggagacagagtcaccatcacttgtcgggcgagtcagggtattggcagctggttagcctggtatcagcagaaaccagggaaagcccctaagctcctgatctatgctgcatccagtttgcaaagtggggtcccatcaaggttcagcggcagtggatctgggacagatttcactctcaccatcagcagcctgcagcctgaagattttgcaacttactattgtcaacaggctaacagtttccccctcactttcggcggagggaccaaggtggagatcaaa

SEQ ID NO: 9141 - DNA, 330 bp, Artificial Sequence
  Synthetic polynucleotide encoding artificial human antibody VL domain
cagtctgtgttgacgcagccgccctcagtgtctgcggccccaggacagaaggtcaccatctcctgctctggaagcagctccaacattgggaataattatgtatcctggtaccagcagctcccaggaacagcccccaaactcctcatttatgacaataataagcgaccctcagggattcctgaccgattctctggctccaagtctggcacgtcagccaccctgggcatcaccggactccagactggggacgaggccgattattactgcggaacatgggatagcagcctgagtgcttatgtcttcggaactgggaccaaggtcaccgtccta

SEQ ID NO: 9142 - DNA, 330 bp, Artificial Sequence
  Synthetic polynucleotide encoding artificial human antibody VL domain
aattttatgctgactcagccccacgctgtgtcggagtctccggggaggacggtaaccatctcctgcacccgcagcagtggcagcattgccagcgactttgtgcagtggtaccagcagcggccgggcagtgcccccaccattgtgatctatgaggataatgaaagaccctctggggtccctgatcggttctctggctccatcgacagctcctccaactctgcctccctcaccatctctggactgaagactgaggacgaggctgactactactgtcagtcttatgatagtagcaattgggtgttcggcggggggaccaagctgaccgtccta

SEQ ID NO: 9143 - DNA, 336 bp, Artificial Sequence
  Synthetic polynucleotide encoding artificial human antibody VL domain
gatattgtgatgactcagtctccactctccctgcccgtcacccctggagagccggcctccatctcctgcaggtctagtcagagcctcctgcatagtaatggatacaactatttggattggtacctgcagaagccagggcagtctccacagctcctgatctatttgggttctaatcgggcctccggggtccctgacaggttcagtggcagtggatcaggcacagattttacactgaaaatcagcagagtggaggctgaggatgttggggtttattactgcatgcaagctctacaaactcccatcaccttcggccaagggacacgactggagattaaa

SEQ ID NO: 9144 - DNA, 327 bp, Artificial Sequence
  Synthetic polynucleotide encoding artificial human antibody VL domain
gaaattgtgttgacgcagtctccgggcaccctgtttttgtctccaggggaaagagccaccttctcctgcagggccagtcagagtgttagcagcaggcacttagcctggtaccagcagaaacctggccaggctcccaggctcctcatctatggtgcatccaacagggccactggcatcccagacaggttcagcgccagtgggtctgggacagacttcactctcaaaatcaggggagtggagcctgaagatcttgcagtatattactgtcagcagtttggaagctcaccttgggggacttttggccaggggaccaagctggagatcaaa

SEQ ID NO: 9145 - DNA, 330 bp, Artificial Sequence
  Synthetic polynucleotide encoding artificial human antibody VL domain
cagtctgccctgactcagcctgcctccgtgtctgggtctcctggacagtcgatcaccatctcctgcactggaaccagcagtgacgttggtggttataactatgtctcctggtaccaacagcacccaggcaaagcccccaaactcatgatttatgatgtcagtaatcggccctcaggggtttctaatcgcttctctggctccaagtctggcaacacggcctccctgaccatctctgggctccaggctgaggacgaggctgattattactgcagctcatatacaagcagcagcacttatgtcttcggaactgggaccaaggtcaccgtccta

SEQ ID NO: 9146 - DNA, 321 bp, Artificial Sequence
  Synthetic polynucleotide encoding artificial human antibody VL domain
gccatcgaggtgacccagtctccatcttacctgtctgcatctgtgggggacagagtcaccatcacttgccgggcgagtcgggccattagaaatgatttaggctggtatcagcagaaaccagggaaagcccctaaactcctgatctatgctgcgtccaaattacaaagtggggtcccttcacgtttcaggggcagtgtgtctggcacagatttcactctcaccatcaccaacctgcagcctgaagattttgcaacttattattgtctacaagactacaattatccattcattttcggccacgggaccaaagtggatatcaaa

SEQ ID NO: 9147 - DNA, 330 bp, Artificial Sequence; identical to SEQ ID NO: 9132
  Synthetic polynucleotide encoding artificial human antibody VL domain

SEQ ID NO: 9148 - DNA, 327 bp, Artificial Sequence
  Synthetic polynucleotide encoding artificial human antibody VL domain
tcttctgagctgactcaggaccctgctgtgtctgtggccttgggacagacagtcaggatcacatgccaaggagacagcctcagaagctattatgcaagctggtaccagcagaagccaggacaggcccctgtacttgtcatctatggtaaaaacaaccggccctcagggatcccagaccgattctctggctccagctcaggaaacacagcttccttgaccatcactggggctcaggcggaagatgaggctgactattactgtaactcccgggacagcagtggtaaccatctgggagtgttcggcggagggaccaagctgaccgtccta

SEQ ID NO: 9149 - DNA, 321 bp, Artificial Sequence
  Synthetic polynucleotide encoding artificial human antibody VL domain
tcctatgagctgacacagccaccctcggtgtcagtgtccccaggacagacggccaggatcacctgctctggagatgcattgccaaagcaatatgcttattggtaccagcagaagccaggccaggcccctgtgctggtgatatataaagacagtgagaggccctcagggatccctgagcgattctctggctccagctcagggacaacagtcacgttgaccatcagtggagtccaggcagaagacgaggctgactattactgtcaatcagcagacagcagtggtacttatgtcttcggaactgggaccaaggtcaccgtccta

SEQ ID NO: 9150 - DNA, 321 bp, Artificial Sequence
  Synthetic polynucleotide encoding artificial human antibody VL domain
gccatccagatgacccagtctccatcctccctgtctgcatctgtaggagacagagtcaccatcacttgccgggcaagtcagggcattagaaatgatttaggctggtatcagcagaaaccagggaaagcccctaagctcctgatctatgctgcatccagtttacaaagtggggtcccatcaaggttcagcggcagtggatctggcacagatttcactctcaccatcagcagcctgcagcctgaagattttgcaacttattactgtctacaagattacaattacccgctcactttcggcggagggaccaaggtggagatcaaa

SEQ ID NO: 9151 - DNA, 321 bp, Artificial Sequence; identical to SEQ ID NO: 9068
  Synthetic polynucleotide encoding artificial human antibody VL domain

SEQ ID NO: 9152 - DNA, 330 bp, Artificial Sequence
  Synthetic polynucleotide encoding artificial human antibody VL domain
cagtctgtgctgacgcagccgccctcagtgtctggggccccagggcagagggtcaccatctcctgcactgggagcagctccaacatcggggcaggttatgatgtacactggtaccagcagcttccaggaacagcccccaaactcctcatctatggtaacagcaatcggccctcaggggtccctgaccgattctctggctccaagtctggcacctcagcctccctggccatcactgggctccaggctgaggatgaggctgattattactgccagtcctatgacagcagcctgagtggggtattcggcggagggaccaagctgaccgtccta

SEQ ID NO: 9153 - DNA, 336 bp, Artificial Sequence
  Synthetic polynucleotide encoding artificial human antibody VL domain
gatattgtgatgacccagactccactctcctcacctgtcacccttggacagccggcctccatctcctgcaggtctagtcaaagcctcgtacacagtgatggaaacacctacttgagttggcttcagcagaggccaggccagcctccaagactcctaatttataagatttctaaccggttctctggggtcccagacagattcagtggcagtggggcagggacagatttcacactgaaaatcagcagggtggaagctgaggatgtcggggtttattactgcatgcaagctacacaatttccgtacacttttggccaggggaccaagctggagatcaaa

SEQ ID NO: 9154 - DNA, 330 bp, Artificial Sequence
  Synthetic polynucleotide encoding artificial human antibody VL domain
cagtctgccctgactcagcctgcctccgtgtctgggtctcctggacagtcgatcaccatctcctgcactggaaccagcagtgacgttggtggttataactatgtctcctggtaccaacaacacccaggcaaagcccccaaactcatgatttatgatgtcagtaatcggccctcaggggtttctaatcgcttctctggctccaagtctggcaacacggcctccctgaccatctctgggctccaggctgaggacgaggctgattattactgcagctcatatacaagcagcagcacttatgtcttcggaactgggaccaaggtcaccgtccta

SEQ ID NO: 9155 - DNA, 321 bp, Artificial Sequence
  Synthetic polynucleotide encoding artificial human antibody VL domain
gaaatagtgatgacgcagtctccagccaccctgtctgtgtctccaggggaaagagccaccctctcctgcagggccagtcagagtgttagcagcaacttagcctggtaccagcagaaacctggccaggctcccaggctcctcatctatggtgcatccaccagggccactggtatcccagccaggttcagtggcagtgggtctgggacagagttcactctcaccatcagcagcctgcagtctgaagattttgcagtttattactgtcagcagtataataactggcctcgaacgttcggccaagggaccaaggtggaaatcaaa

SEQ ID NO: 9156 - DNA, 324 bp, Artificial Sequence
  Synthetic polynucleotide encoding artificial human antibody VL domain
gaaatagtgatgacgcagtctccagccaccctgtctgtgtctccaggggaaagagccaccctctcctgcagggccagtcagagtgttagcagcaacttagcctggtaccagcagaaacctggccaggctcccaggctcctcatctatggtgcatccaccagggccactggtatcccagccaggttcagtggcagtgggtctgggacagagttcactctcaccatcagcagcctgcagtctgaagattttgcagtttattactgtcagcagtataataactggcctccgtggacgttcggccaagggaccaaggtggaaatcaaa

SEQ ID NO: 9157 - DNA, 321 bp, Artificial Sequence
  Synthetic polynucleotide encoding artificial human antibody VL domain
gacatccagatgacccagtctccatcctccctgtctgcatctgtaggagacagagtcaccatcacttgccaggcgagtcaggacattagcaactatttaaattggtatcagcagaaaccagggaaagcccctaagctcctgatctacgatgcatccaatttggaaacaggggtcccatcaaggttcagtggaagtggatctgggacagattttactttcaccatcagcagcctgcagcctgaagatattgcaacatattactgtcaacagtatgataatctcccgctcactttcggcggagggaccaaggtggagatcaaa

SEQ ID NO: 9158 - DNA, 330 bp, Artificial Sequence; identical to SEQ ID NO: 8934
  Synthetic polynucleotide encoding artificial human antibody VL domain

SEQ ID NO: 9159 - DNA, 321 bp, Artificial Sequence
  Synthetic polynucleotide encoding artificial human antibody VL domain
gacatccagatgacccagtctccttccaccctgtctgcatctgtaggagacagagtcaccatcacttgccgggccagtcagagtattagtagctggttggcctggtatcagcagaaaccagggaaagcccctaagctcctgatctataaggcgtctagtttagaaagtggggtcccatcaaggttcagcggcagtggatctgggacagaattcactctcaccatcagcagcctgcagcctgatgattttgcaacttattactgccaacagtataatagtccattgtggacgttcggccaagggaccaaggtggaaatcaaa

SEQ ID NO: 9160 - DNA, 330 bp, Artificial Sequence
  Synthetic polynucleotide encoding artificial human antibody VL domain
caggctgtggtgactcaggagccctcactgactgtgtccccaggagggacagtcactctcacctgtggctccagcactggagctgtcaccagtggtcattatccctactggttccagcagaagcctggccaagcccccaggacactgatttatgatacaagcaacaaacactcctggacacctgcccggttctcaggctccctccttgggggcaaagctgccctgaccctttcgggtgcgcagcctgaggatgaggctgagtattactgcttgctctcctatagtggtgcttatgctgtgttcggaggaggcacccagctgaccgtcctc

SEQ ID NO: 9161 - DNA, 336 bp, Artificial Sequence
  Synthetic polynucleotide encoding artificial human antibody VL domain
gatattgtgatgactcagtctccactctccctgcccgtcacccctggagagccggcctccatctcctgcaggtctagtcagagcctcctgcatagtaatggatacaactatttggattggtacctgcagaagccagggcagtctccacagctcctgatctatttgggttctaatcgggcctccggggtccctgacaggttcagtggcagtggatcaggcacagattttacactgaaaatcagcagagtggaggctgaggatgttggggtttattactgcatgcaagctctacaaactccgatcaccttcggccaagggacacgactggagattaaa

SEQ ID NO: 9162 - DNA, 321 bp, Artificial Sequence
  Synthetic polynucleotide encoding artificial human antibody VL domain
gaaatagtgatgacgcagtctccagccaccctgtctgtgtctccaggggaaagagccaccctctcctgcagggccagtcagagtgttaacagcaacttagcctggtaccagcagaaacctgaccaggctcccaggctcctcatctatggtgcatccaccagggccactggtaccccagccaggttcagtggcagtgggtctgggacagagttcactctcaccatcagcagcctgcagtctgaagattttgcagtttattactgtcagcagtatgatgtctggccgctcactttcggcggagggaccaaggtggagatcaaa

SEQ ID NO: 9163 - DNA, 339 bp, Artificial Sequence
  Synthetic polynucleotide encoding artificial human antibody VL domain
gacatcgtgatgacccagtctccagactccctggctgtgtctctgggcgagagggccaccatcaactgcaagtccagccagagtgttttatacagctccaacaataagaactacttagcttggtaccagcagaaaccaggacagcctcctaagctgctcatttactgggcatctacccgggaatccggggtccctgaccgattcagtggcagcgggtctgggacagatttcactctcaccatcagcagcctgcaggctgaagatgtggcagtttattactgtcagcaatattatagtactccgagcacttttggccaggggaccaagctggagatcaaa

SEQ ID NO: 9164 - DNA, 339 bp, Artificial Sequence
  Synthetic polynucleotide encoding artificial human antibody VL domain
gacatcgtgatgacccagtctccagactccctggctgtgtctctgggcgagagggccaccatcaactgcaagtccagccagagtgttttatacagctccaacaataagaactacttagcttggtaccagcaggaaccaggacagcctcctaagctgctcatttactgggcgtctacccgggaatccggggtccctgaccgattcagtggcagcgggtctgggacagatttcactctcaccatcagcagcctgcaggctgaggatgtggcagtttattactgtcagcaatattatagtactcctcgcacttttggccaggggaccaagctggagatcaaa

SEQ ID NO: 9165 - DNA, 333 bp, Artificial Sequence
  Synthetic polynucleotide encoding artificial human antibody VL domain
cagcttgtgctgactcaatcgccctctgcctctgcctccctgggagcctcggtcaagctcacctgcactctgagcagtgggcacagcagctacgccatcgcatggcatcagcagcagccagagaagggccctcggtacttgatgaagcttaacagtgatggcagccacagcaagggggacgggatccctgatcgcttctcaggctccagctctggggctgagcgctacctcaccatctccagcctccagtctgaggatgaggctgactattactgtcagacctggggcactggcaccgtggtattcggcggagggaccaagctgaccgtccta

SEQ ID NO: 9166 - DNA, 327 bp, Artificial Sequence
  Synthetic polynucleotide encoding artificial human antibody VL domain
cagtctgccctgactcagcctgcctccgtgtctgggtctcctggacagtcgatcaccatctcctgcactggaaccagcagtgacgttggtggttataactatgtctcctggtaccaacaacacccaggcaaagcccccaaactcatgatttatgatgtcagtaatcggccctcaggggtttctaatcgcttctctggctccaagtctggcaacacggcctccctgaccatctctgggctccaggctgaggacgaggctgattattactgcagctcatatacaagcagcaccgtggtattcggcggagggaccaagctgaccgtccta

SEQ ID NO: 9167 - DNA, 324 bp, Artificial Sequence; identical to SEQ ID NO: 8838
  Synthetic polynucleotide encoding artificial human antibody VL domain

SEQ ID NO: 9168 - DNA, 321 bp, Artificial Sequence
  Synthetic polynucleotide encoding artificial human antibody VL domain
gacatccagatgacccagtctccatcctccctgtctgcatctgtgggagacagagtcaccatcacttgccaggcgagtcaggacatttacgtttatgtgcattggtatcagcagaagtcagggggagcccctaagcccctgatccacgatgcatcctatctggaggcaggggtcccatccaggttcagtggaagtcgatctgggacatattttactctcaccatcagcaacctgcagcctgaggatgttgcatcatattactgtgaacagtatgataaatttccgatcaccttcggccaagggacacgagtggagattaaa

SEQ ID NO: 9169 - DNA, 324 bp, Artificial Sequence
  Synthetic polynucleotide encoding artificial human antibody VL domain
tcctatgtgctgactcagccaccctcggtgtcagtggccccaggaaagacggccaggattacctgtgggggaaacaacattggaagtaaaagtgtgcactggtaccagcagaagccaggccaggcccctgtgctggtcgtctatgatgatagcgaccggccctcagggatccctgagcgattctctggctccaactctgggaacacggccaccctgaccatcagcagggtcgaagccggggatgaggccgactattactgtcaggtgtgggatagtagtagtgatcattgggtgttcggcggagggaccaagctgaccgtccta

SEQ ID NO: 9170 - DNA, 330 bp, Artificial Sequence
  Synthetic polynucleotide encoding artificial human antibody VL domain
cagtctgccctgactcagcctgcctccgtgtctgggtctcctggacagtcgatcaccatctcctgcactggaaccagcagtgacgttggtggttataactatgtctcctggtaccaacagcacccaggcaaagcccccaaactcatgatttatgatgtcagtaatcggccctcaggggtttctaatcgcttctctggctccaagtctggcaacacggcctccctgaccatctctgggctccaggctgaggacgaggctgattattactgcagctcatatacaagcagcagcactctggtattcggcggagggaccaagctgaccgtccta

SEQ ID NO: 9171 - DNA, 336 bp, Artificial Sequence
  Synthetic polynucleotide encoding artificial human antibody VL domain
gatattgtgatgacccagactccactctcctcacctgtcacccttggacagccggcctccatctcctgcaggtctagtcaaagcctcgtacacagtgatggaaacacctacttgagttggcttcagcagaggccaggccagcctccaagactcctaatttataagatttctaaccggttctctggggtcccagacagattcagtggcagtggggcagggacagatttcacactgaaaatcagcagggtggaagctgaggatgtcggggtttattactgcatgcaagctacacaatttccgctaaccttcggccaagggacacgactggagattaaa

SEQ ID NO: 9172 - DNA, 333 bp, Artificial Sequence
  Synthetic polynucleotide encoding artificial human antibody VL domain
cagtctgtgttgacgcagccgccctcagtgtctgcggccccaggacagaaggtcaccatctcctgctctggaagcagctccaacattgggaataattatgtatcctggtaccagcagctcccaggaacagcccccaaactcctcatttatgacaataataagcgaccctcagggattcctgaccgattctctggctccaagtctggcacgtcagccaccctgggcatcaccggactccagactggggacgaggccgattattactgcggaacatgggatagcagcctgagtgctgaggtggtattcggcggagggaccaagctgaccgtccta

SEQ ID NO: 9173 - DNA, 324 bp, Artificial Sequence; identical to SEQ ID NO: 9156
  Synthetic polynucleotide encoding artificial human antibody VL domain

SEQ ID NO: 9174 - DNA, 321 bp, Artificial Sequence
  Synthetic polynucleotide encoding artificial human antibody VL domain
gacatccagatgacccagtctccatcctccctgtctgcatctgtaggagacagagtcaccatcacttgccgggcaagtcagagcattagcagctatttaaattggtatcagcagaaaccagggaaagcccctaagctcctgatctatgctgcatccagtttgcaaagtggggtcccatcaaggttcagtggcagtggatctgggacagatttcactctcaccatcagcagtctgcaacctgaagattttgcaacttactactgtcaacagagttacagtaccccgctcactttcggcggagggaccaaggtggagatcaaa

SEQ ID NO: 9175 - DNA, 315 bp, Artificial Sequence
  Synthetic polynucleotide encoding artificial human antibody VL domain
tcctatgaattgacccagccaatctcagtgtcagtgaacctgggacagacggccaggatcacctgtgggggagagaccattggaagtaaaattgtgcactggtatcagcaaaggccaggccaggcccctgtattggtcatctatagggatagtaaccggccctctgggatccctgagcgattctctggctccaactcggggaacacggccaccctgaccatcagcagagcccaagacggggatgagggtgactattactgtcaggtgtgggacagcagcgtggtattcggcggagggaccaagctgaccgtccta

SEQ ID NO: 9176 - DNA, 318 bp, Artificial Sequence
  Synthetic polynucleotide encoding artificial human antibody VL domain
gccatccggatgacccagtctccatcctcattctctgcatctacaggagacagagtcaccatcacttgtcgggcgagtcagggtattagcagttatttagcctggtatcagcaaaaaccagggaaagcccctaagctcctgatctatgctgcatccactttgcaaagtggggtcccatcaaggttcagcggcagtggatctgggacagatttcactctcaccatcagctgcctgcagtctgaagattttgcaacttattactgtcaacagtattatagttaccccaccttcggccaagggacacgactggagattaaa

SEQ ID NO: 9177 - DNA, 324 bp, Artificial Sequence
  Synthetic polynucleotide encoding artificial human antibody VL domain
tcctatgagctgacacagccaccctcggtgtcagtgtccccaggacagacggccaggatcacctgctctgcagatgcattgccaaagcaatatgcttattggtaccagcagaagccaggccaggcccctgtgctggtgatatataaagacagtgagaggccctcagggatccctgagcgattctctggctccagctcagggacaacagtcacgttgaccatcagtggagtccaggcagaagacgaggctgactattactgtcaatcagcagacagcagtggtacttattgggtgttcggcggagggaccaagctgaccgtccta

SEQ ID NO: 9178 - DNA, 333 bp, Artificial Sequence
  Synthetic polynucleotide encoding artificial human antibody VL domain
cagtctgtgctgactcagccaccctcagcgtctgggacccccgggcagagggtcaccatctcttgttctggaagcagctccaacatcggaagtaattatgtatactggtaccagcagctcccaggaacggcccccaaactcctcatctatagtaataatcagcggccctcaggggtccctgaccgattctctggctccaagtctggcacctcagcctccctggccatcagtgggctccggtccgaggatgaggctgattattactgtgcagcatgggatgacagcctgagtggtctttgggtgttcggcggagggaccaagctgaccgtccta

SEQ ID NO: 9179 - DNA, 327 bp, Artificial Sequence
  Synthetic polynucleotide encoding artificial human antibody VL domain
gaaatagtgatgacgcagtctccagccaccctgtctgtgtctccaggggaaagagccaccctctcctgcagggccagtcagagtgttagcagcaacttagcctggtaccagcagaaacctggccaggctcccaggctcctcatctatggtgcatccaccagggccactggtatcccagccaggttcagtggcagtgggtctgggacagagttcactctcaccatcagcagcctgcagtctgaagattttgcagtttattactgtcagcagtataataactggcctcaggtgtacacttttggccaggggaccaagctggagatcaaa

SEQ ID NO: 9180 - DNA, 336 bp, Artificial Sequence
  Synthetic polynucleotide encoding artificial human antibody VL domain
gatgttgtgatgactcagtctccactctccctgcccgtcacccttggacagccggcctccatctcctgcaaatctagtcaaagcctcgtatacagtgatggaaacacctacttgaattggtttcagcagaggccaggccaatctccaaggcgccttatttataaggtttctaaccgggactctggggtcccagacagattcagcggcagtgggtcaggcactgatttcacactgaaaatcagcagggtggaggctgaggatcttggggtttattactgcatgcaaggtacactctggcctcccacttttggccaggggaccaagctggagatcgaa

SEQ ID NO: 9181 - DNA, 336 bp, Artificial Sequence
  Synthetic polynucleotide encoding artificial human antibody VL domain
gatattgtgatgacgcaggccccactcccatcacctgtcgccctcggacaaccggcctccatctcctgcaggtctagtcaaagcctcgtacacagtgatggaaacacctacttcaactggcttcaccagaggccaggccagcctccaagactcctaatttatcagatatctctccgggtctctggggtcccagacagattcagtggcagtggggcagggacagatttcacactgacgatcagcagggtggaacctgaagatgtcgggatctattactgcatgcaggcaacacattttcctcggacgttcggccaagggaccaaggtagaagtcaaa

SEQ ID NO: 9182 - DNA, 318 bp, Artificial Sequence
  Synthetic polynucleotide encoding artificial human antibody VL domain
gacatccagatgacccagtctccatcctccctgtctgcatctgtaggagacagagtcaccatcacttgccgggcaagtcagagcattagcagctatttaaattggtatcagcagaaaccagggaaagcccctaagctcctgatctatgctgcatccagtttgcaaagtggggtcccatcaaggttcagtggcagtggatctgggacagatttcactctcaccatcagcagtctgcaacctgaagattttgcaacttactactgtcaacagagttacagtacccccactttcggcggagggaccaaggtggagatcaaa

SEQ ID NO: 9183 - DNA, 336 bp, Artificial Sequence
  Synthetic polynucleotide encoding artificial human antibody VL domain
gatattgtgatgactcagtctccactctccctgcccgtcacccctggagagccggcctccatctcctgcaggtctagtcagagcctcctgcatagtaatggatacaactatttggattggtacctgcagaagccagggcagtctccacagctcctgatctatttgggttctaatcgggcctccggggtccctgacaggttcagtggcagtggatcaggcacagattttacactgaaaatcagcagagtggaggctgaggatgttggggtttattactgcatgcaagctctacaaactccgctcactttcggcggagggaccaaggtggagatcaaa

SEQ ID NO: 9184 - DNA, 333 bp, Artificial Sequence
  Synthetic polynucleotide encoding artificial human antibody VL domain
cagtctgtgctgacgcagccgccctcagtgtctggggccccaggtcagggggtcaccatctcctgcactgggggcagctccaacatcggggcgggttctgatgtacactggtaccagcagcttccaggaacagcccccaaactcctcatctatgctaacaacaatcggccctcaggggtccctgaccgattctccgcctccaagtctggcacctccgcctccctggccatcactgggctccggactgaggatgaggctgattattactgtcagtcttatgacagcagcctaagtgcttcggtgttcggcggagggaccaaggtgaccgtccta

SEQ ID NO: 9185 - DNA, 330 bp, Artificial Sequence
  Synthetic polynucleotide encoding artificial human antibody VL domain
cagtctgtgctgactcagccaccctcagcgtctgagacccccgggcagagggtcaccatctcttgttctggaagcagctccaacatcggaagtaatactgtaaactggtaccagcacctcccaggaacggcccccaaactcctcatctatagtaataatcagcggccctcaggggtccctgaccgattctctggctccaagtctggcacctcagcctccctggccatcagtgggctccagtctgaggatgaggctgattattactgtgcagcatgggatgacagcctgaatggttgggtgttcggcggagggaccaagctgaccgtccta

SEQ ID NO: 9186 - DNA, 315 bp, Artificial Sequence
  Synthetic polynucleotide encoding artificial human antibody VL domain
tcctatgagctgactcagccaccctcagtgtccgtgtccccaggacagacagccagcatcacctgctctggagataaattgggggataaatatgcttgctggtatcagcagaagccaggccagtcccctgtgctggtcatctatcaagatagcaagcggccctcagggatccctgagcgattctctggctccaactctgggaacacagccactctgaccatcagcgggacccaggctatggatgaggctgactattactgtcaggcgtgggacagcagcatcgtattcggcggagggaccaagctgaccgtccta

SEQ ID NO: 9187 - DNA, 330 bp, Artificial Sequence; identical to SEQ ID NO: 8886
  Synthetic polynucleotide encoding artificial human antibody VL domain

SEQ ID NO: 9188 - DNA, 330 bp, Artificial Sequence; identical to SEQ ID NO: 9141
  Synthetic polynucleotide encoding artificial human antibody VL domain

SEQ ID NO: 9189 - DNA, 321 bp, Artificial Sequence
  Synthetic polynucleotide encoding artificial human antibody VL domain
gacatccagatgacccagtctccttccaccctgtctgcatctgtaggagacagagtcaccatcacttgccgggccagtcagagtattagtagctggttggcctggtatcagcagaaaccagggaaagcccctaagctcctgatctataaggcgtctagtttagaaagtggggtcccatcaaggttcagcggcagtggatctgggacagaattcactctcaccatcagcagcctgcagcctgatgattttgcaacttattactgccaacagtataatagttattcgtggacgttcggccaagggaccaaggtggaaatcaaa

SEQ ID NO: 9190 - DNA, 330 bp, Artificial Sequence
  Synthetic polynucleotide encoding artificial human antibody VL domain
cagtctgtgctgactcagccaccctcagcgtctgggacccccgggcagagggtcaccatctcttgttctggaagcagctccaacatcggaagtaatactgtaaactggtaccagcagctcccaggaacggcccccaaactcctcatctatagtaataatcagcggccctcaggggtccctgaccgattctctggctccaagtctggcacctcagcctccctggccatcagtgggctccagtctgaggatgaggctgattattactgtgcagcatgggatgacagcctgaatggttgggtgttcggcggagggaccaagctgaccgtccta

SEQ ID NO: 9191 - DNA, 321 bp, Artificial Sequence
  Synthetic polynucleotide encoding artificial human antibody VL domain
gacatccagttgacccagtctccacccttcctgtctgcatctgtcggagacagagtcaccatcacttgccgggccagtcagggcattagcacttacttagcctggtatcagcaaaaaccagggaaagcccctaaactcctgatgtatgctgcgtccactctgcaaagtggggtcccatcaaggttcagcggcagtggatctgggacagagttcactctcacaatcagcatcctgaagcctgaggatgctgcaacttattactgtcaacaggttgatagttacccgaacacttttggccaggggaccaagctggagatccaa

SEQ ID NO: 9192 - DNA, 321 bp, Artificial Sequence
  Synthetic polynucleotide encoding artificial human antibody VL domain
gaaatagtgatgacgcagtctccaggcaccctgtctgtgtctccaggggaaagagccaccctctcctgcagggccagtcagagtgttagtaacaacttagcctggtaccagcagaaacctggccaggctcccaggctcctcatctacggtgcatccaccagggccactggtactccagccggattcactggcagtggctctgggacagagttcactctcaccatcagcggcctgcagtctgaagattctgcactttattactgtcagcagtatcatgactggccgatcaccttcggccaagggacacgactggagattaaa

SEQ ID NO: 9193 - DNA, 324 bp, Artificial Sequence
  Synthetic polynucleotide encoding artificial human antibody VL domain
gaaattgtgttgacgcagtctccaggcaccctgtctttgtctccaggggaaagagccaccctctcctgcagggccagtcagagtgttagcagcagctacttagcctggtaccagcagaaacctggccaggctcccaggctcctcatctatggtgcatccagcagggccactggcatcccagacaggttcagtggcagtgggtctgggacagacttcactctcaccatcagcagactggagcctgaagattttgcagtgtattactgtcagcagtatggtagctcacctctgacgttcggccaagggaccaaggtggaaatcaaa

SEQ ID NO: 9194 - DNA, 330 bp, Artificial Sequence; identical to SEQ ID NO: 9141
  Synthetic polynucleotide encoding artificial human antibody VL domain

SEQ ID NO: 9195 - DNA, 327 bp, Artificial Sequence
  Synthetic polynucleotide encoding artificial human antibody VL domain
cagtctgtgctgactcagccaccctcagcgtctgggacccccgggcagagggtcaccatctcttgttctggaagcagctccaacatcggaagtaatactgtaaactggtaccagcagctcccaggaacggcccccaaactcctcatctatagtaataatcagcggccctcaggggtccctgaccgattctctggctccaagtctggcacctcagcctccctggccatcagtgggctccagtctgaggatgaggctgattattactgtgcagcatgggatgacagcctgaatagggtattcggcggagggaccaagctgaccgtccta

SEQ ID NO: 9196 - DNA, 339 bp, Artificial Sequence
  Synthetic polynucleotide encoding artificial human antibody VL domain
gacatcgtgatgacccagtctccagactccctggctgtgtctctgggcgagagggccaccatcaactgcaagtccagccagagtgttttatacagctccaacaataagaactacttagcttggtaccagcagaaaccaggacagcctcctaagctgctcatttactgggcatctacccgggaatccggggtccctgaccgattcagtggcagcgggtctgggacagatttcactctcaccatcagcagcctgcaggctgaagatgtggcagtttattactgtcagcaatattatagtactccgtggacgttcggccaagggaccaaggtggaaatcaaa

SEQ ID NO: 9197 - DNA, 330 bp, Artificial Sequence; identical to SEQ ID NO: 9141
  Synthetic polynucleotide encoding artificial human antibody VL domain

SEQ ID NO: 9198 - DNA, 330 bp, Artificial Sequence
  Synthetic polynucleotide encoding artificial human antibody VL domain
cagtctgccctgactcagcctccctccgcgtccgggtctcctggacagtcagtcaccatctcctgcactggaaccagcagtgacgttggtggttataactatgtctcctggtaccaacagcacccaggcaaagcccccaaactcatgatttatgaggtcagtaagcggccctcaggggtccctgatcgcttctctggctccaagtctggcaacacggcctccctgaccgtctctgggctccaggctgaggatgaggctgattattactgcagctcatatgcaggcagcaacaatgtggtattcggcggagggaccaagctgaccgtccta

SEQ ID NO: 9199 - DNA, 327 bp, Artificial Sequence
  Synthetic polynucleotide encoding artificial human antibody VL domain
gacatccagatgacccagtctccatcctccctgtctgcatctgtaggagacagagtcaccatcacttgccgggcaagtcagagcattagcagctatttaaattggtatcagcagaaaccagggaaagcccctaagctcctgatctatgctgcatccagtttgcaaagtggggtcccatcaaggttcagtggcagtggatctgggacagatttcactctcaccatcagcagtctgcaacctgaagattttgcaacttactactgtcaacagagttacagtaccccccccatgtacacttttggccaggggaccaagctggagatcaaa

SEQ ID NO: 9200 - DNA, 330 bp, Artificial Sequence
  Synthetic polynucleotide encoding artificial human antibody VL domain
cagtctgtgctgactcagccaccctcagcgtctgggacccccgggcagagggtcaccatctcttgttctggaagcagctccaacatcggaagtaatactgtaaactggtaccagcagctcccaggaacggcccccaaactcctcatctatagtaataatcagcggccctcaggggtccctgaccgattctctggctccaagtctggcacctcagcctccctggccatcagtgggctccagtctgaggatgaggctgattattactgtgcagcatgggatgacagcctgaatggtccggtattcggcggagggaccaagctgaccgtccta

SEQ ID NO: 9201 - DNA, 321 bp, Artificial Sequence
  Synthetic polynucleotide encoding artificial human antibody VL domain
gaaattgtgttgacacagtctccagccaccctgtctttgtctccaggggaaagagccaccctctcctgcagggccagtcagaatattggcaacttcttagcctggtaccaacagaaacctggccaggctcccagtctcctcatctatgatgtgtccaacagggccactggcatccccgccaggttcagtggcagtgggtctgggacagacttcactctcaccatcagcagcctagagcctcaagattttgcaatttattactgtcagcaacgtagcgcctggcctctcaccttcggccaagggacacgactggagattaaa

SEQ ID NO: 9202 - DNA, 333 bp, Artificial Sequence
  Synthetic polynucleotide encoding artificial human antibody VL domain
cagtctgccctgactcagcctgcctccgtgtctgggtctcctggacagtcgatcaccatctcctgcactggaaccagcagtgacgttggtggttataactatgtctcctggtaccaacagcacccaggcaaagcccccaaactcatgatttatgatgtcagtaatcggccctcaggggtttctaatcgcttctctggctccaagtctggcaacacggcctccctgaccatctctgggctccaggctgaggacgaggctgattattactgcagctcatatacaagcagcagcactctcgtggtattcggcggagggaccaagctgaccgtccta

SEQ ID NO: 9203 - DNA, 330 bp, Artificial Sequence
  Synthetic polynucleotide encoding artificial human antibody VL domain
cagtctgtgctgactcagccaccctcagcgtctgggacccccgggcagagggtcaccatctcttgttctggaagcagctccaacatcggaagtaatactgtaaactggtaccagcagttcccaggaacggcccccaaactcctcatctatagtaataatcagcggccctcaggggtccctgaccgattctctggctccaagtctggcacctcagcctccctggccatcagtgggctccagtctgaggatgaggctgattattactgtgctgcatgggatgacagcctgaagggtctgggattcggcggagggaccaagctgaccgtccta

SEQ ID NO: 9204 - DNA, 330 bp, Artificial Sequence; identical to SEQ ID NO: 9170
  Synthetic polynucleotide encoding artificial human antibody VL domain

SEQ ID NO: 9205 - DNA, 321 bp, Artificial Sequence; identical to SEQ ID NO: 9068
  Synthetic polynucleotide encoding artificial human antibody VL domain

SEQ ID NO: 9206 - DNA, 336 bp, Artificial Sequence
  Synthetic polynucleotide encoding artificial human antibody VL domain
cagtctgtgctgactcagccaccctcagcgtctgggacccccgggcagagggtcaccatctcttgttctggaagccgctccaacatcggaagtaattttgtattctggtatcagcagttcccaggaacggcccccaaactcctcgtctataagaataatcagcggccctcaggggtccccgaccgattctctgtctccaagtctggcacctcagcctccctggccatcagtgggctccggtccgaggatgaggctgaatattactgtgcatcatgggatgacagcctgactggtcccaattatgtcttcggaactgggaccaaggtcaccgtccta

SEQ ID NO: 9207 - DNA, 321 bp, Artificial Sequence
  Synthetic polynucleotide encoding artificial human antibody VL domain
gaaattgtgttgacacagtctccagccaccctgtctttgtctccaggggaaagagccaccctctcctgcagggccagtcagagtgttagcagctacttagcctggtaccaacagaaacctggccaggctcccaggctcctcatctatgatgcatccaacagggccactggcatcccagccaggttcagtggcagtgggtctgggacagacttcactctcaccatcagcagcctagagcctgaagattttgcagtttattactgtcagcagcgtagcaactggccttccactttcggcggagggaccaaggtggagatcaaa

SEQ ID NO: 9208 - DNA, 330 bp, Artificial Sequence; identical to SEQ ID NO: 8852
  Synthetic polynucleotide encoding artificial human antibody VL domain

SEQ ID NO: 9209 - DNA, 324 bp, Artificial Sequence; identical to SEQ ID NO: 8805
  Synthetic polynucleotide encoding artificial human antibody VL domain

SEQ ID NO: 9210 - DNA, 330 bp, Artificial Sequence
  Synthetic polynucleotide encoding artificial human antibody VL domain
cagtctgccctgactcagcctgcctccgtgtctgggtctcctggacagtcgatcaccatctcctgcactggaaccagcagtgacgttggtggttataactatgtctcctggtaccaacaacacccaggcaaagcccccaaactcatgatttatgatgtcagtaatcggccctcaggggtttctaatcgcttctctggctccaagtctggcaacacggcctccctgaccatctctgggctccaggctgaggacgaggctgattattactgcagctcatatacaagcagcagcactgtggtattcggcggagggaccaagctgaccgtccta

SEQ ID NO: 9211 - DNA, 324 bp, Artificial Sequence; identical to SEQ ID NO: 9169
  Synthetic polynucleotide encoding artificial human antibody VL domain

SEQ ID NO: 9212 - DNA, 327 bp, Artificial Sequence
  Synthetic polynucleotide encoding artificial human antibody VL domain
gaaattgtgttgacgcagtctccaggcaccctgtctttgtctccaggggaaagagccaccctctcctgcagggccagtcagagtgttagcagcagcttcttagcctggtaccagcagaaacctggccagactcccagactcctcatctatggtgcatccagcagggccactggcatcccagacaggttcagtggcagtgggtctgggacagacttcactctcaccatcagcagactggagcctgaagattttgcagtgtattactgtcagcagtttgattactcacctcggtggacgttcggccaagggaccaaggtggaaatcaaa

SEQ ID NO: 9213 - DNA, 318 bp, Artificial Sequence
  Synthetic polynucleotide encoding artificial human antibody VL domain
tcctatgagctgactcagccaccctcagtgtccgtgtccccaggacagacagccagcatcacctgctctggagataaattgggggataaatatgcttgctggtatcagcagaagccaggccagtcccctgtgctggtcatctatcaagatagcaagcggccctcagggatccctgagcgattctctggctccaactctgggaacacagccactctgaccatcagcgggacccaggctatggatgaggctgactattactgtcaggcgtgggacagcagcactgtggtgttcggcggagggaccaagctgaccgtccta

SEQ ID NO: 9214 - DNA, 324 bp, Artificial Sequence
  Synthetic polynucleotide encoding artificial human antibody VL domain
tcttctgagttgactcagggccctgctgtgtcagtggccttgggacagacagtccggatcacatgccaaggagacagcctcaaattctctttttcatgttggtatcaacataagccaggacaggcccctgtagtcgtcatttttggtcaaaacaaccggccctcagggatcccagaccgattctctggctccgactcaggagacaccacgtccttgatcatcactggggctcaggcggaagatgaggctgactattactgcagttcccgggacagaagtggtagtcatgtagtcttcggcggagggaccaggttgaccgtccta

SEQ ID NO: 9215 - DNA, 324 bp, Artificial Sequence
  Synthetic polynucleotide encoding artificial human antibody VL domain
gaaatagcattggcgcagtctccagccaccctgtctctgtctccaggggagacagccaccctctcctgcagggcctctgagatcattggtaacaccttagcctggtaccaacacaaagttggccagccacccaggcttctcatctatgctacatcaaccagggccactggagtcccagccaggttcagtggcagtgggtctgggacagacttcactctcaccatcagcgccctgcagtctgaggattttgcactttattactgtcagcagtataatgagtggccccggatcaccttcggccaagggacacgactggagatcaaa

SEQ ID NO: 9216 - DNA, 324 bp, Artificial Sequence; identical to SEQ ID NO: 9011
  Synthetic polynucleotide encoding artificial human antibody VL domain

SEQ ID NO: 9217 - DNA, 324 bp, Artificial Sequence; identical to SEQ ID NO: 9169
  Synthetic polynucleotide encoding artificial human antibody VL domain

SEQ ID NO: 9218 - DNA, 336 bp, Artificial Sequence; identical to SEQ ID NO: 9115
  Synthetic polynucleotide encoding artificial human antibody VL domain

SEQ ID NO: 9219 - DNA, 330 bp, Artificial Sequence
  Synthetic polynucleotide encoding artificial human antibody VL domain
cagtctgtgctgactcagccaccctcagcgtctgggacccccgggcagagggtcaccatctcttgttctggaagcagctccaacatcggcagtagagctgtaaactggtaccaccagctcccaggaacggcccccaaactcctcgtctatcgtaatgatcagcggccctcaggggtccctgaccgattctctggctccaagtctggcacctcagcctccctggccatcagtgggctccagtctgaggatgaggctgattattactgcgcagcatgggatgacagcctgaatgcttgggtgttcggcggagggaccaagctgaccgtccta

SEQ ID NO: 9220 - DNA, 327 bp, Artificial Sequence
  Synthetic polynucleotide encoding artificial human antibody VL domain
cagtctgtgttgactcagccgccctcagtgtctgcggccccaggccagaaggtcaccatctcctgttctggaagcagctccaccattggggataattatgtatcgtggtaccagcacctcccaggaacagcccccaaactcctcatttatgacaataataagcgaccctcagggattcctgaccgattctctggctccaagtctggcacgtcagccaccctgggcatcaccggactccagactggggacgaggccgattattactgcgcaacatgggatacgagcctgagtgtcgtcttcggcggagggaccaagctgaccgtccta

SEQ ID NO: 9221 - DNA, 318 bp, Artificial Sequence
  Synthetic polynucleotide encoding artificial human antibody VL domain
tcctatgagctgacacaggcaccctcggtgtcagtgtccccaggacagacggccaggatcacctgctctggagacacattggcgaagaaatatgtttattggtaccagcagaagccaggccaggcccctgtattaattatgtataaggatactgagaggccttcagggatccctgagcgattctctggctccagctcagggacaatagtcaccttgaccatcagtggagtccaggcagaagacgaggctgattactactgtcaagcagtggacgggaagaattatgttttcggaggggggaccaaggtcaccgtccta

SEQ ID NO: 9222 - DNA, 330 bp, Artificial Sequence; identical to SEQ ID NO: 9190
  Synthetic polynucleotide encoding artificial human antibody VL domain

SEQ ID NO: 9223 - DNA, 324 bp, Artificial Sequence
  Synthetic polynucleotide encoding artificial human antibody VL domain
tcctatgagctgacacagccaccctcggtgtcagtgtccccaggacagacggccaggatcacctgctctggagatgcattgccaaagcaatatgcttattggtaccagcagaagccaggccaggcccctgtgctggtgatatataaagacagtgagaggccctcagggatccctgagcgattctctggctccagctcagggacaacagtcacgttgaccatcagtggagtccaggcagaagacgaggctgactattactgtcaatcagcagacagcagtggtcccctttatgtcttcggaactgggaccaaggtcaccgtccta

SEQ ID NO: 9224 - DNA, 324 bp, Artificial Sequence; identical to SEQ ID NO: 9078
  Synthetic polynucleotide encoding artificial human antibody VL domain

SEQ ID NO: 9225 - DNA, 339 bp, Artificial Sequence
  Synthetic polynucleotide encoding artificial human antibody VL domain
gacatcgtgatgacccagtctccagactccctggctgtgtctgtgggcgagagggccaccatcaactgcaagtccagtcagagtattttatacacctccaacaataagaactacttagcttggtaccagcacaaaccaggacagcctcctaagttactcctttactgggcgtctacccgggaatccggggtccctgaccggttcagtggcagcgggtctgggacagatttcactctcaccatcagcagcctgctggctgaagatgtggcagtttattactgtcagcaatattacagcactccgtacacttttggccaggggaccaagctggagatcaaa

SEQ ID NO: 9226 - DNA, 330 bp, Artificial Sequence; identical to SEQ ID NO: 8934
  Synthetic polynucleotide encoding artificial human antibody VL domain

SEQ ID NO: 9227 - DNA, 324 bp, Artificial Sequence
  Synthetic polynucleotide encoding artificial human antibody VL domain
gaaattgtgttgacgcagtctccaggcaccctgtctttgtctccaggggaaagagccaccctctcctgcagggccagtcagagtattagcagcagctacttagcctggtaccagcagaaacctggccaggctcccaggctcctcatctatggtgcatccagcagggccactggcatcccagacaggttcagtggcagtgggtctgggacagacttcactctcaccatcagcagactggagcctgaagattttgcagtgtattactgtcagcagtatggtagctcaccgggcactttcggccctgggaccaaagtggatatcaaa

SEQ ID NO: 9228 - DNA, 321 bp, Artificial Sequence; identical to SEQ ID NO: 8765
  Synthetic polynucleotide encoding artificial human antibody VL domain

SEQ ID NO: 9229 - DNA, 324 bp, Artificial Sequence
  Synthetic polynucleotide encoding artificial human antibody VL domain
tcctatgtgctgactcagccaccctcggtgtcagtggccccaggaaagacggccaggattacctgtgggggaaacaacattggaagtaaaagtgtgcactggtaccagcagaagccaggccaggcccctgtgctggtcgtctatgatgatagcgaccggccctcagggatccctgagcgattctctggctccaactctgggaacacggccaccctgaccatcagcagggtcgaagccggggatgaggccgactattactgtcaggtgtgggatagtagtagtgatcatgtggtattcggcggagggaccaagctgaccgtccta

SEQ ID NO: 9230 - DNA, 327 bp, Artificial Sequence
  Synthetic polynucleotide encoding artificial human antibody VL domain
caggctgtggtgactcaggagccctcactgactgtgtccccaggagggatagtcactctcacctgtggctccagctttggagctgtcaccagtggtcattatccctactggttccagcagaagcctggccaagcccccaggacactgatttatgatacaagcaacaaacactcctggacccctgcccggttctcaggctccctccttgggggcagagctaccctgaccctttcgggtgcgcagcctgaggatgaggctgactattactgcttgctctcctatagtggtacttgggtgttcggcggagggaccaagctgagcgtccta

SEQ ID NO: 9231 - DNA, 324 bp, Artificial Sequence
  Synthetic polynucleotide encoding artificial human antibody VL domain
gaaattgtgttgacgcagtctccaggcaccctgtctttgtctccaggggaaagagccaccctctcctgcagggccagtcagagtgttagcagcagctacttagcctggtaccagcagaaacctggccaggctcccaggctcctcatctatggtgcatccagcagggccactggcatcccagacaggttcagtggcagtgggtctgggacagacttcactctcaccatcagcagactggagcctgaagattttgcagtgtattactgtcagcagtatggtagctcaccgtacacttttggccaggggaccaagctggagatcaaa

SEQ ID NO: 9232 - DNA, 324 bp, Artificial Sequence
  Synthetic polynucleotide encoding artificial human antibody VL domain
gaaatagtgatgacgcagtctccagccaccctgtctgtgtctccaggggaaagagccaccctctcctgcagggccagtcagagtgttagaagcaacttagcctggtaccagcagaaacctggccaggctcccaggctcctcatctatggtgcatccaccagggccactggtatcccagccaggttcagtggcagtgggtctgggacagagttcactctcaccatcagcagcctgcagtctgaagattttgcagtttattactgtcagcagtataataactggcctccgtacacttttggccaggggaccaagctggagatcaaa

SEQ ID NO: 9233 - DNA, 321 bp, Artificial Sequence
  Synthetic polynucleotide encoding artificial human antibody VL domain
gacatccagatgacccagtctccatctgccatgtctgcatctgtaggagacagagtcaccatcacttgtcgggcgagtcagggcattagcaattatttagcctggtttcagcagaaaccagggaaagtccctaagcgcctgatctatgctgcatccagtttgcaaagtggggtcccatcaaggttcagcggcagtggatctgggacagaattcactctcacaatcagcagcctgcagcctgaagattttgcaacttattactgtctacagcataatagttaccctcccactttcggcggagggaccaaggtggagatcaaa

SEQ ID NO: 9234 - DNA, 321 bp, Artificial Sequence
  Synthetic polynucleotide encoding artificial human antibody VL domain
gacatccagatgacccagtctccttccaccctgtctgcatctgtaggagacagagtcaccatcacttgccgggccagtcagagtattagtagctggttggcctggtatcagcagaaaccagggaaagcccctaagctcctgatctataaggcgtctagtttagaaagtggggtcccatcaaggttcagcggcagtggatctgggacagaattcactctcaccatcagcagcctgcagcctgatgattttgcaacttattactgccaacagtataatagttacccgtacacttttggccaggggaccaagctggagatcaaa

SEQ ID NO: 9235 - DNA, 336 bp, Artificial Sequence
  Synthetic polynucleotide encoding artificial human antibody VL domain
gatattgtgatgacccagactccactctctctgtccgtcacccctggacagccggcctccatctcctgcaagtctagtcagagcctcctgcatagtgatggaaagacctatttgtattggtacctgcagaagccaggccagcctccacagctcctgatctatgaagtttccaaccggttctctggagtgccagataggttcagtggcagcgggtcagggacagatttcacactgaaaatcagccgggtggaggctgaggatgttggggtttattactgcatgcaaagtatacagcttccgtacacttttggccaggggaccaagctggagatcaaa

SEQ ID NO: 9236 - DNA, 324 bp, Artificial Sequence
  Synthetic polynucleotide encoding artificial human antibody VL domain
tcctatgtgctgactcagccaccctcggtgtcagtggccccaggaaagacggccaggattacctgtgggggaaacaacattggaagtaaaagtgtgcactggtaccagcagaagccaggccaggcccctgtgctggtcgtctatgatgatagcgaccggccctcagggatccctgagcgattctctggctccaactctgggaacacggccaccctgaccatcagcagggtcgaagccggggatgaggccgactattactgtcaggtgtgggatagtagtagtgatcattatgtcttcggaactgggaccaaggtcaccgtccta

SEQ ID NO: 9237 - DNA, 321 bp, Artificial Sequence
  Synthetic polynucleotide encoding artificial human antibody VL domain
gacatccagatgacccagtctccatcctccctgtctgcatctgtaggagacagagtcaccatcacttgccgggcaagtcagagcattagcagctatttaaattggtatcagcagaaaccagggaaagcccctaagctcctgatctatgctgcatccagtttgcaaagtggggtcccatcaaggttcagtggcagtggatctgggacagatttcactctcaccatcagcagtctgcaacctgaagattttgcaacttactactgtcaacagagttacagtacccctcgtacgttcggccaagggaccaaggtggaaatcaaa

SEQ ID NO: 9238 - DNA, 330 bp, Artificial Sequence; identical to SEQ ID NO: 9145
  Synthetic polynucleotide encoding artificial human antibody VL domain

SEQ ID NO: 9239 - DNA, 321 bp, Artificial Sequence
  Synthetic polynucleotide encoding artificial human antibody VL domain
gaaattgtgttgacacagtctccagccaccctgtctttgtctccaggggaaagagccaccctctcctgcagggccagtcagagtgttagcagctacttagcctggtaccaacagaaacctggccaggctcccaggctcctcatctatgatgcatccaacagggccactggcatcccagccaggttcagtggcagtgggtctgggacagacttcactctcaccatcagcagcctagagcctgaagattttgcagtttattactgtcagcagcgtagcaactggccgctcactttcggcggagggaccaaggtggagatcaaa

SEQ ID NO: 9240 - DNA, 324 bp, Artificial Sequence
  Synthetic polynucleotide encoding artificial human antibody VL domain
gaaattgtgttgacgcagtctccaggcaccctgtctttgtctccaggggagtcggccaccctctcctgcggggccagtcagactgttaatagcaactacttagtctggtaccagcagaagcctggccaggctcccaggctcctcatttatggtgcatcccatagggccactgacgttccagacagaatcagtggcggtggagctgggacacacttcactctcaccatcagaagactggaacctgaagattctgcagtgtattattgtcaccaatttggggacccaccctacacttttggccaggggaccagggtggagatcaaa

SEQ ID NO: 9241 - DNA, 336 bp, Artificial Sequence
  Synthetic polynucleotide encoding artificial human antibody VL domain
gatattgtgatgactcagtctccactctccctgcccgtcacccctggagagccggcctccatctcctgcaggtctagtcagagcctcctgcatagtaatggatacaactatttggattggtacctgcagaagccagggcagtctccacagctcctgatctatttgggttctaatcgggcctccggggtccctgacaggttcagtggcagtggatcaggcacagattttacactgaaaatcagcagagtggaggctgaggatgttggggtttattactgcatgcaagctctacaaactcctcccaccttcggccaagggacacgactggagattaaa

SEQ ID NO: 9242 - DNA, 330 bp, Artificial Sequence; identical to SEQ ID NO: 9136
  Synthetic polynucleotide encoding artificial human antibody VL domain

SEQ ID NO: 9243 - DNA, 324 bp, Artificial Sequence
  Synthetic polynucleotide encoding artificial human antibody VL domain
gaaattgtgttgacgcagtctccaggcaccctgtctttgtctccaggtgaaagagccaccctctcctgcagggccagtcagagtgttagcagcagtttcttagcctggtatcagcagagacctggccaggctcccaggctcctcatttatggtgcatccaggagggcctctggcatcccagacaggttcagtgccggtgggtctgggacagacttcactctcaccatcagcagactggagcctgaagattttgcaatgtattactgtcaacagtttggtacgtcaccggagactttcggccctgggaccaaagtggatgtcaaa

SEQ ID NO: 9244 - DNA, 336 bp, Artificial Sequence; identical to SEQ ID NO: 9183
  Synthetic polynucleotide encoding artificial human antibody VL domain

SEQ ID NO: 9245 - DNA, 318 bp, Artificial Sequence
  Synthetic polynucleotide encoding artificial human antibody VL domain
tcctatgagctgactcagccaccctcagtgtccgtgtccccaggacagacagccagcatcacctgctctggagataaattgggggataaatatgcttgctggtatcagcagaagccaggccagtcccctgtgctggtcatctatcaagatagcaagcggccctcagggatccctgagcgattctctggctccaactctgggaacacagccactctgaccatcagcgggacccaggctatggatgaggctgactattactgtcaggcgtgggacagcagcatcgtggtattcggcggagggaccaagctgaccgtccta

SEQ ID NO: 9246 - DNA, 336 bp, Artificial Sequence
  Synthetic polynucleotide encoding artificial human antibody VL domain
gatgttgtgatgactcagtctccactctccctgcccgtcacccttggacagccggcctccatctcctgcaggtctagtcaaagcctcgtacacagtgatggaaacacctacttgaattggtttcagcagaggccaggccaatctccaaggcgcctaatttataaggtttctaaccgggactctggggtcccagacagattcagcggcagtgggtcaggcactgatttcacactgaaaatcagcagggtggaggctgaggatgttggggtttattactgcatgcaaggtacacactggcctcgtacttttggccaggggaccaagctggagatcaaa

SEQ ID NO: 9247 - DNA, 318 bp, Artificial Sequence
  Synthetic polynucleotide encoding artificial human antibody VL domain
tcctatgagctgactcagccaccctcagtgtccgtgtccccaggacagacagccagcatcacctgctctggagataaattgggggataaatatgcttactggtatcagcagaagccaggccagtcccctgtgctggtcatctatcaagatagcaagcggccctcagggatccctgagcgattctctggctccaactctgggaacacagccactctgaccatcagcggcacccaggctatggatgaggctgactattactgtcaggcgtgggacagcagcactgtggtattcggcggagggaccaagctgaccgtccta

SEQ ID NO: 9248 - DNA, 324 bp, Artificial Sequence
  Synthetic polynucleotide encoding artificial human antibody VL domain
tcctatgttctgactcagccaccctcggtgtcagtggccccaggaaagacggccacgattacctgtgggggaagcgacactggaagtcaaagtgtgcactggtaccagcagaagccaggccaggcccctgtgctggtcgtctatgacaatagcgaccggccctcagggatccctgtgcgattttctggctccaactctgggaacacggccaccctgactgtcagcagggtcgaagccggggatgaggccgactattactgtcaggtgtgggataccagtagtgatgaatgggtgttcggcggagggaccaagctgaccgtccta

SEQ ID NO: 9249 - DNA, 324 bp, Artificial Sequence
  Synthetic polynucleotide encoding artificial human antibody VL domain
gaaatagtgttgacgcagtctccagccaccctgtctgtgtctccaggggaaagaggcaccctctcctgcagggccagtcagagtgttaacagcaacttagcctggtaccagcagaagcctggccaggcgcccaggctcctcatctatggtgcatccaccagggccacaggtatcccagccaggttcagtggcagtgggtctgggacagacttcagtctcaccatcagcggcctgcagtctgaagattttgcagtttattactgtcagcagtataatgactggcctccgtggacgttcggccaagggaccaaggtggaaatcaaa

SEQ ID NO: 9250 - DNA, 324 bp, Artificial Sequence
  Synthetic polynucleotide encoding artificial human antibody VL domain
gaaattgtgttgacgcagtctccaggcaccctgtctttgtctccaggggaaagagccaccctctcctgcagggccagtcagagtgttagcagcagctacttagcctggtaccagcagaaacctggccaggctcccaggctcctcatctatggtgcatccagcagggccactggcatcccagacaggttcagtggcagtgggtctgggacagacttcactctcaccatcagcagactggagcctgaagattttgcagtgtattactgtcagcagtatggtagctcacctctcactttcggcggagggaccaaggtggagatcaaa

SEQ ID NO: 9251 - DNA, 321 bp, Artificial Sequence
  Synthetic polynucleotide encoding artificial human antibody VL domain
gacatccagatgacccagtctccatcctcactgtctgcatctgtaggagacagagtcaccatcacttgtcgggcgagtcagggcattagcaattatttagcctggtttcagcagaaaccagggaaagcccctaagtccctgatctatgctgcatccagtttgcaaagtggggtcccatcaaagttcagcggcagtggatctgggacagatttcactctcaccatcagcagcctgcagcctgaagattttgcaacttattactgccaacagtataatagttacccattcactttcggccctgggaccaaagtggatatcaaa

SEQ ID NO: 9252 - DNA, 324 bp, Artificial Sequence
  Synthetic polynucleotide encoding artificial human antibody VL domain
gaaatagtgatgacgcagtctccagccaccctgtctgtgtctccaggggaaagagccaccctctcctgcagggccagtcagagtgttagcagcaacttagcctggtaccagcagaaacctggccaggctcccaggctcctcatctatggtgcatccaccagggccactggtatcccagccaggttcagtggcagtgggtctgggacagagttcactctcaccatcagcagcctgcagtctgaagattttgcagtttattactgtcagcagtataataactggcctccgtacacttttggccaggggaccaagctggagatcaaa

SEQ ID NO: 9253 - DNA, 324 bp, Artificial Sequence; identical to SEQ ID NO: 8838
  Synthetic polynucleotide encoding artificial human antibody VL domain

SEQ ID NO: 9254 - DNA, 321 bp, Artificial Sequence
  Synthetic polynucleotide encoding artificial human antibody VL domain
gaaatagtgatgacgcagtctccagccaccctgtctgtgtctccaggggaaagagccaccctctcctgcagggccagtcagagtgttagcagcaacttagcctggtaccagcagaaacctggccaggctcccaggctcctcatctatggtgcatccaccagggccactggtatcccagccaggttcagtggcagtgggtctgggacagagttcactctcaccatcagcagcctgcagtctgaagattttgcagtttattactgtcagcagtataataactggcctctgacgttcggccaagggaccaaggtggaaatcaaa

SEQ ID NO: 9255 - DNA, 324 bp, Artificial Sequence
  Synthetic polynucleotide encoding artificial human antibody VL domain
tcctatgtgctgactcagccaccctcggtgtcagtggccccaggaaagacggccaggattacctgtgggggaaacaacattggaagtaaaagtgtgcactggtaccagcagaagccaggccaggcccctgtgctggtcgtctatgatgatagcgaccggccctcagggatccctgagcgattctctggctccaactctgggaacacggccaccctgaccatcagcagggtcgaagccggggatgaggccgactattactgtcaggtgtgggatagtagtagtgattcttatgtcttcggaactgggaccaaggtcaccgtccta

SEQ ID NO: 9256 - DNA, 321 bp, Artificial Sequence
  Synthetic polynucleotide encoding artificial human antibody VL domain
gacatccagatgacccagtctccatcctccctgtctgcatctgtaggagacagagtcaccatcacttgccgggcaagtcagagcattagcagctatttaaattggtatcagcagaaaccagggaaagcccctaagctcctgatctatgctgcatccagtttgcaaagtggggtcccatcaaggttcagtggcagtggatctgggacagatttcactctcaccatcagcagtctgcaacctgaagattttgcaacttactactgtcaacagagttacagtaccccggacaccttcggccaagggacacgactggagattaaa

SEQ ID NO: 9257 - DNA, 330 bp, Artificial Sequence
  Synthetic polynucleotide encoding artificial human antibody VL domain
aattttatgctgactcagccccactctgtgtcggagtctccggggaagacggtaaccatctcctgcaccggcagcagtggcagcattgccagcaactatgtgcagtggtaccagcagcgcccgggcagtgcccccaccactgtgatctatgaggataaccaaagaccctctggggtccctgatcggttctctggctccatcgacagctcctccaactctgcctccctcaccatctctggactgaagactgaggacgaggctgactactactgtcagtcttatgatagcagcacctgggtgttcggcggagggaccaagctgaccgtccta

SEQ ID NO: 9258 - DNA, 327 bp, Artificial Sequence
  Synthetic polynucleotide encoding artificial human antibody VL domain
gacatccagatgacccagtctccttcctccctgtctgcacgtcttggcgacagcgtcaccttcacttgccggacgaatgaggacatcggagaccatttaaattggtatcagcaaagtccaggagaggccccccgactcctgatctatgatagatcttctttggagtcaggggtcccctcaaggttcagtggcagtggatctggcacatattttgaactcaccgtcactgacgtgcagcctgaagacgttggaacatattattgtcaatcttacaataatgtctctccaatgtacatttttggccgggggaccactctcgagatcaaa

SEQ ID NO: 9259 - DNA, 321 bp, Artificial Sequence
  Synthetic polynucleotide encoding artificial human antibody VL domain
tcctatgagctgacacagccaccctcggtgtcagtgtccccaggacaaacggccaggatcacctgctctggagatgcattgccaaaaaaatatgcttattggtaccagcagaagtcaggccaggcccctgtgctggtcatctatgaggacagcaaacgaccctccgggatccctgagagattctctggctccagctcagggacaatggccaccttgactatcagtggggcccaggtggaggatgaagctgactactactgttactcaacagacagcagtggtacgagggtgttcggcggagggaccaagctgaccgtccta

SEQ ID NO: 9260 - DNA, 318 bp, Artificial Sequence
  Synthetic polynucleotide encoding artificial human antibody VL domain
gacatccagatgacccagtctccttccaccctgtctgcatctgttggagacagagtcaccatcacttgccgggccagtcagagtattagaaactggttggcctggtatcagcagaaacctgggacagccccgaagaccctgatctataaggcgtctagtttggccagtggggtcccagcaaggttcagcggcagtggatatgggacagaattcactctcaccatcagcagcctgcagcctgatgattttgctacttattactgcctccagtataatagttattggacgttcggccaagggaccacggtggaattcaaa

SEQ ID NO: 9261 - DNA, 333 bp, Artificial Sequence
  Synthetic polynucleotide encoding artificial human antibody VL domain
cagtctgccctgactcagcctgcctccgtgtctgggtctcctggacagtcgatcaccatctcctgcactggaacgaccgatgacattcgtgattctaactttgtctcctggtaccaacaacacccaggcaaggcccccaaactcattatttatgatgtccgtgatcggcccccgggggtttctagtcggttctctggatccaagtctggctacacggcctccctgaccatctctgggctccagtctgaggacgaggctgattatttctgcggctcatattcgaccaccaccactctcggtctcttcggcggagggaccaaggtgaccgtccta

SEQ ID NO: 9262 - DNA, 324 bp, Artificial Sequence
  Synthetic polynucleotide encoding artificial human antibody VL domain
gaaatagtgatgacgcagtctccagccaccctgtctgtgtctccaggggaaagagccaccctctcctgcagggccagtcagagtgttagcagcaacttagcctggtaccagcagaaacctggccaggctcccaggctcctcatctatggtgcatccaccagggccactggtatcccagccaggttcagtggcagtgggtctgggacagagttcactctcaccatcagcagcctgcagtctgaagattttgcagtttattactgtcagcagtataataactggcccctgtacacttttggccaggggaccaagctggagatcaaa

SEQ ID NO: 9263 - DNA, 333 bp, Artificial Sequence
  Synthetic polynucleotide encoding artificial human antibody VL domain
cagtctgccctgactcagcctgcctccgtgtctgggtctcctggacagtcgatcaccatctcctgcactggaaccagcagtgacgttggtggttataactatgtctcctggtaccaacaacacccaggcaaagcccccaaactcatgatttatgatgtcagtaatcggccctcaggggtttctaatcgcttctctggctccaagtctggcaacacggcctccctgaccatctctgggctccaggctgaggacgaggctgattattactgcagctcatatacaagcagcagcactccttatgtcttcggaactgggaccaaggtcaccgtccta

SEQ ID NO: 9264 - DNA, 321 bp, Artificial Sequence
  Synthetic polynucleotide encoding artificial human antibody VL domain
gccatccaggtgacccagtctccaacctccctgtctgcctctgttggagacagagtcaccatcacttgccgggcaagtcagggcattagcagtgctttagcctggtatcagcagaaactagggaaagctcctaagctcctgatctatgatgcctccagattggaaagtggggtcccatcaaggttcagcggcagtggatctgggacagatttcactctcaccatcagcagcctgcagcctgaggattttgcaacttactactgtcaacagtttaatattttcccccctcacttcggcggagggaccaaggtggagatcaaa

SEQ ID NO: 9265 - DNA, 330 bp, Artificial Sequence
  Synthetic polynucleotide encoding artificial human antibody VL domain
cagtctgtactggctcagccaccctcagcgtctgggacccccgggcagagggtcaccatctcttgttctggaagcagctccaacatcggaaggaattatgtttattggtaccagcagttcccaggaatggcccccaaagtcctcatctataggaattatgagcggccctcaggggtcgttgaccgattctctggctccaagtctggcacctcagcctccctggccatcagtgggctccggtccgaggatgaggctgattattattgtgcagcatgggatgacagcctgagtggttatctcttcggacctgggaccaaggtcaccgtccta

SEQ ID NO: 9266 - DNA, 330 bp, Artificial Sequence; identical to SEQ ID NO: 8886
  Synthetic polynucleotide encoding artificial human antibody VL domain

SEQ ID NO: 9267 - DNA, 330 bp, Artificial Sequence
  Synthetic polynucleotide encoding artificial human antibody VL domain
cagtctgtgctgactcagccaccctcagcgtctgggacccccgggcagagggtcaccatctcttgttctggaagcagctccaacatcggaagtaattatgtatactggtaccagcagctcccaggaacggcccccaaactcctcatctataggaataatcagcggccctcaggggtccctgaccgattctctggctccaagtctggcacctcagcctccctggccatcagtgggctccggtccgaggatgaggctgattattactgtgcagcatgggatgacagcctgagtggttgggtgttcggcggagggaccaagctgaccgtccta

SEQ ID NO: 9268 - DNA, 330 bp, Artificial Sequence; identical to SEQ ID NO: 9036
  Synthetic polynucleotide encoding artificial human antibody VL domain

SEQ ID NO: 9269 - DNA, 324 bp, Artificial Sequence
  Synthetic polynucleotide encoding artificial human antibody VL domain
gaaattgtgttgacgcagtctccaggcaccctgtctttgtctccaggggaaagagccaccctctcctgcagggccagtcagagtgttagcagcagctacttagcctggtaccagcagaaacctggccaggctcccaggctcctcatctatggtgcatccagcagggccactggcatcccagacaggttcagtggcagtgggtctgggacagacttcactctcaccatcagcagactggagcctgaagattttgcagtgtattactgtcagcagtatggtagctcacctcaaacttttggccaggggaccaagctggagatcaaa

SEQ ID NO: 9270 - DNA, 321 bp, Artificial Sequence
  Synthetic polynucleotide encoding artificial human antibody VL domain
gacatccagttgacccagtctccatcctccctgtctgcatctgtaggagacagagtcaccatcacttgccgggccagtcagggcattagcagttatttagcctggtatcagcaaaaaccagggaaagcccctaagctcctgatctatgctgcatccactttgcaaagtggggtcccatcaaggttcagcggcagtggatctgggacagatttcactctcaccatcagcagcctgcagcctgaagattttgcaacttattactgtcaacagcttaatagttacccgtacacttttggccaggggaccaagctggagatcaaa

SEQ ID NO: 9271 - DNA, 330 bp, Artificial Sequence
  Synthetic polynucleotide encoding artificial human antibody VL domain
cagtctgccctgactcagcctgcctccgtgtctgggtctcctggacagtcgatcaccatctcctgcactggaaccagcagtgacgttggtggttataactatgtctcctggtaccaacagcacccaggcaaagcccccaaactcatgatttatgatgtcagtaatcggccctcaggggtttctaatcgcttctctggctccaagtctggcaacacggcctccctgaccatctctgggctccaggctgaggacgaggctgattattactgcagctcatatacaagcagcagcactctcgtgttcggcggagggaccaagctgaccgtccta

SEQ ID NO: 9272 - DNA, 321 bp, Artificial Sequence
  Synthetic polynucleotide encoding artificial human antibody VL domain
gacatccagatgacccagtctccatcctccccgtctgcatctgtaggagacagagtcaccatcacttgccgggcgagccagggcattagcaattatttagcctggtatcagcagaaaccagggaaagttcctaagctcctgatctatgctgcatccactttgcaatcaggggtcccatctcggttcagtggcagtggatctgggacagatttcactctcaccatcagcagcctgcagcctgaagatgttgcaacttattactgtcaaaagtataagagtgccccgtacacttttggccaggggaccaagctggagatcaaa

SEQ ID NO: 9273 - DNA, 321 bp, Artificial Sequence
  Synthetic polynucleotide encoding artificial human antibody VL domain
gacatccagatgacccagtctccatcctccctgtctgcatctgtaggagacagagtcaccatcacttgccaggcgagtcaggacattagcaactatttaaattggtatcagcagaaaccagggaaagcccctaagctcctgatctacgatgcatccaatttggaaacaggggtcccatcaaggttcagtggaagtggatctgggacagattttactttcaccatcagcagcctgcagcctgaagatattgcaacatattactgtcaacagtatgataatccttcgatcaccttcggccaagggacacgactggagattaaa

SEQ ID NO: 9274 - DNA, 324 bp, Artificial Sequence; identical to SEQ ID NO: 8838
  Synthetic polynucleotide encoding artificial human antibody VL domain

SEQ ID NO: 9275 - DNA, 336 bp, Artificial Sequence
  Synthetic polynucleotide encoding artificial human antibody VL domain
gatattgtgatgactcagtctccactctccctgcccgtcacccctggagagccggcctccatctcctgcaggtctagtcagagcctcctgcatagtaatggatacaactatttggattggtacctgcagaagccagggcagtctccacagctcctgatctatttgggttctaatcgggcctccggggtccctgacaggttcagtggcagtggatcaggcacagattttacactgaaaatcagcagagtggaggctgaggatgttggggtttattactgcatgcaagctctacaaactcccctcactttcggcggagggaccaaggtggagatcaaa

SEQ ID NO: 9276 - DNA, 324 bp, Artificial Sequence
  Synthetic polynucleotide encoding artificial human antibody VL domain
tcctatgtgctgactcagccaccctcagtgtcagtggccccaggaaagacggccaggattacctgtgggggaaacaacattggaagtaaaagtgtgcactggtaccagcagaagccaggccaggcccctgtgctggtcatctattatgatagcgaccggccctcagggatccctgagcgattctctggctccaactctgggaacacggccaccctgaccatcagcagggtcgaagccggggatgaggccgactattactgtcaggtgtgggatagtagtagtgatcatagggtattcggcggagggaccaagctgaccgtccta

SEQ ID NO: 9277 - DNA, 309 bp, Artificial Sequence
  Synthetic polynucleotide encoding artificial human antibody VL domain
gaaattgtgttgacacagtctccagccaccctgtctttgtctccaggggaaagagccaccctctcctgcagggccagtcagagtgttagcagctacccagcctggtatcgacagaaatctggccaggctcccaggctgctcatctatgatgcatccaaaagggccactggcatcccagccaggttcagtggcagtgggtctgggacagacttcactctcaccatcagtagcctggagcctgaagattttgcagtttattactgtcaacaccgtcggacttttggccaggggaccaaggtggagagcaaa

SEQ ID NO: 9278 - DNA, 321 bp, Artificial Sequence
  Synthetic polynucleotide encoding artificial human antibody VL domain
gacatccagatgacccagtctccttccaccctgtctgcatctgtaggagacagagtcaccatcacttgccgggccagtcagagtattagtagctggttggcctggtatcagcagaaaccagggaaagcccctaagctcctgatctataaggcatctagtttagaaagtggggtcccatcaaggttcagcggcagtggatctgggacagaattcactctcaccatcagcagcctgcagcctgatgattttgcaacttattactgccaacagtataatagttacccgtacacttttggccaggggaccaagctggagatcaaa

SEQ ID NO: 9279 - DNA, 324 bp, Artificial Sequence
  Synthetic polynucleotide encoding artificial human antibody VL domain
tcctatgtgctgactcagccaccctcagtgtcagtggccccaggaaagacggccaggattacctgtgggggaaacaacattggaagtaaaagtgtgcactggtaccagcagaagccaggccaggcccctgtgctggtcatctattatgatagcgaccggccctcagggatccctgagcgattctctggctccaactctgggaacacggccaccctgaccatcagcagggtcgaagccggggatgaggccgactattactgtcaggtgtgggatagtagtagtgatcatgtggtattcggcggagggaccaagctgaccgtccta

SEQ ID NO: 9280 - DNA, 324 bp, Artificial Sequence
  Synthetic polynucleotide encoding artificial human antibody VL domain
gacatcgagatgacccagtctccatcctccctgtctgcatctgtaggagacagagtcaccatcacttgccgggcaagtcagtacattaggaactatttaaattggtatcaacagaaaccagggaaagcccctaaactcctgatctataatgcatccggtttgcaaagtggggtcccatcaaggttcagtggcagtggatctgggacagatttcactctcaccatcagcagtctgcaacctgaagattttgcaacttactactgtcaacagagttacagtgatactcgggtcacgttcggccaagggacacgactggacattaaa

SEQ ID NO: 9281 - DNA, 330 bp, Artificial Sequence
  Synthetic polynucleotide encoding artificial human antibody VL domain
gaaattgtgttgacacagtctccagccaccctgtctttgtctccaggggaaagagccaccctctcctgcagggccagtcagagtgttagcagctacttagcctggtaccaacagaaacctggccaggctcccaggctcctcatctatgatgcatccaacagggccactggcatcccagccaggttcagtggcagtgggtctgggacagacttcactctcaccatcagcagcctagagcctgaagattttgcagtttattactgtcagcagcgtagcaactggcctccgggggctctcactttcggcggagggaccaaggtggagatcaaa

SEQ ID NO: 9282 - DNA, 336 bp, Artificial Sequence
  Synthetic polynucleotide encoding artificial human antibody VL domain
gatgttgtgatgactcagtctccactctccctgcccgtcacccttggacagccggcctccatctcctgcaggtctagtcaaagcctcgtatacagtgatggaaacacctacttgaattggtttcagcagaggccaggccaatctccaaggcgcctaatttataaggtttctaaccgggactctggggtcccagacagattcagcggcagtgggtcaggcactgatttcacactgaaaatcagcagggtggaggctgaggatgttggggtttattactgcatgcaagctctacaaactccattcactttcggccctgggaccaaagtggatatcaaa

SEQ ID NO: 9283 - DNA, 336 bp, Artificial Sequence
  Synthetic polynucleotide encoding artificial human antibody VL domain
gatattgtgatgactcagtctccactctccctgcccgtcacccctggagagccggcctccatctcctgcaggtctagtcagagcctcctgcatagtaatggatacaactatttggattggtacctgcagaagccagggcagtctccacagctcctgatctatttgggttctaatcgggcctccggggtccctgacaggttcagtggcagtggatcaggcacagattttacactgaaaatcagcagagtggaggctgaggatgttggggtttattactgcatgcaagctctacaaactcctcacacttttggccaggggaccaagctggagatcaaa

SEQ ID NO: 9284 - DNA, 324 bp, Artificial Sequence
  Synthetic polynucleotide encoding artificial human antibody VL domain
gacatccagatgacccagtctccatcctccctgtctgcatctgtaggagacagagtcaccatcacttgccgggcaagtcagagcattagcagctatttaaattggtatcagcagaaaccagggaaagcccctaagctcctgatctatgctgcatccagtttgcaaagtggggtcccatcaaggttcagtggcagtggatctgggacagatttcactctcaccatcagcagtctgcaacctgaagattttgcaacttactactgtcaacagagttacagtacccttatgtacacttttggccaggggaccaagctggagatcaaa

SEQ ID NO: 9285 - DNA, 321 bp, Artificial Sequence
  Synthetic polynucleotide encoding artificial human antibody VL domain
tcctatgagctgactcagccaccctcagtgtccgtgtccccaggacagacagccagcatcacctgctctggagataaattgggggataaatatgcttgctggtatcagcagaagccaggccagtcccctgtgctggtcatctatcaagatagcaagcggccctcagggatccctgagcgattctctggctccaactctgggaacacagccactctgaccatcagcgggacccaggctatggatgaggctgactattactgtcaggcgtgggacagcagcactaattatgtcttcggaactgggaccaaggtcaccgtccta

SEQ ID NO: 9286 - DNA, 324 bp, Artificial Sequence; identical to SEQ ID NO: 9229
  Synthetic polynucleotide encoding artificial human antibody VL domain

SEQ ID NO: 9287 - DNA, 327 bp, Artificial Sequence
  Synthetic polynucleotide encoding artificial human antibody VL domain
cagtctgtgctgactcagccaccctcagcgtctgggacccccgggcagagggtcaccatctcttgttctggaagcagctccaacatcggaagtaattatgtatactggtaccagcagctcccaggaacggcccccaaactcctcatctataggaataatcagcggccctcaggggtccctgaccgattctctggctccaagtctggcacctcagcctccctggccatcagtgggctccggtccgaggatgaggctgattattactgtgcagcatgggatgacagcctgagtggtccattcggcggagggaccaagctgaccgtccta

SEQ ID NO: 9288 - DNA, 321 bp, Artificial Sequence
  Synthetic polynucleotide encoding artificial human antibody VL domain
gacatccagatgacccagtctccatcctccctgtctgcatctgtaggagacagagtcaccatcacttgccgggcgagtcagggcattagcaattatttagcctggtatcagcagaaaccagggaaagttcctaagctcctgatctatgctgcatccactttgcaatcaggggtcccatctcggttcagtggcagtggatctgggacagatttcactctcaccatcagcagcctgcagcctgaagatgttgcaacttattactgtcaaaagtataacagtgccccgtggacgttcggccaagggaccaaggtggaaatcaaa

SEQ ID NO: 9289 - DNA, 321 bp, Artificial Sequence
  Synthetic polynucleotide encoding artificial human antibody VL domain
gacatccagatgacccagtctccatcctccctctctgcatctgtaggagacagagtcaccatcacttgccaggcgagtcaggacattagcaactatttaaattggtatcagcagaaaccagggaaagcccctaagctcctgatctacgatgcatccaatttggaaacaggggtcccatcaaggttcagtggaagtggatctgggacagattttactttcaccatcagcagcctgcagcctgaagatattgcaacatattactgtcaacagcatgataatctccctctcactttcggcggagggaccaaggtggagatcaaa

SEQ ID NO: 9290 - DNA, 321 bp, Artificial Sequence
  Synthetic polynucleotide encoding artificial human antibody VL domain
gaaatagtgatgacgcagtctccagccaccctgtctgtgtctccaggggaaagagccaccctctcctgcagggccagtcagagtgttagcagcaacttagcctggtaccagcagaaacctggccaggctcccaggctcctcatctatggtgcatccaccagggccactggtatcccagccaggttcagtggcagtgggtctgggacagagttcactctcaccatcagcagcctgcagtctgaagattttgcagtttattactgtcagcagtataataactggcctcggacgttcggccaagggaccaaggtggaaatcaaa

SEQ ID NO: 9291 - DNA, 321 bp, Artificial Sequence
  Synthetic polynucleotide encoding artificial human antibody VL domain
gacatccagatgacccagtctccatcttccgtgtctgcatctgtaggagacagagtcaccatcacttgtcgggcgagtcagggtattagcagctggttagcctggtatcagcagaaaccagggaaagcccctaagctcctgatctatgctgcatccagtttgcaaagtggggtcccatcaaggttcagcggcagtggatctgggacagatttcactctcaccatcagcagcctgcagcctgaagattttgcaacttactattgtcaacaggctaacagtttccctctcactttcggcggagggaccaaggtggagatcaaa

SEQ ID NO: 9292 - DNA, 324 bp, Artificial Sequence
  Synthetic polynucleotide encoding artificial human antibody VL domain
gaaattgtgttgacgcagtctccaggcaccctgtctttgtctccaggggaaagagccaccctctcctgcagggccagtcagagtgttagcagcagctacttagcctggtaccagcagaaacctggccaggctcccaggctcctcatctatggtgcatccagcagggccactggcatcccagacaggttcagtggcagtgggtctgggacagacttcactctcaccatcagcagactggagcctgaagattttgcagtgtattactgtcagcagtatggtagctcattgtacacttttggccaggggaccaagctggagatcaaa

SEQ ID NO: 9293 - DNA, 330 bp, Artificial Sequence
  Synthetic polynucleotide encoding artificial human antibody VL domain
tcctatgagctgacacagccaccctcggtgtcagtgtccccaggacagacggccaggatcacctgctctggagatgcattgccaaagcaatatgcttattggtaccagcagaagccaggccaggcccctgtgctggtgatatataaagacagtgagaggccctcagggatccctgagcgattctctggctccagctcagggacaacagtcacgttgaccatcagtggagtccaggcagaagacgaggctgactattactgtcaatcagcagacagcagtggtacttatcctaattgggtgttcggcggagggaccaagctgaccgtccta

SEQ ID NO: 9294 - DNA, 321 bp, Artificial Sequence
  Synthetic polynucleotide encoding artificial human antibody VL domain
gacatccagatgacccagtctccatcctccctgtctgcatctgtaggagacagagtcaccatcacttgccaggcgagtcaggacattagcaactatttaaattggtatcagcagaaaccagggaaagcccctaagctcctgatctacgatgcatccaatttggaaacaggggtcccatcaaggttcagtggaagtggatctgggacagattttactttcaccatcagcagcctgcagcctgaagatattgcaacatattactgtcaacagtatgataatctcatgtacacttttggccaggggaccaagctggagatcaaa

SEQ ID NO: 9295 - DNA, 333 bp, Artificial Sequence
  Synthetic polynucleotide encoding artificial human antibody VL domain
cagtctgccctgactcagcctgcctccgtgtctgggtctcctggacagtcgatcaccatctcctgcactggaaccagcagtgatgttgggagttataaccttgtctcctggtaccaacagcacccaggcaaagcccccaaactcatgatttatgaggtcagtaagcggccctcaggggtttctaatcgcttctctggctccaagtctggcaacacggcctccctgacaatctctgggctccaggctgaggacgaggctgattattactgctgctcatatgcaggtagtagcacttccctggtattcggcggagggaccaagctgaccgtccta

SEQ ID NO: 9296 - DNA, 330 bp, Artificial Sequence; identical to SEQ ID NO: 9136
  Synthetic polynucleotide encoding artificial human antibody VL domain

SEQ ID NO: 9297 - DNA, 318 bp, Artificial Sequence
  Synthetic polynucleotide encoding artificial human antibody VL domain
gacatcctgatgacccagtcgccatcctccctgtctgcatctgttggagacagagtcaccatcacttgccaggcgagtcaggacattagcaaccatttaaattggtatcaacagaaaccagggaaagcccctaagttcctgatctacgatgtttccaatttggaaaaaggggtcccatcaaggttcagtggaagtggatctgggacagactttactttcaccatcagcagcctgcagcctgaagatgttggaacatattactgtcaacagtacgataatctccggacgttcggccaagggaccaaggtggaaatcaaa

SEQ ID NO: 9298 - DNA, 321 bp, Artificial Sequence; identical to SEQ ID NO: 8788
  Synthetic polynucleotide encoding artificial human antibody VL domain

SEQ ID NO: 9299 - DNA, 336 bp, Artificial Sequence
  Synthetic polynucleotide encoding artificial human antibody VL domain
gatattgtgatgactcagtctccactctccctgcccgtcacccctggagagccggcctccatctcctgcaggtctagtcagagcctcctgcatagtaatggatacaactatttggcttggtacctgcagaagccagggcagtctccacagctcctgatctatttgggttctaggcgggcctccggggtccctgacaggttcagtggcagtggatcaggcacagactttacactgaaaatcagcagagtggaggctgacgatgttggggtttattactgcatggaaggtctacaaactcctcccactttcgccggagggaccaaggtggagatcaaa

SEQ ID NO: 9300 - DNA, 309 bp, Artificial Sequence
  Synthetic polynucleotide encoding artificial human antibody VL domain
gacatccagatgacccagtctccatcctccctggctgcatctgtaggagacagagtcgtcgtcacttgccaggcgagtcaggacattgacaaccatttaaactggtatcagcagaaaccagggagggcccctaaactcctgatctacgatgcgtccaatttggaaacaggggtcccatcgaggttcagtggaagtggttttggcactgagtttactttcaccattagtagcctccagcctgaagatataggagtctattactgtcaacaacgcgggcctttcggccctgggaccagagtgggcatcaaa

SEQ ID NO: 9301 - DNA, 321 bp, Artificial Sequence
  Synthetic polynucleotide encoding artificial human antibody VL domain
gacatccagatgacccagtctccatcctccctgtctgcatctataggagacagagtcaccatcacttgccgggcaagtcagagcattagtaggtctttaaattggtatcagcacacaccagggaaagcccctaagctgctgatatatactgcgtccactttgcaaagtggggtcccatcaaggttcagtggcgatggatctgggacagatttcactctcaccatcagcagtgtgcaacctgaagattttggaacttactactgtcaacagaattaccgtaaccctcaaacgttcggccaagggaccaaggtggaaatcaaa

SEQ ID NO: 9302 - DNA, 324 bp, Artificial Sequence
  Synthetic polynucleotide encoding artificial human antibody VL domain
gaaattgtgttgacgcagtctccaggcaccctgtctttgtctccaggggaaagagccaccctctcctgcagggccagccagagtcttaccggaaactacttagcctggtatcggcagagccctggccaggctcccagactcctcatttatggtgcatccaggaggcccgctggcagcccgggcaggttcagtggcagtgggtctgggacagacttcactctcaccatcagcagcctggagcctgaagattttgcagtgtattactgtcagcagtatagttccttacctcggacgttcggccaggggaccagggtggacatcaaa

SEQ ID NO: 9303 - DNA, 324 bp, Artificial Sequence
  Synthetic polynucleotide encoding artificial human antibody VL domain
tcctatgtgctgactcagccaccctcggtgtcagtggccccaggaaagacggccaggattacctgtgggggaaacaacattggaagtaaaagtgtgcactggtaccagcagaagccaggccaggcccctgtgctggtcgtctatgatgatagcgaccggccctcagggatccctgagcgattctctggctccaactctgggaacacggccaccctgaccatcagcagggtcgaagccggggatgaggccgactattactgtcaggtgtgggatagtagtagtgatcatggagtgttcggcggagggaccaagctgaccgtccta

SEQ ID NO: 9304 - DNA, 318 bp, Artificial Sequence; identical to SEQ ID NO: 8811
  Synthetic polynucleotide encoding artificial human antibody VL domain

SEQ ID NO: 9305 - DNA, 321 bp, Artificial Sequence
  Synthetic polynucleotide encoding artificial human antibody VL domain
gacatccagatgacccagtctccatcctccctgtctgcatctgtaggagacagagttaacattacttgccaggcgagtcaggacattaagaactatttaaattggtatcaggagacaccagggaaagcccctaaactcctgatctacgatgcaaccaatttggaaacaggggtcccttcaaggttcagtggaagtggatctgggacagattttactttcaccatcagcagcctgcagcctgaagatgttgcaacatattactgtcaccagtatgataatctgccattcactttcggccctgggaccagagtggatttcaaa

SEQ ID NO: 9306 - DNA, 327 bp, Artificial Sequence
  Synthetic polynucleotide encoding artificial human antibody VL domain
tcttctgagctgactcaggaccctgctgtgtctgtggccttgggacagacagtcaggatcacatgccaaggagacagcctcagaagctattatgcaagctggtaccagcagaagccaggacaggcccctgtacttgtcatctatggtaaaaacaaccggccctcagggatcccagaccgattctctggctccagctcaggaaacacagcttccttgaccatcactggggctcaggcggaagatgaggctgactattactgtaactcccgggacagcagtggtaaccatctttatgtcttcggaactgggaccaaggtcaccgtccta

SEQ ID NO: 9307 - DNA, 324 bp, Artificial Sequence; identical to SEQ ID NO: 9232
  Synthetic polynucleotide encoding artificial human antibody VL domain

SEQ ID NO: 9308 - DNA, 339 bp, Artificial Sequence
  Synthetic polynucleotide encoding artificial human antibody VL domain
gatgttgtgatgactcagtctccactctccctgcccgtcacccctggagagccggcctccatctcctgcaggtctagtcaaagcctcgtatacagtgatggaaacacctacttgaattggtttcagcagaggccaggccaatctccaaggcgcctaatttataaggtttctaaccgggactctggggtcccagacagattcagcggcagtgggtcaggcactgatttcacactgaaaatcagcagggtggaggctgaggatgttggggtttattactgcatgcaaggtacacactggcctccgtgcactttcggcggagggaccaaggtggagatcaaa

SEQ ID NO: 9309 - DNA, 321 bp, Artificial Sequence
  Synthetic polynucleotide encoding artificial human antibody VL domain
tcctatgagctgactcagccaccctcagtgtccgtgtccccaggacagacagccagcatcacctgctctggagataaattgggggataaatatgcttgctggtatcagcagaagccaggccagtcccctgtgctggtcatctatcaagatagcaagcggccctcagggatccctgagcgattctctggctccaactctgggaacacagccactctgaccatcagcgggacccaggctatggatgaggctgactattactgtcaggcgtgggacagcagcactgcatgggtgttcggcggagggaccaagctgaccgtccta

SEQ ID NO: 9310 - DNA, 330 bp, Artificial Sequence
  Synthetic polynucleotide encoding artificial human antibody VL domain
cagtctgtgctgactcagccaccctcagcgtctgggacccccgggcagacggtcaccatctcttgttctggaagcagatccaacatcggaaacagttttgtaaactggtatcagcaggtcccaggaatgtcccccagactcctcatttatagtaatactcaccggccctcaggggtccctgaccgattctctgggtccaggtctggcacctcggcctccctggccatcagtgggctccagtctgaggatgaggctgtttattactgtggatcatgggacagcctgaatgccctctttgtcttcggaactgggaccaaggtcagcgtccta

SEQ ID NO: 9311 - DNA, 321 bp, Artificial Sequence
  Synthetic polynucleotide encoding artificial human antibody VL domain
gaaattgtgttgacgcagtctccaggcaccctgtctttgtctccaggggaaaaagccaccctctcctgcagggccagtcagagtgttcccaacaacgacgtagcctggtatcaacataaacctggccaggctcccaggctcctcatctatggtgcatccatcagggtccctggcatcccagacaggttcagtggcggtgggtctgggacagacttcactctctccatcagcagactggagcctgaagattttgcagtgttttattgtcaccagtatggtagctcgcacactttcggcggagggaccaaggtggagatgaaa

SEQ ID NO: 9312 - DNA, 321 bp, Artificial Sequence
  Synthetic polynucleotide encoding artificial human antibody VL domain
gacatccagatgacccagtctccatcttccgtgtctgcatctgtaggagacagagtcaccatgacttgtcgggcgagtcagggtattagcacctggttagcctggtatcagcagaaaccagggaaagcccctaagctcctgatctatgctgcatccactttgcaaagtggggtcccatcaaggttcagcggcagtggatctgggacagagttcactctcaccatcagcagcctgcagcctgaagattttgcaacttactattgtcaacaggctaacagtttccctcgcactttcggcggagggaccaaggtggagatcaaa

SEQ ID NO: 9313 - DNA, 324 bp, Artificial Sequence
  Synthetic polynucleotide encoding artificial human antibody VL domain
gaaattgtgttgacgcagtctccaggcaccctgtctttgtctccaggggacagagccaccctctcctgcagggccagtcagagtgttaccaccacctacttcgcctggtatcaacaaaaacctggccaggctcccaggctcctcattaatggtgcatccaacagggcctctggcatcccagacaggttcagtggcagtgggtctgggacagacttcactctcaccatcagcaggttggagcctgaagattttgcagtctattactgtctgcagggtggtagctcgccgctcactttcggcggagggaccagggtggagatcaaa

SEQ ID NO: 9314 - DNA, 324 bp, Artificial Sequence
  Synthetic polynucleotide encoding artificial human antibody VL domain
gaaattgtgttgacgcagtctccaggcaccctgtctttgtctccaggggaaagagccaccctctcctgcagggccagtcagagtgttagcagcagctacttagcctggtaccagcagaaacctggccaggctcccaggctcctcatctatggtgcatccagcagggccactggcatcccagacaggttcagtggcagtgggtctgggacagacttcactctcaccatcagcagactggagcctgaagattttgcagtgtattactgtcagcagtatggtagctcaccttggacgttcggccaagggaccaaggtggaaatcaaa

SEQ ID NO: 9315 - DNA, 327 bp, Artificial Sequence
  Synthetic polynucleotide encoding artificial human antibody VL domain
gaaattgtgttgacgcagtctccaggcaccctgtctttgtctccaggggaaagagccaccctctcctgcagggccagtcagagtgttagcagcagctacttagcctggtaccagcagaaacctggccaggctcccaggctcctcatctatggtgcatccagcagggccactggcatcccagacaggttcagtggcagtgggtctgggacagacttcactctcaccatcagcagactggagcctgaagattttgcagtgtattactgtcagcagtatggtagctcacccatgtacacttttggccaggggaccaagctggagatcaaa

SEQ ID NO: 9316 - DNA, 321 bp, Artificial Sequence
  Synthetic polynucleotide encoding artificial human antibody VL domain
gacatccagatgacccagaacccctccaccctgtctgcatttgtaggagacagagtcgccatcacttgccgggccagtcagagtattactacttggttggcctggtttcagcagaaaccagggagagcccctaagctcctgatctatagggcgtctactttagaaagtggggtcccatcaaggttcagcggcactggatctgggacagatttctctctcaccatcaccagcctgcagcctgatgattttgcaacttattactgcctacaatatgatacttctccgtacacttttggccaggggaccaagctggagatcaaa

SEQ ID NO: 9317 - DNA, 330 bp, Artificial Sequence
  Synthetic polynucleotide encoding artificial human antibody VL domain
cagtctatgctgactcagccaccctcagcgtctgggacccccgggcagagggtcaccatctcttgttctggaagcagctccaacatcggaagtggtactgtaaactggtaccagcgtctcccgggaacggcccccaaagtcgtcatctatagtaataatcagcggccctcaggggtccctgaccgattctctggctccaagtctggcacctcagcctccctggccatcagcgggctccagtctgaagatgagggtgattatttctgtgcagcatgggatgacagcctgagtggtccggttttcggcggagggaccaaggtgaccgtccta

SEQ ID NO: 9318 - DNA, 321 bp, Artificial Sequence
  Synthetic polynucleotide encoding artificial human antibody VL domain
gccatccagttgacccagtctccatcctccctgtctgcatctgtaggagacagagtcaccttcacttgccgggcaagtcagggcatcagcagtactttagcctggtatcagcagaaaccagggaaagctcctaaactcctgatttatgatgcctccactttggaaagtggggtcccatctaggttcatcggcagtggatctgggacagatttcactctcaccatcagcagcctgcagcctgaagattttgcaacttatttctgtcaacagtttaataattacccggtcactttcggcggagggaccagggtggagatcaaa

SEQ ID NO: 9319 - DNA, 324 bp, Artificial Sequence
  Synthetic polynucleotide encoding artificial human antibody VL domain
gaaattgtgttgacacagtctccagtcaccgtgtctttgtctccaggggatacagccactctctcctgcagggccagtcagggtattgccacccacttagcctggtaccaacagaaacctggccaggctcccagactcctcatctctgatgcatccaatagggccactggcatcccagccaggttcagtggcagtgggtctgggacagacttcactctgaccatcagcagcctagagcctgaagattctgcagtttattactgtcagcaacgttacaactggcctccgctcactttcggcggagggaccaaagtggagatcaaa

SEQ ID NO: 9320 - DNA, 318 bp, Artificial Sequence
  Synthetic polynucleotide encoding artificial human antibody VL domain
gaaattgtgttgacacagtctccagccaccctgtctttgtctccaggggacagagccaccctctcctgcagggccagtcagagtgttggccactacttagcctggtaccaacaaaaacctggccaggctcccaggctcctcatcgttgatgcttccaggagggccactggcatcccagccaggttcagtggcagtgggtctgggacagacttcactctcaccatccgcagcctggagcctgaagattttgcagtttattactgtcagcagcgtagcacctggcacaccttcggccaagggacacgactggaaattaaa

SEQ ID NO: 9321 - DNA, 324 bp, Artificial Sequence
  Synthetic polynucleotide encoding artificial human antibody VL domain
tcttctgagctgactcaggaccctgctgtgtctgtggccttggggcagacagtcaggatcacatgccaaggagacagcctcagaagtggttatgcagcctggtaccagcagaagccaggacaggcccctttacttgtcatcggtggtaaaaacaaccggccctcagggatcccagaccgattctctggctccacctcaggaaacacagcttccttgaccatcactggggctcaggcggaagatgacgctgactattactgtaactcccgagacaacagtggtgaccattatgtcttcggagctgggaccaaggtcaccgtccta

SEQ ID NO: 9322 - DNA, 336 bp, Artificial Sequence
  Synthetic polynucleotide encoding artificial human antibody VL domain
gatgttgtgatgactcactctccactctccctgtccgtcacccttggacagccggcctccatctcctgcacgtctagtcgcagcctcgtgtacagtgatggaaatacccacttgcattggtttcaccagaggccaggccaatctccaaggcgcctgatttatagggtttctaggcgtgactctggggtcccagacagattctccggcagtgggtcaggcacttatttcacactgaacatcagtagggtggaggctgaagatgttgggattttttactgcatgcaaggtacacattggcctccgacgttcggccaagggaccaaggtggaaatcaaa

SEQ ID NO: 9323 - DNA, 327 bp, Artificial Sequence
  Synthetic polynucleotide encoding artificial human antibody VL domain
gaaattgtgttgacgcagtctccaggcaccctgtctttgtctccaggggaaagagccaccctctcctgcagggccagtcagagtgttaacatcaggtttttagactggtatcagcagaaacctggccaggctcccaggctcctcatctattctacatccagcagggccactggcatcccagacaggttcagtggcagtgggtctgggacagacttcactctcaccatcagcagactggagcctgaagattttgcagtgtatttctgtcagcagtacactagctcgcctccgtacacttttggccaggggaccaagttggagatcaaa

SEQ ID NO: 9324 - DNA, 321 bp, Artificial Sequence
  Synthetic polynucleotide encoding artificial human antibody VL domain
gacatccagatgacccagtctccatcattcctggctgcatctataggagacagagtcaccctcacttgccgggcaggtcggaccattagcaattatgtaaactggtatcagaagaagccagggaaagcccctaagctcctgatctatggtgcatccactttgcattctggggtcccctcaacgttcagcggcagtgggtctgggactgacttcactctcaccatcagttctctaaaacttgaagacgttgccacttactactgtcaacagcttgacagtgtcccaccgactttcggcggagggaccaaggttgagatcaaa

SEQ ID NO: 9325 - DNA, 336 bp, Artificial Sequence
  Synthetic polynucleotide encoding artificial human antibody VL domain
gatattgtgatgacccagactccactctctctgtccgtcacccctggacagccggcctccatctcctgcaagtctagtcagagcctcctgcatagtgatggaaagacctatttgtattggtacctgcagaagccaggccagtctccacagctcctaatctatgaagtttccagccggttctctggagtgccagataggttcagtggcagcgggtcagggacagatttcacactgaaaatcagccgggtggaggctgaggatgttggggtttattactgcatgcaaggtatacaccttccgatcaccttcggccaagggacacgactggagattaaa

SEQ ID NO: 9326 - DNA, 321 bp, Artificial Sequence
  Synthetic polynucleotide encoding artificial human antibody VL domain
gacatccagatgacccagtctccatcctccctgtctgcatctgtaggagacagagtcaccatcacttgccgggcgagtcagggcatttccaagtatttggcctggtatcagcagaaaccaggaaaagttcctaacctcctgatctatgctgcgtccactttgcgatcaggggtcccatctcggttccgcggcagtggctctgggacagatttcactctcaccattaccagcctacagcctgaggatgttgcaacttattactgtcaaaaatatgaacgtgcccctctcactttcggcggagggaccaaggtggagatcaaa

SEQ ID NO: 9327 - DNA, 330 bp, Artificial Sequence
  Synthetic polynucleotide encoding artificial human antibody VL domain
cagtctgccctgactcagcctgcctccgtgtctgggtcccctggacagtcgatcaccatctcctgcactgtaaccagaagtgacgtgggtggttataagtatgtctcctggtaccaacaacacccaggcaaagcccccaaactcctgatttatgaagtcactaatcggccctcaggggtttctaatcgcttctctggctccaagtctggcaacacggcctccctgaccgtctctgggctccaggctgaagatgaggctgattattactgcagctcatatgcaggcagcaacaccggggtattcggcggagggaccaagctgaccgtccta

SEQ ID NO: 9328 - DNA, 321 bp, Artificial Sequence
  Synthetic polynucleotide encoding artificial human antibody VL domain
gacatccagatgacccagtctccatcctccctgtctgcatctgtaggagacagagtcaccatcacttgccgagcgagtcaggatattaggaattatatagcctggtatcagcagagatcaggggaagtccccaaactgctgatctggggtgcttccaatttgcaatcaggggtcccttctcgcttcagtggcagtgggtctgggactgttttcactttcgccatcaacggcctgcggcctgaagatgttggaagttattactgtcaaacatatggaagtgcccctcctatgttcggccaagggaccagggtggacctcaaa

SEQ ID NO: 9329 - DNA, 321 bp, Artificial Sequence
  Synthetic polynucleotide encoding artificial human antibody VL domain
gaaattgtgttgacacagtctccagccaccctgcctttgtctccaggggaaagtgccaccctctcctgcagggctagtcagagtgttaacagacacttggcctggtaccaacagagacctggccaggctcccaggctcctcatctatgatgcatccaagtgggccactgacatcccagccaggttcagtggcagtgggtctgggacagactatattctcaccatcagcagcctcgagccagaagattttgcagtttactactgtcagcagtataagaactggccgctcactttcggcggagggtccaaggtggagatcaaa

SEQ ID NO: 9330 - DNA, 336 bp, Artificial Sequence
  Synthetic polynucleotide encoding artificial human antibody VL domain
gatattgtgatgactcagtctccactctccctgcccgtcacccctggagagccggcctccatctcctgcaggtcgagtcagagtctcctaaaaagtgatggataccactatttggattggtacctgcagaagccagggcagtctccacagctcctgatctataagggttttaatcgggcctccggggtccctgacaggttcagtggcagtggatcaggcacagattttacactgaaaatcagcagagtggaggctgaggatgctggggtttattactgcatgcaagctctacaaaatccctggacgttcggccaagggaccaacgtggacatcaaa

SEQ ID NO: 9331 - DNA, 327 bp, Artificial Sequence
  Synthetic polynucleotide encoding artificial human antibody VL domain
caggctgtggtgactcaagagccctcagtgactgtgtccccaggagggacagtcactctcacctgtgcctccagcactggaggtgtcaccagtggtcatattccctattggttccagcagaagcctggccaagcccccaggacactgatatttgatacaagcaacaaatactcctggacccctgcccgcttctcaggctccctccttgggggcaaagctgccctgaccctttcgggtgcgcagcctgatgatgaggctgaatattactgctcactcggctatggtgatgctcgggtgttcggcggagggaccaagttgaccgtccta

SEQ ID NO: 9332 - DNA, 321 bp, Artificial Sequence
  Synthetic polynucleotide encoding artificial human antibody VL domain
gacatccaggtgacccaatctccatcctccctgtctgcatctgttggtgacagagtcaccatcacttgccgggctagtcagagtattgctaattatttgaattggtatcagaagaaaccagggaaagcccctgaacttctgatctatgctgcatccaaactgcagagtggggtcacatcaaggttcagtggcagtggctctgggacagatttcactctcaccatctatagtctccagcctgaggattttgcaacttactactgtcaacagactcacagtaagttgtggacgttcggccaagggaccacggtggaaatcaaa

SEQ ID NO: 9333 - DNA, 330 bp, Artificial Sequence
  Synthetic polynucleotide encoding artificial human antibody VL domain
cagactgtggtgacccaagagccatcgttctccgtgtcccctggagagacagtcacactcacttgtggcttgacctctggctcagtctctactaataacttccccagctggtaccagcagaccccaggccaggctccacgcacgctcatctctaagacagagactcggtcttctggggtccctgatcgcttctctggctccatcgttgggagcaaagctgccctcaccatcacgggggcccaggcagatgatgaatctgattactactgtattctttatttgggtcctggctcttgggtgttcggcggagggaccaggctgaccgtccta

SEQ ID NO: 9334 - DNA, 330 bp, Artificial Sequence
  Synthetic polynucleotide encoding artificial human antibody VL domain
cagtctgccctgactcagcctccctccgcgtccgggtctcctggacagtcagtcaccatctcctgcactggaaccagcagtgacgttggtggttacaattatgtctcctggtatcaacaatacccaggcgaagcccccaaactcatgatttttgacgtcagtaagcggccctcaggggtccctgatcgcttctctggctccaagtctggcaacacggcctccctgaccgtctctgggctccaggctgaggatgaggctgattactactgcagttcatatgcaggcagcaacaatgtactattcggcggagggacaaagctgaccgtccta

SEQ ID NO: 9335 - DNA, 318 bp, Artificial Sequence
  Synthetic polynucleotide encoding artificial human antibody VL domain
gacatccagatgacccagtctccatcctccctgtctgcatctgtaggagacagagtcaccatcacttgccgggcaagtcagagcattagcagctatttaaattggtatcagcagaaaccagggaaagcccctaagctcctgatctatgctgcatccagtttgcaaagtggggtcccatcaaggttcagtggcagtggatctgggacagatttcactctcaccatcagcagtctgcaacctgaagattttgcaacttactactgtcaacagagttacactactctcactttcggccctgggaccaaagtggatatcaaa

SEQ ID NO: 9336 - DNA, 336 bp, Artificial Sequence
  Synthetic polynucleotide encoding artificial human antibody VL domain
gatattgtgatgactcagtctccactctccctgcccgtcacccctggagagccggcctccatctcctgcaggtcgagtcagagtctcctgcacagtaatggatacaactttgtggattggtacctgcagaagccagggcagtctccacagctcctgatctataagggttttattcgggcctccggggtccctgacaggttcagtggcagtggatcaggcacagattttacactgaaaatcagcagagtggaggctgaggatgctggggtttattactgcatgcaagctctacaaaatccctggacgttcggccaagggaccaacgtggacatcaaa

SEQ ID NO: 9337 - DNA, 321 bp, Artificial Sequence
  Synthetic polynucleotide encoding artificial human antibody VL domain
gaaatagtgatgacgcagtctccagccaccctgtctgtgtctccaggggaaagagccaccctctcctgcagggccagtgagaatgttatcaacaacttagcctggttccagcagaaacctggccaggctcccaggctcgtcatctatggtgtgtccaccagggccactggcatcccaggcaggttcagtggcagtgggtctgggacagagttcactctcaccatcagcagcctgcagtctgaagattttgcagtttattactgtctacaaactaataactggcctttcactttcggccctgggaccaaagtggatgtcaaa

SEQ ID NO: 9338 - DNA, 330 bp, Artificial Sequence
  Synthetic polynucleotide encoding artificial human antibody VL domain
tcttctgagctgactcaggaccctgctgtgtctgtggccttgggacagacagtcaggatcacatgccaaggagacagcctcagaagctattatgcaaactggtaccagcagaagccaggacaggcccctgtacttgtcatctatggtaaaaacaaccggccctcagggatcccagaccgattctctggctccagctcaggaaacacagcttccttgaccatcactggggctcaggcggaagatgaggctgactattactgtaactcccgggacagcagtggtaaccatctaaggtgggtgttcggcggagggaccaagctgaccgtccta

SEQ ID NO: 9339 - DNA, 324 bp, Artificial Sequence
  Synthetic polynucleotide encoding artificial human antibody VL domain
tcctatgtgctgactcagccaccctcggtgtcagtggccccaggaaagacggccaggattacctgtgggggagataacattggaaggaaaagtgtgaattggtaccagcagaggccaggccaggcccctgtggtggtcatatatgaagataacgcccggccctcagggatccctgagcgattatctggctccaactctgcgaacacggccaccctgaccatcagcagggccgaggccggggatgaggccgactattattgtcacgtgtgggatgacagtagtgatcaccacgtgtttggcggagggaccaagttgaccgtccta

SEQ ID NO: 9340 - DNA, 336 bp, Artificial Sequence
  Synthetic polynucleotide encoding artificial human antibody VL domain
gatattgtgatgacccagactccactctcctcacctgtcacccttggacagccggcctccatctcctgcaggtctagtcaaagcctcgtacacagtgatggaaacacctacttgaattggcttcaccagaggccaggccagcctccaagactcctaatttataagatttctaaccgatttcctggggtcccagacagattcagtggcagtggggcagggacagatttcacactagaaatcagcagggtggaacctgaggatgtcgggatttattactgcacgcaagttacacaatttccattcactttcggccctgggaccagagtggatatcaaa

SEQ ID NO: 9341 - DNA, 330 bp, Artificial Sequence
  Synthetic polynucleotide encoding artificial human antibody VL domain
cagtctgtgttgacgcagccgccctcagtgtctgcgaccccaggacagaaggtcacgatctcctgcttcggaagcagttccaatattgggaataattatgtatcctggtaccaacacttcccaggaagagcccccaaactcctcatttatgacaattttcggcgaccctcggggattcctgaccgattctcttgctccaagtctggcacgtcagccaccctggacatcaccggactccaggctggggacgaggccgtttattattgcggagcatgggataccagcctgactgttatgatgtttggcggagggaccacgctgaccgtccta

SEQ ID NO: 9342 - DNA, 321 bp, Artificial Sequence
  Synthetic polynucleotide encoding artificial human antibody VL domain
gaaattgtattgacacagtctccggccaccctgtctttgtctccagaagaaagagcctccctctcctgcagggccagtcagagtattaacaccgacttagcctggtaccaacagaaacctggccagcctcccaggctcctcatttttgatgcatctaatagggccactggcatcccagccaggttcagtggcagtgggtctgggacagacttcactctcaccatcagcagcctagagcctgaagattttgcagtctattactgtcagcagcgtaacagctggcctaggacttttggccaggggaccaaagtagaaatcaaa

SEQ ID NO: 9343 - DNA, 321 bp, Artificial Sequence
  Synthetic polynucleotide encoding artificial human antibody VL domain
tcctatgagctgactcagccaccctcagtgtccgtgtccccaggacagacagccagcatcacctgctctggagataaattgggggataaatatgcttgctggtatcagcagaagccaggccagtcccctgtgctggtcatctatcaagatagcaagcggccctcagggatccctgagcgattctctggctccaactctgggaacacagccactctgaccatcagcgggacccaggctatggatgaggctgactattactgtcaggcgtgggacagcagcactgatgtggtattcggcggagggaccaagctgaccgtccta

SEQ ID NO: 9344 - DNA, 324 bp, Artificial Sequence; identical to SEQ ID NO: 9250
  Synthetic polynucleotide encoding artificial human antibody VL domain

SEQ ID NO: 9345 - DNA, 321 bp, Artificial Sequence; identical to SEQ ID NO: 8857
  Synthetic polynucleotide encoding artificial human antibody VL domain

SEQ ID NO: 9346 - DNA, 336 bp, Artificial Sequence
  Synthetic polynucleotide encoding artificial human antibody VL domain
gatattgtgatgactcagtctccactctccctggccgtcacccctggagagccggcctccgtctcctgcaggtctagtcagagcctcctgcatagaaatggatacaactatttggattggtacctacagaaaccagggcagtctccacaactcctcatctattggggatctagtcgggcccccggggtccctgacaggttcagtgccagtggatcaggcacagattttacactgaaaatcagcagagtggaggctgaggatgttggggtttattactgcatgcaagctctacaacctcctctcgctttcggcggagggaccaagttggagatcaaa

SEQ ID NO: 9347 - DNA, 324 bp, Artificial Sequence; identical to SEQ ID NO: 9252
  Synthetic polynucleotide encoding artificial human antibody VL domain

SEQ ID NO: 9348 - DNA, 321 bp, Artificial Sequence
  Synthetic polynucleotide encoding artificial human antibody VL domain
gaaatagtgatgacgcagtctccagccaccctgtctgtgtctccaggggaaagagccaccctctcctgcagggccagtcagagtgttagcagcaacttagcctggtaccagcagaaacctggccaggctcccaggctcctcatctatggtgcatccaccagggccactggtatcccagccaggttcagtggcagtgggtctgggacagagttcactctcaccatcagcagcctgcagtctgaagattttgcagtttattactgtcagcagtataataactggcctcggaccttcggccaagggacacgactggagattaaa

SEQ ID NO: 9349 - DNA, 330 bp, Artificial Sequence
  Synthetic polynucleotide encoding artificial human antibody VL domain
cagtctgtgctgactcagccaccctcagcgtctgggacccccgggcagagggtcaccatatcttgttctggaagcagctccaacatcgaaaatcataatgtatactggtaccagcagttcccaggaacggcccccaaactcctcatctataggaataatcagcggccctcaggggtccctgaccgattctctggctccaagtctggcacctcagcctccctggccatcagtgggctccggtccgacgatgaggctgattattactgtgcagcatgggatgacagcctgagtggtcgggtgttcggcggagggaccgagctgaccgtccta

SEQ ID NO: 9350 - DNA, 324 bp, Artificial Sequence
  Synthetic polynucleotide encoding artificial human antibody VL domain
tcctatgagctgacacagccaccctcggtgtcagtggccccaggacagacggccaggatcacctgcattggagatgcattgtcaaagcaatatgcttattggtaccagcagaagccaggccaggcccctcttgtggtaatatttaaggacactgagaggccctcagggatccctgagcgcttctctggctccagctcagggacaacagtcacgttgaccatcagtggcgcccaggcagaggacgaggctgactattattgtcaatcagcagacatcactgatacttatgtagtattcggcggagggacgaagctgaccgtccta

SEQ ID NO: 9351 - DNA, 333 bp, Artificial Sequence
  Synthetic polynucleotide encoding artificial human antibody VL domain
aattttatgctgactcagccccactctgtgtcggagtctccggggaagacggtaaccatctcctgcacccgcagcagtggcagcattgccagcaactatgtgcagtggtaccagcagcgcccgggcagtgcccccaccactgtgatctatgaggataaccaaagaccctctggggtccctgatcggttctctggctccatcgacagctcctccaactctgcctccctcaccatctctggactgaagactgaggacgaggctgactactactgtcagtcttatgatagcagcaattgttgggtgttcggcggagggaccaagctgaccgtccta

SEQ ID NO: 9352 - DNA, 333 bp, Artificial Sequence
  Synthetic polynucleotide encoding artificial human antibody VL domain
cagtctgtgctgacgcagccgccctcagtgtctggggccccagggcagagggtcaccatctcctgcactgggagcagctccaacatcggggcaggttatgatgtacactggtaccagcagcttccaggaacagcccccaaactcctcatctatggtaacagcaatcggccctcaggggtccctgaccgattctctggctccaagtctggcacctcagcctccctggccatcactgggctccaggctgaggatgaggctgattattactgccagtcctatgacagcagcctgagtggttgggtgttcggcggagggaccaagctgaccgtccta

SEQ ID NO: 9353 - DNA, 333 bp, Artificial Sequence
  Synthetic polynucleotide encoding artificial human antibody VL domain
cagcttgtgctgactcaatcgccctctgcctctgcctccctgggagcctcggtcaaactcacctgcactctgaccagtgggcgctggaactacgccatcgcttggcaccagcagcagccggggaagggccctcggtttttgatgaagattaacagtgatggcagtcataacagaggggacgggattcctgatcgcttctcaggctccagctctggggctgagcggtacctcatcatctccaggctccattcggacgatgaggctgactattactgtcagacctggggccctggctttcaggtcttcggcggagggaccaaggtgaccgtccta

SEQ ID NO: 9354 - DNA, 339 bp, Artificial Sequence
  Synthetic polynucleotide encoding artificial human antibody VL domain
gatgttgtgatgactcagtctccactctccctgcccgtcacccttggacagccggcctccatctcctgcaggtctagtcaaagcctcgtacacagtgatggaaacacctacttgaattggtttcagcagaggccaggccaatctccaaggcgcctaatttataaggtttctaaccgggactctggggtcccagacagattcagcggcagtgggtcaggcactgatttcacactgaaaatcagcagggtggaggctgaggatgttggggtttattactgcatgcaaggtacacactggcctccgtacacttttggccaggggaccaagctggagatcaaa

SEQ ID NO: 9355 - DNA, 321 bp, Artificial Sequence
  Synthetic polynucleotide encoding artificial human antibody VL domain
gacatccagatgacccagtctccaccctccctgtctgcatctgtgggagacttagtcaccatcacgtgccgggcgagtcagggcattgccgattctttagcctggtatcagcagaaaccagggaaagcccctaagctcctgctctatgctgcatccagattggagagaggggtcccatccaggttcagtggcagtggatctgtgacggattacactctcaccatcggcagcctgcagcctgaagattttgcaacttattactgtcaacagtattatagtatcccgtggacattcggccaagggaccaaggtggaaatcaaa

SEQ ID NO: 9356 - DNA, 321 bp, Artificial Sequence
  Synthetic polynucleotide encoding artificial human antibody VL domain
gccatccagatgacccagtctccaccctccctgtctgcatctgtaggagacagagtcaccatcacttgccgggcaagtcagggcattggaactgatttaggctggtatcagcagaaaccagggaaagcccctaaactcctgatatatactacatccagtttagaaagtggggtcccatcaaggttcagcggcagtggatctggcacagacttcactctcaccatcagcagcctgcagcctgaagattttgcaacttattactgtctacaagattacaattacccgtacacttttggccaggggaccaagctggagatcaaa

SEQ ID NO: 9357 - DNA, 324 bp, Artificial Sequence
  Synthetic polynucleotide encoding artificial human antibody VL domain
gaaattgtgttgacacagtctccaggcaccctgtctttgtctccaggggaaagagccatcctctcctgcagggccagtcagactgttagaaccagctacttagcctggcaccagcacaaacctggccaggctccccggctcctcttctttggtgcagccaccagggcccctggcatcccagacaggttcactggcagtgcgtctgggacagtcttcactctcaccatcagcagactggagcctgaagattttgcagtgtattactgccagcagtatggtaggtcaccgttcacttttggccaggggaccaagctggagatcaaa

SEQ ID NO: 9358 - DNA, 318 bp, Artificial Sequence
  Synthetic polynucleotide encoding artificial human antibody VL domain
gacatccagatgacccagtctccatcctccctgtctgcatctgtaggagacagagtcaccatcacttgccgggcaagtcagagcattagcagctatttaaattggtatcagcagaaaccagggaaagcccctaagctcctgatctatgctgcatccagtttgcaaagtggggtcccatcaaggttcagtggcagtggatctgggacagatttcactctcaccatcagcagtctgcaacctgaagattttgcaacttactactgtcaacagagttacagccccttcgctttcggccctgggaccaaagtggatatcaaa

SEQ ID NO: 9359 - DNA, 324 bp, Artificial Sequence
  Synthetic polynucleotide encoding artificial human antibody VL domain
gaaattgagttgacgcagtctccaggcaccctgtccttgtctccaggggagagagccaccctctcctgcagggccagtcagagtgttggcagttccttcttagcctggtaccagcagaaagctggccaggctcccaggctcctcatctatggtacatccagcagggccactggcatcccagacaggttcagtgccagtgggtctgagacagacttcactctcaccatcagcaaactggagcctgaagattttgcagtttattactgtcagcagtatgttgactcaccgtggacgttcggccaagggaccaaggtggaaatcaaa

SEQ ID NO: 9360 - DNA, 324 bp, Artificial Sequence
  Synthetic polynucleotide encoding artificial human antibody VL domain
gaaattgtgttgacgcagtctccaggcaccctgtctttgtctccgggggaaggagccaccctctcctgcagggccagtcagagtgttagcagcaactacttagcctggtaccagcagaagactggccaggctcccaggctcctcatctatggtgcatccaacagggccactggcatcccagacaggttcactggcggtgggtctgggacagacttcactctcaccatcggcagactggagcctgcagattttgcaatgtattactgtcagcagtatggtagtacaccgtacacttttggccaggggaccaagctggatatcaaa

SEQ ID NO: 9361 - DNA, 318 bp, Artificial Sequence
  Synthetic polynucleotide encoding artificial human antibody VL domain
gaaatagtgatgacgcagtctccagccaccctgtctgtgtctccaggggaaagagccaccctctcctgcagggccagtcagagtgttagcagcaacttagcctggtaccagcagaaacctggccaggctcccaggctcctcatctatggtgcatccaccagggccactggtatcccagccaggttcagtggcagtgggtctgggacagagttcactctcaccatcagcagcctgcagtctgaagattttgcagtttattactgtcagcagtataataactggctcactttcggcggagggaccaaggtggagatcaaa

SEQ ID NO: 9362 - DNA, 327 bp, Artificial Sequence
  Synthetic polynucleotide encoding artificial human antibody VL domain
gacatccaggtgacccagtctccaccctccctgtctgcatctgtaggagacagagtcaccatcacttgccggacaagtcagagcattagctactctttaaattggtatcagcagaaaccagggaaagcccctaaactcctgatctttgctgcatccactttgcagagtggggtcccgtcaaggttcagtggcagtggatctgggacagatttcactctcaccatcaccagtctgcaacctgaagattttgcaacttactactgtcaacagagttacagtgcccctccggtggactcttttggccaggggaccaaggtggagatcaaa

SEQ ID NO: 9363 - DNA, 318 bp, Artificial Sequence; identical to SEQ ID NO: 8833
  Synthetic polynucleotide encoding artificial human antibody VL domain

SEQ ID NO: 9364 - DNA, 324 bp, Artificial Sequence
  Synthetic polynucleotide encoding artificial human antibody VL domain
gacatccagatgacccagtctccttccaccctttccgcatctgtaggagacagagtcaccatcacttgccgggccagtcagagtattagtaagtggttggcctggtttcagcagaaaccggggcgtgcccctaaactcctgatgtatgaggcatctactttagagaatggggtcccatcaaggttcagcggcagtggatctgggactgagttcactctcaccatcaactgcctgcagcctgatgattttgcaacttattactgccagcaatatagtgattattctcgggggacgttcggccaagggaccaaggtggaaatcaaa

SEQ ID NO: 9365 - DNA, 324 bp, Artificial Sequence
  Synthetic polynucleotide encoding artificial human antibody VL domain
gacatccagatgacccagtctccatcctccctgtctgcatctgtaggagatagcgtcaccatcacttgccgggcaagtcagaccattaactcctatttaaattggtatcaacaaagaccagggaaagcccctaagctcctgatctatgctgcctccagtttgcaaggtggggtcccatcaaggttcagtggcagtggatctgggacagatttcactctcaccatcagcagtctccaacctgaagattttgcaacttattactgtcaacagagttacatcacccccccgatcaccttcggccaggggacacgactgcagattaaa

SEQ ID NO: 9366 - DNA, 324 bp, Artificial Sequence
  Synthetic polynucleotide encoding artificial human antibody VL domain
tcctatgtgctgactcagccaccctcagtgtcagtggccccaggaaagacggccaggattacctgtgggggaaacaacattggaagtaaaagtgtgcactggtaccagcagaagccaggccaggcccctgtgctggtcatctattatgatagcgaccggccctcagggatccctgagcgattctctggctccaactctgggaacacggccaccctgaccatcagcagggtcgaagccggggatgaggccgactattactgtcaggtgtgggatagtagtagtgatcattgggtgttcggcggagggaccaagctgaccgtccta

SEQ ID NO: 9367 - DNA, 330 bp, Artificial Sequence
  Synthetic polynucleotide encoding artificial human antibody VL domain
cagtctgccctgactcagcctgcctccgtgtctgggtctcctggacagtcgatcaccatctcctgcactggaaccagcagtgacgttggtggttataactatgtctcctggtaccaacaacacccaggcaaagcccccaaactcatgatttatgatgtcagtaatcggccctcaggggtttctaatcgcttctctggctccaagtctggcaacacggcctccctgaccatctctgggctccaggctgaggacgaggctgattattactgcagctcatatacaagcagcagcactctggtgttcggcggagggaccaagctgaccgtccta

SEQ ID NO: 9368 - DNA, 318 bp, Artificial Sequence; identical to SEQ ID NO: 8811
  Synthetic polynucleotide encoding artificial human antibody VL domain

SEQ ID NO: 9369 - DNA, 324 bp, Artificial Sequence
  Synthetic polynucleotide encoding artificial human antibody VL domain
tcttctgagctgactcagaatcctgctgtgtctgtggccctgggacacacagtcaccatcacatgccaaggagacaccctcagaacttcttatgcaaactggtaccagcagaggccagggcaggcccctgtccttgtcttttatggtgaagattcccggccctcagggatcccagaccgattctctggctccttctcggaagacacagcttccttgaccatcactggggctcagacggaggatgaggctgactattattgtaatttatgggacaacagtagtaaccattggctgttcggcggagggaccaagctcaccgtccta

SEQ ID NO: 9370 - DNA, 324 bp, Artificial Sequence
  Synthetic polynucleotide encoding artificial human antibody VL domain
tcctatgagctgacacagccaccctcggtgtcagtgtccccaggacagacggccaggatcacctgctctggagatgcattgccaaagcaatatgcttattggtaccagcagaagccaggccaggcccctgtgctggtgatatataaagacagtgagaggccctcagggatccctgagcgattctctggctccagctcagggacaacagtcacgttgaccatcagtggagtccaggcagaagacgaggctgactattactgtcaatcagcagacagcagtggtacccgttatgtcttcggaactgggaccaaggtcaccgtccta

SEQ ID NO: 9371 - DNA, 339 bp, Artificial Sequence
  Synthetic polynucleotide encoding artificial human antibody VL domain
gacatcgtgatgacccagtctccagactccctggctgtgtctctgggcgagagggccaccatcaactgcaagtccagccagagtattttatacagctccaacaataagaactacctagcttggtaccagcagaaaccaggacagcctcctaagctgctcttttactgggcatctacccgggaatccggggtccctgaccgattcagtggcagcgggtctgggacagatttcactctcaccatcagcagcctccaggctgaagatgtggcagtttattactgtcagcaacattatactattccgtccacttttggccaggggaccaagctggagatcaaa

SEQ ID NO: 9372 - DNA, 330 bp, Artificial Sequence
  Synthetic polynucleotide encoding artificial human antibody VL domain
cagtctatattgacgcagccgccctcagtgtctgcggccccaggacagaaggtctccatctcctgctctggaagcagctccaacattgggaatgattatgtatcctggtaccagcaagtcccaggagcagcccccaaactcctcatttatgacgttgataagcgaccctcaggtattcctgaccgattctctggctccaagtctggcacgtcagccaccctggacatcaccgggctccagactggggacgaggccgattattactgcgcagcatgggataacaacctgagtggtggggtgttcggcggagggaccaagctgaccgtccta

SEQ ID NO: 9373 - DNA, 330 bp, Artificial Sequence; identical to SEQ ID NO: 8903
  Synthetic polynucleotide encoding artificial human antibody VL domain

SEQ ID NO: 9374 - DNA, 318 bp, Artificial Sequence
  Synthetic polynucleotide encoding artificial human antibody VL domain
tcctatgagctgactcagccaccctcaatgtccgtgtccccaggacagacagccaggatcacctgctctggagataaattggggattaaatatgcttcctggtatcagcagaagccaggccagtcccctgtgctggtcatctatcaagataggaagcggccctcagggatccctgagcgattctctggctccaactctgggcacacagccactctgaccatcagcgggacccaggctatggatgaggctgactattcctgtcaggcgtgggacagcagtattgtggcattcggcggagggaccaagctgaccgtccta

SEQ ID NO: 9375 - DNA, 348 bp, Artificial Sequence
  Synthetic polynucleotide encoding artificial human antibody VL domain
cagcctgtgctgactcagccaccttctgcatcagcctccctgggagcctcggtcacactcacctgcaccctgagcagcggctatagtaattataaagtggactggtaccagcagagaccagggaagggcccccggtttgtgatgcgagtgggcactggtgggattgtgggatccaagggggatggcatccctgatcgcttctcagtcttgggctcaggcctgaatcggtacctgaccatcaagaacatccaggaagaggatgagagtgactaccactgtggggcagaccatggcagtgggagcaacttcgtgtgggtgttcggcggagggaccaagctgaccgtccta

SEQ ID NO: 9376 - DNA, 321 bp, Artificial Sequence
  Synthetic polynucleotide encoding artificial human antibody VL domain
gacatccaaatgacccagtctccttccaccctggctgcatctgtaggggacagagtcaccatcacttgccgggccagtcagagtgttggtttctggttggcctggtatcagcagaaaccagggaaagcccctaacctcctgatctataaggcatctactttacaaagtggggtcccatcaaggttcagcggcagtggatctgggacagcattcactctcaccatcagcagtctgcagcctgatgattttgcaacttattactgccaacagtacaatagttattctcggacgttcggccaagggaccaaggtggaaatcaaa

SEQ ID NO: 9377 - DNA, 336 bp, Artificial Sequence
  Synthetic polynucleotide encoding artificial human antibody VL domain
cagtctgccctgactcagcctgcctccgtgtctgggtctcctggacagtcgatctccatcacctgcactggaaccagaagtgacgttggtgcttataactctgtcttctggtaccaacaacacccaggcagagcccccaaactcatcattcttaatgtcactaatcggccctcaggggtttctaatcgcttctctggctccaagtctggcaacacggcctccctgaccatctctgggctccagactgaggacgaggctgactattactgcagctcatatacaagccgtagcaccctcgaggtgatcttcggcggagggaccaagctgaccgtccta

SEQ ID NO: 9378 - DNA, 336 bp, Artificial Sequence
  Synthetic polynucleotide encoding artificial human antibody VL domain
cagtctgtgctgacgcagccgccctcagtgtctggggccccagggcagagggtcaccatctcctgcactgggaacagctccaacatcggggcaccttatgatgtacactggtaccagcggcttccaggaacagcccccaaactcctcatctttagtaataataatcggccctcaggcgtccctgaccgattctctggctcaaagtctggcacctcagcctccctggccatcactgggctccaggctgaagacgaggctgattattactgccagtcctatgacagcagcctgactcgttattgggtgttcggcggagggaccaagctgaccgtccta

SEQ ID NO: 9379 - DNA, 330 bp, Artificial Sequence
  Synthetic polynucleotide encoding artificial human antibody VL domain
cagtctgtgctgacgcagccgccctcagtgtctggggccccagggcagagggtcaccatctcctgcactggggacagcttcaacatcggggcaggttatgatgtacactggtaccagcagcttccaggaacagcccccaaactcctcatctatggtgacaacaatcggccctcaggggtcgttgaccgattctctggctccaagtctggcacctcagcctccctggccatcactgggctccaggctgaggatgaggctgattattactgccagtcctatgacaccaggatgagggaagtgttcggcggagggaccaaactgaccgtccta

SEQ ID NO: 9380 - DNA, 327 bp, Artificial Sequence
  Synthetic polynucleotide encoding artificial human antibody VL domain
caggctgtggtgactcaggagccctcactgactgtgtccccaggagggacagtcactctcacctgtggctccagcactggacctgtcacctttggtcattacccctactggctccagcagaaccctggccaagcccccaggacactgatttatgatacatacagcaaacactcctggacacctgcccggttctcaggctccctccttgggggcaaagctgccctgaccctttcgggtgcgcagcctgaggatgaggctgagtattactgttcgctctactatagtggtatgagggtgttcggcggagggaccaagctgaccgtccta

SEQ ID NO: 9381 - DNA, 336 bp, Artificial Sequence
  Synthetic polynucleotide encoding artificial human antibody VL domain
gatgttgtgatgactcagtctccactctccctgcccgtcacccttggacagccggcctccatctcctgcaggtctagtcaaagcctcgtacacagtgatggaaacacctacttgaattggtttcagcagaggccaggccaatctccaaggcgcctaatttataaggtttctaaccgggactctggggtcccagacagattcagcggcagtgggtcaggcactgatttcacactgaaaatcagcagggtggaggctgaggatgttggagtttattactgcatgcaacctacacactggccgtggacgttcggccaagggaccaaggtggaaatcaaa

SEQ ID NO: 9382 - DNA, 321 bp, Artificial Sequence
  Synthetic polynucleotide encoding artificial human antibody VL domain
gaaatagttatgacgcagtctccagccaccctgtctgtgtctccaggggaaagagtcaccctctcctgcagggccagtcaaagtgttagaagccacttagcctggtaccagcataaacctggccaggctcccaggctcctcatctatgaagcatccaccagggccactggtatcccactcaggttcagtggtagtgggtctgggacagagttcactctcaccatcagcagcctgcagtcggaagattttgcagtttattactgtcagaagtattatgactggcctctcattttcggcggagggacgaaagtggagatcaaa

SEQ ID NO: 9383 - DNA, 318 bp, Artificial Sequence
  Synthetic polynucleotide encoding artificial human antibody VL domain
tcctatgaagtgactcagccaccctcagtgtccgtgtccccaggacagacagccagcatcacctgctctggagataagttggcgactaaatatacttgctggtatcaacagaagccaggccagtcccctgtgctggtcatctatcgagataaggagcggccctcagggatccctgagcgattctctggctccagttctgggaatacagccactctgaccatcaccgggacccaggctatggatgaggctgactattactgtcaggcgtgggacagtcgcacctgggtgttcggcggagggacccacctgaccgtccta

SEQ ID NO: 9384 - DNA, 321 bp, Artificial Sequence
  Synthetic polynucleotide encoding artificial human antibody VL domain
gacatccagatgacccagtctccatcctccctgtctgcatctgtaggtgacagagtcaccatcacttgccgggcaagtctgagcattagcagccatttacattggtatcagcagaaaccagggacagcccctaaactcctaatatatcttgcatccaatttggaaagtggggtcccatcaaggttcagtggcagtggatctgggacagatttcactcttaccatcagcagtctgcaacctgaggattttgcgacttactactgtcaacagagttatagtgccccattcactttcggccctgggaccaaggtggagatcaaa

SEQ ID NO: 9385 - DNA, 324 bp, Artificial Sequence
  Synthetic polynucleotide encoding artificial human antibody VL domain
tcttctgagctgactcaggaccctgctgtgtctgtggccttgggacagacagtcacgatcacatgccagggagacagcctcagaagttattatgcaagttggttccagcagaagcccggacaggcccctgtacttgtcatttatggtaaaaacaagcggccctcagggatctcagaccgattctctggctccagcccaggaaacaccgcttccctgaccatcactggggctcaggcggaagatgaggctgtctattactgtaactcccgggacagcagtggggaccattatgtcttcggacctgggaccaaggtcaccgtccta

SEQ ID NO: 9386 - DNA, 324 bp, Artificial Sequence
  Synthetic polynucleotide encoding artificial human antibody VL domain
tcttctgagctgactcaggaccctgctgtgtctgtggccttgggacagacagtcacgatcacatgccagggagacagcctcagaagttattatgcaagttggttccagcagaagcccggacaggcccctgcacttgtcatttatggtaaaaacaagcggccctcagggatctcagaccgattctctggctccagcccaggaaacaccgcttccctgaccatcactggggctcaggcggaagatgaggctgtctattactgtaactcccgggacagcagtggggaccattatgtcttcggagctgggaccaaggtcaccgtccta

SEQ ID NO: 9387 - DNA, 324 bp, Artificial Sequence
  Synthetic polynucleotide encoding artificial human antibody VL domain
gaaattgtgttgacacagtctccagccaccctgtctttgtctccaggggaaagagccaccctctcctgcagggccagtcagactattagcagcacccagttagcctggtaccaacagaagcctggccaggctcccaggctcctcatctatgctgcatcctacagggccactgatatcccagccaggttcagtggcggtgggtctgggacagacttcactctcgacatcagcagcctagagcctgaagattttgcagtttattactgtcatcagcgtagcgactggcctattaccttcggccaggggacacgactggagattaaa

SEQ ID NO: 9388 - DNA, 324 bp, Artificial Sequence
  Synthetic polynucleotide encoding artificial human antibody VL domain
tcctatgacctgactcagccaccctcagtgtccgtgtccccaggacagacagccagcatcacctgctctggagatcaattgggagataaatttgctgcctggtatcaacagaagccaggccagtcccctgtcttggtcatctatcaagatgccaagcggccctcagggatccctgagcgattctctggctccaactctgggaacacagccactctgaccatcagcggcacccaggctatggatgaggctgactattactgtctggtgtgggacagcggcgccagcgcctatgtcttcggaactgggtcccaggtcaccgtccta

SEQ ID NO: 9389 - DNA, 321 bp, Artificial Sequence
  Synthetic polynucleotide encoding artificial human antibody VL domain
gacatccagatgacccagtctccatcctccctgtctgcatctgtaggagacagagtcaccatcacttgccgggcaagtcagggcattagaaatggtttaggctggtttcaacaaagaccagggaaagcccctaagcgcctgatccattctgcatccactttggaaggtggggtcccatcaacattcagcggcagtggttctgggacagaattcactctcacaatcagcagcctgcagcctgatgattttgcaacttattactgtcttcatcatggttctttcccgtacacttttggccaggggaccaaggttgagatcaaa

SEQ ID NO: 9390 - DNA, 321 bp, Artificial Sequence
  Synthetic polynucleotide encoding artificial human antibody VL domain
gacatccagctgacccagtctccatcctccctgtctgcatctgtaggagacagagtcaccatcacttgccgggcaagtcagggcattagaaatgctttaggctggtttcaacaaagaccagggaaagcccctaagcgcctgatccattctgcatccactttggaaggtggggtcccatcaacattcagcggcagtggttctgggacagaattcactctcacaatcagcagcctgcagcctgatgattttgcaacttattactgtcttcatcatggttctttcccgtacacttttggccaggggaccaaggttgagatcaaa

SEQ ID NO: 9391 - DNA, 318 bp, Artificial Sequence
  Synthetic polynucleotide encoding artificial human antibody VL domain
tcctatgagctgactcagccagcctcagtgtccgtctccccaggacagacagccaccataacctgctctggagaaaatttggggaataggtatgcttattggtatcaacataaggcaggccagtcccctgtgctggtcatctatcaagatgcccagcggccctcagggatccctgagcgattctctggctccaactccggcaacacagccactctgaccatcaccgggacacaggctgtggatgaggctgactattattgccaggcgtgggacagtagcgcagtgatattcggcggagggaccaagctgaccgtccta

SEQ ID NO: 9392 - DNA, 333 bp, Artificial Sequence
  Synthetic polynucleotide encoding artificial human antibody VL domain
cagtctgccctgactcagcctgcctccgcgtctgagtctcctggacagtcgatcaccatctcctgcactggaaccagcagtgatgttgggagttataaccttgtctcctggtaccaacagcaccccgacaaagccccccaactcatgatttatgatgtcagtaagcggccctcaggggtccctgatcgcttctctggctccaagtctggcaacacggcctccctgaccatctctgggctccggactgaggatgaggctgattattactgctgctcatatgcaggcagctacactctttgggtgttcggcggagggaccaagctgaccgtccta

SEQ ID NO: 9393 - DNA, 333 bp, Artificial Sequence
  Synthetic polynucleotide encoding artificial human antibody VL domain
cagcttgtgctgactcaatcgccctctgcctctgcctccttgggagcctcggtcagactcacctgcactctgagcagtagacactttaattacgccatcgcctggcatcaactgcagccggggaagggccctcgcttcctgatgacggttaatagtgatggcagtcacactaagggggccgggatccctggtcgcttctcaggctccagctctggggctgagcgccacctcaccatctccagcctccagtctgaggatgaggctgagtatttttgtcagacgtggggcactggctttcaagtgttcggcggagggaccaaactggccgtccta

SEQ ID NO: 9394 - DNA, 321 bp, Artificial Sequence
  Synthetic polynucleotide encoding artificial human antibody VL domain
gaaatactggtgacgcagtctccagccaccctgtctgtgtctccaggggaaagagccaccctctcctgcagggccagtcagagtgttggcgacaacttagcctggtaccagcagaaacctggccaggctcccaggctcctcatctttggtgcgtccatcagggccactggtgtcccagcccggtttagtggcagtgggtctgggacagaattcactctcaccatcagcagcctgcagtctgaagattttgcagtttatttctgtcaccactattatttctggcctgggacggtcggccaagggactatcgtggaaatcaaa

SEQ ID NO: 9395 - DNA, 339 bp, Artificial Sequence
  Synthetic polynucleotide encoding artificial human antibody VL domain
gacatcgtgatgacccagtctccagactccccggctgtgtctctgggcgagagggccaccatcaactgcaagtccagccagagtgttttatacaggtccaacaataagaactacttagcttggtaccagcagaaaccaggacagcctcctaagttactcatttactgggcatctacccgggaatccggggtccctgaccgattcagtggcagcgggtctgggacagatttcactctcaccatcagcagcctgcaggctgaggatgtggcagtttatttctgtcagcaatattatagtactccgtacacttttggccaggggaccaagctggagatcaaa

SEQ ID NO: 9396 - DNA, 321 bp, Artificial Sequence
  Synthetic polynucleotide encoding artificial human antibody VL domain
gacatccagatgacccagtctccatcctccctgtctgcatctgtaggagacagagtcaccatcacttgccgggcaagtcagagcattagcagctatttaaattggtatcagcagaaaccagggaaagcccctaagctcctgatctatgctgcatccagtttgcaaagtggggtcccatcaaggttcagtggcagtggatctgggacagatttcactctcaccatcagcagtctgcaacctgaagattttgcaacttactactgtcaacagagttacagtaccctttggacgttcggccaagggaccaaggtggaaatcaaa

SEQ ID NO: 9397 - DNA, 321 bp, Artificial Sequence; identical to SEQ ID NO: 9155
  Synthetic polynucleotide encoding artificial human antibody VL domain

SEQ ID NO: 9398 - DNA, 330 bp, Artificial Sequence
  Synthetic polynucleotide encoding artificial human antibody VL domain
cagtctgtgctgacgcagccgccctcagtgtctggggccccagggcagagggtcaccatctcctgcactgggaacagctccaacatcggggcaggttatgatgtacactggtaccagcagcttccaggaacagcccccaaactcctcatctatggtaacagtaatcggccctcaggggtccctgaccgattctctggctccaagtctggcacctcagcctccctggccatcactgggctccaggctgaggatgaggctgattattactgccagtcctatgacagcagcctgagaggggtattcggcggagggaccaagctgaccgtccta

SEQ ID NO: 9399 - DNA, 324 bp, Artificial Sequence
  Synthetic polynucleotide encoding artificial human antibody VL domain
gaaattgtgttgacgcagtctccaggcaccctgtctttgtctccaggggaaagagccaccctctcctgcagggccagtcagtttgttcgcggcaactacctagcctggttccagcagaaacctggccagcctcccaggttcctcatccatgatgcatccaccagggccactggcatcccagacaggttcagtggcagtgggtctgggacagacttcactctcaccatcagcagactggagcctgaagattttgcagtgtattactgtcaatactatgggaccccacctcggatgttcggccaagggaccaaggtggaaatcaaa

SEQ ID NO: 9400 - DNA, 330 bp, Artificial Sequence
  Synthetic polynucleotide encoding artificial human antibody VL domain
cagtctgtgttgacgcagccgccctcagtgtctgcggccccaggacagaaggtcaccatctcctgctctggaggcagtttcaacattgggaataattatgtttcgtggtaccagcagttcccaggaacagcccccagactcctcatttatgacactgataagcggccctcagggattcctgaccgattctctggctccaagtctggcacgtcagggaccctggacatcaccggactccagactggggacgaggccgattattactgcggaacatgggataccagcctgaatggcgtggttttcggcggagggaccaagctgaccgtccta

SEQ ID NO: 9401 - DNA, 330 bp, Artificial Sequence
  Synthetic polynucleotide encoding artificial human antibody VL domain
cagtctgccctgactcagcctccctccgcgtccgggtctcctggacagtcagtcaccatctcctgcactggaaccagcagtgacgttggtgtttttgactatgtctcctggtaccaacagcgcccaggcaaagcccccaaactcatgatttatgaggtcgttaagcggccctcaggggtccctgatcgcttctctggctccaagtctggcaacacggcctccctgaccgtctcaggtctccagactgacgatgaggctgattattactgcagctcatatggaggcggcaacactttgttgttcggcggaggcaccaaactgaccgtccta

SEQ ID NO: 9402 - DNA, 321 bp, Artificial Sequence
  Synthetic polynucleotide encoding artificial human antibody VL domain
gacatccagatgacccagtctccatcctccctgtctgaatctgtaggagacagagtcaccatcacttgccgggcaagtcagactataagcaactttttaaattggtatcagcagaaaccagggaaagtccctaagctcctgatctatggtgcatccagtttgcagagtggggtcccatcaaggttcagtggcagtggatctgggacagagttcactctcaccatcagcagtctgcaacctgaagattctgcaacttattattgtcaacagagttacgatatcccattcaccttcggccctgggaccaaagtggacatcaaa

SEQ ID NO: 9403 - DNA, 339 bp, Artificial Sequence
  Synthetic polynucleotide encoding artificial human antibody VL domain
gacatcgtgctgacccagtctccagactccctggctgtgtctctgggcgagagggccaccatcagctgcaagaccagccagagtgtgttctacagtcccaataataagaacttcttagcttggtaccagcacaaaccaggacagcctcctaaactcctcatttcctgggcatctacccgggaattcggggtcccggaccgattcagtggcggcgggtctgggacagatttcactctcaccatcagcagcctgcaggctgaagatgtggcagtttattactgtcagcattattttgtacttccgtactcctttggccaggggaccatgctggagatcaaa

SEQ ID NO: 9404 - DNA, 339 bp, Artificial Sequence
  Synthetic polynucleotide encoding artificial human antibody VL domain
gacatcgtgatgacccagtctccagactccctggctgtgtctctgggcgagagggccaccatcaactgcaagtccagccagagtgttttatacagctccaacaataagaactacttagcttggtaccagcagaaaccaggacagcctcctaagttgctcatttactgggcatctacccgggaatccggggtccctgaccgattcagtggcagcgggtctgggacagatttcactctcaccatcggcagcctgcaggctgaagatgtggcagtttatttctgtcagcaatattatagtattcctcggacgttcggccaagggacccaggtggacatcaaa

SEQ ID NO: 9405 - DNA, 324 bp, Artificial Sequence
  Synthetic polynucleotide encoding artificial human antibody VL domain
gaaattgtgttgacgcagtctccaggcaccctgtctttgtctccaggggaaagagccaccctctcctgcagggccagtcagaatgtcggcagcagctccttagcctggtaccagcagagacctggccaggctcccaggctcctcatctatggtggatccaccagggccgctggcatctcagacaggttcactggccgtgggtctgagacagacttcactctcaccatcagtagactggagcctgaagattttgcagtctattattgtcagcaatgtggtacgtcttcgatcaccttcggccaggggacacgactggagattaaa

SEQ ID NO: 9406 - DNA, 324 bp, Artificial Sequence
  Synthetic polynucleotide encoding artificial human antibody VL domain
tcctatgtgctgactcagccacccccggtgtcagtggcccccggaaagacggccaggattacctgtgggggagacaacattggaaatacagctgtacactggtaccagcagaagccaggccaggcccctgtgctggtcatctatgatgatagcgaccggccctcagggatttctgagcggttctctggctccaactctgggaacacggccaccctgaccatcagccggatcgaggctggggatgaggccgactattactgtcaggtgtgggattctaacactgatcattgggttttcggcggagggaccaagctgaccgtccta

SEQ ID NO: 9407 - DNA, 333 bp, Artificial Sequence
  Synthetic polynucleotide encoding artificial human antibody VL domain
cagtctgttctgactcagccaccgtcaacgtctgggacccccggtcaaagggtcaccatctcttgttctggaagaagttccaacatcggaagtcatgctgtgagctggtatcaactcctcccgggagcggcccccaaactcctcatctatggactgagtcaacgtccctcaggggtccctgaccggttctctgccgacaagtctggcaactcggcctccctggccatcagtggactgcggtctgaagatgaggctgattactattgttcaacatgggatgacagtttaagtgggtctgtggtgtttggcggtgggaccagactgaccgtccta

SEQ ID NO: 9408 - DNA, 330 bp, Artificial Sequence
  Synthetic polynucleotide encoding artificial human antibody VL domain
cagactgtggtgacccaggagccgtcgttctcagtgtcccctggcgagacagtcacgctcacttgtgccttgacgtctggctcagtctctagtagacactaccccagctggtaccagcagaccccaggccagcctccacgcacgatcatctacaacacaaacactcgctcttctgggatccctggtcgcttctctggctccatccttgggaacaaagctgccctcaccatcacgggggcccaggcggatgatgactctgattattattgtgttctatatatgggtgatggcttttgggtgttcggcggagggaccaagctgaccgtccta

SEQ ID NO: 9409 - DNA, 321 bp, Artificial Sequence
  Synthetic polynucleotide encoding artificial human antibody VL domain
gacatccagatgacccagtctccttctgccgtggctgcatctgtaggagacacagtcaccattacttgccgggcgagtcaggacattggcaagtatatagcctggtttcagcagaaaccaggggaggtccctgagcgcctgatctctgatgtttctacatggcaggctgcggtcccaccaagatttagtggcagtggctctgggacagaattcagcttcactatcagcggcctgcagcctgaagattttggtacttattactgtctgcaacacaaaagtttccctcttactttcggcggagggaccaaagtggaaatcaaa

SEQ ID NO: 9410 - DNA, 318 bp, Artificial Sequence
  Synthetic polynucleotide encoding artificial human antibody VL domain
tcctatgagctgactcagccaccctcagtgtccgtgtccccaggacagacagccagcatcacctgctctggagataaattgggggataaatatgcttgctggtatcagcagaagccaggccagtcccctgtgctggtcatctatcaagatagcaagcggccctcagggatccctgagcgattctctggctccaactctgggaacacagccactctgaccatcagcgggacccaggctatggatgaggctgactattactgtcaggcgtgggacagcagcactggggtattcggcggagggaccaagctgaccgtccta

SEQ ID NO: 9411 - DNA, 321 bp, Artificial Sequence
  Synthetic polynucleotide encoding artificial human antibody VL domain
tcctatgaactgattcagccaccctcactgtccgtgtccccaggacagacagccagcatcacctgctctggagataaattggaagattcatatgttttttggtatcaccagaagccaggccagtctcctgtgcttctcatctttcaagataaccagcggccctcagggatccctgagcgattctctggctccaattttgggaacacagccactctgaccatcagcgggacccaggctatggatgaggctgactattactgtcaggcgtgggacaccggcactcatatagtattcggcggcgggaccaaactgaccgtccta

SEQ ID NO: 9412 - DNA, 330 bp, Artificial Sequence
  Synthetic polynucleotide encoding artificial human antibody VL domain
cagtctgccctgactcagcctgcctccgtgtctgggtctcctggacagtcgatcaccatctcctgcactggaagcagcagtgacgttggtgattataagtatgtctcctggtatcaacagtacccaggcaaagcccccaaactcattattgatgatgtcactaatcggccctcaggggtttctaatcgcttctctggctccaagtctggcaacacggcctccctgaccatctctggggtccaggctgaggacgagggtgattattactgcagctcatattcaagcagcagcactctggttttcggcggggggaccaggctgaccgtccta

SEQ ID NO: 9413 - DNA, 321 bp, Artificial Sequence
  Synthetic polynucleotide encoding artificial human antibody VL domain
gacatccagatgacccagtctccatcgtccctgtctgcggttgtgggtgacagcgtcaccatcacctgtcggacaagtcaaagaattaataggaacttaaattggtatcagcagaaaccagggaacgcccctaaagtcctgatctctgctacattcacattgcaaagtggagtcccaccaaggttcagtggcagtgggtctgggacagagttcactctcaccatcaacaatctgcagcctgatgatttcgcgacttacttctgtcaacagactgacaatattcctcggacgtttggccaagggaccaaggttgaaatcaaa

SEQ ID NO: 9414 - DNA, 324 bp, Artificial Sequence
  Synthetic polynucleotide encoding artificial human antibody VL domain
gacatccagctgacccagtctccagtctccctgtctgcatctgtaggagacagagtcaccatcacttgccgggcaagtcagaacattgagacctatttaaattggtatcaacaaaaacccggaaaagcccctgagctcctcatctatgctgcatccagattgcatactggagtcccatcaaggttcagtggcggtggatctgggacagatttcactctaaccatcagcagtctgcaacctgcagattttgcaagctaccactgtcaacagagtttcattgcccgtgcgtacacttttggccaggggaccaaggtggagatcaaa

SEQ ID NO: 9415 - DNA, 321 bp, Artificial Sequence
  Synthetic polynucleotide encoding artificial human antibody VL domain
gacatccaaatgacccagtctccatcttctgtgtctgcatctataggagacagagtcaccatcacttgtcgggcgagtgagggtcttggcaactggttagcctggtatcagcagaaacccgggaaagcccctaaactcctgatctatggtgcatccattttgcagactggggtcccacctaggttcagcggcagtggatctgggatagagttcactctcacaatcagcggcctgcaggcagaagacattgcaacttatttttgtcaacaatgtaacgatattcctctcactttcggcggagggaccaaggtggagatcaaa

SEQ ID NO: 9416 - DNA, 330 bp, Artificial Sequence
  Synthetic polynucleotide encoding artificial human antibody VL domain
cagtctgccctgactcagcctccctccgcgtccgggtctcctggacagtcagtcaccatctcctgcactggaaccagcagtgacgttggtggttataactatgtctcctggtaccaacagcacccaggcaaagcccccaaattgatgatttatgaggtcagtaagcggccctcaggggtccctgatcgcttctctggctccaagtctggcaacacggcctccctgaccgtctctgggctccaggctgaggatgaggctgattattactgcagctcatatgcaggcagcaacaatttggtgttcggcggagggaccaagctgaccgtccta

SEQ ID NO: 9417 - DNA, 339 bp, Artificial Sequence
  Synthetic polynucleotide encoding artificial human antibody VL domain
gacatcgtgatgacccagtctccagaatccctggctgtgtctctgggcgagagggccaccatcaactgcaagtccagccagagtgttttgtacagccccaacaataagaactacttagcttggtaccagcagaaaccaggacagcctcctaaattgctcatttactgggcatccacccgggaatccggggtccctgaccgattcactggcagcgggtctgggacagatttcactctcaccatcagcagcctgcaggctgaagatgtggcagtttattactgtcagcaatattatgctattccgtggacgttcggccaagggaccaaggtggagatccaa

SEQ ID NO: 9418 - DNA, 324 bp, Artificial Sequence
  Synthetic polynucleotide encoding artificial human antibody VL domain
tcctatgaactgactcagccaccctcggtgtcagtggccccaggacagacggccaggatcacctgtgggcctaaggactttgaaagtcaacccgtccactggtaccagcagaagacaggccaggcccctgtactggtcatctatgatggcggcgaccggccctcagggatccctgagcgattctctggctccaattctgagatcacggccaccctgaccatcagcagggtcgaagccggggatgaaggcgactatttctgtcaggtgtggaataatagacgtcagcatgtgattttcggcggagggaccaagctgaccgtccta

SEQ ID NO: 9419 - DNA, 318 bp, Artificial Sequence
  Synthetic polynucleotide encoding artificial human antibody VL domain
gacatccagatgatccagtctccttccaccctgtctgcatctgtaggagacagagtcaccatcacttgccgggccagccagagtattagtagctggttggcctggtatcagcagaagccaggcaaagccccaaaactccttatctacaaggcgtcgactttggaaagtggggtcccatcaagattcagtggcagtggatctgggacagaattcactctcacaattagtagtctgcagcctgatgattttgctatttatcactgccagcagtatagtgcatactggtcgttcggccaagggaccaaggtggaaatcaaa

SEQ ID NO: 9420 - DNA, 324 bp, Artificial Sequence
  Synthetic polynucleotide encoding artificial human antibody VL domain
tcctatgtgctgactcagccaccctcggtgtcagtggccccaggaaagacggccacaatcacctgtgggggaaacaacattggaactcacagtgtacactggtaccagcagaagccaggccaggcccctgtcctggtcgtctatgatgatagcgaccggccctcagggatccctgaccgattctctggctccaactctggaaacacggccaccctgaccatcagcaggctcgaggctggagatgaggccgactattactgtcaggtgtgggatggcaatagtgctcatgtgattttcggcggagggaccacgctgaccgtccta

SEQ ID NO: 9421 - DNA, 330 bp, Artificial Sequence
  Synthetic polynucleotide encoding artificial human antibody VL domain
aattttctgctgactcagccgcactctgtgtcggagtctccggggaggacagtaaccatctcctgcacccgcagcagtgactacattggcaacttctatgtgcactggtaccaacaacgcccgggcagtgcccccaccactttgatctatgaagatagtcaaagagcctctggagtccctgatcgcttctctggctccatcgacaggtcctccaattctgcctccctcaccatctctgacctgagggctgaggacgaggctgactacttctgtcagtcttctgacagcaacattttaattttcggcggagggaccaagttgaccgtctta

SEQ ID NO: 9422 - DNA, 324 bp, Artificial Sequence
  Synthetic polynucleotide encoding artificial human antibody VL domain
gaaatagtgatgacgcagtctccagccaccctgtctgtgtctccaggggagagagccaccctctcctgcagggccagtcagagtgttaccaccaatttagcctggtaccaacagaaacctggccaggctcccaggctcctcatctatggtgcctccaccagggccattggtatcccagtcaggttcagtggcagtgggtctgggacagacttcactctcaccatcgccagcctgcagtctgaagattttgcagtttattattgtcagcagtataataagtggcctccgtacacttttggccaggggaccaagctggacatcaaa

SEQ ID NO: 9423 - DNA, 321 bp, Artificial Sequence
  Synthetic polynucleotide encoding artificial human antibody VL domain
gaaattgtgttgacgcagtctccagccaccctgtctttgtctccaggtgaaagagccaccctctcctgcagggccagtcagagtgttaccacggagttaggctggtaccaacagaaacctggccagcctcccagactcctcatctccgatgtatccaacagggccgctggcatcccagacaggttcagtggcagtgggtctgggacagacttcactctcatcatcagcagccttgagcctgaagattctgcagtttattactgtcagcagcgtagcaaatggcctctcactttcggcggagggagcaaggtggagatcaaa

SEQ ID NO: 9424 - DNA, 330 bp, Artificial Sequence
  Synthetic polynucleotide encoding artificial human antibody VL domain
cagtctgccctgactcagcctccctccgcgtccgggtctcctggacagtcagtcaccatctcctgcactggaaccagcagtgacgttggtggttataattatgtctcctggtaccaacatcacccaggcaaagccccccaactcattatttctgaggtcactaagcggccctcaggggtccctgatcgcttctctggctccaagtctggcaacacggcctccctgaccgtctctgggctccaggctgaggatgaggctgattattactgcgcctcatatgcaggcaccaacatcgctctcttcggaactgggaccaaggtcaccgtccta

SEQ ID NO: 9425 - DNA, 321 bp, Artificial Sequence
  Synthetic polynucleotide encoding artificial human antibody VL domain
gaaattgtgctgattcagtctccagactttctgtctgtgactccaaaggaaaaagtcaccattacctgccgggccagtcagcgcgttattggcagtttacactggtaccaacagaaaccacatcagtctccaaagctcctcatcaagtttacttcccagtccatctcaggggtcccctcgaggttcagcggcagtggatctgggacagatttcaccctcaccatcaataccctggaagctgaagatgttgcaacgtattactgtcatcagagtggtactttaccgtggacgttcggccaagggaccaaggtggaaatcaaa

SEQ ID NO: 9426 - DNA, 327 bp, Artificial Sequence
  Synthetic polynucleotide encoding artificial human antibody VL domain
tcctatgagctgacacagccaccctcggtgtcagtgtccccaggacaaacggccaggatcacctgctctggagatgcattgccaaaaaaatatgcttattggtaccagcagaagtcaggccaggcccctgtgctggtcatctatgaggacagcaaacgaccctccgggatccctgagagattctctggctccagctcagggacaatggccaccttgactatcagtggggcccaggtggaggatgaagttgactactactgttactcaacagacagcagtggtaatcatagaggggtattcggcggagggaccaagctgaccgtccta

SEQ ID NO: 9427 - DNA, 333 bp, Artificial Sequence
  Synthetic polynucleotide encoding artificial human antibody VL domain
cagcctgttctgactcaatcatcctctgcctcggcttccctgggatcctcggtcaagctcgcctgcactctgagcagtgggcacagtgtctacagcgtcgcttggcatcagcaacagtctgggaaggcccctcaattcctggtgaagcttgaaagtactggaacctacaagaaggggaacggaatttctgatcggttctcaggctccagctctggggctgaccgctacctcatcatctccaacatccagtctgaggatgaggctgattatttctgtgagacctgggacagtaacacccgggttttcggaggagggaccagactgagcgtccta

SEQ ID NO: 9428 - DNA, 324 bp, Artificial Sequence
  Synthetic polynucleotide encoding artificial human antibody VL domain
gaaattgtgttgacgcagtctccaggcaccctgtctttgtctccaggagagagagccaccctctcctgcagggccagtcagagtattgccagcaactggttagcctggtaccagcagagacctggccaggcccccaggctcctcatctatggtgcatccaacagggccccaggcattccagacaggttcagtggcagtgggtctgggacagacttcactctcaccatcagcagactggagcctgaagattttggattgtattactgtcatcagtatgatgattcggagtggacgttcggcctggggaccaaggtggacatcaaa

SEQ ID NO: 9429 - DNA, 330 bp, Artificial Sequence
  Synthetic polynucleotide encoding artificial human antibody VL domain
cagtctgccctgactcagcctgcctccgtgtctgggtctcctggacagtcgatcaccatctcctgcactggaaccagcagtgatgttggcaattatgaccttgtctcatggtaccaacaacacccaggcaaagtccccaaagtcatgatttatgagggcgataagcggccctcaggggtttctagtcgcttctctggctccaagtctggcgacacggcctccctgacaatctctgggctccaggctgaggacgaggctcattattattgctgcttatatgttccttacagtttgtggctattcggcggagggaccaagctgaccgtccta

SEQ ID NO: 9430 - DNA, 321 bp, Artificial Sequence
  Synthetic polynucleotide encoding artificial human antibody VL domain
gacatccagatgacccagtctccttccaccctgtctgcatctgtaggagacaaagtcaccatcacttgccgggccagtcagagtattagtagctggttggcctggtatcagcagaaaccagggaaagcccctaaggtcctgatctataaggcgtctagtttagaaagtggggtcccatcaaggttcagcggcagtggatctgggacagaattcactctcaccatcagcagcctgcagcctgatgattttgcaacttattactgccaacagtataatagttatccgtggacgttcggccaagggaccaaggtggaaatcaaa

SEQ ID NO: 9431 - DNA, 321 bp, Artificial Sequence
  Synthetic polynucleotide encoding artificial human antibody VL domain
gaaattgtgttgacacagtctccagccaccctgtctttgtctccaggggaaagagccaccctctcctgcagggccagtcagagtgttggcaactacttagcctggtaccaacagacaccaggccaggctcccaggctcctcatctttggtgcatccgacagggccactggcatcccagccaggttcagtggcagtgggtctgggacagacttctctctcaccatcagcagcctagagcctgaagattttgcagtttattactgtcagcagcgtagcgactggcctctcactttcggcggagggaccaaggtggagatcaaa

SEQ ID NO: 9432 - DNA, 321 bp, Artificial Sequence
  Synthetic polynucleotide encoding artificial human antibody VL domain
gaaatagtgatgacgcagtctccagccaccctgtctgtgtctccaggggagagagccaccctctcctgcagggccagtcagagtgttagccgcaacttagcctggtaccagcagaaacctggccaggctcccaggctcctcatctttggtgcatccaccagggccactggtctcccagccaggttcagtggcagtgggtctgggacagagttcactctcaccatcagcagcctgcagtctgaagattttgctatttatctctgtcagcagtattatgactggcccctcaccttcggccaagggacacgacttgagattaaa

SEQ ID NO: 9433 - DNA, 336 bp, Artificial Sequence
  Synthetic polynucleotide encoding artificial human antibody VL domain
gatattgtgatgacccagactccactctctctgtccgtcacccccggacagccggcctccatctcctgcaagtctagtcagagcctcctgaatactgatgggaagacttatttgtattggtacctgcagaagccaggccagcctccacagctcctgatgtttgaggtttccaaccggttctctggagtgccagataggttcagtggcagcgggtcagtgacagatttcacactgaaaatcagccgggtggaggctgacgatgttgggatttattactgcatgcaaactaaacaagttccggtcactttcggcggagggaccaaggtggagatcaaa

SEQ ID NO: 9434 - DNA, 321 bp, Artificial Sequence
  Synthetic polynucleotide encoding artificial human antibody VL domain
gacatccagatgacccagtctccatcctcactgtctgcatctgtgggagacatggtcaccatcacttgtcgggcgagtgaggacattgacgatcgtgtagcgtggtttcagaagccaatagggagagcccctaagtccctgatccatgctgcatccagtgtgcaaagtggggtcccatcaaggttccgcgtccgtggctctgggacagagttcactctcaccatcaccaacctgcagcctgaagattttgcaacttattactgtcaacaatttgatagttaccctcttactttcggtggagggaccaaggtggagatcaaa

SEQ ID NO: 9435 - DNA, 324 bp, Artificial Sequence; identical to SEQ ID NO: 9231
  Synthetic polynucleotide encoding artificial human antibody VL domain

SEQ ID NO: 9436 - DNA, 327 bp, Artificial Sequence
  Synthetic polynucleotide encoding artificial human antibody VL domain
gaaattgtgttgacacagtctccagccaccctgtctttgtctccaggagaaagagccaccctctcctgcagggccagtcagagtgttagcagctacttagcctggtaccaacagaaacctggccaggctcccaggctcctcatctatggtgcatccaacagggccactggcatcccaggcaggttcagtggcagtgggtctgggacagacttcactctcaccatcagcagcctagagcctgaagattttgcagtctattactgtcagcaccgtagcagctggtctcctgtattcactttcggccctgggaccaaagtggagatcaaa

SEQ ID NO: 9437 - DNA, 324 bp, Artificial Sequence
  Synthetic polynucleotide encoding artificial human antibody VL domain
gaaataatgatgacgcagtctccagccaccctgtctgtgtctccaggggaaagagccaccctctcctgcagggccagtcagagtgttagcagcaacttagcctggtaccagcagaaacctggccaggctcccaggctcctcatctatggtgcatccaccagggccactggtatcccagccaggttcagtggcagtgggtctgggacagagttcactctcaccatcagcagcctgcagtctgaagattttgcagtttatttctgtcagcagtataataactggcctccgatcaccttcggccaagggacacgactggagattaaa

SEQ ID NO: 9438 - DNA, 324 bp, Artificial Sequence
  Synthetic polynucleotide encoding artificial human antibody VL domain
tcctatgtggtgactcagccacccgcggtgtcagtggccccaggacagacggccaggatttcctgtgggggaaacaacattgcaagtaaaagtgtgcactggtacctccagacgccaggccaggcccctgtgctggtcgtctatgaagatagtgcccgggcctcagggatccctgagcgattctctggctccaactctgggaacacggccaccctgaccatcagcagggtcgaggccggggatgaggccgactatttctgtcaggtgtgggatagtagtattgatcatccactcttcggcggggggaccaagctgaccgtccta

SEQ ID NO: 9439 - DNA, 324 bp, Artificial Sequence
  Synthetic polynucleotide encoding artificial human antibody VL domain
gaaatagtgatgacgcagtctccagccaccctgtctgtgtcgccaggggaaagagccaccctctcctgcagggccagtcacagtgttgacaattatttagcctggtaccagcagaaacctggccaggctcccaggctcctcatctatggtgcatccaccagggccactggtatcccagccaggttcagtggcagtgggtctgagacagagttcactctcaccatcaccagcctgcagtctgaagattttgcagtttattactgtcagcagtataaggagtggcctcctcggacatttggcccagggaccaaggtggaaatcaaa

SEQ ID NO: 9440 - DNA, 324 bp, Artificial Sequence
  Synthetic polynucleotide encoding artificial human antibody VL domain
gaaattgtgttgacgcagtctccaggcaccctgtctttgtctccaggggaaagagccaccctctcctgcagggccagtcagtttgttcgcggcaactacctggcctggttccagcagaaacctggccagcctcccaggttcctcatctatggtgcatccagcagggccactggcatcccatacaggttcagtggcagtgggtctgggacagacttcactctcaccatcagcagactggagcctgaagattctgcagtgtattactgtcagtactatgggaccccacctcggatgttcggccaagggaccaaggtggagatcaaa

SEQ ID NO: 9441 - DNA, 321 bp, Artificial Sequence
  Synthetic polynucleotide encoding artificial human antibody VL domain
gacatccagatgacccagtctccaacgtccctgtctgcatctgttggagacagagtcaccatcacttgccgggcaagtgagaacatcttcgagctattaaattggtatcagcaaaaaccagggagagcccctaagctcctgatctacggtgcatccggtctgcagagtggggtcccttcgcggttcagtggcagtggatctgggacagatttcactctcaccatcagtagtctacaccgtgacgatttcgcaacttactactgtcagcaggcttacagtagccggtggacattcggccaggggaccagcgtggaaatcaaa

SEQ ID NO: 9442 - DNA, 330 bp, Artificial Sequence
  Synthetic polynucleotide encoding artificial human antibody VL domain
cagtctgtcctgactcagcctctctcagcgtctgggacccccggacagagggtcaccatctcttgttctggaggcaggtccaacatcgcgatcaatgctgttcactggtacaggcagttcccaggagaggcccccacagtcctcatctataatactgatcagcggccctcaggggtccctgaccgagtctctggctccaagtctggcgcctcagcctccctggtcatcagtggcctccaatctgaggatgaggctgattatttctgtacaggctgggatgacggcctgggtggtccggtgttcggcggaggcaccaaactgaccgtccta

SEQ ID NO: 9443 - DNA, 324 bp, Artificial Sequence
  Synthetic polynucleotide encoding artificial human antibody VL domain
gaaattgtgttgacgcagtctccaggcaccctgtctttgtctccaggggaaagagccaccctctcttgcaggaccagtcagaatattagcagcagatatttagcctggtaccggcagaaacctggccaggctcccaagctcctcatcttgagtacatccttcagggccgctggcatcccagacaggttcagtggcagtgggtctgggacagacttcactctcaccatcagcagactggagcctgaagatttcgcagtgttttactgtcagaagtatgggagttcaatgtggacgttcggccaagggaccaaggtggaaatcaaa

SEQ ID NO: 9444 - DNA, 321 bp, Artificial Sequence
  Synthetic polynucleotide encoding artificial human antibody VL domain
gacatccagttgacccagtctccatccttcctgtctgcatctgtaggagacagagtcaccatcacttgccgggccagtcagggcattagcagttatttagcctggtatcagcaaaaaccagggaaagcccctaagctcctgatctatgctgcatccactttgcaaagtggggtcccatcaaggttcagcggcagtggatctgggacagaattcactctcacaatcagcagcctgcagcctgaagattttgcaacttattactgtcaacagcttaatagttaccctcccacgttcggccaagggaccaaggtggaaatcaaa

SEQ ID NO: 9445 - DNA, 324 bp, Artificial Sequence
  Synthetic polynucleotide encoding artificial human antibody VL domain
gaaattgtgatgtcgcagtctccagacaccctgtctttgtcggcaggcgaaagagccacgctctcctgcagggccagccacagtgtttacggcaattatttagcctggttccagaagaaacctggccgggctcccaggttcctcatgtatgaggtgtcgaagagggcccctggcaccccagacagattcagtggcagcgggtctgggacagacttcactctcaccatcagcagactggagcctgaagattctgctgtctattactgtcaaaactatgggacggaacctcggatgttcggccaagggaccagggtagagatcaaa

SEQ ID NO: 9446 - DNA, 327 bp, Artificial Sequence
  Synthetic polynucleotide encoding artificial human antibody VL domain
cagtctgccctgactcagcctccctccgcgtccgggtctcctggacagtcagtcaccatctcctgcactggaaccagcaatgacgttggtcgttctaactttgtctcctggtaccgacaacacccaggaagagcccccaaactcataattgatgaactccataaccggccctcaggggtccctgatcgcttctctgactccaagtctggcaacacggcctacctgaccgtctctgggctccaggctgaagatgaggctgattattactgcagctcatatacaggcaacaaaattttattcggcggagggaccaagttgaccgtccta

SEQ ID NO: 9447 - DNA, 315 bp, Artificial Sequence
  Synthetic polynucleotide encoding artificial human antibody VL domain
tcctatgaactgactcagccaccctcagtgtccgtgtccccaggacagacagcccacatcccctgctctggagacaaattggagaataaacatgtttcctggtatcaacagaagcctggccagtcccctgttctgattatctatcaagatgacaagcggccctcagggatccctgagcgattctctggctccaactctgggaacacagccactctgaccatcagcggggcccaggctatggatgaggctcacttttactgtcaggcgtgggacagtaccgtggttttcggcggagggaccaaggtgaccgtccta

SEQ ID NO: 9448 - DNA, 324 bp, Artificial Sequence
  Synthetic polynucleotide encoding artificial human antibody VL domain
tcctatgtgctgactcagccaccctcggtgtcagtggccccaggaaagacggccacaatcacctgtgggggaaacaacattggaactcacagtgtacactggtaccagcagaagccaggccaggcccctgtcctggtcgtctatgatgatagcgaccggccctcagggatccctgagcgattctctggctccaactctggaaacacggccaccctgaccatcagcggcctcgaggctggagatgaggccgactattactgtcaggtgtgggatggcgatagtgctcatgtcatattcggcggagggaccacgctgaccgtccta

SEQ ID NO: 9449 - DNA, 324 bp, Artificial Sequence
  Synthetic polynucleotide encoding artificial human antibody VL domain
tcctatgagctgacacagccaccctcggtgtcagtgtccccaggacagacggccaggatcacctgctctggagatgcattgccaaagcaatatgcttattggtaccagcagaagccaggccaggcccctgtgttggtgatatataaagacagtgagaggccctcagggatccctgagcgattctctggctccagctcagggacaacagtcacgttgaccatcagtggagtccaggcagaagacgaggctgactattactgtcaatcagcagacagcagtggtacttatgtgctattcggcggagggaccaagctgaccgtccta

SEQ ID NO: 9450 - DNA, 339 bp, Artificial Sequence
  Synthetic polynucleotide encoding artificial human antibody VL domain
gacatcgtggtgacccagtctccagcctccctggctgtgtctctgggcgagagggccaccatcaactgcaagtccagccagagtgttttatacagctccaacaataacaactacttaaattggtaccagcagagaccaggacagcctcctaagctgctcatttactgggcatctacccgggaatccggggtccctgaccgattcagtggcagcgggtctgggacagatttcactctcaccatcagcagcctgcaggctgaagatgtggcagtttattattgtcagcaatgttatagttttccgtacgcttttggccaggggaccaagctggagatcaaa

SEQ ID NO: 9451 - DNA, 324 bp, Artificial Sequence
  Synthetic polynucleotide encoding artificial human antibody VL domain
gaaattgtgttgacgcagtctccagcaaccctgtctctgtctccgggggacagagccaccctctcctgcagggccagtcagactgttcccagtaactacttagcctggtatcggcagaaacctggccagcctcccaggctcctcacttacggtgcgtcccaaagggccgttggcatcccagacaggtttagtggcagtgggtctggcacagacttcactctcaccatcaccaggctggagcctgacgattttgcaatttattactgtcgcaaatatgggaccttaccctccactttcggccctgggaccagagtggagatcaaa

SEQ ID NO: 9452 - DNA, 330 bp, Artificial Sequence
  Synthetic polynucleotide encoding artificial human antibody VL domain
cagtctgtgctgatccagccaccctcagcgtctgggacccccgggcagggagtcaccatctcttgttctggaagtacctccagcatcgggagtaatactgtactctggttccggcacctcccaggaacggcccccaaactcctcatatataatagtaatcagcggccctcaggggtccctgaccgattctctggctccaagtctggcacctcagcctccctggccatcagtgggctccagtctgaggatgacacggattattactgtgcagcttgggatgacagcctgaacggttggttgttcggcggagggaccaagctgaccgtccta

SEQ ID NO: 9453 - DNA, 324 bp, Artificial Sequence
  Synthetic polynucleotide encoding artificial human antibody VL domain
gacatccagttgacccagtctccatcctccctgtctgcatctgtaggagacagagtcaccatcacttgccgggccagtcagggcattagcagttatttagcctggtatcagcaaaaaccagggaaagcccctaagctcctgatctatgctgcatccactttgcaaagtggggtcccatcaaggttcagcggcagtggatctgggacagatttcactctcaccatcagcagcctgcagcctgaagattttgcaacttattactgtcaacagcttaatagttaccctccgatcaccttcggccaagggacacgactggagattaaa

SEQ ID NO: 9454 - DNA, 321 bp, Artificial Sequence
  Synthetic polynucleotide encoding artificial human antibody VL domain
gaaattgtgttgacgcagtctccagccaccctgtctttgtctgcgggggagagagccaccctctcctgcagggccagtcagagtgttactaactacttagactggtaccaacacaaacctggccaggctcccaggctcctcatctatggtgcattcaatagggccagtggcatcccagccaggttcagtggcagtgggtctgggacagacttcactctcaccgtcagcagcctagagactgaagactttgcagtttattactgtcagcagcgtagctactggcccaggacttttggccaggggaccaagctggagatcaaa

SEQ ID NO: 9455 - DNA, 336 bp, Artificial Sequence
  Synthetic polynucleotide encoding artificial human antibody VL domain
cagtctgtgctgacgcagccgccctcagtgtctggggccccagggcagggggtcaccatctcctgtactgggagcacttccaacatcgggtcagggtatggagttcattggtaccagcaccttccagggaccgcccccaaactcatcatctatgctgacagccgtcggccctcaggggtccctgaccgattctctggctccaagtctggcacctcagcctccctggccatcactgggctccaggctgaggatgcgggtgattattactgccagacgtatgacaacagactgagtgcctcagtggtgttcggcggagggaccaaggtgaccgtccta

SEQ ID NO: 9456 - DNA, 330 bp, Artificial Sequence
  Synthetic polynucleotide encoding artificial human antibody VL domain
cagtctgccctgactcagcctcgctcagtgtccgggtctcctggacagtcagtcaccatctcctgcactggaaccagcagtgatgttggtggttataactatgtctcctggtaccaacagcacccaggcaaagcccccaaactcatgatttatgatgtcagtaagcggccctcaggggtccctgatcgcttctctggctccaagtctggcaacacggcctccctgaccatctctgggctccaggctgaggatgaggctgattattactgctgctcatatgcaggcagctacctttgggtgttcggcggagggaccaagctgaccgtccta

SEQ ID NO: 9457 - DNA, 336 bp, Artificial Sequence
  Synthetic polynucleotide encoding artificial human antibody VL domain
gacatcgtgatgacccagtctccagactccctggctgtgtctctgggcgagagggccaccatcaactgcaagtccagccagagtgttttatacagctccaacaataagaactacttagcttggtaccagcagaaaccaggacagcctcctaagctgctcatttactgggcatctacccgggaatccggggtccctgaccgattcagtggcagcgggtctgggacagatttcactctcaccatcagcagcctgcaggctgaagatgtggcagtttattactgtcagcaatattatagtctccggacgttcggccaagggaccaaggtggaaatcaaa

SEQ ID NO: 9458 - DNA, 309 bp, Artificial Sequence
  Synthetic polynucleotide encoding artificial human antibody VL domain
gaaatagtgatgacgcagtctccagccaccctgtctgtgtctccaggggaaagagccaccctctcctgcagggccagtcagagtgttagcagcaacttagcctggtaccagcagaaacctggccaggctcccaggctcctcatctatggtgcatccaccagggccactggtatcccagccaggttcagtggcagtgggtctgggacagagttcactctcaccatcagcagcctgcagtctgaagattttgcagtttattactgtcagttccggggaacgttcggccaagggaccaaggtggaaatcaaa

SEQ ID NO: 9459 - DNA, 324 bp, Artificial Sequence
  Synthetic polynucleotide encoding artificial human antibody VL domain
gaaatagtgatgacgcagtctccagccaccctgtctgtgtctccaggggaaagagccaccctctcctgcagggccagtcagagtgttagcagcaacttagcctggtaccagcagaaacctggccaggctcccaggctcctcatctatggtgcatccaccagggccactggtatcccagccaggttcagtggcagtgggtctgggacagagttcactctcaccatcagcagcctgcagtctgaagattttgcagtttattactgtcagcagtataataactggcctccgctcactttcggcggagggaccaaggtggagatcaaa

SEQ ID NO: 9460 - DNA, 324 bp, Artificial Sequence
  Synthetic polynucleotide encoding artificial human antibody VL domain
gacatccagttgacccagtctccatccttcctgtctgcatctgtaggagacagagtcaccatcacttgccgggccagtcagggcattagcagttatttagcctggtatcagcaaaaaccagggaaagcccctaagctcctgatctatgctgcatccactttgcaaagtggggtcccatcaaggttcagcggcagtggatctgggacagaattcactctcacaatcagcagcctgcagcctgaagattttgcaacttattactgtcaacagcttaatagttaccctcccctcactttcggcggagggaccaaggtggagatcaaa

SEQ ID NO: 9461 - DNA, 321 bp, Artificial Sequence
  Synthetic polynucleotide encoding artificial human antibody VL domain
gacatccagatgacccagtctccatcctccctgtctgcatctgtaggagacagagtcaccatcacttgccgggcgagtcagggcattagcaattatttagcctggtatcagcagaaaccagggaaagttcctaagctcctgatctatgctgcatccactttgcaatcaggggtcccatctcggttcagcggcagtggatctgggacagatttcactctcaccatcagcagcctgcagcctgaagatgttgcaacttattactgtcaaaagtataacagtgccccgctcactttcggcggagggaccaaggtggagatcaaa

SEQ ID NO: 9462 - DNA, 321 bp, Artificial Sequence
  Synthetic polynucleotide encoding artificial human antibody VL domain
gacatccagttgacccagtctccatccttcctgtctgcatctgttggagacagagtcaccatcacttgtcgggccagtcagggcataagcacttacttagcctggtatcagcaagaaccagggaaagcccctaaactcctgatctattctgcatccactttgcaaagtggggtcccatcaagattcagcggcagtggatctgggacagaattcactctcacaatcaccaacctgcagcctgaagattttgcaacttattactgtcaagaacttaatagttaccctcgcaccttcggccaagggacacgactggagattaaa

SEQ ID NO: 9463 - DNA, 321 bp, Artificial Sequence
  Synthetic polynucleotide encoding artificial human antibody VL domain
gacatccagatgacccagtctccatcctccctgtctgcatctgtaggagacagagtcaccatcacttgccgggcgagtcagggcattagcaattatttagcctggtatcagcagaaaccagggaaagttcctaagctcctgatctatgctgcatccactttgcaatcaggggtcccatctcggttcagtggcagtggatctgggacagatttcactctcaccatcagcagcctgcagcctgaagatgttgcaacttattactgtcaaaagtataacagtgccctcgggacgttcggccaagggaccaaggtggaaatcaaa

SEQ ID NO: 9464 - DNA, 330 bp, Artificial Sequence
  Synthetic polynucleotide encoding artificial human antibody VL domain
cagtctgccctgactcagcctcgctcagtgtccgggtctcctggacagtcagtcaccatctcctgcactggaaccagcagtgatgttggtggttataactatgtctcctggtaccaacagcacccaggcaaagcccccaaactcatgatttatgatgtcagtaagcggccctcaggggtccctgatcgcttctctggctccaagtctggcaacacggcctccctgaccatctctgggctccaggctgaggatgaggctgattattactgctgctcatatgcaggcagctactcttatgtcttcggaactgggaccaaggtcaccgtccta

SEQ ID NO: 9465 - DNA, 324 bp, Artificial Sequence
  Synthetic polynucleotide encoding artificial human antibody VL domain
cagtctgccctgactcagcctcgctcagtgtccgggtctcctggacagtcagtcaccatctcctgcactggaaccagcagtggttttcgtggttataattttgtctcctggtacctgcaccacccaggcaaagcccccaaactaatcatttatgatgtcaataagcggccctcaggggtccctgatcgcttctctggctccaggtctggcaacacggcctccctgaccatctctgggctccaggctgaggatgaggctgactattactgctgctcatatacaggcacctattacttcggcggagggaccaagctgaccgtccta

SEQ ID NO: 9466 - DNA, 324 bp, Artificial Sequence; identical to SEQ ID NO: 8838
  Synthetic polynucleotide encoding artificial human antibody VL domain

SEQ ID NO: 9467 - DNA, 321 bp, Artificial Sequence
  Synthetic polynucleotide encoding artificial human antibody VL domain
gacatccagatgacccagtctccatcctccctgtctgcatctgtaggagacagagtcaccatcacttgccgggcaagtcagggcattagaaatgatttaggctggtatcagcagaaaccagggaaagcccctaagcgcctgatctatgctgcatccagtttgcaaagtggggtcccatcaaggttcagcggcagtggatctgggacagaattcactctcacaatcagcagcctgcagcctgaagattttgcaacttattactgtctacagcataatagttaccccctcaccttcggccaagggacacgactggagattaaa

SEQ ID NO: 9468 - DNA, 324 bp, Artificial Sequence
  Synthetic polynucleotide encoding artificial human antibody VL domain
tcctatgttctgactcagcctccctcagtgtcagtggacccaggaaagacggccaccatttcctgtgagggaaacaacattggaagtaaagttgtgcactggtaccagcagaggccaggccaggcccctgtcctgctcatctattataacaccgaccgaccctcagggatccctgagcgattttctggttccaattctggtaacacggccaccctgaccctcagcagggtcgaagccggggatgaggccgactattattgtcagctgtgggatagtagtggtgatcaagtggttttcggcggagggacccagctgaccgtccta

SEQ ID NO: 9469 - DNA, 324 bp, Artificial Sequence
  Synthetic polynucleotide encoding artificial human antibody VL domain
gaaattgtgttgacgcagtctccaggcaccctgtctttgtctccaggggaaagagccaccctctcctgcagggccagtcagagtgttagcagcagctacttagcctggtaccagcagaaacctggccaggctcccaggctcctcatctatggtgcatccagcagggccactggcatcccagacaggttcagtggcagtgggtctgggacagacttcactctcaccatcagcagactggagcctgaagattttgcagtgtattactgtcagcagtatggtagctcattcgggacttttggccaggggaccaagctggagatcaaa

SEQ ID NO: 9470 - DNA, 330 bp, Artificial Sequence; identical to SEQ ID NO: 9060
  Synthetic polynucleotide encoding artificial human antibody VL domain

SEQ ID NO: 9471 - DNA, 339 bp, Artificial Sequence
  Synthetic polynucleotide encoding artificial human antibody VL domain
gacatcgtgatgacccagtctccagactccctggctgtgtctctgggcgagagggccaccatcaactgcaagaccagcctgagtgttttctacgagttcaacaatctgaactacttagcttggtaccagcaaaaaccagcagagcctcctaagttgctcatttactgggcatctacccgggcttccggggttcctgaccgattcagtggcagcgggtctgggacagatttcactctcaccatcagcagcctgcaggctgaggatgtggcactttatttctgtcagcaatatttgacagcgcatccgtccttcggccaagggaccagggtggaattgaaa

SEQ ID NO: 9472 - DNA, 321 bp, Artificial Sequence
  Synthetic polynucleotide encoding artificial human antibody VL domain
gacatccagatgacccagtctccatcctccctgtctgcatctgtaggagacagagtcaccatcacttgccgggcaagtcagagcattagcagctatttaaattggtatcagcagaaaccagggaaagcccctaagctcctgatctatgctgcatccagtttgcaaagtggggtcccatcaaggttcagtggcagtggatctgggacagatttcactctcaccatcagcagtctgcaacctgaagattttgcaacttactactgtcaacagagttacagtacctcgtacacttttggccaggggaccaagctggagatcaaa

SEQ ID NO: 9473 - DNA, 321 bp, Artificial Sequence
  Synthetic polynucleotide encoding artificial human antibody VL domain
gacatccagatgacccagtctccatcctccctgtctgcatctgcaggagacagagtcagcatcacttgccgggcgagtcagggcattagtaattatgtagcctggtatcagcagaaaccagggaaagctcctaaactcctgatttatgctgcatccactttgcactcaggggtcccatctcgtttcagcggcagtagatctgggacagattttactctcaccatcagcagcctgcagcctgaagatgttgcaacctatttttgtcaaaaatacaacagtgccccatacacttttggccaggggaccaagctggagatcaaa

SEQ ID NO: 9474 - DNA, 321 bp, Artificial Sequence
  Synthetic polynucleotide encoding artificial human antibody VL domain
gaaatagtgatgactcagtctccagccaccctgtctgtgtctccaggggaaagagccaccctctcctgcagggccagtcagagtgttagtagaaacttggcctggtaccggcagagacctggccaggctcccagcctcctcatctatgctgcatcgaccagggccactggtgtcccagccaggttcagtggcagtgggtctgggacagagttcactctcaccatcagcagcctgcagtctgaagattttgcagtttattactgtaaccagtataataactggcccctcactttcggcggagggaccaaggtgcagatcaaa

SEQ ID NO: 9475 - DNA, 324 bp, Artificial Sequence
  Synthetic polynucleotide encoding artificial human antibody VL domain
gacatccagttgacccagtctccatccttcctgtctgcatctgtaggagacagagtcaccatcacttgccgggccagtcagggcattagcagttatttagcctggtatcagcaaaaaccagggaaagcccctaagctcctgatctatgctgcatccactttgcaaagtggggtcccatcaaggttcagcggcagtggatctgggacagaattcactctcacaatcagcagcctgcagcctgaagattttgcaacttattactgtcaacagcttaatagttaccctccgtacacttttggccaggggaccaagctggagatcaaa

SEQ ID NO: 9476 - DNA, 321 bp, Artificial Sequence
  Synthetic polynucleotide encoding artificial human antibody VL domain
gacatccagttgacccagtctccttccatcctgtctgcatctgcgggagacagagtcaccatcacttgccgggccagtcagggcattagtcattatttagcctggtatcagcaacaaccagggagagcccctaaactcctgatctatggtgcatccactttgcaaagtggggtcccatcaaggttcagcggcagtggatctgggacagaattcactctcacaatcaacagcctgcagcctgaagattttgcaacttattattgtcaatacctcagtgactctccgcgcaccttcggccaagggacacgactggaaattaaa

SEQ ID NO: 9477 - DNA, 324 bp, Artificial Sequence
  Synthetic polynucleotide encoding artificial human antibody VL domain
gaaattgtgttgacgcagtctccaggcaccctgtctttgtctccaggggaaagagccaccctctcctgcagggccagtcagagtgttagcagcagctacttagcctggtaccagcagaaacctggccaggctcccaggctcctcatctatggtgcatccagcagggccactggcatcccagacaggttcagtggcagtgggtctgggacagacttcactctcaccatcagcagactggagcctgaagattttgcagtgtattactgtcagcagtatggtagctcacctggaacgttcggccaagggaccaaggtggaaatcaaa

SEQ ID NO: 9478 - DNA, 336 bp, Artificial Sequence
  Synthetic polynucleotide encoding artificial human antibody VL domain
gatattgtgatgacccagactccactctctctgtccgtcacccctggacagccggcctccatctcctgcaagtctagtcagagcctcctgcatagtgatggaaagacctatttgtattggtacctgcagaagccaggccagtctccacagctcctgatctatgaagtttccaaccggttctctggagtgccagataggttcagtggcagcgggtcagggacagatttcacactgaaaatcagccgggtggaggctgaggatgttggggtttattactgcatgcaaagtatacagcttccgctcactttcggcggagggaccaaggtggagatcaaa

SEQ ID NO: 9479 - DNA, 324 bp, Artificial Sequence
  Synthetic polynucleotide encoding artificial human antibody VL domain
tcctatgagctgacacagccaccctcggtgtcagtgtccccaggacagacggccaggatcacctgctctggagatgcattgccaaagcaatatgcttattggtaccagcagaagccaggccaggcccctgtgctggtgatatataaagacagtgagaggccctcagggatccctgagcgattctctggctccagctcagggacaacagtcacgttgaccatcagtggagtccaggcagaagacgaggctgactattactgtcaatcagcagacagcagtggtacttccttagtgttcggcggagggaccaagctgaccgtccta

SEQ ID NO: 9480 - DNA, 315 bp, Artificial Sequence
  Synthetic polynucleotide encoding artificial human antibody VL domain
tcctatgagctgactcagccaccctcagtgtccgtgtccccaggacagacagccagcatcacctgctctggagataaattgggggataaatatgcttgctggtatcagcagaagccaggccagtcccctgtgctggtcatctatcaagatagcaagcggccctcagggatccctgagcgattctctggctccaactctgggaacacagccactctgaccatcagcgggacccaggctatggatgaggctgactattactgtcaggcgtgggacagcagcactgtattcggcggagggaccaagctgaccgtccta

SEQ ID NO: 9481 - DNA, 321 bp, Artificial Sequence
  Synthetic polynucleotide encoding artificial human antibody VL domain
gacatccagatgacccagtctccatcctccctgtctgcatctgtaggagacagagtcaccatcacttgccgggcaagtcagagcattagcagctatttaaattggtatcagcagaaaccagggaaagcccctaagctcctgatctatgctgcatccagtttgcaaagtggggtcccatcaaggttcagtggcagtggatctgggacagatttcactctcaccatcagcagtctgcaacctgaagattttgcaacttactactgtcaacagagttacagtacccctaagacgttcggccaagggaccaaggtggaaatcaaa

SEQ ID NO: 9482 - DNA, 327 bp, Artificial Sequence
  Synthetic polynucleotide encoding artificial human antibody VL domain
tcttctgagctgactcaggaccctgctgtgtctgtggccttgggacagacagtcaggatcacatgccgaggagacagcctcagaaattattatgcaagctggtaccagaagaagccaggacaggcccctgtccttgtcatctatggcaaaaacaatcggccctcagggatcccagaccgattctcaggctccggctcaggaaacacagcttccttgatcatcagtgtggctcaggcggaagatgaggctgactattattgtaactcccgagacaacagtggtaaccatccaaggatcttcggcggcgggaccaagctgaccgtccta

SEQ ID NO: 9483 - DNA, 330 bp, Artificial Sequence; identical to SEQ ID NO: 9044
  Synthetic polynucleotide encoding artificial human antibody VL domain

SEQ ID NO: 9484 - DNA, 321 bp, Artificial Sequence; identical to SEQ ID NO: 8857
  Synthetic polynucleotide encoding artificial human antibody VL domain

SEQ ID NO: 9485 - DNA, 339 bp, Artificial Sequence
  Synthetic polynucleotide encoding artificial human antibody VL domain
gacatcgtgatgacccagtctccagactccctggctgtgtctctgggcgagagggccaccatcacctgcaggtccagccagaatcttttatacggctacaacaataagaattatttagcgtggttccagcataaaccagggcagcctcctaggctgctcatttactgggcatctacccgggaatccggggtccctgagcgattcagcggcagcgggtctgggacagatttcactctcaccatcagcagcctgcaggctgaagatgtggcagtgtattactgtcagcaatattatacaaatccctttactttcggccctgggaccaaagtgtatgtcaaa

SEQ ID NO: 9486 - DNA, 351 bp, Artificial Sequence
  Synthetic polynucleotide encoding artificial human antibody VL domain
cagcctgtgctgactcagccaccttctgcatcagcctccctgggagcctcggtcacactcacctgcaccctgagcagcggctacagtaattataaagtggactggtaccagcagagaccagggaagggcccccggtttgtgatgcgagtgggcactggtgggattgtgggatccaagggggatggcatccctgatcgcttctcagtcttgggctcaggcctgaatcggtacctgaccatcaagaacatccaggaagaggatgagagtgactaccactgtggggcagaccatggcagtgggagcaacttcgtgtatgtggtattcggcggagggaccaagctgaccgtccta

SEQ ID NO: 9487 - DNA, 327 bp, Artificial Sequence
  Synthetic polynucleotide encoding artificial human antibody VL domain
tcctatgagctgacacagccaccctcggtgtcggtgtccccaggacaaacggccaggatcacctgctctggagatgcattgccaaataaatatgtttattggtaccagcagaagtcaggtcaggcccctatcctggtcatctatgaagacaacaagcgaacgtccgggacccccaggagattctctgggtccagttcagggactttggccaccttgaccatcagtggggcccaggtggaggatgaaggtgactactactgttactcaacagacagtaaggggtatcatcagggcatattcgccggagggaccaagctgaccgtccta

SEQ ID NO: 9488 - DNA, 324 bp, Artificial Sequence
  Synthetic polynucleotide encoding artificial human antibody VL domain
tcctatgagctgacacagccaccctcggtgtcagtgtccccaggacagacggccaggatcacctgctctggagatgcattgccaaagcaatatgcttattggtaccagcagaagccaggccaggcccctgtgctggtgatatataaagacagtgagaggccctcagggatccctgagcgattctctggctccagctcagggacaacagtcacgttgaccatcagtggagtccaggcagaagacgaggctgactattactgtcaatcagcagacagcagtggtacttccgtggtattcggcggagggaccaagctgaccgtccta

SEQ ID NO: 9489 - DNA, 318 bp, Artificial Sequence
  Synthetic polynucleotide encoding artificial human antibody VL domain
tcctatgagctgactcagccaccctcagtgtccgtgtccccaggacagacagccagcatcacctgctctggagataaattgggggataaatatgcttgctggtatcagcagaagccaggccagtcccctgtgctggtcatctatcaagatagcaagcggccctcagggatccctgagcgattctctggctccaactctgggaacacagccactctgaccatcagcgggacccaggctatggatgaggctgactattactgtcaggcgtgggacagcagcaccgtggtattcggcggagggaccaagctgaccgtccta

SEQ ID NO: 9490 - DNA, 327 bp, Artificial Sequence
  Synthetic polynucleotide encoding artificial human antibody VL domain
cagtctgccctgactcagcctcgctcagtgtccgggtctcctggacagtcagtcaccatctcctgcactggaaccagcagtgatgttggtggttataactatgtctcctggtaccaacagcacccaggcaaagcccccaaactcatgatttatgatgtcagtaagcggccctcaggggtccctgatcgcttctctggctccaagtctggcaacacggcctccctgaccatctctgggctccaggctgaggatgaggctgattattactgctgctcatatgcaggcagccttgtggtattcggcggagggaccaagctgaccgtccta

SEQ ID NO: 9491 - DNA, 330 bp, Artificial Sequence
  Synthetic polynucleotide encoding artificial human antibody VL domain
cagtctgccctgactcagcctgcctccgtgtctgggtctcctggacagtcgatcaccatctcctgcactgggaccagcagtgatgttgggacttatgaccttgtctcctggtaccaacaacacccaggcaaagcccccaaactcatgatttatgaagtcactgagcggccctcaggggtttctaatcgcttctctggctccaagtctggcaacacggcctccctgacaatctctgggctccaggctgaagacgaggctgattattattgttcctcatatgcaggtaatagaaagggagtattcggcggagggaccaagctgaccgtccta

SEQ ID NO: 9492 - DNA, 336 bp, Artificial Sequence
  Synthetic polynucleotide encoding artificial human antibody VL domain
cagtctgtgctgacgcagccgccctcagtgtctggggccccagggcagagggtcaccatctcctgcactgggagcagctccaacatcggggcaggttatgatgtacactggtaccagcagcttccaggaacagcccccaaactcctcatctatggtaacagcaatcggccctcaggggtccctgaccgattctctggctccaagtctggcacctcagcctccctggccatcactgggctccaggctgaggatgaggctgattattactgccagtcctatgacagcagcctgagtggcctttatgtcttcggaactgggaccaaggtcaccgtccta

SEQ ID NO: 9493 - DNA, 321 bp, Artificial Sequence
  Synthetic polynucleotide encoding artificial human antibody VL domain
gaaatagtgatgacgcagtctccagacaccctgtctgtgtctccaggggaaagagccaccctctcctgcagggccagtcagacccttagtggtcacttagcctggtaccagcacaaacctggccaggctcccaggctcctcatctctggtgcatctatcagggccactggtgtcccagccaggttcagtggcagtgagtctgggacagagttcactctcaccatcagcagcctgcagtctgaagattttgcactttattattgtcagcagtatgataagtggccgctcactttcggcggagggaccaaggtggagatcaaa

SEQ ID NO: 9494 - DNA, 324 bp, Artificial Sequence
  Synthetic polynucleotide encoding artificial human antibody VL domain
gacatccagatgacccagtctccatcctccctgtctgcatctgtaggagacagagtcaccatcacttgccgggcaagtcagagcattagcagctatttaaattggtatcagcagaaaccagggaaagcccctaagctcctgatctatgctgcatccagtttgcaaagtggggtcccatcaaggttcagtggcagtggatctgggacagatttcactctcaccatcagcagtctgcaacctgaagattttgcaacttactactgtcaacagagttacagtacccctccgtacacttttggccaggggaccaagctggagatcaaa

SEQ ID NO: 9495 - DNA, 321 bp, Artificial Sequence
  Synthetic polynucleotide encoding artificial human antibody VL domain
tcctatgagctgactcagccaccctcagtgtccgtgtccccaggacagacagccagcatcacctgctctggagataaattgggggataaatatgcttgctggtatcagcagaagccaggccagtcccctgtgctggtcatctatcaagatagcaagcggccctcagggatccctgagcgattctctggctccaactctgggaacacagccactctgaccatcagcgggacccaggctatggatgaggctgactattactgtcaggcgtgggacagcagcacttttgtggtattcggcggagggaccaagctgaccgtccta

SEQ ID NO: 9496 - DNA, 330 bp, Artificial Sequence
  Synthetic polynucleotide encoding artificial human antibody VL domain
cagtctgtgctgactcagccaccctcagcgtctgggacccccgggcagagggtcaccatctcttgttctggaagcagctccaacatcggaagtaattatgtatactggtaccagcagctcccaggaacggcccccaaactcctcatctataggaataatcagcggccctcaggggtccctgaccgattctctggctccaagtctggcacctcagcctccctggccatcagtgggctccggtccgaggatgaggctgattattactgtgcagcatgggatgacagcctgagtgcttgggtgttcggcggagggaccaagctgaccgtccta

SEQ ID NO: 9497 - DNA, 342 bp, Artificial Sequence
  Synthetic polynucleotide encoding artificial human antibody VL domain
gatattgtgctgacccagactccactctctctgtccgtcacccctggacagccggcctccatctcctgcaagtctactcagagcctcctgcatagtgatggaaagacctatttctattggtacgtgcagaagccaggccagcctccacagctcctgatctatgaagtttccaggcggttctctggagtgccagataggttcagtggcagcgggtcagggacagatttcacactgcaaatcagccgggtggaggctgaggatgttggggtttattactgtatgcaaagtatacagcttcctctgatttacacttttggccaggggaccaagctggagatcaaa

SEQ ID NO: 9498 - DNA, 318 bp, Artificial Sequence
  Synthetic polynucleotide encoding artificial human antibody VL domain
gacatccagatgacccagtctccttccaccctgtctgcatctgtgggagacagagtgaccatcacttgccgggccagtcagagtattgatacctggttggcctggtatcaacagaaaccaggccaagcccctaaactcctcatctataaggcgtcttctttagaatatggggtcccatctaggttcagcggcagtggctcggggacagaattcactctcaccatcagtagcctgcagcctgatgattttgcaagttattactgccaacagtacaagagtaattacaattttggccaggggaccaagctggagatcaaa

SEQ ID NO: 9499 - DNA, 318 bp, Artificial Sequence
  Synthetic polynucleotide encoding artificial human antibody VL domain
tcctatgagctgactcagccaccctcagtgtccgtgtccccaggacagacagccagcatcacctgctctggagataaattgggggataaatatgcttgctggtatcagcagaagccaggccagtcccctgtgctggtcatctatcaagatagcaagcggccctcagggatccctgagcgattctctggctccaactctgggaacacagccactctgaccatcagcgggacccaggctatggatgaggctgactattactgtcaggcgtgggacagcagcactggcgtcttcggaactgggaccaaggtcaccgtccta

SEQ ID NO: 9500 - DNA, 348 bp, Artificial Sequence
  Synthetic polynucleotide encoding artificial human antibody VL domain
cagcctgtgctgactcagccaccttctgcatcagcctccctgggagcctcggtcacactcacctgcaccctgagcagcggctacagtaattataaagtggactggtaccagcagagaccagggaagggcccccggtttgtgatgcgagtgggcactggtgggattgtgggatccaagggggatggcatccctgatcgcttctcagtcttgggctcaggcctgaatcggtacctgaccatcaagaacatccaggaagaggatgagagtgactaccactgtggggcagaccatggcagtgggagcaacttcgtttatgtcttcggaactgggaccaaggtcaccgtccta

SEQ ID NO: 9501 - DNA, 336 bp, Artificial Sequence
  Synthetic polynucleotide encoding artificial human antibody VL domain
cagtctgtgctgacgcagccgccctcagtgtctggggccccagggcagagggtcaccatctcctgcactgggagcagctccaacatcggggcaggttatgatgtacactggtaccagcagcttccaggaacagcccccaaactcctcatctatggtaacagcaatcggccctcaggggtccctgaccgattctctggctccaagtctggcacctcagcctccctggccatcactgggctccaggctgaggatgaggctgattattactgccagtcctatgacagcagcctgagtggttcgggggtgttcggcggagggaccaagctgaccgtccta

SEQ ID NO: 9502 - DNA, 321 bp, Artificial Sequence
  Synthetic polynucleotide encoding artificial human antibody VL domain
gacatccagatgacccagtctccttccaccctgtctgcatctgtaggagacagagtcaccatcacttgccgggccagtcagagtattagtaacttattggcctggtatcagcagaaaccagggaaagcccctaaactcctgatctataaggcgtctagtttagagagaggggtcccatcaaggttcagtggcagtggatctgggacagaattcactctcactatcagcagcctgcagcctgatgattttgcaacttattattgccaacaatataatagttattctcggacgttcggccaagggaccaaggtggaaatcaaa

SEQ ID NO: 9503 - DNA, 321 bp, Artificial Sequence
  Synthetic polynucleotide encoding artificial human antibody VL domain
gaaattgtattgacacagtctccagccaccctgtctttgtctccaggtgaaagagccaccctctcctgcagggccagtcacagcgtgagcacctccttaggctggtaccaacagaggcctggccaggctcccaggctcctcatctatgatgcatccaacagggccactggcatcccaactaggttcagtggcagtgggtctgggacagacttcactctcaccatcagcagcctagagcctgaagattttgcagtttattattgtcagcagcgcagcaagtggcctctcactttcggcggagggaccaaggtggagatcaaa

SEQ ID NO: 9504 - DNA, 321 bp, Artificial Sequence
  Synthetic polynucleotide encoding artificial human antibody VL domain
gacatccagttgacccagtctccatccttcctgtctgcatctgtaggagacagagtcaccatcacttgccgggccagtcaggacactagcatttatttagcctggtatcagcagaaatcagggaaggcccctaaactcctgatctatgatgcatccactttgcaaagtggggtcccatcgaggttcagcggcagtggatctgggacagaattcactctcacaatcagcagcctgcagcctgaagattttgcaacttattactgtcaacaacttaatagttacccgctcactttcggcggagggaccaaggtggagatcaaa

SEQ ID NO: 9505 - DNA, 327 bp, Artificial Sequence
  Synthetic polynucleotide encoding artificial human antibody VL domain
gaaatagtgatgacgcagtctccagccaccctgtctgtgtctccaggggaaagagccaccctctcctgcagggccagtcagagtgttagcagcaacttagcctggtaccagcagaaacctggccaggctcccaggctcctcatctatggtgcatccaccagggccactggtatcccagccaggttcagtggcagtgggtctgggacagagttcactctcaccatcagcagcctgcagtctgaagattttgcagtttattactgtcagcagtataataactggcctccaatttggacgttcggccaagggaccaaggtggaaatcaaa

SEQ ID NO: 9506 - DNA, 321 bp, Artificial Sequence
  Synthetic polynucleotide encoding artificial human antibody VL domain
gaaattgtgttgacacagtctccagccaccctgtctttgtctccaggggaaagagccaccctctcctgcagggccagtcagagtgttagcagctacttagcctggtaccaacagaaacctggccaggctcccaggctcctcatctatgatgcatccaacagggccactggcatcccagccaggttcagtggcagtgggtctgggacagacttcactctcaccatcagcagcctagagcctgaagattttgcagtttattactgtcagcagcgtagcaactggccgatcaccttcggccaagggacacgactggagattaaa

SEQ ID NO: 9507 - DNA, 321 bp, Artificial Sequence
  Synthetic polynucleotide encoding artificial human antibody VL domain
gacatccagatgacccagtctccatcctcactgtctgcatctgtaggagacagagtcaccatcacttgtcgggcgagtcagggtattagcagctggttagcctggtatcagcagaaaccagagaaagcccctaagtccctgatctatgctgcatccagtttgcaaagtggggtcccatcaaggttcagcggcagtggatctgggacagatttcactctcaccatcagcagcctgcagcctgaagattttgcaacttattactgccaacagtataatagttaccccgtcaccttcggccaagggacacgactggagattaaa

SEQ ID NO: 9508 - DNA, 318 bp, Artificial Sequence; identical to SEQ ID NO: 8811
  Synthetic polynucleotide encoding artificial human antibody VL domain

SEQ ID NO: 9509 - DNA, 318 bp, Artificial Sequence
  Synthetic polynucleotide encoding artificial human antibody VL domain
tcctatgagctgacacagccaccctcggtgtcagtgtccccaggacagacggccaggatcacctgctctggagatgcattgccaaagcaatatgcttattggtaccagcagaagccaggccaggcccctgtgctggtgatatataaagacagtgagaggccctcagggatccctgagcgattctctggctccagctcagggacaacagtcacgttgaccatcagtggagtccaggcagaagacgaggctgactattactgtcaatcagcagacagcagtggtatcgtattcggcggagggaccaagctgaccgtccta

SEQ ID NO: 9510 - DNA, 321 bp, Artificial Sequence
  Synthetic polynucleotide encoding artificial human antibody VL domain
gacatccagatgacccagtctccatcttccgtgtctgcatctgtaggagacagagtcaccatcacttgtcgggcgagtcagggtattagcagctggttagcctggtatcagcagaaaccagggaaagcccctaagctcctgatctatgctgcatccagtttgcaaagtggggtcccatcaaggttcagcggcagtggatctgggacagatttcactctcaccatcagcagcctgcagcctgaagattttgcaacttactattgtcaacaggctaacagtttcccgctcactttcggcggagggaccaaggtggagatcaaa

SEQ ID NO: 9511 - DNA, 309 bp, Artificial Sequence
  Synthetic polynucleotide encoding artificial human antibody VL domain
gacatccagttgacccagtctccatccttcctgtctgcatctgtaggagacagagtcaccatcacttgccgggccagtcagggcattagcagttatttagcctggtatcagcaaaaaccagggaaagcccctaagctcctgatctatgctgcatccactttgcaaagtggggtcccatcaaggttcagcggcagtggatctgggacagaattcactctcacaatcagcagcctgcagcctgaagattttgcaacttattactgtcaacagcttaataccttcggccaagggacacgactggagattaaa

SEQ ID NO: 9512 - DNA, 333 bp, Artificial Sequence
  Synthetic polynucleotide encoding artificial human antibody VL domain
cagtctgccctgactcagcctgcctccgtgtctgggtctcctggacagtcgatcaccatctcctgcactggaaccagcagtgatgttgggagttataaccttgtctcctggtaccaacagcacccaggcaaagcccccaaactcatgatttatgaggtcagtaagcggccctcaggggtttctaatcgcttctctggctccaagtctggcaacacggcctccctgacaatctctgggctccaggctgaggacgaggctgattattactgctgctcatatgcaggtagtagcactttcgtggtattcggcggagggaccaagctgaccgtccta

SEQ ID NO: 9513 - DNA, 333 bp, Artificial Sequence
  Synthetic polynucleotide encoding artificial human antibody VL domain
cagtctgccctgactcagcctccctccgcgtccgggtctcctggacagtcagtcgccatctcctgcactggaaccaacagtgacgttggtggttatgactctgtctcctggtaccagcagcacccaggcaaagcccccaaactcatcatttctgaggtcaataggcggccctcaggggtccctgatcgcttctctggctccaagtctggtaacacggcctccctgaccgtctctggactccaggctgaggatgaggctgattatttctgctcctcatttgcaggcatccccaagcattatgtcttcggaactgggaccaaggtcaccgtccta

SEQ ID NO: 9514 - DNA, 321 bp, Artificial Sequence; identical to SEQ ID NO: 9149
  Synthetic polynucleotide encoding artificial human antibody VL domain

SEQ ID NO: 9515 - DNA, 336 bp, Artificial Sequence
  Synthetic polynucleotide encoding artificial human antibody VL domain
cagtctgccctgactcagcctgcctccgtgtctgggtctcctggacagtcgatcaccatctcctgcactggaaccagcagtgatgttgggagttataaccttgtctcctggtaccaacagcacccaggcaaagcccccaaactcatgatttatgaggtcagtaagcggccctcaggggtttctaatcgcttctctggctccaagtctggcaacacggcctccctgacaatctctgggctccaggctgaggacgaggctgattattactgctgctcatatgcaggtagtagcacttcctatgtggtattcggcggagggaccaagctgaccgtccta

SEQ ID NO: 9516 - DNA, 333 bp, Artificial Sequence
  Synthetic polynucleotide encoding artificial human antibody VL domain
cagtctgccctgactcagcctgcctccgtgtctgggtctcctggacagtcgatcaccatctcctgcactggaaccagcagtgacgttggtggttataactatgtctcctggtaccaacaacacccaggcaaagcccccaaactcatgatttatgatgtcagtaatcggccctcaggggtttctaatcgcttctctggctccaagtctggcaacacggcctccctgaccatctctgggctccaggctgaggacgaggctgattattactgcagctcatatacaagcagcagcactctcgtggtattcggcggagggaccaagctgaccgtccta

SEQ ID NO: 9517 - DNA, 327 bp, Artificial Sequence
  Synthetic polynucleotide encoding artificial human antibody VL domain
tcctatgagctgacacagccaccctcggtgtcagtgtccccaggacagacggccaggatcacctgctctggagatgcattgccaaagcaatatagttactggtaccagaggaagccaggccaggcccctgtgttggtgatgtttaaagacagtgagaggccctcagggatccctgagcgattctctggctccagctcagggacaacagtcacgttgaccatcagtggcgtccaggcagaagacgaggctgactattattgtcaatcagcagacaacattggttcttttcttgtggttttcggcggagggaccaagctgaccgtccta

SEQ ID NO: 9518 - DNA, 324 bp, Artificial Sequence; identical to SEQ ID NO: 8908
  Synthetic polynucleotide encoding artificial human antibody VL domain

SEQ ID NO: 9519 - DNA, 324 bp, Artificial Sequence
  Synthetic polynucleotide encoding artificial human antibody VL domain
gacatccagatgacccagtctccatcctccctgtctgcatctgtaggagacagagtcaccatcacttgccgggcaagtcagagcattagcagctatttaaattggtatcagcagaaaccagggaaagcccctaagctcctgatctatgctgcatccagtttgcaaagtggggtcccatcaaggttcagtggcagtggatctgggacagatttcactctcaccatcagcagtctgcaacctgaagattttgcaacttactactgtcaacagagttacagtacccctctgtacacttttggccaggggaccaagctggagatcaaa

SEQ ID NO: 9520 - DNA, 348 bp, Artificial Sequence
  Synthetic polynucleotide encoding artificial human antibody VL domain
cagcctgtgctgactcagccaccttctgcatcagcctccctgggagcctcggtcacactcacctgcaccctgagcagcggctacagtaattataaagtggactggtaccagcagagaccagggaagggcccccggtttgtgatgcgagtgggcactggtgggattgtgggatccaagggggatggcatccctgatcgcttctcagtcttgggctcaggcctgaatcggtacctgaccatcaagaacatccaggaagaggatgagagtgactaccactgtggggcagaccatggcagtgggagcaacttcgctgtggtattcggcggagggaccaagctgaccgtccta

SEQ ID NO: 9521 - DNA, 324 bp, Artificial Sequence
  Synthetic polynucleotide encoding artificial human antibody VL domain
gaaattgtgttgacgcagtctccaggcaccctgtctttgtctccaggagaaagagtcaccctctcctgcagggccagtcagagtgtttacaggaacttcttatcctggtaccagcaaaaacctggccaggctcccaggctcctcatctacgatgcatccaccagggccactggcatcccaaccaagttcactggcagtgggtctgggacagacttcagtctcaccatcagcagactggagcctgaagattctgcagtgtactactgtcagcagtatggtcgctctcctccaaccttcggcggagggaccaaggtggggatcaaa

SEQ ID NO: 9522 - DNA, 336 bp, Artificial Sequence
  Synthetic polynucleotide encoding artificial human antibody VL domain
gatgttgtgatgactcagtctccactctccctgcccgtcacccttggacagccggcctccatctcctgcaggtctagtcaaagcctcgtatacagtgatggaaacacatacttgaattggtttcaacagaggccaggccaatctccaaggcgcctaatttataaggtttctaaccgggactctggggtcccagacagattcagcggcagtgggtcaggcactgatttcacactgaaaatcagcagggtggaggctgaggatgttggcgtttattactgcatgcaaggaacacactggccgctcactttcggcggagggaccaaggtagagatcaaa

SEQ ID NO: 9523 - DNA, 333 bp, Artificial Sequence
  Synthetic polynucleotide encoding artificial human antibody VL domain
caggctgtggtgactcaggagccctcactgactgtgtccccaggagggacagtcactctcacctgtggctccagcactggagttgtcaccaatggtcattttccctactggttccaacagaagcctggacaagccccccggacactgatttttgatacatcctacaaacactcctggacccctgaccggttctcaggctccctcctcgggggcaaagctgccctgaccctttcgggtgcgctgtctgaagatgaggctgaatattactgcctcctttatcacagtgcgtttgtggtgataggcttcggcggagggaccaagctgaccgtccta

SEQ ID NO: 9524 - DNA, 324 bp, Artificial Sequence
  Synthetic polynucleotide encoding artificial human antibody VL domain
tcctatgagctgacacagccaccctcggtgtcagtgtccccaggacaaacggccaggatcacctgctctggagatgcattgtcaaaaaaatatgcctattggtaccagcagaagtcaggccaggcccctgttctggtcatctatgaggacaccaaacgaccctccgggatccctgagagattctctggctccggctcagggacaatggccaccttgactatcagtggggcccaggtggaggatgaagctgactattactgttactcaagagacaccagtggtaatcttcgggtgttcggcggagggaccaaggtgaccgtccta

SEQ ID NO: 9525 - DNA, 339 bp, Artificial Sequence
  Synthetic polynucleotide encoding artificial human antibody VL domain
gacatcgtgatgacccagtctccagactccctggctgtgtctctgggcgagagggccaccatcaactgcaagtccagccagagtgttttatacagctccaacaataagaactacttagcttggtaccagcagaaaccaggacagcctcctaagctgctcatttactgggcatctacccgggaatccggggtccctgaccgattcagtggcagcgggtctgggacagatttcactctcaccatcagcagcctgcaggctgaagatgtggcagtttattactgtcagcaatattatagtactcctccgacgttcggccaagggaccaaggtggaaatcaaa

SEQ ID NO: 9526 - DNA, 333 bp, Artificial Sequence
  Synthetic polynucleotide encoding artificial human antibody VL domain
cagtctgccctgactcagcctccctccgcgtccgggtctcctggacagtcagtcaccatctcctgcactggaaccagcagtgacgttggtggttataactctgtctcctggtaccaacagcacccaggcaaagcccccaaactcatgatttctgaggtcagtaagcggccctcaggggtccctgatcgcttctctggctccaagtctggaaacacggcctccctgaccgtctctgggctccaggctgaggatgaggctgattattactgcagctcatttgcaggcaccgactatcattatgtcttcggaactgggaccaaggtcaccgtccta

SEQ ID NO: 9527 - DNA, 321 bp, Artificial Sequence
  Synthetic polynucleotide encoding artificial human antibody VL domain
gacatccagatgacccagtctccatcctccctgtctgcatctgtaggagacagagtcaccatcacttgccgggcgagtcaggccattagttattctttagtctggtatcagcaaaaagcgggaaatgtccctaaactcctgctctattctgcatccagattggaaagtggggtcccatccaggttcagtggcagtggatctggggcggagtacactctcaccatcagcaacctgcagcctgaagattttgcaacttattactgtcaacagtattatagtaccacggtcaccttcggcggagggaccaaggtggagatcaaa

SEQ ID NO: 9528 - DNA, 321 bp, Artificial Sequence
  Synthetic polynucleotide encoding artificial human antibody VL domain
gccatccggatgacccagtctccatcctcattctctgcatctacaggagacagagtcaccatcacttgtcgggcgagtcagggtattagcagttatttagcctggtatcagcaaaaaccagggaaagcccctaagctcctgatctatgctgcatccactttgcaaagtggggtcccatcaaggttcagcggcagtggatctgggacagatttcactctcaccatcagctgcctgcagtctgaagattttgcaacttattactgtcaacagtattatagttacccctggacgttcggccaagggaccaaggtggaaatcaaa

SEQ ID NO: 9529 - DNA, 324 bp, Artificial Sequence
  Synthetic polynucleotide encoding artificial human antibody VL domain
cagtctgccctgactcagcctgcctccgtgtctgggtctcctggacagtcgatcaccatctcctgcactggaaccagcagtgatgttggtggttataactatgtctcctggtaccaacagcacccaggcaaagcccccaaactcatgatttatgatgtcagtaagcggccctcaggggtttctaatcgcttctctggctccaagtctggcaacacggcctccctgacaatctctgggctccaggctgaggacgaggctgattattactgctgctcatatgcaggtagttgggtgttcggcggagggaccaagctgaccgtccta

SEQ ID NO: 9530 - DNA, 318 bp, Artificial Sequence
  Synthetic polynucleotide encoding artificial human antibody VL domain
tcctatgagctgacacagccaccctcggtgtcagtgtccccaggacagacggccaggatcacctgctctggagatgcattgccaaagcaatatgcttattggtaccagcagaagccaggccaggcccctgtgctggtgatatataaagacagtgagaggccctcagggatccctgagcgattctctggctccagctcagggacaacagtcacgttgaccatcagtggagtccaggcagaagacgaggctgactattactgtcaatcagcagacagcagtggttatgtcttcggaactgggaccaaggtcaccgtccta

SEQ ID NO: 9531 - DNA, 330 bp, Artificial Sequence
  Synthetic polynucleotide encoding artificial human antibody VL domain
cagtctgtgttgactcagccaccctcagcgtctgggacccccgggcagagggtcatcatctcttgttctggaagcagctccaacatcggaagtaatactgttaactggtaccagcaccttacaggaacggccccccaactcctcatctataataataatcagcggccctcaggggtccctgaccgattctctggctccaagtctggcacctcagcctccctggccatcagtgggctccagtctgaggatgaggctgattattattgtgcagcatgggatgacaggctgcttggtccgctattcggcggagggaccaaggtgaccgtccta

SEQ ID NO: 9532 - DNA, 336 bp, Artificial Sequence
  Synthetic polynucleotide encoding artificial human antibody VL domain
cagtctgtgctgacgcagccgccctccgtgtctggggccccagggcagacggtcgccatctcctgcactgcgaacagttccaatatcgtggcagcttatggtgtccactggtaccagcagcttccaggagcagcccccaaactcctcatttatagtaataccaagcgaccctcaggggtccctgaccgattctccggctccaggtctgacgcctcagcctccctgaccatcactggactccaggctgaggatgaggctgattactactgccagtcctatgacgggagcctgagtggctccggggtcttcggaactgggaccagggtcgccgtccta

SEQ ID NO: 9533 - DNA, 327 bp, Artificial Sequence
  Synthetic polynucleotide encoding artificial human antibody VL domain
tcctatgagctgacacagccaccctcggtgtcagtgcccccaggacagacggccaggatcacctgctctggagatacattgccaaagcaatatacttattggtaccagcggaagtcaggccaggcccctgtcttggtgatatataaagacagtgagaggccctcagggatccctgagcgattctctggctccagctcagggacaacagtcacgttgaccatcagtggagtccaggcagaagacgaggctgactattactgtcaatcagcagacagcagtggtacttttcttgtggtattcggcggagggaccaaactgaccgtccta

SEQ ID NO: 9534 - DNA, 324 bp, Artificial Sequence; identical to SEQ ID NO: 8783
  Synthetic polynucleotide encoding artificial human antibody VL domain

SEQ ID NO: 9535 - DNA, 321 bp, Artificial Sequence
  Synthetic polynucleotide encoding artificial human antibody VL domain
gacatccggttgacccagtctccatcctccctgtctgcatctgtaggagacagagtcaccatcacttgccgggcaagtcagaatgttatcacctctttaaattggtatcagcagacaccagggaaagcccctaaagtcctgatctattctggttccactttgcgaaatggggtcccatcacggttcagtggcagtggatctgggacagagttcaccctcaccatcaccagtctacagcctgaagattttgcaacttactactgtcatcagactcacagcacccctcgcactttcggccccgggaccaaagtcgagatcaaa

SEQ ID NO: 9536 - DNA, 321 bp, Artificial Sequence
  Synthetic polynucleotide encoding artificial human antibody VL domain
gacatccagatgacccagtctccatcctccctgtctgcatctgtaggagacagagtcaccatcacttgccgggcaagtcagggcattagaaatgatttaggctggtatcagcagaaaccagggaaagcccctaagcgcctgatctatgctgcatccagtttgcaaagtggggtcccatcaaggttcagcggcagtggatctgggacagaattcactctcacaatcagcagcctgcagcctgaagattttgcaacttattactgtctacagcataatagttaccctctcactttcggcggagggaccaaggtggagatcaaa

SEQ ID NO: 9537 - DNA, 339 bp, Artificial Sequence
  Synthetic polynucleotide encoding artificial human antibody VL domain
gatgttgtgatgactcagtctccactctccctgtccgtcacccttggacagtcggcctccatctcctgcacttccagtcaaagcctcctttacaatgctggaaacacctacctgagttggtttcaccagaggccaggccaatctccgaggcgcctaatttatagggtttctgaccgggactctggggtcccaaacagattcagcggcagtggttcaggcactgatttcacactgaagatcagcagcgtggaggctgaggatgttggagtttattactgcatgcaaggtacagactggcctgtgtatacttttggccaggggaccaagctggagatcaaa

SEQ ID NO: 9538 - DNA, 333 bp, Artificial Sequence
  Synthetic polynucleotide encoding artificial human antibody VL domain
cagtctgtgctgactcagccaccctcagcgtctgggacccccgggcagagggtcaccatctcttgttctggaagcagctccaacatcggaagtaattatgtatactggtaccagcagctcccaggaacggcccccaaactcctcatctataggaataatcagcggccctcaggggtccctgaccgattctctggctccaagtctggcacctcagcctccctggccatcagtgggctccggtccgaggatgaggctgattattactgtgcagcatgggatgacagcctgagtggttcttatgtcttcggaactgggaccaaggtcaccgtccta

SEQ ID NO: 9539 - DNA, 333 bp, Artificial Sequence
  Synthetic polynucleotide encoding artificial human antibody VL domain
aattttatgctgactcagccccactctgtgtcggagtctccggggaagacggtaaccatctcctgcaccggcagcagtggcagcattgccagcaactatgtgcagtggtaccagcagcgcccgggcagtgcccccaccactgtgatctatgaggataaccaaagaccctctggggtccctgatcggttctctggctccatcgacagctcctccaactctgcctccctcaccatctctggactgaagactgaggacgaggctgactactactgtcagtcttatgatagcagcaatcatgtggtattcggcggagggaccaagctgaccgtccta

SEQ ID NO: 9540 - DNA, 321 bp, Artificial Sequence
  Synthetic polynucleotide encoding artificial human antibody VL domain
gacatccagttgacccagtctccttcctccctgtctgcgcatgtgggagacagcgtcaccatcacttgccgggcaagtcaatccatcagcgtctatttaaattggtatcatcagcgtcccgggaaagccccgaagctcctgatacatgctgcttccagtctgcacagcggggtcccgtcaaggttcagtggcagtgcatctggggcggacttcactctcaccatcagcagtctgcgacctgaagattttggttcttacttctgtcagcagacttacaattccccgtggacgttcggccaagggaccacagtggaaatcaaa

SEQ ID NO: 9541 - DNA, 330 bp, Artificial Sequence
  Synthetic polynucleotide encoding artificial human antibody VL domain
cagtctgtgttgacgcagccgccctcagtgtctgcggccccaggacagaaggtcaccatctcctgctctggaagcagctccaacattgggaataattatgtatcctggtaccagcagctcccaggaacagcccccaaactcctcatttatgacaataataagcgaccctcagggattcctgaccgattctctggctccaagtctggcacgtcagccaccctgggcatcaccggactccagactggggacgaggccgattattactgcggaacatgggatagcagcctgagtgctgtcgtcttcggaactgggaccaaggtcaccgtccta

SEQ ID NO: 9542 - DNA, 318 bp, Artificial Sequence
  Synthetic polynucleotide encoding artificial human antibody VL domain
tcctatgagctgactcagccaccctcagtgtccgtgtccccaggacagacagccagcatcacctgctctggagataaattgggggataaatatgcttgctggtatcagcagaagccaggccagtcccctgtgctggtcatctatcaagatagcaagcggccctcagggatccctgagcgattctctggctccaactctgggaacacagccactctgaccatcagcgggacccaggctatggatgaggctgactattactgtcaggcgtgggacagcagcactgcggtattcggcggagggaccaagctgaccgtccta

SEQ ID NO: 9543 - DNA, 327 bp, Artificial Sequence
  Synthetic polynucleotide encoding artificial human antibody VL domain
cagtctgtgctgactcagccaccctcagcgtctgggacccccgggcagagggtcaccatctcttgttctggaagcagctccaacatcggaagtaattatgtatactggtaccagcagctcccaggaacggcccccaaactcctcatctataggaataatcagcggccctcaggggtccctgaccgattctctggctccaagtctggcacctcagcctccctggccatcagtgggctccggtccgaggatgaggctgattattactgtgcagcatgggatgacagcctgagtgtcttattcggcggagggaccaagctgaccgtccta

SEQ ID NO: 9544 - DNA, 330 bp, Artificial Sequence
  Synthetic polynucleotide encoding artificial human antibody VL domain
cagtctgtgctgactcagccaccctcagcgtctgggacccccgggcagagggtcaccatctcttgttctggaagcagctccaacatcggaagtaatactgtaaactggtaccagcagctcccaggaacggcccccaaactcctcatctatagtaataatcagcggccctcaagagtccctgaccgattctctggctccaagtctggcacctcagcctccctggccatcagtgggctccagtctgaggatgaggctgattattactgtgcagcatgggatgacagcctgaatggttgggtgttcggcggagggaccaagctgaccgtccta

SEQ ID NO: 9545 - DNA, 339 bp, Artificial Sequence
  Synthetic polynucleotide encoding artificial human antibody VL domain
gacatcgtgatgacccagtctcctgactcgctggctgtgtctctgggcgagacggccaccatcaactgcaaatccacccagagtctttttaacaggtccaataataagaattgtgtaacttggttgcagcagaaaccaggccagcctcctaagttgctcatctactgggcatctacccgtgaaatcggggtccctgaacgattcagtggcagcggggctgggtcagatttcactctcagcatcaccaacctgcaggctgaagatgtggcagtttattactgtcagcaatttctttctcctccgtacacttttggccaggggaccaaactggagatcaaa

SEQ ID NO: 9546 - DNA, 348 bp, Artificial Sequence
  Synthetic polynucleotide encoding artificial human antibody VL domain
cagcctgtgctgactcagccaccttctgcatcagcctccctgggagcctcggtcacactcacctgcaccctgagcagcggctacagtaattataaagtggactggtaccagcagagaccagggaagggcccccggtttgtgatgcgagtgggcactggtgggattgtgggatccaagggggatggcatccctgatcgcttctcagtcttgggctcaggcctgaatcggtacctgaccatcaagaacatccaggaagaggatgagagtgactaccactgtggggcagaccatggcagtgggagcaacttcgtgtatgtcttcggaactgggaccaaggtcaccgtccta

SEQ ID NO: 9547 - DNA, 330 bp, Artificial Sequence; identical to SEQ ID NO: 9267
  Synthetic polynucleotide encoding artificial human antibody VL domain

SEQ ID NO: 9548 - DNA, 327 bp, Artificial Sequence
  Synthetic polynucleotide encoding artificial human antibody VL domain
tcctatgagctgacacagccaccctcggtgtcagtgtccccaggacagacggccaggatcacctgctctggagatacattgccaaagcaattttcttattggtatcagcagaagccaggccaggcccctgtattggtgatgtataaagacagtgagaggccctcagggatccctgagcgattctctggctccagctcagggacaacagtcacattgaccatcagtggagtccaggcagaagacgaggctgactattactgtcaatcagcagagagtagcggttcttatcttgtggtattcggcggagggaccaagctgaccgtccta

SEQ ID NO: 9549 - DNA, 321 bp, Artificial Sequence
  Synthetic polynucleotide encoding artificial human antibody VL domain
gacatccagatgacccagtctccttcgtccctgtctgcgtctgtgggagacagagtcaccatcacttgccgggcaagtcagagcattggccactatgtaaattggtatcagcaaaaaccaggggaagcccctaacctcctgatctttgctgcaaccagtttgcaaagtggagtccctccgagattcagtggcagtggatctgggacacatttcaatctcaccatcagcggtctgcaagctgctgattttgcgacctattcctgtcaacagagttacagtcccccgtggacgttcgggcaggggaccaaggtggaaatcaaa

SEQ ID NO: 9550 - DNA, 330 bp, Artificial Sequence
  Synthetic polynucleotide encoding artificial human antibody VL domain
cagtctgtgctgactcagccaccctcagcgtctgggacccccgggcagagggtcaccatctcttgttctggaagcagctccaacatcggaagtaatactgtaaactggtaccagcagctcccaggaacggcccccaaactcctcatctatagtaataatcagcggccctcaggggtccctgaccgattctctggctccaagtctggcacctcagcctccctggccatcagtgggctccagtctgaggatgaggctgattattactgtgcagcatgggatgacagcctgaatggtccggtgttcggcggagggaccaagctgaccgtccta

SEQ ID NO: 9551 - DNA, 321 bp, Artificial Sequence
  Synthetic polynucleotide encoding artificial human antibody VL domain
gacatccagatgacccagtctccatcctccctgtctgcatctgtaggagacagagtcaccatcacttgccgggcaagtcagagcattagcagctatttaaattggtatcagcagaaaccagggaaagcccctaagctcctgatctatgctgcatccagtttgcaaagtggggtcccatcaaggttcagtggcagtggatctgggacagatttcactctcaccatcagcagtctgcaacctgaagattttgcaacttactactgtcaacagagttacagtaccccattcactttcggccctgggaccaaagtggatatcaaa

SEQ ID NO: 9552 - DNA, 324 bp, Artificial Sequence; identical to SEQ ID NO: 8812
  Synthetic polynucleotide encoding artificial human antibody VL domain

SEQ ID NO: 9553 - DNA, 327 bp, Artificial Sequence
  Synthetic polynucleotide encoding artificial human antibody VL domain
tcctatgacctgacacagccaccctcggtgtcagtgtccccaggacagacggccaggatcacctgctctggagatgcattgccaaagcaatatacttattggtaccagaggaagccaggccaggcccctgtgttggttatatatagagacagtgagaggccctcagggatccctgagcgattctctggctccagctcagggacaacagtcacgttgaccatcagtggcgtccaggcagaagacgaggctgaatattactgtcaatcagcagacaacattggtacttttcttgtgctgttcggcggagggaccaagctgaccgtccta

SEQ ID NO: 9554 - DNA, 336 bp, Artificial Sequence
  Synthetic polynucleotide encoding artificial human antibody VL domain
cagtctgtactgacgcagccgccctcagtgtctggggccccagggcagaggatcaccatctcctgcactgggagcagctccaacatcggggcaggttatgatgtacactggtaccaacagcttccagggacagcccccaaactcctcatctctggtaacaacgatcggccctcaggggtccctgaccgattctctggctccaagtctggcacctcagcctccctggccatcactgggctccaggctgaggatgaggctgattattactgccagtcctatgacagcagcctaattggttctgtgattttcggcggagggaccaagctgaccgtccta

SEQ ID NO: 9555 - DNA, 324 bp, Artificial Sequence; identical to SEQ ID NO: 8838
  Synthetic polynucleotide encoding artificial human antibody VL domain

SEQ ID NO: 9556 - DNA, 339 bp, Artificial Sequence
  Synthetic polynucleotide encoding artificial human antibody VL domain
gacatcgtgatgacccagtctccagactccctggctgtgtctctgggcgagagggccaccctcaactgcacctccagccggactcttttgtatacctccaacaataagaactacttagcttggtaccagcagaagccacgacagcctcctaaacttctcatttactggtcatctacgcgggaatccggggtccctgcccgattcagtggcggtgggtctggaacggatttcactctcaccatcagtaacctgcaggctgaagatgtggcagtgtattactgtcagcaatattacaatactccgtactcttttggccaggggaccaagctggagatcaaa

SEQ ID NO: 9557 - DNA, 324 bp, Artificial Sequence
  Synthetic polynucleotide encoding artificial human antibody VL domain
tcttctgagctgactcaggaccctgctgtgtctgtggcctggggacagacagtcaggatcacatgccaaggagacagcctcagaaattattatccaaactggtaccagcagaagccaggacaggcccctcttcttgtcatgtttggtggcgataaacggccctcagggatcccagaccgattctccggctccgcctcaggaatgacagcttctttgaccataactggtgctcaggtggaagatgaggctgactattactgtcactcccgggccaaaagtggttatcattatgtcttcggaggtgggaccaaagtcaccgtccta

SEQ ID NO: 9558 - DNA, 330 bp, Artificial Sequence; identical to SEQ ID NO: 8934
  Synthetic polynucleotide encoding artificial human antibody VL domain

SEQ ID NO: 9559 - DNA, 315 bp, Artificial Sequence; identical to SEQ ID NO: 9480
  Synthetic polynucleotide encoding artificial human antibody VL domain

SEQ ID NO: 9560 - DNA, 327 bp, Artificial Sequence
  Synthetic polynucleotide encoding artificial human antibody VL domain
tcctatgaactgacacagccaccctcggtgtcagtgtccccaggacagacggccaggatcacctgctctggagatgcattgccaaagcaatatacttattggtaccagaggaagccaggccaggcccctgtgttggtgatgtataaagacagtgagaggccctcagggatccctgagcgattctctggctccagctcagggacaacagtcacgttgaccatcagtggcgtccaggcagaagacgaggctgactattactgtcaatcagcagacaacattggtacttttcttgtggttttcggcggagggaccaagctgaccgtccta

SEQ ID NO: 9561 - DNA, 327 bp, Artificial Sequence
  Synthetic polynucleotide encoding artificial human antibody VL domain
gaaatagtgatgacgcagtctccagccaccctgtctgtgtctccaggggaaagagtcaccctctcctgcagggccagccagggtattggtagtaacttagcctggtaccagcagaaacctggccaggctcccaggctcctcatctatggtgcatccaccagggccactggtatcccagccacatttagtggcagtgggtccgggacagacttcactctcaccatcagcagcctgcagtctgaagattttgcagtttactattgtcagcagtatactaagtggccgccggggctcactttcggcggagggaccaaggtggagatcaaa

SEQ ID NO: 9562 - DNA, 318 bp, Artificial Sequence
  Synthetic polynucleotide encoding artificial human antibody VL domain
tcctatgagctgactcagccaccctcagtgtccgtgtccccaggacagacagccagcatcacctgctctggagataaattgggggataaatatgcttgctggtatcagcagaagccaggccagtcccctgtgctggtcatctatcaagatagcaagcggccctcagggatccctgagcgattctctggctccaactctgggaacacagccactctgaccatcagcgggacccaggctatggatgaggctgactattactgtcaggcgtgggacagcagcctttatgtcttcggaactgggaccaaggtcaccgtccta

SEQ ID NO: 9563 - DNA, 318 bp, Artificial Sequence; identical to SEQ ID NO: 9542
  Synthetic polynucleotide encoding artificial human antibody VL domain

SEQ ID NO: 9564 - DNA, 324 bp, Artificial Sequence
  Synthetic polynucleotide encoding artificial human antibody VL domain
gaaattgtgttgacgcagtctccaggcaccctgtctttgtctccaggggaaagagccaccctctcctgcagggccagtcagagtgttagcagcagctacttagcctggtaccagcagaaacctggccaggctcccaggctcctcatctatggtgcatccagcagggccactggcatcccagacaggttcagtggcagtgggtctgggacagacttcactctcaccatcagcagactggagcctgaagattttgcagtgtattactgtcagcagtatggtagctcacttgtgacgttcggccaagggaccaaggtggaaatcaaa

SEQ ID NO: 9565 - DNA, 324 bp, Artificial Sequence; identical to SEQ ID NO: 8838
  Synthetic polynucleotide encoding artificial human antibody VL domain

SEQ ID NO: 9566 - DNA, 339 bp, Artificial Sequence
  Synthetic polynucleotide encoding artificial human antibody VL domain
gacatcgtgatgacccagtctccagactccctggctgtgtcgctgggcgagagggccaccgtcaactgcaggtccagccggactattttatacagctccaacaataagaactacttagcctggtaccagcagaagccaggacagcctcctaaactgctcatttactgggcatctacccgggaatccggggtccctgcccgattcagtggcagcgggtctggaacggatttcactctcaccatcagtagcctgcaggctgaagatgtggcagtttattactgtcagcaatattataatactccgtacacttttggccaggggaccaagctggagatcaaa

SEQ ID NO: 9567 - DNA, 333 bp, Artificial Sequence
  Synthetic polynucleotide encoding artificial human antibody VL domain
gatattgtgatgacccagactccactctctctgtccgtcacccctggacagccggcctccatctcctgcaagtctagtcagagtctcctgcatagtgatggaaagacctatttgtattggtacctgcagaagccaggccagtctccacaactcctaatcgctgaagtttccagccggttctctggagtgccagataggttcagtggcagcgggtcagggacagatttcacactgaaaatcagccgggtggaggctgaggatgtgggggtttattactgcatgcaaggtatacacctttggacgttcggccaagggaccaaggtggaactcaaa

SEQ ID NO: 9568 - DNA, 327 bp, Artificial Sequence
  Synthetic polynucleotide encoding artificial human antibody VL domain
gaaatagtgatgacgcagtctccagccaccctgtctgtgtctccaggggagggagccaccctctcctgcagggccagcgaaagtgtcagcagcagtttagcctggtaccagcagcgacctggccagcctcccaggctcctcatctatggtgcgtccaccagggccactggtgtcccgcccaggttcagcggcagtgggtctgaaacagacttcactctcaccatcagtggcctccaggctgaagattttggagtttatttttgtcagctatatgctgagtggcctccgaaacacacttttggccaggggaccaagctggagagcaaa

SEQ ID NO: 9569 - DNA, 324 bp, Artificial Sequence; identical to SEQ ID NO: 9479
  Synthetic polynucleotide encoding artificial human antibody VL domain

SEQ ID NO: 9570 - DNA, 327 bp, Artificial Sequence
  Synthetic polynucleotide encoding artificial human antibody VL domain
tcctatgagctgacacagccaccctcggtgtcagtgtccccaggacagacggccaggatcacctgctctggagatgcattgccaaagcaatatgcttattggtaccagcagaagccaggccaggcccctgtgctggtgatatataaagacagtgagaggccctcagggatccctgagcgattctctggctccagctcagggacaacagtcacgttgaccatcagtggagtccaggcagaagacgaggctgactattactgtcaatcagcagacagcagtggtacttccgatgtggtattcggcggagggaccaagctgaccgtccta

SEQ ID NO: 9571 - DNA, 330 bp, Artificial Sequence
  Synthetic polynucleotide encoding artificial human antibody VL domain
cagtctgccctgactcagcctccctccgcgtccgggtctcctggacagtcagtcaccatctcctgcactggaaccggcagtgactttggtgattataactatgtctcctggtatcaacagcacccaggcaaagcccccaaactcatactttatgaggtcactaagcggccctcaggggtccctgatcgcttctctggctccaagtttgacaacacggcctccctgaccgtctctgggctccaggctgaggatgaggctgattattactgcagctcatctataggcaactacaattatgtcttcggaactgggaccaaggtcaccgtccta

SEQ ID NO: 9572 - DNA, 321 bp, Artificial Sequence
  Synthetic polynucleotide encoding artificial human antibody VL domain
tcctatgtgctgactcagccaccctcggtgtcagtggccccaggaaagacggccaggattacctgtgggggaaacaacattggaagtaaaagtgtgcactggtaccagcagaagccaggccaggcccctgtgctggtcgtctatgatgatagcgaccggccctcagggatccctgagcgattctctggctccaactctgggaacacggccaccctgaccatcagcagggtcgaagccggggatgaggccgactattactgtcaggtgtgggatagtagtagtcccgtggtattcggcggagggaccaagctgaccgtccta

SEQ ID NO: 9573 - DNA, 336 bp, Artificial Sequence
  Synthetic polynucleotide encoding artificial human antibody VL domain
gatattgtgatgacccagactccactctcattgcctgtcactcttggacagccggcctccatctcctgcaggtctagtcaaagcctcgtacacagggatggaaacacctacctaagttgggttcagcagaggccaggccagcctccaagactcctaatttataagatttctaagcggttctctggggtcccagacagattcagtggcagtggggcggtgacagatttcacactgaggatcaacagggtacaggctgaggatgtcggagtttattactgcatgcaagtcacagattttccctggacgttcggccaagggaccaaggtggaaatcaaa

SEQ ID NO: 9574 - DNA, 345 bp, Artificial Sequence
  Synthetic polynucleotide encoding artificial human antibody VL domain
caggctgtggtgactcagccgtcttccctctctgcatctcttggagcatcaaccagtctcacctgcaccttacgcagtggcatcaatgttgcttcccacaggatatactggtaccagcagaagccagggagtcctccccgttttctcctgaggtacacatcagactcagataagagccagggctctggagtccccagccgcttctctgggtccaaagatgcttcggccaattcagggactctactcatctctggcctccggtctgaggatgaggcttattattactgtatgatctggcataacatggctctggtgttcggcggagggacgaacctgaccgtccta

SEQ ID NO: 9575 - DNA, 330 bp, Artificial Sequence
  Synthetic polynucleotide encoding artificial human antibody VL domain
caggcaggactggctcagccaccctcgatgtccagggacttgggacagaccgccacactcacctgcactgggaacagcgacaatgttggtaaccaaggagcagcttggctgcagcaacaccagggccaccctcccaaactgctgtcctacaagaataacaaccggccctcaggggtctcggagagattctctgcatccaggtcaggaaacacagcctccctgaccatttctagactccagcctgaggacgaggctgactatttctgctcagcgtgggacagcagcctcactgctcgggttttcggcgcagggacccacctgaccgtccta

SEQ ID NO: 9576 - DNA, 324 bp, Artificial Sequence
  Synthetic polynucleotide encoding artificial human antibody VL domain
gaaattgtgttgacgcagtctccaggcaccctgtctttgtctccaggggaaagagccaccctctcctgcagggccagtcagagtgttagcagcagctacttagcctggtaccagcagaaacctggccaggctcccaggctcctcatatatggtgcatccagcaggaccactggcatcccagacaggttcagtggcagtgggtctgggacagacttcactctcaccatcaccagattggagcctgaagattttgcactgtattactgtcagcagtatggtgactcacagctcactttcggcggagggaccaaggtggagatcaaa

SEQ ID NO: 9577 - DNA, 321 bp, Artificial Sequence
  Synthetic polynucleotide encoding artificial human antibody VL domain
gacatccagatgacccagtctccatcttttgtgtctgcgtctgtcggagacagagtctccatcacttgtcgggcgagtccgggcattggcaagtggttagcctggcatcagcagaaaccagggaaagcccccaagctcctgatctacgctgcatccgccttgcataatggagtcccatcaaggttcagcggcagtggatctgggacagaattcactctcactatcagtggcctacagcctgaagacgttgcaacttactattgtcaacaggctgacagtttcccggtcaccttcggccaagggacacgagtggagattaaa

SEQ ID NO: 9578 - DNA, 330 bp, Artificial Sequence
  Synthetic polynucleotide encoding artificial human antibody VL domain
cagtctgtgttgacgcagccgccctcagtgtctgcggccccaggacagaaggtcaccatctcctgctctgcaagcagctccaagattgggaataattatgtatcctggtaccggcaggtcccaggaacagcccccaaactcctcatttatgacaataatcagcgaccctcagggattcctgaccgattctctggctccaagtctggcacgtcagccaccctggccatcaccggactccagactggagacgaggccgattattactgcggaacatgggataccagcctgagtgcttgggtgttcggcggagggaccaagctggccgtccta

SEQ ID NO: 9579 - DNA, 324 bp, Artificial Sequence
  Synthetic polynucleotide encoding artificial human antibody VL domain
tcttctgaactgactcaggaccctgctgtgtctgtggccttgggacagacagtcaggatcacatgccaaggagacagcctcagaagtttttatgcaaactggtaccagcagaagccaggacaggcccctgtccttgtcttctacagtttcaacaatcggccctcagggatcccagaccgattctctggctccagttcaggaaacacagcttccttgaccatcactggggctcaggcggaagatgaggctgactattactgtcactcccgggacagcagtggtcacctctctctcttcggaactgggaccaaggtcaccgtccta

SEQ ID NO: 9580 - DNA, 321 bp, Artificial Sequence
  Synthetic polynucleotide encoding artificial human antibody VL domain
gaaatagggatgacgcagtttccagccaccctgtctgtgtctccaggggaaagagccaccctctcttgcagggccagtcaggatctcaccagctccttagcctggtaccagcagaaacctggccaggctcccaggctcctcatctatggtgtatccattagggccactggtatcccaggcaggttcagtggcagtgggtctgggacagactacaccctcaccatcagcagcctgcagtctgacgattctgcagtttattactgtcagcactatcataaatggcccatcaccttcggccaagggacacgactggacattaaa

SEQ ID NO: 9581 - DNA, 336 bp, Artificial Sequence
  Synthetic polynucleotide encoding artificial human antibody VL domain
caggctgtgctgactcagccgtcttccctctctgtgtctcctggagcatcagcccgtctcacctgcaccctgcgcagtggcatcgatgttggcacgtactggatgcactggtaccagcagaagacagggagtcctccccactatgtcttgaggtataaagatgattatcaggactctggagtgtccagtcgcttctctggatccaaggatacttcggccaatgcaggaatcttagtcatctctgggatccagcctgacgatgaggctgactattattgtatgatttgggacaacaatgctgcggtcttcggcggggggaccaagctgaccgtccta

SEQ ID NO: 9582 - DNA, 336 bp, Artificial Sequence
  Synthetic polynucleotide encoding artificial human antibody VL domain
gatattgtgatgacccagactccactctcatcacctgtcacccttggacagccggcctccatctcctgcaggtcaagcaaaagcctcgttcacgctgatggaaacacctacttgagttggcttcaccagaggccaggccagcctccgagactccttctttacaagatttctaatcggttgtctggggtccctgacagattcagtggcagtggggcaggggcagatttcacactgaagatcagtagggtggaacctgaggatgtcggcatttactactgcatgcaagctacacattttcctctctctttcggcggagggaccaaggtggaaatcaaa

SEQ ID NO: 9583 - DNA, 333 bp, Artificial Sequence
  Synthetic polynucleotide encoding artificial human antibody VL domain
cagtctgtgttgacgcagccgccctcagtgtctgcggccccagggcagaaggtcaccatctcctgttctggaagcagctccaacattggaaataattatgtatcctggtaccaacagctcccaggagcagcccccaaactcctcatttatgacaataataagcgaccctcagggattcctgaccgattctctggctccaagtctggcacgtcagccaccctgggcatcaccggactccagactggggacgaggccgattattactgcggaacatgggatagcagcctgagtgctggaggactattcggcggagggaccaagctgaccgtccta

SEQ ID NO: 9584 - DNA, 330 bp, Artificial Sequence
  Synthetic polynucleotide encoding artificial human antibody VL domain
cagtctgccctgactcagcctccctccgcgtccgggtctcttggacagtcagtcaccatctcctgcactggaaccagcagtgacattggtggttatgactttgtctcctggtaccaacaccacccagacaaagcccccaaactcatgattttgcaggtcactaagcggccctcaggggtccctgatcgcttctctggctccaagtctggcaacacggcctccctgaccgtctctgggctccaggctgacgatgaggctgattattattgcagctcatatgcaggcagcaacaattgggtgttcggcggagggaccaagctgaccgtccta

SEQ ID NO: 9585 - DNA, 330 bp, Artificial Sequence
  Synthetic polynucleotide encoding artificial human antibody VL domain
gaaatagtgatgacgcagtctccagtcaccctgtctgtgtctccaggggaaagagccaccctctcctgcagggccagtcagagtgttagcagcaacttagcctggtaccagcagaaacctggccaggctcccaggctcctcatctatggtgcatccaccagggccactggtatcccagccaggttcagtggcagtgggtctgggacagagttcactctcaccatcagcagcctgcagtctgaagattttgcagtttattactgtcagcagtataataactggcctcccgcaaggatcaccttcggccaagggacacgactggagattaaa

SEQ ID NO: 9586 - DNA, 330 bp, Artificial Sequence
  Synthetic polynucleotide encoding artificial human antibody VL domain
cagactgtggtgacccaggagccatcgttctcagtgtccccaggcgggacagtcacactcacttgtggcttgacctctggttcagtctctgataattactggcccagttggtaccagcagaccccaggccaggctccacgctccctcatctacaacacaaacattcgcttttctggggtccctgatcgcttctctggctccatccttgggaacaaagctgccctcaccatcacgggggcccagccagatgatgaatctgattattattgtgttctctataggggtcgtggcgccgtggtattcggcggggggaccaggctgaccgtccta

SEQ ID NO: 9587 - DNA, 330 bp, Artificial Sequence
  Synthetic polynucleotide encoding artificial human antibody VL domain
cagtctgtgctgactcagccaccctcagcgtctgggacccccgggcagagggtcaccatctcttgttctggaagcagctccaacatcggaagtaattatgtatactggtaccagcagctcccaggaacggcccccaaactcctcatctatagtaataatcagcggccctcaggggtccctgaccgattctctggctccaagtctggcacctcagcctccctggccatcagtgggctccggtccgaggatgaggctgattattactgtgcagcatgggatgacagcctgaatggttatgtcttcggaactgggaccaaggtcaccgtccta

SEQ ID NO: 9588 - DNA, 324 bp, Artificial Sequence
  Synthetic polynucleotide encoding artificial human antibody VL domain
gaaattgtgttgacacagtctccagccaccctgtccttgtctccaggggaaagagccaccctctcctgcagggccagtcagactgttggcaactccttcttagcctggtaccaaaagagacctggccagaatcacaggctcctcatctatggtacatccaacagggcctctggcattccagacagattcagtggcagtgggtctgggacagacttctttctcaccatcagtcgcctagaggctgaagattttgcagtctatttctgtcagcagcgtgccaagtggcctccaacgttcggccaagggaccaaggtggaaatcaaa

SEQ ID NO: 9589 - DNA, 321 bp, Artificial Sequence
  Synthetic polynucleotide encoding artificial human antibody VL domain
gacatccagttgacccagtctccatccttcctgtctgcatctgtaggagacagagtcaccatcacttgccgggccagtcagggcattagcagttatttagcctggtatcagcaaaaaccagggaaagcccctaagctcctgatctatgctgcatccactttgcaaagtggggtcccatcaaggttcagcggcagtggatctgggacagaattcactctcacaatcagcagcctgcagcctgaagattttgcaacttattactgtcaacagcttaatagttaccctttcactttcggcggagggaccaaggtggagatcaaa

SEQ ID NO: 9590 - DNA, 321 bp, Artificial Sequence
  Synthetic polynucleotide encoding artificial human antibody VL domain
tcctatgtgctgactcagccaccctcagtgtcagtggccccaggaacgacggccagaattacctgtgggggaaacaagtttggaatttacactgtgcactggtaccagcagaagccaggccaggcccctgttttggtcatctattctgatagcgaccgaccctcagggatccctgagcgattctccggctccaactctggaaacacggccaccctgaccatcagcagggtcgaagccggggatgaggccgactatttctgtcaggtgtgggatagtggtaatgagcgggtgttcggcggagggaccaagctgaccgtccta

SEQ ID NO: 9591 - DNA, 321 bp, Artificial Sequence
  Synthetic polynucleotide encoding artificial human antibody VL domain
gaaatactattgacgcagtctccagccaccctgtctgcgtctccaggggaaagagccagcctctcctgcagggccagtcagagtgttggaagtcagttagcctggtaccgccagagaccaggccaggctcccaggctcctcatctatggttcatttattagggccattggtatcccggccaggttcagtggcagtgggtctgggacagagttcactctcaccatcagcagcctgcagtctgaagattttgcagtttattactgtcagcactatattgagtggcccatcaccttcggccaagggacacgactggagattaaa

SEQ ID NO: 9592 - DNA, 324 bp, Artificial Sequence
  Synthetic polynucleotide encoding artificial human antibody VL domain
gaaatagtgatgacgcagtctccagccaccctgtctgtgtctccaggggaaagagccaccctctcctgcagggccagtcagagtgttagtacgcacttagcctggtaccagcagaaacctggccaggctcccaggctcctcatctatggtgcatccaccagggccactgatatcccagccagattcagtggcagtgggtctgggacagagttcactctcaccatcagcagcctgcagtctgaagattttgcagtttattactgtcagcagtataaaaactggcccacgtggacgttcggccaagggaccaaggtggaaatcaaa

SEQ ID NO: 9593 - DNA, 321 bp, Artificial Sequence
  Synthetic polynucleotide encoding artificial human antibody VL domain
gaaattgtgttgacacagtctccagccaccctgactttgtctccaggggaaagagccaccctctcctgcagggccagtcagagtgttagcaattacttagtctggtaccaacagaaacctgcccaggctcccaggctcctcatctatggtgcatccaatagggccactggcatcccaggcaggttcagtggcagtgggtctgggacagacttcactctcaccatcagcagcctagagcctgaagattttgcattttatttctgtcagcagcgtagcaagtggccgatcaccttcggccaagggacacgactggagattaaa

SEQ ID NO: 9594 - DNA, 321 bp, Artificial Sequence
  Synthetic polynucleotide encoding artificial human antibody VL domain
gacatccagatgacccagtctccatcctccctgtctgcatctgtaggagacagagtcaccatcacttgccgggcaagtcagagcattagcagctatttaaattggtatcagcagaaaccagggaaagcccctaagctcctgatctatgctgcatccagtttgcaaagtggggtcccatcaaggttcagtggcagtggatctgggacagatttcactctcaccatcagcagtctgcaacctgaagattttgcaacttactactgtcaacagagttacagtacccctcacacttttggccaggggaccaagctggagatcaaa

SEQ ID NO: 9595 - DNA, 318 bp, Artificial Sequence
  Synthetic polynucleotide encoding artificial human antibody VL domain
gacatccacatgacccagtctccttcctccctgtctgcatctgtgggagacagagtcaccatcacttgccgggccagtcagagtattgatagttggttggcctggtatcagcagagaccagggaaagcccctaaactcctgatctataaggcgtcttacttagaaagtggggtcccatcaaggttcagcggcagtggatctgggacagaattcactctcaccatcaccagcctgcagcctgatgattttgcaacttattactgccagcagtattatagttaccggggattcggccaagggaccaaggtggaaatgaaa

SEQ ID NO: 9596 - DNA, 330 bp, Artificial Sequence
  Synthetic polynucleotide encoding artificial human antibody VL domain
caggcagggctgactcagccaccctcggtgtccaagggcttgagacagaccgccacactcacctgcactgggaacagcaacaatgttggctaccaaggagcagcttggctgcagcagcgccagggccaccctcccaaactcctatcctacaggagcaacaaccggccctcagggatctcagagagattatctgcatccaggtcaggaaacacagcctccctgaccattactggactccagcctgaggacgaggctgactattactgctcagcatgggacagcagcctcagtgctcaggtgttcggcggagggaccaagctgaccgtccta

SEQ ID NO: 9597 - DNA, 321 bp, Artificial Sequence
  Synthetic polynucleotide encoding artificial human antibody VL domain
gacatccagatgacccagtctccatcctccctgtctgcatctgtaggagacagagtcaccatcacttgccgggcgagtcagggcattagcaattatttagcctggtatcagcagaaaccagggaaagttcctaagctcctgatctctggtgcatccactttacaatcaggggtcccatctcggttccgtggcagtgggtctgggacacatttcactctcaccatcagcagcctgcagcctgaagatattggaaattattactgtcaaaagtataacagtgtccctctcactttcggcggagggaccaaggtggagatcaaa

SEQ ID NO: 9598 - DNA, 327 bp, Artificial Sequence
  Synthetic polynucleotide encoding artificial human antibody VL domain
cagtctgccctgactcagcctgcctccgtgtctgggtctcctggacagtcgatcaccatctcctgcactggaaccagcagtgacgttggtgattataactatgtctcctggtaccaacggcacccaggcaaagcccccaaactcatgatttatgatgtcagtaagcggccctcaggggtttctaatcgcttctctggctccaagtctggctacacggcctccctgaccatctctgggctccaggctgaggacgaggctgattattactgcagctcatatacaagcagcagcacggtgttcggcggagggaccaagctgaccgtccta

SEQ ID NO: 9599 - DNA, 321 bp, Artificial Sequence
  Synthetic polynucleotide encoding artificial human antibody VL domain
gacatccagctgacccagtctccatcctccctgtctgcatctgtaggagacaaagtcaccatcacttgccaggcgagtcaaggcattgcgaagtctttaaattggtatcaccagcgaccggggaaagcccctaacctcctgatctacgatgcatccaatttggaagtaggagtcccttcaagattcagtggaagtggatctgggacagattttacgttcaccatcaccagcctgcattctgaagacatcggaacatatttctgtcaacagaacgataacgtcccgatcaccttcggccaagggacacgactggaccttaaa

SEQ ID NO: 9600 - DNA, 333 bp, Artificial Sequence
  Synthetic polynucleotide encoding artificial human antibody VL domain
cagtctgtgttgacgcagccgccctcagtgtctgcggcccccggacagaaggtcaccatctcctgttctggaagcagctccaacattggaaataattatgtctcctggtaccaacacctcccaggaacagcccccaaactcctcatttatgacaataataagcgaccctcagggattcctgaccgattctctggctccaagtctggcacgtcagccaccctgggcatcaccggactccagcctggggacgaggccgattattactgcggaacatgggatagcggcctgagtggtggggcattattcggcggaggaaccaagttgaccgtccta

SEQ ID NO: 9601 - DNA, 321 bp, Artificial Sequence
  Synthetic polynucleotide encoding artificial human antibody VL domain
gaaatagtgatgacgcagtctccaggcaccctgtctgtgtctccagcggaaagagtcaccctctcctgcggggccagtcagagtgtaggcagcgccttagcctggtaccagcagaaacctggccaggctcccaggctcctcctctatggtgcatccatctgggccactggtgtcccagccaggttcagtggcagtgggtctgggacatatttcactctcaccatccgcggcctgcagtctgaagatgttgcagtgtattactgtcagcaatattttaagtggcccatcaccttcggccaagggacacgactggagattaaa

SEQ ID NO: 9602 - DNA, 330 bp, Artificial Sequence
  Synthetic polynucleotide encoding artificial human antibody VL domain
cagtctgccctgactcagcctgcctccgtgtctgggtctcctggacagtcgatcaccatttcctgcactggaaccagcagtgatgttggcaattataaccgtgtctcctggttccaacaatacccaggcaaagtccccaagctcatgatttatgaggacactaagcggccctcagggatttctaatcgcttctctggctccaagtctggcaacacggcctccctgacaatctctgggctccaggctgaagacgaggctgattattactgctgctcatatgcacgtggtgagaaatgggtgttcggcggtgggaccaagttgaccgtccta

SEQ ID NO: 9603 - DNA, 330 bp, Artificial Sequence
  Synthetic polynucleotide encoding artificial human antibody VL domain
tcttctgagctgactcaggaccctgctgtgtctgtggccttgagacagacagtcaggatcacatgccaaggagacagcctccgaaccttttacgcaagctggtaccagcagaagccaggacaggcccctgtagttgtcatgtacggtaaaaacaaccggccctctgggatccccgaccgcttctctggctccaactcaggggacacatcttccttgatcatcactgagactcaggcggaagatgaggctgattattactgttgctcccgggacagtagtgggaatcatctgcgggtgatcttcggcggagggaccaagctgaccgtccta

SEQ ID NO: 9604 - DNA, 321 bp, Artificial Sequence
  Synthetic polynucleotide encoding artificial human antibody VL domain
gaaattgtgttgacacagtctccagccaccctgtctttgtctccaggggaaagggcctccctctcctgcagggccagtcagagtgttggcaattacttagcctggtaccaacagaaacctggccaggctcccaggctcctcatctatgatgcatccaacagggccactggcgtcccagtcaggttcagtggcggtgggtcggggacagacttcactctcaccatcagcagcctagaccctgaagattttgcagtttattactgtcagcagcgtaccaactggccgctcactttcggcggagggaccaaggtggagatcaaa

SEQ ID NO: 9605 - DNA, 330 bp, Artificial Sequence
  Synthetic polynucleotide encoding artificial human antibody VL domain
cagtctgccctgactcagcctgcctccgtgtctgggtctcctggacagtcgatcaccatctcctgcacaggaaccagcagtgacgttggtggttataactttgtctcctggtaccaacaatacccaggcaaagcccccaaactcatgatttatgatgtcagtaatcggccctcaggggtttctaatcgtttctctggctccaagtctggcaacgtggcctctttgaccatttctggtctccaggctgaggacgaggctgattattactgcgcctcatatacaaccaggttgtttgtggtgttcggcggagggaccaagctgaccgtccta

SEQ ID NO: 9606 - DNA, 324 bp, Artificial Sequence
  Synthetic polynucleotide encoding artificial human antibody VL domain
gaaatagtgatgacgcagtctccagccaccctgtctgtgtctccaggagaaagagccaccctctcctgcagggccagtcagagtgttgacaccaacttggcctggtaccagcagaaacctggccaggctcccaggctcctcatctatggctcatccaccagggcccctggtatcccagccaggttcagtggcagggggtctgggacagaattcactctcaccatcagcagcctgcaatttgaagattttggactttattactgtcagcaatataagaactggcctccgaggacgttcggccaagggaccaaggtggaaatcaaa

SEQ ID NO: 9607 - DNA, 327 bp, Artificial Sequence
  Synthetic polynucleotide encoding artificial human antibody VL domain
cagtctgccctgactcagcctgcctccgtgtctgggtctcctggacagtcgatcaccatctcctgcactggaaccagtagtgacgttggtggttctacttttatctcctggtaccaacaacacccaggcaaagcccccaaagtcattctttatgatgtctttaagcggccctcaggggtttctagtcgcttctctggctccaagtctggcaacacggcctccctgaccatctctgggctccaggctgaggacgaggctgattattactgctgctcatatataagcaccaacactcttttcggcggagggaccaaactgaccgtccta

SEQ ID NO: 9608 - DNA, 327 bp, Artificial Sequence
  Synthetic polynucleotide encoding artificial human antibody VL domain
tcttctgagctgactcaggaccctgctgtgtctgtggccttgggacagacagtcaggatcacatgccgaggagacatcctcagaagttattatgtcagctggtaccagcagaagccaggacaggcccctgtccttgtcatctttggtaataacaaccgaccctcagggatcccagaccgattctctggctccagctcaggtaacacaggttccttgaccatcactggggctcaggcggaagatgaggctgactattactgtaactcccgggacactagtggtgatcatctttggatgttcggcggagggaccaagctgaccgtccta

SEQ ID NO: 9609 - DNA, 321 bp, Artificial Sequence
  Synthetic polynucleotide encoding artificial human antibody VL domain
tcctatgagctgacacagccaccctcggtgtcagtgtccccaggtcagacggccaagatcacctgctccggagatgcattgccaaacctttctgtttattggtaccaacagaggccaggccaggcccctgtgttggtgatatttaaagacactgagaggccctcagggatccctgagcgattctctggctccagctcagggacaacagtcacgttgaccatcagtggagtccaggcagaagacacggctgacttttactgtcaatcagcagacaacaatggtttcgtggccttcggcggagggaccaagctgaccgtccta

SEQ ID NO: 9610 - DNA, 327 bp, Artificial Sequence
  Synthetic polynucleotide encoding artificial human antibody VL domain
gaaattgtgttgacgcagtctccaggcaccctgtctttgtctccaggggaaagagccaccctctcctgcagggccagtcagagtgtgaatagcaactacttagcctggtaccagcagaaagttggccaggctcccaggctcctcatctatggtgcatccaccagggccactggcatcccagacaggatcagtggcagtggatctgggacagacttcactctcaccatcagcagactggagcctgaagattttgcagtctatttctgtcagcactatggtagttcaccgccgtacagttttggccaggggaccaagctggagatccaa

SEQ ID NO: 9611 - DNA, 339 bp, Artificial Sequence
  Synthetic polynucleotide encoding artificial human antibody VL domain
gacatcgtgatgagccagtctccagactccctggctgtgtctctgggcgagagggccaccatcagctgcaagtccagccggagcgttttatccaggtccaataatcagaattacttagcttggtaccagcagaaaccaggacagtctcctaagctgctcatttactgggcatctacccgggaatccggggtccctgaccgattcagtggcagcgggtctgggacagatttcactctcaccatcagcagcctgcaggctgaagatgtggcagtgtattactgtcagcactattatgatactcctctctctttcggcggagggaccaaggtggagatcaaa

SEQ ID NO: 9612 - DNA, 321 bp, Artificial Sequence
  Synthetic polynucleotide encoding artificial human antibody VL domain
gacatccagatgacccagtctccatcctccctgtctgcatctgtaggagacagagtcaccatcacttgccgggcaagtcagagcattagcagctatttaaattggtatcagcagaaaccagggaaagcccctaagctcctgatctatgctgcatccagtttgcaaagtggggtcccatcaaggttcagtggcagtggatctgggacagatttcactctcaccatcagcagtctgcaacctgaagattttgcaacttactactgtcaacagagttacagtaccgcgatcaccttcggccaagggacacgactggagattaaa

SEQ ID NO: 9613 - DNA, 330 bp, Artificial Sequence
  Synthetic polynucleotide encoding artificial human antibody VL domain
cagtctgccctgactcagcctgcctcggtgtctgggtcccctggacagtcgatcaccatgtcctgcactggaaccagcagtgacgttggtggttataactatatttcctggtaccaacaatacccaggcagagcccccaaactcataatttctgatgtcggtaatcggccctcaggggtttctaatcgcttctctggctccaagtctggcaacacggcctccctgaccatctctgggctccaggctcaggacgaggctgattattactgcatgtcatatacaaccagcaactcttatgtcttcggaagtgggaccaacgtcatcgtccta

SEQ ID NO: 9614 - DNA, 321 bp, Artificial Sequence
  Synthetic polynucleotide encoding artificial human antibody VL domain
gacatccagatgacccagtctccatcctccctgtctgcatctgtaggagacagagtcaccatcacttgccgggcaagtcagggctttggaaatcgtttaggctggtatcagcagaggccagggacagcccctaagcgcctgatttatgctacatccagtttgcaaagtggggtcccatcaaggttcagcggcagtggatctgggacagaattcactctcacaatcagcagcctgcagcctgaggattttgcaacttattattgtctagactataatagttatccgctcactttcggcggagggaccaaggtggagatcaaa

SEQ ID NO: 9615 - DNA, 336 bp, Artificial Sequence
  Synthetic polynucleotide encoding artificial human antibody VL domain
gatattgtgatgactcagtctccactctccctgcccgtcacccctggagagccggcctccatctcctgcaggtctaatcagagcctcctgcatagtaatgggcacaactatttggattggtatgtgcagaagccagggcagtctccacagctcctgacctatttgggttctagtcgggcctccggggtctctgacaggttcagtggcagtggatcaggcacagattttacactgaaaatcagcagagtggaggctgacgatgttggggtctattactgcatgcaagctctacgatctcctatcaccttcggccaagggacacgactggatattaaa

SEQ ID NO: 9616 - DNA, 327 bp, Artificial Sequence
  Synthetic polynucleotide encoding artificial human antibody VL domain
cagtctctactgacgcagccgccctcagtgtctggggcccctggacagactgtcaccatctcttgcactggcagcaccgccaatctcggtattggttatggtgtacaatggtacaagcaggttccagggactgcccccaaagtccttattcattcaaacaccaatcgcgcgtcaggaatctctgagcggttttctggctccaagtcgggcacctcagcctccctgaccatctctggactccagcctgacgatgagggtgattattactgccagtcccatgacgccgcctctgttgttttcggaggagggaccaagctggccgtccta

SEQ ID NO: 9617 - DNA, 336 bp, Artificial Sequence
  Synthetic polynucleotide encoding artificial human antibody VL domain
gatattgtgatgactcagtctccactctccctgcccgtcacccctggagagccggcctccatctcctgcaggtctagtcagagcctcctgtacagtaatggatacaactatgtggattggttcctgcagaagccagggcagtctccacaactcctgatctatatggcttctagtcgggcctccggggtccctgacaggttcagtggcagtggatcaggcacagattttacactgaagatcagcagagtggaggccgaagatgtgggcgtttattactgcatgcaacctctacacactccgtggacgttcggccaagggactaaggtggaaatcaaa

SEQ ID NO: 9618 - DNA, 321 bp, Artificial Sequence
  Synthetic polynucleotide encoding artificial human antibody VL domain
gaaatagtgatgacgcagtctccagccaccctgtctgtgtttccaggggaaagagccaccctctcctgcagggcccgtcagagtgtgagcagcaagttagcctggtatcagcaaaaacctggccaggctcccaggctcctcatctatggtacatctaccagggccactggtgtcccagccaggttcagtggcagtgggtctgggacagagttcactctcaccatcaacagcctgcagtctgaagattttgcactttatttctgtcagcactacaataactggcctccggccttcggccaagggaccaaggtggaaatcaaa

SEQ ID NO: 9619 - DNA, 333 bp, Artificial Sequence
  Synthetic polynucleotide encoding artificial human antibody VL domain
cagtctgccctgactcagcctgcctccgtgtctgggtctcctggacagtcgatcaccatctcctgcactggaaccagcagtgacgttggtggttataactatgtctcctggtaccaacagcacccaggcaaagcccccaaactcatgatttatgatgtcagtaagcggccctcaggggtttctaatcgcttctctggctccaagtctggcaacacggcctccctgaccatctctgggctccaggctgaggacgaggctgattattactgcagctcatatacaagcagcagcactctttgggtgttcggcggagggaccaagctgaccgtccta

SEQ ID NO: 9620 - DNA, 330 bp, Artificial Sequence
  Synthetic polynucleotide encoding artificial human antibody VL domain
cagtctgtgctgactcagccaccctcagcgtctgggacccccgggcagagggtcaccatctcttgttctggaagcagctccaacatcggaagtaatactgtaaactggtaccagcagctcccaggaacggcccccaaactcctcatctatagtactaatcagcggccctcaggggtccctgaccgattctctggctccaagtctggcacctcagcctccctggccatcagtgggctccagtctgaggatgaggctgattattattgtgcagcatgggatgacaccctgattggttatgtcttcgcaactgggaccaaggtcaccgtccta

SEQ ID NO: 9621 - DNA, 330 bp, Artificial Sequence
  Synthetic polynucleotide encoding artificial human antibody VL domain
aattttatgctgactcagccccactctgtgtcggagtctccggggaagacgataaccgtctcctgcacccgcagtagtggcagcattggcaacaactttgtacagtggtaccagcagcgcccgggctctacccccgccgttctgatatatgaccatgcaaaaagaccctctggggtccctgatcggttctctggctccatcgacacgtcctccaactctgcctccctcaccatctctggactgaagactgaggacgaggctgactactactgtcaatcttatgatcgcggcaaaatggtcctcggcggagggaccaagttgaccgtccta

SEQ ID NO: 9622 - DNA, 324 bp, Artificial Sequence
  Synthetic polynucleotide encoding artificial human antibody VL domain
gaaatagtaatgacgcagtctccagccaccctgtctgtgtctccaggggaaagagccaccctctcctgcacggccagtcagagtgttaacaccaacttggcctggtaccagcagaaacctggccaggctcccaggctcctcatctatggttcatccaccagggccactggtatcccagccaggttcagtggcagggggtctgggacacagttcactctcaccatcagtagcctgcaattggaagattttggaacttattactgtcagcagtatatgaactggcctccgaggacgttcggccaagggaccaaggtggaaatcaaa

SEQ ID NO: 9623 - DNA, 330 bp, Artificial Sequence
  Synthetic polynucleotide encoding artificial human antibody VL domain
cagtctgccctgactcaacctccctccgcgtccgggtctcctggacagtcagtcaccatctcctgcactggaaccagcagtgacgtcggtgcttatgactatgtctcctggtatcaacaatatccaggcaaagcccccaaactcatgatttttgagaccactaagcggccctcaggggtccctaatcgtttctctggctccaagtctgccaacacggcctccctgaccgtctctgggctccagtctgaggatgaggctgattactactgctgctcatatgccggcaacaacagatttgtcttcggaactgggaccaaggtttccgtccta

SEQ ID NO: 9624 - DNA, 333 bp, Artificial Sequence
  Synthetic polynucleotide encoding artificial human antibody VL domain
cagtctgccctgactcagcctccctccgtgtccgggtctcctggacagtcagtcaccatctcctgcactggaaccagcagtgacattggtggttatgaccgtgtctcctggtaccagcagcccccaggcacagcccccaaactcatgatttatgaggtcagtaatcggccctcaggggtccctgatcggttctctgggtccaagtctggcaacacggcctccctgaccatctctgggctccaggctgaggacgaggctcattattactgctgctcatatacagacagcagcccttcggtggtgttcggcggagggaccaaggtgaccgtccta

SEQ ID NO: 9625 - DNA, 324 bp, Artificial Sequence
  Synthetic polynucleotide encoding artificial human antibody VL domain
gacatccagatgacccagtctccatcctccctgtctgcgtctgtaggagacagcgtcagtataacttgtcaggcgagtcgggacataagcaacgatttaaactggtatcagcagaaaccagggaaagcccctcagctcctgatctacgatgcatccaatttgcaagcaggggtcccatcaaggttcagtggaagtggatctgggacagaatttactttgaccatcagcagcctgcagcctgaggacattggaacatattactgtcaactgtatgataatgtcgttccggtcactttcggccctgggaccaaggtggatatcaaa

SEQ ID NO: 9626 - DNA, 321 bp, Artificial Sequence
  Synthetic polynucleotide encoding artificial human antibody VL domain
gacatccagatgacccagtctccatcctccctgtctgcatctgtaggagacagagtcaccatcacttgccgggcgagtcagggcattaccaattttttagcctggtatcagcagaaaccagggaaagttcctaagctcctgatctatgctgcatccactttgcaatcaggggtcccatctcggttcagtggccgtggatctgggacagatttcactctcaccatcagcagcctacagcctgaagatgttgcaacttattactgtcaaaagtataacagtgccccccttacgttcggccaagggaccaaggtggaaatcaaa

SEQ ID NO: 9627 - DNA, 321 bp, Artificial Sequence
  Synthetic polynucleotide encoding artificial human antibody VL domain
gacatccagatgacccagtctccttccaccctgtctgcatctgtaggagacagagtcaccatcacttgccgggccagtcagagtattagtagctggttggcctggtatcagcagaaaccagggaaagcccctaagctcctgatctataaggcgtctagtttagaaagtggggtcccatcaaggttcagcggcagtggatctgggacagaattcactctcaccatcagcagcctgcagcctgatgattttgcaacttattactgccaacagtataatagttattcaggcagttttggccaggggaccaagctggagatcaaa

SEQ ID NO: 9628 - DNA, 330 bp, Artificial Sequence
  Synthetic polynucleotide encoding artificial human antibody VL domain
cagtcttccctgactcagcctgcctccgtgtctgggtctcctggtcagtcgatcaccatctcctgcactggaaccagcagtgatgttggggcttataaccttgtctcctggtaccaacagcacccaggcaaagcccccaaactcatgatttatgaggtcaataagcggccctcaggggtttctaatcgcttctctggctccaagtctggcaacacggcctcactgacaatctctggcctccaggctgaggacgaggctgattattactgctgctcatatgtaggtgacttctatgtcattttcggcggagggaccacgctgaccgtccta

SEQ ID NO: 9629 - DNA, 321 bp, Artificial Sequence
  Synthetic polynucleotide encoding artificial human antibody VL domain
gacatccaggtgacccagtctccatcctccctgtctgcatttgtaggggacagagtcaccatcacttgccggacaagtcagaacattaactactttttaaattggtatcagcagaaaccagggaaagcccctaggctcctgatctatactgcatccactttgcaaagtggggtcccatcaaggttcagtggcagtggatctgggacagatttcaccctcaccatcactagtctgcaacctgaagattttgtaagttactactgtcaacagagttacactaccccgatcactttcggcggggggaccaaggtggagatcaaa

SEQ ID NO: 9630 - DNA, 327 bp, Artificial Sequence
  Synthetic polynucleotide encoding artificial human antibody VL domain
cagactgtggtgacgcaggagccctcactgactgtgtccccaggagggacagtcactctcacctgtgcttccagcactggagcagtcaccagtggttactatccaagctggttccagcggaaacctggacaagcacccagggcgctgatttatagtacaatcaacaaacagtcctggacccctgcccgcttctccggctccctccttggggacaaagctgccctgacactgtcaggtgtgcagcctgaggacgaggctgagtattactgccaactctactatggtggtgctcttgtcttcggcggagggaccaagctgaccgtccta

SEQ ID NO: 9631 - DNA, 321 bp, Artificial Sequence
  Synthetic polynucleotide encoding artificial human antibody VL domain
gacatccagttgacccagtctccatccttcctgtctgcatctgtaggagacagagtcaccatcacttgccgggccagtcagggcattagcagttatttagcctggtatcagcaaaaaccagggaaagcccctaagctcctgatctatgctgcatccactttgcaaagtggggtcccatcaaggttcagcggcagtggatctgggacagaattcactctcacaatcagcagcctgcagcctgaagattttgcaacttattactgtcaacagcttaatagttactcgctcactttcggcggagggaccaaggtggagatcaaa

SEQ ID NO: 9632 - DNA, 324 bp, Artificial Sequence
  Synthetic polynucleotide encoding artificial human antibody VL domain
tcttctgagctgactcaggaccctgctgtgtctgtggccttgggacagacagtcaggatcacatgccaaggagacaacctcagaagctattatgcaaactggtaccagcagaggccaggacaggcccctgtacttgtcatccatggtaacaacaataggccctcagggatcccagaccgattctctggctccacctcaggaaacacagctaccttgaccatcactggggctcaggcgggagatgaggctgactattactgtagttgccgggacggcaatggtaaccatgtgcccttcggcggcgggaccaagctgaccgtccta

SEQ ID NO: 9633 - DNA, 324 bp, Artificial Sequence
  Synthetic polynucleotide encoding artificial human antibody VL domain
gaaattgtgttgacgcagtctccaggcaccctgtctttgtctccaggggaaagagccaccctctcctgcagggccagtcagagtgttagcagcagctacttagcctggtaccagcagaaacctggccaggctcccaggctcctcatctatggtgcatccagcagggccactggcatcccagacaggttcagtggcagtgggtctgggacagacttcactctcaccatcagcagactggagcctgaagattttgcagtgtattactgtcagcagtatggtagctcacctctaacgttcggccaagggaccaaggtggaaatcaaa

SEQ ID NO: 9634 - DNA, 324 bp, Artificial Sequence
  Synthetic polynucleotide encoding artificial human antibody VL domain
gaaatagtcctgacgcagtttccagtcaccctgtctgtgtctccaggggaaagagtcgccctctcgtgcagggccagtcagagtattaacaccaacttggcctggtaccagcagcgccctggccagcctcccaggctcctcatgtatggttcatcaaccagggccactggtgtcccagccaggttcagcggccgtgggtctgggacagagttcactctcaccatcagtagcctgcagtctgaggattttgcactttacttctgtcagcagtatagcaactggcctccgaggacgttcggccaagggaccagggtggagatgaaa

SEQ ID NO: 9635 - DNA, 321 bp, Artificial Sequence
  Synthetic polynucleotide encoding artificial human antibody VL domain
gacatccagatgacccagtttccatcctccctgtctgcatctgtaggggacagagtcaccatcacttgccgggcaagtcagaggattagcacctatttgaattggtatcagcagagaccagggaaagcccctaaactcctcatctatgctgcatccactttgcaaagtggggtcccatcagggttcagtggcagtggatctgggacagacttcactctcaccatcagcagtctgcaacctgaagattttgcaacttatttctgtcaacagagctacagttccccatacaattttggccaggggaccaagctggagagcaaa

SEQ ID NO: 9636 - DNA, 330 bp, Artificial Sequence
  Synthetic polynucleotide encoding artificial human antibody VL domain
cagtctgagctgactcagccaccctcagcgtctgggacccccgggcagagggtcaccatctcttgctctggaagcagctccaacatcggaagcgatgctgtaaactggtaccagcacctcccaggaacggcccccaaactcctcatctataataataatctgcggccctcaagggtccctgaccgattctctggctccaagtctggcacctcagcctccctggccatcagtgggctccgttctgaggatgaggctctttattactgtgcagcgtgggatgacagcctgaatggtgtgctattcggcggagggaccagactgaccgtccta

SEQ ID NO: 9637 - DNA, 327 bp, Artificial Sequence
  Synthetic polynucleotide encoding artificial human antibody VL domain
tcctatgtgctgactcagccaccctcggtgtcagtggccccaggaaagacggccaggattacctgtgggggagacaacattggaggtaaaggtgtactctggtaccagcagaggccaggccaggcccctgttttggtcgtctatgatgatagcgcccggccctcagggatccctgagcgattctctgcctccaagtctgggagcacggccaccctgaccatcagccgggtcgaggccgaggatgaggccgactacttctgtcaggtgtgggatactaatactgatcatttggaggtattcggcggagggaccaagctgaccgtccta

SEQ ID NO: 9638 - DNA, 321 bp, Artificial Sequence
  Synthetic polynucleotide encoding artificial human antibody VL domain
gacatccagatgacccagtctccatcttccctgtctgcatctgtaggagacacagtcaccatcacttgtcgggcgagtcaggtcattagcggttatttagcctggtatcagcagagaccagggaaaagtcctaaactcctgatctatgctgcatccactttgcaatcaggggtcccatctcggttcagtggcagtggatctgggacagattacagtctcaccattagcagcctgcagcccgaagatgttggggcttattactgtcagaaatataacagtgccccgtggacgttcggccaagggaccacggtggaaatcaaa

SEQ ID NO: 9639 - DNA, 330 bp, Artificial Sequence
  Synthetic polynucleotide encoding artificial human antibody VL domain
cagtctgtgctgactcagccaccctcagcgtctgcgacccccggacagagcgtcaccatctcctgctctggaagcacctccaacatcggacctaataatgtctactggtatcagcaattcccaggaagggcccccaaacttctcaaggatacctataatgaggggccctcaggggtccctgaccgattctctggctccaagtctggcacctcagcctccctggccatcagtggagtccggcccgaagatgaggctgattatcactgtgcagtatgggatgacaccctgagagctgtgattttcggcggagggaccaagttgaccgtccta

SEQ ID NO: 9640 - DNA, 330 bp, Artificial Sequence
  Synthetic polynucleotide encoding artificial human antibody VL domain
caggcaggactggctcagccaccctcgatgtccagggacttgggacagaccgccacactcacctgcactgggaacagcaacaatgttggtaacgaaggagcagcttggttgcagcaacaccagggccaccctcccaaactgctggcctacaagaataacaaccggccctcagggatctcggagagattctctgcatccaggtcaggaaacacagcctccctgaccatttctggactccagcctgaggacgaggctgactattactgctcagcgtgggacagcagcctcaatgttcgggttttcggcggagggacccacctgaccgtccta

SEQ ID NO: 9641 - DNA, 333 bp, Artificial Sequence
  Synthetic polynucleotide encoding artificial human antibody VL domain
cagtctgccctgactcagcctgcctccctgtctgggtctcctggacagtcgatcaccctctcctgcactggaaccagcaatgacattggtggttataacttagtctcctggtaccgacagcaccccggcgaagcccccaaactcttactttttgatgtcactgagcgcccctcaggggtttctgatcgcttctctggctccaagtctggcaacacggcctccctgaccatctctggactcctgcgtgaggacgaggctgattattattgcagctcatttacaagcgacagcactcatctgattttcgccggagggaccagactcaccgtccta

SEQ ID NO: 9642 - DNA, 339 bp, Artificial Sequence
  Synthetic polynucleotide encoding artificial human antibody VL domain
gacatcgtgatgacccagtctccagactccctgggtgtgtctctgggcgacagggccaccatcaactgtaagtccagccacagtctcttacacagttccaacagtaagaactacttagcttggttccagcagaaaccaggacagcctccaaaactgctcctttactgggcctctacccgagagtccgggttccctgaccgatttagtggcagcgggtctggaacagatttcactctcaccatcagtaacctgcaggctgaagatgtggcagtttatcactgtcagcaatattatagtcatccgtacacctttggccaggggaccaagctggacatcaaa

SEQ ID NO: 9643 - DNA, 336 bp, Artificial Sequence
  Synthetic polynucleotide encoding artificial human antibody VL domain
gatattgtgatgacccagagtccactctcctcatctgtcacccttggacagtcggcctccatctcctgtaggtctagtcagagcctcctccaccataatggcaacacctacttgagttggtttcaccagaggccaggccagcctccaagactcctaatttataagatttctgagcggttctctggggtcccagacagattcagtggcaatggggcagggacagatttcacactgaaaatcagcagggtggaagctgaggatgtcggggtctattactgcctgcaatctacacaatttcctcggacgttcggccaagggaccatgttggaaatcaaa

SEQ ID NO: 9644 - DNA, 330 bp, Artificial Sequence
  Synthetic polynucleotide encoding artificial human antibody VL domain
aattttatgctggctcagcccctctctgtgtcggagtctccggggaagacggttaccgtctcttgcacccgcaacagtggaagtattggcagcaaccatgtgcagtggtatcagcagcgcccgggccgtgtccccacccttgtgatctatgaccataagaaaagaccctctggggtttctgatcgtttctctggctccatcgacgcctcctccaactctgcctccctcaccatctctggactgacgactgaggacgaggctgactactattgtcaatcttatgatcgcggcgtaatggttatcggcggagggacgaaggtgactgtccta

SEQ ID NO: 9645 - DNA, 333 bp, Artificial Sequence
  Synthetic polynucleotide encoding artificial human antibody VL domain
aattttatactgactcagccccactctgtgtcggagtctccggggaagacggttgtcgtctcctgcacccgcagcagtggcagcattgccaacaactttgtacagtggtatcagcagcgtccgggcagtgcccccaccactattatctatgaaaacgataaaagaccctctggggtccctgatcgattctctggctccatcgacaggccctccaactcagcctccctcaccatctctggactgaggactgaggacgaggctgactaccattgtcagtcttatgattcttccaatcaaataattttcggcggagggaccaagctgaccgtccta

SEQ ID NO: 9646 - DNA, 321 bp, Artificial Sequence
  Synthetic polynucleotide encoding artificial human antibody VL domain
gaaatagggatgacgcagtttccagccaccctgtctgtgtctccaggggaaagagccaccctctcttgcagggccagtcagagtgtcagccgcgccttagcctggtaccaacagaaacctggccaggctcccagactcctcatctatggtgcatccattagggccactggtatcgcagccaggtttagtggcagtgggtctgggacagagttcactctcaccatcagcagcctgcagtctgaagattttgcactttattactgtcaacactattatgaatggcccatcaccttcggccaagggacacgactggagattaaa

SEQ ID NO: 9647 - DNA, 324 bp, Artificial Sequence
  Synthetic polynucleotide encoding artificial human antibody VL domain
gaaattgtgttgacgcagtctccaggcaccctgtctttgtctccaggggaaagagccaccctctcctgcagggccagtcagagtgttagcagcagctacttagcctggtaccagcagaaacctggccaggctcccaggctcctcatctatggtgcatccagcagggccactggcatcccagacaggttcagtggcagtgggtctgggacagacttcactctcaccatcagcagactggagcctgaagattttgcagtgtattactgtcagcagtatggtagctcaccctggacgttcggccaagggaccaaggtggaaatcaaa

SEQ ID NO: 9648 - DNA, 333 bp, Artificial Sequence
  Synthetic polynucleotide encoding artificial human antibody VL domain
cagtctgtgctgacgcagccgccctcagtgtctggggccccagggcagagggtcaccatctcctgcactgggagcggctccaacatcggggcaaattttgatgtacactggtaccgccaccttccaggaacagcccccaaactcctcatttatggttactccaatcggccctcaggtgtccctgaccgattctctggctccaagtcaggcgcgtcagcctccttggccattattgggctccaggctgaggatgaggctgattattactgccagtcctatgacagtagcctgagtggttgggtgttcggcggagggaccaagctgaccgtccta

SEQ ID NO: 9649 - DNA, 339 bp, Artificial Sequence
  Synthetic polynucleotide encoding artificial human antibody VL domain
cagtctcccctgactcagcctgcctccgtgtctgggtctcctggacagtcgatcaccatctcctgcactggaaccagcagtgacattggtggttatgattctgtctcctggtaccaacagcacccagccaaagcccccaaactcatcatttatgacgtcagtaatcggccctcaggggtttctaatcacttctctggctccaagtctggcaacacggcctccctgaccatctctgggctccgggctgacgacgaggctgattattactgcagctcatatacaaggaggagcaacactgtgactgtggtatttggcggagggaccaagctgaccgtccta

SEQ ID NO: 9650 - DNA, 330 bp, Artificial Sequence; identical to SEQ ID NO: 9106
  Synthetic polynucleotide encoding artificial human antibody VL domain

SEQ ID NO: 9651 - DNA, 336 bp, Artificial Sequence
  Synthetic polynucleotide encoding artificial human antibody VL domain
gatattgtgatgacccagactccactctcctcacctgtcacccttggacagccggcctccatctcctgtaggtctagtcaaagcctcgtacacagtgatggaaacacctacttgggttggcttcagcagaggccaggccagcctccaagacccctaatttacaagatttctaaccggttgtctggggtcccagacagattcattggcagtggggcagggacagatttcacattgcaaatcaccagggtggaagctgaggatgtcgggatttattactgcatgcaagctacacagtttccttggacgttcggccaagggaccaaggtggaaatcaaa

SEQ ID NO: 9652 - DNA, 321 bp, Artificial Sequence
  Synthetic polynucleotide encoding artificial human antibody VL domain
gacatccagatgacccagtctccttccaccctgtctgcttctgtaggagacagagccaccatcacttgccgggccagtcgggatattcataactggttggcctggtatcagcagaaaccagggaaagcccctaggctcctcatctataaggcaaatactttagagagtggggtcccatcaaggttcagcggcagtggatctgggacagaattcactctcaccatcagcagcctgcagcctgatgattttgcaacttattactgccagcagtatgagacttactcgtggacgttcggccaagggaccaaggtggaagtcaaa

SEQ ID NO: 9653 - DNA, 330 bp, Artificial Sequence
  Synthetic polynucleotide encoding artificial human antibody VL domain
cagtctgcgttgacgcagccgccctcagcatctgcggccccaggacagagggtcgccatctcctgctctggaaacgcctccaatgttgccatcaattatgtgtcatggtaccagcatttcccagggacagcccccagagtcgtcgttcatgacaatgataagcggccctcagggatttctgaccggttctctggctccaagtctggcacgactgccaccctgggcatcaccggactccagactggggacgaggccgattattactgcgcaacttgggataggagtctgagtgcttgggtgttcggcggagggaccaagttgaccgtccta

SEQ ID NO: 9654 - DNA, 324 bp, Artificial Sequence; identical to SEQ ID NO: 9123
  Synthetic polynucleotide encoding artificial human antibody VL domain

SEQ ID NO: 9655 - DNA, 330 bp, Artificial Sequence
  Synthetic polynucleotide encoding artificial human antibody VL domain
cagtctgtggtgactcagccaccctcagcgtctgggacccccgggcagagggtcaccatctcctgttctggaagcagctccaacatcggaaggtatgctgtgaactggtaccagctcctcccaggaacggcccccaaactcctcatttatggtaatagtttgcggccctcaagggtccctgaccgattctctggctccaagtctggcacctcagcctccctggccatcagtggtctcctgcctgacgatgaggctgattattactgtgcagtatgggatgacagcctgaatggtccggtgttcggcggagggaccaaggtgaccgtccta

SEQ ID NO: 9656 - DNA, 327 bp, Artificial Sequence
  Synthetic polynucleotide encoding artificial human antibody VL domain
gaaattgtgttgacgcagtctccaggcaccctgtctttgtctccaggggaaagagccaccctctcctgtagggccagtcagagtgttaggaaaaactacttagcctggtaccagcagaaacctgggcaggctcccaggctccttatctttggagcatccagtaggcccggtggcatcccagacaggttcagcggcagtgggtctgggacagacttcacgctcactatcagcagactggagcctgaagattttgcagtgtatttctgtcaacagtatgatagaacacctccggttaccttcggccaagggacacgactggagattaaa

SEQ ID NO: 9657 - DNA, 321 bp, Artificial Sequence
  Synthetic polynucleotide encoding artificial human antibody VL domain
gacatccagatgacgcagtctccttccaccctgtctgcatctgtaggagacagagtcaccatcacttgccgggccagtcagagtattagtatctggttggcctggtatcagcagaaaccagggaaagcccctaaactcctgacttataaggcatctactttagagaggggggtctcatccagattcagcggcagtggatctgggacagaattcactctcaccattaccagcctgcagcctgatgattctgcaacttattactgccaacattatagtgcttacccgcccactttcggcggagggaccaaggtggagatcaaa

SEQ ID NO: 9658 - DNA, 336 bp, Artificial Sequence
  Synthetic polynucleotide encoding artificial human antibody VL domain
gatattgtgatgactcagtctccactctccctgcccgtcacccctggagagccggcctccatctcctgcaggtctagtcagagcctcctgaattttaatggatatacccatttcgcttggtacctgcagcggccggggcagtctccacaggtcctgatcaatttgggttctaatcgggcctccggggtccctgacaggttcagtggcagtggatcaggcacagattttacactgaaaatcagcagagtggaggctgacgatgttggaatttattactgcatgcaagctctacaaattccgtatacttttggccaggggaccaagctggagatcaaa

SEQ ID NO: 9659 - DNA, 333 bp, Artificial Sequence
  Synthetic polynucleotide encoding artificial human antibody VL domain
cagtctgtgctggctcagccaccctcagcgtctgggacccccggtcagagggtcatcatttcttgttcagggggctggtccaacatcgctactaattatgtctactggtaccaacaattcccaggaacggcccccagactcctcattttcaataataatcagcggccctcaggagtccctgaccgattctctgcctccaagtcgggcacctcagcctccctggccatcagtggcctccggtccgaggatgaggccgactattattgtgcagcatgggatgacagactgcgtggttcctgggtgttcggcggagggaccagggtgtccgtccta

SEQ ID NO: 9660 - DNA, 330 bp, Artificial Sequence
  Synthetic polynucleotide encoding artificial human antibody VL domain
cagtctgtggtgactcagccaccctcagtgtctgggacccccgggcagagggtcaccatctcttgctctggaagcagctccaacatcggaacttatactgttaactggtatcagcacctcccaggaacgggccccaaactcctcatctatagtaatgatgggcggccctcaagggtccctgaccgattctctggctccaagtctggcacctcagcctccctggccatcagtgggctccagtctgaagatgaggctgattattactgtgcaacatgggatgacagcctcaagggtccggtgttcggcggagggaccaagctgaccgtccta

SEQ ID NO: 9661 - DNA, 333 bp, Artificial Sequence
  Synthetic polynucleotide encoding artificial human antibody VL domain
cagcttgtgctgactcaatcgccctctgcctctgcctccctgggagcctcggtcaaggtcacctgcactctgagcagtgggcacagcagctacgccatcgcatggcatcagcagcagccagagaagggccctcggtacttgatgaagcttaacagtgatggcagccacagcaagggggacgggatccctgatcgcttctcaggctccagctctggggctgagcgctacctcaccatctccagcctccagtctgaggatgaggctgactattactgtcagacctggggcactggctcttgggtgttcggcggagggaccaagctgaccgtccta

SEQ ID NO: 9662 - DNA, 324 bp, Artificial Sequence
  Synthetic polynucleotide encoding artificial human antibody VL domain
gaaatagtgatgacgcagtctccagacaccctgtctgtgtctccaggggaaagagccaccctctcctgcagggccagtcagactgttcacaataaggttgcctggtaccagcagaagcctggccaggctcccaggctcctcatctatgatgcatccaccagggccactggtgtcccagtcaggttcggtggcagtggctctgggacagagttcactctcaccatcagcagcctgcagcctgacgatttggcaatttattattgtcagcagtatcgtatgtggcctccgctcactttcggcggagggaccaaggtggcgatcaaa

SEQ ID NO: 9663 - DNA, 330 bp, Artificial Sequence
  Synthetic polynucleotide encoding artificial human antibody VL domain
cagtctgtgctgactcagccaccctcagcgtctggggcccccgggcagagggtcgccatctcttgttctggaagcagttccaacttcggaagtaatactgtgaactggtaccaacaactcccacgaacggcccccaaactcctcatctatagtagtaatcagcggccctcaggggtccctgaccgattctctggctccaagtctggcacctcagcctccctggccatcagtgggctccagtctgaggatgaggctgattattactgtgcaacatgggatgacagcctgaatggtcccgtattcggcggagggaccaagctgaccgtccta

SEQ ID NO: 9664 - DNA, 327 bp, Artificial Sequence
  Synthetic polynucleotide encoding artificial human antibody VL domain
gaaattgtgttgacgcagtctccaggcaccctgtctttgtctccaggggaaagagccaccctctcctgcagggccagtcagagtgttagcagcacctacttagactggtaccagcagaaacctggccaggctcccaggctcctcatctatggtgcatccaacagggccactggcatcccagacaggttcagtggcagtgggtctgggacagacttcactctcaccatcagcagactggagcctgaagattttgcagtgtattattgtcagcagtatggtagctcgtttgcgtacacttttggccaggggaccaaggtggagatcaaa

SEQ ID NO: 9665 - DNA, 330 bp, Artificial Sequence
  Synthetic polynucleotide encoding artificial human antibody VL domain
cagtctgtgttgacgcagccgccctcagtgtctgcggccccaggacagaaggtcaccatctcctgctctggaagcagctccaacattgagaataattttgtatcctggtaccaacaactcccaggaacagcccccaaactcctcatttttgacaataataagcgaccctcagggattcctgaccgattctctggctccaagtctggcacgtcagccaccctgggcatcaccggactccagactggggacgaggccgattattactgcggaacttgggataatagtttgagtgctggggtattcggcggagggaccaagctgaccgtccta

SEQ ID NO: 9666 - DNA, 330 bp, Artificial Sequence
  Synthetic polynucleotide encoding artificial human antibody VL domain
cagtctgttttgacgcagccgccctcactatctgcggccccaggacagagggtcaccatctcctgctctggaagtttctccaatattgggaagaattttgtttcctggtatcaacaagtcccagggaccgccccccgactcctcatttatgacgatgataggcgaccctcagggagtccgggtggagtctccggctccaagtctggcacgtcagccaccctggtcatcaccggcctccagactggggacgagggcgactatttttgcggagcttgggacagcgacctcgctatttatgtcttcggaagtgcgaccagggtcaccgtccta

SEQ ID NO: 9667 - DNA, 330 bp, Artificial Sequence
  Synthetic polynucleotide encoding artificial human antibody VL domain
cagtctgtggtgactcagccaccctcagcgtctgggacccccgggcagagggtcaccatctcctgttctggaagcagctccaacatcggaaggtatgctgtgaactggtaccagctcctcccaggaacggcccccaaactcctcatttatggtaatagtttgcggccctcaagggtccctgaccgattctctggctccaagtctggcacctcagcctccctggccatcagtggtctcctgtctgacgatgaggctgattattactgtgcagtatgggatgacagcctgaatggtccggtgttcggcggagggaccaaggtgaccgtccta

SEQ ID NO: 9668 - DNA, 330 bp, Artificial Sequence
  Synthetic polynucleotide encoding artificial human antibody VL domain
cagtctgtgctgactcagccaccctcagcgtctgggacccccggacagagggtcatcatctcttgttctggaagcaccaccaacatcggaggcacttatgtctactggtaccagcaagtcccaggaacggcccccaaactcctcatctatagtaatgatcagcggccctcaggggtccctgaccgattctctggctccaagtctggcacctcagcctccctggccatcagtgggctccggtccgaggatgaggctgactattactgttcagcttgggattacagcctgaatggtcggttgttcggcggggggaccagactgaccgtccta

SEQ ID NO: 9669 - DNA, 336 bp, Artificial Sequence
  Synthetic polynucleotide encoding artificial human antibody VL domain
gatattgtgatgactcagtctccactctccctgcccgtcacccctggagagccggcctccatctcctgcaggtctagtcagagcctcctccatagtaatggatacaactatttggattggtacctgcagaagccagggcagtctccacagctcctgatctctttgggttctcatcgggcctccggggtccctgacaggttcagtggcagtggatcaggcacagattatacactgaaaatcagcagagtggaggctgaggatgttggggtttattactgcatgcaagctctacaaactgcccgcagttttggccaggggaccaagctggagatcaaa

SEQ ID NO: 9670 - DNA, 330 bp, Artificial Sequence
  Synthetic polynucleotide encoding artificial human antibody VL domain
cagtctgtggtgactcagccaccctcagcgtctgggacccccgggcagagggtcaccatctcttgttctggaagcagctccaacatcggaacttatactgttaactggtatcagcacgtcccaggaacgggccccaaactcctcatctatagtaatgatgggcggccctcaagggtccctgaccgattctctggctccaagtctggcacctcagcctccctggccatcagtggtctccagtctgaggatgaggctgattattactgtgcaacatgggatgacagcctcaagggtccggtgttcggcggagggaccaagctgaccgtccta

SEQ ID NO: 9671 - DNA, 330 bp, Artificial Sequence
  Synthetic polynucleotide encoding artificial human antibody VL domain
cagtctgtggtgactcagccaccctcagcgtctgggacccccgggcagagggtcaccatctcttgttctggaagcagctccaacatcggaagttatactgttaactggtaccagcacctcccaggaacgggccccaaactcctcatctatagtaatgatgggcggccctcaagggtccctgaccgattctctggctccaagtctggcacctcagcctccctggccatcagtgggctccagtctgaagatgaggctgattattactgtgcaacatgggatgacagcctcaagggtccggtgttcggcggagggaccaagttgaccgtccta

SEQ ID NO: 9672 - DNA, 327 bp, Artificial Sequence
  Synthetic polynucleotide encoding artificial human antibody VL domain
cagtctgtgctgacgcagccgccctcagtgtctggggccccagggcagagggtcaccatctcctgcactgggagcagctccaacatcggggcagattataatgtacactggtaccagcagcttccaggaacagcccccaaactcctcatctacggtaacaacaatcggccctcaggggtccctgaccgattctctggctccaagtctggcacctcagcctccctggccatcactgggctccaggctgaggatgaggctgattattactgccagtcctatgacaacaacctttgggtgttcggcgaagggaccaagctgaccgtccta

SEQ ID NO: 9673 - DNA, 336 bp, Artificial Sequence
  Synthetic polynucleotide encoding artificial human antibody VL domain
gatattgtgatgacccagactccactctcctcacctgtcacccttggacagccggcctccatctcctgtagatctagtcaaagcctcgtacacagtaatggaaacacctacttgagttggcttcagcagcggccaggccagcctccgagactcctcatttatcaggtttctaaccggttctctggggtcccagagagattcagtggcagtggggcagggacggatttcacactagaaataagtagggtggaagctgaggatgtcgggctttatttctgcatgcaagctacagaatttcctcgtacttttggccaggggaccaagctggagatcaaa

SEQ ID NO: 9674 - DNA, 321 bp, Artificial Sequence
  Synthetic polynucleotide encoding artificial human antibody VL domain
gacatccagatgacccagtctccatcctccctgtctgcatctgtaggagacagagtcaccatcacttgccaggcgagtcaagacgttcgaaataatttaaattggtatcaacagaaaccagggaaagcccctaagctcctgatctacgatgcatccaatttggagacaggggtcccatcaaggttcagtggaagtgaatctgggacagattttactttcaccatcagcagcctgcagcctgaagatattggaacatattactgtcaacattatgatagtctcccgctcactttcggcggagggaccaaggtggagatcaaa

SEQ ID NO: 9675 - DNA, 327 bp, Artificial Sequence
  Synthetic polynucleotide encoding artificial human antibody VL domain
gccatccagttgacccagtctccatcctccctgtctgcatctgtaggagacagagtcaccatcacttgccgggcaagtcagggcattgacagtgctttagcctggtatcagcagaaaccagggaaacctcctaaactcctgatctatgatgcctccagtttgaatagtggggtcccgtcaaggttcagcggcgatggatctgggacagatttcactctcaccatcagcagcctgcagcctgaagattttgcaacttatcactgtcaacaggtcactagttatcgtcaggggtgcacttttggccaggggaccagggtggagatcaaa

SEQ ID NO: 9676 - DNA, 321 bp, Artificial Sequence
  Synthetic polynucleotide encoding artificial human antibody VL domain
gacatccagatgacccagtctccttccaccctgtctgcatctgtaggagacagagtcaccatcacttgccgggccagtcagagtattagtatctggttggcctggtatcagcagacaccagggaaagcccctagactcctgatctctaaggcgtctagtttacatagtggggtcccattacggttcagcggcagtggatctgggacagaattcactctcaccatcagcagcctgcagcctgatgattctgcaacttattactgccaacactatgatggttattctattactttcggccaagggacacgactggagattaaa

SEQ ID NO: 9677 - DNA, 324 bp, Artificial Sequence; identical to SEQ ID NO: 8812
  Synthetic polynucleotide encoding artificial human antibody VL domain

SEQ ID NO: 9678 - DNA, 330 bp, Artificial Sequence
  Synthetic polynucleotide encoding artificial human antibody VL domain
cagtctgccctgactcagcctcgctcagtgtccgggtctcctggtcaatcagtcaccatctcctgcagtggaaccaacagtgatgttggtggttacaattctgtctcctggtatcagcagcgcccaggcgaagcccccaaacttatgatttttgatgtcaataagcggccctcaggggtccctgagcgcttctctggttccaagtctggcaacacggcctccctgaccatctcggggctccaggcggacgatgaggctgattatcactgctgttcatacgctggcacatacacctgggtgttcggcggagggaccaaactgaccttccta

SEQ ID NO: 9679 - DNA, 330 bp, Artificial Sequence
  Synthetic polynucleotide encoding artificial human antibody VL domain
cagtctgtgttgacgcagccgccctcagtgtctgcggccccaggacagaaggtcaccatctcctgctctggaagcagctccaacattgggaataattatgtatcctggtaccagcaactcccaggaacagcccccaaactcctcatttatgacaataataagcgaccctcagggattcctgaccgattctctggctccaagtctggcacgtcagccaccctgggcatcaccggactccagactggggacgaggccgattattactgcggaacatgggatggcagcctgagtgccgtggtattcggcggagggaccaagctgaccgtccta

SEQ ID NO: 9680 - DNA, 321 bp, Artificial Sequence
  Synthetic polynucleotide encoding artificial human antibody VL domain
gacatccagatgacccagtctccatcctcactgtctgcatctgtaggagacagcgtcaccatcacttgtcgggcgagtcagggcattagcaattatttagcctgggttcagcagaaaccagggaaaggccctaagtccctgatctatggtgcatccagtttgcagagtggggtcccatcaaggttcaacggccgtggaactgggagagatttcactctcacaatcaacagcctgcagcctgaagattttgcaacttattactgccaacagtatgcgagttaccctctcactttcggcggagggacgaaggtggagatcaaa

SEQ ID NO: 9681 - DNA, 321 bp, Artificial Sequence
  Synthetic polynucleotide encoding artificial human antibody VL domain
gacatccagttgacccagtctccatccttcctgtctgcatctgttggagacagagtcaccatcacttgccgggccagtcagggcattagcacttatttagcctggtatcagcaaagaccagggaaagcccctaagctcctgatctatgctgcatccactttgcaaagtggggtcccatcaaggttcagcggcagtggatctgggacagaattcactctcacaatcagcagcctgcagcctgaagattttgcaacttattactgtcaacagcttaatcgttacccgctcactttcggcggtgggaccaaggtggagatcaaa

SEQ ID NO: 9682 - DNA, 330 bp, Artificial Sequence
  Synthetic polynucleotide encoding artificial human antibody VL domain
cagtctgtggtgactcagccaccgtcagtgtctgggacccccgggcagagggtcaccatctcttgttctggaagcagctccaacatcggaacttatactgttaattggtaccagcacctcccaggaacgggccccaaactcctcatctatagtaatgatgggcggccctcaagggtccctgaccgattctctggctccaagtctggcacctcagcctccctggccatcagtgggctccagtctgaggatgaggctgattattactgtgcaacatgggatgacagcctcaagggtccggtgttcggcggagggaccaagctgaccgtccta

SEQ ID NO: 9683 - DNA, 330 bp, Artificial Sequence
  Synthetic polynucleotide encoding artificial human antibody VL domain
cagtctgtggtgactcagccaccctcagcgtctgggacccccgggcagagggtcaccatctcttgttctggaagaagctccaatatcggacgttatggtgttaactggtaccagcacctccccggaaggggccccaaactcctcatctatagtagtgatgggcggccctcaagggtccctgaccgattctctggctccaagtctggcacctcagcctccctggccatcagtgacctccagtctgaggatgaggccgattatttctgtgcaacatgggatgacagtgtcaagggtccggtgttcggcggagggaccaagctgaccgtccta

SEQ ID NO: 9684 - DNA, 336 bp, Artificial Sequence
  Synthetic polynucleotide encoding artificial human antibody VL domain
gatattgtgatgacccagactccactctctttatttgtcaccgttggacagccggcctccatctcctgcaggtctagtcaaagtctccgacacagtgatggaaacacctacttgagttggcttcaccagaggccaggccagcctccaagactcctaatttattacatttttaaccgcttctctggggtcccagacagattcagtggcagtggggcagggacagatttcacactgaaaatcagcaaggtggaagctgaggatgtcggggtttattactgcttgcaagctacaaaatttcccctcaccttcggccaagggacacgactggagattaaa

SEQ ID NO: 9685 - DNA, 321 bp, Artificial Sequence
  Synthetic polynucleotide encoding artificial human antibody VL domain
gacatccagatgacccagtctccatcctccctgtctgcatctgtaggagacagcgtcactatcacttgccgggcaagtcagaacattagaagctatttaaattggtatcagctgaagtcagggaaagcccctagactcttgatttatgctgcatccagtttacaagatggggtcccatcaaggttccttggcagtgggtctgggacagaattcactctcaccatcagcagtctccagcctgatgattttgcaacttactattgtctggcgaccaacaatctcccgtacacttttgggcaggggaccaaggtggagatcaaa

SEQ ID NO: 9686 - DNA, 333 bp, Artificial Sequence
  Synthetic polynucleotide encoding artificial human antibody VL domain
cagtctgccctgactcagcctgcctccgtgtctgggtctcctggacagtcgatcaccatctcctgcactggaaccaccagagatgttgggaattataaccttgtctcctggtacctacaactcccaggcacagcccccaagctcctgatttatgaggtcagtcagcggccctcaggggtttctgatcgcttctctggctccaagtctggcaacacggcctccctgacaatatctgggctccaggctgaggacgaggctgattattactgctcctcatatacaggcagtaatactttcgcggtgttcggcggcgggaccaggctgaccgtccta

SEQ ID NO: 9687 - DNA, 333 bp, Artificial Sequence
  Synthetic polynucleotide encoding artificial human antibody VL domain
cagtctgccctgactcagcctccctccgcgtccgggtctcctggacagtcagtcaccatctcctgcactggaaccagcagtgacgttggtggttataactatgtctcctggtaccaacagcacccaggcaaagcccccaaactcatgatttatgaggtcagtaagcggccctcaggggtccctgatcgcttctctggctccaagtctggcaacacggcctccctgaccgtctctgggctccaggctgaggatgaggctgattattactgcagctcatatgcaggcagcaacaatttgggggtgttcggcggagggaccaagctgaccgtccta

SEQ ID NO: 9688 - DNA, 321 bp, Artificial Sequence
  Synthetic polynucleotide encoding artificial human antibody VL domain
gacatccagatgacgcagtctccttccaccctgtctgcatctgtaggagacagagtcaccatcacttgccgggccagtcagagtattaatatctggttggcctggtatcagcagaaaccagggaaagcccctaaactcctgacttataaggcatctactttagagaggggggtctcatccagattcagcggcagtggatctgggacagaattcactctcaccattaacagcctgcagcctgatgattctgcaacttattactgccaacattatgatacttatccgcccagtttcggcggggggaccaaggtggagatcaaa

SEQ ID NO: 9689 - DNA, 339 bp, Artificial Sequence
  Synthetic polynucleotide encoding artificial human antibody VL domain
gacatcgtgatgacccagtctccagactccctggctgtgtctctgggcgagagggccaccatcaactgcaagtccagccagagtgttttatacagctccaacaataagaaccagttagcttggtaccagcagaaaccaggacagcctcctaagttgctcatttactgggcatctacccgggaatccggtgtccctgaccgattcagtggcagcgggtctgcgacagatttcactctcaccatcagcagcctgcaggctgaagatgtggccgtttattactgtcagcaatgttttagtactccgtggacgttcggccaagggaccaaggtggaaatcaaa

SEQ ID NO: 9690 - DNA, 330 bp, Artificial Sequence
  Synthetic polynucleotide encoding artificial human antibody VL domain
cagtctatactgactcaaccaccctcaatgtctgcgacccccgggcagacagtcaccatctcttgttctggaagcagctccaacatcggcagtaatactgtggactggtaccagcaactcccgggattggcccccaaactcgtcatctatgttaataatcagcggccctcagatgtccctgaccgattttttggctccaagtctggcacctcaggctccctggccatcagtggcctccagtctgaggatgaggctgattattactgcgctgcatgggatgacaccctgaatgctctggtgttcggcggagggaccaagctgaccgtccta

SEQ ID NO: 9691 - DNA, 321 bp, Artificial Sequence
  Synthetic polynucleotide encoding artificial human antibody VL domain
gacatccagatgacccagtctccatcctccctgtctgcatctgtaggagacagagtcaccatcacttgccgggcaagtcagagcattagcagctatttaaattggtatcagcagaaaccagggaaagcccctaagctcctgatctatgctgcatccagtttgcaaagtggggtcccatcaaggttcagtggcagtggatctgggacagatttcactctcaccatcagcagtctgcaacctgaagattttgcaacttactactgtcaacagagttacagtaccccattcactttcggcccggggaccaaagtggatatcaaa

SEQ ID NO: 9692 - DNA, 324 bp, Artificial Sequence
  Synthetic polynucleotide encoding artificial human antibody VL domain
gacatccagttgacccagtctccatcctccctgtctgcatctgtaggagacagagtcaccatcacttgccgggccagtcagggcattagcaattatttgggctggtatcagcaaaaaccagggaaatcccctaaactcctgatctatgctgcatccactttgcaaagtggggccccatcaaggttcagcggcagtggatctgggacagatttcactctcaccatcagcggcctgcagcctgaagattttgcaacttattactgtcaacagcttaatacttaccctccgaggacgttcggccaagggaccaaggtggaagtcaaa

SEQ ID NO: 9693 - DNA, 330 bp, Artificial Sequence
  Synthetic polynucleotide encoding artificial human antibody VL domain
cagtctgccctgactcagcctccctccgcgtccgggtctcttggacagtcagtcaccatctcctgcactggaaccagcaatgacgttggttattataattatgtctcctggtaccaacagcacccaggcaaagcccccaaactcatcatttatgaagtcgttaaccggccctcaggggtccctgttcgcttctccggctccaagtctgacaacacggcctccctgaccgtctctgggctccagactgaggatgaggctgattatttctgcagctcatatgcagccaccaacactttgattttcggcggagggaccagggtgaccgtccta

SEQ ID NO: 9694 - DNA, 333 bp, Artificial Sequence
  Synthetic polynucleotide encoding artificial human antibody VL domain
cagtctgtgctgacgcagccgccctcagtgtctggggccccagggcagagggtcaccatttcctgcactgggagcagctccaacatcggggcaggttatgctgtacactggtaccagcagcttccacgaacagtccccaaactcctcctctatggtaacaacaatcggccctcaggggtccctgaccgattctctggatccaagtctggcacctcagcctccctggccatcactgggctccaggctgaggatgaggctgattattactgccagtcctatgacagcagcctgagtggtgtggtattcggcggggggaccaagctgaccgtccta

SEQ ID NO: 9695 - DNA, 321 bp, Artificial Sequence
  Synthetic polynucleotide encoding artificial human antibody VL domain
gaaattgttttgacacagtctccagccaccctgtctttgtctccaggggaaagagccaccctctcctgcagggccagtcagagtattagcacctacttagcctggtaccaacacaaacctggccaggctcccaggctcctcatgtatgatgcatccaacagggccactggcatcccagccaggttcagtggcagtgggtttgggacagagttcactctcaccatcaccagcctggagcctgaagattttgcagtttatttctgtcaccagcgtgccaactttccgctcactttcggcggagggaccaaggtggagatcaaa

SEQ ID NO: 9696 - DNA, 339 bp, Artificial Sequence
  Synthetic polynucleotide encoding artificial human antibody VL domain
gacatcgttgtgacccagtctccagcctccctggctgtgtctctgggcgagagggccaccatcaactgcaagtccagccagaccgttttacacaactccaacgataaggactgcctagcttggtaccagcagaaaccaggacagcctcctaggctgctcatttactgggcatctacccgggaatccggggtccctgaccgattcagtggcagcgggtctgggacagatttcactctcaccatcagtagcctgcaggctgaagatgtggcagtttattattgtcagcaatattataatactcctctcactttcggcggagggaccaaggtggagatcaaa

SEQ ID NO: 9697 - DNA, 333 bp, Artificial Sequence
  Synthetic polynucleotide encoding artificial human antibody VL domain
cagtctgccctgactcagcctgcctccgtgtctgggtctcttggacagtcgatcatcatcccctgcactgggaccagcagtgatatttatacttatgaccttgtctcttggtatcagcagtgtccaggcagagcccccaaactcatcattttccaggtgaccagacggcccttaggggtctctgatcgcttctctggctccaagtctgagaacacggcctccctgacaatttctggactccagactgatgacgagtgtacttattactgctgctcatatgcacgtgattaccccaattgggttttcggcggagggaccaatttgaccgtccta

SEQ ID NO: 9698 - DNA, 330 bp, Artificial Sequence
  Synthetic polynucleotide encoding artificial human antibody VL domain
cagtctgtgttgatgcagccgccctcagtgtctgcggccccaggacagaaggtcaccatctcctgctctggaagcagctccaacattgggaataattttgtatcctggtaccagcacctcccaggaacagcccccaaactcctcatttatgacaataataagcgaccctcagggattcctgaccgattctctgggtcacactctgacacgtcagccaccctgggcatcaccggactccagactggggacgaggccgattattactgcggaacatgggatagcagcctgagtgctgcggtgttcggcggggggaccaaactgaccgtccta

SEQ ID NO: 9699 - DNA, 330 bp, Artificial Sequence
  Synthetic polynucleotide encoding artificial human antibody VL domain
cagtctgccctgactcagcctcgctcagtgtccgggtctcctggacagtcagtcaccatttcctgcactggaaccagcagtgatgttggtgcttataactatgtctcctggtatcagcaatacccaggcaaagcccccaaactcatgatttatgatctcactaagcggccctcaggggtccctgatcgcttctctggctccaagtctggcaacacggcctccctgaccatctctgggcttcagacagaggatgagggtgattattactgctgttcatatgcaggcgcctataatgtgttattcggcggagggaccaggctgaccgtccta

SEQ ID NO: 9700 - DNA, 330 bp, Artificial Sequence
  Synthetic polynucleotide encoding artificial human antibody VL domain
cagtctgccctgactcagcctgcctccgtgtctgggtctcctggacagtcgatcaccatctcctgcactggaagcagcgatgacgttggtggttataattatgtctcttggtaccaacaacagtcaggcaaagcccccaaagtcgtgatttttgacgtcagtagtcggccctcagggatttctgatcgtttctctgcctccaagtcaggcaacacggcctccctgaccatctccggcctccaggctgaggacgaggcttattactattgtagttcgtatgcaaaacacggaattctcgtcttcggcggagggaccaagttgaccgtccta

SEQ ID NO: 9701 - DNA, 330 bp, Artificial Sequence
  Synthetic polynucleotide encoding artificial human antibody VL domain
cagtctgtgctgactcagccaccctcagcgtctgggacccccgggcagagggtcaccatcttttgttctgggagcacctccaatatcggaactaatactgtaaactggtaccagcagtttccaggaacggcccccaaactcctcatctataataataatcagcgaccctcgggggtccctgaccgattctctgactccaagtctggcaccacagcctccctggccatcagtgggctccagtctgaggatgaggctgattattactgttcatcatgggatgacagcctgcatggtcaggtgttcggcggagggaccaagctgaccgtccta

SEQ ID NO: 9702 - DNA, 321 bp, Artificial Sequence
  Synthetic polynucleotide encoding artificial human antibody VL domain
gaaattgtgttgacacagtctccagccaccctgtctttgtctccaggggaaagagccaccctctcctgcagggccagtcagactgttagcaccttcttagcctggtaccaactgaaacctggccagactcccaggctcctcatctatgatacatataacagggccactggcatcccagccaggttcagtggcagtgggtctgggacagagttcactctcaccatcagcagcctggagcctgaggattttgcaatttatttctgtctccagcgtgccagcttgccgctcaccttcggcggagggaccaaggtggaaatcaaa

SEQ ID NO: 9703 - DNA, 324 bp, Artificial Sequence
  Synthetic polynucleotide encoding artificial human antibody VL domain
cagtctgtgctgactcagccaccctcagcgtctgggacccccgggcagagggtctccatctcttgttctggaagcagctccaacatcggacgtaataatgtagactggtaccagcaactcccaggaacggccccccaactcctcctgttcaacaatgatcagcggccctcaggggtccctggccgattctctggctcgaagtccgggacctcagcctccctggccatcagtggactccggtccgaggatgaggctgattattactgtgcggtttgggctgacaaccgctgggtgttcggcggagggacgaagctgagcgtccta

SEQ ID NO: 9704 - DNA, 330 bp, Artificial Sequence
  Synthetic polynucleotide encoding artificial human antibody VL domain
cagtctgccctgactcagcctccctccgtgtccgggtctcctggacagtcagtcaccatctcctgcactggaaccagtaatgacgttggtggttatgaccgtgtctcctggtaccagcagcccccaggcacagcccccaaactcatgatttatgaggtcacttatcggccctcaggggtccctgatcgcttctctgggtccaagtctggcaacacggccgccctgaccatctctgggctccaggctgaggacgaggctgattattactgcagctcatatacaggcagcggcactgtgatattcggcggagggaccaagctgaccgtccta

SEQ ID NO: 9705 - DNA, 324 bp, Artificial Sequence
  Synthetic polynucleotide encoding artificial human antibody VL domain
gaaattatattgacgcagtctccaggcaccctgtctttgtctccaggggaaagagccaccctctcctgcagggccagtcagagtgttgccaacagcttcttggcctggttccagaaaaaacctggccagggtcccagactcctcatctatgggacgtccgtcagggccactggcactccagacaggttcagtggcagtgggtctgggacagagttcattctcaccatcaccagactggaacctgaagactttgcactctattactgtcagcagtataatagtccatcgtacacttttggccaggggaccagcgttgagatcaaa

SEQ ID NO: 9706 - DNA, 330 bp, Artificial Sequence
  Synthetic polynucleotide encoding artificial human antibody VL domain
cagtctgccctgactcagcctcgctcagtgtccggctctcctggacagtcagtcaccatcgcctgcactggaaccagcagtgatgttggtggttataactatgtctcctggtaccaacaacacccaggcaaagcccccaaactcatactttatgatgtctctaggcggccctcaggggtccctgatcgcttctctggctccaagtctggcaacacggcctccctgaccatctctgggctccaggctgaggatgaggctgattattactgcagctcagaagcagacaggtaccttgtgatattcggcggagggaccaagctgaccgtccta

SEQ ID NO: 9707 - DNA, 336 bp, Artificial Sequence
  Synthetic polynucleotide encoding artificial human antibody VL domain
gatgttgtgctgactcagtctccactctccctgcccgtcacccttggacagccggcctccatctcctgcaggtctagtcaaagcctcgtagacagtgatcgaaacacctacttgagttggtttcatcagaggccaggccaatctccaaggcgcctaatttttaaggtttctaaccgggactctggggtcccggacagattcagcggcagtgggtcaggcactgatttcacactgaaaatcagtaacgtggaggctgaagatgttggggtttattactgcctgcaaaccacacactggccgctcaccttcggcggagggaccaaggtcgagatcaaa

SEQ ID NO: 9708 - DNA, 321 bp, Artificial Sequence
  Synthetic polynucleotide encoding artificial human antibody VL domain
gacatccagatgacccagtctccttccaccctgtctgcatctgtaggagacagagtcaccatcacttgccgggccagtcagagtattagtagctggttggcctggtatcagcagaaaccagggaaagcccctaagctcctgatctataaggcatctagtttagaaagtggggtcccatcaaggttcagcggcagtggatctgggacagaattcactctcaccatcagcagcctgcagcctgatgattttgcaacttattactgccaacagtataatagttatttgtgggcgttcggccaagggaccaaggtggaaatcaaa

SEQ ID NO: 9709 - DNA, 327 bp, Artificial Sequence
  Synthetic polynucleotide encoding artificial human antibody VL domain
cagtctgccctgactcagcctcgctcagtgtccgggtctcctggacagtcagtcaccatctcctgcactggaaccagcagtgatgttggtggttataactatgtctcctggtaccaacagcacccaggcaaagcccccaaactcatgatttatgatgtctataagcggccctcaggagtccttgatcgcttctctggctccaagtccggtaacacggcctccctgaccatctcttggctccaggctgatgatgaagctgattattactgcagctcatatgcaggcacctctgtgatattcggcggagggaccaagctgaccgtccta

SEQ ID NO: 9710 - DNA, 330 bp, Artificial Sequence
  Synthetic polynucleotide encoding artificial human antibody VL domain
cagtctgtgctgactcagccaccctcagcgtctgggacccccgggcagagggtcaccatcttttgttctgggactacctccaatatcggaagtaatactgtaaactggtaccagcaatttccaggagcggcccccaaactcctcatctataataataatcaacgaccctcgggggtccctgaccgattctctgactccaagtctggcaccacagcctccctggccatcagtgggctccagtctgaggatgaggctgattattactgttcgtcatgggatgacagcctgcatggtcaggtgttcggcggagggaccaagctgaccgtccta

SEQ ID NO: 9711 - DNA, 333 bp, Artificial Sequence
  Synthetic polynucleotide encoding artificial human antibody VL domain
gatgttgtgatgactcagtctccactctccctgcccgtcacccttggacagccggcctccatctcctgcaggtctagtcaaagcctcgtacacagtgacggaaacacctacttgaattggtttcagcagaggccaggccaatctccaaggcgcctaatttataaggtttctaaccgggactctggggccccagacagattcagcggcagtgggtcaggcactgatttcatactgaaaatcagcagggtggaggctgaggatgttggcgtttattactgcatgcaaggtacacacttgtttactttcggccctgggaccaaagtggaaatcaaa

SEQ ID NO: 9712 - DNA, 333 bp, Artificial Sequence
  Synthetic polynucleotide encoding artificial human antibody VL domain
cagtctgccctgactcagcctccctccgcgtccgggtctcctggacagtcagtcaccatctcctgcactggaaccagcggtgacgttggtggttataagtttgtctcctggtaccaacatcacccaggcaaagcccccaaactcttgatttatgaggtcagtaagcggccctcaggggtccctgatcgcttctctggctccaggtctggcaacacggcctccctgaccgtctcttggctccaggctgaggatgaggctgtttattactgcagttcctatgcagacaccaacaatttcggggtattcggcggagggaccaagctgaccgtccta

SEQ ID NO: 9713 - DNA, 318 bp, Artificial Sequence
  Synthetic polynucleotide encoding artificial human antibody VL domain
gacatccagatgacccagtctccatcctccctgtctgcatctataggagacagagtcaccatcacttgccgggcaagtcagaacattaaaaattatttaaattggtatcagcagaaaccagggaatgcccccaaggtcttgatctacgaagcctccagtttacagaggggggtctcatcaaggttcagtggcagtggatctgggacagatttcactctcgtcatcagcagtctgcaacctgaagattttgcaacttactactgtcaacagacttacaataaagccaccttcggccaggggacacgactggagattaaa

SEQ ID NO: 9714 - DNA, 330 bp, Artificial Sequence
  Synthetic polynucleotide encoding artificial human antibody VL domain
cagtctgccctgagtcagcctccctccgtgtccgggtctcctggacagtcagtcaccatttcctgcactggaaccagcaatgacattggtagtcatgaccgtgtctcctggtaccagcagcccccaggcacagtccccagactcattatttttgaggtcagtcatcggccctcaggggtccctgatcgcttctctgggtccaagtctggcgacacggcctccctgaccatctctgggctccaggctgaggacgaggctgattattactgcagttcatatacaactaccggcactgtgctgttcggcggagggaccaaggtgaccgtccta

SEQ ID NO: 9715 - DNA, 324 bp, Artificial Sequence
  Synthetic polynucleotide encoding artificial human antibody VL domain
gaaattgtgttgacgcagtctccaggccccctgtctttgtctccaggggagagagccagtctctcctgcaggaccagtcagagtattagcagtagctatttagcctggtaccagcagaaacctggccaggctcccagtctcctcatctatggtggatccaagagggccactggcatcccagacagattcagtggcagtgggtctgggacagacttcactctcaccatcagcagactggagcctgaagattttgcagtgtattactgtcaacagtatggtcactcaccgtggacgttcggccaagggaccaaggtggacatcaaa

SEQ ID NO: 9716 - DNA, 324 bp, Artificial Sequence
  Synthetic polynucleotide encoding artificial human antibody VL domain
gaaattgtgttgacgcagtctccaggcaccctgtctttgtctccaggggagagagccaccctctcctgcagggccagtcagagtgtgaccagcagccacttagcctggtaccagcagaagcctggccaggctcccaggctcctcatctatgttgcatccagcagggccactggcatcccagacaggttcagtggcagtgggtctgggacagacttcactctcaccatcagcagagtggagcctgaagatgttgcagtatattactgtcagcagtatgggaactcacctcttacctttggccaggggaccaacctggagatcaaa

SEQ ID NO: 9717 - DNA, 324 bp, Artificial Sequence
  Synthetic polynucleotide encoding artificial human antibody VL domain
gaaattgtgctgacacagtctccaggcaccctgtctttgtctccaggggaaagagccaccctctcctgcagggccagtcagagtcttagcggcgcctacttggcctggtaccagcagaaacctggccaggcccccagtctcctcatctatggtgcatccaggagggcccctggcatcccagacaggttcagtggcagtgggtctgggacagacttcactctcaccatcagcagactggagcctgaagattttgcaatatattactgtcagcaatatagtacgtcacctaggacgttcggccaagggaccaaggtgcaaatcaaa

SEQ ID NO: 9718 - DNA, 330 bp, Artificial Sequence
  Synthetic polynucleotide encoding artificial human antibody VL domain
cagtctgccctgactcagcctcgctcagtgtccgggtctcctggacagtcagtcaccatttcctgcactggaaccaacagtgatgttggtgcttataactatgtctcctggtatcagcagcacccaggcaaagcccccaaactcatgatttatgatctcactaagcggccctcaggggtccctgatcgcttctctggctccaagtctggcaacacggcctccctgaccatctctgggcttcagactgaggatgagggtgattattactgcagttcatatgcaggcgcctatattgtgatcttcggcggagggaccaagctgaccgtccta

SEQ ID NO: 9719 - DNA, 333 bp, Artificial Sequence
  Synthetic polynucleotide encoding artificial human antibody VL domain
cagtctgccctgactcagcctccctccgcgtccgggtctcctggacagtcagtcaccatctcctgcactggaaccagcagtgacgttggtggttataactatgtctcctggtaccaacagcacccaggcaaagcccccaaactcatgatttatgaggtcaataagcggccctcaggggtccctgatcgcttctttggctccaagtctggcaacacggcctccctgatcgtctctgggctccaggctgaggatgaggctgattattactgcagctcatttgcaggcagcgacaacccttttgtcttcggaactgggaccaaggtcaccgtccta

SEQ ID NO: 9720 - DNA, 321 bp, Artificial Sequence
  Synthetic polynucleotide encoding artificial human antibody VL domain
gacatccagatgacccagtctccttcctccctgtctgcatctgtaggggacagagtcaccatcacttgccgggccagtcagagtattggtgactggttggcctggtatcaacagaagccaggcaaagcccctaaactcgtgatctataaggcgtctactttagaaaatggagtccctctcaggttcagcggcagtggatctgggacagaattcactctcaccatcaccagcctgcagcctgatgactttgcaacttattactgccaacaatatagtgataattctaatacttttggccaggggaccagtctgcagatgaaa

SEQ ID NO: 9721 - DNA, 318 bp, Artificial Sequence
  Synthetic polynucleotide encoding artificial human antibody VL domain
tcctatgagctgactcagccaccctcagtgtccgtgtccccaggacagacagccagcatcacctgctctggagataaattgggggatagatatgcttgctggtatcaacagaggccaggccagtcccctgtgctggtcatctatgaagatgacaagcggccctcagggatccctgagcgattctctggctccaactctgggaacacagccactctgaccatcagcgggacccaggctatggatgaggctgactattactgtcaggcgtgggacagcagcactggcgtgttcggcggagggaccaagctgaccgtccta

SEQ ID NO: 9722 - DNA, 321 bp, Artificial Sequence
  Synthetic polynucleotide encoding artificial human antibody VL domain
gacatccagttgacccagtctccatcctccctgtctgcatctgtaggagacagagtcaccatcacttgccgggccagtcagggcattagcagttatttagcctggtatcagcaaaaaccagggaaagcccctaagctcctgatctatgctgcatccactttggaaagtggggtcccatcaaggttcagcggcagtggatctgggacagatttcactctcatcatcagcagcctgcagcctgaagattttgcaacttattactgtcaacagcttaatagttacccgtacacttttggccaggggaccaagctggagatcaaa

SEQ ID NO: 9723 - DNA, 321 bp, Artificial Sequence
  Synthetic polynucleotide encoding artificial human antibody VL domain
gacatccagatgacccagtctccatcctccctgtctgcatctgtaggagacaaagtcaccatcacttgccgggcgagtcagggcattagcaattatttagcctggtatcagcaaaaaccagggaaagttcctaacctcctgatctatactgcatccactttgcaatcaggggtcccatctcggttcagtggcagtggatctgggacagatttcactctcaccatcagcagcctgcagcctgaagatgttgcaacttattactgtcaaaagtataacagtgccccgtggacgttcggccaagggaccaaggtggaaatcaaa

SEQ ID NO: 9724 - DNA, 330 bp, Artificial Sequence
  Synthetic polynucleotide encoding artificial human antibody VL domain
cagtctgccctgactcagcctccctccgtgtccgggtctcctggacagtcagtcaccatctcctgcactgggaccaacagtgacattggtacttatgaccgtgtctcctggtaccagcagcccccaggcacaacccccaaactcctcatttatgaggtcacttatcggccctcaggggtccctgttcgcttctctgggtccaagtctggcaacacggcctccctgaccatctctgggctccaggctgaggacgaggctgattattactgcagttcatatataaccagtggcggtgtgatattcggcggagggaccaagttgaccgtccta

SEQ ID NO: 9725 - DNA, 330 bp, Artificial Sequence
  Synthetic polynucleotide encoding artificial human antibody VL domain
cagtctgtactgactcagccaccctcagcgtctgggacccccgggcagagggtcaccatctcttgttctgggagcagctccaacatcggaagtcatactgtaaactggtaccggcaggtcccaggagcggcccccagtctcctcatctataatcatagtcgccggccctcaggggtccctgagcgattctctggctccaagtctggcacctcagcctccctggccatcagtgggctccagtctgaggatgaggctgattattattgtgcagcttgggaatccaccctgaatgcttgggtgttcggcggagggaccaagctgaccgtccta

SEQ ID NO: 9726 - DNA, 321 bp, Artificial Sequence
  Synthetic polynucleotide encoding artificial human antibody VL domain
gacatccagatgacccagtctccttccaccctgtctgcatctgtaggagacagagtcaccatcacttgccgggccagtcagagtattagtacctcgttggcctggtatcagcagaaaccagggacagcccctaaactcctgatctataaggcatctactttagaaactggggtcccatcaaggttcagcggcagtggatctgggacagaattcactctcaccgtcagcagcctgcagcctgatgattttgcaacttattactgccaacaatataatgattattcattcgctttcggccctgggaccaaagtggatatcaaa

SEQ ID NO: 9727 - DNA, 336 bp, Artificial Sequence
  Synthetic polynucleotide encoding artificial human antibody VL domain
gatgttgtcatgactcagtctcctctctccctgcccgtcacccttggacagccggcctccatctcctgcaggtctagtcaaagcctcgtacacagtgatggaaacacctacttgatttggtttcggcagaggccaggcctatctccaaggcgcctaatttataaggtttctaaccgggaccctggggtcccagacagattcagcggcagtgggtcaggcactgatttcatactgaaaatcagcagggtggaggctgaggatgttggggtttattactgcatgcaaggtacacactggccgtggacgttcggccaagggaccaaggtggaaatcaaa

SEQ ID NO: 9728 - DNA, 336 bp, Artificial Sequence
  Synthetic polynucleotide encoding artificial human antibody VL domain
cagtctatactgacgcagccgccctcagtgtctggggccccagggcagagagtcaccatctcctgcactgggagcagctccaacatcggggcaggttatcctgtaaactggtaccagcagtttcctggagcaggccccaaactcctcatctatgaaaatatgcatcggccctcaggggtccctgaccgcttctctgggtccaactctggcacctcagcctccctgaccatcactggcctccaggctgaagatgaggctgactacttctgccagtcttatggcagggacctggctggcctctatgtcttcggcactgggaccagggtcaccgtccta

SEQ ID NO: 9729 - DNA, 339 bp, Artificial Sequence
  Synthetic polynucleotide encoding artificial human antibody VL domain
gacatcgtgatgacccagtctccagactccctggctgtgtctctgggcgagagggccaccatcaactgcaagtccagccagagtgttttatacagctccaacaataagaactacttagcttggtaccagcagaaaccaggacagcctcctaagctcctcatttactgggcatctacccgggaatccggggtccctgaccgaatcagtggcagcgggtctgggacagatttcactctcaccatcagcagcctgcaggctgaagatgtggcagtttattactgtcaacaatattatagtactcctcaaacttttggccaggggaccaagctggagatcaaa

SEQ ID NO: 9730 - DNA, 330 bp, Artificial Sequence
  Synthetic polynucleotide encoding artificial human antibody VL domain
cagtctggactgactcagccaccctcagcgtctgggacccccgggcagagggtcaccatctcttgttctggaagcagtttcaacatcggcagaaacaatgtatattggtacaagcaggtcccaggagcggcccccaatctcctcatctgtaagaatgatcagcggccctcaggggtccctgaccgattctctggctccaagtctggcgcctcagcctccctggccatcagtggactccactccgaagatgaggcggactattactgtgcaacatgggatggcagcctgagcgcttgggtgttcggcggcgggaccaaactgaccgtccta

SEQ ID NO: 9731 - DNA, 321 bp, Artificial Sequence
  Synthetic polynucleotide encoding artificial human antibody VL domain
gaaattgtgttgacacagtctccagccaccctatctttgtctccaggggaaagagtcaccctctcctgcagggccagtcagagtgttagcacctacttggcctggtaccaacagaaacctggccaggctcccaggctccttatgtatgatgcatccatccgggccactggcatcccagccaggttcagtggcagagggtctgggacagagttcactctcaccatcagcagcctggagcctgaagattttgcagtttacttctgtcagcagcgtgccaagttgccgctaactttcggcggagggaccaaagtggagatcaaa

SEQ ID NO: 9732 - DNA, 339 bp, Artificial Sequence
  Synthetic polynucleotide encoding artificial human antibody VL domain
gacatcgtgatgacccagtctccagactccctggctgtgtctctgggcgagagggccaccatcaactgcaagtccagtcagagtattttacacagcggcaccaataagaatcgcctagcctggttccagcagaaaccaggacagccccctaagttgctcatttactgggcatctacccgggattccggggtccctgaccgattcagtggcagggagtctgggacagatttcactctcaccatcagcagcctgcaggctgaagatgtggcagtttatttctgtcagcaatatcatagtcctcctctcactttcggcggagggaccaaggtggagatcaaa

SEQ ID NO: 9733 - DNA, 333 bp, Artificial Sequence
  Synthetic polynucleotide encoding artificial human antibody VL domain
cagtctgcccttactcagcctgcctccgtgtctgggtctcctggacagtcgatcacactctcctgcactggaagcagcagtgatgttgggagttatgaccttgtctcttggtaccaacaatgcccaggcaaaccccccagactcatcctatatcaggtcaataggcggccctcagggatttctgatcgcttctctggctcgaagtctgacaagacggcctccctgacgatctccggcctccagactgaggacgaggcgacttattactgctgctcatatgcaactaattaccccaattgggtattcggcggagggaccaagctgaccgtccta

SEQ ID NO: 9734 - DNA, 318 bp, Artificial Sequence
  Synthetic polynucleotide encoding artificial human antibody VL domain
gaaattgtgttgacacagtctccagccaccctgtctttgtctccaggggaaagagccaccctctcctgcagggccagtcagagtgttagcagctacttagcctggtaccaacagaaacctggccaggctcccaggctcctcatctatgatgcatccaacagggccactggcatcccagccaggttcagtggcagtgggtctgggacagacttcactctcaccatcagcagcctagagcctgaagattttgcagtttattactgtcagcagcgtagcaactggtacacttttggccaggggaccaagctggagatcaaa

SEQ ID NO: 9735 - DNA, 324 bp, Artificial Sequence
  Synthetic polynucleotide encoding artificial human antibody VL domain
tcctatgagctgacacagccaccctcggtgtcagtgtccccaggacaaacggccaggatcacctgctctggagatgcattgccaaaaaaatatgcttattggtaccagcagaagtcaggccaggcccctgtgctggtcatctatgaggacagcaaacgaccctccgggatccctgagagattctctggctccagctcagggacaatggccaccttgactatcagtggggcccaggtggaggatgaagctgactactactgttactcgacagacagcagtggtaatcatggggtcttcggaactgggaccaagatcaccgtccta

SEQ ID NO: 9736 - DNA, 333 bp, Artificial Sequence
  Synthetic polynucleotide encoding artificial human antibody VL domain
cagcttgtgctgactcaatcgccctctgcctctgcctccctgggagcctcggtcaagctcacctgcattctgggcactgaacacagcggcaacgccatcgcatggcatcagcagcacccagagaggggccctcgattcttgatgaagcttaacagtgatggcagtcacttcaggggggacgggatccctgatcgcttttcaggctccagctctgggactgagcgctacctcaccatctccagcctccagtctgaggatgaggctgactattactgtcaaacctggggccctggcattcaggtgttcggcggagggaccaagctgaccgtccta

SEQ ID NO: 9737 - DNA, 330 bp, Artificial Sequence
  Synthetic polynucleotide encoding artificial human antibody VL domain
cagtctgccctgactcagcctccctccgtgtccgggtctcctggacagtcagtcaccatctcctgcactggaaccagcagtgacgttggtagttataaccgtgtctcctggtaccagcagtccccaggcacagcccccaaactcatgatttatgaggtcagttatcggccctcaggggtccctgatcgcttctctgggtccaagtctgacaacacggcctccctgaccatctctgggctccaggctgaggacggggctgattattactgcagctcatatacaagcagcaacactataatattcggcggggggaccaggctgaccgtccta

SEQ ID NO: 9738 - DNA, 330 bp, Artificial Sequence
  Synthetic polynucleotide encoding artificial human antibody VL domain
cagtctgccctgactcagcctgcctccgtgtctgggtctcctggacaatcgatcaccatcccctgcactggaaccagccgtgatattgggacttataaccgtgtctcctggtatcaacagcacccagacaaagcccccaaactcttaatttatgaggccactaagcggccctcaggggtttctaatcgcttctctggctccaggtctggccacacggcctccctgacaatcactgggctccaggctgaggacgaggctgattattattgctccgcatatgcaggtagtaacactttcccattcggcggagggaccaagttgaccgtccta

SEQ ID NO: 9739 - DNA, 339 bp, Artificial Sequence
  Synthetic polynucleotide encoding artificial human antibody VL domain
gacatcgtaatgacccagtctccagactccctggctgtgtctctgggcgagagggccaccatgaactgcaagtccagccagagtattttacacagccccaccaataagaaccgtctagcctggtaccaggagaaaccaggacagcctcctaagttgctcatttactgggcatctattcgggaagccggggtccctgaccgattccgtggcagcgggtctgggacagatttcactctcaccatcagcagcctgcaggctgaagatgtggcagtttattactgtcagcaatatcttagtcctcctctcactttcggcggagggaccaaggtggagatcaaa

SEQ ID NO: 9740 - DNA, 327 bp, Artificial Sequence
  Synthetic polynucleotide encoding artificial human antibody VL domain
gaaattgtgttgacacagtctccagtcaccctgtctttgtcaccaggggaaggagccaccctctcctgcagggccagtcagagtgttggcaactccttagcgtggtaccaacagaggcccggccaggctcccaggctcctcatctatgatgcatccaacagggccactggcatcccggccaggttcagtggcagtgggtctgggacagacttcactctcaccatcggcaacctgcagcctgaagattttgcaatttattattgtcagcagcgtaacaactggcctccccaagtcactttcggcggagggaccaaggtggagatcaaa

SEQ ID NO: 9741 - DNA, 330 bp, Artificial Sequence
  Synthetic polynucleotide encoding artificial human antibody VL domain
cagtctgccctgactcagcctcgctcagtgtccgggtctcctggacagtcagtcaccatctcctgcactggaaccagcagtgatgttggtggttataactatgtctcctggtaccaacaacacccaggcaaagcccccaaactcatgatttttgatgtcactaggcggccctcaggggtccctgatcgcttctctggctccaagtctggcaacacggcctccctgaccatctctgggctccaggctgaagatgaggctgattattactgcagctcagaagcagacaggtaccttgtggtcttcggcggagggaccaagctgaccgtccta

SEQ ID NO: 9742 - DNA, 321 bp, Artificial Sequence
  Synthetic polynucleotide encoding artificial human antibody VL domain
gacatccagatgacccagtctccatcctccctgtctgcagctgttggagacagagtcaccatcacttgtcgggcgagtcagggcattgccaattttttagcctggtatcagcagagaccagggaaagttcctaagctcctcatctatcctgcatccactttgcaatcaggggtcccatctcggttcagtggcagtggatctgggacagatttcactctcactatcagcggcctgcagcctgaagatgttgcaacttattactgtcaaaagtttaacagtgccccttggacgttcggccaagggaccaaggtggaaatcaaa

SEQ ID NO: 9743 - DNA, 318 bp, Artificial Sequence
  Synthetic polynucleotide encoding artificial human antibody VL domain
tcctatgagctgactcagccaccctcagtgtccgtgtccccaggacagacagccaccatcacctgctctggagataatttggtggatagatttgcttgctggtatcagcagaagacaggccagtcccctgtgctggtcatctatcaagacaacgagcggccctcagggatccctgagcgattctctggctccaactccgggaacacagccactctgaccatcagcgggacccaggttatggatgaggctgactattactgtcaggcgtgggacagcagggcttatgtcttcggaactgggaccacactcaccgtctta

SEQ ID NO: 9744 - DNA, 327 bp, Artificial Sequence
  Synthetic polynucleotide encoding artificial human antibody VL domain
caggctgtggtgactcaggagccctcactgactgtgtccccaggagggacagtcactctcacctgtggctccaacactggagttgtcaccagtggtcattatccctactggctccagcagaagcctggccaagcccccaggacactgatttatgatacaagtaacacacactcttggacacctgcccggttctcaggctccctcgttgggggcaaagctgccctgaccctttcgggtgcgcagcctgaggatgaggctgagtattactgcttcctctcctatggtggtgctcgggtgttcggcggagggaccaagctgaccgtccta

SEQ ID NO: 9745 - DNA, 324 bp, Artificial Sequence
  Synthetic polynucleotide encoding artificial human antibody VL domain
gaaatagtgatgacgcagtctccagccaccctgtctgtgtctccaggggaaagagtcaccctctcctgcagggccagtcagagtgttgggagcaagttagcctggtaccaacagagacctggccaggctcccagactcctcatgtatggtgtatccatcagggccactggtatcccagccaggttcagtggcagtgggtctgggacagacttcaccctcaccgtcagcagcctgcagtctgacgattttgcagtttattactgtcagcagtataataactggcctccgttggcctttggccaggggaccaagctggagatcaaa

SEQ ID NO: 9746 - DNA, 333 bp, Artificial Sequence
  Synthetic polynucleotide encoding artificial human antibody VL domain
cagtctgttctgactcagccaccctcagcgtctgggacccccgggcagagggtcaccatctcttgttctggaagcagctccaacatcggaagtaatactgtaaactggtaccaacaactcccaggaatggcccccaaactcctcatctatagtaataatcagcggccctcaggggtccctgaccgattctctggctccaagtctggcacctcagcctccctggccatcagtgggctccagtctgaggatgaagctgcttattactgtgtagcgtgggatgacagcctcaatggtctttatgtcttcgggactgggaccagtgtcaccgtccta

SEQ ID NO: 9747 - DNA, 330 bp, Artificial Sequence
  Synthetic polynucleotide encoding artificial human antibody VL domain
cagtctgccctgactcagcctccctccgtgtccgggtctcctggacagtcagtcaccatctcctgcactggaaccagcagtgacgttggtatttataaccgtgtctcctggtaccagcagtcccccggcacagcccccaaactcatgatttttgaggtcagtaatcggccctcagcggtccctgatcgcttctctgcgtccaagtctggcaacacggcctccctgaccatctctgggctccaggctgaggacgaggctgactattactgcagctcatatacaagcagcagcactgtgatattcggcggagggaccaagctgaccgtccta

SEQ ID NO: 9748 - DNA, 339 bp, Artificial Sequence
  Synthetic polynucleotide encoding artificial human antibody VL domain
gacatcgtgatgacccagtctccagactcactggctgtgtctctgggcgagagggccaccatcaactgcaagtccagccggagtgttttatataactccaacaataagaactacttagcttggtaccagcacaaaccaggacatcctcctaaactgctcatttacttggcatctacccgggaacccggggtccctgaccgattcagtggcagcgggtctgggacagatttcactctcaccatcagcagcctgcaggctgaagatgtggcagtttattactgtcagcaatattatgatactcctcggacgttcggccaagggaccaaggtggaaatcaaa

SEQ ID NO: 9749 - DNA, 324 bp, Artificial Sequence
  Synthetic polynucleotide encoding artificial human antibody VL domain
gaaattgtgttgacgcagtctccaggcaccctgtctttgtctccaggggaaagagccaccctctcctgcagggccagtcagagtcttagtggcggccagttagcctggtaccagcagaaacctggccaggctcccaggctcctcatctatggtgcatccagcaggaccactggcatcccagacaggttcagtggcagtgggtctgggacaggcttcactctcaccatcagcagactggagcctgaagattttgcagtgtattactgtcagcagtatgggaactcacgtcttacttttggccaggggaccaagctggagatcaaa

SEQ ID NO: 9750 - DNA, 330 bp, Artificial Sequence
  Synthetic polynucleotide encoding artificial human antibody VL domain
cagtctgccctgactcagcctcgctcagtgtccgggtctcctggacagtcagtcaccatctcctgcactggaaccagcagtgatgttggtgcttataactatgtctcctggtaccaacagcacccaggcaaagcccccaaactcatgatttatgatctcagtaggcggccctcaggggtccctgatcgcttctctggctccaagtctggctacacggcctccctgaccatctctgggctccagactgaggatgaggctgattattactgcagctcatatgcaggcagctacattgtggtattcggcggagggaccaagctgaccgtccta

SEQ ID NO: 9751 - DNA, 318 bp, Artificial Sequence
  Synthetic polynucleotide encoding artificial human antibody VL domain
gacatccagatgacccagtctccatcctccttgtctgcgtctgtaggcgatagagtcaccatcacctgtcgggcgagtcgggatattcgtacttggttggtctggtatcagcagcaaggagggaaagcccctaatctcctgatcaaggctgcatcctttttgcaaactggagtcccatcacggttcaacggcagtggatcagggacagacttcactctcaccatcagcggcctacagcctgaagattctgcagtctattattgtcaacaggctaccagcccgtacacttttggccaggggaccaagctggagatcaaa

SEQ ID NO: 9752 - DNA, 321 bp, Artificial Sequence
  Synthetic polynucleotide encoding artificial human antibody VL domain
gacatccagatgacccagtctccttccaccctgtctgcatctgttggagacagagtcaccatcacttgccgggccagtcagagtgttagtagctggttggcctggtatcagcagaaaccagggagagcccctaaactcctgatgtacaaggcatctactttagaaagtggggtcccatcaaggttcagcggcagtggatctgggacagagttcactctcaccatcaccagcctgcagcctgatgattttgcaacttatttctgccaacactatcgttcttcttcctggacgttcggccaagggaccaaggtggaaatcaaa

SEQ ID NO: 9753 - DNA, 321 bp, Artificial Sequence
  Synthetic polynucleotide encoding artificial human antibody VL domain
gacatccagatgacccagtctccttcttccgtgtctgcttctgttggagacagcgtcactttcacttgccgggcgagccagggtattaacatctggttggcctggtatcagcggaagccagggaaaccccctaacctcctgatctatgaaggaactattttgcggagtggcgtcccatctaggttcagtggccgtaggtctggggcagatttcactctcaccatcagcggcctgcagcctgaagattttggaacttactattgtcaacaggttaacagtttcccgtacacttttggccaggggacggagttggagatcaaa

SEQ ID NO: 9754 - DNA, 330 bp, Artificial Sequence
  Synthetic polynucleotide encoding artificial human antibody VL domain
cagtctgccctgactcagcctccctccgtgtccgggtctcctggacagtcagtcaccatctcctgcactggaaccagtaatgacgttggtggttatgaccgtgtctcctggtaccagcagcccccaggcacagcccccaaactcatgatttatgaggtcacttatcggccctcaggggtccctgatcgcttctctgggtccaagtctggcaacacggccgccctgaccatctctgggctccaggctgaggacgaggctgattattactgcagctcatatacaggcagcggcactgtggtgttcggcggagggaccaagctgaccgtccta

SEQ ID NO: 9755 - DNA, 333 bp, Artificial Sequence
  Synthetic polynucleotide encoding artificial human antibody VL domain
cagtctgtgctgacgcagccgccctcagtgtctggggccccagggcagagggtcaccatctcctgcacggggagcagctccaacatcgggccaggttatggtgtacactggtaccagcagcttccaggaacagcccccaaactcctcatctatggtaacagcaatcggccctcaggggtccctgaccgattctctggctccaagtctggcacctcagcctccctggccatcactgggctccaggctgaggatgaggctgattattactgccagtcctatgacagcagcctgagtggttcggtgttcggcggagggaccaagctgaccgtccta

SEQ ID NO: 9756 - DNA, 321 bp, Artificial Sequence
  Synthetic polynucleotide encoding artificial human antibody VL domain
gacatccagatgacccagtctccatcttccgtgtctgcatctgtaggagacagagtcaccatcacttgtcgggcgagtcagggtattagcagctggttagcctggtatcagcagaaaccagggaaagcccctaagctcctgatctatgctgcatccagtttgcaaagtggggtcccatcaaggttcagcggcagtggatctgggacagatttcactctcaccatcagcagcctgcagcctgaagattttgcaacttactattgtcaacaggctaacagtttccctcggacgttcggccaagggaccaaggtggaaatcaaa

SEQ ID NO: 9757 - DNA, 339 bp, Artificial Sequence
  Synthetic polynucleotide encoding artificial human antibody VL domain
gacatcgtgatgacccagtctccagactccctggctgtgtctctgggcgagagggccaccatcaactgcaagtccagccagagtgttttccagagcaccaccaataagaattacttagcttggtaccagaagaaaccaggacagcctcctaaactgctcattcactgggcgtctatccgggaattcggggtccctgaccgattcagtggcagcgggtctgggacagatttcactctcaccatcagcagcctgcaggctgaagatgtggcagtttatttctgtcagcattatcatactgttcctcggacgttcggccaagggaccaaggtggaaatcaaa

SEQ ID NO: 9758 - DNA, 324 bp, Artificial Sequence
  Synthetic polynucleotide encoding artificial human antibody VL domain
gaaattgtgttgacacagtctccacccaccctgtctttgtctccaggggaaagagccaccctctcctgcagggccagtcagacttttggcaactacttagcctggtaccagcagaagcctggccaggctcccaggctcctcatctatgatgtgtctaacagggccgctggtgtcccagccaggttcagtggcagtgggtctgcgacagacttcactctcaccatcagcagcctggagcctgaggattctggagtttattactgtcagccgcgtggcagctggcggggtttcactttcggccctgggaccaaagtggatatcaaa

SEQ ID NO: 9759 - DNA, 321 bp, Artificial Sequence
  Synthetic polynucleotide encoding artificial human antibody VL domain
gaaatagtgatgacgcagtctccagccaccctgtctgtgtctccaggggaaagagccaccctctcctgcagggccagtcagagtgttactaccaacctagcctggtaccagcacaaacctggccaggctcccaggctcctcatatatgattcatccaccagggccactggtatcccagccaggttcagtggcagtgggtctgggacagacttcactctcaccatcagcagcctgcagtctgaagattttgcagtgtattactgtcagcactataacatctggccttacacttttggccaggggaccaagctggagatcaaa

SEQ ID NO: 9760 - DNA, 324 bp, Artificial Sequence
  Synthetic polynucleotide encoding artificial human antibody VL domain
gaaattgtgttgacgcagtctccaggcaccctgtctttgtctccaggggaaagagccaccctctcctgcagggccagtcagagtgttagcagcatctacttagcctggtaccagcagaaacctgggcaggctcccaggctcctcatctatggtgcatccaggagggccactggcatcccagacaggttcagtggcagtgggtctgggacagacttcactctcaccatcagcagactggagcctgaagatttcgcagtgtattactgtcagcagtatggtggttcacctcggactttcggcggagggaccaaggtggagatcaaa

SEQ ID NO: 9761 - DNA, 318 bp, Artificial Sequence; identical to SEQ ID NO: 8833
  Synthetic polynucleotide encoding artificial human antibody VL domain

SEQ ID NO: 9762 - DNA, 336 bp, Artificial Sequence
  Synthetic polynucleotide encoding artificial human antibody VL domain
cagtctgtgctgacgcagccgccctcaatgtctggggccccagggcagggactcaccatctcctgcactgggagcacctccaatatcggggcaggttatgatgtacattggtaccaccaagttccaggggcagccccccgactcctcatctatggtaacaccaatcggccctcaggggtccctgaccgattctctggttccaagtctggcaccgcagcctccctggccatcactgggctccaggctgaagatgagggtcattattactgtcagtcgtatgaccgctccctgagtgcctcggcggttttcggcggggggaccaaggtgaccgtccta

SEQ ID NO: 9763 - DNA, 318 bp, Artificial Sequence
  Synthetic polynucleotide encoding artificial human antibody VL domain
tcctatgagctgactcagccaccctcagtgtccgtgtccccaggacagacagccagcatcacctgctctggagataaattgggggataaatatgcttgctggtatcagcagaagccaggccagtcccctgtgctggtcatctatcaagatagcaagcggccctcagggatccctgagcgattctctggctccaactctgggaacacagccactctgaccatcagcgggacccaggctatggatgaggctgactattactgtcaggcgtgggacagcagcactgcaggattcggcggagggaccaagctgaccgtccta

SEQ ID NO: 9764 - DNA, 321 bp, Artificial Sequence
  Synthetic polynucleotide encoding artificial human antibody VL domain
gacatccagctgacccagtctccttccaccctgtctgcgtctgtgggagacagagtcaccatcacttgccgggccagtcagactgttggtgcctccttggcctggtatcaacagaagccagggaaggcccctaaacccctgatctatagggcctccagtttacacagtggggtcccatcaaggttcagtggcagtggctctgggacagtgttcactctcaccatcagcagcctgcagcctgatgattttgctacttattactgccatcaatatgatagtttttcgtggacgttcggcccagggaccagggtggatttcaaa

SEQ ID NO: 9765 - DNA, 321 bp, Artificial Sequence
  Synthetic polynucleotide encoding artificial human antibody VL domain
gacatccagatgagccagtctccatcttccgtgtctgcatctgtgggagacagagtcaccatcacttgtcgggcgagtcggggcattaatatctggttggcctggtatcagcagagaccagggagagcccctaaactcctgatctatgaagcaaacactttgcaaagtggggtcccatcaaggttcagcggcagtagatctggggcagatttcactctcaccatcagcagcctgcagcctgaagatgttgcaacttactattgtcaacagcttaacagtttcccgtacacttttggccaggggacgaaggttgagatcaaa

SEQ ID NO: 9766 - DNA, 330 bp, Artificial Sequence
  Synthetic polynucleotide encoding artificial human antibody VL domain
cagtctgtggtgactcagccaccctcagcgtctgggacccccgggcagagggtcaccattttttgttctgggagcacctccaatatcggaagtaacactgtaaactggtaccagcactttccaggaacggcccccaaactcctcatctataataataatcagcggccctcggggattcctgaccgattctctgactccaagtctggcaccacagcctccctggccatcagtgggctccagtctgaggatgaggctgattattactgttcatcatgggatgacatcctgcatgaacaggtgttcggcggagggaccaagctgaccgtccta

SEQ ID NO: 9767 - DNA, 330 bp, Artificial Sequence
  Synthetic polynucleotide encoding artificial human antibody VL domain
gaaattgtgttgacgcagtctccaggcactatgtctttgtctccaggggaaagagccaccctctcctgcagggccagtcagagtgttagcaacaggtacttagcctggtaccagcagagacctggccaggctcccaggctcctcatttatggagcatccaccagggccactggcatcccagacaggttcagtggcagtgggtctgggacagacttcactctcaccatcagcagactggagccggaagattttgcagtgtattactgtcagcagtatggtggctcacctccgcagctcactgtcggcggagggaccaaggtggagatcaaa

SEQ ID NO: 9768 - DNA, 321 bp, Artificial Sequence
  Synthetic polynucleotide encoding artificial human antibody VL domain
gacatccagatgacccagtctccatcctccctgtctgcatctgtaggagacagagtcaccatcacttgccgggcaagtcagagcattagcagctatttaaattggtatcagcagaaaccagggaaagcccctaagctcctgatctatgctgcatccagtttgcaaagtggggtcccatcaaggttcagtggcagtggatctgggacagatttcactctcaccatcagcagtctgcaacctgaagattttgcaacttactactgtcaacagagttacagtactccgtacacttttggccaggggaccaagctggagatcaaa

SEQ ID NO: 9769 - DNA, 321 bp, Artificial Sequence
  Synthetic polynucleotide encoding artificial human antibody VL domain
tcctatgagctgacacagccatcctcagtgtcagtgtctccgggacagacagccaggatcacctgctcaggagatgtactggcaaaaaaatatgctcggtggttccagcagaagccaggccaggcccctgtgctggtgatttataaagacagtgagcggccctcagggatccctgagcgattctccggctccagctcagggaccacagtcaccttgaccatcagcggggcccaggttgaggatgaggctgactattactgttactctgcggctgacaacaatgggggggtgttcggcggagggaccaagctgaccgtccta

SEQ ID NO: 9770 - DNA, 330 bp, Artificial Sequence
  Synthetic polynucleotide encoding artificial human antibody VL domain
cagtctgccctgactcagcctccctccgtgtccgggtctcctggacagtcagtcaccatttcctgcactggaaccagcaatgacattggtagtcatgaccgtgtctcctggtaccagcagcccccaggcacagtccccaaactcatgatttttgaggtcagtcatcggccctcaggggtccctgatcgcttctctgggtccaagtctggcgacacggcctccctgaccatctctgggctccaggctgaggacgaggctgattattactgcagttcatatacaacccccggcactgtggtgttcggcggagggaccaagctgaccgtccta

SEQ ID NO: 9771 - DNA, 321 bp, Artificial Sequence
  Synthetic polynucleotide encoding artificial human antibody VL domain
gacatccagatgacccagtctccatcttccgtgtctgcatctgtcggagacagagtcaccatctcttgtcgggcgagtcagggtgttagcagtttgttagcctggtatcagcagaaaccagggaaagcccctaaactcctgatctatggtgcatccagtttgcaaagtggggtcccatcaaggttcagcggcagtggctctgagacagatttcactctcaccatcagcagcctgcagcctgaagattttgcaacttactattgtcagcaggcttacactttccctttcactttcggccctgggaccaaagtggatatcaaa

SEQ ID NO: 9772 - DNA, 336 bp, Artificial Sequence
  Synthetic polynucleotide encoding artificial human antibody VL domain
gacatcgtgatgacccagtctccagactcactggctgtgtctctgggcgagagggccaccatcagctgcaagtccagccagaatgttttatccagctccaacaataagaactacttagcttggtaccagcagaaacctggacagcctcctaagctgctcatttcctgggcatctacccgggaatccggagtccctgaccgattcgatggcagcgggtctgggacagagttcactctcaccatcagcagcctgcaggctgaagatgtggcagtttattactgtcaacaatattataatactcccacgttcggccaagggaccaaggtggaaatcaaa

SEQ ID NO: 9773 - DNA, 321 bp, Artificial Sequence
  Synthetic polynucleotide encoding artificial human antibody VL domain
gacatccagatgacccagtctcctttcaccctgtctgcgtctgtaggagacagagtcaccatcacttgccgggccagtcagagtgttgttacttggttggcctggtatcagcagaagccaggcaaagcccctaacctcctgatctataaggcatctaatttggaaagtggggtcccatcacggttcagcggcagtggatctgggacagaattcgctctcaccatcaacagcctgcagcctgatgattttgcaacttattactgccaacaatattatattctcccgtggacgtttggccaggggaccaaggtggagatcaaa

SEQ ID NO: 9774 - DNA, 339 bp, Artificial Sequence
  Synthetic polynucleotide encoding artificial human antibody VL domain
gacatcgtgatgacccagtctccagactccctggctgtgtctctgggcgagagggccaccatcacctgcaggtccagccagagtgttttacacagccccaccgataagaaccgcctagcttggtaccagcagaaattaggacagcctcctaagttgctcatttactgggcatctttccgggaatccggggtccctgaccgattcagtggcagcgggtctgggacagatttcactctcaccatcaacggcctgcaggctgaagatgtggcagtttattactgtcagcaatatcttagtcctcctctcactttcggcggagggaccaaggtggagatcaaa

SEQ ID NO: 9775 - DNA, 327 bp, Artificial Sequence
  Synthetic polynucleotide encoding artificial human antibody VL domain
cagtctgtgctgactcagccaccctcagcgtctgggacccccggacagggggtcaccatctcttgttctggaagcagctccaacatcggaagtaatcctgtaaactggtaccagcagttcccggggacggcccccaaactcctcatctataatactaatcagcggccctcaggggtccctgaccgattctctggctccaagtctggcacctcagcctccctggccatcagtgggctccagtctgaggatgaggctgattattactgtgcagcatgggattacggcctgcatggtctattcggcggagggaccaaactgaccgtccta

SEQ ID NO: 9776 - DNA, 321 bp, Artificial Sequence
  Synthetic polynucleotide encoding artificial human antibody VL domain
gacatccagatgacccagtctccttccaccctgtctgcatctgtaggagacagactcaccatcacttgccgggccagtcagagtattagtgattggttggcctggtatcagcagaaaccagggagaggccctaaactcctgatctataaggcgtctagtttaaatggtggggtcccatcaaggttcaccggcagtggatctgggacagaattcactctcaccatcagcagcctacagcctgatgattttgcaacttattactgccaacagtatactacttattctcgaacgttcggccaagggaccaaggtggaaatcaaa

SEQ ID NO: 9777 - DNA, 339 bp, Artificial Sequence
  Synthetic polynucleotide encoding artificial human antibody VL domain
gacatcgtgatgacccagtctccagactccctggctctgtctctgggcgagacggccaccatcaactgcaagtccagtcacagtgttttctacagctcccacaataagagcttcttagcttggtaccagcagaaaccaggacagcctcctaagctgctcatttactgggcatctacccgggaattcggggtccctgaccgcttcagtggcagcgggtctgggacagatttcactctcaccatcagcggcctgcaggctgaggatgtggcagtttatttctgtcagcattatcatagtgttcctcggacgttcggccaagggaccaaggtggaaatcaaa

SEQ ID NO: 9778 - DNA, 333 bp, Artificial Sequence
  Synthetic polynucleotide encoding artificial human antibody VL domain
cagtctgtgctgactcagccaccctcagcgtctgggacccccgggcagagggtcaccatctcttgttctggaagcagctccaacatcggaagtaattatgtatactggtaccagcagctcccaggaacggcccccaaactcctcatctataggaataatcagcggccctcaggggtccctgaccgattctctggctccaagtctggcacctcagcctccctggccatcagtgggctccggtccgaggatgaggctgattattactgtgcagcatgggatgacagcctgagtggccattgggtgttcggcggagggaccaagctgaccgtccta

SEQ ID NO: 9779 - DNA, 321 bp, Artificial Sequence
  Synthetic polynucleotide encoding artificial human antibody VL domain
gaaattgtgttgacacagtctccagccaccctatctttgtctccaggggaaagagccaccctctcctgcagggccagtcagagtgttagcacctacttggcctggtaccaacagaaacctggccaggctcccaggctccttatgtatgatgcatccaacagggccactggcatcccagccaggttcagtggcagagggtctgggacagagttcactctcaccatcagcagcctggagcctgaagattttgcagtttatttctgtcagcagcgtgccaacttgccgctaactttcggcggagggaccaaggtggagatcaaa

SEQ ID NO: 9780 - DNA, 321 bp, Artificial Sequence
  Synthetic polynucleotide encoding artificial human antibody VL domain
gccatccagatgacccagtctccatcttccctgtctgcatctgtaggagacagagtcaccatcacttgccgggcaagtcagggcattagaaatgatttaggctggtatcagcagaaaccagggaaagcccctaagctcctgatctatggtgcatccaatttacagagtggagtcccatcgaggttcagcggcagtggatctgacacagatttcactctcaccatcagcagcctgcagcctgaagattttgcaacttattactgtctgcaagattataattaccccaaaacattcggccaggggaccagggtggaaatcaaa

SEQ ID NO: 9781 - DNA, 339 bp, Artificial Sequence
  Synthetic polynucleotide encoding artificial human antibody VL domain
gacatcgtgatgacccagtctccagactccctggctgtgtctctgggcgagagagccaccatcaactgcaagtccagtcagagtgttttgtccaccgccgacaataagaattacttagtttggtaccagcagaaaccaggacagcctcctaagttgctcatttcctgggcttctacccgggaatccggggtccctgaccgattcagtggcagcgggtctgggacagatttcactctcaccatcagcagcctgcaggctgaagatgtggcgatttattactgtcagcaatgttatggtgttccgctcactttcggcggagggaccaaggtggagatcaaa

SEQ ID NO: 9782 - DNA, 339 bp, Artificial Sequence
  Synthetic polynucleotide encoding artificial human antibody VL domain
gatgttgtgatgactcagtctccactctccctgcccgtcacccttggacagccggcctccatctcctgcaggtctagtcaaagcctcgtacacagtgatggaaacacctacttgaattggtttcagcagaggccaggccaatctccaaggcgcctaatttataaggtttctaaccgggactctggggtcccagacagattcagcggcagtgggtcaggcactgatttcacactgaaaatcagcagggtggaggctgaggatgttggggtttattactgcatgcaaggtacacactggccttcgtggacgttcggccaagggaccaaggtggaaatcaaa

SEQ ID NO: 9783 - DNA, 330 bp, Artificial Sequence
  Synthetic polynucleotide encoding artificial human antibody VL domain
cagtctgccctgactcagcctgcctccgtgtctgggtctcctggacagtcgatcaccatctcctgcgctggaaccagcagtgatgttgggggttataaccttgtctcctggtaccaacagtacccaggcaaagcccccaaactcatcatttatgaggtcactaagtggccctcagggatttctgatcgcttctctggttccaagtctggcaacacggcctccctgacaatctctgggctccaggctgacgacgaggctgattattactgctgctcatatgcagccaggggcacttcggtgttcggcggagggaccaagctgaccgtccta

SEQ ID NO: 9784 - DNA, 336 bp, Artificial Sequence
  Synthetic polynucleotide encoding artificial human antibody VL domain
gatgttgtggtgactcagtctccgctctccctgcccgtcacccttggacagccggcctccatctcctgcaggtctaatcaaagcctcgtacacagtgatcgtaacacctacttgagttggtttcatcagaggccaggccaatctccaaggcgcctcatttttaaggtttctaagcgggactctggggtcccggacagattcagcggcagtgggtcaggctctgatttcacactgaaaatcagtaatgtggaggctgaagatgttggggtttattactgcctgcaaaccacacactggccgctcaccttcggcggagggaccaaggtcgagatcaaa

SEQ ID NO: 9785 - DNA, 330 bp, Artificial Sequence
  Synthetic polynucleotide encoding artificial human antibody VL domain
cagtctgccctgactcagcctccctccgcgtccgggtctcctggacagtcagtcaccatctcctgcactggaaccagcagtgacattggtggttataactatgtctcctggtaccaacagcacccaggcgaagcccccaaactcatgatttatgaggtcaataagcggccctcaggggtccctgatcgcttctctggctccaggtctggcaacacggcctccctgaccgtctctgggctccaggctgaggatgaggctgattattactgtgcctcagttgcaggcggtgacaacttgctattcggcggagggaccaaactgaccgtctta

SEQ ID NO: 9786 - DNA, 321 bp, Artificial Sequence
  Synthetic polynucleotide encoding artificial human antibody VL domain
gaaattgtgttgacgcagtctccagccaccctgtctttgtctccaggagaaagagccaccctctcctgcggggccagtcagactgttagcagcagctacttggcctggtaccagcagaaacctggcctggcgcccaggctcctcatctatgatgcatccagcagggccgctggcatcccagacaggttcagtggcagtgggtctgcgacagacttcactctcaccatcagcagactggagcctgaagattttgcagtgtattactgtcagcactatgctgccgcaatcactttcggcggagggaccaaggtggagatcaaa

SEQ ID NO: 9787 - DNA, 324 bp, Artificial Sequence
  Synthetic polynucleotide encoding artificial human antibody VL domain
gaaatactgatgacgcagtctccagccaccctgtctgtgtctccaggggaaagagccaccctctcctgtagggccagccagagtgttggcagcaacttagcctggtaccagcagaaacctggccaggctcccaggctcctcatctacggagcatttaatagggccactgatgtcccagccaggttcagtggcagtgggtctgggacagagttcactctcaccatcagcagtctgcagtctgaagattttgcagtttattactgtcagcactataatacctggccccggtggacgttcggccaagggaccaaggtggagatcaaa

SEQ ID NO: 9788 - DNA, 321 bp, Artificial Sequence
  Synthetic polynucleotide encoding artificial human antibody VL domain
gacatccacttgacccagtctccatccttcctgtctgcatctgtaggagacagagtcaccatcacttgccgggccagtcagcccatgggcaattatttagcctggtatcagcagaaaccagggaaagcccctaagctcctgatctatgctgcatccactttgcaaagtggggtctcatcaaggttcaccggcagtggatctgggacagagttcactctcacaatcagcagactgcagcctgaagattttgcaacttatttctgtcaacaggttcatagttaccccttcactttcggccctggggccaaagtggagatcaaa

SEQ ID NO: 9789 - DNA, 324 bp, Artificial Sequence
  Synthetic polynucleotide encoding artificial human antibody VL domain
tcttctgagctgactcaggaccctgctgtgtctgtggcctcgggacagacagtcaagatcacgtgccaaggagacagtctcaaaaccttttatgcaacctggtaccagcagaagcccgggcaggcccctctacttgtcctctatggtaaaaataaccggccctcagggatcccagaccgattctctggctccagttcaggagacacagcatccttgaccatcactggggctcaggcggaagatgaggctgactattactgtaactcccggcacagcagtggtaactatctggtcttcggcggagggaccaagctgaccgtccta

SEQ ID NO: 9790 - DNA, 324 bp, Artificial Sequence
  Synthetic polynucleotide encoding artificial human antibody VL domain
tcctatgagctggcacagccaccctcggtgacagtgtccccaggacaaacggccaggatcacctgctctggagatgcattgccaagaaaatttgcttattggtaccagcagaagtcaggccaggcccctgtggtggtcatctatgaagactccaaacggccctccgggatccctgaaagattttctggctccagctcagggacagtggccaccttgactatcactggggcccgtgtggaggatgaggctgactactactgttactcaacagacaggtatgctgatcacagggtgttcggcggagggaccaagttgaccgtccta

SEQ ID NO: 9791 - DNA, 330 bp, Artificial Sequence
  Synthetic polynucleotide encoding artificial human antibody VL domain
cagtctgtgctgactcagccaccctcagcgtctgggacccccgggcagaggatcaccatctcttgctctggaagcagctccaacatcggacgtaatcttgtaacctggtaccagcagctcccgggaacggcccccaaactcgtcctctacagtaataatctgcggccctctggggtccctgaccgactctctggctccaagtctggcacctcagcctccctggccatcagtgggctccagtctgaggatgaggctgattatttctgtgcatcttgggatgacagtctgcacggttatgtcttcggacctgggactaaggtcaccgtccta

SEQ ID NO: 9792 - DNA, 330 bp, Artificial Sequence
  Synthetic polynucleotide encoding artificial human antibody VL domain
cagtctgtgttgagtcagccaccctcagtgtctgggtcccccggccagagggtcaccatctcttgttctggaagcacctccaacatcggaagcaatactgtgagttggtatcgacaattcccaggaggggcccccaaagtcgtcatctataatcatgataagcgaccctcaggggtccctgaccgattctctgactccaagtctggcacctcagcctccctggccatcagtgggctccaatctgaggatgaggctgattattactgcgctgtatgggatgacagtgtaaatgctccggtgttcggcggagggaccaagctgaccgtcata

SEQ ID NO: 9793 - DNA, 321 bp, Artificial Sequence
  Synthetic polynucleotide encoding artificial human antibody VL domain
gaaattgtgttgacacagtctccagccaccctgtctttgtctccgggggaaagagccaccctctcctgcagggccagtcagagtgttagcaactccttaggctggtaccaacagaaacctggccaggctcccaggctcctcatccatgaagcatccaacagggccaatggcatcccagccaggttcagtggcagtgggtctgggacagacttcactctcaccatcagcggcctagagcctgaagattttgcagtttattactgtcagcaccgaagcaactggcctctcactttcggccctgggaccaaagtggatatcaaa

SEQ ID NO: 9794 - DNA, 324 bp, Artificial Sequence
  Synthetic polynucleotide encoding artificial human antibody VL domain
gaaattgttttgacgcagtctccaggcaccctgtctctgtctccaggggaaggagccaccctctcctgtcgggccagtcgggctgttaccggcaactacgtagcctggtaccagcacaaacctggccaggctcccaggctcctcgtatatggtgcatccaacagggccactggcatcccagacaggttcagtggcagtgggtccgggagagacttcactctcaccctcagcagactggagcctgaagattttgcagtatattactgtcagcagtatcttacgtcaattgggacgttcggccgagggaccagggtggaaatcaaa

SEQ ID NO: 9795 - DNA, 330 bp, Artificial Sequence; identical to SEQ ID NO: 8911
  Synthetic polynucleotide encoding artificial human antibody VL domain

SEQ ID NO: 9796 - DNA, 318 bp, Artificial Sequence
  Synthetic polynucleotide encoding artificial human antibody VL domain
gacatccagatgacccagtctccttccaccctgtccgcatctgtgggagacagagtcaccatcacttgccgggccagtcagactattgataggtggttggcctggtatcagcagaaaccagggaaagcccctaagctcctgatctatgagacgtccagattacaaagtggggtcccatcaaggttcggcggcagtggatctgggacggaattcactctcaccatcagcagcctgcagcctgatgattttgcatcttattactgtcaacaatataaaacttatcccacttttggccaggggaccaggctgcagatcaaa

SEQ ID NO: 9797 - DNA, 321 bp, Artificial Sequence
  Synthetic polynucleotide encoding artificial human antibody VL domain
gccatccaggtgacccagtctccaccctccctgtctgcgtctgtaggagacagagtcaccatcacttgccgggcaagtcagggcattggaacttatttaggctggtatcaacagaaaccagggaaaggccctaagctcctgatctacgatgcatccagtttgcaaagtggggtcccatcaaggttcagcggtagtggctctggcacagatttcactctcaccatcagcagcctgcagcttgaagatttcgcaacttattattgtctacaagactacctctacccagccacttttggccaggggaccaagctggagatcaaa

SEQ ID NO: 9798 - DNA, 339 bp, Artificial Sequence
  Synthetic polynucleotide encoding artificial human antibody VL domain
gacatcgtgatgacccagtctccagactccctggctgtgtctctgggcgagagggccaccatcaactgcaagtccagccagagtgttttatggacctccaatgataagaattacttagcttggtaccagcagaaaccaggacagcctcctaaactactcatttactgggcgtctacccgggagtccggggtccctgatcgattcagtggcagcgggtctgggacagttttcactctcaccatcagcaacctgcaggctgaagatgtggcagtttattattgtcagcaatattatgctgttccgctcactttcggcggagggacccaggtggagatcaaa

SEQ ID NO: 9799 - DNA, 330 bp, Artificial Sequence
  Synthetic polynucleotide encoding artificial human antibody VL domain
cagtctgccctgactcagccttcctccgtgtctgggtctcgtggccagtcggtcaccatctcctgcactgggaccagcactgacattggtctttctaatcatgtctcctggtaccaattatacccagacaaagcccccaaactcctgatttacggcgtctctgagaggccctcaggggtttctggtcacttctctggctccaagtctggcaatacggcctccctaaccatctctggcctccagtctgacgacgaggctacatatttctgcaactcatattcgcgcgccggatatagtgttttcggcggggggaccaagctgaccgtccta

SEQ ID NO: 9800 - DNA, 339 bp, Artificial Sequence
  Synthetic polynucleotide encoding artificial human antibody VL domain
gacatcgtgatgacccagtctccagactccctggctgtgtctctgggcgagagggccaccatcaactgcaagtccagccagagtgttttatacagctccaacaataagaactacttagcttggtaccagcagaaaccaggacagcctcctaagctgctcatttactgggcatctacccgggaatccggggtccctgaccgattcagtggcagcgggtctgggacagatttcactctcaccatcagcagcctgcaggctgaagatgtggcagtttattactgtcaacaatattatagtactgcctggacgttcggccaagggaccaaggtggaaatcaaa

SEQ ID NO: 9801 - DNA, 324 bp, Artificial Sequence
  Synthetic polynucleotide encoding artificial human antibody VL domain
gaaattatgttgacgcagtctccaggcaccctgtctttgtctccaggggaaagagccaccctctcctgcagggccagtcagagtgttagcagcagctacttagcctggtaccagcagaaacctggccaggctcccaggctcctcatctatggtgcatccagcagggccactggcatcccagacaggttcagtggcagtgggtctgggacagacttcactctcaccatcagcagactggagcctgaagattttgcagtgtattactgtcagcagtatggtagctcaccgtacacttttggccaggggaccaagctggagatcaaa

SEQ ID NO: 9802 - DNA, 333 bp, Artificial Sequence
  Synthetic polynucleotide encoding artificial human antibody VL domain
cagcttgtgctgactcaatcgccctctgcctccgcctctctgggagcctcggtcaaggtcgcctgcactctcagtagtggccagagtaggtaccccatcgcatggcttcagcagcagccagggaagggtcctcggtacttgatgaaggttaacaatgatggcagccacaccaagggagacggaatcccggatcgcttttcaggctccagctctggggctgagcgctacctcaccatctccagcctccagtctgaagatgaggctgactattattgtcagacgtggggcactgacacttgggtgttcggccgagggaccaaggtgaccgtccta

SEQ ID NO: 9803 - DNA, 321 bp, Artificial Sequence
  Synthetic polynucleotide encoding artificial human antibody VL domain
tcctatgacctgactcagccaccctcagtgtccgtgtccccaggacagacagccaccatcacctgctctggaagtaatttgggggataagtatacttgctggtatcaacacaagccgggccagtcccctgttctgctcatctatcagaataacaagcggccctcagggatccctgagcgcttctctggctccacgtctggggacacagccactctaaccatcaccgggacccagcctatcgatgaagctgactattactgccaggcgtgggacaataggaatcttgatgtcttcgggaccgggaccaaggtcaccgtccta

SEQ ID NO: 9804 - DNA, 327 bp, Artificial Sequence
  Synthetic polynucleotide encoding artificial human antibody VL domain
cagtctgccctgactcagcctcgctcagtgtccgggtctcctggacagtcagtcaccatctcctgcactggaaccagcagtgatgttggtggttataactatgtctcctggtaccaacagcacccaggcaaagcccccaaactcatgatttatgatgtcagtaagcggccctcaggggtccctgatcgcttctctggctccaagtctggcaacacggcctccctgaccatctctgggctccaggctgaggatgaggctgattattactgctgctcatatgcaggcagcccttatgtcttcggaactgggaccaaggtcaccgtccta

SEQ ID NO: 9805 - DNA, 330 bp, Artificial Sequence
  Synthetic polynucleotide encoding artificial human antibody VL domain
cagtctgccctgactcagcctcgctcagtgtccgggtctcctggacagtcagtcaccatctcctgcactggaaccagcagtgatgttggcggatataactatgtctcctggtaccaacagcacccaggcaaagcccccaaactcatgatttatgatgtcagtaagcggccctcaggggtccctgatcgcttctctggctccaagtctggcaacacggcctccctgaccatctctgggctccaggctgaggatgaggctgatttttactgctgctcatatgcaggcagctacacttatgtcttcggaactgggaccaaggtcaccgtccta

SEQ ID NO: 9806 - DNA, 324 bp, Artificial Sequence
  Synthetic polynucleotide encoding artificial human antibody VL domain
gaaattgtgttgacgcagtctccaggcaccctgtctctgtctccaggggaaagagccaccctctcctgcagggccagtcagagtgttagcggcaactacttagcctggtatcagcagaaacctggccaggctcccaggctcctcatctatggtgcatccagcagggccactggcatcccagacaggttcagtggcagtgggtctgggacagacttcactctcaccatcagcagactggagcctgaagattttgtagtgtacttctgtcagcagtatggtagctcaccgctcactttcggcggagggaccaaggtggggatcaaa

SEQ ID NO: 9807 - DNA, 327 bp, Artificial Sequence
  Synthetic polynucleotide encoding artificial human antibody VL domain
cagtctgtcttgacgcagccgccctcagtgtctgcggccccaggacagaaggtcaccatctcctgctctggaagcggctccaacattggcagtagttttgtatcctggtaccagcagctcccaggaacagcccccaaactcctgatttatgacaatgataagcgaccctcagggattcctgaccgcttctctggctccaagtctggcacgtcagccaccctgggcatcaccgggctccagactggggacgaggccgattattactgcggagcatgggatactgggctgactgtgatgttcggcggagggacccatctgaccgtccta

SEQ ID NO: 9808 - DNA, 330 bp, Artificial Sequence
  Synthetic polynucleotide encoding artificial human antibody VL domain
cagtctgtactgactcagccgccctcagcgtctgggacccccgggcagagggtcaccatctcttgttccggaggcatctccaacgtcagaagtaatcctgtgaactggtaccagcaattcccagggacggcccccagactcctcctctttagtgattttcagcggccctccggggtccctgaccgattctcgggctccaagtctggcacctcagcctccctggccatcactggcctccagtctgaggatgaggctgattattactgtgcagcgtgggacgacagcctgaatgcatggctgttcggcggagggaccaggcttaccgtcgta

SEQ ID NO: 9809 - DNA, 321 bp, Artificial Sequence
  Synthetic polynucleotide encoding artificial human antibody VL domain
gacatccagatgacccagtctccatcttccgtgtctgcatctgtaggagacagagtcaccatcacttgtcgggcgagtcagggtattagcagctggttagcctggtatcagcagaaaccagggaaagcccctaagctcctgatctatgctgcatccagtttgcaaagtggggtcccatcaaggttcagcggcagtggatctgggacagatttcactctcaccatcagcagcctgcagcctgaagattttgcaacttactattgtcaacaggctaacagtttcccattcactttcggccctgggaccaaagtggatatcaaa

SEQ ID NO: 9810 - DNA, 324 bp, Artificial Sequence
  Synthetic polynucleotide encoding artificial human antibody VL domain
gaaattgtgttgacgcagtctccaggcaccctgtctttgtctccaggggaaagagccaccctctcctgcagggccagtcagagtgttagcagcagctacttagcctggtaccagcagaaacctggccaggctcccagcctcctcatctatggtgcatccagcagggccactggcatcccagacaggttcagtggcagtgggtctgggacagacttcactctcaccatcagcagactggagcctgaagattttgcagtgtattactgtcagcagtatggtagctcaccgcggacttttggccaggggaccaagctggagatcaaa

SEQ ID NO: 9811 - DNA, 321 bp, Artificial Sequence
  Synthetic polynucleotide encoding artificial human antibody VL domain
gacatccagatgacccagtctccatcctccctgtctgcatctgtaggagacagagtcaccatcacttgccgggcaagtcagagtattaggatatatttaaattggtatcagcagaaaccagggaaagcccctaacctcctgatctatgctgcgtccactttgcaaagtggggtctcatcgaggttcagtggcagtggatctgggacagatttcactctcaccatcagcagtctgcaacctgaagattttgcaacttactactgtcaacagagttacagcacccctcctactttcggcggagggaccaaggtggagatcaaa

SEQ ID NO: 9812 - DNA, 324 bp, Artificial Sequence
  Synthetic polynucleotide encoding artificial human antibody VL domain
gaaatagtgatgacgcagtctccagccaccctgtctgtgtctcccggggaaacagccaccctctcctgcagggccagtcagggtgttaacagaaacttagcctggtaccagcggaaacctggccaggctcccaggctcctcatctataatggttcgaccagggccactggtgtcccagccaggttcagtggcagtgggtctgggacagacttcactctcaccatcagcagcctgcagtctggagattttgcagtgtattactgtcagcagtatgataagtggcctccgttcactttcggccctgggaccacagtggatatcaaa

SEQ ID NO: 9813 - DNA, 321 bp, Artificial Sequence
  Synthetic polynucleotide encoding artificial human antibody VL domain
gacatccagatgacccagtctccatcctccctgtctgcatctgtgggagacagagtcaccatcacttgccgggcgagtcagggcattagcaattatttagcctggtatcaacataaaccagggaaagttcctaggttgttgatctattctgcatccactttgcattcaggagtcccatctcggttcagcggcagtgggtatgggacagatttcactctcaccatcagcagcctgcagcctgaggatgtggcaacttattactgtcaaaagtctgacggtgccccgtggacgttcggccaagggaccaaggtggaaatcaaa

SEQ ID NO: 9814 - DNA, 339 bp, Artificial Sequence
  Synthetic polynucleotide encoding artificial human antibody VL domain
gatgttgtgatgactcagtctccactctccctgcccgtcacccttggacagccggcctccatctcctgcaggtctagtcaaagcctcgtacacagtgatggaaacacctacttgaattggtttcagcagaggccaggccaatctccaaggcgcctaatttataaggtttctaaccgggactctggggtcccagacagattcagcggcagtgggtcaggcactgatttcacactgaaaatcagcagggtggaggctgaggatgttggggtttattactgcatgcaaggtacacactggcctccgtggacgttcggccaagggaccaaggtggaaatcaaa

SEQ ID NO: 9815 - DNA, 333 bp, Artificial Sequence
  Synthetic polynucleotide encoding artificial human antibody VL domain
cagtctgccctgactcagcctgcctccgtgtctgggtctcctggacagtcgatcaccatctcctgcactggaaccagcagtgacgttggtggttataactatgtctcctggtaccaacaacacccaggcaaagcccccaaactcatgatttatgatgtcagtaatcggccctcaggggtttctaatcgcttctctggctccaagtctggcaacacggcctccctgaccatctctgggctccaggctgcggacgaggctgattattactgcagctcatatacaagcaccagcactctcgtggtattcggcggagggaccaagctgaccgtccta

SEQ ID NO: 9816 - DNA, 330 bp, Artificial Sequence
  Synthetic polynucleotide encoding artificial human antibody VL domain
cagtctgtgttgccgcagccgccctcagtgtctgcggccccagggcagaaggtcaccatctcctgctctggaagcagcaccaatattgggcataattttgtatcctggtaccaacaactcccaggagcagcccccaaactcctcatttatgacactagtaagcgaccctcagcgattcctgaccgattctctgcctccaagtctggcacgtcagccaccctggacatcgcaggactccagactggggacgaggccgaatactactgcggaacctgggatgagatcctgggtgtgtgggtcttcggcggagggaccaaactgaccgtccta

SEQ ID NO: 9817 - DNA, 333 bp, Artificial Sequence
  Synthetic polynucleotide encoding artificial human antibody VL domain
gatattgtgatgactcagtctccactctccctgcccgtcacccctggagagccggcctccatctcctgcaggtctagtcagagcctcctgcatagtaatggatacaactatttggattggtacctgcagaagccagggcagtctccacagctcctgatctatttgggttctaatcgggcctccggggtccctgacaggttcagtggcagtggatcaggcacagattttacactgaaaatcagcagagtggaggctgaggatgttggggtttattactgcatgcaagctctacaaactccggcgttcggccaagggaccaaggtggaaatcaaa

SEQ ID NO: 9818 - DNA, 318 bp, Artificial Sequence
  Synthetic polynucleotide encoding artificial human antibody VL domain
tcctatgagctgactcagccaccctcagtgtccgtgtccccaggacagacagccagcatcacctgctctggagataaattgggggataaatatgcttgctggtatcagcagaagccaggccagtcccctgtgctggtcatctatcaagatagtaagcggccctcagggatccctgagcgattctctggctccaactctgggaacacagccactctgaccatcagcgggacccaggctatggatgaggctgactattactgtcaggcgtgggacagcagcactccggtattcggcggagggaccaagctgaccgtccta

SEQ ID NO: 9819 - DNA, 330 bp, Artificial Sequence
  Synthetic polynucleotide encoding artificial human antibody VL domain
cagtctgtgctgactcagccaccctcagcgtctgggacccccgggcagagggtcaccatctcttgttctggaagcaactccaacatcggaagtaattatatatactggtaccagcagctcccaggaacggcccccaaactcctcatctataggaataatcagcggccctcaggggtccctgaccgattctctggctccaagtctggcacctcagcctccctggccatcagtgggctccggtccgaggatgaggctgattattactgtgcaacatgggatgacagcctgagtggttgggtgttcggcggagggaccaagctgaccgtccta

SEQ ID NO: 9820 - DNA, 321 bp, Artificial Sequence
  Synthetic polynucleotide encoding artificial human antibody VL domain
gaaattgtgttgacacagtctccagccaccctgtctttgtctccaggggaaagagccaccctctcctgcagggccagtcagagtgttagcagctacttagcctggtaccagcagaaacctggccaggctcccaggctcctcatctatgatgcatccaacagggccactggcatcccagccaggttcagtggcagtgggcctgggacagacttcactctcaccatcagcagcctagagcctgaagattttgcagtttattactgtcagcagcgtagcaactggccccatcccttcggccaagggacacgactggagattaaa

SEQ ID NO: 9821 - DNA, 339 bp, Artificial Sequence
  Synthetic polynucleotide encoding artificial human antibody VL domain
gacatcgtgatgacccagtctccagactccctggctgtgtctctgggcgagagggccaccatcaactgcaagtccagccagactattttatacagctccatcaataagaactgcttagcttggtaccagcagaaaccaggacagcctccaaagctgctcatttactgggcatctagacgggaaatcggggtccctgaccgattcaatggcagcgggtctgggacagatttcactctcaccatcagcagcctgcaggctgaagatgtggcggtttattactgtcagcaatattatagtagtccgtacccttttggccaggggaccaagctggagatcaaa

SEQ ID NO: 9822 - DNA, 330 bp, Artificial Sequence; identical to SEQ ID NO: 9267
  Synthetic polynucleotide encoding artificial human antibody VL domain

SEQ ID NO: 9823 - DNA, 321 bp, Artificial Sequence
  Synthetic polynucleotide encoding artificial human antibody VL domain
gacatccagatgacccagtctccatcttccctgtctgcctctatcggagacagagtcaccatcagttgccgggcgagtcaagacattagcgattatttagcctggtatcagcagagaccaggggaagttcctaaactcttgatttatgcaacctccaacttacagtccggggtcccatctcgcttcagtggcgctggatctgggacagatttctctctcaccatcagcagcctgcagccggaagatgttgccacttattattgtcagatgtataacactgccccctggacgttcggcccagggaccaaggtggaaatcaaa

SEQ ID NO: 9824 - DNA, 330 bp, Artificial Sequence
  Synthetic polynucleotide encoding artificial human antibody VL domain
cagtctgccctgactcagcctgcctccgtgtctgggtctcctggacagtcgatcaccatctcctgcactggaaccagcagtgatgttgggagttataaccttgtctcctggtaccaacagcacccaggcaaagcccccaaactcatgatttatgagggcagtaagcggccctcaggggtttctaatcgcttctctggctccaagtctggcaacacggcctccctgacaatctctgggctccaggctgaggacgaggctgattattactgctactcatatgcaggtagtagcacttgggtgttcggcggagggaccaagctgaccgtccta

SEQ ID NO: 9825 - DNA, 330 bp, Artificial Sequence
  Synthetic polynucleotide encoding artificial human antibody VL domain
cagtctgtgctgactcagtcaccctcagcgtctgggactcccgggcagagggtcaccatctcttgttctggaagcagctccaacatcggaagtaatactgtaaactggtaccagcagttcccaggaacggcccccaaactcctcatctttagtgataatcagcggccctcaggggtccctgaccgattctctggctccaagtctggcacctcagcctccctggccatcagtgggctccagtctgaggatgaggctgattattactgtgcagcatgggatgacagcctgagtggtgtggtattcggcggagggaccaagctgaccgtccta

SEQ ID NO: 9826 - DNA, 330 bp, Artificial Sequence
  Synthetic polynucleotide encoding artificial human antibody VL domain
cagtctgtgctgactcagccaccctcagcgtctgggacccccgggcagagggtcaccatctcttgttctggaagcagctccaacatcggaagtaatactgtaaactggtaccagcagctcccaggaacggcccccaaactcctcatctatagtaataatgagcggccctcaggggtccctgaccgattctctggctccaagtctggcacctcagcctccctggccatcagtgggctccagtctgaggatgaggctgattattactgtgcagcatgggatgacagcctgaatggttgggtgttcggcggagggaccaagctgaccgtccta

SEQ ID NO: 9827 - DNA, 327 bp, Artificial Sequence
  Synthetic polynucleotide encoding artificial human antibody VL domain
gaaattgtgttgacgcagtctccaggcaccctgtctttgtctccaggtgaaagagcctccctctcctgcagggcaagtcagcagattatcagagcctacctggcctggtaccagctgaaacctggccaggctcccagactcctcatttacggcacgtcctacagggccgccggcatcccagacaggttcagtggcgctgggtctgggacagacttcactctcaccatcagcagactggagcctgacgattttgcagtatattactgtcagctctatgataattcaccgaaattcactttcggccctgggaccaaagtggatttcaaa

SEQ ID NO: 9828 - DNA, 330 bp, Artificial Sequence
  Synthetic polynucleotide encoding artificial human antibody VL domain
cagtctgtgttgacgcagccgccctcagtgtctgcggcccctggacagagggtcaccatctcctgctctggaggcagctccaacattgggaataattacgtctcctggtaccagcaactcccaggaacagcccccaagctcctcatttatgacaatgataaacgaccctcagggattcctgaccggttctctgcctccaagtctggcacgtcggccaccctgggcatcaccgggctccagactggggacgaggccgattattactgcggaacttgggatagcagcctgagcgctggagtcttcggaactgggaccaaggtcaccgtccta

SEQ ID NO: 9829 - DNA, 330 bp, Artificial Sequence
  Synthetic polynucleotide encoding artificial human antibody VL domain
cagactgtggtgacccaggagccatcgttctcagtgtcccctggagggactgtcacactcacttgtggcttgagctctggctcagtctctactacttactaccccagctggtaccagcagaccccaggccaggctccacgcacgctcatctacagcacaaacactcgctcttctggggtccctgatcgcttctctggctccatccttgggaacaaagctgccctcaccatcacgggggcccaggcagatgatgaatctgattattactgtgtgctgtatatgggtagtggcatctgggtgttcggcggagggaccaagctgaccgtccta

SEQ ID NO: 9830 - DNA, 336 bp, Artificial Sequence
  Synthetic polynucleotide encoding artificial human antibody VL domain
gatgttgtgatgactcagtctccactctccctgcccgtcacccttggacagccggcctccatctcctgcaggtctagtcaaagcctcgtacacagtgatggaaacacccacttgagttggtttcaacagaggccaggccaatctccaaggcgcctaatttataaggtttctaaccgggactctggggtcccagacagattcagcggcagtgggtcaggcactgatttcacactgaaaatcagcagggtggaggctgaggatgttggggtttattactgcatgcaaggtacacactggccttggacttttggccaggggaccaagctggagatcaaa

SEQ ID NO: 9831 - DNA, 336 bp, Artificial Sequence
  Synthetic polynucleotide encoding artificial human antibody VL domain
gatattgtgatgactcagtctccactctccctgcccgtcacccctggagagccggcctccatctcctgcaggtctagtcagagcctcctgcatagtaatggatacaactatttggattggtacctgcagaagccagggcagtctccacagctcctgatctatttgggttctaatcgggcctccggggtccctgacaggttcagtggcagtggatcaggcacagattttacactgaaaatcagcagagtggaggctgaggatgttggggtttattactgcatgcaagctctacaaactctgtacacttttggccaggggaccaagctggagatcaaa

SEQ ID NO: 9832 - DNA, 333 bp, Artificial Sequence
  Synthetic polynucleotide encoding artificial human antibody VL domain
cagtctgccctgactcagcctgcctccgtgtctgggtctcctggacagtcgatcaccatctcctgcactggaaccagcagtgacgttggtggttataactatgtctcctggtaccaacagcacccaggcaaagcccccaaactcatgatttatgatgtcagtaagcggccctcaggggtttctaatcgcttctctggctccaagtctggcaacacggcctccctgaccatctctgggctccaggctgaggacgaggctgattattactgcagctcatatacaagcagcagcactccttatgtcttcggaactgggaccaaggtcaccgtccta

SEQ ID NO: 9833 - DNA, 330 bp, Artificial Sequence
  Synthetic polynucleotide encoding artificial human antibody VL domain
cagtctgtgctgactcagccaccctcagcgtctgagacccccgggcagagggtcaccatctcttgttctggaagcagctccaacatcggaagcaataccgtaaactggtaccagctgctcccaggaacggcccccaaactcctcatctatagtaatggtcggcggccctcaggggtccctgaccgattctctggctccaagtctggcacctcagcctccctggccatcagtggactccagtctgaggatgaggcagattattactgtgcagcatgggatgacggcctgaatggtctcgccttcggaactgggaccaaggtcaccgtccta

SEQ ID NO: 9834 - DNA, 336 bp, Artificial Sequence
  Synthetic polynucleotide encoding artificial human antibody VL domain
gatattgtgatgacccagactccactctcctcacctgtcacccttggacagccggcctccatctcctgcaggtctagtcaaagcctcgtacacagtgatggaaacacctacttgagttggcttcagcagaggccaggccagcctccaagactcctaatttataagatttctaaccggttctctggggtcccagacagattcagtggcagtggggcagggacagatttcacactgaaaatcagcagggtggaagctgaggatgtcggggtttattactgcacgcaagctacacaatttccattcaccttcggccaagggacacgactggagattaaa

SEQ ID NO: 9835 - DNA, 333 bp, Artificial Sequence
  Synthetic polynucleotide encoding artificial human antibody VL domain
cagtctgtgctgactcagccaccctcagcgtctgggacccccgggcagagggtcaccatctcttgttctggaagcagctccaacatcgggagtaatactgtaaactggtaccagcagctcccaggaacggcccccaatctcctcatctatagtaataatcagcggccctcaggggtccctgaccgattctctggctccaagtctggcacctcagcctccctggccatcagtgggctccagtctgaggatgaggctgattattactgtgcagcatgggatgacagcctgaatggtcgttatgtcttcggaactgggaccaaggtcaccgtccta

SEQ ID NO: 9836 - DNA, 321 bp, Artificial Sequence
  Synthetic polynucleotide encoding artificial human antibody VL domain
gacatccagatgacccagtctccttccatcctgtctgcctcgctaggtgacacagtcactttaacttgccgggccagccagagtgttgatgactggctggcctggtatcaacaaatgccaggtgaagcccctaaacttctaatcgataaggcgtcttttcttcaaaggggtgtctcatcaagattcagtgccagtggctctggcacagacttttctctcaccatcaggagcctccagcctgaggattttgcgacttatttctgccaccaatataatttttttccgtggacgttcggccgagggaccaaggtggaaatcaaa

SEQ ID NO: 9837 - DNA, 327 bp, Artificial Sequence
  Synthetic polynucleotide encoding artificial human antibody VL domain
cagtctgccctgactcagcctgcctccgtgtctgggtctcctgggcagtcgatcaccatctcgtgcactggcaccaacagtgacattggtgcttataattatgtctcctggtaccaacaacacccaggcaaagcccccaaactcttgatttctgaggtcagtcatcggccctcaggggtttctaatcgcttctctggctccaagtctggcaacacggcctccctgaccatctctgggctccaggctgacgacgaggctgattatcactgcagctcatatacaagcagcaccagggtcttcggcggggggaccaaggtgaccgtccta

SEQ ID NO: 9838 - DNA, 330 bp, Artificial Sequence
  Synthetic polynucleotide encoding artificial human antibody VL domain
cagtctgccctgactcagcctgcctccgtgtctgggtctcctggacagtcgatcaccatctcctgcactggaaccagcagtgacgttggtggttataactatgtctcctggtaccaacagcacccaggcaaagcccccaagctcttgatttatgaggtcactaagcggccctcaggggtttctaatcgcttctctggctccaagtctggcaacacggcctccctgaccatctctgggctccaggctgaggacgaggctgattattactgcagctcatatacaagcaccatcaccctggtgttcggcggagggaccaagctgaccgtccta

SEQ ID NO: 9839 - DNA, 330 bp, Artificial Sequence
  Synthetic polynucleotide encoding artificial human antibody VL domain
cagcttgtgctgactcaatcgccctctgcctctgcctccctgggagcctcggtcaagatcacctgcactctgagcagtgggcacagcagttacgccatcgcatggcatcagcagcagccagagaagggccctcggtacttgatgaaggtcaccagtgatggcagccacaccaaggcggacgggatccctgatcgcttctcaggctccagttctggggctgagcgcttcctcaccatctccagactccagtctgacgatgaggctgactattactgtcaggcctggggcactggcattgtgttcggcggggggaccaagttgaccgtccta

SEQ ID NO: 9840 - DNA, 330 bp, Artificial Sequence
  Synthetic polynucleotide encoding artificial human antibody VL domain
cagtctgtgctgacgcagccgccctcagtgtctggggccccagggcagagggtcaccatctcctgcactgggagcagctccaacatcggggcaggttatgatgtacactggtaccagcagcttccaggaacagcccccaaactcctcatctatggtaacagcaatcggccctcaggggtccctgaccgattctctggctccaagtctggcacctcagcctccctggccatcactgggctccaggctgaggatgaggctgattattactgccagtcctatgacagcagcctgaggagagtattcggcggagggaccaagctgaccgtccta

SEQ ID NO: 9841 - DNA, 324 bp, Artificial Sequence
  Synthetic polynucleotide encoding artificial human antibody VL domain
tcttctgagctgactcaggaccctgctgtgtctgtggccttgggacagacagtcaggatcacatgccaaggagacagcctcagaagctattatgcaagctggtaccagcagaagccaggacaggcccctgtacttgtcatctatggtaaaaacaaccggccctcagggatcccagaccgattctctggctccagctcaggaaacacagcttccttgaccatcactggggctcaggcggaagatgaggctgactattactgtaactcccgggacagcagtggtaaccatgtggtattcggcggagggaccaagctgaccgtccta

SEQ ID NO: 9842 - DNA, 336 bp, Artificial Sequence
  Synthetic polynucleotide encoding artificial human antibody VL domain
cagtctgccctgactcagccagcctccatttctgggtctcctggacagtcgatcaccatctcctgctctctgcccggcagtgatgttgagacttatcaccttgtctcctggtaccagcagcaccctgtcggaccccccaaactcttaatttttggggacaataagcggccctccggggttcccgatcgcttctatacgtccaactctggcaggacggcctccctggtgatctctggactccaggctgaggacgaggctcattatttctgctgctcatatggaactacccccacttccccttatgtcttcggcagtgggaccaacgtcatagtccta

SEQ ID NO: 9843 - DNA, 330 bp, Artificial Sequence
  Synthetic polynucleotide encoding artificial human antibody VL domain
gaaattgtgttgacgcagtctccaggcaccctgtctttgtctccaggggaaagagccaccctctcctgcagggccagtcagagtgttaggaacaatttcttagcctggtaccagcagaaacctggccaggctcccaggctcgtcatctattatgcatccgtcagggccactggcatcccagacaggttcagtggcagtggggctgggacagacttcactctcaccatcagcagactggagcctgaagattttgcagtgtattactgtcagcagtctggtagctcacctcctatgtacacttttggccaggggaccaagctggagatcaaa

SEQ ID NO: 9844 - DNA, 327 bp, Artificial Sequence
  Synthetic polynucleotide encoding artificial human antibody VL domain
gaaattgtgttgacgcagtttccaggcaccctgtctttgtctcctggggagagagccaccctctcctgcagggccagtcagactgttagcggcggctcctttgcctggtaccagcagaatcctggccaggctcccagactcctcatctatagtccatccaacagggccactggcatcccagacaggttcagtggcagtggctctgggacagacttcactctcaccatcagcagactggagcctgaagattttgcagtgtattattgtcatcactatggtagttcacctgcgtggacgttcggccaggggaccaaggtggaaatcaaa

SEQ ID NO: 9845 - DNA, 336 bp, Artificial Sequence
  Synthetic polynucleotide encoding artificial human antibody VL domain
gatgttgtgatgactcagtctccactctccctgcccgtcacccttggacagccggcctccctctcctgcaggtctaatcaaagcctcgtacacagtgatggaagcacccacttcgcttggtttcagcagaggccaggccaatctccaaggcgcctaatttatatggcttctaaccgggactctggggtcccagacagattcagcggcagtgggtcaggcactgatttcacactgaaaataagcagggtggaggctgaggatgttggagtttattactgcatgcaacatacacactggccccacacttttggccaggggaccaaggtggagatcaaa

SEQ ID NO: 9846 - DNA, 333 bp, Artificial Sequence
  Synthetic polynucleotide encoding artificial human antibody VL domain
cagtctgccctgactcagcctccctccgcgtccgggtctcctggacagtcagtcaccatctcctgcactggaaccagcagtgacgttggtggttataactatgtctcctggtaccaacagcacccaggcaaagcccccaaactcatgatttatgaggtcagtaagcggccctcaggggtccctgatcgcttctctggctccaagtctggcaacacggcctccctgaccgtctctgggctccaggctgaggatgaggctgattattactgcagctcatatgcaggcagcaacaattttgtggtattcggcggagggaccaagctgaccgtccta

SEQ ID NO: 9847 - DNA, 327 bp, Artificial Sequence
  Synthetic polynucleotide encoding artificial human antibody VL domain
cagtctgccctaactcagcctcgctcagtgtccgggcctcctggacagtcagtcaccatctcctgcactggaaccagcagtgatgttggtggttatgactatgtctcctggtaccaacaatacccaggcagagcccccaaactcatgatttatggtgtcagtaaccggccctcaggggtcccatatcgcttctctggctccaagtctggcaacacggcctccctgaccatctctgggctccaggctgaggatgaggcggattattactgctgctcatatgcaggcggcccctttgtcttcggaactgggaccgaggtcaccgtccta

SEQ ID NO: 9848 - DNA, 315 bp, Artificial Sequence
  Synthetic polynucleotide encoding artificial human antibody VL domain
tcctatgagctgacacagccatcctcagtgtcagtgtctccgggacagacagccaggatcccctgctcaggagatgtactggcaaaaaaatatgctcggtggttccagcagaagccaggccaggcccctgtgctggtgatttataaagacactgagcggccctcagggatccctgagcgattctccggctccagctcagggaccacagtcaccttgaccatcagcggggcccaggttgacgatgaggctgactattactgttactctgcggctgaccagggagtgttcggcggagggaccaagctgaccgtccta

SEQ ID NO: 9849 - DNA, 339 bp, Artificial Sequence
  Synthetic polynucleotide encoding artificial human antibody VL domain
gacatcgtgatgacccagtctccagactccctggctgtgtctctgggcgagagggccaccatcaactgccagtccagccagcctattttatacagccccaacaatcagaactccttaggttggtaccagcagaaaccaggacagcctcctaagttgctcatttactgggcgtctacccgggcatccggggtccctgaccgattcagtggcagcgggtctgggacagatttcactctcaccatcagcagcctgcaggctgaagatgtggcaatttattattgtcaccaatatcgtcatcgtccttccaccttcggccaagggacacgactggagattaaa

SEQ ID NO: 9850 - DNA, 330 bp, Artificial Sequence
  Synthetic polynucleotide encoding artificial human antibody VL domain
cagtctgtgctgactcagccaccctcagcgtctgggacccccgggcagagggtcaccatctcttgttctggaagcagctccaacatcggaagtaaaattgtgaactggtaccagcagctcccaagaacggcccccaaactcctcatctatagtaataatcagcggccctcaggggtccctgaccgattctctggctccaagtctggcacctcagcctccctggtcatcagtgggctccagtctgaggatgaggctgattattactgtgcatcttgggatgacagcctgaatggtgtggtgttcggcggagggaccaagatgaccgtccta

SEQ ID NO: 9851 - DNA, 321 bp, Artificial Sequence
  Synthetic polynucleotide encoding artificial human antibody VL domain
gacatccagatgacccagtctccatcctccctgtctgcatctgtaggagacagagtcaccatcacttgccgggcaagtcagggcattagaaataatttaggctggtatcagaagaaaccagggaaagcccctaagagcctgatctatgctgcatccagtttgcaaagtggcgtcccatcaaggttcagcggcagtggatctgggacagaattcactctcacaatcagcagcctgcagcctgaagattttgcaacttattactgtctacaacttaatagttaccccctcactttcggcggagggaccaaggtggagatcaaa

SEQ ID NO: 9852 - DNA, 321 bp, Artificial Sequence
  Synthetic polynucleotide encoding artificial human antibody VL domain
gacatccagatgacccagtctccatcctccctgtctgcatctgtaggagacagagtcaccatcacttgccgggcgagtcagggcattaacatttatttagcctggtatcagcagaaaccagggaaacatcctaagctcctgatctatgctgcatccactttgcagtccggggtcccatctcggttcagtggcagtggatctgggacagaattcactctcaccatcagcggcctgcagcctgatgatgttgcaacttattattgtcaaagatataaccttgccccgtggacgttcggccacgggaccaaggtggacatcaaa

SEQ ID NO: 9853 - DNA, 330 bp, Artificial Sequence
  Synthetic polynucleotide encoding artificial human antibody VL domain
cagtctgtgttgacgcacccgccctcagtgtctgcggccccaggacagaaggtcaccatctcctgctctggaaacagctccaacattgggagcacttatgtctcctggtaccagcaggtcccaggaacagcccccaaactcctcatttttgaaactaagaagcgaccctcagggattcctgaccgattttctggctccaagtctggcacgacggccaccctggacatcaccggcctccagcctggggacgaggccgattattactgcggaacatgggataccagcctgcatattgtggtcttcggcggagggaccaagctgaccgtccta

SEQ ID NO: 9854 - DNA, 330 bp, Artificial Sequence
  Synthetic polynucleotide encoding artificial human antibody VL domain
cagtctgtgctgactcagccaccctcagcgtctgggacccccgggcagagggtcaccatctcttgttctggaagcagctccaacatcggaagtcattatgtatactggtaccagcagctcccaggaacggcccccaaactcctcatctataggaataatcagcggccctcaggggtccctgaccgattctctggctccaagtctggcacctcagcctccctggccatcagtgggctccggtccgaggatgaggctgattattactgtgcagcatgggatgacagcctgagtggcgtggtattcggcggagggaccaagctgaccgtccta

SEQ ID NO: 9855 - DNA, 333 bp, Artificial Sequence
  Synthetic polynucleotide encoding artificial human antibody VL domain
cagcttgtgctgactcaatcgccctctgcctctgcctccctgggagcctcggtcaagctcacctgcactctgagcagtgggcacagcaactacgccatcgcatggcatcagcagcagccagagaagggccctcggtacttgatgaagcttaacaatgatggcagccacagcaagggggacgggatccctgatcgcttctcaggctccagctctggggctgagcgctacctcaccatctccagcctccagtctgaggatgaggctgactattactgtcagacctgggacactggcgtttgggtgttcggcggagggaccaagctgaccgtccta

SEQ ID NO: 9856 - DNA, 324 bp, Artificial Sequence
  Synthetic polynucleotide encoding artificial human antibody VL domain
gacatccagttgacccagtctccatccttcctgtctgcctctgtaggagacagagtcaccatcacttgccgggccagtcgcgacattaacacttatttagcctggtatcagcaaaaaccaggggaagcccctaaactcctgatctatgctgcatccgctttgcacggtggggtcccatcaaggttcagcggcagtggatctgggacagaattcactctcacaatcagcagcctgcagcctgaagatttcgcaacttattactgtcaacagcttattgaacaccctccgctcactttcggcggagggtccaaggtggagatcaaa

SEQ ID NO: 9857 - DNA, 330 bp, Artificial Sequence
  Synthetic polynucleotide encoding artificial human antibody VL domain
cagtctgtgctgactcagccaccctcagcgtctgggacccccgggcagagggtcaccatctcttgttctggaagcagctccaacatcggaagtaatactgtaaactggtaccagcagctcccaggaacggcccccaaactcctcatctatagtaataatcagcggccctcaggggtccctgaccgattctctggctccaagtctggcacctcagcctccctggccatcagtgggctccagtctgaggatgaggctgattattactgtgcagcatgggatgacagcctgaatggcctggtattcggcggagggaccaggctgaccgtccta

SEQ ID NO: 9858 - DNA, 321 bp, Artificial Sequence
  Synthetic polynucleotide encoding artificial human antibody VL domain
gacatccagatgacccagtctccatcttccgtgtctgcatctgtaggagacagagtcaccatcacttgtcgggcgagtcagggtattagcagctggttagcctggtatcagcagaaaccagggaaagcccctaagctcctgatctatgctgcatccagtttgcaaagtggggtcccatcaaggttcagcggcagtggatctgggacagatttcactctcaccatcagcagcctgcagcctgaagattttgcaacttactattgtcaacaggctaacagtttccccctcactttcggcggagggaccaaggtggagatcaaa

SEQ ID NO: 9859 - DNA, 321 bp, Artificial Sequence
  Synthetic polynucleotide encoding artificial human antibody VL domain
gacatccagatgacccagtctccttccaccctgtctgcatctgtaggagacagagtcaccatcacttgccgggccagtcagagtattagtagctggttggcctggtatcagcagaaaccagggaaagcccctaagctcctgatctataaggcgtctagtttagaaagtggggtcccatcaaggttcagcggcagtggatctgggacagaattcactctcaccatcagcagcctgcagcctgatgattttgcaacttattactgccaacagtataatagttacccgtggacgttcggccaagggaccaaggtggaaatccaa

SEQ ID NO: 9860 - DNA, 324 bp, Artificial Sequence; identical to SEQ ID NO: 8836
  Synthetic polynucleotide encoding artificial human antibody VL domain

SEQ ID NO: 9861 - DNA, 333 bp, Artificial Sequence
  Synthetic polynucleotide encoding artificial human antibody VL domain
cagcttgtactgactcaatcgccctctgcctctgcctccctgggaggctcggtcaacctcacctgtattctgagcagtgggcacagcagttacgccatcgcatggcatcagcagcagccagagaagggccctcggtacttgatgaagcttaacagtgatggcagccacattaagggggacgggattcctgatcgcttctcaggctccagttctggggctgagcgctacctcagcatctccagcctccagtctcaggatgaggctgactattactgtcagacctggggcagtggcgtctgggtgttcggcggagggaccaagctgaccgtccta

SEQ ID NO: 9862 - DNA, 333 bp, Artificial Sequence
  Synthetic polynucleotide encoding artificial human antibody VL domain
cagcttgtgctgactcaatcgccctctgcctctgcctccctgggagcctcggtcaagctcacctgcactctgagcagtgggcacagcagctacgccatcgcatggcatcagcagcagccagagaagggccctcggtacttgatgaagcttaacagtgatggcagccacagcaagggggacgggatccctgatcgcttctcaggctccagctctggggctgagcgctacctcaccatctccagcctccagtctgaggatgaggctgactattactgtcagacctggggcactggcccctgggtgttcggcggagggaccaagctgaccgtccta

SEQ ID NO: 9863 - DNA, 336 bp, Artificial Sequence
  Synthetic polynucleotide encoding artificial human antibody VL domain
gatattgtgctgacccagagtccactctctctgtccgtcacccctggacagccggcctccatcacttgcaagtctagtcagagcctcctgcacagtaatggaaagacctttttgtattggcacctgcagaaaccaggccagtctccacagctcctaatctacgaactttaccggcggttctctggagtgtcagatagattcattggcagcgggtctgagacagatttcacactgaaaatcagccgggtggaggctggggatgttggcgtctattattgcatgcaagcttttctttttccatacacctttggaccgggcaccaggctggagatcaaa

SEQ ID NO: 9864 - DNA, 324 bp, Artificial Sequence
  Synthetic polynucleotide encoding artificial human antibody VL domain
gacatccagatgacccagtctccatcctccctgtctgcatctgtaggagacagagtcaccatcacttgccgggcaagtcagagcattagcagctatttaaattggtatcagcagaaaccagggaaagcccctaagctcctgatctatgctgcatccagtttgcaaagtggggtcccatcaaggttcagtggcagtggatctgggacagatttcactctcaccatcagcagtctgcaacctgaagattttgcaacttactactgtcaacagagttacagtacccctccggacacttttggccaggggaccaagctggagatcaaa

SEQ ID NO: 9865 - DNA, 318 bp, Artificial Sequence
  Synthetic polynucleotide encoding artificial human antibody VL domain
gacatccagatgacccagtctccttccgccctgtctgcatctgtaggagacagagtcaccatcacttgccgggccagtcagagtattgttaccttcttggcctggtatcagcagaaaccaggaaaagcccctaaggtcctgatctatggggcgtctaatttagaaagtggggtcccatcaaggttcactggcagtggatctgggacagaattcactctcaccatcagcagcctacagcctgatgattttgcaacttattactgccaacagtattttcatatggggaccttcggccaagggaccaaggttgaagtcaaa

SEQ ID NO: 9866 - DNA, 330 bp, Artificial Sequence
  Synthetic polynucleotide encoding artificial human antibody VL domain
cagtctgtgctgactcaggtaccctcagcgtctgggacccccggacagagggtcaccatttcttgttctggaagcagctccaatgtcgggaggaattatgtatactggtaccagcagctcccaggagcggcccccagacttctcatctttatgaataataaacgacccccaggggtccctgagcgattctctggctccaagtctggcaccaccgcctccctggccatcagtgggctccgatccgacgatgaggctgattattactgtgcagcgtgggatgacagcctgacttctctgttgttcggcggagggaccaagctgaccgcccta

SEQ ID NO: 9867 - DNA, 324 bp, Artificial Sequence
  Synthetic polynucleotide encoding artificial human antibody VL domain
gaaattgtgatgacacagtctccagccaccgtgtctttgtctccaggggaaagagtcaccctctcctgcagggccagtcagagtgtcagcaccagccagttggcctggtaccagcacagacctggccaggctcccaggctcgtcatctttgatgcatccaagagggccactggcaccccagacagattcagtgccagtgggtctgggacagacttcactctcaccatcagcagactggagcctgaagattttgcagtgtattactgtcagcaatatggtagtttacctttcgccttcggcggagggaccaacgtggagatcaaa

SEQ ID NO: 9868 - DNA, 336 bp, Artificial Sequence
  Synthetic polynucleotide encoding artificial human antibody VL domain
gatgttgtgatgactcagtctccacggtccctgcccgtcacccttggacagccggcctccatctcctgcaggtctagtcaaagcctcgttcacagtgatggaaacacctacttgacttggtttcagcagaggccaggccaatctccaaggcgcctaatttatgcggtttctaaccgggactctggggtcccagacagattcagcggcagtgggtcaggcactgatttcacactgacaatcagcagggtggaggctgaggatgttgcgatttattattgcaaacagggttcacacgggccgcacacttttggccaggggaccaagctggagatcaaa

SEQ ID NO: 9869 - DNA, 336 bp, Artificial Sequence
  Synthetic polynucleotide encoding artificial human antibody VL domain
gatattgtgatgactcagtctccactctccctgcccgtcacccctggagagccggcctccatctcctgcaggtctagtcagagcctcctgcataggaatggacacacctatttggattggtacgtgcagaagccagggcagtctccacagctcctgatctatttgtcttctactcgggcctccggggtccctgacaggttcagtggcagtggatcaggcacagattttacactgcaaatcagcagagtggaggctgaggatgttgggatttattactgcatgcaagcagtacaaactccgtggacgttcggccaagggaccaaggtggaaatcaaa

SEQ ID NO: 9870 - DNA, 336 bp, Artificial Sequence
  Synthetic polynucleotide encoding artificial human antibody VL domain
cagcttgttctgacgcaatcgccctctgcctctgcctccctgggagcctcggtcaggctcacctgtactttgagcagtgggcacagcaactacgccatcgcttggcatcagcagccgccagagaagggccctcgatttttgatgaaggttgaatttgatggccgccacaccaagggggacgaaatccctaatcgcttctcaggctcgacctctggggctgagcgctacctcaccatctccagcgtccagcctgaagatgaggcagtctattattgtcagacgtgggccagtggcttttggggggtgttcggcggagggaccacgctgaccgtccta

SEQ ID NO: 9871 - DNA, 318 bp, Artificial Sequence
  Synthetic polynucleotide encoding artificial human antibody VL domain
gaaattgctttgacacagtctccaaccaccctgtatttgtctccaggggaaagagccaccctctcctgcagggccagtcagaatgttggcaactggttagcctggtaccaacagagacctggccaggctcccagactcctcatctatgatgtatccatcagggccgccggcgtcccagccaggttcagtggcggtgggtctgggacagacttctctctcaccatcagcagcctagagcctgaagactttgtagtttattactgtgtgcagcgccactggccttggacgttcggccaggggtccaaggtggaggtcaaa

SEQ ID NO: 9872 - DNA, 330 bp, Artificial Sequence
  Synthetic polynucleotide encoding artificial human antibody VL domain
cagtctgtggtgactcagccaccctcagtgtctgggacccccgggcagaaggttatcatctcttgttctgacgacaggtccaacatccgatataatgctgtcaactggtatcaacgactcccaggaacggcccccaaactcctcatttatactaataatcggcggccctcaggggtccctgaccgattctctggctccaagtctggcacctcagcctccctggccatcagtgggctccggtctgaggatgaggctgaatattactgtgcagtgtgggatgactacctggatggtccggtattcggcggagggaccaagctgaccgtccta

SEQ ID NO: 9873 - DNA, 333 bp, Artificial Sequence
  Synthetic polynucleotide encoding artificial human antibody VL domain
cagtctgtattgacgcagccgccctcagtgtctggggccccagggcagagggtcaccatctcctgcactgggactagctccaacatcggggcaggttatgatgtgcactggtatcaacaccttccgggaaaagcccccaaacttatcatttttgataacaccaggcggccctcaggggtccctgcgcgattttctggctccatgtctggcacctcggcctccctggccatcactgacctccaggctgaggatgaggctgactatttctgccagtgctttgacaccagactgagtggttcggtgttcggcggagggaccaagctgaccgtccta

SEQ ID NO: 9874 - DNA, 321 bp, Artificial Sequence
  Synthetic polynucleotide encoding artificial human antibody VL domain
gacatcctgctgacccaatctccatcctccctgtctgcatctgttggggacagagtcaccatcgcttgccgggcaagtcagaccattagtacctatttaaattggtatcagcagacacctgggacagcccctaagttcctaatctacgttgcgtccaatttacgtcgaggggccccatcaaggttcagtggcagtgggtcggggacaaatttcactctcaccatcagcaatcttcaacctgaagattttgcgacctactactgtcaacagacttacagtaatccccggacttttggccaggggacccggctgtcaatcaaa

SEQ ID NO: 9875 - DNA, 330 bp, Artificial Sequence
  Synthetic polynucleotide encoding artificial human antibody VL domain
cagtctgccctgactcagccggcctccgtgtctgggtctcctggacagtcgatcaccatctcctgcaatggaatcagcagtgacgttggtggttataactatgtctcctggtaccaacaacacccaggcaaagcccccaaactcatgatttatgatgtcagtaatcggccctcaggggtttctagtcgcttctctggctccaagtctggcaacacggcctccctgaccatctctgggctccaggctgaggacgaggctgattattactgcgcctcatatgcgggcggcgacacttgggtgttcggcggagggaccgagttgaccgtccta

SEQ ID NO: 9876 - DNA, 321 bp, Artificial Sequence
  Synthetic polynucleotide encoding artificial human antibody VL domain
gaaatagtgatgatgcagtctccagccaccctgtctgtgtctccaggggagagagccagcatctcctgcagggccagccagactataagcaccaacgtagcctggtatcagcacaaacctggccaggctcccaggctcctcatgtatggttcatccactagggccactggtgtcccacccaggttcagtggccgtgggtctgggacagagttcagtctctccatcagcagcctgcagtctgaagattttgcagtttatttctgtcagcagtatgataactggcctcgaacttttggccaggggaccaggctggagatcaaa

SEQ ID NO: 9877 - DNA, 321 bp, Artificial Sequence
  Synthetic polynucleotide encoding artificial human antibody VL domain
gacatccagatgacccagtctccttccaccctgtctgcatctgtaggagacagagttatcatcacttgccgggccagtaagagtattagtaactccttggcctggtatcagcagaaatcagggaaagcccctaaactcctgatctataaggcgtctagtttagaaagtggggtcccatcaagattcagcggcagtggatctgggacagaattcactctcaccatcagcagcctgcagcctgatgattttgcaacttattactgccaacagtataatatttttccgtacacttttggccaggggaccaagctggagatcaaa

SEQ ID NO: 9878 - DNA, 324 bp, Artificial Sequence
  Synthetic polynucleotide encoding artificial human antibody VL domain
gaaattgtgttgacgcagtctccaggcaccctgtctttgtctccgggggaaagagccaccctctcctgtagggccagtcagagtgttagcagcagctacttagcctggtaccagcagaaacctggccaggctcccaggctcctcatctatggtgcatccagcagggccactggcatcccagacaggttcagtggcagtgggtctgggacagacttcactctcaccatcagcagactggagcctgaagattttgcagtgtattactgtcagcagtatggtaggtcaccggtcactttcggccctgggaccaaagtggatatcaaa

SEQ ID NO: 9879 - DNA, 321 bp, Artificial Sequence
  Synthetic polynucleotide encoding artificial human antibody VL domain
gacatccagatgacccagtctccttccaccctgtctgcatctgtaggagacagagtcaccatcacttgccgggccagtgagagaattagtggctggttggcctggtatcaggagaaaccagggaaagcccctaacctcctgatctataaggcatctactttagaaagtggggtcccatcaaggttcagcggcagtggatctgggacagaattcactctcaccatcagcagcctgcaacctgatgattttgcaacttattactgccaacaatataatacgtatcccatcactttcggcggagggaccaaggtggagatcaaa

SEQ ID NO: 9880 - DNA, 330 bp, Artificial Sequence
  Synthetic polynucleotide encoding artificial human antibody VL domain
cagtctgccctgactcagcctgcctccgtgtctgggtctcctggacagtcgatcaccatctcctgcactggaaccagcagtgacgttggtggttataactatgtctcgtggcatcaacaacacccaggcacagcccccaaagtcatcatttatgatgtcacgactcgaccctcaggggtttctaatcgcttctctggctccaagtctgacaacacggcctccctgaccatctctgggctccaggctgaggacgaggctgattattactgcctctcatacggaggcgactatacttatgtcttcggaagtgggaccaaggtcaccgtccta

SEQ ID NO: 9881 - DNA, 333 bp, Artificial Sequence
  Synthetic polynucleotide encoding artificial human antibody VL domain
cagtctgtactgacgcagccgccctctttgtctggggccccagggcagagggtcaccgtctcctgcactgggaccacctccaacctcggggcaggtcacggtgtaaattggttccagagactcccggaaagaggccccaaactcctcatctctgcagacaacagtcgtccctcaggagtccctgaccgattttctgtctctcagtctggcacctctgccttcttggtcatcactggactccagactgacgacgcggcggaatactattgtcagtcccatgacgactttttgggtggcgcgattttcggcggcgggaccacgctgaccgtccta

SEQ ID NO: 9882 - DNA, 333 bp, Artificial Sequence
  Synthetic polynucleotide encoding artificial human antibody VL domain
cagtctgtgctgacgcagccgccctcagtgtctggggccccaggacagagggtcaccatctcctgcacggggggtagttccaacatcggggcaggttatgttgttcactggtaccagcagcttccaggagcagcccccaaagtcctcatttatgataccatctatcggccctcaggggtccctgaccgattctctggctccaagtctggcgcctcagcctccctggccatcactgggctccgggctgaggatgagtgtcattattactgccagtcctacgacagcagcctgtttggaggagtgttcggcggagggaccaaggtgaccgtccta

SEQ ID NO: 9883 - DNA, 333 bp, Artificial Sequence
  Synthetic polynucleotide encoding artificial human antibody VL domain
cagtctgccctgattcaagtcgcctccgtgtctgggtctcctgggcagtcgatcaccatctcctgcactgcgcccactagtgacgttaacttttacaaatatgtctcgtggttccaacagcacccaggcaaagtccccaaactcttactttatgatgttggtcatcggccctcaggtgtttctgatcgcttctctggctccaagtctggcgacacggcctccctcaccatctctagactgcagcctgaggacgagggcgattattattgcagttcggctcctaccaaaatcgctctcgaggtgtttggcggagggaccaaattgaccgtctta

SEQ ID NO: 9884 - DNA, 330 bp, Artificial Sequence
  Synthetic polynucleotide encoding artificial human antibody VL domain
aattttatgctgactcagccccactctgtgtcggagtctccggggaagacggtaaccatctcctgcaccggcagcagtggcagcattgccgacaactatgtgcagtggtaccagcagcgcccgggcagtgcccccaccactgtgatctatgaagataagcaaaggccctctggggtccctgatcggttctctggctccatcgacagctcctccaactctgcctccctcaccatctctggactgaagactgaggacgaggctgactactactgtcagtcttatgatggcaacaattgggtgttcggcggagggaccaagctgaccgtccta

SEQ ID NO: 9885 - DNA, 321 bp, Artificial Sequence
  Synthetic polynucleotide encoding artificial human antibody VL domain
gaaatagtgatgacgcagtctccagccaccctgtctgtgtctccaggggaaagagccaccctctcctgcagggccagtcagagtgtagccaggaacttagcctggtaccagcagaaacctggccaggctcccaggctcctcatctctgatacatccaccagggccactggtatcccagccaggttcagtggcagtgggactgggacagagttcactctcaccatcaatagcctgcagtctgaagattttgcattttattactgtcaacactataataagtggccgtacacttttggccaggggaccaaggtggagatcaaa

SEQ ID NO: 9886 - DNA, 330 bp, Artificial Sequence
  Synthetic polynucleotide encoding artificial human antibody VL domain
cagtctgccctgactcagcctgcctccgtgtctgggtctcctggacagtcgattaccatctcctgcactggaaccagcagtgatgttgggagttataaccttgtctcctggtaccatcagcacccaggcaaagtccccaagctcatcatttatgagggcactaagcggccctcaggggtttctgatcgtttctctggctccaggtctggcaacacggcctccctgacaatctctgggctccaggctgaggacgagggtgaatattactgctgctcatttgcaggaagtagcacttatgtcttcggaactgggaccaaggtcaccgtccta

SEQ ID NO: 9887 - DNA, 321 bp, Artificial Sequence
  Synthetic polynucleotide encoding artificial human antibody VL domain
gaaatagtgatgacgcagtctccagccaccctgtctatgtctccaggggaaagagccaccctctcctgcagggccagtcagagtgttagcagcaacttagcctggtatcagcagaaacctggccaggctcccaggctcctcatctatgatgcatccaccagggccactggtatcccagccaggttcagtggcagtgggtctgggacagagttcactctcaccatcagtagcctgcagtctgaagattttgcagtttactactgtcagcagtataataactggccgtacacttttggccaggggaccaagctggagatcaaa

SEQ ID NO: 9888 - DNA, 321 bp, Artificial Sequence
  Synthetic polynucleotide encoding artificial human antibody VL domain
gacatccagatgacccagtctccatcttccgtgtctgcatctgtaggagagagagtcaccatcgcttgtcgggcgagtcaatatattgccggttccttagcctggtatcagcagaaaccagggaaagcccctgagctcctgatctatggtgcatccagtttgcaaagtggggtcccatcaaggttcagcggcagtggatctgggacagatttcactctcaccatcagcagcctgcagcctgaagattttgcaacatattattgtcaacaggctagcggtttcccgtacacttttggccaggggaccaagctcgagatcaaa

SEQ ID NO: 9889 - DNA, 321 bp, Artificial Sequence
  Synthetic polynucleotide encoding artificial human antibody VL domain
gaaatagtgatgacgcagtctccagccaccctgtctgtgtctccaggggaaagagccaccctctcctgcagggccagtcagagtgttatcagcaacttagcctggtaccagtacatacctggccaggttcccaggctcctcatctatggtgcatccaccagggccactggtattccagtcaggttcagtggcagtgggtctgggacggagttcaccctcaccatcagcagcctgcagtctgaggattttggagtttatttctgtcagcactatcttaagtggccgtacacttttggccaggggaccaacctggagatcaaa

SEQ ID NO: 9890 - DNA, 321 bp, Artificial Sequence
  Synthetic polynucleotide encoding artificial human antibody VL domain
gacatccagctgacccagtctccttccaccctgtctgcatctgtaggagacagggtcaccatcacttgccgggccagtcagagttttacttcctggttggcctggtatcagcagaaaccagggaaagcccctaaactcctgatctataaggcgtctactttagaaagtggggtcccatcaaggttcagtggcagtggttctgggacagacttctctctcaccatcagcggcctgcagcccgacgattttgcaacttattattgtcaacaatatgattcttatccgctcactttcggcggagggaccacggtgcagatcaaa

SEQ ID NO: 9891 - DNA, 324 bp, Artificial Sequence
  Synthetic polynucleotide encoding artificial human antibody VL domain
gaaattgtgttgacgcagtctccaggcaccctgtctttgtctccaggggaaagagccaccctctcctgcagggccagtcagagtgttagcagcagctacttagcctggtaccagcagaaacctggccaggctcccaggctcctcatctatggtgcatccagcagggccactggcatcccagacaggttcagtggcagtgggtctgggacagacttcactctcaccatcagcagactggagcctgaagattttgcagtgtattactgtcagcagtatggtagctcaccgagaacttttggccaggggaccaagctggagatcaaa

SEQ ID NO: 9892 - DNA, 324 bp, Artificial Sequence
  Synthetic polynucleotide encoding artificial human antibody VL domain
gaaattgtgttgacgcagtctccaggcaccctgtctttgtctccaggggaaagagccacactctcctgcagggccagtcagagtgttagcagcagttatttagcctggtatcagcagaaacctggccaggctcccaggctcctcatctatggtgcatccagcagggccactggcgtcccagacaggttcagtggcagtgggtctgggacagacttcactctcaccatcagcagactggagcctgaagattttgcagtgtatttctgtcagcagtatggtagctcaccggggacgttcggccaagggaccaaggtggaattcaaa

SEQ ID NO: 9893 - DNA, 339 bp, Artificial Sequence
  Synthetic polynucleotide encoding artificial human antibody VL domain
gacatcgtgatgacccagtctccagactccctggctgtgtctctgggcgagagggccaccatcaactgcaagtccagccagagtattttatatagctccaacgataagaactacttagcttggtaccagcagaaaccaggacagcctcctaagctactcatttactgggcatctacccgggtatccggggtccctgaccgattcagtggcagcgggtctgggacagatttcactctcaccatcagcagcctgcaggctgaagatgtggcagtttattactgtcagcaatattatagttcccctcaaacttttggccaggggaccaagctggagatcaaa

SEQ ID NO: 9894 - DNA, 324 bp, Artificial Sequence; identical to SEQ ID NO: 9104
  Synthetic polynucleotide encoding artificial human antibody VL domain

SEQ ID NO: 9895 - DNA, 330 bp, Artificial Sequence
  Synthetic polynucleotide encoding artificial human antibody VL domain
cagtctgtgctgactcagccaccctcagcgtctgggacccccgggcagagggtcaccatctcttgttctggaggcagctccaacatcggagacaattttgtttactggtaccagcagctcccaggaacggcccccaaacttctcatctataggaatattcagcggccctcaggggtccctgaccgattctctggctccaagtctggcacctcagcctccctggccatcagtgggctccggtccgaggatgaggctgattattattgttcagcgtgggatgacagcctgagtgtcgtactcttcggcggagggaccaagctgaccgtccta

SEQ ID NO: 9896 - DNA, 336 bp, Artificial Sequence
  Synthetic polynucleotide encoding artificial human antibody VL domain
gatgttgtgatgactcagtctccagtctccctgcccgtcacccttggacagccggcctccatctcctgcaggtctagtcaaagcctcgttttcagtaatggaaacacctacttgagttggtttcaccagaggccaggccaatctccaaggcagcttatttacgaggtttctgaccgggactctggggtcccagacagattcagcggcagtgggtcaggcactgatttcacactgaaaatcagcagggtggaggctgaggatgttggcgtttattactgcatgcaaggtacacactggccttacacttttggcctggggaccaggctggagatcaaa

SEQ ID NO: 9897 - DNA, 339 bp, Artificial Sequence
  Synthetic polynucleotide encoding artificial human antibody VL domain
gacatcgtgatgacccagtctccagactccctggctgtgtctctgggcgagagggccaccatcaactgcacgtccagccagagtcttttatccagctacagcaataagaactacttagtttggtaccagcagagaccgggacagtctcctcggttgcttatttcctgggcatctatgcgccaatccggggtcccggaccgattcagtggcagcgggtctgggacagacttcactctcaccatcagtagtctacaggctgaagatgtggcagtctattactgtcagcaatgttatggtagtccgctcactttcggcggagggaccaaggtggagatcaaa

SEQ ID NO: 9898 - DNA, 333 bp, Artificial Sequence
  Synthetic polynucleotide encoding artificial human antibody VL domain
cagtctgccctgactcagcctccctccgcgtccgggtctcctggacagtcagtcaccatctcctgcactggaaccagcagtgacgttggtggttataactatgtctcgtggtaccaacagcacccaggcaaagcccccaaactcatgatttatgaggtcactaagcggccctcaggggtccctgatcgcttctctggctccaagtctggcaacacggcctccctgaccgtctctgggctccaggctgaggatgagggtgattatttctgcagctcatatggaggcaggaacaatttttgggtgctcggcggggggaccaaactgaccgtccta

SEQ ID NO: 9899 - DNA, 321 bp, Artificial Sequence
  Synthetic polynucleotide encoding artificial human antibody VL domain
gaaattgtgctgactcagtctccagagtttcagtctgtgactccaaaggagagagtctccatcacctgccgggccagtcagaacattaatattgacttacactggtatcagcaaaaaccaaatcagtctccaaagctcctcatcaagtatgcttcccactccaactccggggtcccctcgaggttcagtggcagtggatctgggacagatttcaccctcaccatctggagcctggaacctgaagatgctgcaacatattactgtcatcagagtattcatttaccgtacacttttggccaggggaccaagttggagatcaaa

SEQ ID NO: 9900 - DNA, 321 bp, Artificial Sequence
  Synthetic polynucleotide encoding artificial human antibody VL domain
gacatccagatgacccagtctccttccaccctgtctgcatctgtaggagacagagtcaccatcacttgccgggccagtcagagtattagtaccttgttggcctggtatcagcagaaaccagggaaagcccctaacctcctgatctataaggcatctagtttagaaagtggggtcccatcaaggtttagcggcagtggatctgggacagaattcactctcaccatcagcagcctgcagcctgatgactttgcaacttattactgccaacaatataatagtttcgcgtacacttttggccaggggaccaagctggagatcaaa

SEQ ID NO: 9901 - DNA, 321 bp, Artificial Sequence
  Synthetic polynucleotide encoding artificial human antibody VL domain
gacatccagatgacccagtctccatcctccctgtctgcatctgtaggagacagagtcaccatcacttgccgggcgagtcagggcattagcaattatttagcctggtatcagcagaaaccagggaaagttcctaacctcctgatctatgctgcatccactttgcaatcaggggtcccatctcggttcagtggcagtggatctgggacagatttcactctcaccatcagcagcctgcagcctgaagatgttgcaacttattactgtcaaaagtataacagtgccccgtggacgttcggccaagggaccaaggtggaaatcaaa

SEQ ID NO: 9902 - DNA, 324 bp, Artificial Sequence
  Synthetic polynucleotide encoding artificial human antibody VL domain
gaaattgtgttgacacagtctccagacaccctgtctttgtctccaggggaaactgccaccctctcctgcagggccagtgagagtgttggcaggtacttagcctggtaccagcagaaacctggccaggctcccaggctcctcatccatgatgcgtccagcggggccactggcgtcccagccagattcagtggcagtgggtctgggacagacttcaatctcaccatcagccgcctagagcctgaagattttgctgtgtatttctgtcagcagcgtagcaactggccttcgatcaccttcggccaagggacacgagtggagattaaa

SEQ ID NO: 9903 - DNA, 330 bp, Artificial Sequence
  Synthetic polynucleotide encoding artificial human antibody VL domain
cagtctgccccgactcaacctgcctccgtgtctgggtctcctggacagtcgatcaccatctcctgcactggaagcagtagtgacgttggcggttataagtatgtctcctggtaccaacagcacccacacaaagcccccaaactcatgatttatgatgtcaataatcggccctcaggggtttctactcgcttctctggctccaagtctggcaacacggcctccctgaccatctctgggctccaggctgaagacgaggctgattattactgtatctcatttacaagcagcggcacttatgtcttcggacctgggaccagggtcaccgtccta

SEQ ID NO: 9904 - DNA, 330 bp, Artificial Sequence
  Synthetic polynucleotide encoding artificial human antibody VL domain
cagtctgccctgactcagcctgcctccgtgtctgggtctcctggacagtcgatcaccttctcctgcgctggaaccagcagtgatgttgggagatatgaccgtgtctcctggtatcaacagcacccaggcaaagcccccaaactcatgatttatgaggtcaataagcggccctctggagtttctaatcgcttctctggcttcaagtctggcagcgcggcctccctgacaatctctgggctccagactgaggacgaggctgattatttctgctgttcatatgcaggcagtatgacttgggtgttcggcggagggaccaaggtgaccgtccta

SEQ ID NO: 9905 - DNA, 318 bp, Artificial Sequence
  Synthetic polynucleotide encoding artificial human antibody VL domain
gacatccagatgacccagtctcctcccaccctgtctgcatatgtgggggacagagtcaccatcacctgccgggccagccaggatactgataacagggtggcctggtatcagcacaaaccagggaaagcccctaaacttctgatctataaggtatctagtttagaagatgggatcccatcaagattcagcggcagtggatctgcgacagaattcactctcaccatcagcggcctgcagcctgatgattttgcaacgtattactgccaacattatagtagtctgtacactttcggccaggggaccgagctggagatcaaa

SEQ ID NO: 9906 - DNA, 333 bp, Artificial Sequence
  Synthetic polynucleotide encoding artificial human antibody VL domain
cagtctgccctgactcagcctccctccgcgtccgggtctcctggacagtcagtcaccatctcctgcactacaaccagcagtgactttggtggttataaccttgtctcctggtaccaacagcgcccaggcaaggcccccaaactcatgatttatgaggtcagtaagcggccctcaggggtccctgatcgcttctctggctccaagtctggcaacacggcctccctgaccgtctctgggctccaggctgaggatgaggctgattattactgcagctcatatggaggcagcaacatattttatgtcttcggaactgggaccaaggtcaccgtccta

SEQ ID NO: 9907 - DNA, 321 bp, Artificial Sequence
  Synthetic polynucleotide encoding artificial human antibody VL domain
gccatccagatgacccagtctccatcctccctgtctgcatctgttggagacagagtcaccatcacttgccgggcaagtcagtacattagaaatgatgtagcctggtatcagcagaaaccaggaaaagcccctaacctcctgatctatgctgcctctaatttagaaggtggggtcccgtcaaggtacagcggcagtggatctggcacagatttcactctgaccatcagcagcctgcagcctgaagattttgcaacttattactgtaaacaagattacaattacccgcacactttcggcggagggaccaaggtggagatcaaa

SEQ ID NO: 9908 - DNA, 336 bp, Artificial Sequence
  Synthetic polynucleotide encoding artificial human antibody VL domain
cagtctgccctgactcagcctgcctccgtgtctgggtctcctggacagtcgatcaccatctcctgcactggaactagcagtgccgttggtggttataagtatgtctcgtggtatcaacaacatcccggcaaagccccccgactcttgattcatgatgtcaatcatcggcccacaggggtctctgatcgcttctctggctctaagtctgacgacgcggcctccctgaccatctctggactcctggctgaggacgaagctgtttacatctgctgctcatatacaaccatacccgaccacacttgggtgttcggcggagggaccaacctgaccgtccta

SEQ ID NO: 9909 - DNA, 333 bp, Artificial Sequence
  Synthetic polynucleotide encoding artificial human antibody VL domain
cagtctctattgacgcagccgccctcagtgtctggggccccagggcagagggtcaccatttcctgcgctgggagcagctccaacatcggggcaggttatgatgtacactggtaccagcaacttccaggaacagcccccaaactcctcatctatgttaacaacaatcgaccctcaggggtccctgaccgattctctggctccaggtctggcacctcagcctccctggccatcaccggggtccaggctgaggatgaggctgattattactgccagtcccatgacagtagcctgagtatttgggtgttcggcggagggaccaaactgaccgtctta

SEQ ID NO: 9910 - DNA, 330 bp, Artificial Sequence
  Synthetic polynucleotide encoding artificial human antibody VL domain
aattttatgctgactcagccccactctgtgtcggcgtctccggggaagacagtaaccatctcctgcaccggcaacagtggcagcattgccagcaactttgtgcagtggtaccagcagcgcccgggcagtgcccccatcattgtgatctatgaggataaccaaagaccctctggggtccctaatcggttctctggctccatcgacagctcctccaactctgcctccctcaccatctctggtctgaagactgaggacgaggctgattactactgtcagtcttatgataacaacaattgggtgttcggcggagggaccaggctgaccgtccta

SEQ ID NO: 9911 - DNA, 321 bp, Artificial Sequence
  Synthetic polynucleotide encoding artificial human antibody VL domain
gacatccagatgacccagtctccatcctcactgtctgcatctgtaggagacagagtcaccatcacttgtcgggcgagtcagggcattaggaattatttaacctggtttcagcaaaaaccagggaaaccccctaagtccctgatctatgctgcgtccagtttacaacctggggtcccatcaaaattcagcggcagtgggtctggcacggatttcactctcaccatcagcggcctgcagcctgaagattttgcaacttattactgccaacagtatgcaagttaccccatgaccttcggccaagggacacgactggagattaaa

SEQ ID NO: 9912 - DNA, 321 bp, Artificial Sequence
  Synthetic polynucleotide encoding artificial human antibody VL domain
gaaattgtgttgacacagtctccagccaccctgtctttgtctccaggggaaagagccaccctctcctgcagggccagtcagagtgttagcaactccttagcctggtaccaacagaaacctggccaggctcccaggctcctcatctctgatgcatccaacagggccactggcatcccagccaggttcagtggcagtgggtctgggacagacttcactctcaccatcagcagcctagagcctgaagattttgcagtttattattgtcagcagcgtggcacctggccctacacttttggccaggggaccaagctggagatcaaa

SEQ ID NO: 9913 - DNA, 333 bp, Artificial Sequence
  Synthetic polynucleotide encoding artificial human antibody VL domain
cagtctgtgctgacgcagccgccctcagtgtctggggccccagggcagagggtcaccatctcctgcactgggagcagctccgacatcggggcaggttatgatgtgaattggtaccagcaacttccaggaacagcccccaaactcctcatccatgataacagcaatcggccctcaggggtccctgaccgattctctggctccaagtctggcacctcagcctccctggccatcactgggctccaggctgaggatgaggctgattattactgccagtcctatgacagcggcctgagtgtttatgtcttcggaactgggaccaaggtcaccgtccta

SEQ ID NO: 9914 - DNA, 321 bp, Artificial Sequence
  Synthetic polynucleotide encoding artificial human antibody VL domain
gacatccagatgacccagtctccttccaccctgtctgcatttgtaggagacagagtcaccatcacttgccgggccagtcagagtattagtaactggttggcctggtatcagcagaaaccagggaaagcccctaagctcctgatatataaggcatctactttagaaagtggggtcccatcaaggttcagcggcagtgagtctgggacagaattcactctcaccatcagcagcctgcagcctgatgattttgcaacttatttctgccaacagttctctctttatcccatcactttcggcggggggaccaaggtggagatcaaa

SEQ ID NO: 9915 - DNA, 321 bp, Artificial Sequence
  Synthetic polynucleotide encoding artificial human antibody VL domain
gacatccagatgacccagtctccatcttctgtgtctgcatctgtaggagacagagtcaccatcacttgtcgggcgagtcagggtattagcagctggttagcctggcatcagcagaaaccagggaaagcccctaaactcctgatctttgctgcatccagtttgcaaagtggggtcccatcaaggttcagcggcagtggatctgggacagatttcactctcactatcagcaacctgcagcctgaagattttgcaacttactattgtcaacaggctaacagtttcccgatcaccttcggccaagggacacgactggagattaaa

SEQ ID NO: 9916 - DNA, 324 bp, Artificial Sequence
  Synthetic polynucleotide encoding artificial human antibody VL domain
gaaattgttttgacgcagtctccaggcaccctgtctttgtctccaggggaaagagccaccctctcctgcagggccagtcacagtattagatatacctacttagcctggtaccagcagaaacctggccaggctcccaggctcctcatgtttggtgcatccagtagggccactgccaccccaggcaggttcactggcagtgggtctgggacagacttcaacctcaccatcagcagactggagcctgaagattttggagtgtattactgtcagcagtatggtagctcaccgtacacttttggccaggggaccaaggtggagatcaaa

SEQ ID NO: 9917 - DNA, 321 bp, Artificial Sequence
  Synthetic polynucleotide encoding artificial human antibody VL domain
gacatccagttgacccagtctccatcttccgtgtctgcatctgtaggagaccgagtcaccatcacttgtcgggcgagtcaagatattagcaggtggttagcctggtatcaacagaaaccagggaaagcccctaaactccttatctatgctgcatccagtttggaaagtggggtcccatcaaggttcagcggcagtggatctgggacagatttcactctcaccatcagctgcctgcagtttgaagactttgcaacttacttttgtcagcaggcttacagtttcccggtcaccttcggacaagggacacgactggagattaaa

SEQ ID NO: 9918 - DNA, 321 bp, Artificial Sequence
  Synthetic polynucleotide encoding artificial human antibody VL domain
gaaattgtgttgacacagtctccagtcaccctgtctttgtctccaggggaaagagccaccctctcctgcagggccagtcacagtgttggcgtctacttagcctggtaccaacagaaacctggccaggttcccaggctcctcatctatgattcaacccacagggccacgggcatttcacccaggttcagtggcagtgggtctgggacagacttcactctcaccatcagcagcctagagcccgaggattcttcagtttattactgtcagcagcgtagcagctggcctctcactttcggcggagggaccaaggtggagatcaaa

SEQ ID NO: 9919 - DNA, 321 bp, Artificial Sequence
  Synthetic polynucleotide encoding artificial human antibody VL domain
gaaatagtgatgacacagtctccagccaccctgtctgtgtctccagggggaagagccaccctctcctgcggggccagtcagagtgttggcatcaacttagcctggtacctacaaaagcctggccaggctcccagactcctcatctttggtgcctccacccgggccactggtgtcccactcaggttcagtggcagtgggtctggcacagaattcactctcaccatcagcagcctgcagtctgaagattttgcagtttatttctgtcagcagtatgataaatggcctcccagtttcggccctgggaccaaagtggatgtcaaa

SEQ ID NO: 9920 - DNA, 324 bp, Artificial Sequence
  Synthetic polynucleotide encoding artificial human antibody VL domain
gaaattgtgttgacgcagtctccaggcaccctgtctttgtctccaggggaaagagccaccctctcctgcagggccagtcagagtgttagcagcagccagttagcctggtaccagcagaaacctggccaggctcccaggctcctcatctatggtgcatccagcagggccactggcatcccagacaggttcagtggcagtgggtctgggacagacttcactctcaccatcagcagactggagcctgaagattttgcagtgtattactgtcagcagtatggtagctcacccctcactttcggcggagggaccaaggtggagatcaaa

SEQ ID NO: 9921 - DNA, 333 bp, Artificial Sequence
  Synthetic polynucleotide encoding artificial human antibody VL domain
cagtctgtgctgacgcagccgccctcagtgtctggggccccaggacagagggtcaccatctcctgcactgggagcagctccaacatcggggcaggttatgatgttcactggtaccagcactttccaggagcagcccccaaactcctcatctatgctaacgacaatcggccctcgggggtccctgaccgattctctggctcccagtctggcacctcagcctccctggccatcactgggctccaggcagaggatgagacagattattactgccagtcctatgacatcagcctgagtggttatgtcttcggatctgggaccaaggtcaccgtccta

SEQ ID NO: 9922 - DNA, 336 bp, Artificial Sequence
  Synthetic polynucleotide encoding artificial human antibody VL domain
cagcctgtggtgactcaatcatcttctgtctctgcttccctgggatcctcagtcaatctcacctgcactctgagttatgaccacagggccttcatcatcgcttggcatcagcaggagccagggaaggcccctcggtttttgatgaggcttgacggcagaggagtctacaggaaggcgagtggacttccagatcgtttttcagggttcagttctgggtctcaccgctacctcaccatctccaggctccagtctgacgatgaggcccattattactgtgagacttgggacactgacagtcgtggtgtgttcggcggagggaccagactgaccgtccta

SEQ ID NO: 9923 - DNA, 318 bp, Artificial Sequence; identical to SEQ ID NO: 9542
  Synthetic polynucleotide encoding artificial human antibody VL domain

SEQ ID NO: 9924 - DNA, 330 bp, Artificial Sequence
  Synthetic polynucleotide encoding artificial human antibody VL domain
cagactgtggtgacccaggagccatcgttctcagtgtcccctggagggacagtcacactcacttgtggcttgagctctggctcagtctcttctagtcactaccccagctggtaccagcagaccccaggccaggctccacgcacgctcatccacagcacaaacactcgctcttctggggtccctgatcgcttctctggctccatccttgggaacaaagctgccctcaccatcacgggggcccaggcagatgatgaatctgattattactgtgtgctgtatatgactagtggcaattgggtgttcggcggagggaccaagctgaccgtccta

SEQ ID NO: 9925 - DNA, 315 bp, Artificial Sequence
  Synthetic polynucleotide encoding artificial human antibody VL domain
tcctatgagctgacgcagccaccctcagtgtccgtgtccccaggacagacagccagcatcacctgttctggagataaattgggggataaacatgtttgctggtatcagcagaagccaggccagtcccctcttctggtcatctatcaagatgccaagcggccctcagggatccctgagcgattctctggttccaattctgggaacacagccactctgaccatcagcgggacccaggctgtggatgaggctgactattactgtcaggcgtgggacagcactgtggtgtttggcggagggaccaaactgaccgtccta

SEQ ID NO: 9926 - DNA, 321 bp, Artificial Sequence
  Synthetic polynucleotide encoding artificial human antibody VL domain
gacatccagttgacccagtctccatccttcctgtctgcatctgtaggagacagagtcaccatcacttgccgggccagtcagggcattagcagttatttagcctggtatcagcaaaaaccagggaaagcccctaagctcctgatctatgctgcatccactttgcaaagtggggtcccatcaaggttcagcggcagtggatctgggacagaattcactctcacaatcagcagcctgcagcctgaagattttgcaacttattactgtcaacagcttaatagttaccctttcaccttcggccaagggacacgactggagattaaa

SEQ ID NO: 9927 - DNA, 333 bp, Artificial Sequence
  Synthetic polynucleotide encoding artificial human antibody VL domain
cagcttttcttgactcaatcgccctctgcctctgcctccctgggagcctcggtcaaactcacctgcactctgaccagtggacacagtaggtacgccatcgcgtggcttcagcagcagccagagaagcgccctcggttcttgatgaaacttaataatgatggccaccacatcaagggggccgggatccctgatcgcttctcaggctctagttctggggctgagcggtacctcaccatctccagcctccagtctgaagatgaggctgtctattattgtcaaacctgggcctctggcattcgagtgttcggcggggggacctgggtgaccgtccta

SEQ ID NO: 9928 - DNA, 333 bp, Artificial Sequence
  Synthetic polynucleotide encoding artificial human antibody VL domain
cagctttcgctgactcaatcgccctctgactctgcctccctgggagcctcggtcaaactcacctgcactctgagcagtgggcacagcaggtacgccgtcgcgtggcatcagcagcagccagagaagcgccctcgcttcttgatgaaacttaacaatgatggccaccacatcaagggggccgggatccctgatcgcttctcaggctccagttctggggctgagcgctacctcaccatctccagcctccagtctgaagatgaggctgtctattattgtcaaacctggggctctggcattcgagtgttcggcggggggaccaaggtgaccgtccta

SEQ ID NO: 9929 - DNA, 321 bp, Artificial Sequence
  Synthetic polynucleotide encoding artificial human antibody VL domain
gacatccagatgacccagtctcctcagaccctggctgcgtctctaggagacagagtcaccatcacttgccgggccagtcagagtgttagtaactggttggcctggtatcagcagaaaccagggaaagccccgagactcctgatctataaggcctctaatttagaaagtggggtcccatcacggttcagtggaagtggctctgggacagaattcactctcaccatcagaagcctgcagcctgatgatattgctacttatcactgccaacagtatgatacttatcctgtcaccttcggcggagggacgagggtggagatcaaa

SEQ ID NO: 9930 - DNA, 321 bp, Artificial Sequence
  Synthetic polynucleotide encoding artificial human antibody VL domain
gaaattgtgttgacacagtctccagccaccctgtctttgtctccaggggaaagagccatcctctcctgcagggccagtcagagtgtggacaactacttaggctggtaccaacacaaacctggccaggctcccaggctcctcatctatggtgcaaccaacagggcccctgccatcgcagccaggttcagtggcgctgggtctgggacagacttcactctcaccatcagcagcctagagcctgaagattttgcagtttattactgtcagcagcgtcacagctggcctctcactttcggccctgggaccaaagtggatatcaaa

SEQ ID NO: 9931 - DNA, 321 bp, Artificial Sequence
  Synthetic polynucleotide encoding artificial human antibody VL domain
gacatccagttgacgcagtctccacccttcctgtctgcatctgtaggagacaaaatcaccatcacttgccgggccagtcagggcattagtacttatttagcctggtatcagcagaaaccagggaaagcccctaagctcctgatctatgttgcctccactttagaaagtggggtcccattaaggttcagcggcagtggatctggaacagaattcactctcacgatcagcagcctgcagcctgaagattttgcaacttattactgtcaacaccttaaaagttacccattcgctttcggccctgggaccagagtggatgtcaaa

SEQ ID NO: 9932 - DNA, 339 bp, Artificial Sequence
  Synthetic polynucleotide encoding artificial human antibody VL domain
gacatcgtgatgacccagtctccagactccctggctgtgtctctgggcgagagggccaccatcaactgcaagtccagccagagtattttatacagctccaacaataagaactacttaggttggtaccagcagaaaccaggacagcctcctaagctgctcatttactgggcatctacccgggattccggggtccctgaccgattcagtggcagcgggtctgggacagatttcactctcaccatcagcagcctgcaggctgaagatgtggcaatttattactgtcagcaatattatagtactccgtacacttttggccaggggaccaagctggagatcaaa

SEQ ID NO: 9933 - DNA, 318 bp, Artificial Sequence
  Synthetic polynucleotide encoding artificial human antibody VL domain
gacatccagatgacccagtctccatcctccctgtctgcatctgtaggagacagagtcaccatcacttgccgggcaagtcagagcattagcagctatttaaattggtatcagcagaaaccagggaaagcccctaagctcctgatctatgctgcatccagtttgcaaagtggggtcccatcaaggttcagtggcagtggatctgggacagatttcactctcaccatcagcagtctgcaacctgaagattttgcaacttactactgtcaacagagttacagtacccctaatttcggccctgggaccaaagtggatatcaaa

SEQ ID NO: 9934 - DNA, 336 bp, Artificial Sequence
  Synthetic polynucleotide encoding artificial human antibody VL domain
cagcttgtgctgactcaatcgccctctgtctcagcctccctgggagcctcggtcagactcacctgcactctcaccaatgggcacgatttttacgccgtcgcctggcatcaacagcgtccagggaaggggcctcgatatctgatgaagattaatactgatggcagccactccaggggggccgggatccctgatcgattctcagtctccagctctgggtctgagcactacctcaccgtctccagcctccagtccgaggatgaaggtgactattactgtcagacttgggccaactggaacacctggatattcggcgggggaaccaaattgaccgtccta

SEQ ID NO: 9935 - DNA, 321 bp, Artificial Sequence
  Synthetic polynucleotide encoding artificial human antibody VL domain
gccatccagatgacccagtctccatcctccctgtctgcatctgtgggagacagagtcaccatcacttgccgggcaagtcaggacattagaagtgatttaggctggtatcagcaaagaccaggggaagcccctaaactcctgatctatgctgcatccactttacaaactggggtcccatcaagattcagcggcagtgggtctggcagatatttcagtcttacaatcagtagcctgcagcctgaagattttgcaacttattactgcctacaggattgcgaataccccctcactttcggcggagggaccaaggtggagatcaaa

SEQ ID NO: 9936 - DNA, 333 bp, Artificial Sequence
  Synthetic polynucleotide encoding artificial human antibody VL domain
cagcttgtgttgactcagtcgccctctgcctctgcctccctgggaggctcggtcaaactcacgtgcactctgaacagtgggcgcaccaggtacgccatcgcttggcttcagcaacaaccagagaagggccctcggttcctgatgaaacttaacaatgatggccaccacgtcacgggggacgggatccccgatcgcttctcaggctccagttctggggctgagcgctacctcaccatctccagcctccaggctgaggatgaggctgactattactgtctgacgtggggcgctggctttcgagtgttcggcggagggaccaggttgaccgtccta

SEQ ID NO: 9937 - DNA, 318 bp, Artificial Sequence
  Synthetic polynucleotide encoding artificial human antibody VL domain
gaaattgtgttgacacagtctccagccaccctgtctttgtctccaggggaaagagccaccctctcctgcagggccagtcagagtgttagcagctacttagcctggtaccaacagaaacctggccaggctcccaggctcctcatctatgatgcatccaacagggccactggcatcccagccaggttcagtggcagtgggtctgggacagacttcactctcaccatcagcagcctagagcctgaagattttggagtttatttctgtcagcagcgtgtcagctggcccactttcggccctgggaccaaagtggatatcaaa

SEQ ID NO: 9938 - DNA, 321 bp, Artificial Sequence
  Synthetic polynucleotide encoding artificial human antibody VL domain
gaaatagtgatgacgcagtctccagccaccctgtctgtgtctccaggggaaagagccaccctctcctgcagggccagtcagagtgttagtagcaagttagcctggtaccagcagaaacctggccaggctcccaggctcctcatctctggtgcatccaccagggccactggtatcccaggcacgttcagtggcagtgggtctgggacagagttcactctcaccatcagcagcctgcagtctgaagattttgcagtttattactgtcagcagtataatggctggccgtacacttttggccaggggaccaagctggagatcaaa

SEQ ID NO: 9939 - DNA, 333 bp, Artificial Sequence
  Synthetic polynucleotide encoding artificial human antibody VL domain
cagcttgtgctgactcaatcgcccgctgcctctgcctccctgggagcctcggtcaagcttacctgcactctgagcagtgggcacagcggctacgacatcgcatggcatcagcaacagccaggcaagggccctcgattcttgatgaaggttacccattataacacccacatcaagggggacgacatccctgatcgcttctcaggctccagctctggggctgagcgctacctcaccatctccagcctccggtctgaggatgaggctgactattactgtcagacctgggacacaggcattcgggtgttcggcggagggaccaaggtgaccgtccta

SEQ ID NO: 9940 - DNA, 324 bp, Artificial Sequence
  Synthetic polynucleotide encoding artificial human antibody VL domain
tcctatgtactgactcagccaccctcagtgtcagtggccccaggaaagacggccaagattacctgtgggggcaacaacattggaaataaagatgtgcactggtatcagcagaagccaggccaggcccctgtggtagtcttctattatgatggcgaccggccctcagtgatccctgagcgattctctgcttccaactctggcaacacggccaccctgaccatcagcggggtcgaggccggggatgaggccgactattactgtcaggtgtgggatagtaataatgatcatcaggtgttcggcggagggaccaagctgaccgtccta

SEQ ID NO: 9941 - DNA, 330 bp, Artificial Sequence
  Synthetic polynucleotide encoding artificial human antibody VL domain
cagtctgcactgactcagccaccctcagcgtctgggacccccgggcagagggtcaccatctcttgttctgggggcacctccaagatcggacgtaatcatgtgtattggtaccaacaactcccaggaacggcccccaaactcctcatctacaagactattcagcggccctcaggggtccctgaccggttctctggttccaggtctgacacctcagcctccctggccatcagtgggctccggtccgaggatgaggctcattatcactgtgcaacatgggatgacagcctgagtcgtcccgtgttcggcggagggaccagactgaccgtccta

SEQ ID NO: 9942 - DNA, 339 bp, Artificial Sequence
  Synthetic polynucleotide encoding artificial human antibody VL domain
gacatcgtgatgacccagtctccagactccctggctgtgtctctgggcgagagggccaccatcaactgcaagtccagccagagtgttttatacagctccaacaataagaactacttagcttggtaccagcagaaaccaggacagcctcctaagctgctcatttactgggcatctacccgggaatccggggtccctgaccgattcagtggcagcgggtctgggacagatttcactctcaccatcagcagcctgcaggctgaagatgtggcagtttattactgtcagcaatattatagtactccgatcaccttcggccaagggacacgactggagattaaa

SEQ ID NO: 9943 - DNA, 321 bp, Artificial Sequence
  Synthetic polynucleotide encoding artificial human antibody VL domain
gaaatagtgatgacgcagtctccagccaccctgtctgtgtctccaggggaaagagccaccctctcctgcagggccagtcagagtattagcagcaccttagcctggtaccagcagaaacctggccaggctcccaggctcctcatctatggtgcatccgccagggcccctggtatcccagccaggttcagtggcagtgggtctgggacagagttcactctcaccatcagcagcctgcagtctgaagattttgcaatttattactgtcagcagtataaaaactggcctcagacgttcggccaagggaccaaggtggaaatcaaa

SEQ ID NO: 9944 - DNA, 333 bp, Artificial Sequence
  Synthetic polynucleotide encoding artificial human antibody VL domain
gatgttgtgatgactcagtctccactctccctgcccgtcacccttggacagccggcctccatctcctgcaggtctagtcaaagcctcgtatacagagatggagacacctacttgaattggtttcagcagaggccaggccaatctccaaggcgcctaatttataaggtttctaaccgggactctggggtcccagacagattcagcggcagtgggtcaggcactgatttcacgctgaaaatcagcagggtggaggctgaggatgttggggtttattactgcatgcaaggtacacactggcggacttttggccaggggaccaagctggagatcaaa

SEQ ID NO: 9945 - DNA, 324 bp, Artificial Sequence; identical to SEQ ID NO: 9250
  Synthetic polynucleotide encoding artificial human antibody VL domain

SEQ ID NO: 9946 - DNA, 324 bp, Artificial Sequence
  Synthetic polynucleotide encoding artificial human antibody VL domain
gaaattgtgttgacgcagtctccaggcaccctgtctttgtctccaggggaaagagccaccctctcctgcagggccagtcagagtgttagcagcaactacttagcctggtaccagcagaaacctggccaggctcccaggctcctcatctatggtgcatccagcagggccactggcatcccagacaggttcagtggcagtgggtctgggacagacttcactctcaccatcagcagactggagcctgaagattttgcagtgtattactgtcagcagtatggtagctcacctcgaacgttcggccaagggaccaaggtggaaatcaaa

SEQ ID NO: 9947 - DNA, 321 bp, Artificial Sequence
  Synthetic polynucleotide encoding artificial human antibody VL domain
gacatccagatgacccagtctccatcctccctgtctgcatctgtaggagacagagtcaccatcacatgccgggcaagtcagagcattagcaacaatttaaattggtatcaccagaaaccagggaaagcccctaagctcctgatctatgctgcatccagtttgcaaggtggggtcccatcaaggttcagtggcagtggatctgggacagatttcactctcaccatcagcagtctgcaacctgaagattttgcaacttactactgtcaacagagttacagtacccctcgaacgttcggccaagggaccaagttggaaatcaaa

SEQ ID NO: 9948 - DNA, 330 bp, Artificial Sequence
  Synthetic polynucleotide encoding artificial human antibody VL domain
cagtctgccctgactcagcctgcctccgtgtctgggtctcctggacagtcgatcaccatctcctgcactggaaccagcagtgacgttggtggttataactatgtctcctggtaccaacaacacccaggcaaagcccccaaactcatgatttatgatgtcagtaatcggccctcaggggtttctaatcgcttctctggctccaagtctggcaacacggcctccctgaccatctctgggctccaggctgaggacgaggctgattattactgcagctcatatacaagcagcagcactctggtattcggcggagggaccaagctgaccgtccta

SEQ ID NO: 9949 - DNA, 336 bp, Artificial Sequence
  Synthetic polynucleotide encoding artificial human antibody VL domain
gatattgtgatgactcagtctccgctctccctgcccgtcatccctggagagccggcctccatctcctgcaggtctagtcagagcctcctgcatagtaatggatacaactatttggattggtacctgcaaaagccagggcagtctccacaggtcctgatctatttgggttctaatcgggcctccggggtccctgacaggttcagtggcagtggatcaggcacagattttacactgaaaatcagcagagtggaggctgaggatgttggggtttattactgcatgcaagctctacaaactccgtggacgttcggccaagggaccaaggtggaaatcaaa

SEQ ID NO: 9950 - DNA, 324 bp, Artificial Sequence
  Synthetic polynucleotide encoding artificial human antibody VL domain
gaaatagtgatgacgcagtctccagccaccctgtctgtgtccccaggggaaggagccaccctctcctgtagggccggtcagagtgttaacagtaacttagcctggtaccagcagaaacctggccaggctcccaggctcctcatctatggtgcatccaccagggccactggtatcccagccaggttcagtggcagtgggtttgggacagagttcactctaaccatcaacagcctgcagtctgaagattttgcagtgtattactgtcagcagtataatcactggcccttgatcaccttcggccaagggacacgactggagattaaa

SEQ ID NO: 9951 - DNA, 339 bp, Artificial Sequence
  Synthetic polynucleotide encoding artificial human antibody VL domain
gacatcgtgatgacccagtctccagactccttggctgtgtctctgggcgagggggccaccatcagctgcaagtccagccagaatgtttttttccagtccaacaataagaactacttagcttggtaccagcagaaaccaagacagcctcctaaactgctcatttattcggcatctacccgggcatccggggtccctgaccgattcagtggcagcgggtctgggacagatttcactctcaccatcagcagcctgcaacctgaagatgtggcagtttattactgtcagcaatattatgctactcctccaacgttcggccaagggaccaaggtggaaatcaaa

SEQ ID NO: 9952 - DNA, 330 bp, Artificial Sequence
  Synthetic polynucleotide encoding artificial human antibody VL domain
caggcagggctgactcagccaccctcggtgtcccagggcttgagacagaccgccacactcacctgcactgggaacaacaacaatgttggcaaccaaggagcagcctggctgcagcagcgccagggccaccctcccaaactactatcgtacaggaataacaaccggcccccagagatctcagagagattctctgcatccaggtcaggaaacacagtctccctgaccattactggtctccagcctgaggacgaggctgactattactgctcagcgtgggacagcactctcagtgtttgggtgttcggcggggggaccaagctgaccgtccta

SEQ ID NO: 9953 - DNA, 330 bp, Artificial Sequence
  Synthetic polynucleotide encoding artificial human antibody VL domain
cagtctgtgttgacgcagccgccctcagtgtctgcggcccctggacagaaggtcaccatctcctgctctggaatcagttccagtattgggaataattatgtctcctggtaccagcaactcccaggaacagcccccaaactcctcatttatgacaatgatcaacgaccctcagatattcctgaccgattctctggctcccggtctggcacgtcggccaccctgggcatcagcggactccagactggggacgaggccgattattactgcgcaacatgggatactagcctgagttctggttggttcggcggagggaccagggtgaccgtccta

SEQ ID NO: 9954 - DNA, 318 bp, Artificial Sequence
  Synthetic polynucleotide encoding artificial human antibody VL domain
tcctatgagctgacacagccatcctcagtgtcagtgtctccgggacagacagccaggatcacctgctcaggagatgtactggcaaaaaaatatgctcggtggttccagcagaagccaggccaggcccctgtgctggtgatttataaagacagtgagcggccctcagggatccctgagcgattctccggctccagctcagggaccacagtcaccttgaccatcagcggggcccaggttgaggatgaggctgactattactgttactctgcggctgacaacaatcgggtgttcggcggagggaccaagctgaccgtccta

SEQ ID NO: 9955 - DNA, 321 bp, Artificial Sequence; identical to SEQ ID NO: 9149
  Synthetic polynucleotide encoding artificial human antibody VL domain

SEQ ID NO: 9956 - DNA, 324 bp, Artificial Sequence
  Synthetic polynucleotide encoding artificial human antibody VL domain
gaaatagtgatgacgcagtttccagccaccctgtctgtgtctccgggggaaggagccaccctctcctgcagggccgatcagagtgtccgatccaatttggcctggtatcagcacaaacctggccaggctcccagcctcctcatctatgatgcatctatccgggccagtggtgtcccagccaggttcagtggcagagggtctggcacagagttcactctcagcatcagcagcctgcagtctgaagattctgcagtttattactgtcagcagtatgataactggcctcccgttacgttcggccaggggaccagggtggaaatcaaa

SEQ ID NO: 9957 - DNA, 339 bp, Artificial Sequence
  Synthetic polynucleotide encoding artificial human antibody VL domain
gacatcgttctgacccagtctccagactccctggctgtgtctctgggcgagagggccaccatcaactgcaagtccagtcacagtcttttttatacctccgagaataccaactacttagcttggtaccagcagaagccaggacagcctcctaatatgatcatttcctgggcttctgcccgggaatccggggtccctgaccgattcactggcagcgggtctgggacagatttcactctcaccatcaccagcctgcagcctgaagatgtggcagtttattactgtcagcagttttatgccactcctccgacttttggccaggggaccaaactgcagatcaaa

SEQ ID NO: 9958 - DNA, 327 bp, Artificial Sequence
  Synthetic polynucleotide encoding artificial human antibody VL domain
tcctatgtgctgactcagccaccctcggtgtcagtggccccaggaaagacggccaggattacctgtgggggaaacaacattggaagtaaaagtgtgcactggtaccagcagaagccaggccaggcccctgtgctggtcgtctatgatgatagcgaccggccctcagggatccctgagcgattctctggctccaactctgggaacacggccaccctgaccatcagcagggtcgaagccggggatgaggccgactattactgtcaggtgtgggatagtagtagtgatcatcatgtggtattcggcggagggaccaagctgaccgtccta

SEQ ID NO: 9959 - DNA, 318 bp, Artificial Sequence
  Synthetic polynucleotide encoding artificial human antibody VL domain
gacatccagatgacccagtctccttccaccctgtctgcatctgtaggagacagagtcaccatcacttgccgggccagtcagagtattagtagctggttggcctggtatcagcagaaaccagggaaagcccctaacctcctgatctataaggcgtctagtttagaaagtggggtcccatcaaggttcagcggcagtggatccgggacagaattcactctcaccatcaacagcctgcagcctgatgattttgcaacttattactgccaacagtataatagttattggacgttcggccaagggaccaaggtggaaatcaaa

SEQ ID NO: 9960 - DNA, 321 bp, Artificial Sequence
  Synthetic polynucleotide encoding artificial human antibody VL domain
gacatccagatgacccagtctccatccacagtgtctgcatctgtgggagacacagtcaccatcacatgtcgggcgagtcaggatattagtagttggctagcctggtatcaggtgaaaccggagacagcccctaagtccctgatctacggtgcattcggtttgcaacgtggggtcccatcaaggttcagcggcagtggatctggggcagaatttactctcaccatcaccagcctgcagcccgaagattttgcgacttattattgtcaacagtatagtacttatcctctcactttcggcggagggaccaaggtggagctcaaa

SEQ ID NO: 9961 - DNA, 333 bp, Artificial Sequence
  Synthetic polynucleotide encoding artificial human antibody VL domain
cagtctgtactgacgcagccgccctcagtgtctggggccccagggcagacggtcaccatctcctgcaccgggggctcctccaatctcggggaaggatatgatgtccattggtaccagcagcttcccggaacagcccccaaactcatcatctatgcctcccgcgatcggccctcaggggtccctgatcgattctctggctccaagtctggcacctcagcctccctggccatcacagggctccagactgaggatgaggctgactattactgccagtcctatgacatcgtgagagatcagatggtgtttggcggggggaccgcgctgaccgtccta

SEQ ID NO: 9962 - DNA, 330 bp, Artificial Sequence
  Synthetic polynucleotide encoding artificial human antibody VL domain
cagtctgccctgactcagcctgcctccgtgtctgggtctcctggacagtcgatcaccatctcctgcactggaaccagcagtgacgttggtggttataactatgtctcctggtaccaacacctcccaggcaaagcccccaaactcatgatttatgatgtcagtaatcggccctcaggggtttctaatcgcttctctggctccaagtctggcaacacggcctccctgaccatctctgggctccaggctggggacgaggctgattattactgcagctcatatacaaccagcaccacttatgtcttcgggacggggaccagggtcaccgtccta

SEQ ID NO: 9963 - DNA, 330 bp, Artificial Sequence
  Synthetic polynucleotide encoding artificial human antibody VL domain
caggctgtggtgactcaggagccctcattgactgtgtccccaggagggacagtcactctcacctgtggctccaccactggagatgtcaccattggtcattacccctactggttccagcagaagcctggccaagtccccagggcactgatttatgatacaaacatcagatattcctggacacctgcccgattctcaggctccctccttgggggcaaagctgccctgaccctctcgagtgcgcagcctgaggatgaggctgactattactgcttgctctactgtggtgattctcagcaggtttttggcggagggaccaaactgaccgtccta

SEQ ID NO: 9964 - DNA, 330 bp, Artificial Sequence
  Synthetic polynucleotide encoding artificial human antibody VL domain
cagtctgtgctgacgcagccgccctcagtgtctggggccccagggcagagggtcaccatctcctgcactgggagcagctccaacatcggggcaggttatgatatacactggtaccagcaacttccaggaacagcccccaaactcctcatctatggtgacaccaatcggccctcaggggtccctgaccgattctctggctccaagtctggcacctcagcctccctggccatctctgggctccaggctgaggatgaggctgattattactgccagtcctatgacagcagcctgaatgctctgttcggcggagggaccaagctcaccgtccta

SEQ ID NO: 9965 - DNA, 333 bp, Artificial Sequence
  Synthetic polynucleotide encoding artificial human antibody VL domain
cagtctgtgctgacgcagccgccctcagtgtctggggccccaggacagagggtcaccgtctcctgcactggacacagctccaacatcgggggaggttatgatgtacactggtaccaacaacttccaggaactgcccccagactcctcatctttggtaactccaatcggccctcaggtgtccctgaccgatttgtcggctccaagtctggcgcctcagcctccctggccatcgctgggctccaggaagaagatgaggctgattattattgccagtcctatgacgccggcctgagtgctgttgttttcggcggagggaccaaggtgaccgtccta

SEQ ID NO: 9966 - DNA, 330 bp, Artificial Sequence
  Synthetic polynucleotide encoding artificial human antibody VL domain
cagactgtggtgacccaggagccatcgttctcagtgtcccctggagggacagtcacactcacttgtggcttgagctctggctcagtctctactagttactaccccagctggtaccagcagaccccaggccaggctccacgcacgctcatgtacagcacaaacactcgctcttctggggtccctgatcgcttctctggctccatccttgggaacaaagctgccctcaccatcacgggggcccaggcagatgatgaatctgattattactgtgtgctgtatatgggtagtggcatttgggtgttcggcggagggaccaagctgaccgtccta

SEQ ID NO: 9967 - DNA, 321 bp, Artificial Sequence
  Synthetic polynucleotide encoding artificial human antibody VL domain
tcctatgaggtgactcagccagcctcagtgtccgtgtccccggggcagacagccaccatcacctgctctggacagaaattggaggataaatatgtttgttggtatcagcagaagccaggccagtcccctgttctggtcatctatgaagataagaagcggccctcagggatccctgagcgattctctggctccaacactgggaacacagccactctgaccatcagtgggacccaggctatggatgcggctgactattactgtcaggtgtgggacaccaacactcttagggtgttcggcggagggaccaggctgaccgtccta

SEQ ID NO: 9968 - DNA, 333 bp, Artificial Sequence
  Synthetic polynucleotide encoding artificial human antibody VL domain
cagcttttgctgactcaatcgccctctgcctctgcctccctgggagcctcggtcaaactcacctgcactctgagcagtgggcacagcaggtacgccatcgcgtggcatcagcaacaggcagagaagcgccctcgcttcttgatgaaacttaacaatgatggccaccacatcaagggggccgggatccctgatcgcttctcaggctccagttctggggctgagcgctacctcaccatctccagcctgcagtctgaagatgaggctgtctattattgtcaaacttggggctctggcattcgagtgttcggcggggggaccaaggtgaccgtccta

SEQ ID NO: 9969 - DNA, 321 bp, Artificial Sequence
  Synthetic polynucleotide encoding artificial human antibody VL domain
gacatccagatgagccagtctccatcctccctgtctgcatctgtaggagacagagtcaccatcacttgccgggcaagtcagaacattgccgtctatgtaaattggtatcagcaaaaaccgaggaaagcccctcaactcctggtctatgctgcgtccaatttgcagactggggtcccctcaaggttcacgggcagcggatcagggacagatttcgctctcaccatcaccagtctgcaacctgacgatgttgcagcttactactgtcaacagagttacagtaccccgtacacttttggccaggggaccaaactggagatcaaa

SEQ ID NO: 9970 - DNA, 321 bp, Artificial Sequence
  Synthetic polynucleotide encoding artificial human antibody VL domain
tcctatgacctgacacagcccccctcggtgtcagtgtccccaggacagacggccaggatcacctgctctggagatgcattgccaaaacaatatgcttattggtaccagcagaagccaggccaggcccctgtgctggtaatatataaagacactaagaggccctcagggatccctgagcgcttctctggctccagctcagggacaacagtcacgttgaccatcagtggagtccaggcagaagacgaggctgactattactgtcaatcaggagacagcagtgttacttatgtcttcgggactgggaccaaggtcaccgtccta

SEQ ID NO: 9971 - DNA, 324 bp, Artificial Sequence
  Synthetic polynucleotide encoding artificial human antibody VL domain
gaaattgtgttgacgcagtccccggccaccatgtccttgtctccgggggacagagccaccctctcctgcgaggccagtgagaccattgacaggggcttcttagcctggtaccaacacaagtctggcctggcgcccaggctcctcatctatgatgcaacgaacacggcctctggcatcccagacagattcactggcagtgggtctggaacagacttcactctcaccatcagtaggctggagcctgatgattttgcagtatattactgtcagcaatatggtacctcaccaattaccttcggcccggggacacgagtggagattaaa

SEQ ID NO: 9972 - DNA, 327 bp, Artificial Sequence
  Synthetic polynucleotide encoding artificial human antibody VL domain
caggctgtagtgactcaggaccccgcactgactgtgtccccaggagggacagtcactctcgcctgtgcctccagtactggaagtgtcaccaggtggcgttatccctactggttccagcagaagcctggccaggcccccaccacattaatctatgatacagacaacaaaaagtcctggataccagcccgcttttcaggctccctcattgggggcaaggctgccctgaccctttcgggcgcgcagcctgaagatgaggctgactatttctgctcgctctggtatgatggtgttcgagtgttcggcggagggaccaagttgaccgtccta

SEQ ID NO: 9973 - DNA, 324 bp, Artificial Sequence
  Synthetic polynucleotide encoding artificial human antibody VL domain
gaaattgtgttgacgcagtctccaggcaccctgtctttgtctccaggggaaagagccaccctctcctgcagggccagtcagagtgttagcagcagctacttagcctggtaccagcagaatcctggccaggctcccaggctcctcatctatggtgcatccagcagggccattggcatcccagacaggttcagtggcagtgggtctgggacagacttcactctcaccatcagcagactggagcctgaagattttgcagtgtattactgtcagcagtatggtagctcctcgatcaccttcggccaagggacacgactggagattaaa

SEQ ID NO: 9974 - DNA, 321 bp, Artificial Sequence
  Synthetic polynucleotide encoding artificial human antibody VL domain
gacatccagatgacccagtctccttccaccctgtctgcatctgtaggagacagagtcaccatcacttgccgggccagtcagagtattagtagctggttggcctggtatcagcagaaaccagggaaagcccctaagctcctgatctataaggcgtctagtttagaaagtggggtcccatcaaggttcagcggcagtggatctgggacagaattcactctcaccatcagcagcctgcagcctgatgattttgcaacttattactgccaacagtataatagttatccgctcactttcggcggagggaccaaggtggagatcaaa

SEQ ID NO: 9975 - DNA, 339 bp, Artificial Sequence
  Synthetic polynucleotide encoding artificial human antibody VL domain
gacatcgtgatgacccagtctccagactccctggctgtgtctctgggcgagagggccaccatcaactgcaagtccagccagagtgttttatacagctccaacaataagaactacttagcttggtaccagcagaaaccaggacagcctcctaagctgctcatttactgggcatctacccgggaatccggggtccctgaccgattcagtggcagcgggtctgggacagatttcactctcaccatcagcagcctgcaggctgaagatgtggcagtttattactgtcagcaatattatagtactcctcgcacttttggccaggggaccaagctggagatcaaa

SEQ ID NO: 9976 - DNA, 333 bp, Artificial Sequence
  Synthetic polynucleotide encoding artificial human antibody VL domain
cagtctgtgctgactcagccaccctcagcgtctgggacccccgggcagagggtcaccatctcttgttctggaagcagctccaacatcggaagtaattatgtatactggtaccagcagctcccaggaacggcccccaaactcctcatctatagtaataatcagcggccctcaggggtccctgaccgattctctggctccaagtctggcacctcagcctccctggccatcagtgggctccggtccgaggatgaggctgattattactgtgcagcatgggatgacagcctgagtgctctttatgtcttcggaactgggaccaaggtcaccgtccta

SEQ ID NO: 9977 - DNA, 321 bp, Artificial Sequence
  Synthetic polynucleotide encoding artificial human antibody VL domain
gacatccaggtgacccagtctccatcctccctgtctgcatctgtgggagacagagtcaccatcacttgccgggcaagccgaaatattaatagttatttaaattggtttcagcagaaaccaggaaaggcccctaagctcctgatctatgctgggtccagtttgataagtggggtcccatcaaggttcagtggcagtggatctgggacagatttcactctcaccatcggcagtctgcaacctgaagattctgcaacttattactgtcaacagatttacagtacccttcggaccttcggccaagggaccaaggtggaaatcaaa

SEQ ID NO: 9978 - DNA, 327 bp, Artificial Sequence
  Synthetic polynucleotide encoding artificial human antibody VL domain
tcctatgtgctgactcagccaccctcggcgtcagtggccccaggtcagacggccaggcttacctgtggggcagtcggtattggagccaaaagggtccagtggtaccaacagaggccaggccaggcccctcacctggtcgtctttgatgatagtgaccggccctcagggatccctgagcgattcactggctccaagtctgggaacacggccaccctgaccatcaccagggtcgaagccggggatgaggccgactattactgtcaggtttgggatagtactactgatcataacgtggtcttcggcggagggaccaagctggccgtccta

SEQ ID NO: 9979 - DNA, 333 bp, Artificial Sequence
  Synthetic polynucleotide encoding artificial human antibody VL domain
cagtctatactgacgcagccgccctcagtgtctggggccccagggcagaaggtcaccatctcctgcactgggagcagctccaacatcgggtcaaattatgatgtgaattggtaccagctccttccaggaagagcccccaaactcctcatctatcgtgacgtcagtcggccctcaggagtccctgaccgattctctggctccaagtctggcacctcagcctccctggccatcactgggctccaggctgaggatgaggctgattattactgccagtcttatgacatcagcctgagaggttcggtgtttggcggagggaccaagctgaccgtccta

SEQ ID NO: 9980 - DNA, 321 bp, Artificial Sequence
  Synthetic polynucleotide encoding artificial human antibody VL domain
gacatccagttgacccagtctccatccttcctgtctgcatctgtaggagacagagtcaccatcacttgccgggccagtcagggcattagcagttatttagcctggtatcagcaaaaaccagggaaagcccctaagctcctgatctatgctgcatccactttgcaaagtggggtcccatcaaggttcagcggcagtggatctgggacagaattcactctcacaatcagcagcctgcagcctgaagattttgcaacttattactgtcaacagcttaatagttaccctcagacgttcggccaagggaccaaggtggaaatcaaa

SEQ ID NO: 9981 - DNA, 339 bp, Artificial Sequence
  Synthetic polynucleotide encoding artificial human antibody VL domain
gacatcgtgatgacccagtctcccgacgccctggctgtgcctctgggcgagagggtcaccatcaactgcaagtccagccagactatcttatccccctcctacaataagtattatctggcttggtaccaaaagaagtcagggcagcctccgagattgctcatttactgggcgtctacccgggagttcgacgtccctggccgcttcagtggcggcgggtccgagacagagttcactctcactatcgacaacctgcaggctgaagatgcggcattttatttctgtcagcaatattatactaccccatacacctttggccaggggaccaaggtggagatcaaa

SEQ ID NO: 9982 - DNA, 336 bp, Artificial Sequence
  Synthetic polynucleotide encoding artificial human antibody VL domain
cagtctgccctgactcagcctccctccgcgtccgggtctcctggacagtcagtcaccatctcctgcactggaaccagcggtgacgttggtacttataactatgtctcctggtaccaacaacacccaggcaaagcccccaaactcataatctatgaggtcagtaagcggccctcaggggtccctgttcgcttctctggctccaagtctggcaacacggcctccctgaccgtctctgggctccaggctgaggatgaggctgattattactgcagctcatatgcaggcaacagcaagcataattatgtcttcggaactgggaccaaggtcaccgtccta

SEQ ID NO: 9983 - DNA, 333 bp, Artificial Sequence
  Synthetic polynucleotide encoding artificial human antibody VL domain
cagtctgtgctgactcagccaccctcagcgtctgggacccccgggcagagggtcaccatctcttgttctggaagcacctccaacatcgggagtaatactgtaacctggtaccagcagctcccaggaacggcccccagactcctcatctatagtgatgatcagcggccctcaggggtccctgaccggttctctgcctccaggtctggcacctcagcctccctggccatcagtgggctccagtctgaggatgaggctgattattattgtgcagcctgggatgacagcctggatggtcattgggtgttcggcggagggaccaagttgaccgtccta

SEQ ID NO: 9984 - DNA, 321 bp, Artificial Sequence
  Synthetic polynucleotide encoding artificial human antibody VL domain
gaaattgtgttgacacagtctccagccaccctgtctgtgtctccaggggaaagagccaccctctcctgcagggccagtcagagtgttaggagcttcttagcctggtaccaacagaaacctggccaggctcccaggctcctcatctctgatgcatccaacagggccactggcatcccagccaggttccgtggcagtgggtctgggacagacttcactctcaccatcagcagcctagagcctgaagattttgcagtttattactgtcagcagcgtagcaactggcctttcactttcggccctgggaccaaagtggatatcaaa

SEQ ID NO: 9985 - DNA, 333 bp, Artificial Sequence
  Synthetic polynucleotide encoding artificial human antibody VL domain
cagtctgtgctgacgcagccgccctcagtgtctggggccccagggcagagtgtcaccatctcctgcgctgggagcagctccaacatcggggcaccttatgatgtacactggtaccagcagtttccaggaacagcccccaaactcctcatccatgataactacaatcggccctcaggggtccctgaccgattctctggctccaggtctggcacctcagcctccctggccatcactgggctccaggctgaggatgaggctgattattactgccagtcctatgacagcagcctgagtggttatgtcttcggaattgggaccaaggtcaccgtccta

SEQ ID NO: 9986 - DNA, 327 bp, Artificial Sequence
  Synthetic polynucleotide encoding artificial human antibody VL domain
caggctgtggtgactcaggagccctcactgactgtgtccccaggagggacagtcactctcacctgtggctccagcactggagctgtcaccagtggtcattatccctactggttccagcaaaagcctggccaagcccccaggacgctgatttatgaaacaagcaataaatactcctggacacctgcccggttctcaggcttcctccttgggggccaagctgccctgaccctttcgggtgcgcagtctgaggatgaggctgagtattactgtttgctctcctatagtggtgcttcagtgttcggcggagggaccaagctgaccgtctta

SEQ ID NO: 9987 - DNA, 330 bp, Artificial Sequence; identical to SEQ ID NO: 9267
  Synthetic polynucleotide encoding artificial human antibody VL domain

SEQ ID NO: 9988 - DNA, 330 bp, Artificial Sequence
  Synthetic polynucleotide encoding artificial human antibody VL domain
cagtctgccctgactcagcctgcctccgtgtctgggtctcctggacagtcgatcaccatctcctacactggaaccagcagtgacgttggtggttataactatgtctcctggtaccaacaacacccaggcaaagcccccaaactcatgatttgtgatgtcagtaagcggccctcaggggtttctaatcgcttctctggctccaagtctggcaacacggcctccctgaccatctctgggctccaggctgaggacgaggctgattattactgcagctcatatacaagcagcagcactcaggtcttcggaactgggaccaaggtcaccgtccta

SEQ ID NO: 9989 - DNA, 315 bp, Artificial Sequence
  Synthetic polynucleotide encoding artificial human antibody VL domain
tcctatgagctgactcagccaccctcagtgtccgtgtccccaggacagacagccagcatcacctgctctggagataaattgggggataaatatgcttgctggtatcagcagaagccaggccagtcccctgtgctggtcatctatcaagatagcaagcggccctcagggatccctgagcgattctctggctccaactctgggaacacagccactctgaccatcagcgggacccaggctatggatgaggctgactattactgtcaggcgtgggacagcagcgtggtattcggcggagggaccaagctgaccgtccta

SEQ ID NO: 9990 - DNA, 324 bp, Artificial Sequence; identical to SEQ ID NO: 9459
  Synthetic polynucleotide encoding artificial human antibody VL domain

SEQ ID NO: 9991 - DNA, 330 bp, Artificial Sequence
  Synthetic polynucleotide encoding artificial human antibody VL domain
cagtctgtgttgacgcagccgccttcagtgtctgcggccccaggacagaaggtcaccatctcctgctctggaagcacctccaatattggcgataattggatttcctggtaccaacaattcccagacacagtccccaaactcatcatttatgacgatagcaagcgagtctcagggattcctgaccgattttcgggctccaggtctggcacgtcagtcaccctggccatcaccggactccagactggagacgaggccgattattactgttcatcatgggatagtggcctgagtgctgtggtcttcggcggagggaccaggctgaccgtccta

SEQ ID NO: 9992 - DNA, 330 bp, Artificial Sequence
  Synthetic polynucleotide encoding artificial human antibody VL domain
cagtctgcactgactcagccaccctcagcgtctgggacccccgggcagagggtcatcatctcttgttctgaaggcacgtccaagatcggacgtaatcatgtgtactggtaccagcagctcccaggaacggcccccaaactcctcatctataagactattcagcgaccctcaggggtccctgaccggttctctggttccaagtctgacacctcagcctccctggccatcagtgggctccggtccgaggatgaggctgattatcactgtgcaacatgggatgacggcctgagtcgtcccgtgttcggcggagggaccaggctgaccgtccta

SEQ ID NO: 9993 - DNA, 327 bp, Artificial Sequence
  Synthetic polynucleotide encoding artificial human antibody VL domain
gaaattgtgttgacgcagttcccaggctccctgtccttgtccccaggggaaagtgccaccctcttctgcagggccagtcagactgtttatttcaggtacttagcctggtaccagcagaagcctggccagcctcccagactcctcatctatggaggatccaatagggccactggcatcccagacaggatcagcggcagtaggtctgggacagacttcactctcaccatcagcagactggagcctgaagattctgcggtgtattactgtcagcaatttggtaactcgcctctgtacacttttggccaggggaccaaagtggagatcaaa

SEQ ID NO: 9994 - DNA, 330 bp, Artificial Sequence
  Synthetic polynucleotide encoding artificial human antibody VL domain
cagtctgtggtgactcagccaccctcagtgtctgggacccccggacagagcgtcaccatctcttgttctggatccgggtccaacatcggaggtcataaggttgactggtaccagcatctcccagggacggcccccaagctcatcatctatgatgattctttgcgccactcaggggcccctgaccgattctctggctccaagtctggctcctcagcctccctggtcatcaatgggctccagtctgtggatgagggagactattactgtttaacatgggattacagtctgaatgctcgagtcttcggcggagggaccaggctgaccgtccta

SEQ ID NO: 9995 - DNA, 327 bp, Artificial Sequence
  Synthetic polynucleotide encoding artificial human antibody VL domain
tcctatgacctgacacagccaccctcgctgtcggtgtcccccggacagacggccaggatcacctgttctggagacgatttgtcaaagaactatgcttactggtaccagcagaggccaggccaggcccctatgttggtgatacataaggacagtgagaggccctcagggatccctgagcgattctctggctccagttcagggacaatagccacgttgaccatcagtggagtccaggcagaagacgaggctgactattactgtcaatcagtagtcaaagatgttaccccctatgtgatcttcggcggagggaccaaactgaccgtccta

SEQ ID NO: 9996 - DNA, 330 bp, Artificial Sequence
  Synthetic polynucleotide encoding artificial human antibody VL domain
cagtctgtgctgactcagccaccctcagcgtctgggacccccgggcagagggtcaccatctcttgttctggaagcagctccaacatcggaagtaattatgtatactggtaccagcagctcccaggaacggcccccaaactcctcatctatagtaataatcagcggccctcaggggtccctgaccgattctctggctccaagtctggcacctcagcctccctggccatcagtgggctccggtccgaggatgaggctgattattactgtgcagcatgggatgacagcctgagtggtccggtgttcggcggagggaccaagctgaccgtccta

SEQ ID NO: 9997 - DNA, 324 bp, Artificial Sequence
  Synthetic polynucleotide encoding artificial human antibody VL domain
gaaatagtgatgacgcagtctccagccaccctgtctgtgtctcctggggaaagagccaccctctcctgcagggccagtcagagtgttagcagtaacttagcctggtaccagcagaaacctggccaggctcccaggctcctcatctatggtgcatccaccagggccactggtgtcccaaccagattcagtggcagtgggtctgggacagagttcactctcaccatcagcagcctgcagtctgaagattttgcactttattactgtcagcagtataataactggcctccgctcactttcggcggagggaccaaggtggagatcaaa

SEQ ID NO: 9998 - DNA, 321 bp, Artificial Sequence
  Synthetic polynucleotide encoding artificial human antibody VL domain
gacatccagatgacccagtctccttccaccctgtctgcatctgtaggagacagagtcaccatcacttgccgggccagtcagagtattagtagctggttggcctggtatcagcagaaaccagggaaagcccctaagctcctgatctataaggcgtctagtttagaaagtggggtcccatcaaggttcagcggcagtggatctgggacagaattcactctcaccatcagcagcctgcagcctgatgattttgcaacttattactgccaacagtataatagttacccttggacgttcggccaagggaccaaggtggaaatcaaa

SEQ ID NO: 9999 - DNA, 324 bp, Artificial Sequence
  Synthetic polynucleotide encoding artificial human antibody VL domain
gacatccagatgacccagtctccatcctccctgtctgcatctgtaggagacagagtcaccatcacttgccgggcaagtcagagcattagcagctatttaaattggtatcagcagaaaccagggaaagcccctaagctcctgatctatgctgcatccagtttgcaaagtggggtcccatcaaggttcagtggcagtggatctgggacagatttcactctcaccatcagcagtctgcaacctgaagattttgcaacttactactgtcaacagagttacagtacccctccgtggacgttcggccaagggaccaaggtggaaatcaaa

SEQ ID NO: 10000 - DNA, 321 bp, Artificial Sequence
  Synthetic polynucleotide encoding artificial human antibody VL domain
gacatccagttgacccagtctccatccttcctgtctgcatctgtaggagacagagtcaccatcacttgccgggccagtcagggcattagcagttatttagcctggtatcagcaaaaaccagggaaagcccctaagctcctgatctatgctgcatccactttgcaaagtggggtcccatcaaggttcagcggcagtggatctgggacagaattcactctcacaatcagcagcctgcagcctgaagattttgcaacttattactgtcaacagcttaatagttacccattcactttcggccctgggaccaaagtggatatcaaa

SEQ ID NO: 10001 - protein, 8 aa, Artificial Sequence
  Synthetic polypeptide representing artificial human antibody CDR-H1 region
GFTFTTYW

SEQ ID NO: 10002 - protein, 10 aa, Artificial Sequence
  Synthetic polypeptide representing artificial human antibody CDR-H1 region
GFSLSNRRMG

SEQ ID NO: 10003 - protein, 10 aa, Artificial Sequence
  Synthetic polypeptide representing artificial human antibody CDR-H1 region
GFSLSNRRMG

SEQ ID NO: 10004 - protein, 10 aa, Artificial Sequence
  Synthetic polypeptide representing artificial human antibody CDR-H1 region
GFSLSNRRMG

SEQ ID NO: 10005 - protein, 10 aa, Artificial Sequence
  Synthetic polypeptide representing artificial human antibody CDR-H1 region
GFSLSNRRMG

SEQ ID NO: 10006 - protein, 10 aa, Artificial Sequence
  Synthetic polypeptide representing artificial human antibody CDR-H1 region
GFSLSNRRMG

SEQ ID NO: 10007 - protein, 10 aa, Artificial Sequence
  Synthetic polypeptide representing artificial human antibody CDR-H1 region
GFSLSNRRMG

SEQ ID NO: 10008 - protein, 8 aa, Artificial Sequence
  Synthetic polypeptide representing artificial human antibody CDR-H1 region
GFTFSSYS

SEQ ID NO: 10009 - protein, 8 aa, Artificial Sequence
  Synthetic polypeptide representing artificial human antibody CDR-H1 region
GFTFSSYS

SEQ ID NO: 10010 - protein, 10 aa, Artificial Sequence
  Synthetic polypeptide representing artificial human antibody CDR-H1 region
GGSLSSSSYY

SEQ ID NO: 10011 - protein, 8 aa, Artificial Sequence
  Synthetic polypeptide representing artificial human antibody CDR-H1 region
EFTVSSNY

SEQ ID NO: 10012 - protein, 8 aa, Artificial Sequence
  Synthetic polypeptide representing artificial human antibody CDR-H1 region
GFTFSSYA

SEQ ID NO: 10013 - protein, 8 aa, Artificial Sequence
  Synthetic polypeptide representing artificial human antibody CDR-H1 region
GFTFSSYA

SEQ ID NO: 10014 - protein, 9 aa, Artificial Sequence
  Synthetic polypeptide representing artificial human antibody CDR-H1 region
GGSISSSNW

SEQ ID NO: 10015 - protein, 10 aa, Artificial Sequence
  Synthetic polypeptide representing artificial human antibody CDR-H1 region
GFSLSTSGVG

SEQ ID NO: 10016 - protein, 8 aa, Artificial Sequence
  Synthetic polypeptide representing artificial human antibody CDR-H1 region
GFAFNNFG

SEQ ID NO: 10017 - protein, 8 aa, Artificial Sequence
  Synthetic polypeptide representing artificial human antibody CDR-H1 region
GYTFTGHY

SEQ ID NO: 10018 - protein, 8 aa, Artificial Sequence
  Synthetic polypeptide representing artificial human antibody CDR-H1 region
GYTFTSYA

SEQ ID NO: 10019 - protein, 8 aa, Artificial Sequence
  Synthetic polypeptide representing artificial human antibody CDR-H1 region
GYTFTDYF

SEQ ID NO: 10020 - protein, 8 aa, Artificial Sequence
  Synthetic polypeptide representing artificial human antibody CDR-H1 region
GFIFDDHG

SEQ ID NO: 10021 - protein, 8 aa, Artificial Sequence
  Synthetic polypeptide representing artificial human antibody CDR-H1 region
GGTFSGFA

SEQ ID NO: 10022 - protein, 8 aa, Artificial Sequence
  Synthetic polypeptide representing artificial human antibody CDR-H1 region
GFSFSNYN

SEQ ID NO: 10023 - protein, 8 aa, Artificial Sequence
  Synthetic polypeptide representing artificial human antibody CDR-H1 region
GYTLTELS

SEQ ID NO: 10024 - protein, 8 aa, Artificial Sequence
  Synthetic polypeptide representing artificial human antibody CDR-H1 region
GYTFTSYA

SEQ ID NO: 10025 - protein, 8 aa, Artificial Sequence
  Synthetic polypeptide representing artificial human antibody CDR-H1 region
GYTLTELS

SEQ ID NO: 10026 - protein, 8 aa, Artificial Sequence
  Synthetic polypeptide representing artificial human antibody CDR-H1 region
GFHFSSYA

SEQ ID NO: 10027 - protein, 8 aa, Artificial Sequence
  Synthetic polypeptide representing artificial human antibody CDR-H1 region
GFTFSNYA

SEQ ID NO: 10028 - protein, 8 aa, Artificial Sequence
  Synthetic polypeptide representing artificial human antibody CDR-H1 region
GFTFSSYA

SEQ ID NO: 10029 - protein, 8 aa, Artificial Sequence
  Synthetic polypeptide representing artificial human antibody CDR-H1 region
GFTFSSYG

SEQ ID NO: 10030 - protein, 8 aa, Artificial Sequence
  Synthetic polypeptide representing artificial human antibody CDR-H1 region
GFTFSRYA

SEQ ID NO: 10031 - protein, 8 aa, Artificial Sequence
  Synthetic polypeptide representing artificial human antibody CDR-H1 region
GYTFTSYD

SEQ ID NO: 10032 - protein, 8 aa, Artificial Sequence
  Synthetic polypeptide representing artificial human antibody CDR-H1 region
GYTFINNR

SEQ ID NO: 10033 - protein, 8 aa, Artificial Sequence
  Synthetic polypeptide representing artificial human antibody CDR-H1 region
GFTFGDFA

SEQ ID NO: 10034 - protein, 8 aa, Artificial Sequence
  Synthetic polypeptide representing artificial human antibody CDR-H1 region
IGSISSHY

SEQ ID NO: 10035 - protein, 8 aa, Artificial Sequence
  Synthetic polypeptide representing artificial human antibody CDR-H1 region
GFTFKKYL

SEQ ID NO: 10036 - protein, 8 aa, Artificial Sequence
  Synthetic polypeptide representing artificial human antibody CDR-H1 region
GFIFDDYA

SEQ ID NO: 10037 - protein, 8 aa, Artificial Sequence
  Synthetic polypeptide representing artificial human antibody CDR-H1 region
GFTFSSYA

SEQ ID NO: 10038 - protein, 8 aa, Artificial Sequence
  Synthetic polypeptide representing artificial human antibody CDR-H1 region
GGTFSSYA

SEQ ID NO: 10039 - protein, 8 aa, Artificial Sequence
  Synthetic polypeptide representing artificial human antibody CDR-H1 region
GYTFTSYD

SEQ ID NO: 10040 - protein, 8 aa, Artificial Sequence
  Synthetic polypeptide representing artificial human antibody CDR-H1 region
GFTFSSYA

SEQ ID NO: 10041 - protein, 8 aa, Artificial Sequence
  Synthetic polypeptide representing artificial human antibody CDR-H1 region
GFTFDDYA

SEQ ID NO: 10042 - protein, 8 aa, Artificial Sequence
  Synthetic polypeptide representing artificial human antibody CDR-H1 region
GFSLGKFW

SEQ ID NO: 10043 - protein, 8 aa, Artificial Sequence
  Synthetic polypeptide representing artificial human antibody CDR-H1 region
GFTFVSFA

SEQ ID NO: 10044 - protein, 8 aa, Artificial Sequence
  Synthetic polypeptide representing artificial human antibody CDR-H1 region
GGSISRYY

SEQ ID NO: 10045 - protein, 10 aa, Artificial Sequence
  Synthetic polypeptide representing artificial human antibody CDR-H1 region
GGSISSSSYY

SEQ ID NO: 10046 - protein, 8 aa, Artificial Sequence
  Synthetic polypeptide representing artificial human antibody CDR-H1 region
GFTFSSYG

SEQ ID NO: 10047 - protein, 8 aa, Artificial Sequence
  Synthetic polypeptide representing artificial human antibody CDR-H1 region
GYRLTEVA

SEQ ID NO: 10048 - protein, 8 aa, Artificial Sequence
  Synthetic polypeptide representing artificial human antibody CDR-H1 region
GFTFGDHA

SEQ ID NO: 10049 - protein, 8 aa, Artificial Sequence
  Synthetic polypeptide representing artificial human antibody CDR-H1 region
GFSFSRYA

SEQ ID NO: 10050 - protein, 8 aa, Artificial Sequence
  Synthetic polypeptide representing artificial human antibody CDR-H1 region
GFTFSTHW

SEQ ID NO: 10051 - protein, 8 aa, Artificial Sequence
  Synthetic polypeptide representing artificial human antibody CDR-H1 region
GFTFRSYW

SEQ ID NO: 10052 - protein, 8 aa, Artificial Sequence
  Synthetic polypeptide representing artificial human antibody CDR-H1 region
GFTFTSSA

SEQ ID NO: 10053 - protein, 8 aa, Artificial Sequence
  Synthetic polypeptide representing artificial human antibody CDR-H1 region
GYSFTTYG

SEQ ID NO: 10054 - protein, 8 aa, Artificial Sequence
  Synthetic polypeptide representing artificial human antibody CDR-H1 region
GFTFSSYS

SEQ ID NO: 10055 - protein, 10 aa, Artificial Sequence
  Synthetic polypeptide representing artificial human antibody CDR-H1 region
GDSVSSNSAA

SEQ ID NO: 10056 - protein, 10 aa, Artificial Sequence
  Synthetic polypeptide representing artificial human antibody CDR-H1 region
GFSLSTSTVG

SEQ ID NO: 10057 - protein, 8 aa, Artificial Sequence
  Synthetic polypeptide representing artificial human antibody CDR-H1 region
GFTFSSYS

SEQ ID NO: 10058 - protein, 8 aa, Artificial Sequence
  Synthetic polypeptide representing artificial human antibody CDR-H1 region
GYTFTGYY

SEQ ID NO: 10059 - protein, 8 aa, Artificial Sequence
  Synthetic polypeptide representing artificial human antibody CDR-H1 region
GFTFSSYG

SEQ ID NO: 10060 - protein, 8 aa, Artificial Sequence
  Synthetic polypeptide representing artificial human antibody CDR-H1 region
GFSISDNY

SEQ ID NO: 10061 - protein, 10 aa, Artificial Sequence
  Synthetic polypeptide representing artificial human antibody CDR-H1 region
GFSLSTSGVG

SEQ ID NO: 10062 - protein, 8 aa, Artificial Sequence
  Synthetic polypeptide representing artificial human antibody CDR-H1 region
GFTFSSYG

SEQ ID NO: 10063 - protein, 8 aa, Artificial Sequence
  Synthetic polypeptide representing artificial human antibody CDR-H1 region
GFTFSSYG

SEQ ID NO: 10064 - protein, 8 aa, Artificial Sequence
  Synthetic polypeptide representing artificial human antibody CDR-H1 region
GFTFSSYS

SEQ ID NO: 10065 - protein, 10 aa, Artificial Sequence
  Synthetic polypeptide representing artificial human antibody CDR-H1 region
GFSLSTSGVG

SEQ ID NO: 10066 - protein, 8 aa, Artificial Sequence
  Synthetic polypeptide representing artificial human antibody CDR-H1 region
GFTFSSYA

SEQ ID NO: 10067 - protein, 8 aa, Artificial Sequence
  Synthetic polypeptide representing artificial human antibody CDR-H1 region
GGSISSFY

SEQ ID NO: 10068 - protein, 8 aa, Artificial Sequence
  Synthetic polypeptide representing artificial human antibody CDR-H1 region
GFTFKTYS

SEQ ID NO: 10069 - protein, 8 aa, Artificial Sequence
  Synthetic polypeptide representing artificial human antibody CDR-H1 region
GFTFSGYG

SEQ ID NO: 10070 - protein, 8 aa, Artificial Sequence
  Synthetic polypeptide representing artificial human antibody CDR-H1 region
GFTFSSYA

SEQ ID NO: 10071 - protein, 8 aa, Artificial Sequence
  Synthetic polypeptide representing artificial human antibody CDR-H1 region
GFAFSGSA

SEQ ID NO: 10072 - protein, 10 aa, Artificial Sequence
  Synthetic polypeptide representing artificial human antibody CDR-H1 region
DGSSSRNYYF

SEQ ID NO: 10073 - protein, 8 aa, Artificial Sequence
  Synthetic polypeptide representing artificial human antibody CDR-H1 region
GFTFDDYA

SEQ ID NO: 10074 - protein, 8 aa, Artificial Sequence
  Synthetic polypeptide representing artificial human antibody CDR-H1 region
GYTFTSYA

SEQ ID NO: 10075 - protein, 8 aa, Artificial Sequence
  Synthetic polypeptide representing artificial human antibody CDR-H1 region
GFNVSNNY

SEQ ID NO: 10076 - protein, 8 aa, Artificial Sequence
  Synthetic polypeptide representing artificial human antibody CDR-H1 region
GFTFSSYS

SEQ ID NO: 10077 - protein, 8 aa, Artificial Sequence
  Synthetic polypeptide representing artificial human antibody CDR-H1 region
GFMFDGYA

SEQ ID NO: 10078 - protein, 8 aa, Artificial Sequence
  Synthetic polypeptide representing artificial human antibody CDR-H1 region
GFTFDDYA

SEQ ID NO: 10079 - protein, 8 aa, Artificial Sequence
  Synthetic polypeptide representing artificial human antibody CDR-H1 region
GFTFSSYS

SEQ ID NO: 10080 - protein, 8 aa, Artificial Sequence
  Synthetic polypeptide representing artificial human antibody CDR-H1 region
GFTFSSYA

SEQ ID NO: 10081 - protein, 8 aa, Artificial Sequence
  Synthetic polypeptide representing artificial human antibody CDR-H1 region
GFTFSSYW

SEQ ID NO: 10082 - protein, 8 aa, Artificial Sequence
  Synthetic polypeptide representing artificial human antibody CDR-H1 region
GYTFTSYD

SEQ ID NO: 10083 - protein, 8 aa, Artificial Sequence
  Synthetic polypeptide representing artificial human antibody CDR-H1 region
GFTFSSYA

SEQ ID NO: 10084 - protein, 10 aa, Artificial Sequence
  Synthetic polypeptide representing artificial human antibody CDR-H1 region
GFSLSTSGMC

SEQ ID NO: 10085 - protein, 8 aa, Artificial Sequence
  Synthetic polypeptide representing artificial human antibody CDR-H1 region
GFTFSSYG

SEQ ID NO: 10086 - protein, 8 aa, Artificial Sequence
  Synthetic polypeptide representing artificial human antibody CDR-H1 region
GYTFTSYY

SEQ ID NO: 10087 - protein, 8 aa, Artificial Sequence
  Synthetic polypeptide representing artificial human antibody CDR-H1 region
GFTFSNFW

SEQ ID NO: 10088 - protein, 8 aa, Artificial Sequence
  Synthetic polypeptide representing artificial human antibody CDR-H1 region
GGTFSSYA

SEQ ID NO: 10089 - protein, 8 aa, Artificial Sequence
  Synthetic polypeptide representing artificial human antibody CDR-H1 region
GFTFDDYA

SEQ ID NO: 10090 - protein, 8 aa, Artificial Sequence
  Synthetic polypeptide representing artificial human antibody CDR-H1 region
GFTVSSNY

SEQ ID NO: 10091 - protein, 8 aa, Artificial Sequence
  Synthetic polypeptide representing artificial human antibody CDR-H1 region
RFTFSSHA

SEQ ID NO: 10092 - protein, 8 aa, Artificial Sequence
  Synthetic polypeptide representing artificial human antibody CDR-H1 region
GYSFTDYV

SEQ ID NO: 10093 - protein, 8 aa, Artificial Sequence
  Synthetic polypeptide representing artificial human antibody CDR-H1 region
GYTFSNYV

SEQ ID NO: 10094 - protein, 8 aa, Artificial Sequence
  Synthetic polypeptide representing artificial human antibody CDR-H1 region
GYTFTYRY

SEQ ID NO: 10095 - protein, 8 aa, Artificial Sequence
  Synthetic polypeptide representing artificial human antibody CDR-H1 region
GYTFTSYY

SEQ ID NO: 10096 - protein, 8 aa, Artificial Sequence
  Synthetic polypeptide representing artificial human antibody CDR-H1 region
GFSFGDYG

SEQ ID NO: 10097 - protein, 8 aa, Artificial Sequence
  Synthetic polypeptide representing artificial human antibody CDR-H1 region
GGTFSSYA

SEQ ID NO: 10098 - protein, 8 aa, Artificial Sequence
  Synthetic polypeptide representing artificial human antibody CDR-H1 region
GFTFSSYA

SEQ ID NO: 10099 - protein, 8 aa, Artificial Sequence
  Synthetic polypeptide representing artificial human antibody CDR-H1 region
GFTFSSYW

SEQ ID NO: 10100 - protein, 8 aa, Artificial Sequence
  Synthetic polypeptide representing artificial human antibody CDR-H1 region
GFTFSEYA

SEQ ID NO: 10101 - protein, 8 aa, Artificial Sequence
  Synthetic polypeptide representing artificial human antibody CDR-H1 region
GYTFTSYD

SEQ ID NO: 10102 - protein, 8 aa, Artificial Sequence
  Synthetic polypeptide representing artificial human antibody CDR-H1 region
GFTFSSYA

SEQ ID NO: 10103 - protein, 10 aa, Artificial Sequence
  Synthetic polypeptide representing artificial human antibody CDR-H1 region
YASVSGTTDY

SEQ ID NO: 10104 - protein, 10 aa, Artificial Sequence
  Synthetic polypeptide representing artificial human antibody CDR-H1 region
GDSISSNGYY

SEQ ID NO: 10105 - protein, 8 aa, Artificial Sequence
  Synthetic polypeptide representing artificial human antibody CDR-H1 region
GGTFTSYA

SEQ ID NO: 10106 - protein, 10 aa, Artificial Sequence
  Synthetic polypeptide representing artificial human antibody CDR-H1 region
GGSISSSSYF

SEQ ID NO: 10107 - protein, 8 aa, Artificial Sequence
  Synthetic polypeptide representing artificial human antibody CDR-H1 region
GFTFSSYA

SEQ ID NO: 10108 - protein, 8 aa, Artificial Sequence
  Synthetic polypeptide representing artificial human antibody CDR-H1 region
GFTFDDYA

SEQ ID NO: 10109 - protein, 10 aa, Artificial Sequence
  Synthetic polypeptide representing artificial human antibody CDR-H1 region
GDSISSSSYY

SEQ ID NO: 10110 - protein, 8 aa, Artificial Sequence
  Synthetic polypeptide representing artificial human antibody CDR-H1 region
GFTFSSYW

SEQ ID NO: 10111 - protein, 8 aa, Artificial Sequence
  Synthetic polypeptide representing artificial human antibody CDR-H1 region
GFTFSSYA

SEQ ID NO: 10112 - protein, 8 aa, Artificial Sequence
  Synthetic polypeptide representing artificial human antibody CDR-H1 region
GYTFTSYY

SEQ ID NO: 10113 - protein, 8 aa, Artificial Sequence
  Synthetic polypeptide representing artificial human antibody CDR-H1 region
GFTFSSYA

SEQ ID NO: 10114 - protein, 10 aa, Artificial Sequence
  Synthetic polypeptide representing artificial human antibody CDR-H1 region
GGSISSGSYY

SEQ ID NO: 10115 - protein, 8 aa, Artificial Sequence
  Synthetic polypeptide representing artificial human antibody CDR-H1 region
GYTFTAYY

SEQ ID NO: 10116 - protein, 8 aa, Artificial Sequence
  Synthetic polypeptide representing artificial human antibody CDR-H1 region
GYTFTSYG

SEQ ID NO: 10117 - protein, 8 aa, Artificial Sequence
  Synthetic polypeptide representing artificial human antibody CDR-H1 region
GYKFTAFY

SEQ ID NO: 10118 - protein, 8 aa, Artificial Sequence
  Synthetic polypeptide representing artificial human antibody CDR-H1 region
GDSFRGYY

SEQ ID NO: 10119 - protein, 8 aa, Artificial Sequence
  Synthetic polypeptide representing artificial human antibody CDR-H1 region
GGSFTANY

SEQ ID NO: 10120 - protein, 8 aa, Artificial Sequence
  Synthetic polypeptide representing artificial human antibody CDR-H1 region
GFTFGSFD

SEQ ID NO: 10121 - protein, 8 aa, Artificial Sequence
  Synthetic polypeptide representing artificial human antibody CDR-H1 region
GDSFRGYY

SEQ ID NO: 10122 - protein, 8 aa, Artificial Sequence
  Synthetic polypeptide representing artificial human antibody CDR-H1 region
GGSFNAYY

SEQ ID NO: 10123 - protein, 8 aa, Artificial Sequence
  Synthetic polypeptide representing artificial human antibody CDR-H1 region
GFTFSSYA

SEQ ID NO: 10124 - protein, 10 aa, Artificial Sequence
  Synthetic polypeptide representing artificial human antibody CDR-H1 region
GFSLTTAGLG

SEQ ID NO: 10125 - protein, 8 aa, Artificial Sequence
  Synthetic polypeptide representing artificial human antibody CDR-H1 region
GYSFTSYW

SEQ ID NO: 10126 - protein, 10 aa, Artificial Sequence
  Synthetic polypeptide representing artificial human antibody CDR-H1 region
GDSVSSNSAA

SEQ ID NO: 10127 - protein, 8 aa, Artificial Sequence
  Synthetic polypeptide representing artificial human antibody CDR-H1 region
GYSFTSYW

SEQ ID NO: 10128 - protein, 8 aa, Artificial Sequence
  Synthetic polypeptide representing artificial human antibody CDR-H1 region
GGSMNSYH

SEQ ID NO: 10129 - protein, 8 aa, Artificial Sequence
  Synthetic polypeptide representing artificial human antibody CDR-H1 region
GGSFSVYQ

SEQ ID NO: 10130 - protein, 8 aa, Artificial Sequence
  Synthetic polypeptide representing artificial human antibody CDR-H1 region
GFNFNIYW

SEQ ID NO: 10131 - protein, 8 aa, Artificial Sequence
  Synthetic polypeptide representing artificial human antibody CDR-H1 region
GYTFTSYY

SEQ ID NO: 10132 - protein, 8 aa, Artificial Sequence
  Synthetic polypeptide representing artificial human antibody CDR-H1 region
GYSFTSYW

SEQ ID NO: 10133 - protein, 10 aa, Artificial Sequence
  Synthetic polypeptide representing artificial human antibody CDR-H1 region
GFSLSTSGMC

SEQ ID NO: 10134 - protein, 8 aa, Artificial Sequence
  Synthetic polypeptide representing artificial human antibody CDR-H1 region
GVSPTTYY

SEQ ID NO: 10135 - protein, 8 aa, Artificial Sequence
  Synthetic polypeptide representing artificial human antibody CDR-H1 region
GFTFNNHG

SEQ ID NO: 10136 - protein, 8 aa, Artificial Sequence
  Synthetic polypeptide representing artificial human antibody CDR-H1 region
GYTLTELS

SEQ ID NO: 10137 - protein, 8 aa, Artificial Sequence
  Synthetic polypeptide representing artificial human antibody CDR-H1 region
GFPLSPYW

SEQ ID NO: 10138 - protein, 8 aa, Artificial Sequence
  Synthetic polypeptide representing artificial human antibody CDR-H1 region
GVSPTIYY

SEQ ID NO: 10139 - protein, 8 aa, Artificial Sequence
  Synthetic polypeptide representing artificial human antibody CDR-H1 region
GESSSDHY

SEQ ID NO: 10140 - protein, 8 aa, Artificial Sequence
  Synthetic polypeptide representing artificial human antibody CDR-H1 region
GFTFDDYA

SEQ ID NO: 10141 - protein, 8 aa, Artificial Sequence
  Synthetic polypeptide representing artificial human antibody CDR-H1 region
GVSPSNYY

SEQ ID NO: 10142 - protein, 8 aa, Artificial Sequence
  Synthetic polypeptide representing artificial human antibody CDR-H1 region
GYILTSNW

SEQ ID NO: 10143 - protein, 8 aa, Artificial Sequence
  Synthetic polypeptide representing artificial human antibody CDR-H1 region
GFTFSSYD

SEQ ID NO: 10144 - protein, 8 aa, Artificial Sequence
  Synthetic polypeptide representing artificial human antibody CDR-H1 region
GFSFSDYY

SEQ ID NO: 10145 - protein, 10 aa, Artificial Sequence
  Synthetic polypeptide representing artificial human antibody CDR-H1 region
GFSLSTSGVG

SEQ ID NO: 10146 - protein, 10 aa, Artificial Sequence
  Synthetic polypeptide representing artificial human antibody CDR-H1 region
GASISSGGYY

SEQ ID NO: 10147 - protein, 8 aa, Artificial Sequence
  Synthetic polypeptide representing artificial human antibody CDR-H1 region
GFTFSTYA

SEQ ID NO: 10148 - protein, 8 aa, Artificial Sequence
  Synthetic polypeptide representing artificial human antibody CDR-H1 region
GFTFSSSW

SEQ ID NO: 10149 - protein, 9 aa, Artificial Sequence
  Synthetic polypeptide representing artificial human antibody CDR-H1 region
GDSISSSNW

SEQ ID NO: 10150 - protein, 8 aa, Artificial Sequence
  Synthetic polypeptide representing artificial human antibody CDR-H1 region
GESSSDHF

SEQ ID NO: 10151 - protein, 10 aa, Artificial Sequence
  Synthetic polypeptide representing artificial human antibody CDR-H1 region
GGSISSSSYY

SEQ ID NO: 10152 - protein, 8 aa, Artificial Sequence
  Synthetic polypeptide representing artificial human antibody CDR-H1 region
GVSPTTYY

SEQ ID NO: 10153 - protein, 8 aa, Artificial Sequence
  Synthetic polypeptide representing artificial human antibody CDR-H1 region
GFTFSSYG

SEQ ID NO: 10154 - protein, 8 aa, Artificial Sequence
  Synthetic polypeptide representing artificial human antibody CDR-H1 region
GVSPTPYY

SEQ ID NO: 10155 - protein, 8 aa, Artificial Sequence
  Synthetic polypeptide representing artificial human antibody CDR-H1 region
GFIFSNYA

SEQ ID NO: 10156 - protein, 8 aa, Artificial Sequence
  Synthetic polypeptide representing artificial human antibody CDR-H1 region
GLTFSDFA

SEQ ID NO: 10157 - protein, 8 aa, Artificial Sequence
  Synthetic polypeptide representing artificial human antibody CDR-H1 region
GYTFTSYA

SEQ ID NO: 10158 - protein, 8 aa, Artificial Sequence
  Synthetic polypeptide representing artificial human antibody CDR-H1 region
GFTFSSYS

SEQ ID NO: 10159 - protein, 8 aa, Artificial Sequence
  Synthetic polypeptide representing artificial human antibody CDR-H1 region
GYSFTNYG

SEQ ID NO: 10160 - protein, 8 aa, Artificial Sequence
  Synthetic polypeptide representing artificial human antibody CDR-H1 region
GFIVGDNY

SEQ ID NO: 10161 - protein, 8 aa, Artificial Sequence
  Synthetic polypeptide representing artificial human antibody CDR-H1 region
GYTLTELS

SEQ ID NO: 10162 - protein, 8 aa, Artificial Sequence
  Synthetic polypeptide representing artificial human antibody CDR-H1 region
GFTFSSSW

SEQ ID NO: 10163 - protein, 8 aa, Artificial Sequence
  Synthetic polypeptide representing artificial human antibody CDR-H1 region
GFNFGDHN

SEQ ID NO: 10164 - protein, 10 aa, Artificial Sequence
  Synthetic polypeptide representing artificial human antibody CDR-H1 region
GFSLSTSGVG

SEQ ID NO: 10165 - protein, 8 aa, Artificial Sequence
  Synthetic polypeptide representing artificial human antibody CDR-H1 region
GVSPSNYY

SEQ ID NO: 10166 - protein, 10 aa, Artificial Sequence
  Synthetic polypeptide representing artificial human antibody CDR-H1 region
SVSITSGGSY

SEQ ID NO: 10167 - protein, 8 aa, Artificial Sequence
  Synthetic polypeptide representing artificial human antibody CDR-H1 region
GVSPSSYS

SEQ ID NO: 10168 - protein, 8 aa, Artificial Sequence
  Synthetic polypeptide representing artificial human antibody CDR-H1 region
GGSFSGYY

SEQ ID NO: 10169 - protein, 10 aa, Artificial Sequence
  Synthetic polypeptide representing artificial human antibody CDR-H1 region
GGSVSSGSNY

SEQ ID NO: 10170 - protein, 8 aa, Artificial Sequence
  Synthetic polypeptide representing artificial human antibody CDR-H1 region
GVSPSDYY

SEQ ID NO: 10171 - protein, 8 aa, Artificial Sequence
  Synthetic polypeptide representing artificial human antibody CDR-H1 region
GFTLRSYA

SEQ ID NO: 10172 - protein, 8 aa, Artificial Sequence
  Synthetic polypeptide representing artificial human antibody CDR-H1 region
GFTFHEYG

SEQ ID NO: 10173 - protein, 8 aa, Artificial Sequence
  Synthetic polypeptide representing artificial human antibody CDR-H1 region
GYTFIDYD

SEQ ID NO: 10174 - protein, 8 aa, Artificial Sequence
  Synthetic polypeptide representing artificial human antibody CDR-H1 region
GYTLTELS

SEQ ID NO: 10175 - protein, 8 aa, Artificial Sequence
  Synthetic polypeptide representing artificial human antibody CDR-H1 region
GFTFDDYA

SEQ ID NO: 10176 - protein, 8 aa, Artificial Sequence
  Synthetic polypeptide representing artificial human antibody CDR-H1 region
GFTFSSYA

SEQ ID NO: 10177 - protein, 8 aa, Artificial Sequence
  Synthetic polypeptide representing artificial human antibody CDR-H1 region
GVSPSNFY

SEQ ID NO: 10178 - protein, 8 aa, Artificial Sequence
  Synthetic polypeptide representing artificial human antibody CDR-H1 region
GFSFNNYG

SEQ ID NO: 10179 - protein, 8 aa, Artificial Sequence
  Synthetic polypeptide representing artificial human antibody CDR-H1 region
GFTFRTYT

SEQ ID NO: 10180 - protein, 8 aa, Artificial Sequence
  Synthetic polypeptide representing artificial human antibody CDR-H1 region
GYSFTSYW

SEQ ID NO: 10181 - protein, 8 aa, Artificial Sequence
  Synthetic polypeptide representing artificial human antibody CDR-H1 region
GFAFSSSW

SEQ ID NO: 10182 - protein, 10 aa, Artificial Sequence
  Synthetic polypeptide representing artificial human antibody CDR-H1 region
GFSISTSGVG

SEQ ID NO: 10183 - protein, 8 aa, Artificial Sequence
  Synthetic polypeptide representing artificial human antibody CDR-H1 region
GYSFTSYW

SEQ ID NO: 10184 - protein, 8 aa, Artificial Sequence
  Synthetic polypeptide representing artificial human antibody CDR-H1 region
GYTLTELS

SEQ ID NO: 10185 - protein, 8 aa, Artificial Sequence
  Synthetic polypeptide representing artificial human antibody CDR-H1 region
GFTFSSYD

SEQ ID NO: 10186 - protein, 8 aa, Artificial Sequence
  Synthetic polypeptide representing artificial human antibody CDR-H1 region
GFTFKNYP

SEQ ID NO: 10187 - protein, 8 aa, Artificial Sequence
  Synthetic polypeptide representing artificial human antibody CDR-H1 region
GFTFDDYG

SEQ ID NO: 10188 - protein, 8 aa, Artificial Sequence
  Synthetic polypeptide representing artificial human antibody CDR-H1 region
GITFEDYG

SEQ ID NO: 10189 - protein, 8 aa, Artificial Sequence
  Synthetic polypeptide representing artificial human antibody CDR-H1 region
GYSFPTYW

SEQ ID NO: 10190 - protein, 8 aa, Artificial Sequence
  Synthetic polypeptide representing artificial human antibody CDR-H1 region
GFTFSSYG

SEQ ID NO: 10191 - protein, 8 aa, Artificial Sequence
  Synthetic polypeptide representing artificial human antibody CDR-H1 region
GFTFRHYP

SEQ ID NO: 10192 - protein, 8 aa, Artificial Sequence
  Synthetic polypeptide representing artificial human antibody CDR-H1 region
GYSFTSYW

SEQ ID NO: 10193 - protein, 10 aa, Artificial Sequence
  Synthetic polypeptide representing artificial human antibody CDR-H1 region
GGSISSGDYY

SEQ ID NO: 10194 - protein, 8 aa, Artificial Sequence
  Synthetic polypeptide representing artificial human antibody CDR-H1 region
GYTFTSYY

SEQ ID NO: 10195 - protein, 8 aa, Artificial Sequence
  Synthetic polypeptide representing artificial human antibody CDR-H1 region
GFTFNSYA

SEQ ID NO: 10196 - protein, 8 aa, Artificial Sequence
  Synthetic polypeptide representing artificial human antibody CDR-H1 region
GGSFSGYY

SEQ ID NO: 10197 - protein, 8 aa, Artificial Sequence
  Synthetic polypeptide representing artificial human antibody CDR-H1 region
GFVFSDSY

SEQ ID NO: 10198 - protein, 8 aa, Artificial Sequence
  Synthetic polypeptide representing artificial human antibody CDR-H1 region
GYSFTSYW

SEQ ID NO: 10199 - protein, 8 aa, Artificial Sequence
  Synthetic polypeptide representing artificial human antibody CDR-H1 region
GFTFGGHA

SEQ ID NO: 10200 - protein, 8 aa, Artificial Sequence
  Synthetic polypeptide representing artificial human antibody CDR-H1 region
GFTLSTYW

SEQ ID NO: 10201 - protein, 8 aa, Artificial Sequence
  Synthetic polypeptide representing artificial human antibody CDR-H1 region
GFTFSSYW

SEQ ID NO: 10202 - protein, 8 aa, Artificial Sequence
  Synthetic polypeptide representing artificial human antibody CDR-H1 region
GFAFSNYA

SEQ ID NO: 10203 - protein, 8 aa, Artificial Sequence
  Synthetic polypeptide representing artificial human antibody CDR-H1 region
GFTFNTYS

SEQ ID NO: 10204 - protein, 8 aa, Artificial Sequence
  Synthetic polypeptide representing artificial human antibody CDR-H1 region
GESSSDHY

SEQ ID NO: 10205 - protein, 8 aa, Artificial Sequence
  Synthetic polypeptide representing artificial human antibody CDR-H1 region
GFTFDDYA

SEQ ID NO: 10206 - protein, 8 aa, Artificial Sequence
  Synthetic polypeptide representing artificial human antibody CDR-H1 region
GFTFSDYY

SEQ ID NO: 10207 - protein, 10 aa, Artificial Sequence
  Synthetic polypeptide representing artificial human antibody CDR-H1 region
GGSISSGDYY

SEQ ID NO: 10208 - protein, 8 aa, Artificial Sequence
  Synthetic polypeptide representing artificial human antibody CDR-H1 region
GFTFDDHA

SEQ ID NO: 10209 - protein, 8 aa, Artificial Sequence
  Synthetic polypeptide representing artificial human antibody CDR-H1 region
GYTFTSYA

SEQ ID NO: 10210 - protein, 8 aa, Artificial Sequence
  Synthetic polypeptide representing artificial human antibody CDR-H1 region
GGTFSSYA

SEQ ID NO: 10211 - protein, 8 aa, Artificial Sequence
  Synthetic polypeptide representing artificial human antibody CDR-H1 region
GFTFSTYT

SEQ ID NO: 10212 - protein, 8 aa, Artificial Sequence
  Synthetic polypeptide representing artificial human antibody CDR-H1 region
GYRLTEVA

SEQ ID NO: 10213 - protein, 8 aa, Artificial Sequence
  Synthetic polypeptide representing artificial human antibody CDR-H1 region
GGSITGYY

SEQ ID NO: 10214 - protein, 8 aa, Artificial Sequence
  Synthetic polypeptide representing artificial human antibody CDR-H1 region
GGSLSPYY

SEQ ID NO: 10215 - protein, 10 aa, Artificial Sequence
  Synthetic polypeptide representing artificial human antibody CDR-H1 region
GGSVSSGSYY

SEQ ID NO: 10216 - protein, 10 aa, Artificial Sequence
  Synthetic polypeptide representing artificial human antibody CDR-H1 region
DGFISNDDYS

SEQ ID NO: 10217 - protein, 8 aa, Artificial Sequence
  Synthetic polypeptide representing artificial human antibody CDR-H1 region
GYIFTDFA

SEQ ID NO: 10218 - protein, 8 aa, Artificial Sequence
  Synthetic polypeptide representing artificial human antibody CDR-H1 region
GFIFGDFD

SEQ ID NO: 10219 - protein, 8 aa, Artificial Sequence
  Synthetic polypeptide representing artificial human antibody CDR-H1 region
GYTFTGYY

SEQ ID NO: 10220 - protein, 8 aa, Artificial Sequence
  Synthetic polypeptide representing artificial human antibody CDR-H1 region
GSTLSNAW

SEQ ID NO: 10221 - protein, 10 aa, Artificial Sequence
  Synthetic polypeptide representing artificial human antibody CDR-H1 region
GDSVSSNSAA

SEQ ID NO: 10222 - protein, 8 aa, Artificial Sequence
  Synthetic polypeptide representing artificial human antibody CDR-H1 region
GFIFGDYD

SEQ ID NO: 10223 - protein, 8 aa, Artificial Sequence
  Synthetic polypeptide representing artificial human antibody CDR-H1 region
GGTLSNSG

SEQ ID NO: 10224 - protein, 8 aa, Artificial Sequence
  Synthetic polypeptide representing artificial human antibody CDR-H1 region
GYTFTSYG

SEQ ID NO: 10225 - protein, 8 aa, Artificial Sequence
  Synthetic polypeptide representing artificial human antibody CDR-H1 region
GASLSGND

SEQ ID NO: 10226 - protein, 8 aa, Artificial Sequence
  Synthetic polypeptide representing artificial human antibody CDR-H1 region
GYTFTGYY

SEQ ID NO: 10227 - protein, 8 aa, Artificial Sequence
  Synthetic polypeptide representing artificial human antibody CDR-H1 region
GFTFSSYG

SEQ ID NO: 10228 - protein, 8 aa, Artificial Sequence
  Synthetic polypeptide representing artificial human antibody CDR-H1 region
GFTFSDYW

SEQ ID NO: 10229 - protein, 8 aa, Artificial Sequence
  Synthetic polypeptide representing artificial human antibody CDR-H1 region
GGSISGHY

SEQ ID NO: 10230 - protein, 8 aa, Artificial Sequence
  Synthetic polypeptide representing artificial human antibody CDR-H1 region
GYVFTNYA

SEQ ID NO: 10231 - protein, 8 aa, Artificial Sequence
  Synthetic polypeptide representing artificial human antibody CDR-H1 region
GGTFSSYA

SEQ ID NO: 10232 - protein, 8 aa, Artificial Sequence
  Synthetic polypeptide representing artificial human antibody CDR-H1 region
GGSFTDYY

SEQ ID NO: 10233 - protein, 8 aa, Artificial Sequence
  Synthetic polypeptide representing artificial human antibody CDR-H1 region
GFTFNVYG

SEQ ID NO: 10234 - protein, 8 aa, Artificial Sequence
  Synthetic polypeptide representing artificial human antibody CDR-H1 region
GFTFSGYV

SEQ ID NO: 10235 - protein, 8 aa, Artificial Sequence
  Synthetic polypeptide representing artificial human antibody CDR-H1 region
GFTFSNFA

SEQ ID NO: 10236 - protein, 8 aa, Artificial Sequence
  Synthetic polypeptide representing artificial human antibody CDR-H1 region
GFTFNNYW

SEQ ID NO: 10237 - protein, 8 aa, Artificial Sequence
  Synthetic polypeptide representing artificial human antibody CDR-H1 region
GGSISSSY

SEQ ID NO: 10238 - protein, 8 aa, Artificial Sequence
  Synthetic polypeptide representing artificial human antibody CDR-H1 region
GFTFSTYW

SEQ ID NO: 10239 - protein, 8 aa, Artificial Sequence
  Synthetic polypeptide representing artificial human antibody CDR-H1 region
GFTFSNYE

SEQ ID NO: 10240 - protein, 10 aa, Artificial Sequence
  Synthetic polypeptide representing artificial human antibody CDR-H1 region
GGSISSGGYY

SEQ ID NO: 10241 - protein, 8 aa, Artificial Sequence
  Synthetic polypeptide representing artificial human antibody CDR-H1 region
GFTFSDYY

SEQ ID NO: 10242 - protein, 10 aa, Artificial Sequence
  Synthetic polypeptide representing artificial human antibody CDR-H1 region
GGSISSSSYY

SEQ ID NO: 10243 - protein, 8 aa, Artificial Sequence
  Synthetic polypeptide representing artificial human antibody CDR-H1 region
GFTFSSYA

SEQ ID NO: 10244 - protein, 8 aa, Artificial Sequence
  Synthetic polypeptide representing artificial human antibody CDR-H1 region
GFTFNIHA

SEQ ID NO: 10245 - protein, 8 aa, Artificial Sequence
  Synthetic polypeptide representing artificial human antibody CDR-H1 region
GFTFSSYW

SEQ ID NO: 10246 - protein, 8 aa, Artificial Sequence
  Synthetic polypeptide representing artificial human antibody CDR-H1 region
GYTFTSYY

SEQ ID NO: 10247 - protein, 8 aa, Artificial Sequence
  Synthetic polypeptide representing artificial human antibody CDR-H1 region
GFTVSDYY

SEQ ID NO: 10248 - protein, 8 aa, Artificial Sequence
  Synthetic polypeptide representing artificial human antibody CDR-H1 region
GFNFNNYG

SEQ ID NO: 10249 - protein, 8 aa, Artificial Sequence
  Synthetic polypeptide representing artificial human antibody CDR-H1 region
GFTFSNYG

SEQ ID NO: 10250 - protein, 8 aa, Artificial Sequence
  Synthetic polypeptide representing artificial human antibody CDR-H1 region
GGSLSGYF

SEQ ID NO: 10251 - protein, 8 aa, Artificial Sequence
  Synthetic polypeptide representing artificial human antibody CDR-H1 region
GFTFSSYG

SEQ ID NO: 10252 - protein, 8 aa, Artificial Sequence
  Synthetic polypeptide representing artificial human antibody CDR-H1 region
GYTFTSYA

SEQ ID NO: 10253 - protein, 8 aa, Artificial Sequence
  Synthetic polypeptide representing artificial human antibody CDR-H1 region
GFTFTTYF

SEQ ID NO: 10254 - protein, 8 aa, Artificial Sequence
  Synthetic polypeptide representing artificial human antibody CDR-H1 region
GFAFDNYA

SEQ ID NO: 10255 - protein, 8 aa, Artificial Sequence
  Synthetic polypeptide representing artificial human antibody CDR-H1 region
GFFFSDYG

SEQ ID NO: 10256 - protein, 8 aa, Artificial Sequence
  Synthetic polypeptide representing artificial human antibody CDR-H1 region
GFTFSDYY

SEQ ID NO: 10257 - protein, 8 aa, Artificial Sequence
  Synthetic polypeptide representing artificial human antibody CDR-H1 region
GGSISSYF

SEQ ID NO: 10258 - protein, 8 aa, Artificial Sequence
  Synthetic polypeptide representing artificial human antibody CDR-H1 region
GFTFSSYA

SEQ ID NO: 10259 - protein, 8 aa, Artificial Sequence
  Synthetic polypeptide representing artificial human antibody CDR-H1 region
GFTFSSYG

SEQ ID NO: 10260 - protein, 10 aa, Artificial Sequence
  Synthetic polypeptide representing artificial human antibody CDR-H1 region
GDSVSSDSAA

SEQ ID NO: 10261 - protein, 8 aa, Artificial Sequence
  Synthetic polypeptide representing artificial human antibody CDR-H1 region
GGSISSYY

SEQ ID NO: 10262 - protein, 8 aa, Artificial Sequence
  Synthetic polypeptide representing artificial human antibody CDR-H1 region
GYTSSNYA

SEQ ID NO: 10263 - protein, 8 aa, Artificial Sequence
  Synthetic polypeptide representing artificial human antibody CDR-H1 region
GFTFDDYA

SEQ ID NO: 10264 - protein, 10 aa, Artificial Sequence
  Synthetic polypeptide representing artificial human antibody CDR-H1 region
GDLFSSTAFY

SEQ ID NO: 10265 - protein, 9 aa, Artificial Sequence
  Synthetic polypeptide representing artificial human antibody CDR-H1 region
GDPLTLGIF

SEQ ID NO: 10266 - protein, 10 aa, Artificial Sequence
  Synthetic polypeptide representing artificial human antibody CDR-H1 region
GASITSSGYY

SEQ ID NO: 10267 - protein, 8 aa, Artificial Sequence
  Synthetic polypeptide representing artificial human antibody CDR-H1 region
GFTFSTYA

SEQ ID NO: 10268 - protein, 8 aa, Artificial Sequence
  Synthetic polypeptide representing artificial human antibody CDR-H1 region
GFTFSYAW

SEQ ID NO: 10269 - protein, 8 aa, Artificial Sequence
  Synthetic polypeptide representing artificial human antibody CDR-H1 region
GGSFSDYY

SEQ ID NO: 10270 - protein, 8 aa, Artificial Sequence
  Synthetic polypeptide representing artificial human antibody CDR-H1 region
GYTFTDYW

SEQ ID NO: 10271 - protein, 8 aa, Artificial Sequence
  Synthetic polypeptide representing artificial human antibody CDR-H1 region
GFTFSGYV

SEQ ID NO: 10272 - protein, 8 aa, Artificial Sequence
  Synthetic polypeptide representing artificial human antibody CDR-H1 region
GYTFASYG

SEQ ID NO: 10273 - protein, 8 aa, Artificial Sequence
  Synthetic polypeptide representing artificial human antibody CDR-H1 region
GASVLTYY

SEQ ID NO: 10274 - protein, 8 aa, Artificial Sequence
  Synthetic polypeptide representing artificial human antibody CDR-H1 region
GFIFRNYD

SEQ ID NO: 10275 - protein, 8 aa, Artificial Sequence
  Synthetic polypeptide representing artificial human antibody CDR-H1 region
GFTFDDYT

SEQ ID NO: 10276 - protein, 8 aa, Artificial Sequence
  Synthetic polypeptide representing artificial human antibody CDR-H1 region
GFTFSSYA

SEQ ID NO: 10277 - protein, 8 aa, Artificial Sequence
  Synthetic polypeptide representing artificial human antibody CDR-H1 region
GYSFTSYW

SEQ ID NO: 10278 - protein, 10 aa, Artificial Sequence
  Synthetic polypeptide representing artificial human antibody CDR-H1 region
GGSISSSTYY

SEQ ID NO: 10279 - protein, 8 aa, Artificial Sequence
  Synthetic polypeptide representing artificial human antibody CDR-H1 region
GYTFTSYA

SEQ ID NO: 10280 - protein, 8 aa, Artificial Sequence
  Synthetic polypeptide representing artificial human antibody CDR-H1 region
GFTFRDYG

SEQ ID NO: 10281 - protein, 8 aa, Artificial Sequence
  Synthetic polypeptide representing artificial human antibody CDR-H1 region
GYDFTKFV

SEQ ID NO: 10282 - protein, 8 aa, Artificial Sequence
  Synthetic polypeptide representing artificial human antibody CDR-H1 region
GFTFDYHT

SEQ ID NO: 10283 - protein, 10 aa, Artificial Sequence
  Synthetic polypeptide representing artificial human antibody CDR-H1 region
GFSLKTNGVA

SEQ ID NO: 10284 - protein, 8 aa, Artificial Sequence
  Synthetic polypeptide representing artificial human antibody CDR-H1 region
GFTFSNYA

SEQ ID NO: 10285 - protein, 8 aa, Artificial Sequence
  Synthetic polypeptide representing artificial human antibody CDR-H1 region
GFIFEDYV

SEQ ID NO: 10286 - protein, 8 aa, Artificial Sequence
  Synthetic polypeptide representing artificial human antibody CDR-H1 region
GGSISSYY

SEQ ID NO: 10287 - protein, 10 aa, Artificial Sequence
  Synthetic polypeptide representing artificial human antibody CDR-H1 region
GGSISSSSYY

SEQ ID NO: 10288 - protein, 8 aa, Artificial Sequence
  Synthetic polypeptide representing artificial human antibody CDR-H1 region
GFTFSSYG

SEQ ID NO: 10289 - protein, 8 aa, Artificial Sequence
  Synthetic polypeptide representing artificial human antibody CDR-H1 region
GYTLTELS

SEQ ID NO: 10290 - protein, 10 aa, Artificial Sequence
  Synthetic polypeptide representing artificial human antibody CDR-H1 region
GASISSGNHF

SEQ ID NO: 10291 - protein, 8 aa, Artificial Sequence
  Synthetic polypeptide representing artificial human antibody CDR-H1 region
GFTFSTYA

SEQ ID NO: 10292 - protein, 8 aa, Artificial Sequence
  Synthetic polypeptide representing artificial human antibody CDR-H1 region
GGSISSYY

SEQ ID NO: 10293 - protein, 8 aa, Artificial Sequence
  Synthetic polypeptide representing artificial human antibody CDR-H1 region
GVSITTYY

SEQ ID NO: 10294 - protein, 8 aa, Artificial Sequence
  Synthetic polypeptide representing artificial human antibody CDR-H1 region
GYTFTGYY

SEQ ID NO: 10295 - protein, 10 aa, Artificial Sequence
  Synthetic polypeptide representing artificial human antibody CDR-H1 region
GGSISSSSYY

SEQ ID NO: 10296 - protein, 8 aa, Artificial Sequence
  Synthetic polypeptide representing artificial human antibody CDR-H1 region
GFTFSSYG

SEQ ID NO: 10297 - protein, 8 aa, Artificial Sequence
  Synthetic polypeptide representing artificial human antibody CDR-H1 region
GFTFGDYA

SEQ ID NO: 10298 - protein, 8 aa, Artificial Sequence
  Synthetic polypeptide representing artificial human antibody CDR-H1 region
GYTFTGYY

SEQ ID NO: 10299 - protein, 10 aa, Artificial Sequence
  Synthetic polypeptide representing artificial human antibody CDR-H1 region
GGSISSGGYY

SEQ ID NO: 10300 - protein, 8 aa, Artificial Sequence
  Synthetic polypeptide representing artificial human antibody CDR-H1 region
GFALRGNG

SEQ ID NO: 10301 - protein, 8 aa, Artificial Sequence
  Synthetic polypeptide representing artificial human antibody CDR-H1 region
GYTLTELS

SEQ ID NO: 10302 - protein, 8 aa, Artificial Sequence
  Synthetic polypeptide representing artificial human antibody CDR-H1 region
GLSFTSFA

SEQ ID NO: 10303 - protein, 8 aa, Artificial Sequence
  Synthetic polypeptide representing artificial human antibody CDR-H1 region
GYTLTELS

SEQ ID NO: 10304 - protein, 8 aa, Artificial Sequence
  Synthetic polypeptide representing artificial human antibody CDR-H1 region
GGSISSYY

SEQ ID NO: 10305 - protein, 10 aa, Artificial Sequence
  Synthetic polypeptide representing artificial human antibody CDR-H1 region
GFSLSTSGVG

SEQ ID NO: 10306 - protein, 8 aa, Artificial Sequence
  Synthetic polypeptide representing artificial human antibody CDR-H1 region
GYTFTGYY

SEQ ID NO: 10307 - protein, 8 aa, Artificial Sequence
  Synthetic polypeptide representing artificial human antibody CDR-H1 region
GYRFTTYH

SEQ ID NO: 10308 - protein, 8 aa, Artificial Sequence
  Synthetic polypeptide representing artificial human antibody CDR-H1 region
GASITTYY

SEQ ID NO: 10309 - protein, 8 aa, Artificial Sequence
  Synthetic polypeptide representing artificial human antibody CDR-H1 region
GYSFTSYW

SEQ ID NO: 10310 - protein, 8 aa, Artificial Sequence
  Synthetic polypeptide representing artificial human antibody CDR-H1 region
GYTLTELS

SEQ ID NO: 10311 - protein, 8 aa, Artificial Sequence
  Synthetic polypeptide representing artificial human antibody CDR-H1 region
GFTVSSNY

SEQ ID NO: 10312 - protein, 8 aa, Artificial Sequence
  Synthetic polypeptide representing artificial human antibody CDR-H1 region
GFTFSDFY

SEQ ID NO: 10313 - protein, 8 aa, Artificial Sequence
  Synthetic polypeptide representing artificial human antibody CDR-H1 region
GYTLTELS

SEQ ID NO: 10314 - protein, 8 aa, Artificial Sequence
  Synthetic polypeptide representing artificial human antibody CDR-H1 region
GFTFSSYW

SEQ ID NO: 10315 - protein, 8 aa, Artificial Sequence
  Synthetic polypeptide representing artificial human antibody CDR-H1 region
GYTLTELS

SEQ ID NO: 10316 - protein, 8 aa, Artificial Sequence
  Synthetic polypeptide representing artificial human antibody CDR-H1 region
GFTFSNSA

SEQ ID NO: 10317 - protein, 10 aa, Artificial Sequence
  Synthetic polypeptide representing artificial human antibody CDR-H1 region
GGSITSGDSY

SEQ ID NO: 10318 - protein, 10 aa, Artificial Sequence
  Synthetic polypeptide representing artificial human antibody CDR-H1 region
GFSLSNARMG

SEQ ID NO: 10319 - protein, 8 aa, Artificial Sequence
  Synthetic polypeptide representing artificial human antibody CDR-H1 region
EFTFSNYA

SEQ ID NO: 10320 - protein, 10 aa, Artificial Sequence
  Synthetic polypeptide representing artificial human antibody CDR-H1 region
GGSISSGSYY

SEQ ID NO: 10321 - protein, 8 aa, Artificial Sequence
  Synthetic polypeptide representing artificial human antibody CDR-H1 region
GFTFSSYW

SEQ ID NO: 10322 - protein, 8 aa, Artificial Sequence
  Synthetic polypeptide representing artificial human antibody CDR-H1 region
GFSISSYS

SEQ ID NO: 10323 - protein, 8 aa, Artificial Sequence
  Synthetic polypeptide representing artificial human antibody CDR-H1 region
GFIFSSYA

SEQ ID NO: 10324 - protein, 8 aa, Artificial Sequence
  Synthetic polypeptide representing artificial human antibody CDR-H1 region
GFTFSTYV

SEQ ID NO: 10325 - protein, 8 aa, Artificial Sequence
  Synthetic polypeptide representing artificial human antibody CDR-H1 region
GYNFNDYW

SEQ ID NO: 10326 - protein, 8 aa, Artificial Sequence
  Synthetic polypeptide representing artificial human antibody CDR-H1 region
GFTFSSYE

SEQ ID NO: 10327 - protein, 8 aa, Artificial Sequence
  Synthetic polypeptide representing artificial human antibody CDR-H1 region
GGTFSSYA

SEQ ID NO: 10328 - protein, 8 aa, Artificial Sequence
  Synthetic polypeptide representing artificial human antibody CDR-H1 region
GGSFSGYY

SEQ ID NO: 10329 - protein, 10 aa, Artificial Sequence
  Synthetic polypeptide representing artificial human antibody CDR-H1 region
GGSISSSTYF

SEQ ID NO: 10330 - protein, 8 aa, Artificial Sequence
  Synthetic polypeptide representing artificial human antibody CDR-H1 region
GFTFSNAW

SEQ ID NO: 10331 - protein, 8 aa, Artificial Sequence
  Synthetic polypeptide representing artificial human antibody CDR-H1 region
GFTFSSYG

SEQ ID NO: 10332 - protein, 8 aa, Artificial Sequence
  Synthetic polypeptide representing artificial human antibody CDR-H1 region
GYTFTSYG

SEQ ID NO: 10333 - protein, 8 aa, Artificial Sequence
  Synthetic polypeptide representing artificial human antibody CDR-H1 region
GLTFSDHY

SEQ ID NO: 10334 - protein, 8 aa, Artificial Sequence
  Synthetic polypeptide representing artificial human antibody CDR-H1 region
GYTFTGYY

SEQ ID NO: 10335 - protein, 10 aa, Artificial Sequence
  Synthetic polypeptide representing artificial human antibody CDR-H1 region
GFSLSTSGVG

SEQ ID NO: 10336 - protein, 8 aa, Artificial Sequence
  Synthetic polypeptide representing artificial human antibody CDR-H1 region
GAPITTYY

SEQ ID NO: 10337 - protein, 8 aa, Artificial Sequence
  Synthetic polypeptide representing artificial human antibody CDR-H1 region
GFTFSTYW

SEQ ID NO: 10338 - protein, 8 aa, Artificial Sequence
  Synthetic polypeptide representing artificial human antibody CDR-H1 region
GFTFDDYA

SEQ ID NO: 10339 - protein, 10 aa, Artificial Sequence
  Synthetic polypeptide representing artificial human antibody CDR-H1 region
GDSISRGTYY

SEQ ID NO: 10340 - protein, 8 aa, Artificial Sequence
  Synthetic polypeptide representing artificial human antibody CDR-H1 region
GFTFSRYW

SEQ ID NO: 10341 - protein, 10 aa, Artificial Sequence
  Synthetic polypeptide representing artificial human antibody CDR-H1 region
GGPISSGNYY

SEQ ID NO: 10342 - protein, 8 aa, Artificial Sequence
  Synthetic polypeptide representing artificial human antibody CDR-H1 region
GYTLIELS

SEQ ID NO: 10343 - protein, 10 aa, Artificial Sequence
  Synthetic polypeptide representing artificial human antibody CDR-H1 region
GFSLSTSGVG

SEQ ID NO: 10344 - protein, 8 aa, Artificial Sequence
  Synthetic polypeptide representing artificial human antibody CDR-H1 region
GYTLTELS

SEQ ID NO: 10345 - protein, 10 aa, Artificial Sequence
  Synthetic polypeptide representing artificial human antibody CDR-H1 region
GGSISSGGYY

SEQ ID NO: 10346 - protein, 8 aa, Artificial Sequence
  Synthetic polypeptide representing artificial human antibody CDR-H1 region
GGSFSGYY

SEQ ID NO: 10347 - protein, 8 aa, Artificial Sequence
  Synthetic polypeptide representing artificial human antibody CDR-H1 region
GGSFSGYY

SEQ ID NO: 10348 - protein, 8 aa, Artificial Sequence
  Synthetic polypeptide representing artificial human antibody CDR-H1 region
GYTFTGYY

SEQ ID NO: 10349 - protein, 10 aa, Artificial Sequence
  Synthetic polypeptide representing artificial human antibody CDR-H1 region
GDSVSSNSAA

SEQ ID NO: 10350 - protein, 8 aa, Artificial Sequence
  Synthetic polypeptide representing artificial human antibody CDR-H1 region
GGSISSYY

SEQ ID NO: 10351 - protein, 10 aa, Artificial Sequence
  Synthetic polypeptide representing artificial human antibody CDR-H1 region
GGSISSGSYY

SEQ ID NO: 10352 - protein, 8 aa, Artificial Sequence
  Synthetic polypeptide representing artificial human antibody CDR-H1 region
GFTFSSFA

SEQ ID NO: 10353 - protein, 8 aa, Artificial Sequence
  Synthetic polypeptide representing artificial human antibody CDR-H1 region
GFTFSSYG

SEQ ID NO: 10354 - protein, 8 aa, Artificial Sequence
  Synthetic polypeptide representing artificial human antibody CDR-H1 region
GFTFSSYG

SEQ ID NO: 10355 - protein, 8 aa, Artificial Sequence
  Synthetic polypeptide representing artificial human antibody CDR-H1 region
GGTFSSYT

SEQ ID NO: 10356 - protein, 8 aa, Artificial Sequence
  Synthetic polypeptide representing artificial human antibody CDR-H1 region
GFTFSSYG

SEQ ID NO: 10357 - protein, 8 aa, Artificial Sequence
  Synthetic polypeptide representing artificial human antibody CDR-H1 region
GFTVSSNY

SEQ ID NO: 10358 - protein, 10 aa, Artificial Sequence
  Synthetic polypeptide representing artificial human antibody CDR-H1 region
GDSVSSNSAA

SEQ ID NO: 10359 - protein, 8 aa, Artificial Sequence
  Synthetic polypeptide representing artificial human antibody CDR-H1 region
GDSLTEFS

SEQ ID NO: 10360 - protein, 8 aa, Artificial Sequence
  Synthetic polypeptide representing artificial human antibody CDR-H1 region
GYTFTTYD

SEQ ID NO: 10361 - protein, 8 aa, Artificial Sequence
  Synthetic polypeptide representing artificial human antibody CDR-H1 region
GFTFSNYG

SEQ ID NO: 10362 - protein, 8 aa, Artificial Sequence
  Synthetic polypeptide representing artificial human antibody CDR-H1 region
GFTFSSYE

SEQ ID NO: 10363 - protein, 8 aa, Artificial Sequence
  Synthetic polypeptide representing artificial human antibody CDR-H1 region
RFTFSSYA

SEQ ID NO: 10364 - protein, 10 aa, Artificial Sequence
  Synthetic polypeptide representing artificial human antibody CDR-H1 region
GGSISSSSYY

SEQ ID NO: 10365 - protein, 10 aa, Artificial Sequence
  Synthetic polypeptide representing artificial human antibody CDR-H1 region
GGSISSGSYY

SEQ ID NO: 10366 - protein, 8 aa, Artificial Sequence
  Synthetic polypeptide representing artificial human antibody CDR-H1 region
GYTFTSYD

SEQ ID NO: 10367 - protein, 8 aa, Artificial Sequence
  Synthetic polypeptide representing artificial human antibody CDR-H1 region
GFFLRGRG

SEQ ID NO: 10368 - protein, 8 aa, Artificial Sequence
  Synthetic polypeptide representing artificial human antibody CDR-H1 region
GFTFSSYE

SEQ ID NO: 10369 - protein, 8 aa, Artificial Sequence
  Synthetic polypeptide representing artificial human antibody CDR-H1 region
GFTFSSYG

SEQ ID NO: 10370 - protein, 8 aa, Artificial Sequence
  Synthetic polypeptide representing artificial human antibody CDR-H1 region
GFTVSSNY

SEQ ID NO: 10371 - protein, 10 aa, Artificial Sequence
  Synthetic polypeptide representing artificial human antibody CDR-H1 region
GFSLSTSGMC

SEQ ID NO: 10372 - protein, 8 aa, Artificial Sequence
  Synthetic polypeptide representing artificial human antibody CDR-H1 region
GGPFSDSY

SEQ ID NO: 10373 - protein, 10 aa, Artificial Sequence
  Synthetic polypeptide representing artificial human antibody CDR-H1 region
GGSISSSSYY

SEQ ID NO: 10374 - protein, 8 aa, Artificial Sequence
  Synthetic polypeptide representing artificial human antibody CDR-H1 region
GFTFSSYG

SEQ ID NO: 10375 - protein, 8 aa, Artificial Sequence
  Synthetic polypeptide representing artificial human antibody CDR-H1 region
GFTFSNYE

SEQ ID NO: 10376 - protein, 8 aa, Artificial Sequence
  Synthetic polypeptide representing artificial human antibody CDR-H1 region
GYTFTSYY

SEQ ID NO: 10377 - protein, 10 aa, Artificial Sequence
  Synthetic polypeptide representing artificial human antibody CDR-H1 region
GFSLSTSGVG

SEQ ID NO: 10378 - protein, 8 aa, Artificial Sequence
  Synthetic polypeptide representing artificial human antibody CDR-H1 region
GFTFSSYA

SEQ ID NO: 10379 - protein, 8 aa, Artificial Sequence
  Synthetic polypeptide representing artificial human antibody CDR-H1 region
GFTFNSYA

SEQ ID NO: 10380 - protein, 10 aa, Artificial Sequence
  Synthetic polypeptide representing artificial human antibody CDR-H1 region
GGSISSGDYY

SEQ ID NO: 10381 - protein, 8 aa, Artificial Sequence
  Synthetic polypeptide representing artificial human antibody CDR-H1 region
GFTFSTYG

SEQ ID NO: 10382 - protein, 8 aa, Artificial Sequence
  Synthetic polypeptide representing artificial human antibody CDR-H1 region
GYTLTELS

SEQ ID NO: 10383 - protein, 8 aa, Artificial Sequence
  Synthetic polypeptide representing artificial human antibody CDR-H1 region
GFTFSSYE

SEQ ID NO: 10384 - protein, 10 aa, Artificial Sequence
  Synthetic polypeptide representing artificial human antibody CDR-H1 region
GGSISSGGYY

SEQ ID NO: 10385 - protein, 10 aa, Artificial Sequence
  Synthetic polypeptide representing artificial human antibody CDR-H1 region
GFSLSTSGMC

SEQ ID NO: 10386 - protein, 10 aa, Artificial Sequence
  Synthetic polypeptide representing artificial human antibody CDR-H1 region
GFSLSTSGVG

SEQ ID NO: 10387 - protein, 8 aa, Artificial Sequence
  Synthetic polypeptide representing artificial human antibody CDR-H1 region
GFTFSSYG

SEQ ID NO: 10388 - protein, 8 aa, Artificial Sequence
  Synthetic polypeptide representing artificial human antibody CDR-H1 region
GGSISSYY

SEQ ID NO: 10389 - protein, 9 aa, Artificial Sequence
  Synthetic polypeptide representing artificial human antibody CDR-H1 region
GGSISSSNW

SEQ ID NO: 10390 - protein, 8 aa, Artificial Sequence
  Synthetic polypeptide representing artificial human antibody CDR-H1 region
GYTFTSYY

SEQ ID NO: 10391 - protein, 8 aa, Artificial Sequence
  Synthetic polypeptide representing artificial human antibody CDR-H1 region
GYTLTELS

SEQ ID NO: 10392 - protein, 8 aa, Artificial Sequence
  Synthetic polypeptide representing artificial human antibody CDR-H1 region
GFTFSGSA

SEQ ID NO: 10393 - protein, 8 aa, Artificial Sequence
  Synthetic polypeptide representing artificial human antibody CDR-H1 region
GFTFSDYY

SEQ ID NO: 10394 - protein, 8 aa, Artificial Sequence
  Synthetic polypeptide representing artificial human antibody CDR-H1 region
GYIFTKYW

SEQ ID NO: 10395 - protein, 8 aa, Artificial Sequence
  Synthetic polypeptide representing artificial human antibody CDR-H1 region
GYTFTGYY

SEQ ID NO: 10396 - protein, 8 aa, Artificial Sequence
  Synthetic polypeptide representing artificial human antibody CDR-H1 region
GFHFSGTD

SEQ ID NO: 10397 - protein, 8 aa, Artificial Sequence
  Synthetic polypeptide representing artificial human antibody CDR-H1 region
GYTLTELS

SEQ ID NO: 10398 - protein, 8 aa, Artificial Sequence
  Synthetic polypeptide representing artificial human antibody CDR-H1 region
GFTFSSYA

SEQ ID NO: 10399 - protein, 8 aa, Artificial Sequence
  Synthetic polypeptide representing artificial human antibody CDR-H1 region
GFTFSSYG

SEQ ID NO: 10400 - protein, 8 aa, Artificial Sequence
  Synthetic polypeptide representing artificial human antibody CDR-H1 region
GFTFSSYW

SEQ ID NO: 10401 - protein, 10 aa, Artificial Sequence
  Synthetic polypeptide representing artificial human antibody CDR-H1 region
GGSISSSSYY

SEQ ID NO: 10402 - protein, 8 aa, Artificial Sequence
  Synthetic polypeptide representing artificial human antibody CDR-H1 region
GFTFSDYY

SEQ ID NO: 10403 - protein, 8 aa, Artificial Sequence
  Synthetic polypeptide representing artificial human antibody CDR-H1 region
GYTLTELS

SEQ ID NO: 10404 - protein, 9 aa, Artificial Sequence
  Synthetic polypeptide representing artificial human antibody CDR-H1 region
GGSISSSNW

SEQ ID NO: 10405 - protein, 8 aa, Artificial Sequence
  Synthetic polypeptide representing artificial human antibody CDR-H1 region
GFTVSSNY

SEQ ID NO: 10406 - protein, 10 aa, Artificial Sequence
  Synthetic polypeptide representing artificial human antibody CDR-H1 region
GGSISSSSYY

SEQ ID NO: 10407 - protein, 8 aa, Artificial Sequence
  Synthetic polypeptide representing artificial human antibody CDR-H1 region
GFTFSSYA

SEQ ID NO: 10408 - protein, 8 aa, Artificial Sequence
  Synthetic polypeptide representing artificial human antibody CDR-H1 region
GYTLTELS

SEQ ID NO: 10409 - protein, 10 aa, Artificial Sequence
  Synthetic polypeptide representing artificial human antibody CDR-H1 region
GFSLSNARMG

SEQ ID NO: 10410 - protein, 8 aa, Artificial Sequence
  Synthetic polypeptide representing artificial human antibody CDR-H1 region
GFTFGDYA

SEQ ID NO: 10411 - protein, 10 aa, Artificial Sequence
  Synthetic polypeptide representing artificial human antibody CDR-H1 region
GFSLSTSGVG

SEQ ID NO: 10412 - protein, 8 aa, Artificial Sequence
  Synthetic polypeptide representing artificial human antibody CDR-H1 region
GGSINSYY

SEQ ID NO: 10413 - protein, 8 aa, Artificial Sequence
  Synthetic polypeptide representing artificial human antibody CDR-H1 region
GFTFSSYW

SEQ ID NO: 10414 - protein, 10 aa, Artificial Sequence
  Synthetic polypeptide representing artificial human antibody CDR-H1 region
GGSISSGSYY

SEQ ID NO: 10415 - protein, 10 aa, Artificial Sequence
  Synthetic polypeptide representing artificial human antibody CDR-H1 region
GGSISSSSYY

SEQ ID NO: 10416 - protein, 8 aa, Artificial Sequence
  Synthetic polypeptide representing artificial human antibody CDR-H1 region
GGSISSYY

SEQ ID NO: 10417 - protein, 8 aa, Artificial Sequence
  Synthetic polypeptide representing artificial human antibody CDR-H1 region
GGSISSYY

SEQ ID NO: 10418 - protein, 8 aa, Artificial Sequence
  Synthetic polypeptide representing artificial human antibody CDR-H1 region
GFDFTNFF

SEQ ID NO: 10419 - protein, 8 aa, Artificial Sequence
  Synthetic polypeptide representing artificial human antibody CDR-H1 region
GYTFTSYG

SEQ ID NO: 10420 - protein, 8 aa, Artificial Sequence
  Synthetic polypeptide representing artificial human antibody CDR-H1 region
GYTLTELS

SEQ ID NO: 10421 - protein, 8 aa, Artificial Sequence
  Synthetic polypeptide representing artificial human antibody CDR-H1 region
GYTLTELS

SEQ ID NO: 10422 - protein, 8 aa, Artificial Sequence
  Synthetic polypeptide representing artificial human antibody CDR-H1 region
GYTLTELS

SEQ ID NO: 10423 - protein, 10 aa, Artificial Sequence
  Synthetic polypeptide representing artificial human antibody CDR-H1 region
GGSISSSSYY

SEQ ID NO: 10424 - protein, 10 aa, Artificial Sequence
  Synthetic polypeptide representing artificial human antibody CDR-H1 region
GGSISSGSYY

SEQ ID NO: 10425 - protein, 8 aa, Artificial Sequence
  Synthetic polypeptide representing artificial human antibody CDR-H1 region
GFAFTTYG

SEQ ID NO: 10426 - protein, 8 aa, Artificial Sequence
  Synthetic polypeptide representing artificial human antibody CDR-H1 region
GFTFSSYA

SEQ ID NO: 10427 - protein, 8 aa, Artificial Sequence
  Synthetic polypeptide representing artificial human antibody CDR-H1 region
GFTFSSYG

SEQ ID NO: 10428 - protein, 10 aa, Artificial Sequence
  Synthetic polypeptide representing artificial human antibody CDR-H1 region
GGSISSSSYY

SEQ ID NO: 10429 - protein, 10 aa, Artificial Sequence
  Synthetic polypeptide representing artificial human antibody CDR-H1 region
GGSISSGSYY

SEQ ID NO: 10430 - protein, 8 aa, Artificial Sequence
  Synthetic polypeptide representing artificial human antibody CDR-H1 region
GGTFSNYA

SEQ ID NO: 10431 - protein, 8 aa, Artificial Sequence
  Synthetic polypeptide representing artificial human antibody CDR-H1 region
GFFLRGRG

SEQ ID NO: 10432 - protein, 10 aa, Artificial Sequence
  Synthetic polypeptide representing artificial human antibody CDR-H1 region
GFSLSNARMG

SEQ ID NO: 10433 - protein, 10 aa, Artificial Sequence
  Synthetic polypeptide representing artificial human antibody CDR-H1 region
GFSLSTSGVG

SEQ ID NO: 10434 - protein, 8 aa, Artificial Sequence
  Synthetic polypeptide representing artificial human antibody CDR-H1 region
GFGFNNYG

SEQ ID NO: 10435 - protein, 8 aa, Artificial Sequence
  Synthetic polypeptide representing artificial human antibody CDR-H1 region
GFTFSSYW

SEQ ID NO: 10436 - protein, 8 aa, Artificial Sequence
  Synthetic polypeptide representing artificial human antibody CDR-H1 region
GYTFTGYY

SEQ ID NO: 10437 - protein, 10 aa, Artificial Sequence
  Synthetic polypeptide representing artificial human antibody CDR-H1 region
GFSLSTSGMC

SEQ ID NO: 10438 - protein, 8 aa, Artificial Sequence
  Synthetic polypeptide representing artificial human antibody CDR-H1 region
GYTLTELS

SEQ ID NO: 10439 - protein, 8 aa, Artificial Sequence
  Synthetic polypeptide representing artificial human antibody CDR-H1 region
GFTFSSYW

SEQ ID NO: 10440 - protein, 8 aa, Artificial Sequence
  Synthetic polypeptide representing artificial human antibody CDR-H1 region
GFTFDDYA

SEQ ID NO: 10441 - protein, 8 aa, Artificial Sequence
  Synthetic polypeptide representing artificial human antibody CDR-H1 region
GASFDNNA

SEQ ID NO: 10442 - protein, 8 aa, Artificial Sequence
  Synthetic polypeptide representing artificial human antibody CDR-H1 region
GFTFSSYS

SEQ ID NO: 10443 - protein, 8 aa, Artificial Sequence
  Synthetic polypeptide representing artificial human antibody CDR-H1 region
GGSISSYY

SEQ ID NO: 10444 - protein, 8 aa, Artificial Sequence
  Synthetic polypeptide representing artificial human antibody CDR-H1 region
GYTFTSYD

SEQ ID NO: 10445 - protein, 8 aa, Artificial Sequence
  Synthetic polypeptide representing artificial human antibody CDR-H1 region
GFTFSSYS

SEQ ID NO: 10446 - protein, 8 aa, Artificial Sequence
  Synthetic polypeptide representing artificial human antibody CDR-H1 region
GGSFSGYY

SEQ ID NO: 10447 - protein, 8 aa, Artificial Sequence
  Synthetic polypeptide representing artificial human antibody CDR-H1 region
GYTLTELS

SEQ ID NO: 10448 - protein, 10 aa, Artificial Sequence
  Synthetic polypeptide representing artificial human antibody CDR-H1 region
GGSISSSSYY

SEQ ID NO: 10449 - protein, 10 aa, Artificial Sequence
  Synthetic polypeptide representing artificial human antibody CDR-H1 region
GGSISSGSYY

SEQ ID NO: 10450 - protein, 8 aa, Artificial Sequence
  Synthetic polypeptide representing artificial human antibody CDR-H1 region
GYTFTSYG

SEQ ID NO: 10451 - protein, 8 aa, Artificial Sequence
  Synthetic polypeptide representing artificial human antibody CDR-H1 region
GFTFSNYV

SEQ ID NO: 10452 - protein, 8 aa, Artificial Sequence
  Synthetic polypeptide representing artificial human antibody CDR-H1 region
GYTLTELS

SEQ ID NO: 10453 - protein, 8 aa, Artificial Sequence
  Synthetic polypeptide representing artificial human antibody CDR-H1 region
GYTFTSYD

SEQ ID NO: 10454 - protein, 10 aa, Artificial Sequence
  Synthetic polypeptide representing artificial human antibody CDR-H1 region
GGSISSGSYY

SEQ ID NO: 10455 - protein, 10 aa, Artificial Sequence
  Synthetic polypeptide representing artificial human antibody CDR-H1 region
GFSLSNARMG

SEQ ID NO: 10456 - protein, 8 aa, Artificial Sequence
  Synthetic polypeptide representing artificial human antibody CDR-H1 region
GYNFMNSG

SEQ ID NO: 10457 - protein, 8 aa, Artificial Sequence
  Synthetic polypeptide representing artificial human antibody CDR-H1 region
GFTFDDYA

SEQ ID NO: 10458 - protein, 10 aa, Artificial Sequence
  Synthetic polypeptide representing artificial human antibody CDR-H1 region
GFSLSNARMG

SEQ ID NO: 10459 - protein, 10 aa, Artificial Sequence
  Synthetic polypeptide representing artificial human antibody CDR-H1 region
GGSISSSSYY

SEQ ID NO: 10460 - protein, 10 aa, Artificial Sequence
  Synthetic polypeptide representing artificial human antibody CDR-H1 region
GGSISSGSYY

SEQ ID NO: 10461 - protein, 8 aa, Artificial Sequence
  Synthetic polypeptide representing artificial human antibody CDR-H1 region
GYTFTSYY

SEQ ID NO: 10462 - protein, 10 aa, Artificial Sequence
  Synthetic polypeptide representing artificial human antibody CDR-H1 region
GDSVSSNSAA

SEQ ID NO: 10463 - protein, 8 aa, Artificial Sequence
  Synthetic polypeptide representing artificial human antibody CDR-H1 region
GYTFTGYY

SEQ ID NO: 10464 - protein, 8 aa, Artificial Sequence
  Synthetic polypeptide representing artificial human antibody CDR-H1 region
GFDFDTFG

SEQ ID NO: 10465 - protein, 8 aa, Artificial Sequence
  Synthetic polypeptide representing artificial human antibody CDR-H1 region
GFSFRDNV

SEQ ID NO: 10466 - protein, 10 aa, Artificial Sequence
  Synthetic polypeptide representing artificial human antibody CDR-H1 region
GGSISSGGYY

SEQ ID NO: 10467 - protein, 8 aa, Artificial Sequence
  Synthetic polypeptide representing artificial human antibody CDR-H1 region
GYTLTELS

SEQ ID NO: 10468 - protein, 10 aa, Artificial Sequence
  Synthetic polypeptide representing artificial human antibody CDR-H1 region
GGSISSGSYY

SEQ ID NO: 10469 - protein, 8 aa, Artificial Sequence
  Synthetic polypeptide representing artificial human antibody CDR-H1 region
GFTFSNAW

SEQ ID NO: 10470 - protein, 8 aa, Artificial Sequence
  Synthetic polypeptide representing artificial human antibody CDR-H1 region
GDIFASEG

SEQ ID NO: 10471 - protein, 8 aa, Artificial Sequence
  Synthetic polypeptide representing artificial human antibody CDR-H1 region
GYSLSKLS

SEQ ID NO: 10472 - protein, 8 aa, Artificial Sequence
  Synthetic polypeptide representing artificial human antibody CDR-H1 region
GYTLTELS

SEQ ID NO: 10473 - protein, 8 aa, Artificial Sequence
  Synthetic polypeptide representing artificial human antibody CDR-H1 region
GFTFSSYG

SEQ ID NO: 10474 - protein, 8 aa, Artificial Sequence
  Synthetic polypeptide representing artificial human antibody CDR-H1 region
GGSISSYY

SEQ ID NO: 10475 - protein, 8 aa, Artificial Sequence
  Synthetic polypeptide representing artificial human antibody CDR-H1 region
GFTFSTYA

SEQ ID NO: 10476 - protein, 8 aa, Artificial Sequence
  Synthetic polypeptide representing artificial human antibody CDR-H1 region
GFTFSSYG

SEQ ID NO: 10477 - protein, 8 aa, Artificial Sequence
  Synthetic polypeptide representing artificial human antibody CDR-H1 region
GLTVSSNY

SEQ ID NO: 10478 - protein, 8 aa, Artificial Sequence
  Synthetic polypeptide representing artificial human antibody CDR-H1 region
GYTFTGYY

SEQ ID NO: 10479 - protein, 8 aa, Artificial Sequence
  Synthetic polypeptide representing artificial human antibody CDR-H1 region
GFTVSSNY

SEQ ID NO: 10480 - protein, 8 aa, Artificial Sequence
  Synthetic polypeptide representing artificial human antibody CDR-H1 region
GFIFSNAW

SEQ ID NO: 10481 - protein, 8 aa, Artificial Sequence
  Synthetic polypeptide representing artificial human antibody CDR-H1 region
GFTFSSYS

SEQ ID NO: 10482 - protein, 8 aa, Artificial Sequence
  Synthetic polypeptide representing artificial human antibody CDR-H1 region
GFTFSSYA

SEQ ID NO: 10483 - protein, 8 aa, Artificial Sequence
  Synthetic polypeptide representing artificial human antibody CDR-H1 region
GYTFTGYY

SEQ ID NO: 10484 - protein, 8 aa, Artificial Sequence
  Synthetic polypeptide representing artificial human antibody CDR-H1 region
GYTFTSYG

SEQ ID NO: 10485 - protein, 8 aa, Artificial Sequence
  Synthetic polypeptide representing artificial human antibody CDR-H1 region
GFTFSSYG

SEQ ID NO: 10486 - protein, 8 aa, Artificial Sequence
  Synthetic polypeptide representing artificial human antibody CDR-H1 region
GFTFSSYA

SEQ ID NO: 10487 - protein, 8 aa, Artificial Sequence
  Synthetic polypeptide representing artificial human antibody CDR-H1 region
GYTLTELS

SEQ ID NO: 10488 - protein, 8 aa, Artificial Sequence
  Synthetic polypeptide representing artificial human antibody CDR-H1 region
GFTFSSYG

SEQ ID NO: 10489 - protein, 10 aa, Artificial Sequence
  Synthetic polypeptide representing artificial human antibody CDR-H1 region
GFSLSTSGMC

SEQ ID NO: 10490 - protein, 10 aa, Artificial Sequence
  Synthetic polypeptide representing artificial human antibody CDR-H1 region
GASISSDDYY

SEQ ID NO: 10491 - protein, 8 aa, Artificial Sequence
  Synthetic polypeptide representing artificial human antibody CDR-H1 region
GFTFSSYG

SEQ ID NO: 10492 - protein, 8 aa, Artificial Sequence
  Synthetic polypeptide representing artificial human antibody CDR-H1 region
GYSFTSYW

SEQ ID NO: 10493 - protein, 8 aa, Artificial Sequence
  Synthetic polypeptide representing artificial human antibody CDR-H1 region
GGSMSRYY

SEQ ID NO: 10494 - protein, 8 aa, Artificial Sequence
  Synthetic polypeptide representing artificial human antibody CDR-H1 region
GFTFGDYA

SEQ ID NO: 10495 - protein, 8 aa, Artificial Sequence
  Synthetic polypeptide representing artificial human antibody CDR-H1 region
GGTFSSYA

SEQ ID NO: 10496 - protein, 8 aa, Artificial Sequence
  Synthetic polypeptide representing artificial human antibody CDR-H1 region
GFTFSSYG

SEQ ID NO: 10497 - protein, 8 aa, Artificial Sequence
  Synthetic polypeptide representing artificial human antibody CDR-H1 region
GYTFTSYD

SEQ ID NO: 10498 - protein, 8 aa, Artificial Sequence
  Synthetic polypeptide representing artificial human antibody CDR-H1 region
GGSFNTYA

SEQ ID NO: 10499 - protein, 8 aa, Artificial Sequence
  Synthetic polypeptide representing artificial human antibody CDR-H1 region
GFSFNNYN

SEQ ID NO: 10500 - protein, 8 aa, Artificial Sequence
  Synthetic polypeptide representing artificial human antibody CDR-H1 region
GFTFSSYA

SEQ ID NO: 10501 - protein, 8 aa, Artificial Sequence
  Synthetic polypeptide representing artificial human antibody CDR-H1 region
GFTFSSYA

SEQ ID NO: 10502 - protein, 8 aa, Artificial Sequence
  Synthetic polypeptide representing artificial human antibody CDR-H1 region
GFTFSNAW

SEQ ID NO: 10503 - protein, 10 aa, Artificial Sequence
  Synthetic polypeptide representing artificial human antibody CDR-H1 region
GGSVSSGSYY

SEQ ID NO: 10504 - protein, 8 aa, Artificial Sequence
  Synthetic polypeptide representing artificial human antibody CDR-H1 region
GFTFSSYG

SEQ ID NO: 10505 - protein, 8 aa, Artificial Sequence
  Synthetic polypeptide representing artificial human antibody CDR-H1 region
GFTFSSYA

SEQ ID NO: 10506 - protein, 8 aa, Artificial Sequence
  Synthetic polypeptide representing artificial human antibody CDR-H1 region
GFTFSSYD

SEQ ID NO: 10507 - protein, 8 aa, Artificial Sequence
  Synthetic polypeptide representing artificial human antibody CDR-H1 region
GFTFSSYA

SEQ ID NO: 10508 - protein, 10 aa, Artificial Sequence
  Synthetic polypeptide representing artificial human antibody CDR-H1 region
GASVRGGGYS

SEQ ID NO: 10509 - protein, 8 aa, Artificial Sequence
  Synthetic polypeptide representing artificial human antibody CDR-H1 region
GFTFSSYS

SEQ ID NO: 10510 - protein, 8 aa, Artificial Sequence
  Synthetic polypeptide representing artificial human antibody CDR-H1 region
GFAVSSIY

SEQ ID NO: 10511 - protein, 8 aa, Artificial Sequence
  Synthetic polypeptide representing artificial human antibody CDR-H1 region
QFTFSHYE

SEQ ID NO: 10512 - protein, 8 aa, Artificial Sequence
  Synthetic polypeptide representing artificial human antibody CDR-H1 region
GFTFDDYA

SEQ ID NO: 10513 - protein, 10 aa, Artificial Sequence
  Synthetic polypeptide representing artificial human antibody CDR-H1 region
GFSLSTSGMC

SEQ ID NO: 10514 - protein, 8 aa, Artificial Sequence
  Synthetic polypeptide representing artificial human antibody CDR-H1 region
GFTFQNYV

SEQ ID NO: 10515 - protein, 10 aa, Artificial Sequence
  Synthetic polypeptide representing artificial human antibody CDR-H1 region
WDSVSTKEAT

SEQ ID NO: 10516 - protein, 8 aa, Artificial Sequence
  Synthetic polypeptide representing artificial human antibody CDR-H1 region
GFTFSSYG

SEQ ID NO: 10517 - protein, 10 aa, Artificial Sequence
  Synthetic polypeptide representing artificial human antibody CDR-H1 region
GFSLSTSGMC

SEQ ID NO: 10518 - protein, 8 aa, Artificial Sequence
  Synthetic polypeptide representing artificial human antibody CDR-H1 region
GYTFTSYG

SEQ ID NO: 10519 - protein, 8 aa, Artificial Sequence
  Synthetic polypeptide representing artificial human antibody CDR-H1 region
GFTFSSYA

SEQ ID NO: 10520 - protein, 8 aa, Artificial Sequence
  Synthetic polypeptide representing artificial human antibody CDR-H1 region
GFTFSSYA

SEQ ID NO: 10521 - protein, 8 aa, Artificial Sequence
  Synthetic polypeptide representing artificial human antibody CDR-H1 region
GYSFTSYW

SEQ ID NO: 10522 - protein, 8 aa, Artificial Sequence
  Synthetic polypeptide representing artificial human antibody CDR-H1 region
GFTFSSYA

SEQ ID NO: 10523 - protein, 8 aa, Artificial Sequence
  Synthetic polypeptide representing artificial human antibody CDR-H1 region
GYSFTSYW

SEQ ID NO: 10524 - protein, 8 aa, Artificial Sequence
  Synthetic polypeptide representing artificial human antibody CDR-H1 region
GGSISSYY

SEQ ID NO: 10525 - protein, 8 aa, Artificial Sequence
  Synthetic polypeptide representing artificial human antibody CDR-H1 region
GFTFSSYS

SEQ ID NO: 10526 - protein, 8 aa, Artificial Sequence
  Synthetic polypeptide representing artificial human antibody CDR-H1 region
GYTLTELS

SEQ ID NO: 10527 - protein, 8 aa, Artificial Sequence
  Synthetic polypeptide representing artificial human antibody CDR-H1 region
GFTFSSRW

SEQ ID NO: 10528 - protein, 10 aa, Artificial Sequence
  Synthetic polypeptide representing artificial human antibody CDR-H1 region
GGSISSGGYY

SEQ ID NO: 10529 - protein, 8 aa, Artificial Sequence
  Synthetic polypeptide representing artificial human antibody CDR-H1 region
GYTLTELS

SEQ ID NO: 10530 - protein, 8 aa, Artificial Sequence
  Synthetic polypeptide representing artificial human antibody CDR-H1 region
GYSFPSYW

SEQ ID NO: 10531 - protein, 8 aa, Artificial Sequence
  Synthetic polypeptide representing artificial human antibody CDR-H1 region
GFTFSSYG

SEQ ID NO: 10532 - protein, 8 aa, Artificial Sequence
  Synthetic polypeptide representing artificial human antibody CDR-H1 region
GGSISSYY

SEQ ID NO: 10533 - protein, 8 aa, Artificial Sequence
  Synthetic polypeptide representing artificial human antibody CDR-H1 region
GFTFSSYG

SEQ ID NO: 10534 - protein, 8 aa, Artificial Sequence
  Synthetic polypeptide representing artificial human antibody CDR-H1 region
GFTFSSYA

SEQ ID NO: 10535 - protein, 8 aa, Artificial Sequence
  Synthetic polypeptide representing artificial human antibody CDR-H1 region
GFTFSNAW

SEQ ID NO: 10536 - protein, 8 aa, Artificial Sequence
  Synthetic polypeptide representing artificial human antibody CDR-H1 region
GYTLTELS

SEQ ID NO: 10537 - protein, 8 aa, Artificial Sequence
  Synthetic polypeptide representing artificial human antibody CDR-H1 region
GYTLTELS

SEQ ID NO: 10538 - protein, 8 aa, Artificial Sequence
  Synthetic polypeptide representing artificial human antibody CDR-H1 region
GYTFTSYG

SEQ ID NO: 10539 - protein, 8 aa, Artificial Sequence
  Synthetic polypeptide representing artificial human antibody CDR-H1 region
GFTFSSYD

SEQ ID NO: 10540 - protein, 10 aa, Artificial Sequence
  Synthetic polypeptide representing artificial human antibody CDR-H1 region
GGSVSSGSYY

SEQ ID NO: 10541 - protein, 8 aa, Artificial Sequence
  Synthetic polypeptide representing artificial human antibody CDR-H1 region
GYTFTSYA

SEQ ID NO: 10542 - protein, 8 aa, Artificial Sequence
  Synthetic polypeptide representing artificial human antibody CDR-H1 region
GFTFSSYA

SEQ ID NO: 10543 - protein, 8 aa, Artificial Sequence
  Synthetic polypeptide representing artificial human antibody CDR-H1 region
GFTFSSYG

SEQ ID NO: 10544 - protein, 8 aa, Artificial Sequence
  Synthetic polypeptide representing artificial human antibody CDR-H1 region
GYTFTSYY

SEQ ID NO: 10545 - protein, 8 aa, Artificial Sequence
  Synthetic polypeptide representing artificial human antibody CDR-H1 region
GFTFSSYA

SEQ ID NO: 10546 - protein, 8 aa, Artificial Sequence
  Synthetic polypeptide representing artificial human antibody CDR-H1 region
GYTFTSYY

SEQ ID NO: 10547 - protein, 9 aa, Artificial Sequence
  Synthetic polypeptide representing artificial human antibody CDR-H1 region
DDSISSKNW

SEQ ID NO: 10548 - protein, 10 aa, Artificial Sequence
  Synthetic polypeptide representing artificial human antibody CDR-H1 region
GGSISSSSYY

SEQ ID NO: 10549 - protein, 8 aa, Artificial Sequence
  Synthetic polypeptide representing artificial human antibody CDR-H1 region
GYRFTSYW

SEQ ID NO: 10550 - protein, 8 aa, Artificial Sequence
  Synthetic polypeptide representing artificial human antibody CDR-H1 region
GFIFEDYS

SEQ ID NO: 10551 - protein, 10 aa, Artificial Sequence
  Synthetic polypeptide representing artificial human antibody CDR-H1 region
GDSISSGGYY

SEQ ID NO: 10552 - protein, 8 aa, Artificial Sequence
  Synthetic polypeptide representing artificial human antibody CDR-H1 region
DTSLRSYS

SEQ ID NO: 10553 - protein, 8 aa, Artificial Sequence
  Synthetic polypeptide representing artificial human antibody CDR-H1 region
GFTFDDYA

SEQ ID NO: 10554 - protein, 10 aa, Artificial Sequence
  Synthetic polypeptide representing artificial human antibody CDR-H1 region
GGSISSGGYY

SEQ ID NO: 10555 - protein, 8 aa, Artificial Sequence
  Synthetic polypeptide representing artificial human antibody CDR-H1 region
GGSMSSYY

SEQ ID NO: 10556 - protein, 8 aa, Artificial Sequence
  Synthetic polypeptide representing artificial human antibody CDR-H1 region
GFTFSSYA

SEQ ID NO: 10557 - protein, 8 aa, Artificial Sequence
  Synthetic polypeptide representing artificial human antibody CDR-H1 region
GFTFSSYA

SEQ ID NO: 10558 - protein, 8 aa, Artificial Sequence
  Synthetic polypeptide representing artificial human antibody CDR-H1 region
GGSISSYY

SEQ ID NO: 10559 - protein, 8 aa, Artificial Sequence
  Synthetic polypeptide representing artificial human antibody CDR-H1 region
GFTVSSNY

SEQ ID NO: 10560 - protein, 8 aa, Artificial Sequence
  Synthetic polypeptide representing artificial human antibody CDR-H1 region
GFVFTGAW

SEQ ID NO: 10561 - protein, 8 aa, Artificial Sequence
  Synthetic polypeptide representing artificial human antibody CDR-H1 region
GFIFSSYE

SEQ ID NO: 10562 - protein, 8 aa, Artificial Sequence
  Synthetic polypeptide representing artificial human antibody CDR-H1 region
GFSLSKYW

SEQ ID NO: 10563 - protein, 8 aa, Artificial Sequence
  Synthetic polypeptide representing artificial human antibody CDR-H1 region
GFTFIHSA

SEQ ID NO: 10564 - protein, 8 aa, Artificial Sequence
  Synthetic polypeptide representing artificial human antibody CDR-H1 region
GGTFSTYT

SEQ ID NO: 10565 - protein, 8 aa, Artificial Sequence
  Synthetic polypeptide representing artificial human antibody CDR-H1 region
GGSISSYY

SEQ ID NO: 10566 - protein, 8 aa, Artificial Sequence
  Synthetic polypeptide representing artificial human antibody CDR-H1 region
GYTFTDYY

SEQ ID NO: 10567 - protein, 10 aa, Artificial Sequence
  Synthetic polypeptide representing artificial human antibody CDR-H1 region
GDSISSDTAA

SEQ ID NO: 10568 - protein, 10 aa, Artificial Sequence
  Synthetic polypeptide representing artificial human antibody CDR-H1 region
GDSISGGDYY

SEQ ID NO: 10569 - protein, 8 aa, Artificial Sequence
  Synthetic polypeptide representing artificial human antibody CDR-H1 region
GYVFAKYA

SEQ ID NO: 10570 - protein, 8 aa, Artificial Sequence
  Synthetic polypeptide representing artificial human antibody CDR-H1 region
GNSLSDLS

SEQ ID NO: 10571 - protein, 8 aa, Artificial Sequence
  Synthetic polypeptide representing artificial human antibody CDR-H1 region
GFSFSDHY

SEQ ID NO: 10572 - protein, 8 aa, Artificial Sequence
  Synthetic polypeptide representing artificial human antibody CDR-H1 region
GFSFSNYW

SEQ ID NO: 10573 - protein, 8 aa, Artificial Sequence
  Synthetic polypeptide representing artificial human antibody CDR-H1 region
GRSISGSY

SEQ ID NO: 10574 - protein, 8 aa, Artificial Sequence
  Synthetic polypeptide representing artificial human antibody CDR-H1 region
GFSVTTTQ

SEQ ID NO: 10575 - protein, 8 aa, Artificial Sequence
  Synthetic polypeptide representing artificial human antibody CDR-H1 region
GFTFSSYA

SEQ ID NO: 10576 - protein, 8 aa, Artificial Sequence
  Synthetic polypeptide representing artificial human antibody CDR-H1 region
GFTFSNYA

SEQ ID NO: 10577 - protein, 8 aa, Artificial Sequence
  Synthetic polypeptide representing artificial human antibody CDR-H1 region
GFFVTEYD

SEQ ID NO: 10578 - protein, 8 aa, Artificial Sequence
  Synthetic polypeptide representing artificial human antibody CDR-H1 region
GDSLNGFD

SEQ ID NO: 10579 - protein, 10 aa, Artificial Sequence
  Synthetic polypeptide representing artificial human antibody CDR-H1 region
GDSISIDGFY

SEQ ID NO: 10580 - protein, 8 aa, Artificial Sequence
  Synthetic polypeptide representing artificial human antibody CDR-H1 region
GFTFSSYW

SEQ ID NO: 10581 - protein, 8 aa, Artificial Sequence
  Synthetic polypeptide representing artificial human antibody CDR-H1 region
GFTFSPYW

SEQ ID NO: 10582 - protein, 8 aa, Artificial Sequence
  Synthetic polypeptide representing artificial human antibody CDR-H1 region
RLSVSRYA

SEQ ID NO: 10583 - protein, 8 aa, Artificial Sequence
  Synthetic polypeptide representing artificial human antibody CDR-H1 region
GFIFSDHY

SEQ ID NO: 10584 - protein, 10 aa, Artificial Sequence
  Synthetic polypeptide representing artificial human antibody CDR-H1 region
GASLSSGSYY

SEQ ID NO: 10585 - protein, 8 aa, Artificial Sequence
  Synthetic polypeptide representing artificial human antibody CDR-H1 region
GYTFTRYA

SEQ ID NO: 10586 - protein, 8 aa, Artificial Sequence
  Synthetic polypeptide representing artificial human antibody CDR-H1 region
GFMFSSSW

SEQ ID NO: 10587 - protein, 8 aa, Artificial Sequence
  Synthetic polypeptide representing artificial human antibody CDR-H1 region
GDTFTKYA

SEQ ID NO: 10588 - protein, 8 aa, Artificial Sequence
  Synthetic polypeptide representing artificial human antibody CDR-H1 region
GYSFTSYW

SEQ ID NO: 10589 - protein, 8 aa, Artificial Sequence
  Synthetic polypeptide representing artificial human antibody CDR-H1 region
GFTFTNHG

SEQ ID NO: 10590 - protein, 8 aa, Artificial Sequence
  Synthetic polypeptide representing artificial human antibody CDR-H1 region
GFSFSSYA

SEQ ID NO: 10591 - protein, 9 aa, Artificial Sequence
  Synthetic polypeptide representing artificial human antibody CDR-H1 region
PGSINLSLR

SEQ ID NO: 10592 - protein, 8 aa, Artificial Sequence
  Synthetic polypeptide representing artificial human antibody CDR-H1 region
GFTFSSYS

SEQ ID NO: 10593 - protein, 8 aa, Artificial Sequence
  Synthetic polypeptide representing artificial human antibody CDR-H1 region
GFTFSSYG

SEQ ID NO: 10594 - protein, 10 aa, Artificial Sequence
  Synthetic polypeptide representing artificial human antibody CDR-H1 region
GGSISSGDYY

SEQ ID NO: 10595 - protein, 8 aa, Artificial Sequence
  Synthetic polypeptide representing artificial human antibody CDR-H1 region
GYTFTSYY

SEQ ID NO: 10596 - protein, 8 aa, Artificial Sequence
  Synthetic polypeptide representing artificial human antibody CDR-H1 region
GFLVTSNF

SEQ ID NO: 10597 - protein, 8 aa, Artificial Sequence
  Synthetic polypeptide representing artificial human antibody CDR-H1 region
GFTFSSYE

SEQ ID NO: 10598 - protein, 10 aa, Artificial Sequence
  Synthetic polypeptide representing artificial human antibody CDR-H1 region
GGSISSGDYY

SEQ ID NO: 10599 - protein, 8 aa, Artificial Sequence
  Synthetic polypeptide representing artificial human antibody CDR-H1 region
GFTFSDHY

SEQ ID NO: 10600 - protein, 8 aa, Artificial Sequence
  Synthetic polypeptide representing artificial human antibody CDR-H1 region
GFRFFNYW

SEQ ID NO: 10601 - protein, 8 aa, Artificial Sequence
  Synthetic polypeptide representing artificial human antibody CDR-H1 region
GFTFSDYY

SEQ ID NO: 10602 - protein, 10 aa, Artificial Sequence
  Synthetic polypeptide representing artificial human antibody CDR-H1 region
GFSLSTSGMC

SEQ ID NO: 10603 - protein, 8 aa, Artificial Sequence
  Synthetic polypeptide representing artificial human antibody CDR-H1 region
GFVFSNFA

SEQ ID NO: 10604 - protein, 8 aa, Artificial Sequence
  Synthetic polypeptide representing artificial human antibody CDR-H1 region
GFTFSSYA

SEQ ID NO: 10605 - protein, 10 aa, Artificial Sequence
  Synthetic polypeptide representing artificial human antibody CDR-H1 region
GGSISNGNYY

SEQ ID NO: 10606 - protein, 8 aa, Artificial Sequence
  Synthetic polypeptide representing artificial human antibody CDR-H1 region
GFIFDYYE

SEQ ID NO: 10607 - protein, 8 aa, Artificial Sequence
  Synthetic polypeptide representing artificial human antibody CDR-H1 region
GYSLTEVG

SEQ ID NO: 10608 - protein, 10 aa, Artificial Sequence
  Synthetic polypeptide representing artificial human antibody CDR-H1 region
GGSISSGSYY

SEQ ID NO: 10609 - protein, 8 aa, Artificial Sequence
  Synthetic polypeptide representing artificial human antibody CDR-H1 region
GGTFSNYA

SEQ ID NO: 10610 - protein, 8 aa, Artificial Sequence
  Synthetic polypeptide representing artificial human antibody CDR-H1 region
GYILSALP

SEQ ID NO: 10611 - protein, 8 aa, Artificial Sequence
  Synthetic polypeptide representing artificial human antibody CDR-H1 region
GFTFDDYA

SEQ ID NO: 10612 - protein, 10 aa, Artificial Sequence
  Synthetic polypeptide representing artificial human antibody CDR-H1 region
GGSISSGEYY

SEQ ID NO: 10613 - protein, 8 aa, Artificial Sequence
  Synthetic polypeptide representing artificial human antibody CDR-H1 region
GFTFSSYG

SEQ ID NO: 10614 - protein, 8 aa, Artificial Sequence
  Synthetic polypeptide representing artificial human antibody CDR-H1 region
GYRFSTHW

SEQ ID NO: 10615 - protein, 8 aa, Artificial Sequence
  Synthetic polypeptide representing artificial human antibody CDR-H1 region
GYTFSSYF

SEQ ID NO: 10616 - protein, 8 aa, Artificial Sequence
  Synthetic polypeptide representing artificial human antibody CDR-H1 region
GYTFTSYY

SEQ ID NO: 10617 - protein, 8 aa, Artificial Sequence
  Synthetic polypeptide representing artificial human antibody CDR-H1 region
GYTFTSYG

SEQ ID NO: 10618 - protein, 8 aa, Artificial Sequence
  Synthetic polypeptide representing artificial human antibody CDR-H1 region
GFTFSSYW

SEQ ID NO: 10619 - protein, 8 aa, Artificial Sequence
  Synthetic polypeptide representing artificial human antibody CDR-H1 region
GFTFSMAW

SEQ ID NO: 10620 - protein, 8 aa, Artificial Sequence
  Synthetic polypeptide representing artificial human antibody CDR-H1 region
GFTFSSYG

SEQ ID NO: 10621 - protein, 10 aa, Artificial Sequence
  Synthetic polypeptide representing artificial human antibody CDR-H1 region
GVSISSSRDF

SEQ ID NO: 10622 - protein, 10 aa, Artificial Sequence
  Synthetic polypeptide representing artificial human antibody CDR-H1 region
GFSLSTSGMC

SEQ ID NO: 10623 - protein, 8 aa, Artificial Sequence
  Synthetic polypeptide representing artificial human antibody CDR-H1 region
GYTFTSYG

SEQ ID NO: 10624 - protein, 8 aa, Artificial Sequence
  Synthetic polypeptide representing artificial human antibody CDR-H1 region
GFTFSSYG

SEQ ID NO: 10625 - protein, 8 aa, Artificial Sequence
  Synthetic polypeptide representing artificial human antibody CDR-H1 region
GGTFSSHA

SEQ ID NO: 10626 - protein, 10 aa, Artificial Sequence
  Synthetic polypeptide representing artificial human antibody CDR-H1 region
GFSLSTSGVS

SEQ ID NO: 10627 - protein, 8 aa, Artificial Sequence
  Synthetic polypeptide representing artificial human antibody CDR-H1 region
GFTFNLYY

SEQ ID NO: 10628 - protein, 10 aa, Artificial Sequence
  Synthetic polypeptide representing artificial human antibody CDR-H1 region
GDSVSSSTYY

SEQ ID NO: 10629 - protein, 8 aa, Artificial Sequence
  Synthetic polypeptide representing artificial human antibody CDR-H1 region
GFTVGSSF

SEQ ID NO: 10630 - protein, 8 aa, Artificial Sequence
  Synthetic polypeptide representing artificial human antibody CDR-H1 region
GYSFVSDR

SEQ ID NO: 10631 - protein, 8 aa, Artificial Sequence
  Synthetic polypeptide representing artificial human antibody CDR-H1 region
GFTFSSYA

SEQ ID NO: 10632 - protein, 10 aa, Artificial Sequence
  Synthetic polypeptide representing artificial human antibody CDR-H1 region
GDSIGTTSYY

SEQ ID NO: 10633 - protein, 8 aa, Artificial Sequence
  Synthetic polypeptide representing artificial human antibody CDR-H1 region
GLTFKNYW

SEQ ID NO: 10634 - protein, 10 aa, Artificial Sequence
  Synthetic polypeptide representing artificial human antibody CDR-H1 region
GDRVSSNTGA

SEQ ID NO: 10635 - protein, 8 aa, Artificial Sequence
  Synthetic polypeptide representing artificial human antibody CDR-H1 region
GYTFTTYG

SEQ ID NO: 10636 - protein, 8 aa, Artificial Sequence
  Synthetic polypeptide representing artificial human antibody CDR-H1 region
GYTFTTYG

SEQ ID NO: 10637 - protein, 8 aa, Artificial Sequence
  Synthetic polypeptide representing artificial human antibody CDR-H1 region
EFTFRVYD

SEQ ID NO: 10638 - protein, 10 aa, Artificial Sequence
  Synthetic polypeptide representing artificial human antibody CDR-H1 region
GFSLSTSGVA

SEQ ID NO: 10639 - protein, 8 aa, Artificial Sequence
  Synthetic polypeptide representing artificial human antibody CDR-H1 region
GFTFNTFD

SEQ ID NO: 10640 - protein, 8 aa, Artificial Sequence
  Synthetic polypeptide representing artificial human antibody CDR-H1 region
GFTFNTFD

SEQ ID NO: 10641 - protein, 10 aa, Artificial Sequence
  Synthetic polypeptide representing artificial human antibody CDR-H1 region
GDSISSTSNY

SEQ ID NO: 10642 - protein, 10 aa, Artificial Sequence
  Synthetic polypeptide representing artificial human antibody CDR-H1 region
GDSITSSSYY

SEQ ID NO: 10643 - protein, 8 aa, Artificial Sequence
  Synthetic polypeptide representing artificial human antibody CDR-H1 region
GFTFATHA

SEQ ID NO: 10644 - protein, 8 aa, Artificial Sequence
  Synthetic polypeptide representing artificial human antibody CDR-H1 region
GFSVSSNY

SEQ ID NO: 10645 - protein, 10 aa, Artificial Sequence
  Synthetic polypeptide representing artificial human antibody CDR-H1 region
GDSISSSSYH

SEQ ID NO: 10646 - protein, 8 aa, Artificial Sequence
  Synthetic polypeptide representing artificial human antibody CDR-H1 region
GYTFTDYY

SEQ ID NO: 10647 - protein, 10 aa, Artificial Sequence
  Synthetic polypeptide representing artificial human antibody CDR-H1 region
GGSISSSSYY

SEQ ID NO: 10648 - protein, 8 aa, Artificial Sequence
  Synthetic polypeptide representing artificial human antibody CDR-H1 region
GFTFSSYA

SEQ ID NO: 10649 - protein, 8 aa, Artificial Sequence
  Synthetic polypeptide representing artificial human antibody CDR-H1 region
GGSFSGYH

SEQ ID NO: 10650 - protein, 8 aa, Artificial Sequence
  Synthetic polypeptide representing artificial human antibody CDR-H1 region
GFSISNYY

SEQ ID NO: 10651 - protein, 8 aa, Artificial Sequence
  Synthetic polypeptide representing artificial human antibody CDR-H1 region
GFNFGTYA

SEQ ID NO: 10652 - protein, 8 aa, Artificial Sequence
  Synthetic polypeptide representing artificial human antibody CDR-H1 region
GITFSSYE

SEQ ID NO: 10653 - protein, 8 aa, Artificial Sequence
  Synthetic polypeptide representing artificial human antibody CDR-H1 region
GFSFTNYD

SEQ ID NO: 10654 - protein, 8 aa, Artificial Sequence
  Synthetic polypeptide representing artificial human antibody CDR-H1 region
GFTFSNYA

SEQ ID NO: 10655 - protein, 8 aa, Artificial Sequence
  Synthetic polypeptide representing artificial human antibody CDR-H1 region
GVSMSGFY

SEQ ID NO: 10656 - protein, 8 aa, Artificial Sequence
  Synthetic polypeptide representing artificial human antibody CDR-H1 region
GMIFSSYE

SEQ ID NO: 10657 - protein, 8 aa, Artificial Sequence
  Synthetic polypeptide representing artificial human antibody CDR-H1 region
DIPIRYFF

SEQ ID NO: 10658 - protein, 8 aa, Artificial Sequence
  Synthetic polypeptide representing artificial human antibody CDR-H1 region
GGSISGHY

SEQ ID NO: 10659 - protein, 8 aa, Artificial Sequence
  Synthetic polypeptide representing artificial human antibody CDR-H1 region
GFNFGDYA

SEQ ID NO: 10660 - protein, 8 aa, Artificial Sequence
  Synthetic polypeptide representing artificial human antibody CDR-H1 region
GFTFSSYG

SEQ ID NO: 10661 - protein, 8 aa, Artificial Sequence
  Synthetic polypeptide representing artificial human antibody CDR-H1 region
GFNFSSHE

SEQ ID NO: 10662 - protein, 8 aa, Artificial Sequence
  Synthetic polypeptide representing artificial human antibody CDR-H1 region
GFILGNYW

SEQ ID NO: 10663 - protein, 8 aa, Artificial Sequence
  Synthetic polypeptide representing artificial human antibody CDR-H1 region
GRSFSGYH

SEQ ID NO: 10664 - protein, 8 aa, Artificial Sequence
  Synthetic polypeptide representing artificial human antibody CDR-H1 region
GFFFSSFE

SEQ ID NO: 10665 - protein, 8 aa, Artificial Sequence
  Synthetic polypeptide representing artificial human antibody CDR-H1 region
GFPFSSYV

SEQ ID NO: 10666 - protein, 8 aa, Artificial Sequence
  Synthetic polypeptide representing artificial human antibody CDR-H1 region
GYTFTKNY

SEQ ID NO: 10667 - protein, 8 aa, Artificial Sequence
  Synthetic polypeptide representing artificial human antibody CDR-H1 region
EFAFSIYA

SEQ ID NO: 10668 - protein, 10 aa, Artificial Sequence
  Synthetic polypeptide representing artificial human antibody CDR-H1 region
GGSISGSFFY

SEQ ID NO: 10669 - protein, 12 aa, Artificial Sequence
  Synthetic polypeptide representing artificial human antibody CDR-H1 region
GYPFVKRFTNFW

SEQ ID NO: 10670 - protein, 8 aa, Artificial Sequence
  Synthetic polypeptide representing artificial human antibody CDR-H1 region
GFIFRTYE

SEQ ID NO: 10671 - protein, 8 aa, Artificial Sequence
  Synthetic polypeptide representing artificial human antibody CDR-H1 region
EFTFSGST

SEQ ID NO: 10672 - protein, 8 aa, Artificial Sequence
  Synthetic polypeptide representing artificial human antibody CDR-H1 region
GFAFSFYG

SEQ ID NO: 10673 - protein, 11 aa, Artificial Sequence
  Synthetic polypeptide representing artificial human antibody CDR-H1 region
GGSISSFHWNH

SEQ ID NO: 10674 - protein, 10 aa, Artificial Sequence
  Synthetic polypeptide representing artificial human antibody CDR-H1 region
GVSTSSSDYY

SEQ ID NO: 10675 - protein, 8 aa, Artificial Sequence
  Synthetic polypeptide representing artificial human antibody CDR-H1 region
GFSVSSNY

SEQ ID NO: 10676 - protein, 8 aa, Artificial Sequence
  Synthetic polypeptide representing artificial human antibody CDR-H1 region
GFTFSSYG

SEQ ID NO: 10677 - protein, 8 aa, Artificial Sequence
  Synthetic polypeptide representing artificial human antibody CDR-H1 region
GFTFSDYS

SEQ ID NO: 10678 - protein, 8 aa, Artificial Sequence
  Synthetic polypeptide representing artificial human antibody CDR-H1 region
GFTFTTSN

SEQ ID NO: 10679 - protein, 8 aa, Artificial Sequence
  Synthetic polypeptide representing artificial human antibody CDR-H1 region
GFPFTALG

SEQ ID NO: 10680 - protein, 8 aa, Artificial Sequence
  Synthetic polypeptide representing artificial human antibody CDR-H1 region
GYTFTGYD

SEQ ID NO: 10681 - protein, 8 aa, Artificial Sequence
  Synthetic polypeptide representing artificial human antibody CDR-H1 region
GFTFSDYA

SEQ ID NO: 10682 - protein, 10 aa, Artificial Sequence
  Synthetic polypeptide representing artificial human antibody CDR-H1 region
GGSVTNRTYY

SEQ ID NO: 10683 - protein, 8 aa, Artificial Sequence
  Synthetic polypeptide representing artificial human antibody CDR-H1 region
GFTFSNYG

SEQ ID NO: 10684 - protein, 8 aa, Artificial Sequence
  Synthetic polypeptide representing artificial human antibody CDR-H1 region
GYTFTGYY

SEQ ID NO: 10685 - protein, 8 aa, Artificial Sequence
  Synthetic polypeptide representing artificial human antibody CDR-H1 region
GGSFSGYY

SEQ ID NO: 10686 - protein, 8 aa, Artificial Sequence
  Synthetic polypeptide representing artificial human antibody CDR-H1 region
GFTFSSYD

SEQ ID NO: 10687 - protein, 10 aa, Artificial Sequence
  Synthetic polypeptide representing artificial human antibody CDR-H1 region
GGSISSSSYY

SEQ ID NO: 10688 - protein, 8 aa, Artificial Sequence
  Synthetic polypeptide representing artificial human antibody CDR-H1 region
GYSFTTHW

SEQ ID NO: 10689 - protein, 10 aa, Artificial Sequence
  Synthetic polypeptide representing artificial human antibody CDR-H1 region
GDSISTTNYY

SEQ ID NO: 10690 - protein, 8 aa, Artificial Sequence
  Synthetic polypeptide representing artificial human antibody CDR-H1 region
GGSFSGYH

SEQ ID NO: 10691 - protein, 8 aa, Artificial Sequence
  Synthetic polypeptide representing artificial human antibody CDR-H1 region
GFTFSSYW

SEQ ID NO: 10692 - protein, 10 aa, Artificial Sequence
  Synthetic polypeptide representing artificial human antibody CDR-H1 region
GGSIRGSRDY

SEQ ID NO: 10693 - protein, 8 aa, Artificial Sequence
  Synthetic polypeptide representing artificial human antibody CDR-H1 region
GYSFTGYY

SEQ ID NO: 10694 - protein, 8 aa, Artificial Sequence
  Synthetic polypeptide representing artificial human antibody CDR-H1 region
GYTFTGYY

SEQ ID NO: 10695 - protein, 8 aa, Artificial Sequence
  Synthetic polypeptide representing artificial human antibody CDR-H1 region
GGSFSGYH

SEQ ID NO: 10696 - protein, 8 aa, Artificial Sequence
  Synthetic polypeptide representing artificial human antibody CDR-H1 region
GFTFSSYS

SEQ ID NO: 10697 - protein, 10 aa, Artificial Sequence
  Synthetic polypeptide representing artificial human antibody CDR-H1 region
GGSINRSRFL

SEQ ID NO: 10698 - protein, 8 aa, Artificial Sequence
  Synthetic polypeptide representing artificial human antibody CDR-H1 region
GFIFRTYE

SEQ ID NO: 10699 - protein, 10 aa, Artificial Sequence
  Synthetic polypeptide representing artificial human antibody CDR-H1 region
GFSLSNARMG

SEQ ID NO: 10700 - protein, 8 aa, Artificial Sequence
  Synthetic polypeptide representing artificial human antibody CDR-H1 region
GFTFNAYW

SEQ ID NO: 10701 - protein, 8 aa, Artificial Sequence
  Synthetic polypeptide representing artificial human antibody CDR-H1 region
GYPFTDFG

SEQ ID NO: 10702 - protein, 8 aa, Artificial Sequence
  Synthetic polypeptide representing artificial human antibody CDR-H1 region
GFSFSFYA

SEQ ID NO: 10703 - protein, 8 aa, Artificial Sequence
  Synthetic polypeptide representing artificial human antibody CDR-H1 region
GFTFSSYE

SEQ ID NO: 10704 - protein, 8 aa, Artificial Sequence
  Synthetic polypeptide representing artificial human antibody CDR-H1 region
GVTFTRYS

SEQ ID NO: 10705 - protein, 8 aa, Artificial Sequence
  Synthetic polypeptide representing artificial human antibody CDR-H1 region
GGAFRGHY

SEQ ID NO: 10706 - protein, 8 aa, Artificial Sequence
  Synthetic polypeptide representing artificial human antibody CDR-H1 region
GGSISSYY

SEQ ID NO: 10707 - protein, 10 aa, Artificial Sequence
  Synthetic polypeptide representing artificial human antibody CDR-H1 region
GGSISSGGYY

SEQ ID NO: 10708 - protein, 10 aa, Artificial Sequence
  Synthetic polypeptide representing artificial human antibody CDR-H1 region
GGSISSGGYY

SEQ ID NO: 10709 - protein, 10 aa, Artificial Sequence
  Synthetic polypeptide representing artificial human antibody CDR-H1 region
GGSISSGGYY

SEQ ID NO: 10710 - protein, 8 aa, Artificial Sequence
  Synthetic polypeptide representing artificial human antibody CDR-H1 region
GFTFSSYA

SEQ ID NO: 10711 - protein, 8 aa, Artificial Sequence
  Synthetic polypeptide representing artificial human antibody CDR-H1 region
GFTFSNAW

SEQ ID NO: 10712 - protein, 8 aa, Artificial Sequence
  Synthetic polypeptide representing artificial human antibody CDR-H1 region
GGSFSDYY

SEQ ID NO: 10713 - protein, 8 aa, Artificial Sequence
  Synthetic polypeptide representing artificial human antibody CDR-H1 region
GFTVSSNY

SEQ ID NO: 10714 - protein, 8 aa, Artificial Sequence
  Synthetic polypeptide representing artificial human antibody CDR-H1 region
GGTFSSYA

SEQ ID NO: 10715 - protein, 8 aa, Artificial Sequence
  Synthetic polypeptide representing artificial human antibody CDR-H1 region
GFTFSRYA

SEQ ID NO: 10716 - protein, 8 aa, Artificial Sequence
  Synthetic polypeptide representing artificial human antibody CDR-H1 region
GYTFTSYG

SEQ ID NO: 10717 - protein, 10 aa, Artificial Sequence
  Synthetic polypeptide representing artificial human antibody CDR-H1 region
GGSISSSSYY

SEQ ID NO: 10718 - protein, 10 aa, Artificial Sequence
  Synthetic polypeptide representing artificial human antibody CDR-H1 region
GFSLSNDRMG

SEQ ID NO: 10719 - protein, 8 aa, Artificial Sequence
  Synthetic polypeptide representing artificial human antibody CDR-H1 region
GYSFTSYW

SEQ ID NO: 10720 - protein, 10 aa, Artificial Sequence
  Synthetic polypeptide representing artificial human antibody CDR-H1 region
GGSISSSSYY

SEQ ID NO: 10721 - protein, 8 aa, Artificial Sequence
  Synthetic polypeptide representing artificial human antibody CDR-H1 region
GASVRDEF

SEQ ID NO: 10722 - protein, 10 aa, Artificial Sequence
  Synthetic polypeptide representing artificial human antibody CDR-H1 region
GFSLSTSGVG

SEQ ID NO: 10723 - protein, 8 aa, Artificial Sequence
  Synthetic polypeptide representing artificial human antibody CDR-H1 region
GFTFTTYG

SEQ ID NO: 10724 - protein, 8 aa, Artificial Sequence
  Synthetic polypeptide representing artificial human antibody CDR-H1 region
GFTFSNYA

SEQ ID NO: 10725 - protein, 8 aa, Artificial Sequence
  Synthetic polypeptide representing artificial human antibody CDR-H1 region
GFTFSSYG

SEQ ID NO: 10726 - protein, 8 aa, Artificial Sequence
  Synthetic polypeptide representing artificial human antibody CDR-H1 region
GGSFSDSY

SEQ ID NO: 10727 - protein, 10 aa, Artificial Sequence
  Synthetic polypeptide representing artificial human antibody CDR-H1 region
GGSISSGDYY

SEQ ID NO: 10728 - protein, 8 aa, Artificial Sequence
  Synthetic polypeptide representing artificial human antibody CDR-H1 region
GFTFSSYG

SEQ ID NO: 10729 - protein, 8 aa, Artificial Sequence
  Synthetic polypeptide representing artificial human antibody CDR-H1 region
GFTFSSYS

SEQ ID NO: 10730 - protein, 8 aa, Artificial Sequence
  Synthetic polypeptide representing artificial human antibody CDR-H1 region
GYSFTSYW

SEQ ID NO: 10731 - protein, 8 aa, Artificial Sequence
  Synthetic polypeptide representing artificial human antibody CDR-H1 region
GGTFSSYA

SEQ ID NO: 10732 - protein, 8 aa, Artificial Sequence
  Synthetic polypeptide representing artificial human antibody CDR-H1 region
GGTFNKYG

SEQ ID NO: 10733 - protein, 8 aa, Artificial Sequence
  Synthetic polypeptide representing artificial human antibody CDR-H1 region
GGTFSSYA

SEQ ID NO: 10734 - protein, 8 aa, Artificial Sequence
  Synthetic polypeptide representing artificial human antibody CDR-H1 region
GGTFSSYA

SEQ ID NO: 10735 - protein, 8 aa, Artificial Sequence
  Synthetic polypeptide representing artificial human antibody CDR-H1 region
GFSLSRFG

SEQ ID NO: 10736 - protein, 8 aa, Artificial Sequence
  Synthetic polypeptide representing artificial human antibody CDR-H1 region
GYSFTSYW

SEQ ID NO: 10737 - protein, 8 aa, Artificial Sequence
  Synthetic polypeptide representing artificial human antibody CDR-H1 region
GFTFSNYV

SEQ ID NO: 10738 - protein, 10 aa, Artificial Sequence
  Synthetic polypeptide representing artificial human antibody CDR-H1 region
GGSISSSSYY

SEQ ID NO: 10739 - protein, 8 aa, Artificial Sequence
  Synthetic polypeptide representing artificial human antibody CDR-H1 region
GFTFSSYA

SEQ ID NO: 10740 - protein, 8 aa, Artificial Sequence
  Synthetic polypeptide representing artificial human antibody CDR-H1 region
GYTFTSYA

SEQ ID NO: 10741 - protein, 8 aa, Artificial Sequence
  Synthetic polypeptide representing artificial human antibody CDR-H1 region
GFTFSTYR

SEQ ID NO: 10742 - protein, 8 aa, Artificial Sequence
  Synthetic polypeptide representing artificial human antibody CDR-H1 region
GYTLTELS

SEQ ID NO: 10743 - protein, 10 aa, Artificial Sequence
  Synthetic polypeptide representing artificial human antibody CDR-H1 region
GGSMSGSGYT

SEQ ID NO: 10744 - protein, 8 aa, Artificial Sequence
  Synthetic polypeptide representing artificial human antibody CDR-H1 region
GFTVSSNY

SEQ ID NO: 10745 - protein, 10 aa, Artificial Sequence
  Synthetic polypeptide representing artificial human antibody CDR-H1 region
GFSLSTSGVG

SEQ ID NO: 10746 - protein, 10 aa, Artificial Sequence
  Synthetic polypeptide representing artificial human antibody CDR-H1 region
GFSLSTSGMC

SEQ ID NO: 10747 - protein, 8 aa, Artificial Sequence
  Synthetic polypeptide representing artificial human antibody CDR-H1 region
GGTFRKYD

SEQ ID NO: 10748 - protein, 8 aa, Artificial Sequence
  Synthetic polypeptide representing artificial human antibody CDR-H1 region
GGSFTENY

SEQ ID NO: 10749 - protein, 8 aa, Artificial Sequence
  Synthetic polypeptide representing artificial human antibody CDR-H1 region
GFTFSSYA

SEQ ID NO: 10750 - protein, 8 aa, Artificial Sequence
  Synthetic polypeptide representing artificial human antibody CDR-H1 region
GFTFSSYG

SEQ ID NO: 10751 - protein, 8 aa, Artificial Sequence
  Synthetic polypeptide representing artificial human antibody CDR-H1 region
GYTFTSYA

SEQ ID NO: 10752 - protein, 8 aa, Artificial Sequence
  Synthetic polypeptide representing artificial human antibody CDR-H1 region
GFTFSSYS

SEQ ID NO: 10753 - protein, 8 aa, Artificial Sequence
  Synthetic polypeptide representing artificial human antibody CDR-H1 region
GLPLSDSY

SEQ ID NO: 10754 - protein, 8 aa, Artificial Sequence
  Synthetic polypeptide representing artificial human antibody CDR-H1 region
GFTFSSSA

SEQ ID NO: 10755 - protein, 8 aa, Artificial Sequence
  Synthetic polypeptide representing artificial human antibody CDR-H1 region
GFTFSSYS

SEQ ID NO: 10756 - protein, 8 aa, Artificial Sequence
  Synthetic polypeptide representing artificial human antibody CDR-H1 region
GYTFTSYY

SEQ ID NO: 10757 - protein, 8 aa, Artificial Sequence
  Synthetic polypeptide representing artificial human antibody CDR-H1 region
GFTFDDYA

SEQ ID NO: 10758 - protein, 8 aa, Artificial Sequence
  Synthetic polypeptide representing artificial human antibody CDR-H1 region
GFTFSSYA

SEQ ID NO: 10759 - protein, 8 aa, Artificial Sequence
  Synthetic polypeptide representing artificial human antibody CDR-H1 region
GFTFSSYA

SEQ ID NO: 10760 - protein, 8 aa, Artificial Sequence
  Synthetic polypeptide representing artificial human antibody CDR-H1 region
GFTFSSYS

SEQ ID NO: 10761 - protein, 8 aa, Artificial Sequence
  Synthetic polypeptide representing artificial human antibody CDR-H1 region
GYTFTGYY

SEQ ID NO: 10762 - protein, 8 aa, Artificial Sequence
  Synthetic polypeptide representing artificial human antibody CDR-H1 region
GFTFSSYG

SEQ ID NO: 10763 - protein, 8 aa, Artificial Sequence
  Synthetic polypeptide representing artificial human antibody CDR-H1 region
GFTFTDYY

SEQ ID NO: 10764 - protein, 8 aa, Artificial Sequence
  Synthetic polypeptide representing artificial human antibody CDR-H1 region
GFTFSSYA

SEQ ID NO: 10765 - protein, 8 aa, Artificial Sequence
  Synthetic polypeptide representing artificial human antibody CDR-H1 region
GFTFSSYS

SEQ ID NO: 10766 - protein, 10 aa, Artificial Sequence
  Synthetic polypeptide representing artificial human antibody CDR-H1 region
GGSISSGGYY

SEQ ID NO: 10767 - protein, 10 aa, Artificial Sequence
  Synthetic polypeptide representing artificial human antibody CDR-H1 region
GGSISSSNHY

SEQ ID NO: 10768 - protein, 10 aa, Artificial Sequence
  Synthetic polypeptide representing artificial human antibody CDR-H1 region
GGSISSGGYY

SEQ ID NO: 10769 - protein, 8 aa, Artificial Sequence
  Synthetic polypeptide representing artificial human antibody CDR-H1 region
GFTFSSYA

SEQ ID NO: 10770 - protein, 8 aa, Artificial Sequence
  Synthetic polypeptide representing artificial human antibody CDR-H1 region
GFTFSSYA

SEQ ID NO: 10771 - protein, 8 aa, Artificial Sequence
  Synthetic polypeptide representing artificial human antibody CDR-H1 region
GFRFSLYS

SEQ ID NO: 10772 - protein, 8 aa, Artificial Sequence
  Synthetic polypeptide representing artificial human antibody CDR-H1 region
GLTFSRYA

SEQ ID NO: 10773 - protein, 8 aa, Artificial Sequence
  Synthetic polypeptide representing artificial human antibody CDR-H1 region
EFIFNNYA

SEQ ID NO: 10774 - protein, 8 aa, Artificial Sequence
  Synthetic polypeptide representing artificial human antibody CDR-H1 region
GFSFDNAW

SEQ ID NO: 10775 - protein, 8 aa, Artificial Sequence
  Synthetic polypeptide representing artificial human antibody CDR-H1 region
GGTFSSYA

SEQ ID NO: 10776 - protein, 8 aa, Artificial Sequence
  Synthetic polypeptide representing artificial human antibody CDR-H1 region
GFTLTGYY

SEQ ID NO: 10777 - protein, 8 aa, Artificial Sequence
  Synthetic polypeptide representing artificial human antibody CDR-H1 region
GFRFRSYA

SEQ ID NO: 10778 - protein, 8 aa, Artificial Sequence
  Synthetic polypeptide representing artificial human antibody CDR-H1 region
GFTFSSYS

SEQ ID NO: 10779 - protein, 10 aa, Artificial Sequence
  Synthetic polypeptide representing artificial human antibody CDR-H1 region
GGSISSGGYY

SEQ ID NO: 10780 - protein, 8 aa, Artificial Sequence
  Synthetic polypeptide representing artificial human antibody CDR-H1 region
GFTFSSYS

SEQ ID NO: 10781 - protein, 8 aa, Artificial Sequence
  Synthetic polypeptide representing artificial human antibody CDR-H1 region
GDSINQYQ

SEQ ID NO: 10782 - protein, 8 aa, Artificial Sequence
  Synthetic polypeptide representing artificial human antibody CDR-H1 region
GYTFSTFG

SEQ ID NO: 10783 - protein, 10 aa, Artificial Sequence
  Synthetic polypeptide representing artificial human antibody CDR-H1 region
GGSISINNHY

SEQ ID NO: 10784 - protein, 10 aa, Artificial Sequence
  Synthetic polypeptide representing artificial human antibody CDR-H1 region
GGSISSSSYY

SEQ ID NO: 10785 - protein, 8 aa, Artificial Sequence
  Synthetic polypeptide representing artificial human antibody CDR-H1 region
GFTFDDYT

SEQ ID NO: 10786 - protein, 10 aa, Artificial Sequence
  Synthetic polypeptide representing artificial human antibody CDR-H1 region
GGSISSGGYY

SEQ ID NO: 10787 - protein, 8 aa, Artificial Sequence
  Synthetic polypeptide representing artificial human antibody CDR-H1 region
GFTFSSYN

SEQ ID NO: 10788 - protein, 8 aa, Artificial Sequence
  Synthetic polypeptide representing artificial human antibody CDR-H1 region
GYTFTSYY

SEQ ID NO: 10789 - protein, 8 aa, Artificial Sequence
  Synthetic polypeptide representing artificial human antibody CDR-H1 region
GFTFSNAW

SEQ ID NO: 10790 - protein, 8 aa, Artificial Sequence
  Synthetic polypeptide representing artificial human antibody CDR-H1 region
GGSISSYL

SEQ ID NO: 10791 - protein, 8 aa, Artificial Sequence
  Synthetic polypeptide representing artificial human antibody CDR-H1 region
GFTFSSYA

SEQ ID NO: 10792 - protein, 8 aa, Artificial Sequence
  Synthetic polypeptide representing artificial human antibody CDR-H1 region
GFTFSSYA

SEQ ID NO: 10793 - protein, 8 aa, Artificial Sequence
  Synthetic polypeptide representing artificial human antibody CDR-H1 region
GFTFSSYG

SEQ ID NO: 10794 - protein, 8 aa, Artificial Sequence
  Synthetic polypeptide representing artificial human antibody CDR-H1 region
GYTFTSYA

SEQ ID NO: 10795 - protein, 8 aa, Artificial Sequence
  Synthetic polypeptide representing artificial human antibody CDR-H1 region
GFTFTSHG

SEQ ID NO: 10796 - protein, 8 aa, Artificial Sequence
  Synthetic polypeptide representing artificial human antibody CDR-H1 region
GFTFSSYA

SEQ ID NO: 10797 - protein, 8 aa, Artificial Sequence
  Synthetic polypeptide representing artificial human antibody CDR-H1 region
GGSFSGYY

SEQ ID NO: 10798 - protein, 10 aa, Artificial Sequence
  Synthetic polypeptide representing artificial human antibody CDR-H1 region
GDSISSSSYY

SEQ ID NO: 10799 - protein, 8 aa, Artificial Sequence
  Synthetic polypeptide representing artificial human antibody CDR-H1 region
GFSISNYE

SEQ ID NO: 10800 - protein, 8 aa, Artificial Sequence
  Synthetic polypeptide representing artificial human antibody CDR-H1 region
GGTFSSYA

SEQ ID NO: 10801 - protein, 8 aa, Artificial Sequence
  Synthetic polypeptide representing artificial human antibody CDR-H1 region
GYTFTSYA

SEQ ID NO: 10802 - protein, 8 aa, Artificial Sequence
  Synthetic polypeptide representing artificial human antibody CDR-H1 region
GFTFSSYG

SEQ ID NO: 10803 - protein, 10 aa, Artificial Sequence
  Synthetic polypeptide representing artificial human antibody CDR-H1 region
GGSISSNNHY

SEQ ID NO: 10804 - protein, 8 aa, Artificial Sequence
  Synthetic polypeptide representing artificial human antibody CDR-H1 region
GFTFSSFG

SEQ ID NO: 10805 - protein, 8 aa, Artificial Sequence
  Synthetic polypeptide representing artificial human antibody CDR-H1 region
GYTFTSYA

SEQ ID NO: 10806 - protein, 8 aa, Artificial Sequence
  Synthetic polypeptide representing artificial human antibody CDR-H1 region
GFAFSDYS

SEQ ID NO: 10807 - protein, 8 aa, Artificial Sequence
  Synthetic polypeptide representing artificial human antibody CDR-H1 region
GDSFSTLR

SEQ ID NO: 10808 - protein, 8 aa, Artificial Sequence
  Synthetic polypeptide representing artificial human antibody CDR-H1 region
GYTFTSYG

SEQ ID NO: 10809 - protein, 10 aa, Artificial Sequence
  Synthetic polypeptide representing artificial human antibody CDR-H1 region
GGSISSSSYY

SEQ ID NO: 10810 - protein, 10 aa, Artificial Sequence
  Synthetic polypeptide representing artificial human antibody CDR-H1 region
GGSISSSNHY

SEQ ID NO: 10811 - protein, 8 aa, Artificial Sequence
  Synthetic polypeptide representing artificial human antibody CDR-H1 region
GGDFNNYA

SEQ ID NO: 10812 - protein, 8 aa, Artificial Sequence
  Synthetic polypeptide representing artificial human antibody CDR-H1 region
GFTFSNAW

SEQ ID NO: 10813 - protein, 8 aa, Artificial Sequence
  Synthetic polypeptide representing artificial human antibody CDR-H1 region
GFTFSSYA

SEQ ID NO: 10814 - protein, 8 aa, Artificial Sequence
  Synthetic polypeptide representing artificial human antibody CDR-H1 region
GFTFSSYG

SEQ ID NO: 10815 - protein, 8 aa, Artificial Sequence
  Synthetic polypeptide representing artificial human antibody CDR-H1 region
GYSFTSYW

SEQ ID NO: 10816 - protein, 8 aa, Artificial Sequence
  Synthetic polypeptide representing artificial human antibody CDR-H1 region
GFSFSDYS

SEQ ID NO: 10817 - protein, 8 aa, Artificial Sequence
  Synthetic polypeptide representing artificial human antibody CDR-H1 region
GFTFSNYA

SEQ ID NO: 10818 - protein, 8 aa, Artificial Sequence
  Synthetic polypeptide representing artificial human antibody CDR-H1 region
GFTFINYW

SEQ ID NO: 10819 - protein, 8 aa, Artificial Sequence
  Synthetic polypeptide representing artificial human antibody CDR-H1 region
GFTFSSYS

SEQ ID NO: 10820 - protein, 8 aa, Artificial Sequence
  Synthetic polypeptide representing artificial human antibody CDR-H1 region
GYTFTGYY

SEQ ID NO: 10821 - protein, 8 aa, Artificial Sequence
  Synthetic polypeptide representing artificial human antibody CDR-H1 region
GFTFNNYG

SEQ ID NO: 10822 - protein, 8 aa, Artificial Sequence
  Synthetic polypeptide representing artificial human antibody CDR-H1 region
GFTFSSYS

SEQ ID NO: 10823 - protein, 8 aa, Artificial Sequence
  Synthetic polypeptide representing artificial human antibody CDR-H1 region
GFTFGDYS

SEQ ID NO: 10824 - protein, 8 aa, Artificial Sequence
  Synthetic polypeptide representing artificial human antibody CDR-H1 region
GFTFSAYN

SEQ ID NO: 10825 - protein, 8 aa, Artificial Sequence
  Synthetic polypeptide representing artificial human antibody CDR-H1 region
GFLLDSYY

SEQ ID NO: 10826 - protein, 8 aa, Artificial Sequence
  Synthetic polypeptide representing artificial human antibody CDR-H1 region
GLTFSTFG

SEQ ID NO: 10827 - protein, 8 aa, Artificial Sequence
  Synthetic polypeptide representing artificial human antibody CDR-H1 region
GFNFNTYN

SEQ ID NO: 10828 - protein, 8 aa, Artificial Sequence
  Synthetic polypeptide representing artificial human antibody CDR-H1 region
GLTFSLAW

SEQ ID NO: 10829 - protein, 8 aa, Artificial Sequence
  Synthetic polypeptide representing artificial human antibody CDR-H1 region
GFNFDDHA

SEQ ID NO: 10830 - protein, 8 aa, Artificial Sequence
  Synthetic polypeptide representing artificial human antibody CDR-H1 region
GLTFKKYA

SEQ ID NO: 10831 - protein, 8 aa, Artificial Sequence
  Synthetic polypeptide representing artificial human antibody CDR-H1 region
GFTFSNYN

SEQ ID NO: 10832 - protein, 8 aa, Artificial Sequence
  Synthetic polypeptide representing artificial human antibody CDR-H1 region
GDTFRNFE

SEQ ID NO: 10833 - protein, 8 aa, Artificial Sequence
  Synthetic polypeptide representing artificial human antibody CDR-H1 region
GFTLSSYT

SEQ ID NO: 10834 - protein, 8 aa, Artificial Sequence
  Synthetic polypeptide representing artificial human antibody CDR-H1 region
GFTFKNFW

SEQ ID NO: 10835 - protein, 8 aa, Artificial Sequence
  Synthetic polypeptide representing artificial human antibody CDR-H1 region
GYSFTSYW

SEQ ID NO: 10836 - protein, 8 aa, Artificial Sequence
  Synthetic polypeptide representing artificial human antibody CDR-H1 region
GFIFGTYW

SEQ ID NO: 10837 - protein, 8 aa, Artificial Sequence
  Synthetic polypeptide representing artificial human antibody CDR-H1 region
GYTFTSYD

SEQ ID NO: 10838 - protein, 8 aa, Artificial Sequence
  Synthetic polypeptide representing artificial human antibody CDR-H1 region
GFTFGDYA

SEQ ID NO: 10839 - protein, 10 aa, Artificial Sequence
  Synthetic polypeptide representing artificial human antibody CDR-H1 region
GGSISSSSYY

SEQ ID NO: 10840 - protein, 10 aa, Artificial Sequence
  Synthetic polypeptide representing artificial human antibody CDR-H1 region
GGSVSDSTYY

SEQ ID NO: 10841 - protein, 8 aa, Artificial Sequence
  Synthetic polypeptide representing artificial human antibody CDR-H1 region
GLTFGNYA

SEQ ID NO: 10842 - protein, 10 aa, Artificial Sequence
  Synthetic polypeptide representing artificial human antibody CDR-H1 region
GDSISSRSFY

SEQ ID NO: 10843 - protein, 10 aa, Artificial Sequence
  Synthetic polypeptide representing artificial human antibody CDR-H1 region
GGSISSSSYY

SEQ ID NO: 10844 - protein, 8 aa, Artificial Sequence
  Synthetic polypeptide representing artificial human antibody CDR-H1 region
GFTFSTYA

SEQ ID NO: 10845 - protein, 8 aa, Artificial Sequence
  Synthetic polypeptide representing artificial human antibody CDR-H1 region
GFSFSNAW

SEQ ID NO: 10846 - protein, 8 aa, Artificial Sequence
  Synthetic polypeptide representing artificial human antibody CDR-H1 region
GFTFSSYA

SEQ ID NO: 10847 - protein, 8 aa, Artificial Sequence
  Synthetic polypeptide representing artificial human antibody CDR-H1 region
GFTFTDYF

SEQ ID NO: 10848 - protein, 10 aa, Artificial Sequence
  Synthetic polypeptide representing artificial human antibody CDR-H1 region
GFSLTTSGVG

SEQ ID NO: 10849 - protein, 8 aa, Artificial Sequence
  Synthetic polypeptide representing artificial human antibody CDR-H1 region
GFSFSSYG

SEQ ID NO: 10850 - protein, 8 aa, Artificial Sequence
  Synthetic polypeptide representing artificial human antibody CDR-H1 region
GFTLSSYS

SEQ ID NO: 10851 - protein, 8 aa, Artificial Sequence
  Synthetic polypeptide representing artificial human antibody CDR-H1 region
GLTISTYA

SEQ ID NO: 10852 - protein, 8 aa, Artificial Sequence
  Synthetic polypeptide representing artificial human antibody CDR-H1 region
GFIFRHYA

SEQ ID NO: 10853 - protein, 8 aa, Artificial Sequence
  Synthetic polypeptide representing artificial human antibody CDR-H1 region
GFTFNSFA

SEQ ID NO: 10854 - protein, 8 aa, Artificial Sequence
  Synthetic polypeptide representing artificial human antibody CDR-H1 region
GFPFSDYY

SEQ ID NO: 10855 - protein, 8 aa, Artificial Sequence
  Synthetic polypeptide representing artificial human antibody CDR-H1 region
GFSFSNYA

SEQ ID NO: 10856 - protein, 8 aa, Artificial Sequence
  Synthetic polypeptide representing artificial human antibody CDR-H1 region
GFTFRSHA

SEQ ID NO: 10857 - protein, 8 aa, Artificial Sequence
  Synthetic polypeptide representing artificial human antibody CDR-H1 region
GYTFSSYA

SEQ ID NO: 10858 - protein, 8 aa, Artificial Sequence
  Synthetic polypeptide representing artificial human antibody CDR-H1 region
GGSMSYSY

SEQ ID NO: 10859 - protein, 8 aa, Artificial Sequence
  Synthetic polypeptide representing artificial human antibody CDR-H1 region
GFTFQTYP

SEQ ID NO: 10860 - protein, 8 aa, Artificial Sequence
  Synthetic polypeptide representing artificial human antibody CDR-H1 region
GFTFSGAA

SEQ ID NO: 10861 - protein, 8 aa, Artificial Sequence
  Synthetic polypeptide representing artificial human antibody CDR-H1 region
GFTFSDYF

SEQ ID NO: 10862 - protein, 8 aa, Artificial Sequence
  Synthetic polypeptide representing artificial human antibody CDR-H1 region
GFTFSSYS

SEQ ID NO: 10863 - protein, 10 aa, Artificial Sequence
  Synthetic polypeptide representing artificial human antibody CDR-H1 region
GDSIISWTHY

SEQ ID NO: 10864 - protein, 8 aa, Artificial Sequence
  Synthetic polypeptide representing artificial human antibody CDR-H1 region
GFVFKTAW

SEQ ID NO: 10865 - protein, 8 aa, Artificial Sequence
  Synthetic polypeptide representing artificial human antibody CDR-H1 region
GGTFTSYA

SEQ ID NO: 10866 - protein, 8 aa, Artificial Sequence
  Synthetic polypeptide representing artificial human antibody CDR-H1 region
GASIGDYL

SEQ ID NO: 10867 - protein, 8 aa, Artificial Sequence
  Synthetic polypeptide representing artificial human antibody CDR-H1 region
GYSFSNYH

SEQ ID NO: 10868 - protein, 8 aa, Artificial Sequence
  Synthetic polypeptide representing artificial human antibody CDR-H1 region
GFTFSRYG

SEQ ID NO: 10869 - protein, 10 aa, Artificial Sequence
  Synthetic polypeptide representing artificial human antibody CDR-H1 region
GGSISSSSYY

SEQ ID NO: 10870 - protein, 8 aa, Artificial Sequence
  Synthetic polypeptide representing artificial human antibody CDR-H1 region
GFTFSNYW

SEQ ID NO: 10871 - protein, 8 aa, Artificial Sequence
  Synthetic polypeptide representing artificial human antibody CDR-H1 region
GFEFDAYA

SEQ ID NO: 10872 - protein, 8 aa, Artificial Sequence
  Synthetic polypeptide representing artificial human antibody CDR-H1 region
GFTFRSHA

SEQ ID NO: 10873 - protein, 8 aa, Artificial Sequence
  Synthetic polypeptide representing artificial human antibody CDR-H1 region
GYTFGAHY

SEQ ID NO: 10874 - protein, 8 aa, Artificial Sequence
  Synthetic polypeptide representing artificial human antibody CDR-H1 region
AEAFNGYY

SEQ ID NO: 10875 - protein, 8 aa, Artificial Sequence
  Synthetic polypeptide representing artificial human antibody CDR-H1 region
GFTFSNHY

SEQ ID NO: 10876 - protein, 8 aa, Artificial Sequence
  Synthetic polypeptide representing artificial human antibody CDR-H1 region
GYTFTNYA

SEQ ID NO: 10877 - protein, 8 aa, Artificial Sequence
  Synthetic polypeptide representing artificial human antibody CDR-H1 region
GFTFSSYA

SEQ ID NO: 10878 - protein, 8 aa, Artificial Sequence
  Synthetic polypeptide representing artificial human antibody CDR-H1 region
GYNFNTYW

SEQ ID NO: 10879 - protein, 8 aa, Artificial Sequence
  Synthetic polypeptide representing artificial human antibody CDR-H1 region
GYSFSTYY

SEQ ID NO: 10880 - protein, 8 aa, Artificial Sequence
  Synthetic polypeptide representing artificial human antibody CDR-H1 region
GFTFSTYW

SEQ ID NO: 10881 - protein, 8 aa, Artificial Sequence
  Synthetic polypeptide representing artificial human antibody CDR-H1 region
GFTFSSYG

SEQ ID NO: 10882 - protein, 8 aa, Artificial Sequence
  Synthetic polypeptide representing artificial human antibody CDR-H1 region
GFTFASYA

SEQ ID NO: 10883 - protein, 10 aa, Artificial Sequence
  Synthetic polypeptide representing artificial human antibody CDR-H1 region
GGSISSGGYY

SEQ ID NO: 10884 - protein, 8 aa, Artificial Sequence
  Synthetic polypeptide representing artificial human antibody CDR-H1 region
GFSFRNHA

SEQ ID NO: 10885 - protein, 10 aa, Artificial Sequence
  Synthetic polypeptide representing artificial human antibody CDR-H1 region
GGSVSSDNYY

SEQ ID NO: 10886 - protein, 8 aa, Artificial Sequence
  Synthetic polypeptide representing artificial human antibody CDR-H1 region
GFSVSDLY

SEQ ID NO: 10887 - protein, 8 aa, Artificial Sequence
  Synthetic polypeptide representing artificial human antibody CDR-H1 region
GYSIRSFW

SEQ ID NO: 10888 - protein, 8 aa, Artificial Sequence
  Synthetic polypeptide representing artificial human antibody CDR-H1 region
GFTFSASE

SEQ ID NO: 10889 - protein, 9 aa, Artificial Sequence
  Synthetic polypeptide representing artificial human antibody CDR-H1 region
GDDSMKSYY

SEQ ID NO: 10890 - protein, 8 aa, Artificial Sequence
  Synthetic polypeptide representing artificial human antibody CDR-H1 region
GFLLSSYY

SEQ ID NO: 10891 - protein, 8 aa, Artificial Sequence
  Synthetic polypeptide representing artificial human antibody CDR-H1 region
GFSFNNYV

SEQ ID NO: 10892 - protein, 8 aa, Artificial Sequence
  Synthetic polypeptide representing artificial human antibody CDR-H1 region
GFTFSNSV

SEQ ID NO: 10893 - protein, 8 aa, Artificial Sequence
  Synthetic polypeptide representing artificial human antibody CDR-H1 region
GFTFSNYA

SEQ ID NO: 10894 - protein, 8 aa, Artificial Sequence
  Synthetic polypeptide representing artificial human antibody CDR-H1 region
GFQFEAFA

SEQ ID NO: 10895 - protein, 8 aa, Artificial Sequence
  Synthetic polypeptide representing artificial human antibody CDR-H1 region
GFSFHDYA

SEQ ID NO: 10896 - protein, 8 aa, Artificial Sequence
  Synthetic polypeptide representing artificial human antibody CDR-H1 region
GLTFRNYA

SEQ ID NO: 10897 - protein, 8 aa, Artificial Sequence
  Synthetic polypeptide representing artificial human antibody CDR-H1 region
GGSFSGYY

SEQ ID NO: 10898 - protein, 8 aa, Artificial Sequence
  Synthetic polypeptide representing artificial human antibody CDR-H1 region
GFTFKSND

SEQ ID NO: 10899 - protein, 8 aa, Artificial Sequence
  Synthetic polypeptide representing artificial human antibody CDR-H1 region
GYTFISYG

SEQ ID NO: 10900 - protein, 8 aa, Artificial Sequence
  Synthetic polypeptide representing artificial human antibody CDR-H1 region
GGSISSYY

SEQ ID NO: 10901 - protein, 8 aa, Artificial Sequence
  Synthetic polypeptide representing artificial human antibody CDR-H1 region
GFTFRNFA

SEQ ID NO: 10902 - protein, 8 aa, Artificial Sequence
  Synthetic polypeptide representing artificial human antibody CDR-H1 region
GFTFSGFS

SEQ ID NO: 10903 - protein, 8 aa, Artificial Sequence
  Synthetic polypeptide representing artificial human antibody CDR-H1 region
GFLFKVYS

SEQ ID NO: 10904 - protein, 8 aa, Artificial Sequence
  Synthetic polypeptide representing artificial human antibody CDR-H1 region
GFTFSSYE

SEQ ID NO: 10905 - protein, 8 aa, Artificial Sequence
  Synthetic polypeptide representing artificial human antibody CDR-H1 region
GFTFNNYA

SEQ ID NO: 10906 - protein, 8 aa, Artificial Sequence
  Synthetic polypeptide representing artificial human antibody CDR-H1 region
GFTFNIYE

SEQ ID NO: 10907 - protein, 8 aa, Artificial Sequence
  Synthetic polypeptide representing artificial human antibody CDR-H1 region
EFTFGNSV

SEQ ID NO: 10908 - protein, 8 aa, Artificial Sequence
  Synthetic polypeptide representing artificial human antibody CDR-H1 region
GGSFSGYH

SEQ ID NO: 10909 - protein, 8 aa, Artificial Sequence
  Synthetic polypeptide representing artificial human antibody CDR-H1 region
GFILRRLG

SEQ ID NO: 10910 - protein, 8 aa, Artificial Sequence
  Synthetic polypeptide representing artificial human antibody CDR-H1 region
GLTFASYA

SEQ ID NO: 10911 - protein, 8 aa, Artificial Sequence
  Synthetic polypeptide representing artificial human antibody CDR-H1 region
GFTFSNYN

SEQ ID NO: 10912 - protein, 8 aa, Artificial Sequence
  Synthetic polypeptide representing artificial human antibody CDR-H1 region
GFTFNTYG

SEQ ID NO: 10913 - protein, 8 aa, Artificial Sequence
  Synthetic polypeptide representing artificial human antibody CDR-H1 region
GFTFKSYE

SEQ ID NO: 10914 - protein, 8 aa, Artificial Sequence
  Synthetic polypeptide representing artificial human antibody CDR-H1 region
GYTFSIYY

SEQ ID NO: 10915 - protein, 8 aa, Artificial Sequence
  Synthetic polypeptide representing artificial human antibody CDR-H1 region
GFTFRGYA

SEQ ID NO: 10916 - protein, 8 aa, Artificial Sequence
  Synthetic polypeptide representing artificial human antibody CDR-H1 region
GFTFNDHA

SEQ ID NO: 10917 - protein, 8 aa, Artificial Sequence
  Synthetic polypeptide representing artificial human antibody CDR-H1 region
GFTFNNYA

SEQ ID NO: 10918 - protein, 8 aa, Artificial Sequence
  Synthetic polypeptide representing artificial human antibody CDR-H1 region
GFSFSNSW

SEQ ID NO: 10919 - protein, 8 aa, Artificial Sequence
  Synthetic polypeptide representing artificial human antibody CDR-H1 region
GFIFSDYY

SEQ ID NO: 10920 - protein, 8 aa, Artificial Sequence
  Synthetic polypeptide representing artificial human antibody CDR-H1 region
EFTFSNYV

SEQ ID NO: 10921 - protein, 8 aa, Artificial Sequence
  Synthetic polypeptide representing artificial human antibody CDR-H1 region
GLTFSSYA

SEQ ID NO: 10922 - protein, 10 aa, Artificial Sequence
  Synthetic polypeptide representing artificial human antibody CDR-H1 region
GFSLSTRGMS

SEQ ID NO: 10923 - protein, 8 aa, Artificial Sequence
  Synthetic polypeptide representing artificial human antibody CDR-H1 region
GYTFKNYI

SEQ ID NO: 10924 - protein, 8 aa, Artificial Sequence
  Synthetic polypeptide representing artificial human antibody CDR-H1 region
GGSFNSYY

SEQ ID NO: 10925 - protein, 8 aa, Artificial Sequence
  Synthetic polypeptide representing artificial human antibody CDR-H1 region
GFNFNLYA

SEQ ID NO: 10926 - protein, 8 aa, Artificial Sequence
  Synthetic polypeptide representing artificial human antibody CDR-H1 region
GFPFGNII

SEQ ID NO: 10927 - protein, 8 aa, Artificial Sequence
  Synthetic polypeptide representing artificial human antibody CDR-H1 region
GFTFSSYA

SEQ ID NO: 10928 - protein, 8 aa, Artificial Sequence
  Synthetic polypeptide representing artificial human antibody CDR-H1 region
GWTFTYPY

SEQ ID NO: 10929 - protein, 8 aa, Artificial Sequence
  Synthetic polypeptide representing artificial human antibody CDR-H1 region
GGSLSSYY

SEQ ID NO: 10930 - protein, 8 aa, Artificial Sequence
  Synthetic polypeptide representing artificial human antibody CDR-H1 region
GFTLSDHY

SEQ ID NO: 10931 - protein, 8 aa, Artificial Sequence
  Synthetic polypeptide representing artificial human antibody CDR-H1 region
GFTFDDYA

SEQ ID NO: 10932 - protein, 8 aa, Artificial Sequence
  Synthetic polypeptide representing artificial human antibody CDR-H1 region
GLTFSSYA

SEQ ID NO: 10933 - protein, 8 aa, Artificial Sequence
  Synthetic polypeptide representing artificial human antibody CDR-H1 region
GLTFSKFA

SEQ ID NO: 10934 - protein, 8 aa, Artificial Sequence
  Synthetic polypeptide representing artificial human antibody CDR-H1 region
GFNFGEDA

SEQ ID NO: 10935 - protein, 8 aa, Artificial Sequence
  Synthetic polypeptide representing artificial human antibody CDR-H1 region
GGSVDGYF

SEQ ID NO: 10936 - protein, 8 aa, Artificial Sequence
  Synthetic polypeptide representing artificial human antibody CDR-H1 region
GFAFDDSA

SEQ ID NO: 10937 - protein, 10 aa, Artificial Sequence
  Synthetic polypeptide representing artificial human antibody CDR-H1 region
GGSISSSSYY

SEQ ID NO: 10938 - protein, 8 aa, Artificial Sequence
  Synthetic polypeptide representing artificial human antibody CDR-H1 region
QFTIQNSI

SEQ ID NO: 10939 - protein, 8 aa, Artificial Sequence
  Synthetic polypeptide representing artificial human antibody CDR-H1 region
GGSISSYY

SEQ ID NO: 10940 - protein, 8 aa, Artificial Sequence
  Synthetic polypeptide representing artificial human antibody CDR-H1 region
GYPFTGYY

SEQ ID NO: 10941 - protein, 8 aa, Artificial Sequence
  Synthetic polypeptide representing artificial human antibody CDR-H1 region
GFTFSSYG

SEQ ID NO: 10942 - protein, 8 aa, Artificial Sequence
  Synthetic polypeptide representing artificial human antibody CDR-H1 region
GFTFSGYS

SEQ ID NO: 10943 - protein, 10 aa, Artificial Sequence
  Synthetic polypeptide representing artificial human antibody CDR-H1 region
GDSITRRHSY

SEQ ID NO: 10944 - protein, 8 aa, Artificial Sequence
  Synthetic polypeptide representing artificial human antibody CDR-H1 region
GFTVSSSY

SEQ ID NO: 10945 - protein, 8 aa, Artificial Sequence
  Synthetic polypeptide representing artificial human antibody CDR-H1 region
GLTFSGFT

SEQ ID NO: 10946 - protein, 8 aa, Artificial Sequence
  Synthetic polypeptide representing artificial human antibody CDR-H1 region
GGSFSNYV

SEQ ID NO: 10947 - protein, 8 aa, Artificial Sequence
  Synthetic polypeptide representing artificial human antibody CDR-H1 region
KFGFTTSG

SEQ ID NO: 10948 - protein, 8 aa, Artificial Sequence
  Synthetic polypeptide representing artificial human antibody CDR-H1 region
GFTLSNCG

SEQ ID NO: 10949 - protein, 8 aa, Artificial Sequence
  Synthetic polypeptide representing artificial human antibody CDR-H1 region
GYTFTRHA

SEQ ID NO: 10950 - protein, 8 aa, Artificial Sequence
  Synthetic polypeptide representing artificial human antibody CDR-H1 region
ALNFTKDA

SEQ ID NO: 10951 - protein, 8 aa, Artificial Sequence
  Synthetic polypeptide representing artificial human antibody CDR-H1 region
GYSFTSYS

SEQ ID NO: 10952 - protein, 8 aa, Artificial Sequence
  Synthetic polypeptide representing artificial human antibody CDR-H1 region
GLTFSGFT

SEQ ID NO: 10953 - protein, 8 aa, Artificial Sequence
  Synthetic polypeptide representing artificial human antibody CDR-H1 region
GVTVSHHY

SEQ ID NO: 10954 - protein, 8 aa, Artificial Sequence
  Synthetic polypeptide representing artificial human antibody CDR-H1 region
GYTFTTSP

SEQ ID NO: 10955 - protein, 8 aa, Artificial Sequence
  Synthetic polypeptide representing artificial human antibody CDR-H1 region
GHSFNYYF

SEQ ID NO: 10956 - protein, 8 aa, Artificial Sequence
  Synthetic polypeptide representing artificial human antibody CDR-H1 region
GYNFFNHA

SEQ ID NO: 10957 - protein, 8 aa, Artificial Sequence
  Synthetic polypeptide representing artificial human antibody CDR-H1 region
GVPFSNAW

SEQ ID NO: 10958 - protein, 8 aa, Artificial Sequence
  Synthetic polypeptide representing artificial human antibody CDR-H1 region
GFTVTSNY

SEQ ID NO: 10959 - protein, 10 aa, Artificial Sequence
  Synthetic polypeptide representing artificial human antibody CDR-H1 region
GFSLTTSGVG

SEQ ID NO: 10960 - protein, 8 aa, Artificial Sequence
  Synthetic polypeptide representing artificial human antibody CDR-H1 region
GYTFSDYS

SEQ ID NO: 10961 - protein, 8 aa, Artificial Sequence
  Synthetic polypeptide representing artificial human antibody CDR-H1 region
GFTFSSYS

SEQ ID NO: 10962 - protein, 8 aa, Artificial Sequence
  Synthetic polypeptide representing artificial human antibody CDR-H1 region
GYTFTDYW

SEQ ID NO: 10963 - protein, 8 aa, Artificial Sequence
  Synthetic polypeptide representing artificial human antibody CDR-H1 region
GYTFTNYY

SEQ ID NO: 10964 - protein, 8 aa, Artificial Sequence
  Synthetic polypeptide representing artificial human antibody CDR-H1 region
GSTISGYW

SEQ ID NO: 10965 - protein, 8 aa, Artificial Sequence
  Synthetic polypeptide representing artificial human antibody CDR-H1 region
GFTFNNCA

SEQ ID NO: 10966 - protein, 8 aa, Artificial Sequence
  Synthetic polypeptide representing artificial human antibody CDR-H1 region
GFNFSNFA

SEQ ID NO: 10967 - protein, 9 aa, Artificial Sequence
  Synthetic polypeptide representing artificial human antibody CDR-H1 region
GLSFSRRYA

SEQ ID NO: 10968 - protein, 8 aa, Artificial Sequence
  Synthetic polypeptide representing artificial human antibody CDR-H1 region
GYTFSRHS

SEQ ID NO: 10969 - protein, 8 aa, Artificial Sequence
  Synthetic polypeptide representing artificial human antibody CDR-H1 region
GFTFSTYW

SEQ ID NO: 10970 - protein, 8 aa, Artificial Sequence
  Synthetic polypeptide representing artificial human antibody CDR-H1 region
GFTFSDYA

SEQ ID NO: 10971 - protein, 8 aa, Artificial Sequence
  Synthetic polypeptide representing artificial human antibody CDR-H1 region
GFTFSTYW

SEQ ID NO: 10972 - protein, 8 aa, Artificial Sequence
  Synthetic polypeptide representing artificial human antibody CDR-H1 region
GFTFSSYS

SEQ ID NO: 10973 - protein, 8 aa, Artificial Sequence
  Synthetic polypeptide representing artificial human antibody CDR-H1 region
GFTFRNYA

SEQ ID NO: 10974 - protein, 8 aa, Artificial Sequence
  Synthetic polypeptide representing artificial human antibody CDR-H1 region
GFTFAGYW

SEQ ID NO: 10975 - protein, 8 aa, Artificial Sequence
  Synthetic polypeptide representing artificial human antibody CDR-H1 region
GYTFTNYG

SEQ ID NO: 10976 - protein, 8 aa, Artificial Sequence
  Synthetic polypeptide representing artificial human antibody CDR-H1 region
GFTFSSYA

SEQ ID NO: 10977 - protein, 8 aa, Artificial Sequence
  Synthetic polypeptide representing artificial human antibody CDR-H1 region
GYTFTDYF

SEQ ID NO: 10978 - protein, 8 aa, Artificial Sequence
  Synthetic polypeptide representing artificial human antibody CDR-H1 region
GFNFNSYA

SEQ ID NO: 10979 - protein, 8 aa, Artificial Sequence
  Synthetic polypeptide representing artificial human antibody CDR-H1 region
GFTFRTYD

SEQ ID NO: 10980 - protein, 8 aa, Artificial Sequence
  Synthetic polypeptide representing artificial human antibody CDR-H1 region
GFTFSNTL

SEQ ID NO: 10981 - protein, 8 aa, Artificial Sequence
  Synthetic polypeptide representing artificial human antibody CDR-H1 region
GLTFSGFT

SEQ ID NO: 10982 - protein, 8 aa, Artificial Sequence
  Synthetic polypeptide representing artificial human antibody CDR-H1 region
GYTFTRNP

SEQ ID NO: 10983 - protein, 8 aa, Artificial Sequence
  Synthetic polypeptide representing artificial human antibody CDR-H1 region
GFPFSTSD

SEQ ID NO: 10984 - protein, 10 aa, Artificial Sequence
  Synthetic polypeptide representing artificial human antibody CDR-H1 region
GFSLSTSGVG

SEQ ID NO: 10985 - protein, 8 aa, Artificial Sequence
  Synthetic polypeptide representing artificial human antibody CDR-H1 region
EFTFSNYG

SEQ ID NO: 10986 - protein, 8 aa, Artificial Sequence
  Synthetic polypeptide representing artificial human antibody CDR-H1 region
GYTLTSYA

SEQ ID NO: 10987 - protein, 8 aa, Artificial Sequence
  Synthetic polypeptide representing artificial human antibody CDR-H1 region
GFTLSAYW

SEQ ID NO: 10988 - protein, 8 aa, Artificial Sequence
  Synthetic polypeptide representing artificial human antibody CDR-H1 region
EYTSTGDY

SEQ ID NO: 10989 - protein, 8 aa, Artificial Sequence
  Synthetic polypeptide representing artificial human antibody CDR-H1 region
GYTFTNNP

SEQ ID NO: 10990 - protein, 8 aa, Artificial Sequence
  Synthetic polypeptide representing artificial human antibody CDR-H1 region
GFTFNNFA

SEQ ID NO: 10991 - protein, 8 aa, Artificial Sequence
  Synthetic polypeptide representing artificial human antibody CDR-H1 region
GYTFTNHA

SEQ ID NO: 10992 - protein, 8 aa, Artificial Sequence
  Synthetic polypeptide representing artificial human antibody CDR-H1 region
GFSFDKVW

SEQ ID NO: 10993 - protein, 8 aa, Artificial Sequence
  Synthetic polypeptide representing artificial human antibody CDR-H1 region
GFTFSHHA

SEQ ID NO: 10994 - protein, 8 aa, Artificial Sequence
  Synthetic polypeptide representing artificial human antibody CDR-H1 region
EYTFTDYA

SEQ ID NO: 10995 - protein, 8 aa, Artificial Sequence
  Synthetic polypeptide representing artificial human antibody CDR-H1 region
GFSFSSFG

SEQ ID NO: 10996 - protein, 8 aa, Artificial Sequence
  Synthetic polypeptide representing artificial human antibody CDR-H1 region
GYTFTNYW

SEQ ID NO: 10997 - protein, 8 aa, Artificial Sequence
  Synthetic polypeptide representing artificial human antibody CDR-H1 region
GFTLSGYW

SEQ ID NO: 10998 - protein, 8 aa, Artificial Sequence
  Synthetic polypeptide representing artificial human antibody CDR-H1 region
GGSFSDYH

SEQ ID NO: 10999 - protein, 8 aa, Artificial Sequence
  Synthetic polypeptide representing artificial human antibody CDR-H1 region
GFNFSNYA

SEQ ID NO: 11000 - protein, 8 aa, Artificial Sequence
  Synthetic polypeptide representing artificial human antibody CDR-H1 region
GYTFTNNA

SEQ ID NO: 11001 - protein, 8 aa, Artificial Sequence
  Synthetic polypeptide representing artificial human antibody CDR-H1 region
GFTFSTYW

SEQ ID NO: 11002 - protein, 10 aa, Artificial Sequence
  Synthetic polypeptide representing artificial human antibody CDR-H1 region
GASIGSGGYY

SEQ ID NO: 11003 - protein, 8 aa, Artificial Sequence
  Synthetic polypeptide representing artificial human antibody CDR-H1 region
GFSVSATY

SEQ ID NO: 11004 - protein, 8 aa, Artificial Sequence
  Synthetic polypeptide representing artificial human antibody CDR-H1 region
GFNFRNYW

SEQ ID NO: 11005 - protein, 10 aa, Artificial Sequence
  Synthetic polypeptide representing artificial human antibody CDR-H1 region
GGSISSSSYY

SEQ ID NO: 11006 - protein, 10 aa, Artificial Sequence
  Synthetic polypeptide representing artificial human antibody CDR-H1 region
GGSISSGNYY

SEQ ID NO: 11007 - protein, 8 aa, Artificial Sequence
  Synthetic polypeptide representing artificial human antibody CDR-H1 region
GFTFSDAW

SEQ ID NO: 11008 - protein, 8 aa, Artificial Sequence
  Synthetic polypeptide representing artificial human antibody CDR-H1 region
GLTFDNFA

SEQ ID NO: 11009 - protein, 8 aa, Artificial Sequence
  Synthetic polypeptide representing artificial human antibody CDR-H1 region
GFTFNTYA

SEQ ID NO: 11010 - protein, 8 aa, Artificial Sequence
  Synthetic polypeptide representing artificial human antibody CDR-H1 region
GFTFSNYA

SEQ ID NO: 11011 - protein, 8 aa, Artificial Sequence
  Synthetic polypeptide representing artificial human antibody CDR-H1 region
GYTFTSYA

SEQ ID NO: 11012 - protein, 10 aa, Artificial Sequence
  Synthetic polypeptide representing artificial human antibody CDR-H1 region
GDSVTSHFYY

SEQ ID NO: 11013 - protein, 8 aa, Artificial Sequence
  Synthetic polypeptide representing artificial human antibody CDR-H1 region
GYTFTGYY

SEQ ID NO: 11014 - protein, 10 aa, Artificial Sequence
  Synthetic polypeptide representing artificial human antibody CDR-H1 region
GASIRSSSYY

SEQ ID NO: 11015 - protein, 8 aa, Artificial Sequence
  Synthetic polypeptide representing artificial human antibody CDR-H1 region
GFTVMDTY

SEQ ID NO: 11016 - protein, 8 aa, Artificial Sequence
  Synthetic polypeptide representing artificial human antibody CDR-H1 region
GYTFTKYS

SEQ ID NO: 11017 - protein, 8 aa, Artificial Sequence
  Synthetic polypeptide representing artificial human antibody CDR-H1 region
GFTFRDYA

SEQ ID NO: 11018 - protein, 8 aa, Artificial Sequence
  Synthetic polypeptide representing artificial human antibody CDR-H1 region
GFTFSSYS

SEQ ID NO: 11019 - protein, 8 aa, Artificial Sequence
  Synthetic polypeptide representing artificial human antibody CDR-H1 region
GGSFSGYY

SEQ ID NO: 11020 - protein, 8 aa, Artificial Sequence
  Synthetic polypeptide representing artificial human antibody CDR-H1 region
GSTISGYW

SEQ ID NO: 11021 - protein, 8 aa, Artificial Sequence
  Synthetic polypeptide representing artificial human antibody CDR-H1 region
GFTFSIYA

SEQ ID NO: 11022 - protein, 8 aa, Artificial Sequence
  Synthetic polypeptide representing artificial human antibody CDR-H1 region
GFTFSSYG

SEQ ID NO: 11023 - protein, 8 aa, Artificial Sequence
  Synthetic polypeptide representing artificial human antibody CDR-H1 region
GFTFGDFA

SEQ ID NO: 11024 - protein, 8 aa, Artificial Sequence
  Synthetic polypeptide representing artificial human antibody CDR-H1 region
GYTFTTSP

SEQ ID NO: 11025 - protein, 10 aa, Artificial Sequence
  Synthetic polypeptide representing artificial human antibody CDR-H1 region
GVSVSSPSYY

SEQ ID NO: 11026 - protein, 8 aa, Artificial Sequence
  Synthetic polypeptide representing artificial human antibody CDR-H1 region
ELSFSNYV

SEQ ID NO: 11027 - protein, 8 aa, Artificial Sequence
  Synthetic polypeptide representing artificial human antibody CDR-H1 region
GFTFSDAW

SEQ ID NO: 11028 - protein, 9 aa, Artificial Sequence
  Synthetic polypeptide representing artificial human antibody CDR-H1 region
GGSISSSNW

SEQ ID NO: 11029 - protein, 8 aa, Artificial Sequence
  Synthetic polypeptide representing artificial human antibody CDR-H1 region
GLTFSGFT

SEQ ID NO: 11030 - protein, 8 aa, Artificial Sequence
  Synthetic polypeptide representing artificial human antibody CDR-H1 region
GFIFSNYG

SEQ ID NO: 11031 - protein, 8 aa, Artificial Sequence
  Synthetic polypeptide representing artificial human antibody CDR-H1 region
GFTFSGYG

SEQ ID NO: 11032 - protein, 8 aa, Artificial Sequence
  Synthetic polypeptide representing artificial human antibody CDR-H1 region
GFTFSSYA

SEQ ID NO: 11033 - protein, 8 aa, Artificial Sequence
  Synthetic polypeptide representing artificial human antibody CDR-H1 region
GGSVTSYY

SEQ ID NO: 11034 - protein, 8 aa, Artificial Sequence
  Synthetic polypeptide representing artificial human antibody CDR-H1 region
GVPVSNAW

SEQ ID NO: 11035 - protein, 8 aa, Artificial Sequence
  Synthetic polypeptide representing artificial human antibody CDR-H1 region
GGSIINYF

SEQ ID NO: 11036 - protein, 10 aa, Artificial Sequence
  Synthetic polypeptide representing artificial human antibody CDR-H1 region
GGSISSSGYF

SEQ ID NO: 11037 - protein, 8 aa, Artificial Sequence
  Synthetic polypeptide representing artificial human antibody CDR-H1 region
GFTVSDAY

SEQ ID NO: 11038 - protein, 8 aa, Artificial Sequence
  Synthetic polypeptide representing artificial human antibody CDR-H1 region
GYTFTDYY

SEQ ID NO: 11039 - protein, 8 aa, Artificial Sequence
  Synthetic polypeptide representing artificial human antibody CDR-H1 region
GYNFNNFD

SEQ ID NO: 11040 - protein, 8 aa, Artificial Sequence
  Synthetic polypeptide representing artificial human antibody CDR-H1 region
GFTFSDTY

SEQ ID NO: 11041 - protein, 8 aa, Artificial Sequence
  Synthetic polypeptide representing artificial human antibody CDR-H1 region
GFSFSNSV

SEQ ID NO: 11042 - protein, 8 aa, Artificial Sequence
  Synthetic polypeptide representing artificial human antibody CDR-H1 region
GFRFRDAW

SEQ ID NO: 11043 - protein, 8 aa, Artificial Sequence
  Synthetic polypeptide representing artificial human antibody CDR-H1 region
GFTFSVFS

SEQ ID NO: 11044 - protein, 8 aa, Artificial Sequence
  Synthetic polypeptide representing artificial human antibody CDR-H1 region
GLTVSNSY

SEQ ID NO: 11045 - protein, 8 aa, Artificial Sequence
  Synthetic polypeptide representing artificial human antibody CDR-H1 region
GYTFTGYY

SEQ ID NO: 11046 - protein, 8 aa, Artificial Sequence
  Synthetic polypeptide representing artificial human antibody CDR-H1 region
GFYFTNYA

SEQ ID NO: 11047 - protein, 8 aa, Artificial Sequence
  Synthetic polypeptide representing artificial human antibody CDR-H1 region
GFTFSDFA

SEQ ID NO: 11048 - protein, 8 aa, Artificial Sequence
  Synthetic polypeptide representing artificial human antibody CDR-H1 region
AFTFRNFG

SEQ ID NO: 11049 - protein, 8 aa, Artificial Sequence
  Synthetic polypeptide representing artificial human antibody CDR-H1 region
GDSMTGYY

SEQ ID NO: 11050 - protein, 8 aa, Artificial Sequence
  Synthetic polypeptide representing artificial human antibody CDR-H1 region
GYTFTGYY

SEQ ID NO: 11051 - protein, 8 aa, Artificial Sequence
  Synthetic polypeptide representing artificial human antibody CDR-H1 region
GGSFSGYY

SEQ ID NO: 11052 - protein, 10 aa, Artificial Sequence
  Synthetic polypeptide representing artificial human antibody CDR-H1 region
GDSVSNTNYY

SEQ ID NO: 11053 - protein, 8 aa, Artificial Sequence
  Synthetic polypeptide representing artificial human antibody CDR-H1 region
GYTFSASG

SEQ ID NO: 11054 - protein, 8 aa, Artificial Sequence
  Synthetic polypeptide representing artificial human antibody CDR-H1 region
GGSFSGYY

SEQ ID NO: 11055 - protein, 8 aa, Artificial Sequence
  Synthetic polypeptide representing artificial human antibody CDR-H1 region
GGTFSSYA

SEQ ID NO: 11056 - protein, 8 aa, Artificial Sequence
  Synthetic polypeptide representing artificial human antibody CDR-H1 region
GFTFSNYA

SEQ ID NO: 11057 - protein, 8 aa, Artificial Sequence
  Synthetic polypeptide representing artificial human antibody CDR-H1 region
ESSFSIKA

SEQ ID NO: 11058 - protein, 8 aa, Artificial Sequence
  Synthetic polypeptide representing artificial human antibody CDR-H1 region
GFPFSEYY

SEQ ID NO: 11059 - protein, 8 aa, Artificial Sequence
  Synthetic polypeptide representing artificial human antibody CDR-H1 region
GFTVSSNY

SEQ ID NO: 11060 - protein, 8 aa, Artificial Sequence
  Synthetic polypeptide representing artificial human antibody CDR-H1 region
GYTFTSYG

SEQ ID NO: 11061 - protein, 8 aa, Artificial Sequence
  Synthetic polypeptide representing artificial human antibody CDR-H1 region
GFTFSTSN

SEQ ID NO: 11062 - protein, 8 aa, Artificial Sequence
  Synthetic polypeptide representing artificial human antibody CDR-H1 region
GFNFGEYA

SEQ ID NO: 11063 - protein, 8 aa, Artificial Sequence
  Synthetic polypeptide representing artificial human antibody CDR-H1 region
GYRFSDYF

SEQ ID NO: 11064 - protein, 8 aa, Artificial Sequence
  Synthetic polypeptide representing artificial human antibody CDR-H1 region
GYTFTSYG

SEQ ID NO: 11065 - protein, 10 aa, Artificial Sequence
  Synthetic polypeptide representing artificial human antibody CDR-H1 region
GGSISSGSYY

SEQ ID NO: 11066 - protein, 8 aa, Artificial Sequence
  Synthetic polypeptide representing artificial human antibody CDR-H1 region
GFTLTTFW

SEQ ID NO: 11067 - protein, 8 aa, Artificial Sequence
  Synthetic polypeptide representing artificial human antibody CDR-H1 region
GGTFSNYA

SEQ ID NO: 11068 - protein, 8 aa, Artificial Sequence
  Synthetic polypeptide representing artificial human antibody CDR-H1 region
GFTFSSYS

SEQ ID NO: 11069 - protein, 10 aa, Artificial Sequence
  Synthetic polypeptide representing artificial human antibody CDR-H1 region
GFSLSTSEMC

SEQ ID NO: 11070 - protein, 8 aa, Artificial Sequence
  Synthetic polypeptide representing artificial human antibody CDR-H1 region
GFTFSSYG

SEQ ID NO: 11071 - protein, 8 aa, Artificial Sequence
  Synthetic polypeptide representing artificial human antibody CDR-H1 region
GYIFSNYV

SEQ ID NO: 11072 - protein, 8 aa, Artificial Sequence
  Synthetic polypeptide representing artificial human antibody CDR-H1 region
GFTFSSYS

SEQ ID NO: 11073 - protein, 8 aa, Artificial Sequence
  Synthetic polypeptide representing artificial human antibody CDR-H1 region
GFTYSSHA

SEQ ID NO: 11074 - protein, 8 aa, Artificial Sequence
  Synthetic polypeptide representing artificial human antibody CDR-H1 region
GGSFSGYY

SEQ ID NO: 11075 - protein, 8 aa, Artificial Sequence
  Synthetic polypeptide representing artificial human antibody CDR-H1 region
GYTFTSFD

SEQ ID NO: 11076 - protein, 10 aa, Artificial Sequence
  Synthetic polypeptide representing artificial human antibody CDR-H1 region
GGSISSRSYY

SEQ ID NO: 11077 - protein, 8 aa, Artificial Sequence
  Synthetic polypeptide representing artificial human antibody CDR-H1 region
EFTFANSA

SEQ ID NO: 11078 - protein, 8 aa, Artificial Sequence
  Synthetic polypeptide representing artificial human antibody CDR-H1 region
GFSFNNYA

SEQ ID NO: 11079 - protein, 8 aa, Artificial Sequence
  Synthetic polypeptide representing artificial human antibody CDR-H1 region
GGSFSSYY

SEQ ID NO: 11080 - protein, 8 aa, Artificial Sequence
  Synthetic polypeptide representing artificial human antibody CDR-H1 region
GFRFTGYW

SEQ ID NO: 11081 - protein, 10 aa, Artificial Sequence
  Synthetic polypeptide representing artificial human antibody CDR-H1 region
GGSISSSSYY

SEQ ID NO: 11082 - protein, 8 aa, Artificial Sequence
  Synthetic polypeptide representing artificial human antibody CDR-H1 region
GFTFSSYG

SEQ ID NO: 11083 - protein, 8 aa, Artificial Sequence
  Synthetic polypeptide representing artificial human antibody CDR-H1 region
GYTFTGYH

SEQ ID NO: 11084 - protein, 8 aa, Artificial Sequence
  Synthetic polypeptide representing artificial human antibody CDR-H1 region
GFTFSSYG

SEQ ID NO: 11085 - protein, 8 aa, Artificial Sequence
  Synthetic polypeptide representing artificial human antibody CDR-H1 region
GFTFSSYS

SEQ ID NO: 11086 - protein, 8 aa, Artificial Sequence
  Synthetic polypeptide representing artificial human antibody CDR-H1 region
GFIFSDYY

SEQ ID NO: 11087 - protein, 8 aa, Artificial Sequence
  Synthetic polypeptide representing artificial human antibody CDR-H1 region
GFMFSIYA

SEQ ID NO: 11088 - protein, 10 aa, Artificial Sequence
  Synthetic polypeptide representing artificial human antibody CDR-H1 region
GGSISGGDYY

SEQ ID NO: 11089 - protein, 8 aa, Artificial Sequence
  Synthetic polypeptide representing artificial human antibody CDR-H1 region
GFTFSNTW

SEQ ID NO: 11090 - protein, 8 aa, Artificial Sequence
  Synthetic polypeptide representing artificial human antibody CDR-H1 region
GGSFSGYS

SEQ ID NO: 11091 - protein, 8 aa, Artificial Sequence
  Synthetic polypeptide representing artificial human antibody CDR-H1 region
GGSFSGYY

SEQ ID NO: 11092 - protein, 10 aa, Artificial Sequence
  Synthetic polypeptide representing artificial human antibody CDR-H1 region
GGSIISGSKY

SEQ ID NO: 11093 - protein, 8 aa, Artificial Sequence
  Synthetic polypeptide representing artificial human antibody CDR-H1 region
GYTLSELS

SEQ ID NO: 11094 - protein, 8 aa, Artificial Sequence
  Synthetic polypeptide representing artificial human antibody CDR-H1 region
SGSVISFY

SEQ ID NO: 11095 - protein, 8 aa, Artificial Sequence
  Synthetic polypeptide representing artificial human antibody CDR-H1 region
GFNFINYW

SEQ ID NO: 11096 - protein, 8 aa, Artificial Sequence
  Synthetic polypeptide representing artificial human antibody CDR-H1 region
GFTFSSYA

SEQ ID NO: 11097 - protein, 8 aa, Artificial Sequence
  Synthetic polypeptide representing artificial human antibody CDR-H1 region
GFTFSNYG

SEQ ID NO: 11098 - protein, 8 aa, Artificial Sequence
  Synthetic polypeptide representing artificial human antibody CDR-H1 region
GFTFSSYG

SEQ ID NO: 11099 - protein, 8 aa, Artificial Sequence
  Synthetic polypeptide representing artificial human antibody CDR-H1 region
GGSINGYY

SEQ ID NO: 11100 - protein, 8 aa, Artificial Sequence
  Synthetic polypeptide representing artificial human antibody CDR-H1 region
GYTFTNFF

SEQ ID NO: 11101 - protein, 8 aa, Artificial Sequence
  Synthetic polypeptide representing artificial human antibody CDR-H1 region
GSSFSFYY

SEQ ID NO: 11102 - protein, 8 aa, Artificial Sequence
  Synthetic polypeptide representing artificial human antibody CDR-H1 region
GFMFSNYA

SEQ ID NO: 11103 - protein, 10 aa, Artificial Sequence
  Synthetic polypeptide representing artificial human antibody CDR-H1 region
GFSLSNIGVG

SEQ ID NO: 11104 - protein, 8 aa, Artificial Sequence
  Synthetic polypeptide representing artificial human antibody CDR-H1 region
GYTFTGNY

SEQ ID NO: 11105 - protein, 8 aa, Artificial Sequence
  Synthetic polypeptide representing artificial human antibody CDR-H1 region
GFTFSSYG

SEQ ID NO: 11106 - protein, 8 aa, Artificial Sequence
  Synthetic polypeptide representing artificial human antibody CDR-H1 region
GFTFSDHY

SEQ ID NO: 11107 - protein, 10 aa, Artificial Sequence
  Synthetic polypeptide representing artificial human antibody CDR-H1 region
GDSISSSSYY

SEQ ID NO: 11108 - protein, 10 aa, Artificial Sequence
  Synthetic polypeptide representing artificial human antibody CDR-H1 region
GGSISSRSYY

SEQ ID NO: 11109 - protein, 8 aa, Artificial Sequence
  Synthetic polypeptide representing artificial human antibody CDR-H1 region
GYTFTSYD

SEQ ID NO: 11110 - protein, 8 aa, Artificial Sequence
  Synthetic polypeptide representing artificial human antibody CDR-H1 region
GFTFDDYA

SEQ ID NO: 11111 - protein, 8 aa, Artificial Sequence
  Synthetic polypeptide representing artificial human antibody CDR-H1 region
GFTFNTSG

SEQ ID NO: 11112 - protein, 8 aa, Artificial Sequence
  Synthetic polypeptide representing artificial human antibody CDR-H1 region
GFTFSSYG

SEQ ID NO: 11113 - protein, 10 aa, Artificial Sequence
  Synthetic polypeptide representing artificial human antibody CDR-H1 region
GASINTGPYY

SEQ ID NO: 11114 - protein, 8 aa, Artificial Sequence
  Synthetic polypeptide representing artificial human antibody CDR-H1 region
GFTFSSYA

SEQ ID NO: 11115 - protein, 8 aa, Artificial Sequence
  Synthetic polypeptide representing artificial human antibody CDR-H1 region
QFTFSLYW

SEQ ID NO: 11116 - protein, 7 aa, Artificial Sequence
  Synthetic polypeptide representing artificial human antibody CDR-H1 region
GGNPTYT

SEQ ID NO: 11117 - protein, 8 aa, Artificial Sequence
  Synthetic polypeptide representing artificial human antibody CDR-H1 region
GFTFNNYA

SEQ ID NO: 11118 - protein, 8 aa, Artificial Sequence
  Synthetic polypeptide representing artificial human antibody CDR-H1 region
GFNFKDSW

SEQ ID NO: 11119 - protein, 8 aa, Artificial Sequence
  Synthetic polypeptide representing artificial human antibody CDR-H1 region
GYTFAAYY

SEQ ID NO: 11120 - protein, 8 aa, Artificial Sequence
  Synthetic polypeptide representing artificial human antibody CDR-H1 region
GFTFSDYY

SEQ ID NO: 11121 - protein, 8 aa, Artificial Sequence
  Synthetic polypeptide representing artificial human antibody CDR-H1 region
GFTFGNYG

SEQ ID NO: 11122 - protein, 10 aa, Artificial Sequence
  Synthetic polypeptide representing artificial human antibody CDR-H1 region
GDSASNHNYF

SEQ ID NO: 11123 - protein, 8 aa, Artificial Sequence
  Synthetic polypeptide representing artificial human antibody CDR-H1 region
GASIDSYY

SEQ ID NO: 11124 - protein, 9 aa, Artificial Sequence
  Synthetic polypeptide representing artificial human antibody CDR-H1 region
GGSMDSHNW

SEQ ID NO: 11125 - protein, 8 aa, Artificial Sequence
  Synthetic polypeptide representing artificial human antibody CDR-H1 region
GFTFSSYW

SEQ ID NO: 11126 - protein, 9 aa, Artificial Sequence
  Synthetic polypeptide representing artificial human antibody CDR-H1 region
SFSISSGYY

SEQ ID NO: 11127 - protein, 8 aa, Artificial Sequence
  Synthetic polypeptide representing artificial human antibody CDR-H1 region
GFTFGSFA

SEQ ID NO: 11128 - protein, 10 aa, Artificial Sequence
  Synthetic polypeptide representing artificial human antibody CDR-H1 region
GGSISSSSYY

SEQ ID NO: 11129 - protein, 8 aa, Artificial Sequence
  Synthetic polypeptide representing artificial human antibody CDR-H1 region
GFTYSTYA

SEQ ID NO: 11130 - protein, 8 aa, Artificial Sequence
  Synthetic polypeptide representing artificial human antibody CDR-H1 region
GFTFSTSW

SEQ ID NO: 11131 - protein, 10 aa, Artificial Sequence
  Synthetic polypeptide representing artificial human antibody CDR-H1 region
GDSITTTGFF

SEQ ID NO: 11132 - protein, 8 aa, Artificial Sequence
  Synthetic polypeptide representing artificial human antibody CDR-H1 region
GFTFTSFS

SEQ ID NO: 11133 - protein, 8 aa, Artificial Sequence
  Synthetic polypeptide representing artificial human antibody CDR-H1 region
GFSFGRYG

SEQ ID NO: 11134 - protein, 8 aa, Artificial Sequence
  Synthetic polypeptide representing artificial human antibody CDR-H1 region
GYTFTSYG

SEQ ID NO: 11135 - protein, 8 aa, Artificial Sequence
  Synthetic polypeptide representing artificial human antibody CDR-H1 region
GFTFNNFA

SEQ ID NO: 11136 - protein, 10 aa, Artificial Sequence
  Synthetic polypeptide representing artificial human antibody CDR-H1 region
GDSLSSTSYS

SEQ ID NO: 11137 - protein, 8 aa, Artificial Sequence
  Synthetic polypeptide representing artificial human antibody CDR-H1 region
GFTFSTYA

SEQ ID NO: 11138 - protein, 8 aa, Artificial Sequence
  Synthetic polypeptide representing artificial human antibody CDR-H1 region
GYSFTNHW

SEQ ID NO: 11139 - protein, 8 aa, Artificial Sequence
  Synthetic polypeptide representing artificial human antibody CDR-H1 region
GFTFNNYA

SEQ ID NO: 11140 - protein, 8 aa, Artificial Sequence
  Synthetic polypeptide representing artificial human antibody CDR-H1 region
GFTFFTYT

SEQ ID NO: 11141 - protein, 8 aa, Artificial Sequence
  Synthetic polypeptide representing artificial human antibody CDR-H1 region
GFTFKNYA

SEQ ID NO: 11142 - protein, 8 aa, Artificial Sequence
  Synthetic polypeptide representing artificial human antibody CDR-H1 region
GFTVSSSY

SEQ ID NO: 11143 - protein, 8 aa, Artificial Sequence
  Synthetic polypeptide representing artificial human antibody CDR-H1 region
GYTFTNYD

SEQ ID NO: 11144 - protein, 8 aa, Artificial Sequence
  Synthetic polypeptide representing artificial human antibody CDR-H1 region
GYSFTSYW

SEQ ID NO: 11145 - protein, 8 aa, Artificial Sequence
  Synthetic polypeptide representing artificial human antibody CDR-H1 region
GFTFNNYA

SEQ ID NO: 11146 - protein, 8 aa, Artificial Sequence
  Synthetic polypeptide representing artificial human antibody CDR-H1 region
GFSFSNYW

SEQ ID NO: 11147 - protein, 8 aa, Artificial Sequence
  Synthetic polypeptide representing artificial human antibody CDR-H1 region
GFIFSDYA

SEQ ID NO: 11148 - protein, 8 aa, Artificial Sequence
  Synthetic polypeptide representing artificial human antibody CDR-H1 region
GFRFSDSS

SEQ ID NO: 11149 - protein, 8 aa, Artificial Sequence
  Synthetic polypeptide representing artificial human antibody CDR-H1 region
GFTFSTNH

SEQ ID NO: 11150 - protein, 8 aa, Artificial Sequence
  Synthetic polypeptide representing artificial human antibody CDR-H1 region
GFTFSNYA

SEQ ID NO: 11151 - protein, 8 aa, Artificial Sequence
  Synthetic polypeptide representing artificial human antibody CDR-H1 region
GFTFSGSA

SEQ ID NO: 11152 - protein, 10 aa, Artificial Sequence
  Synthetic polypeptide representing artificial human antibody CDR-H1 region
GVSVTSIGYY

SEQ ID NO: 11153 - protein, 10 aa, Artificial Sequence
  Synthetic polypeptide representing artificial human antibody CDR-H1 region
GASVSSVDSH

SEQ ID NO: 11154 - protein, 8 aa, Artificial Sequence
  Synthetic polypeptide representing artificial human antibody CDR-H1 region
GFTFTTYP

SEQ ID NO: 11155 - protein, 8 aa, Artificial Sequence
  Synthetic polypeptide representing artificial human antibody CDR-H1 region
GFSVSSAW

SEQ ID NO: 11156 - protein, 9 aa, Artificial Sequence
  Synthetic polypeptide representing artificial human antibody CDR-H1 region
GVSISSSNW

SEQ ID NO: 11157 - protein, 8 aa, Artificial Sequence
  Synthetic polypeptide representing artificial human antibody CDR-H1 region
GFSFNSHW

SEQ ID NO: 11158 - protein, 8 aa, Artificial Sequence
  Synthetic polypeptide representing artificial human antibody CDR-H1 region
GYRFTSFW

SEQ ID NO: 11159 - protein, 8 aa, Artificial Sequence
  Synthetic polypeptide representing artificial human antibody CDR-H1 region
GYSFTGHL

SEQ ID NO: 11160 - protein, 8 aa, Artificial Sequence
  Synthetic polypeptide representing artificial human antibody CDR-H1 region
GYTFTSYG

SEQ ID NO: 11161 - protein, 8 aa, Artificial Sequence
  Synthetic polypeptide representing artificial human antibody CDR-H1 region
GFIFSKYA

SEQ ID NO: 11162 - protein, 8 aa, Artificial Sequence
  Synthetic polypeptide representing artificial human antibody CDR-H1 region
GFTFSTNT

SEQ ID NO: 11163 - protein, 9 aa, Artificial Sequence
  Synthetic polypeptide representing artificial human antibody CDR-H1 region
GGSITSTYW

SEQ ID NO: 11164 - protein, 8 aa, Artificial Sequence
  Synthetic polypeptide representing artificial human antibody CDR-H1 region
GFTFSSYA

SEQ ID NO: 11165 - protein, 8 aa, Artificial Sequence
  Synthetic polypeptide representing artificial human antibody CDR-H1 region
GFTFSSYA

SEQ ID NO: 11166 - protein, 8 aa, Artificial Sequence
  Synthetic polypeptide representing artificial human antibody CDR-H1 region
GYTFTTYW

SEQ ID NO: 11167 - protein, 10 aa, Artificial Sequence
  Synthetic polypeptide representing artificial human antibody CDR-H1 region
GGSISSSGYS

SEQ ID NO: 11168 - protein, 8 aa, Artificial Sequence
  Synthetic polypeptide representing artificial human antibody CDR-H1 region
GFTLGNAW

SEQ ID NO: 11169 - protein, 8 aa, Artificial Sequence
  Synthetic polypeptide representing artificial human antibody CDR-H1 region
GDTLRNYA

SEQ ID NO: 11170 - protein, 10 aa, Artificial Sequence
  Synthetic polypeptide representing artificial human antibody CDR-H1 region
GGSISSRSYY

SEQ ID NO: 11171 - protein, 8 aa, Artificial Sequence
  Synthetic polypeptide representing artificial human antibody CDR-H1 region
GFTFSDFE

SEQ ID NO: 11172 - protein, 10 aa, Artificial Sequence
  Synthetic polypeptide representing artificial human antibody CDR-H1 region
GFSLDTPKMS

SEQ ID NO: 11173 - protein, 8 aa, Artificial Sequence
  Synthetic polypeptide representing artificial human antibody CDR-H1 region
GGTFSSYA

SEQ ID NO: 11174 - protein, 8 aa, Artificial Sequence
  Synthetic polypeptide representing artificial human antibody CDR-H1 region
GFTFSKYG

SEQ ID NO: 11175 - protein, 8 aa, Artificial Sequence
  Synthetic polypeptide representing artificial human antibody CDR-H1 region
GFTFDNYA

SEQ ID NO: 11176 - protein, 8 aa, Artificial Sequence
  Synthetic polypeptide representing artificial human antibody CDR-H1 region
GFTFGDYA

SEQ ID NO: 11177 - protein, 8 aa, Artificial Sequence
  Synthetic polypeptide representing artificial human antibody CDR-H1 region
GFTVSSNY

SEQ ID NO: 11178 - protein, 8 aa, Artificial Sequence
  Synthetic polypeptide representing artificial human antibody CDR-H1 region
GVSVSANY

SEQ ID NO: 11179 - protein, 8 aa, Artificial Sequence
  Synthetic polypeptide representing artificial human antibody CDR-H1 region
GYRFHTYC

SEQ ID NO: 11180 - protein, 8 aa, Artificial Sequence
  Synthetic polypeptide representing artificial human antibody CDR-H1 region
GFSFSIYG

SEQ ID NO: 11181 - protein, 8 aa, Artificial Sequence
  Synthetic polypeptide representing artificial human antibody CDR-H1 region
KFTFSDYA

SEQ ID NO: 11182 - protein, 8 aa, Artificial Sequence
  Synthetic polypeptide representing artificial human antibody CDR-H1 region
GFTFSSYS

SEQ ID NO: 11183 - protein, 10 aa, Artificial Sequence
  Synthetic polypeptide representing artificial human antibody CDR-H1 region
GGSISSGGYY

SEQ ID NO: 11184 - protein, 8 aa, Artificial Sequence
  Synthetic polypeptide representing artificial human antibody CDR-H1 region
GFTFSAHA

SEQ ID NO: 11185 - protein, 8 aa, Artificial Sequence
  Synthetic polypeptide representing artificial human antibody CDR-H1 region
GFTFSNFY

SEQ ID NO: 11186 - protein, 8 aa, Artificial Sequence
  Synthetic polypeptide representing artificial human antibody CDR-H1 region
GITVSLNY

SEQ ID NO: 11187 - protein, 8 aa, Artificial Sequence
  Synthetic polypeptide representing artificial human antibody CDR-H1 region
GFTFSNYA

SEQ ID NO: 11188 - protein, 8 aa, Artificial Sequence
  Synthetic polypeptide representing artificial human antibody CDR-H1 region
GFTFNDYA

SEQ ID NO: 11189 - protein, 10 aa, Artificial Sequence
  Synthetic polypeptide representing artificial human antibody CDR-H1 region
GGSITSDGYY

SEQ ID NO: 11190 - protein, 8 aa, Artificial Sequence
  Synthetic polypeptide representing artificial human antibody CDR-H1 region
GYTFSDYY

SEQ ID NO: 11191 - protein, 9 aa, Artificial Sequence
  Synthetic polypeptide representing artificial human antibody CDR-H1 region
NGSVSNNNW

SEQ ID NO: 11192 - protein, 8 aa, Artificial Sequence
  Synthetic polypeptide representing artificial human antibody CDR-H1 region
GFTFSSYD

SEQ ID NO: 11193 - protein, 8 aa, Artificial Sequence
  Synthetic polypeptide representing artificial human antibody CDR-H1 region
GFTFSSYW

SEQ ID NO: 11194 - protein, 8 aa, Artificial Sequence
  Synthetic polypeptide representing artificial human antibody CDR-H1 region
GFTVSSYY

SEQ ID NO: 11195 - protein, 10 aa, Artificial Sequence
  Synthetic polypeptide representing artificial human antibody CDR-H1 region
GGSISSGGYY

SEQ ID NO: 11196 - protein, 8 aa, Artificial Sequence
  Synthetic polypeptide representing artificial human antibody CDR-H1 region
GYTFTSYG

SEQ ID NO: 11197 - protein, 8 aa, Artificial Sequence
  Synthetic polypeptide representing artificial human antibody CDR-H1 region
GGSISHYY

SEQ ID NO: 11198 - protein, 10 aa, Artificial Sequence
  Synthetic polypeptide representing artificial human antibody CDR-H1 region
GGSISSSSYY

SEQ ID NO: 11199 - protein, 8 aa, Artificial Sequence
  Synthetic polypeptide representing artificial human antibody CDR-H1 region
GYIFNRYA

SEQ ID NO: 11200 - protein, 8 aa, Artificial Sequence
  Synthetic polypeptide representing artificial human antibody CDR-H1 region
GFSFSSYA

SEQ ID NO: 11201 - protein, 8 aa, Artificial Sequence
  Synthetic polypeptide representing artificial human antibody CDR-H1 region
GFSFNIYA

SEQ ID NO: 11202 - protein, 8 aa, Artificial Sequence
  Synthetic polypeptide representing artificial human antibody CDR-H1 region
GFTFSRYG

SEQ ID NO: 11203 - protein, 8 aa, Artificial Sequence
  Synthetic polypeptide representing artificial human antibody CDR-H1 region
GFTFVDYY

SEQ ID NO: 11204 - protein, 8 aa, Artificial Sequence
  Synthetic polypeptide representing artificial human antibody CDR-H1 region
GFTFSSYW

SEQ ID NO: 11205 - protein, 8 aa, Artificial Sequence
  Synthetic polypeptide representing artificial human antibody CDR-H1 region
GYTFTRYA

SEQ ID NO: 11206 - protein, 8 aa, Artificial Sequence
  Synthetic polypeptide representing artificial human antibody CDR-H1 region
GLTLNDLS

SEQ ID NO: 11207 - protein, 8 aa, Artificial Sequence
  Synthetic polypeptide representing artificial human antibody CDR-H1 region
GYTFTSYD

SEQ ID NO: 11208 - protein, 8 aa, Artificial Sequence
  Synthetic polypeptide representing artificial human antibody CDR-H1 region
GFTFSSYA

SEQ ID NO: 11209 - protein, 8 aa, Artificial Sequence
  Synthetic polypeptide representing artificial human antibody CDR-H1 region
GFTFSYAW

SEQ ID NO: 11210 - protein, 8 aa, Artificial Sequence
  Synthetic polypeptide representing artificial human antibody CDR-H1 region
GFTFSNFG

SEQ ID NO: 11211 - protein, 10 aa, Artificial Sequence
  Synthetic polypeptide representing artificial human antibody CDR-H1 region
GDSIISDDDY

SEQ ID NO: 11212 - protein, 8 aa, Artificial Sequence
  Synthetic polypeptide representing artificial human antibody CDR-H1 region
GYTFNSYY

SEQ ID NO: 11213 - protein, 8 aa, Artificial Sequence
  Synthetic polypeptide representing artificial human antibody CDR-H1 region
GFIFSDVW

SEQ ID NO: 11214 - protein, 10 aa, Artificial Sequence
  Synthetic polypeptide representing artificial human antibody CDR-H1 region
GVSITSGSYS

SEQ ID NO: 11215 - protein, 8 aa, Artificial Sequence
  Synthetic polypeptide representing artificial human antibody CDR-H1 region
GFMSSSYA

SEQ ID NO: 11216 - protein, 8 aa, Artificial Sequence
  Synthetic polypeptide representing artificial human antibody CDR-H1 region
GFTFSSYG

SEQ ID NO: 11217 - protein, 8 aa, Artificial Sequence
  Synthetic polypeptide representing artificial human antibody CDR-H1 region
GFSFVDSA

SEQ ID NO: 11218 - protein, 8 aa, Artificial Sequence
  Synthetic polypeptide representing artificial human antibody CDR-H1 region
GLTVSSNY

SEQ ID NO: 11219 - protein, 8 aa, Artificial Sequence
  Synthetic polypeptide representing artificial human antibody CDR-H1 region
GYTFTSHA

SEQ ID NO: 11220 - protein, 10 aa, Artificial Sequence
  Synthetic polypeptide representing artificial human antibody CDR-H1 region
GFSLTSSGVC

SEQ ID NO: 11221 - protein, 8 aa, Artificial Sequence
  Synthetic polypeptide representing artificial human antibody CDR-H1 region
GFSFSSYA

SEQ ID NO: 11222 - protein, 8 aa, Artificial Sequence
  Synthetic polypeptide representing artificial human antibody CDR-H1 region
EYNFNTYY

SEQ ID NO: 11223 - protein, 10 aa, Artificial Sequence
  Synthetic polypeptide representing artificial human antibody CDR-H1 region
GGSVSSSDYY

SEQ ID NO: 11224 - protein, 8 aa, Artificial Sequence
  Synthetic polypeptide representing artificial human antibody CDR-H1 region
GFTFSSYA

SEQ ID NO: 11225 - protein, 8 aa, Artificial Sequence
  Synthetic polypeptide representing artificial human antibody CDR-H1 region
GFTFSSYA

SEQ ID NO: 11226 - protein, 8 aa, Artificial Sequence
  Synthetic polypeptide representing artificial human antibody CDR-H1 region
GGSISSYY

SEQ ID NO: 11227 - protein, 8 aa, Artificial Sequence
  Synthetic polypeptide representing artificial human antibody CDR-H1 region
GFTFRTHA

SEQ ID NO: 11228 - protein, 8 aa, Artificial Sequence
  Synthetic polypeptide representing artificial human antibody CDR-H1 region
GYTFTNYY

SEQ ID NO: 11229 - protein, 8 aa, Artificial Sequence
  Synthetic polypeptide representing artificial human antibody CDR-H1 region
TFKFRVYG

SEQ ID NO: 11230 - protein, 8 aa, Artificial Sequence
  Synthetic polypeptide representing artificial human antibody CDR-H1 region
GFTFSSYA

SEQ ID NO: 11231 - protein, 8 aa, Artificial Sequence
  Synthetic polypeptide representing artificial human antibody CDR-H1 region
GFTFHDYA

SEQ ID NO: 11232 - protein, 10 aa, Artificial Sequence
  Synthetic polypeptide representing artificial human antibody CDR-H1 region
GGSISNNSFH

SEQ ID NO: 11233 - protein, 8 aa, Artificial Sequence
  Synthetic polypeptide representing artificial human antibody CDR-H1 region
GFNFATHG

SEQ ID NO: 11234 - protein, 8 aa, Artificial Sequence
  Synthetic polypeptide representing artificial human antibody CDR-H1 region
GFTFSDYY

SEQ ID NO: 11235 - protein, 8 aa, Artificial Sequence
  Synthetic polypeptide representing artificial human antibody CDR-H1 region
GFSLSTYW

SEQ ID NO: 11236 - protein, 8 aa, Artificial Sequence
  Synthetic polypeptide representing artificial human antibody CDR-H1 region
GFTFRDYA

SEQ ID NO: 11237 - protein, 10 aa, Artificial Sequence
  Synthetic polypeptide representing artificial human antibody CDR-H1 region
GFSLSTSGMC

SEQ ID NO: 11238 - protein, 8 aa, Artificial Sequence
  Synthetic polypeptide representing artificial human antibody CDR-H1 region
GFTFSSYT

SEQ ID NO: 11239 - protein, 8 aa, Artificial Sequence
  Synthetic polypeptide representing artificial human antibody CDR-H1 region
GYTFTGYY

SEQ ID NO: 11240 - protein, 8 aa, Artificial Sequence
  Synthetic polypeptide representing artificial human antibody CDR-H1 region
GFTFSSYA

SEQ ID NO: 11241 - protein, 8 aa, Artificial Sequence
  Synthetic polypeptide representing artificial human antibody CDR-H1 region
GGSIGNSY

SEQ ID NO: 11242 - protein, 9 aa, Artificial Sequence
  Synthetic polypeptide representing artificial human antibody CDR-H1 region
NGSISSSNW

SEQ ID NO: 11243 - protein, 8 aa, Artificial Sequence
  Synthetic polypeptide representing artificial human antibody CDR-H1 region
GDSISRFY

SEQ ID NO: 11244 - protein, 8 aa, Artificial Sequence
  Synthetic polypeptide representing artificial human antibody CDR-H1 region
YFAFETYY

SEQ ID NO: 11245 - protein, 8 aa, Artificial Sequence
  Synthetic polypeptide representing artificial human antibody CDR-H1 region
GYTFTNYF

SEQ ID NO: 11246 - protein, 8 aa, Artificial Sequence
  Synthetic polypeptide representing artificial human antibody CDR-H1 region
GGTFSSYA

SEQ ID NO: 11247 - protein, 8 aa, Artificial Sequence
  Synthetic polypeptide representing artificial human antibody CDR-H1 region
GFTFSEYW

SEQ ID NO: 11248 - protein, 8 aa, Artificial Sequence
  Synthetic polypeptide representing artificial human antibody CDR-H1 region
GFTFSDYY

SEQ ID NO: 11249 - protein, 8 aa, Artificial Sequence
  Synthetic polypeptide representing artificial human antibody CDR-H1 region
GFTFSSYA

SEQ ID NO: 11250 - protein, 8 aa, Artificial Sequence
  Synthetic polypeptide representing artificial human antibody CDR-H1 region
GFTFGDYA

SEQ ID NO: 11251 - protein, 8 aa, Artificial Sequence
  Synthetic polypeptide representing artificial human antibody CDR-L1 region
SSNIGSNT

SEQ ID NO: 11252 - protein, 6 aa, Artificial Sequence
  Synthetic polypeptide representing artificial human antibody CDR-L1 region
QSVRSH

SEQ ID NO: 11253 - protein, 6 aa, Artificial Sequence
  Synthetic polypeptide representing artificial human antibody CDR-L1 region
QTIIDW

SEQ ID NO: 11254 - protein, 6 aa, Artificial Sequence
  Synthetic polypeptide representing artificial human antibody CDR-L1 region
QTIIDW

SEQ ID NO: 11255 - protein, 6 aa, Artificial Sequence
  Synthetic polypeptide representing artificial human antibody CDR-L1 region
QTIIDW

SEQ ID NO: 11256 - protein, 6 aa, Artificial Sequence
  Synthetic polypeptide representing artificial human antibody CDR-L1 region
QTIIDW

SEQ ID NO: 11257 - protein, 6 aa, Artificial Sequence
  Synthetic polypeptide representing artificial human antibody CDR-L1 region
QTIIDW

SEQ ID NO: 11258 - protein, 8 aa, Artificial Sequence
  Synthetic polypeptide representing artificial human antibody CDR-L1 region
SSNIGSNT

SEQ ID NO: 11259 - protein, 6 aa, Artificial Sequence
  Synthetic polypeptide representing artificial human antibody CDR-L1 region
QSVSSH

SEQ ID NO: 11260 - protein, 7 aa, Artificial Sequence
  Synthetic polypeptide representing artificial human antibody CDR-L1 region
QSLSSSY

SEQ ID NO: 11261 - protein, 9 aa, Artificial Sequence
  Synthetic polypeptide representing artificial human antibody CDR-L1 region
SSDIGGYDY

SEQ ID NO: 11262 - protein, 9 aa, Artificial Sequence
  Synthetic polypeptide representing artificial human antibody CDR-L1 region
SSDVGGYNY

SEQ ID NO: 11263 - protein, 11 aa, Artificial Sequence
  Synthetic polypeptide representing artificial human antibody CDR-L1 region
QSLLHSNGYNY

SEQ ID NO: 11264 - protein, 11 aa, Artificial Sequence
  Synthetic polypeptide representing artificial human antibody CDR-L1 region
QSLVHSDGNTY

SEQ ID NO: 11265 - protein, 6 aa, Artificial Sequence
  Synthetic polypeptide representing artificial human antibody CDR-L1 region
QSISSY

SEQ ID NO: 11266 - protein, 6 aa, Artificial Sequence
  Synthetic polypeptide representing artificial human antibody CDR-L1 region
QSVSSY

SEQ ID NO: 11267 - protein, 9 aa, Artificial Sequence
  Synthetic polypeptide representing artificial human antibody CDR-L1 region
SSDVGGYNY

SEQ ID NO: 11268 - protein, 7 aa, Artificial Sequence
  Synthetic polypeptide representing artificial human antibody CDR-L1 region
SGHSNYI

SEQ ID NO: 11269 - protein, 9 aa, Artificial Sequence
  Synthetic polypeptide representing artificial human antibody CDR-L1 region
GSDVGSYSL

SEQ ID NO: 11270 - protein, 6 aa, Artificial Sequence
  Synthetic polypeptide representing artificial human antibody CDR-L1 region
NIGSKS

SEQ ID NO: 11271 - protein, 9 aa, Artificial Sequence
  Synthetic polypeptide representing artificial human antibody CDR-L1 region
SRDIGGYMS

SEQ ID NO: 11272 - protein, 9 aa, Artificial Sequence
  Synthetic polypeptide representing artificial human antibody CDR-L1 region
SSDIGSSNF

SEQ ID NO: 11273 - protein, 7 aa, Artificial Sequence
  Synthetic polypeptide representing artificial human antibody CDR-L1 region
QSVSSSY

SEQ ID NO: 11274 - protein, 9 aa, Artificial Sequence
  Synthetic polypeptide representing artificial human antibody CDR-L1 region
SSDVGGYNY

SEQ ID NO: 11275 - protein, 9 aa, Artificial Sequence
  Synthetic polypeptide representing artificial human antibody CDR-L1 region
SSDVGSYNL

SEQ ID NO: 11276 - protein, 7 aa, Artificial Sequence
  Synthetic polypeptide representing artificial human antibody CDR-L1 region
QSVSSSY

SEQ ID NO: 11277 - protein, 6 aa, Artificial Sequence
  Synthetic polypeptide representing artificial human antibody CDR-L1 region
QSIDFY

SEQ ID NO: 11278 - protein, 7 aa, Artificial Sequence
  Synthetic polypeptide representing artificial human antibody CDR-L1 region
SGYSNYK

SEQ ID NO: 11279 - protein, 6 aa, Artificial Sequence
  Synthetic polypeptide representing artificial human antibody CDR-L1 region
QGISSY

SEQ ID NO: 11280 - protein, 7 aa, Artificial Sequence
  Synthetic polypeptide representing artificial human antibody CDR-L1 region
SRHGNYA

SEQ ID NO: 11281 - protein, 7 aa, Artificial Sequence
  Synthetic polypeptide representing artificial human antibody CDR-L1 region
QSVSSSY

SEQ ID NO: 11282 - protein, 6 aa, Artificial Sequence
  Synthetic polypeptide representing artificial human antibody CDR-L1 region
QGIRND

SEQ ID NO: 11283 - protein, 6 aa, Artificial Sequence
  Synthetic polypeptide representing artificial human antibody CDR-L1 region
QSVSSY

SEQ ID NO: 11284 - protein, 6 aa, Artificial Sequence
  Synthetic polypeptide representing artificial human antibody CDR-L1 region
ALPKQY

SEQ ID NO: 11285 - protein, 6 aa, Artificial Sequence
  Synthetic polypeptide representing artificial human antibody CDR-L1 region
QGISDF

SEQ ID NO: 11286 - protein, 6 aa, Artificial Sequence
  Synthetic polypeptide representing artificial human antibody CDR-L1 region
QGISTA

SEQ ID NO: 11287 - protein, 6 aa, Artificial Sequence
  Synthetic polypeptide representing artificial human antibody CDR-L1 region
QSVSSN

SEQ ID NO: 11288 - protein, 6 aa, Artificial Sequence
  Synthetic polypeptide representing artificial human antibody CDR-L1 region
QGIRND

SEQ ID NO: 11289 - protein, 6 aa, Artificial Sequence
  Synthetic polypeptide representing artificial human antibody CDR-L1 region
NIGSKS

SEQ ID NO: 11290 - protein, 12 aa, Artificial Sequence
  Synthetic polypeptide representing artificial human antibody CDR-L1 region
QSVLYSSNNKNY

SEQ ID NO: 11291 - protein, 9 aa, Artificial Sequence
  Synthetic polypeptide representing artificial human antibody CDR-L1 region
SSDVGGYNY

SEQ ID NO: 11292 - protein, 9 aa, Artificial Sequence
  Synthetic polypeptide representing artificial human antibody CDR-L1 region
RSDIGAYNY

SEQ ID NO: 11293 - protein, 9 aa, Artificial Sequence
  Synthetic polypeptide representing artificial human antibody CDR-L1 region
SSDVGSYNL

SEQ ID NO: 11294 - protein, 6 aa, Artificial Sequence
  Synthetic polypeptide representing artificial human antibody CDR-L1 region
QSVSSN

SEQ ID NO: 11295 - protein, 6 aa, Artificial Sequence
  Synthetic polypeptide representing artificial human antibody CDR-L1 region
SLRSYY

SEQ ID NO: 11296 - protein, 11 aa, Artificial Sequence
  Synthetic polypeptide representing artificial human antibody CDR-L1 region
QSLLHSDGKTY

SEQ ID NO: 11297 - protein, 7 aa, Artificial Sequence
  Synthetic polypeptide representing artificial human antibody CDR-L1 region
QSVSSSY

SEQ ID NO: 11298 - protein, 6 aa, Artificial Sequence
  Synthetic polypeptide representing artificial human antibody CDR-L1 region
QSLRNT

SEQ ID NO: 11299 - protein, 9 aa, Artificial Sequence
  Synthetic polypeptide representing artificial human antibody CDR-L1 region
TSNIGADYD

SEQ ID NO: 11300 - protein, 12 aa, Artificial Sequence
  Synthetic polypeptide representing artificial human antibody CDR-L1 region
QSLSYSSKYKNY

SEQ ID NO: 11301 - protein, 9 aa, Artificial Sequence
  Synthetic polypeptide representing artificial human antibody CDR-L1 region
SSDIGGYDR

SEQ ID NO: 11302 - protein, 8 aa, Artificial Sequence
  Synthetic polypeptide representing artificial human antibody CDR-L1 region
SSNIGSNY

SEQ ID NO: 11303 - protein, 8 aa, Artificial Sequence
  Synthetic polypeptide representing artificial human antibody CDR-L1 region
RSNIGSNA

SEQ ID NO: 11304 - protein, 8 aa, Artificial Sequence
  Synthetic polypeptide representing artificial human antibody CDR-L1 region
SSNIGNNY

SEQ ID NO: 11305 - protein, 6 aa, Artificial Sequence
  Synthetic polypeptide representing artificial human antibody CDR-L1 region
SLRSYY

SEQ ID NO: 11306 - protein, 7 aa, Artificial Sequence
  Synthetic polypeptide representing artificial human antibody CDR-L1 region
QSINRNF

SEQ ID NO: 11307 - protein, 6 aa, Artificial Sequence
  Synthetic polypeptide representing artificial human antibody CDR-L1 region
QSISSY

SEQ ID NO: 11308 - protein, 6 aa, Artificial Sequence
  Synthetic polypeptide representing artificial human antibody CDR-L1 region
ALPKQY

SEQ ID NO: 11309 - protein, 11 aa, Artificial Sequence
  Synthetic polypeptide representing artificial human antibody CDR-L1 region
QSLLHSDGKTY

SEQ ID NO: 11310 - protein, 6 aa, Artificial Sequence
  Synthetic polypeptide representing artificial human antibody CDR-L1 region
QGITNH

SEQ ID NO: 11311 - protein, 6 aa, Artificial Sequence
  Synthetic polypeptide representing artificial human antibody CDR-L1 region
KLGDKY

SEQ ID NO: 11312 - protein, 6 aa, Artificial Sequence
  Synthetic polypeptide representing artificial human antibody CDR-L1 region
ALPKKY

SEQ ID NO: 11313 - protein, 11 aa, Artificial Sequence
  Synthetic polypeptide representing artificial human antibody CDR-L1 region
QSLLHSNGYNY

SEQ ID NO: 11314 - protein, 12 aa, Artificial Sequence
  Synthetic polypeptide representing artificial human antibody CDR-L1 region
QSLLDSDDGNTY

SEQ ID NO: 11315 - protein, 11 aa, Artificial Sequence
  Synthetic polypeptide representing artificial human antibody CDR-L1 region
QSLLHSNGYNY

SEQ ID NO: 11316 - protein, 9 aa, Artificial Sequence
  Synthetic polypeptide representing artificial human antibody CDR-L1 region
SSDIGAYNY

SEQ ID NO: 11317 - protein, 7 aa, Artificial Sequence
  Synthetic polypeptide representing artificial human antibody CDR-L1 region
QSVSSSY

SEQ ID NO: 11318 - protein, 8 aa, Artificial Sequence
  Synthetic polypeptide representing artificial human antibody CDR-L1 region
SNNVGNQG

SEQ ID NO: 11319 - protein, 12 aa, Artificial Sequence
  Synthetic polypeptide representing artificial human antibody CDR-L1 region
QSVLYTPNNKNY

SEQ ID NO: 11320 - protein, 6 aa, Artificial Sequence
  Synthetic polypeptide representing artificial human antibody CDR-L1 region
QSVSSN

SEQ ID NO: 11321 - protein, 8 aa, Artificial Sequence
  Synthetic polypeptide representing artificial human antibody CDR-L1 region
SSNIGGNT

SEQ ID NO: 11322 - protein, 6 aa, Artificial Sequence
  Synthetic polypeptide representing artificial human antibody CDR-L1 region
QTINNN

SEQ ID NO: 11323 - protein, 9 aa, Artificial Sequence
  Synthetic polypeptide representing artificial human antibody CDR-L1 region
SSDVGSYNL

SEQ ID NO: 11324 - protein, 8 aa, Artificial Sequence
  Synthetic polypeptide representing artificial human antibody CDR-L1 region
SSNIGSNY

SEQ ID NO: 11325 - protein, 6 aa, Artificial Sequence
  Synthetic polypeptide representing artificial human antibody CDR-L1 region
QGIGNK

SEQ ID NO: 11326 - protein, 9 aa, Artificial Sequence
  Synthetic polypeptide representing artificial human antibody CDR-L1 region
TGAVTSGHY

SEQ ID NO: 11327 - protein, 6 aa, Artificial Sequence
  Synthetic polypeptide representing artificial human antibody CDR-L1 region
QGISTA

SEQ ID NO: 11328 - protein, 11 aa, Artificial Sequence
  Synthetic polypeptide representing artificial human antibody CDR-L1 region
QSLLHSNGYNY

SEQ ID NO: 11329 - protein, 7 aa, Artificial Sequence
  Synthetic polypeptide representing artificial human antibody CDR-L1 region
SGHSSYA

SEQ ID NO: 11330 - protein, 6 aa, Artificial Sequence
  Synthetic polypeptide representing artificial human antibody CDR-L1 region
QGIRND

SEQ ID NO: 11331 - protein, 11 aa, Artificial Sequence
  Synthetic polypeptide representing artificial human antibody CDR-L1 region
QSLLHSNGYNY

SEQ ID NO: 11332 - protein, 6 aa, Artificial Sequence
  Synthetic polypeptide representing artificial human antibody CDR-L1 region
QSISSY

SEQ ID NO: 11333 - protein, 6 aa, Artificial Sequence
  Synthetic polypeptide representing artificial human antibody CDR-L1 region
QSISSW

SEQ ID NO: 11334 - protein, 6 aa, Artificial Sequence
  Synthetic polypeptide representing artificial human antibody CDR-L1 region
QSISSY

SEQ ID NO: 11335 - protein, 11 aa, Artificial Sequence
  Synthetic polypeptide representing artificial human antibody CDR-L1 region
QSLLHSNGYNY

SEQ ID NO: 11336 - protein, 6 aa, Artificial Sequence
  Synthetic polypeptide representing artificial human antibody CDR-L1 region
QSVSSY

SEQ ID NO: 11337 - protein, 9 aa, Artificial Sequence
  Synthetic polypeptide representing artificial human antibody CDR-L1 region
RSDIGSYNY

SEQ ID NO: 11338 - protein, 6 aa, Artificial Sequence
  Synthetic polypeptide representing artificial human antibody CDR-L1 region
ALPKQY

SEQ ID NO: 11339 - protein, 11 aa, Artificial Sequence
  Synthetic polypeptide representing artificial human antibody CDR-L1 region
QSLVYSDGNTY

SEQ ID NO: 11340 - protein, 6 aa, Artificial Sequence
  Synthetic polypeptide representing artificial human antibody CDR-L1 region
NIGSKS

SEQ ID NO: 11341 - protein, 6 aa, Artificial Sequence
  Synthetic polypeptide representing artificial human antibody CDR-L1 region
QDVGAY

SEQ ID NO: 11342 - protein, 9 aa, Artificial Sequence
  Synthetic polypeptide representing artificial human antibody CDR-L1 region
SGNVGRYNL

SEQ ID NO: 11343 - protein, 11 aa, Artificial Sequence
  Synthetic polypeptide representing artificial human antibody CDR-L1 region
QSLVHRDGNTH

SEQ ID NO: 11344 - protein, 6 aa, Artificial Sequence
  Synthetic polypeptide representing artificial human antibody CDR-L1 region
QSISSY

SEQ ID NO: 11345 - protein, 6 aa, Artificial Sequence
  Synthetic polypeptide representing artificial human antibody CDR-L1 region
QGISSW

SEQ ID NO: 11346 - protein, 12 aa, Artificial Sequence
  Synthetic polypeptide representing artificial human antibody CDR-L1 region
QSVLYTSNNKDY

SEQ ID NO: 11347 - protein, 6 aa, Artificial Sequence
  Synthetic polypeptide representing artificial human antibody CDR-L1 region
QDISNY

SEQ ID NO: 11348 - protein, 7 aa, Artificial Sequence
  Synthetic polypeptide representing artificial human antibody CDR-L1 region
QSVSSSY

SEQ ID NO: 11349 - protein, 7 aa, Artificial Sequence
  Synthetic polypeptide representing artificial human antibody CDR-L1 region
QSVSSSY

SEQ ID NO: 11350 - protein, 11 aa, Artificial Sequence
  Synthetic polypeptide representing artificial human antibody CDR-L1 region
QSLLHSNGYNY

SEQ ID NO: 11351 - protein, 8 aa, Artificial Sequence
  Synthetic polypeptide representing artificial human antibody CDR-L1 region
SSNIGSNY

SEQ ID NO: 11352 - protein, 9 aa, Artificial Sequence
  Synthetic polypeptide representing artificial human antibody CDR-L1 region
SSDVGGYNY

SEQ ID NO: 11353 - protein, 6 aa, Artificial Sequence
  Synthetic polypeptide representing artificial human antibody CDR-L1 region
QAIRDE

SEQ ID NO: 11354 - protein, 6 aa, Artificial Sequence
  Synthetic polypeptide representing artificial human antibody CDR-L1 region
QSISMY

SEQ ID NO: 11355 - protein, 6 aa, Artificial Sequence
  Synthetic polypeptide representing artificial human antibody CDR-L1 region
QSISGF

SEQ ID NO: 11356 - protein, 9 aa, Artificial Sequence
  Synthetic polypeptide representing artificial human antibody CDR-L1 region
SSDVGGYNY

SEQ ID NO: 11357 - protein, 6 aa, Artificial Sequence
  Synthetic polypeptide representing artificial human antibody CDR-L1 region
QSVSSY

SEQ ID NO: 11358 - protein, 6 aa, Artificial Sequence
  Synthetic polypeptide representing artificial human antibody CDR-L1 region
QGIRND

SEQ ID NO: 11359 - protein, 6 aa, Artificial Sequence
  Synthetic polypeptide representing artificial human antibody CDR-L1 region
QSVGSF

SEQ ID NO: 11360 - protein, 11 aa, Artificial Sequence
  Synthetic polypeptide representing artificial human antibody CDR-L1 region
QSLVYSDGNTY

SEQ ID NO: 11361 - protein, 6 aa, Artificial Sequence
  Synthetic polypeptide representing artificial human antibody CDR-L1 region
SLRSYY

SEQ ID NO: 11362 - protein, 9 aa, Artificial Sequence
  Synthetic polypeptide representing artificial human antibody CDR-L1 region
SSDVGGYNY

SEQ ID NO: 11363 - protein, 11 aa, Artificial Sequence
  Synthetic polypeptide representing artificial human antibody CDR-L1 region
QSLVYSDGNTY

SEQ ID NO: 11364 - protein, 9 aa, Artificial Sequence
  Synthetic polypeptide representing artificial human antibody CDR-L1 region
SSDVGAYIY

SEQ ID NO: 11365 - protein, 9 aa, Artificial Sequence
  Synthetic polypeptide representing artificial human antibody CDR-L1 region
SSNIGARYD

SEQ ID NO: 11366 - protein, 6 aa, Artificial Sequence
  Synthetic polypeptide representing artificial human antibody CDR-L1 region
QGINNW

SEQ ID NO: 11367 - protein, 8 aa, Artificial Sequence
  Synthetic polypeptide representing artificial human antibody CDR-L1 region
SSNIGKNY

SEQ ID NO: 11368 - protein, 9 aa, Artificial Sequence
  Synthetic polypeptide representing artificial human antibody CDR-L1 region
SSDVGGYNY

SEQ ID NO: 11369 - protein, 6 aa, Artificial Sequence
  Synthetic polypeptide representing artificial human antibody CDR-L1 region
QSISSW

SEQ ID NO: 11370 - protein, 6 aa, Artificial Sequence
  Synthetic polypeptide representing artificial human antibody CDR-L1 region
HSISGY

SEQ ID NO: 11371 - protein, 9 aa, Artificial Sequence
  Synthetic polypeptide representing artificial human antibody CDR-L1 region
SSDVGGYNY

SEQ ID NO: 11372 - protein, 6 aa, Artificial Sequence
  Synthetic polypeptide representing artificial human antibody CDR-L1 region
QNINNW

SEQ ID NO: 11373 - protein, 9 aa, Artificial Sequence
  Synthetic polypeptide representing artificial human antibody CDR-L1 region
SSDVGGYNY

SEQ ID NO: 11374 - protein, 8 aa, Artificial Sequence
  Synthetic polypeptide representing artificial human antibody CDR-L1 region
ASNIGSNL

SEQ ID NO: 11375 - protein, 9 aa, Artificial Sequence
  Synthetic polypeptide representing artificial human antibody CDR-L1 region
SSNIGAGYD

SEQ ID NO: 11376 - protein, 12 aa, Artificial Sequence
  Synthetic polypeptide representing artificial human antibody CDR-L1 region
QSVLYSSNNKNY

SEQ ID NO: 11377 - protein, 8 aa, Artificial Sequence
  Synthetic polypeptide representing artificial human antibody CDR-L1 region
SSNIGSNT

SEQ ID NO: 11378 - protein, 6 aa, Artificial Sequence
  Synthetic polypeptide representing artificial human antibody CDR-L1 region
RSVNRN

SEQ ID NO: 11379 - protein, 6 aa, Artificial Sequence
  Synthetic polypeptide representing artificial human antibody CDR-L1 region
SLRSYY

SEQ ID NO: 11380 - protein, 6 aa, Artificial Sequence
  Synthetic polypeptide representing artificial human antibody CDR-L1 region
QGISTS

SEQ ID NO: 11381 - protein, 6 aa, Artificial Sequence
  Synthetic polypeptide representing artificial human antibody CDR-L1 region
ALPKQY

SEQ ID NO: 11382 - protein, 6 aa, Artificial Sequence
  Synthetic polypeptide representing artificial human antibody CDR-L1 region
KLGDKY

SEQ ID NO: 11383 - protein, 8 aa, Artificial Sequence
  Synthetic polypeptide representing artificial human antibody CDR-L1 region
SSNIGNNY

SEQ ID NO: 11384 - protein, 6 aa, Artificial Sequence
  Synthetic polypeptide representing artificial human antibody CDR-L1 region
NLKLFY

SEQ ID NO: 11385 - protein, 6 aa, Artificial Sequence
  Synthetic polypeptide representing artificial human antibody CDR-L1 region
QSISTY

SEQ ID NO: 11386 - protein, 8 aa, Artificial Sequence
  Synthetic polypeptide representing artificial human antibody CDR-L1 region
SSNIGSNY

SEQ ID NO: 11387 - protein, 9 aa, Artificial Sequence
  Synthetic polypeptide representing artificial human antibody CDR-L1 region
WTDIGLFNH

SEQ ID NO: 11388 - protein, 6 aa, Artificial Sequence
  Synthetic polypeptide representing artificial human antibody CDR-L1 region
ALPKQY

SEQ ID NO: 11389 - protein, 6 aa, Artificial Sequence
  Synthetic polypeptide representing artificial human antibody CDR-L1 region
SLRIYY

SEQ ID NO: 11390 - protein, 6 aa, Artificial Sequence
  Synthetic polypeptide representing artificial human antibody CDR-L1 region
QSVSSY

SEQ ID NO: 11391 - protein, 6 aa, Artificial Sequence
  Synthetic polypeptide representing artificial human antibody CDR-L1 region
SLKLFY

SEQ ID NO: 11392 - protein, 6 aa, Artificial Sequence
  Synthetic polypeptide representing artificial human antibody CDR-L1 region
ALPKQY

SEQ ID NO: 11393 - protein, 12 aa, Artificial Sequence
  Synthetic polypeptide representing artificial human antibody CDR-L1 region
QSVLYSSNNKNY

SEQ ID NO: 11394 - protein, 6 aa, Artificial Sequence
  Synthetic polypeptide representing artificial human antibody CDR-L1 region
VLPKQH

SEQ ID NO: 11395 - protein, 6 aa, Artificial Sequence
  Synthetic polypeptide representing artificial human antibody CDR-L1 region
QSINRY

SEQ ID NO: 11396 - protein, 6 aa, Artificial Sequence
  Synthetic polypeptide representing artificial human antibody CDR-L1 region
KLGDKY

SEQ ID NO: 11397 - protein, 6 aa, Artificial Sequence
  Synthetic polypeptide representing artificial human antibody CDR-L1 region
QSVSTY

SEQ ID NO: 11398 - protein, 6 aa, Artificial Sequence
  Synthetic polypeptide representing artificial human antibody CDR-L1 region
QKIATY

SEQ ID NO: 11399 - protein, 7 aa, Artificial Sequence
  Synthetic polypeptide representing artificial human antibody CDR-L1 region
QSVNSDY

SEQ ID NO: 11400 - protein, 6 aa, Artificial Sequence
  Synthetic polypeptide representing artificial human antibody CDR-L1 region
SLRIYY

SEQ ID NO: 11401 - protein, 6 aa, Artificial Sequence
  Synthetic polypeptide representing artificial human antibody CDR-L1 region
SLRSYY

SEQ ID NO: 11402 - protein, 6 aa, Artificial Sequence
  Synthetic polypeptide representing artificial human antibody CDR-L1 region
SLTLFY

SEQ ID NO: 11403 - protein, 9 aa, Artificial Sequence
  Synthetic polypeptide representing artificial human antibody CDR-L1 region
SGSVSTSYY

SEQ ID NO: 11404 - protein, 6 aa, Artificial Sequence
  Synthetic polypeptide representing artificial human antibody CDR-L1 region
NLKLFY

SEQ ID NO: 11405 - protein, 12 aa, Artificial Sequence
  Synthetic polypeptide representing artificial human antibody CDR-L1 region
QSILYNSNSKNY

SEQ ID NO: 11406 - protein, 9 aa, Artificial Sequence
  Synthetic polypeptide representing artificial human antibody CDR-L1 region
NSDVGTYNF

SEQ ID NO: 11407 - protein, 9 aa, Artificial Sequence
  Synthetic polypeptide representing artificial human antibody CDR-L1 region
SSNIGAGYD

SEQ ID NO: 11408 - protein, 6 aa, Artificial Sequence
  Synthetic polypeptide representing artificial human antibody CDR-L1 region
ALPKQY

SEQ ID NO: 11409 - protein, 9 aa, Artificial Sequence
  Synthetic polypeptide representing artificial human antibody CDR-L1 region
GSNIGATYD

SEQ ID NO: 11410 - protein, 9 aa, Artificial Sequence
  Synthetic polypeptide representing artificial human antibody CDR-L1 region
SDSVGGYNY

SEQ ID NO: 11411 - protein, 9 aa, Artificial Sequence
  Synthetic polypeptide representing artificial human antibody CDR-L1 region
SSDVGGYNY

SEQ ID NO: 11412 - protein, 6 aa, Artificial Sequence
  Synthetic polypeptide representing artificial human antibody CDR-L1 region
QSIATY

SEQ ID NO: 11413 - protein, 6 aa, Artificial Sequence
  Synthetic polypeptide representing artificial human antibody CDR-L1 region
QSISSN

SEQ ID NO: 11414 - protein, 11 aa, Artificial Sequence
  Synthetic polypeptide representing artificial human antibody CDR-L1 region
QSLLHSNGYNY

SEQ ID NO: 11415 - protein, 6 aa, Artificial Sequence
  Synthetic polypeptide representing artificial human antibody CDR-L1 region
SLRLFY

SEQ ID NO: 11416 - protein, 6 aa, Artificial Sequence
  Synthetic polypeptide representing artificial human antibody CDR-L1 region
GLGAKY

SEQ ID NO: 11417 - protein, 6 aa, Artificial Sequence
  Synthetic polypeptide representing artificial human antibody CDR-L1 region
SLKLFY

SEQ ID NO: 11418 - protein, 6 aa, Artificial Sequence
  Synthetic polypeptide representing artificial human antibody CDR-L1 region
TLTLYY

SEQ ID NO: 11419 - protein, 7 aa, Artificial Sequence
  Synthetic polypeptide representing artificial human antibody CDR-L1 region
QSVSSGY

SEQ ID NO: 11420 - protein, 6 aa, Artificial Sequence
  Synthetic polypeptide representing artificial human antibody CDR-L1 region
SLKLFY

SEQ ID NO: 11421 - protein, 9 aa, Artificial Sequence
  Synthetic polypeptide representing artificial human antibody CDR-L1 region
SSDVGGYNY

SEQ ID NO: 11422 - protein, 8 aa, Artificial Sequence
  Synthetic polypeptide representing artificial human antibody CDR-L1 region
NGGIASNY

SEQ ID NO: 11423 - protein, 6 aa, Artificial Sequence
  Synthetic polypeptide representing artificial human antibody CDR-L1 region
KLGNKY

SEQ ID NO: 11424 - protein, 8 aa, Artificial Sequence
  Synthetic polypeptide representing artificial human antibody CDR-L1 region
SSNIGNNY

SEQ ID NO: 11425 - protein, 9 aa, Artificial Sequence
  Synthetic polypeptide representing artificial human antibody CDR-L1 region
SSDVGSYNL

SEQ ID NO: 11426 - protein, 7 aa, Artificial Sequence
  Synthetic polypeptide representing artificial human antibody CDR-L1 region
QSVSSSY

SEQ ID NO: 11427 - protein, 6 aa, Artificial Sequence
  Synthetic polypeptide representing artificial human antibody CDR-L1 region
NLKLFY

SEQ ID NO: 11428 - protein, 6 aa, Artificial Sequence
  Synthetic polypeptide representing artificial human antibody CDR-L1 region
QHMSGY

SEQ ID NO: 11429 - protein, 12 aa, Artificial Sequence
  Synthetic polypeptide representing artificial human antibody CDR-L1 region
QSLLYRSNNKNY

SEQ ID NO: 11430 - protein, 6 aa, Artificial Sequence
  Synthetic polypeptide representing artificial human antibody CDR-L1 region
QDISNY

SEQ ID NO: 11431 - protein, 6 aa, Artificial Sequence
  Synthetic polypeptide representing artificial human antibody CDR-L1 region
QKIATY

SEQ ID NO: 11432 - protein, 6 aa, Artificial Sequence
  Synthetic polypeptide representing artificial human antibody CDR-L1 region
KLGDKY

SEQ ID NO: 11433 - protein, 8 aa, Artificial Sequence
  Synthetic polypeptide representing artificial human antibody CDR-L1 region
SGSIASNY

SEQ ID NO: 11434 - protein, 8 aa, Artificial Sequence
  Synthetic polypeptide representing artificial human antibody CDR-L1 region
SSNIGNNY

SEQ ID NO: 11435 - protein, 9 aa, Artificial Sequence
  Synthetic polypeptide representing artificial human antibody CDR-L1 region
SSDVGGYNY

SEQ ID NO: 11436 - protein, 9 aa, Artificial Sequence
  Synthetic polypeptide representing artificial human antibody CDR-L1 region
SSSIGAGYD

SEQ ID NO: 11437 - protein, 9 aa, Artificial Sequence
  Synthetic polypeptide representing artificial human antibody CDR-L1 region
SSDVGGYNY

SEQ ID NO: 11438 - protein, 7 aa, Artificial Sequence
  Synthetic polypeptide representing artificial human antibody CDR-L1 region
QSVSITS

SEQ ID NO: 11439 - protein, 8 aa, Artificial Sequence
  Synthetic polypeptide representing artificial human antibody CDR-L1 region
SSNIGSHY

SEQ ID NO: 11440 - protein, 7 aa, Artificial Sequence
  Synthetic polypeptide representing artificial human antibody CDR-L1 region
QSVSSSY

SEQ ID NO: 11441 - protein, 12 aa, Artificial Sequence
  Synthetic polypeptide representing artificial human antibody CDR-L1 region
QSVLYRSNNKNY

SEQ ID NO: 11442 - protein, 6 aa, Artificial Sequence
  Synthetic polypeptide representing artificial human antibody CDR-L1 region
QGISSW

SEQ ID NO: 11443 - protein, 8 aa, Artificial Sequence
  Synthetic polypeptide representing artificial human antibody CDR-L1 region
SSNIGNNY

SEQ ID NO: 11444 - protein, 6 aa, Artificial Sequence
  Synthetic polypeptide representing artificial human antibody CDR-L1 region
QSVSSY

SEQ ID NO: 11445 - protein, 6 aa, Artificial Sequence
  Synthetic polypeptide representing artificial human antibody CDR-L1 region
QGISNY

SEQ ID NO: 11446 - protein, 8 aa, Artificial Sequence
  Synthetic polypeptide representing artificial human antibody CDR-L1 region
SSNIGNNY

SEQ ID NO: 11447 - protein, 12 aa, Artificial Sequence
  Synthetic polypeptide representing artificial human antibody CDR-L1 region
RSVFYSSGNKNY

SEQ ID NO: 11448 - protein, 8 aa, Artificial Sequence
  Synthetic polypeptide representing artificial human antibody CDR-L1 region
SSNIGSNT

SEQ ID NO: 11449 - protein, 9 aa, Artificial Sequence
  Synthetic polypeptide representing artificial human antibody CDR-L1 region
SSAIGGYNL

SEQ ID NO: 11450 - protein, 6 aa, Artificial Sequence
  Synthetic polypeptide representing artificial human antibody CDR-L1 region
KLGEKF

SEQ ID NO: 11451 - protein, 6 aa, Artificial Sequence
  Synthetic polypeptide representing artificial human antibody CDR-L1 region
ALPKQY

SEQ ID NO: 11452 - protein, 12 aa, Artificial Sequence
  Synthetic polypeptide representing artificial human antibody CDR-L1 region
QSVLYSSNNKNY

SEQ ID NO: 11453 - protein, 11 aa, Artificial Sequence
  Synthetic polypeptide representing artificial human antibody CDR-L1 region
QSLLHSNGYTL

SEQ ID NO: 11454 - protein, 6 aa, Artificial Sequence
  Synthetic polypeptide representing artificial human antibody CDR-L1 region
SLRIYY

SEQ ID NO: 11455 - protein, 9 aa, Artificial Sequence
  Synthetic polypeptide representing artificial human antibody CDR-L1 region
SSDVGGYNY

SEQ ID NO: 11456 - protein, 11 aa, Artificial Sequence
  Synthetic polypeptide representing artificial human antibody CDR-L1 region
QSLVYSDGNTY

SEQ ID NO: 11457 - protein, 6 aa, Artificial Sequence
  Synthetic polypeptide representing artificial human antibody CDR-L1 region
NIGSKS

SEQ ID NO: 11458 - protein, 6 aa, Artificial Sequence
  Synthetic polypeptide representing artificial human antibody CDR-L1 region
QSVGSN

SEQ ID NO: 11459 - protein, 6 aa, Artificial Sequence
  Synthetic polypeptide representing artificial human antibody CDR-L1 region
SLRSYY

SEQ ID NO: 11460 - protein, 11 aa, Artificial Sequence
  Synthetic polypeptide representing artificial human antibody CDR-L1 region
QSLLHSNGYNY

SEQ ID NO: 11461 - protein, 11 aa, Artificial Sequence
  Synthetic polypeptide representing artificial human antibody CDR-L1 region
QSLLHSNGYNC

SEQ ID NO: 11462 - protein, 7 aa, Artificial Sequence
  Synthetic polypeptide representing artificial human antibody CDR-L1 region
QSVSSTY

SEQ ID NO: 11463 - protein, 8 aa, Artificial Sequence
  Synthetic polypeptide representing artificial human antibody CDR-L1 region
SSNIGSNP

SEQ ID NO: 11464 - protein, 7 aa, Artificial Sequence
  Synthetic polypeptide representing artificial human antibody CDR-L1 region
QSLSSRY

SEQ ID NO: 11465 - protein, 9 aa, Artificial Sequence
  Synthetic polypeptide representing artificial human antibody CDR-L1 region
SGSVSTSHY

SEQ ID NO: 11466 - protein, 8 aa, Artificial Sequence
  Synthetic polypeptide representing artificial human antibody CDR-L1 region
SSNIGSNT

SEQ ID NO: 11467 - protein, 6 aa, Artificial Sequence
  Synthetic polypeptide representing artificial human antibody CDR-L1 region
NLDEKY

SEQ ID NO: 11468 - protein, 9 aa, Artificial Sequence
  Synthetic polypeptide representing artificial human antibody CDR-L1 region
SSDVGAYNY

SEQ ID NO: 11469 - protein, 8 aa, Artificial Sequence
  Synthetic polypeptide representing artificial human antibody CDR-L1 region
SSNIGSNY

SEQ ID NO: 11470 - protein, 6 aa, Artificial Sequence
  Synthetic polypeptide representing artificial human antibody CDR-L1 region
QNFYSY

SEQ ID NO: 11471 - protein, 6 aa, Artificial Sequence
  Synthetic polypeptide representing artificial human antibody CDR-L1 region
SLRRYY

SEQ ID NO: 11472 - protein, 9 aa, Artificial Sequence
  Synthetic polypeptide representing artificial human antibody CDR-L1 region
SSDVGAYNY

SEQ ID NO: 11473 - protein, 6 aa, Artificial Sequence
  Synthetic polypeptide representing artificial human antibody CDR-L1 region
QNIDSY

SEQ ID NO: 11474 - protein, 8 aa, Artificial Sequence
  Synthetic polypeptide representing artificial human antibody CDR-L1 region
SSNIGSNT

SEQ ID NO: 11475 - protein, 6 aa, Artificial Sequence
  Synthetic polypeptide representing artificial human antibody CDR-L1 region
TLRMYY

SEQ ID NO: 11476 - protein, 6 aa, Artificial Sequence
  Synthetic polypeptide representing artificial human antibody CDR-L1 region
QTVNIN

SEQ ID NO: 11477 - protein, 6 aa, Artificial Sequence
  Synthetic polypeptide representing artificial human antibody CDR-L1 region
QDISNY

SEQ ID NO: 11478 - protein, 6 aa, Artificial Sequence
  Synthetic polypeptide representing artificial human antibody CDR-L1 region
QGISRY

SEQ ID NO: 11479 - protein, 8 aa, Artificial Sequence
  Synthetic polypeptide representing artificial human antibody CDR-L1 region
SSNIGSNF

SEQ ID NO: 11480 - protein, 11 aa, Artificial Sequence
  Synthetic polypeptide representing artificial human antibody CDR-L1 region
QSLVHSDGNTY

SEQ ID NO: 11481 - protein, 6 aa, Artificial Sequence
  Synthetic polypeptide representing artificial human antibody CDR-L1 region
KLGDKY

SEQ ID NO: 11482 - protein, 6 aa, Artificial Sequence
  Synthetic polypeptide representing artificial human antibody CDR-L1 region
SLRSYY

SEQ ID NO: 11483 - protein, 11 aa, Artificial Sequence
  Synthetic polypeptide representing artificial human antibody CDR-L1 region
QSLLHSDGKTY

SEQ ID NO: 11484 - protein, 6 aa, Artificial Sequence
  Synthetic polypeptide representing artificial human antibody CDR-L1 region
QAISSY

SEQ ID NO: 11485 - protein, 11 aa, Artificial Sequence
  Synthetic polypeptide representing artificial human antibody CDR-L1 region
QSLVHSDGNTY

SEQ ID NO: 11486 - protein, 6 aa, Artificial Sequence
  Synthetic polypeptide representing artificial human antibody CDR-L1 region
KLGDLL

SEQ ID NO: 11487 - protein, 6 aa, Artificial Sequence
  Synthetic polypeptide representing artificial human antibody CDR-L1 region
QIFNNN

SEQ ID NO: 11488 - protein, 11 aa, Artificial Sequence
  Synthetic polypeptide representing artificial human antibody CDR-L1 region
QSLVHSDGNTY

SEQ ID NO: 11489 - protein, 8 aa, Artificial Sequence
  Synthetic polypeptide representing artificial human antibody CDR-L1 region
SSNIGNNH

SEQ ID NO: 11490 - protein, 6 aa, Artificial Sequence
  Synthetic polypeptide representing artificial human antibody CDR-L1 region
QSISNY

SEQ ID NO: 11491 - protein, 11 aa, Artificial Sequence
  Synthetic polypeptide representing artificial human antibody CDR-L1 region
QSLLHSNGYNY

SEQ ID NO: 11492 - protein, 8 aa, Artificial Sequence
  Synthetic polypeptide representing artificial human antibody CDR-L1 region
SSNIGSNY

SEQ ID NO: 11493 - protein, 8 aa, Artificial Sequence
  Synthetic polypeptide representing artificial human antibody CDR-L1 region
SSNIGGNY

SEQ ID NO: 11494 - protein, 9 aa, Artificial Sequence
  Synthetic polypeptide representing artificial human antibody CDR-L1 region
SSNIGSGYD

SEQ ID NO: 11495 - protein, 11 aa, Artificial Sequence
  Synthetic polypeptide representing artificial human antibody CDR-L1 region
QSLVHSDGNTY

SEQ ID NO: 11496 - protein, 6 aa, Artificial Sequence
  Synthetic polypeptide representing artificial human antibody CDR-L1 region
ALPKQY

SEQ ID NO: 11497 - protein, 8 aa, Artificial Sequence
  Synthetic polypeptide representing artificial human antibody CDR-L1 region
SSNIGSNS

SEQ ID NO: 11498 - protein, 6 aa, Artificial Sequence
  Synthetic polypeptide representing artificial human antibody CDR-L1 region
QLADKY

SEQ ID NO: 11499 - protein, 12 aa, Artificial Sequence
  Synthetic polypeptide representing artificial human antibody CDR-L1 region
QSVLSSSNNKNY

SEQ ID NO: 11500 - protein, 6 aa, Artificial Sequence
  Synthetic polypeptide representing artificial human antibody CDR-L1 region
QSIDIF

SEQ ID NO: 11501 - protein, 7 aa, Artificial Sequence
  Synthetic polypeptide representing artificial human antibody CDR-L1 region
QSVSSSY

SEQ ID NO: 11502 - protein, 6 aa, Artificial Sequence
  Synthetic polypeptide representing artificial human antibody CDR-L1 region
QSISSW

SEQ ID NO: 11503 - protein, 11 aa, Artificial Sequence
  Synthetic polypeptide representing artificial human antibody CDR-L1 region
QSLLHSDGRTY

SEQ ID NO: 11504 - protein, 6 aa, Artificial Sequence
  Synthetic polypeptide representing artificial human antibody CDR-L1 region
QSVGSD

SEQ ID NO: 11505 - protein, 6 aa, Artificial Sequence
  Synthetic polypeptide representing artificial human antibody CDR-L1 region
ENINNF

SEQ ID NO: 11506 - protein, 8 aa, Artificial Sequence
  Synthetic polypeptide representing artificial human antibody CDR-L1 region
SSNIGSNT

SEQ ID NO: 11507 - protein, 6 aa, Artificial Sequence
  Synthetic polypeptide representing artificial human antibody CDR-L1 region
ALTKQY

SEQ ID NO: 11508 - protein, 6 aa, Artificial Sequence
  Synthetic polypeptide representing artificial human antibody CDR-L1 region
QGIRDD

SEQ ID NO: 11509 - protein, 6 aa, Artificial Sequence
  Synthetic polypeptide representing artificial human antibody CDR-L1 region
ALPKQY

SEQ ID NO: 11510 - protein, 9 aa, Artificial Sequence
  Synthetic polypeptide representing artificial human antibody CDR-L1 region
SSNIGAGYD

SEQ ID NO: 11511 - protein, 7 aa, Artificial Sequence
  Synthetic polypeptide representing artificial human antibody CDR-L1 region
QSVSSSY

SEQ ID NO: 11512 - protein, 6 aa, Artificial Sequence
  Synthetic polypeptide representing artificial human antibody CDR-L1 region
SIGSKN

SEQ ID NO: 11513 - protein, 6 aa, Artificial Sequence
  Synthetic polypeptide representing artificial human antibody CDR-L1 region
QGISSY

SEQ ID NO: 11514 - protein, 6 aa, Artificial Sequence
  Synthetic polypeptide representing artificial human antibody CDR-L1 region
QTVRSK

SEQ ID NO: 11515 - protein, 7 aa, Artificial Sequence
  Synthetic polypeptide representing artificial human antibody CDR-L1 region
ESVSRSY

SEQ ID NO: 11516 - protein, 11 aa, Artificial Sequence
  Synthetic polypeptide representing artificial human antibody CDR-L1 region
QSLVHSDGNTY

SEQ ID NO: 11517 - protein, 9 aa, Artificial Sequence
  Synthetic polypeptide representing artificial human antibody CDR-L1 region
SGSVSTSHY

SEQ ID NO: 11518 - protein, 6 aa, Artificial Sequence
  Synthetic polypeptide representing artificial human antibody CDR-L1 region
SLPKKY

SEQ ID NO: 11519 - protein, 6 aa, Artificial Sequence
  Synthetic polypeptide representing artificial human antibody CDR-L1 region
QSISTY

SEQ ID NO: 11520 - protein, 6 aa, Artificial Sequence
  Synthetic polypeptide representing artificial human antibody CDR-L1 region
GLTRKY

SEQ ID NO: 11521 - protein, 6 aa, Artificial Sequence
  Synthetic polypeptide representing artificial human antibody CDR-L1 region
QAISSY

SEQ ID NO: 11522 - protein, 9 aa, Artificial Sequence
  Synthetic polypeptide representing artificial human antibody CDR-L1 region
SSDVGGYNF

SEQ ID NO: 11523 - protein, 9 aa, Artificial Sequence
  Synthetic polypeptide representing artificial human antibody CDR-L1 region
SSDLGAGYD

SEQ ID NO: 11524 - protein, 9 aa, Artificial Sequence
  Synthetic polypeptide representing artificial human antibody CDR-L1 region
MGPVTTSYY

SEQ ID NO: 11525 - protein, 11 aa, Artificial Sequence
  Synthetic polypeptide representing artificial human antibody CDR-L1 region
QSLLHSNGYNY

SEQ ID NO: 11526 - protein, 6 aa, Artificial Sequence
  Synthetic polypeptide representing artificial human antibody CDR-L1 region
SLRSYY

SEQ ID NO: 11527 - protein, 9 aa, Artificial Sequence
  Synthetic polypeptide representing artificial human antibody CDR-L1 region
SSDVGSYNL

SEQ ID NO: 11528 - protein, 6 aa, Artificial Sequence
  Synthetic polypeptide representing artificial human antibody CDR-L1 region
RSVSSS

SEQ ID NO: 11529 - protein, 6 aa, Artificial Sequence
  Synthetic polypeptide representing artificial human antibody CDR-L1 region
QGISGW

SEQ ID NO: 11530 - protein, 4 aa, Artificial Sequence
  Synthetic polypeptide representing artificial human antibody CDR-L1 region
RGDD

SEQ ID NO: 11531 - protein, 6 aa, Artificial Sequence
  Synthetic polypeptide representing artificial human antibody CDR-L1 region
EVGNAN

SEQ ID NO: 11532 - protein, 6 aa, Artificial Sequence
  Synthetic polypeptide representing artificial human antibody CDR-L1 region
QDISNY

SEQ ID NO: 11533 - protein, 6 aa, Artificial Sequence
  Synthetic polypeptide representing artificial human antibody CDR-L1 region
QSVSRW

SEQ ID NO: 11534 - protein, 7 aa, Artificial Sequence
  Synthetic polypeptide representing artificial human antibody CDR-L1 region
QSVSSNY

SEQ ID NO: 11535 - protein, 9 aa, Artificial Sequence
  Synthetic polypeptide representing artificial human antibody CDR-L1 region
NSDIYGYAR

SEQ ID NO: 11536 - protein, 8 aa, Artificial Sequence
  Synthetic polypeptide representing artificial human antibody CDR-L1 region
SSNIGSNY

SEQ ID NO: 11537 - protein, 7 aa, Artificial Sequence
  Synthetic polypeptide representing artificial human antibody CDR-L1 region
QSVSSSY

SEQ ID NO: 11538 - protein, 9 aa, Artificial Sequence
  Synthetic polypeptide representing artificial human antibody CDR-L1 region
SSNIGAGYD

SEQ ID NO: 11539 - protein, 9 aa, Artificial Sequence
  Synthetic polypeptide representing artificial human antibody CDR-L1 region
SSDVGSYNL

SEQ ID NO: 11540 - protein, 9 aa, Artificial Sequence
  Synthetic polypeptide representing artificial human antibody CDR-L1 region
TGTITSLYY

SEQ ID NO: 11541 - protein, 6 aa, Artificial Sequence
  Synthetic polypeptide representing artificial human antibody CDR-L1 region
QTISSY

SEQ ID NO: 11542 - protein, 8 aa, Artificial Sequence
  Synthetic polypeptide representing artificial human antibody CDR-L1 region
SSNIGNNY

SEQ ID NO: 11543 - protein, 11 aa, Artificial Sequence
  Synthetic polypeptide representing artificial human antibody CDR-L1 region
QSLLDRNGHNC

SEQ ID NO: 11544 - protein, 9 aa, Artificial Sequence
  Synthetic polypeptide representing artificial human antibody CDR-L1 region
SSDVGSYNL

SEQ ID NO: 11545 - protein, 6 aa, Artificial Sequence
  Synthetic polypeptide representing artificial human antibody CDR-L1 region
QSISSW

SEQ ID NO: 11546 - protein, 6 aa, Artificial Sequence
  Synthetic polypeptide representing artificial human antibody CDR-L1 region
NIGSKS

SEQ ID NO: 11547 - protein, 6 aa, Artificial Sequence
  Synthetic polypeptide representing artificial human antibody CDR-L1 region
QSISSW

SEQ ID NO: 11548 - protein, 6 aa, Artificial Sequence
  Synthetic polypeptide representing artificial human antibody CDR-L1 region
QSVSSY

SEQ ID NO: 11549 - protein, 6 aa, Artificial Sequence
  Synthetic polypeptide representing artificial human antibody CDR-L1 region
QSISSY

SEQ ID NO: 11550 - protein, 9 aa, Artificial Sequence
  Synthetic polypeptide representing artificial human antibody CDR-L1 region
TGTVTSGHY

SEQ ID NO: 11551 - protein, 11 aa, Artificial Sequence
  Synthetic polypeptide representing artificial human antibody CDR-L1 region
QSLVHSDGNTY

SEQ ID NO: 11552 - protein, 6 aa, Artificial Sequence
  Synthetic polypeptide representing artificial human antibody CDR-L1 region
QDIRRY

SEQ ID NO: 11553 - protein, 9 aa, Artificial Sequence
  Synthetic polypeptide representing artificial human antibody CDR-L1 region
SSDVGGYNY

SEQ ID NO: 11554 - protein, 9 aa, Artificial Sequence
  Synthetic polypeptide representing artificial human antibody CDR-L1 region
SSDVGGYNY

SEQ ID NO: 11555 - protein, 6 aa, Artificial Sequence
  Synthetic polypeptide representing artificial human antibody CDR-L1 region
KLGDKY

SEQ ID NO: 11556 - protein, 9 aa, Artificial Sequence
  Synthetic polypeptide representing artificial human antibody CDR-L1 region
SSDVGSYNL

SEQ ID NO: 11557 - protein, 7 aa, Artificial Sequence
  Synthetic polypeptide representing artificial human antibody CDR-L1 region
EVVTNNY

SEQ ID NO: 11558 - protein, 9 aa, Artificial Sequence
  Synthetic polypeptide representing artificial human antibody CDR-L1 region
NSDIGAYDY

SEQ ID NO: 11559 - protein, 12 aa, Artificial Sequence
  Synthetic polypeptide representing artificial human antibody CDR-L1 region
QSVLYSSNNKNY

SEQ ID NO: 11560 - protein, 8 aa, Artificial Sequence
  Synthetic polypeptide representing artificial human antibody CDR-L1 region
SSNIGNNY

SEQ ID NO: 11561 - protein, 9 aa, Artificial Sequence
  Synthetic polypeptide representing artificial human antibody CDR-L1 region
SSDVGGYNY

SEQ ID NO: 11562 - protein, 12 aa, Artificial Sequence
  Synthetic polypeptide representing artificial human antibody CDR-L1 region
QSVVYSSNNKNY

SEQ ID NO: 11563 - protein, 9 aa, Artificial Sequence
  Synthetic polypeptide representing artificial human antibody CDR-L1 region
SSDVGSYNL

SEQ ID NO: 11564 - protein, 9 aa, Artificial Sequence
  Synthetic polypeptide representing artificial human antibody CDR-L1 region
SSDVGGYNY

SEQ ID NO: 11565 - protein, 6 aa, Artificial Sequence
  Synthetic polypeptide representing artificial human antibody CDR-L1 region
QSISSW

SEQ ID NO: 11566 - protein, 6 aa, Artificial Sequence
  Synthetic polypeptide representing artificial human antibody CDR-L1 region
QSISRY

SEQ ID NO: 11567 - protein, 6 aa, Artificial Sequence
  Synthetic polypeptide representing artificial human antibody CDR-L1 region
QHIRHD

SEQ ID NO: 11568 - protein, 6 aa, Artificial Sequence
  Synthetic polypeptide representing artificial human antibody CDR-L1 region
QSISSW

SEQ ID NO: 11569 - protein, 10 aa, Artificial Sequence
  Synthetic polypeptide representing artificial human antibody CDR-L1 region
QSVLDGSNNN

SEQ ID NO: 11570 - protein, 7 aa, Artificial Sequence
  Synthetic polypeptide representing artificial human antibody CDR-L1 region
QSVSSSY

SEQ ID NO: 11571 - protein, 6 aa, Artificial Sequence
  Synthetic polypeptide representing artificial human antibody CDR-L1 region
QSISSY

SEQ ID NO: 11572 - protein, 7 aa, Artificial Sequence
  Synthetic polypeptide representing artificial human antibody CDR-L1 region
QSVNRNY

SEQ ID NO: 11573 - protein, 12 aa, Artificial Sequence
  Synthetic polypeptide representing artificial human antibody CDR-L1 region
QSVLYSSNNKNY

SEQ ID NO: 11574 - protein, 9 aa, Artificial Sequence
  Synthetic polypeptide representing artificial human antibody CDR-L1 region
SSDVGGYKY

SEQ ID NO: 11575 - protein, 8 aa, Artificial Sequence
  Synthetic polypeptide representing artificial human antibody CDR-L1 region
NSNIGSNY

SEQ ID NO: 11576 - protein, 6 aa, Artificial Sequence
  Synthetic polypeptide representing artificial human antibody CDR-L1 region
ALPKKY

SEQ ID NO: 11577 - protein, 6 aa, Artificial Sequence
  Synthetic polypeptide representing artificial human antibody CDR-L1 region
QSVSSY

SEQ ID NO: 11578 - protein, 7 aa, Artificial Sequence
  Synthetic polypeptide representing artificial human antibody CDR-L1 region
QSVSSSY

SEQ ID NO: 11579 - protein, 12 aa, Artificial Sequence
  Synthetic polypeptide representing artificial human antibody CDR-L1 region
QSVLNSSNNKNY

SEQ ID NO: 11580 - protein, 11 aa, Artificial Sequence
  Synthetic polypeptide representing artificial human antibody CDR-L1 region
QSLLHSDGKTY

SEQ ID NO: 11581 - protein, 11 aa, Artificial Sequence
  Synthetic polypeptide representing artificial human antibody CDR-L1 region
QSLVHSDGNTY

SEQ ID NO: 11582 - protein, 6 aa, Artificial Sequence
  Synthetic polypeptide representing artificial human antibody CDR-L1 region
SLRSYY

SEQ ID NO: 11583 - protein, 6 aa, Artificial Sequence
  Synthetic polypeptide representing artificial human antibody CDR-L1 region
QGIRND

SEQ ID NO: 11584 - protein, 6 aa, Artificial Sequence
  Synthetic polypeptide representing artificial human antibody CDR-L1 region
KLGHKN

SEQ ID NO: 11585 - protein, 6 aa, Artificial Sequence
  Synthetic polypeptide representing artificial human antibody CDR-L1 region
QSVSSY

SEQ ID NO: 11586 - protein, 9 aa, Artificial Sequence
  Synthetic polypeptide representing artificial human antibody CDR-L1 region
SGDIGAYNF

SEQ ID NO: 11587 - protein, 6 aa, Artificial Sequence
  Synthetic polypeptide representing artificial human antibody CDR-L1 region
QSISSW

SEQ ID NO: 11588 - protein, 6 aa, Artificial Sequence
  Synthetic polypeptide representing artificial human antibody CDR-L1 region
QDISNY

SEQ ID NO: 11589 - protein, 9 aa, Artificial Sequence
  Synthetic polypeptide representing artificial human antibody CDR-L1 region
SSNIGAGYD

SEQ ID NO: 11590 - protein, 12 aa, Artificial Sequence
  Synthetic polypeptide representing artificial human antibody CDR-L1 region
QTILHSSTKKTH

SEQ ID NO: 11591 - protein, 9 aa, Artificial Sequence
  Synthetic polypeptide representing artificial human antibody CDR-L1 region
SSDVGGYNC

SEQ ID NO: 11592 - protein, 11 aa, Artificial Sequence
  Synthetic polypeptide representing artificial human antibody CDR-L1 region
QSLVHSDGNTY

SEQ ID NO: 11593 - protein, 6 aa, Artificial Sequence
  Synthetic polypeptide representing artificial human antibody CDR-L1 region
NIGSKS

SEQ ID NO: 11594 - protein, 7 aa, Artificial Sequence
  Synthetic polypeptide representing artificial human antibody CDR-L1 region
QSVSSSY

SEQ ID NO: 11595 - protein, 6 aa, Artificial Sequence
  Synthetic polypeptide representing artificial human antibody CDR-L1 region
QGIRND

SEQ ID NO: 11596 - protein, 6 aa, Artificial Sequence
  Synthetic polypeptide representing artificial human antibody CDR-L1 region
QSISSW

SEQ ID NO: 11597 - protein, 6 aa, Artificial Sequence
  Synthetic polypeptide representing artificial human antibody CDR-L1 region
SLRSYY

SEQ ID NO: 11598 - protein, 7 aa, Artificial Sequence
  Synthetic polypeptide representing artificial human antibody CDR-L1 region
QSVSSSY

SEQ ID NO: 11599 - protein, 6 aa, Artificial Sequence
  Synthetic polypeptide representing artificial human antibody CDR-L1 region
QDISNY

SEQ ID NO: 11600 - protein, 8 aa, Artificial Sequence
  Synthetic polypeptide representing artificial human antibody CDR-L1 region
SGSIASNY

SEQ ID NO: 11601 - protein, 6 aa, Artificial Sequence
  Synthetic polypeptide representing artificial human antibody CDR-L1 region
QSISSY

SEQ ID NO: 11602 - protein, 11 aa, Artificial Sequence
  Synthetic polypeptide representing artificial human antibody CDR-L1 region
QSLVHSDGNTY

SEQ ID NO: 11603 - protein, 6 aa, Artificial Sequence
  Synthetic polypeptide representing artificial human antibody CDR-L1 region
QSVSSY

SEQ ID NO: 11604 - protein, 6 aa, Artificial Sequence
  Synthetic polypeptide representing artificial human antibody CDR-L1 region
SLRSYY

SEQ ID NO: 11605 - protein, 8 aa, Artificial Sequence
  Synthetic polypeptide representing artificial human antibody CDR-L1 region
SSNIGSND

SEQ ID NO: 11606 - protein, 8 aa, Artificial Sequence
  Synthetic polypeptide representing artificial human antibody CDR-L1 region
SSNIGSNY

SEQ ID NO: 11607 - protein, 8 aa, Artificial Sequence
  Synthetic polypeptide representing artificial human antibody CDR-L1 region
SSNIGNNY

SEQ ID NO: 11608 - protein, 7 aa, Artificial Sequence
  Synthetic polypeptide representing artificial human antibody CDR-L1 region
QSVSSSY

SEQ ID NO: 11609 - protein, 6 aa, Artificial Sequence
  Synthetic polypeptide representing artificial human antibody CDR-L1 region
QGIRND

SEQ ID NO: 11610 - protein, 9 aa, Artificial Sequence
  Synthetic polypeptide representing artificial human antibody CDR-L1 region
SSNIGAGYE

SEQ ID NO: 11611 - protein, 6 aa, Artificial Sequence
  Synthetic polypeptide representing artificial human antibody CDR-L1 region
QGISSY

SEQ ID NO: 11612 - protein, 6 aa, Artificial Sequence
  Synthetic polypeptide representing artificial human antibody CDR-L1 region
QGIDSW

SEQ ID NO: 11613 - protein, 9 aa, Artificial Sequence
  Synthetic polypeptide representing artificial human antibody CDR-L1 region
SSDVGGYNY

SEQ ID NO: 11614 - protein, 6 aa, Artificial Sequence
  Synthetic polypeptide representing artificial human antibody CDR-L1 region
KLGDKY

SEQ ID NO: 11615 - protein, 9 aa, Artificial Sequence
  Synthetic polypeptide representing artificial human antibody CDR-L1 region
SSNIGAGYD

SEQ ID NO: 11616 - protein, 7 aa, Artificial Sequence
  Synthetic polypeptide representing artificial human antibody CDR-L1 region
QSVSRNY

SEQ ID NO: 11617 - protein, 11 aa, Artificial Sequence
  Synthetic polypeptide representing artificial human antibody CDR-L1 region
QSLVHSDGNTY

SEQ ID NO: 11618 - protein, 6 aa, Artificial Sequence
  Synthetic polypeptide representing artificial human antibody CDR-L1 region
QGISSW

SEQ ID NO: 11619 - protein, 9 aa, Artificial Sequence
  Synthetic polypeptide representing artificial human antibody CDR-L1 region
TGAVTSGYY

SEQ ID NO: 11620 - protein, 5 aa, Artificial Sequence
  Synthetic polypeptide representing artificial human antibody CDR-L1 region
QSVSR

SEQ ID NO: 11621 - protein, 12 aa, Artificial Sequence
  Synthetic polypeptide representing artificial human antibody CDR-L1 region
QSVLYSSNNKNY

SEQ ID NO: 11622 - protein, 6 aa, Artificial Sequence
  Synthetic polypeptide representing artificial human antibody CDR-L1 region
ESIGGW

SEQ ID NO: 11623 - protein, 6 aa, Artificial Sequence
  Synthetic polypeptide representing artificial human antibody CDR-L1 region
QSVSSN

SEQ ID NO: 11624 - protein, 6 aa, Artificial Sequence
  Synthetic polypeptide representing artificial human antibody CDR-L1 region
ALPKKY

SEQ ID NO: 11625 - protein, 6 aa, Artificial Sequence
  Synthetic polypeptide representing artificial human antibody CDR-L1 region
KLGDKY

SEQ ID NO: 11626 - protein, 6 aa, Artificial Sequence
  Synthetic polypeptide representing artificial human antibody CDR-L1 region
ALPKQY

SEQ ID NO: 11627 - protein, 9 aa, Artificial Sequence
  Synthetic polypeptide representing artificial human antibody CDR-L1 region
SGDVGRYDL

SEQ ID NO: 11628 - protein, 7 aa, Artificial Sequence
  Synthetic polypeptide representing artificial human antibody CDR-L1 region
QSVSSSY

SEQ ID NO: 11629 - protein, 6 aa, Artificial Sequence
  Synthetic polypeptide representing artificial human antibody CDR-L1 region
QSVSSN

SEQ ID NO: 11630 - protein, 6 aa, Artificial Sequence
  Synthetic polypeptide representing artificial human antibody CDR-L1 region
NIGSKS

SEQ ID NO: 11631 - protein, 11 aa, Artificial Sequence
  Synthetic polypeptide representing artificial human antibody CDR-L1 region
QSLLHSKGYNY

SEQ ID NO: 11632 - protein, 8 aa, Artificial Sequence
  Synthetic polypeptide representing artificial human antibody CDR-L1 region
SSNIGNNY

SEQ ID NO: 11633 - protein, 8 aa, Artificial Sequence
  Synthetic polypeptide representing artificial human antibody CDR-L1 region
SGSIASNY

SEQ ID NO: 11634 - protein, 6 aa, Artificial Sequence
  Synthetic polypeptide representing artificial human antibody CDR-L1 region
KLGDKY

SEQ ID NO: 11635 - protein, 8 aa, Artificial Sequence
  Synthetic polypeptide representing artificial human antibody CDR-L1 region
SSNIGSNY

SEQ ID NO: 11636 - protein, 8 aa, Artificial Sequence
  Synthetic polypeptide representing artificial human antibody CDR-L1 region
SGSIASNY

SEQ ID NO: 11637 - protein, 6 aa, Artificial Sequence
  Synthetic polypeptide representing artificial human antibody CDR-L1 region
VLAKKY

SEQ ID NO: 11638 - protein, 6 aa, Artificial Sequence
  Synthetic polypeptide representing artificial human antibody CDR-L1 region
SLRSYY

SEQ ID NO: 11639 - protein, 6 aa, Artificial Sequence
  Synthetic polypeptide representing artificial human antibody CDR-L1 region
KLGDKY

SEQ ID NO: 11640 - protein, 6 aa, Artificial Sequence
  Synthetic polypeptide representing artificial human antibody CDR-L1 region
QGIGSW

SEQ ID NO: 11641 - protein, 8 aa, Artificial Sequence
  Synthetic polypeptide representing artificial human antibody CDR-L1 region
SSNIGNNY

SEQ ID NO: 11642 - protein, 8 aa, Artificial Sequence
  Synthetic polypeptide representing artificial human antibody CDR-L1 region
SGSIASDF

SEQ ID NO: 11643 - protein, 11 aa, Artificial Sequence
  Synthetic polypeptide representing artificial human antibody CDR-L1 region
QSLLHSNGYNY

SEQ ID NO: 11644 - protein, 7 aa, Artificial Sequence
  Synthetic polypeptide representing artificial human antibody CDR-L1 region
QSVSSRH

SEQ ID NO: 11645 - protein, 9 aa, Artificial Sequence
  Synthetic polypeptide representing artificial human antibody CDR-L1 region
SSDVGGYNY

SEQ ID NO: 11646 - protein, 6 aa, Artificial Sequence
  Synthetic polypeptide representing artificial human antibody CDR-L1 region
RAIRND

SEQ ID NO: 11647 - protein, 8 aa, Artificial Sequence
  Synthetic polypeptide representing artificial human antibody CDR-L1 region
SSNIGNNY

SEQ ID NO: 11648 - protein, 6 aa, Artificial Sequence
  Synthetic polypeptide representing artificial human antibody CDR-L1 region
SLRSYY

SEQ ID NO: 11649 - protein, 6 aa, Artificial Sequence
  Synthetic polypeptide representing artificial human antibody CDR-L1 region
ALPKQY

SEQ ID NO: 11650 - protein, 6 aa, Artificial Sequence
  Synthetic polypeptide representing artificial human antibody CDR-L1 region
QGIRND

SEQ ID NO: 11651 - protein, 6 aa, Artificial Sequence
  Synthetic polypeptide representing artificial human antibody CDR-L1 region
QSISSW

SEQ ID NO: 11652 - protein, 9 aa, Artificial Sequence
  Synthetic polypeptide representing artificial human antibody CDR-L1 region
SSNIGAGYD

SEQ ID NO: 11653 - protein, 11 aa, Artificial Sequence
  Synthetic polypeptide representing artificial human antibody CDR-L1 region
QSLVHSDGNTY

SEQ ID NO: 11654 - protein, 9 aa, Artificial Sequence
  Synthetic polypeptide representing artificial human antibody CDR-L1 region
SSDVGGYNY

SEQ ID NO: 11655 - protein, 6 aa, Artificial Sequence
  Synthetic polypeptide representing artificial human antibody CDR-L1 region
QSVSSN

SEQ ID NO: 11656 - protein, 6 aa, Artificial Sequence
  Synthetic polypeptide representing artificial human antibody CDR-L1 region
QSVSSN

SEQ ID NO: 11657 - protein, 6 aa, Artificial Sequence
  Synthetic polypeptide representing artificial human antibody CDR-L1 region
QDISNY

SEQ ID NO: 11658 - protein, 8 aa, Artificial Sequence
  Synthetic polypeptide representing artificial human antibody CDR-L1 region
SSNIGNNY

SEQ ID NO: 11659 - protein, 6 aa, Artificial Sequence
  Synthetic polypeptide representing artificial human antibody CDR-L1 region
QSISSW

SEQ ID NO: 11660 - protein, 9 aa, Artificial Sequence
  Synthetic polypeptide representing artificial human antibody CDR-L1 region
TGAVTSGHY

SEQ ID NO: 11661 - protein, 11 aa, Artificial Sequence
  Synthetic polypeptide representing artificial human antibody CDR-L1 region
QSLLHSNGYNY

SEQ ID NO: 11662 - protein, 6 aa, Artificial Sequence
  Synthetic polypeptide representing artificial human antibody CDR-L1 region
QSVNSN

SEQ ID NO: 11663 - protein, 12 aa, Artificial Sequence
  Synthetic polypeptide representing artificial human antibody CDR-L1 region
QSVLYSSNNKNY

SEQ ID NO: 11664 - protein, 12 aa, Artificial Sequence
  Synthetic polypeptide representing artificial human antibody CDR-L1 region
QSVLYSSNNKNY

SEQ ID NO: 11665 - protein, 7 aa, Artificial Sequence
  Synthetic polypeptide representing artificial human antibody CDR-L1 region
SGHSSYA

SEQ ID NO: 11666 - protein, 9 aa, Artificial Sequence
  Synthetic polypeptide representing artificial human antibody CDR-L1 region
SSDVGGYNY

SEQ ID NO: 11667 - protein, 6 aa, Artificial Sequence
  Synthetic polypeptide representing artificial human antibody CDR-L1 region
ALPKQY

SEQ ID NO: 11668 - protein, 6 aa, Artificial Sequence
  Synthetic polypeptide representing artificial human antibody CDR-L1 region
QDIYVY

SEQ ID NO: 11669 - protein, 6 aa, Artificial Sequence
  Synthetic polypeptide representing artificial human antibody CDR-L1 region
NIGSKS

SEQ ID NO: 11670 - protein, 9 aa, Artificial Sequence
  Synthetic polypeptide representing artificial human antibody CDR-L1 region
SSDVGGYNY

SEQ ID NO: 11671 - protein, 11 aa, Artificial Sequence
  Synthetic polypeptide representing artificial human antibody CDR-L1 region
QSLVHSDGNTY

SEQ ID NO: 11672 - protein, 8 aa, Artificial Sequence
  Synthetic polypeptide representing artificial human antibody CDR-L1 region
SSNIGNNY

SEQ ID NO: 11673 - protein, 6 aa, Artificial Sequence
  Synthetic polypeptide representing artificial human antibody CDR-L1 region
QSVSSN

SEQ ID NO: 11674 - protein, 6 aa, Artificial Sequence
  Synthetic polypeptide representing artificial human antibody CDR-L1 region
QSISSY

SEQ ID NO: 11675 - protein, 6 aa, Artificial Sequence
  Synthetic polypeptide representing artificial human antibody CDR-L1 region
TIGSKI

SEQ ID NO: 11676 - protein, 6 aa, Artificial Sequence
  Synthetic polypeptide representing artificial human antibody CDR-L1 region
QGISSY

SEQ ID NO: 11677 - protein, 6 aa, Artificial Sequence
  Synthetic polypeptide representing artificial human antibody CDR-L1 region
ALPKQY

SEQ ID NO: 11678 - protein, 8 aa, Artificial Sequence
  Synthetic polypeptide representing artificial human antibody CDR-L1 region
SSNIGSNY

SEQ ID NO: 11679 - protein, 6 aa, Artificial Sequence
  Synthetic polypeptide representing artificial human antibody CDR-L1 region
QSVSSN

SEQ ID NO: 11680 - protein, 11 aa, Artificial Sequence
  Synthetic polypeptide representing artificial human antibody CDR-L1 region
QSLVYSDGNTY

SEQ ID NO: 11681 - protein, 11 aa, Artificial Sequence
  Synthetic polypeptide representing artificial human antibody CDR-L1 region
QSLVHSDGNTY

SEQ ID NO: 11682 - protein, 6 aa, Artificial Sequence
  Synthetic polypeptide representing artificial human antibody CDR-L1 region
QSISSY

SEQ ID NO: 11683 - protein, 11 aa, Artificial Sequence
  Synthetic polypeptide representing artificial human antibody CDR-L1 region
QSLLHSNGYNY

SEQ ID NO: 11684 - protein, 9 aa, Artificial Sequence
  Synthetic polypeptide representing artificial human antibody CDR-L1 region
SSNIGAGSD

SEQ ID NO: 11685 - protein, 8 aa, Artificial Sequence
  Synthetic polypeptide representing artificial human antibody CDR-L1 region
SSNIGSNT

SEQ ID NO: 11686 - protein, 6 aa, Artificial Sequence
  Synthetic polypeptide representing artificial human antibody CDR-L1 region
KLGDKY

SEQ ID NO: 11687 - protein, 8 aa, Artificial Sequence
  Synthetic polypeptide representing artificial human antibody CDR-L1 region
SSNIGSNY

SEQ ID NO: 11688 - protein, 8 aa, Artificial Sequence
  Synthetic polypeptide representing artificial human antibody CDR-L1 region
SSNIGNNY

SEQ ID NO: 11689 - protein, 6 aa, Artificial Sequence
  Synthetic polypeptide representing artificial human antibody CDR-L1 region
QSISSW

SEQ ID NO: 11690 - protein, 8 aa, Artificial Sequence
  Synthetic polypeptide representing artificial human antibody CDR-L1 region
SSNIGSNT

SEQ ID NO: 11691 - protein, 6 aa, Artificial Sequence
  Synthetic polypeptide representing artificial human antibody CDR-L1 region
QGISTY

SEQ ID NO: 11692 - protein, 6 aa, Artificial Sequence
  Synthetic polypeptide representing artificial human antibody CDR-L1 region
QSVSNN

SEQ ID NO: 11693 - protein, 7 aa, Artificial Sequence
  Synthetic polypeptide representing artificial human antibody CDR-L1 region
QSVSSSY

SEQ ID NO: 11694 - protein, 8 aa, Artificial Sequence
  Synthetic polypeptide representing artificial human antibody CDR-L1 region
SSNIGNNY

SEQ ID NO: 11695 - protein, 8 aa, Artificial Sequence
  Synthetic polypeptide representing artificial human antibody CDR-L1 region
SSNIGSNT

SEQ ID NO: 11696 - protein, 12 aa, Artificial Sequence
  Synthetic polypeptide representing artificial human antibody CDR-L1 region
QSVLYSSNNKNY

SEQ ID NO: 11697 - protein, 8 aa, Artificial Sequence
  Synthetic polypeptide representing artificial human antibody CDR-L1 region
SSNIGNNY

SEQ ID NO: 11698 - protein, 9 aa, Artificial Sequence
  Synthetic polypeptide representing artificial human antibody CDR-L1 region
SSDVGGYNY

SEQ ID NO: 11699 - protein, 6 aa, Artificial Sequence
  Synthetic polypeptide representing artificial human antibody CDR-L1 region
QSISSY

SEQ ID NO: 11700 - protein, 8 aa, Artificial Sequence
  Synthetic polypeptide representing artificial human antibody CDR-L1 region
SSNIGSNT

SEQ ID NO: 11701 - protein, 6 aa, Artificial Sequence
  Synthetic polypeptide representing artificial human antibody CDR-L1 region
QNIGNF

SEQ ID NO: 11702 - protein, 9 aa, Artificial Sequence
  Synthetic polypeptide representing artificial human antibody CDR-L1 region
SSDVGGYNY

SEQ ID NO: 11703 - protein, 8 aa, Artificial Sequence
  Synthetic polypeptide representing artificial human antibody CDR-L1 region
SSNIGSNT

SEQ ID NO: 11704 - protein, 9 aa, Artificial Sequence
  Synthetic polypeptide representing artificial human antibody CDR-L1 region
SSDVGGYNY

SEQ ID NO: 11705 - protein, 6 aa, Artificial Sequence
  Synthetic polypeptide representing artificial human antibody CDR-L1 region
QSISSW

SEQ ID NO: 11706 - protein, 8 aa, Artificial Sequence
  Synthetic polypeptide representing artificial human antibody CDR-L1 region
RSNIGSNF

SEQ ID NO: 11707 - protein, 6 aa, Artificial Sequence
  Synthetic polypeptide representing artificial human antibody CDR-L1 region
QSVSSY

SEQ ID NO: 11708 - protein, 9 aa, Artificial Sequence
  Synthetic polypeptide representing artificial human antibody CDR-L1 region
SSDVGGYNY

SEQ ID NO: 11709 - protein, 6 aa, Artificial Sequence
  Synthetic polypeptide representing artificial human antibody CDR-L1 region
SLRSYY

SEQ ID NO: 11710 - protein, 9 aa, Artificial Sequence
  Synthetic polypeptide representing artificial human antibody CDR-L1 region
SSDVGGYNY

SEQ ID NO: 11711 - protein, 6 aa, Artificial Sequence
  Synthetic polypeptide representing artificial human antibody CDR-L1 region
NIGSKS

SEQ ID NO: 11712 - protein, 7 aa, Artificial Sequence
  Synthetic polypeptide representing artificial human antibody CDR-L1 region
QSVSSSF

SEQ ID NO: 11713 - protein, 6 aa, Artificial Sequence
  Synthetic polypeptide representing artificial human antibody CDR-L1 region
KLGDKY

SEQ ID NO: 11714 - protein, 6 aa, Artificial Sequence
  Synthetic polypeptide representing artificial human antibody CDR-L1 region
SLKFSF

SEQ ID NO: 11715 - protein, 6 aa, Artificial Sequence
  Synthetic polypeptide representing artificial human antibody CDR-L1 region
EIIGNT

SEQ ID NO: 11716 - protein, 7 aa, Artificial Sequence
  Synthetic polypeptide representing artificial human antibody CDR-L1 region
QSVSSSY

SEQ ID NO: 11717 - protein, 6 aa, Artificial Sequence
  Synthetic polypeptide representing artificial human antibody CDR-L1 region
NIGSKS

SEQ ID NO: 11718 - protein, 9 aa, Artificial Sequence
  Synthetic polypeptide representing artificial human antibody CDR-L1 region
SSNIGAGYD

SEQ ID NO: 11719 - protein, 8 aa, Artificial Sequence
  Synthetic polypeptide representing artificial human antibody CDR-L1 region
SSNIGSRA

SEQ ID NO: 11720 - protein, 8 aa, Artificial Sequence
  Synthetic polypeptide representing artificial human antibody CDR-L1 region
SSTIGDNY

SEQ ID NO: 11721 - protein, 6 aa, Artificial Sequence
  Synthetic polypeptide representing artificial human antibody CDR-L1 region
TLAKKY

SEQ ID NO: 11722 - protein, 8 aa, Artificial Sequence
  Synthetic polypeptide representing artificial human antibody CDR-L1 region
SSNIGSNT

SEQ ID NO: 11723 - protein, 6 aa, Artificial Sequence
  Synthetic polypeptide representing artificial human antibody CDR-L1 region
ALPKQY

SEQ ID NO: 11724 - protein, 7 aa, Artificial Sequence
  Synthetic polypeptide representing artificial human antibody CDR-L1 region
QSVSSSY

SEQ ID NO: 11725 - protein, 12 aa, Artificial Sequence
  Synthetic polypeptide representing artificial human antibody CDR-L1 region
QSILYTSNNKNY

SEQ ID NO: 11726 - protein, 8 aa, Artificial Sequence
  Synthetic polypeptide representing artificial human antibody CDR-L1 region
SSNIGNNY

SEQ ID NO: 11727 - protein, 7 aa, Artificial Sequence
  Synthetic polypeptide representing artificial human antibody CDR-L1 region
QSISSSY

SEQ ID NO: 11728 - protein, 6 aa, Artificial Sequence
  Synthetic polypeptide representing artificial human antibody CDR-L1 region
QSISSY

SEQ ID NO: 11729 - protein, 6 aa, Artificial Sequence
  Synthetic polypeptide representing artificial human antibody CDR-L1 region
NIGSKS

SEQ ID NO: 11730 - protein, 9 aa, Artificial Sequence
  Synthetic polypeptide representing artificial human antibody CDR-L1 region
FGAVTSGHY

SEQ ID NO: 11731 - protein, 7 aa, Artificial Sequence
  Synthetic polypeptide representing artificial human antibody CDR-L1 region
QSVSSSY

SEQ ID NO: 11732 - protein, 6 aa, Artificial Sequence
  Synthetic polypeptide representing artificial human antibody CDR-L1 region
QSVRSN

SEQ ID NO: 11733 - protein, 6 aa, Artificial Sequence
  Synthetic polypeptide representing artificial human antibody CDR-L1 region
QGISNY

SEQ ID NO: 11734 - protein, 6 aa, Artificial Sequence
  Synthetic polypeptide representing artificial human antibody CDR-L1 region
QSISSW

SEQ ID NO: 11735 - protein, 11 aa, Artificial Sequence
  Synthetic polypeptide representing artificial human antibody CDR-L1 region
QSLLHSDGKTY

SEQ ID NO: 11736 - protein, 6 aa, Artificial Sequence
  Synthetic polypeptide representing artificial human antibody CDR-L1 region
NIGSKS

SEQ ID NO: 11737 - protein, 6 aa, Artificial Sequence
  Synthetic polypeptide representing artificial human antibody CDR-L1 region
QSISSY

SEQ ID NO: 11738 - protein, 9 aa, Artificial Sequence
  Synthetic polypeptide representing artificial human antibody CDR-L1 region
SSDVGGYNY

SEQ ID NO: 11739 - protein, 6 aa, Artificial Sequence
  Synthetic polypeptide representing artificial human antibody CDR-L1 region
QSVSSY

SEQ ID NO: 11740 - protein, 7 aa, Artificial Sequence
  Synthetic polypeptide representing artificial human antibody CDR-L1 region
QTVNSNY

SEQ ID NO: 11741 - protein, 11 aa, Artificial Sequence
  Synthetic polypeptide representing artificial human antibody CDR-L1 region
QSLLHSNGYNY

SEQ ID NO: 11742 - protein, 8 aa, Artificial Sequence
  Synthetic polypeptide representing artificial human antibody CDR-L1 region
SGSIASNY

SEQ ID NO: 11743 - protein, 7 aa, Artificial Sequence
  Synthetic polypeptide representing artificial human antibody CDR-L1 region
QSVSSSF

SEQ ID NO: 11744 - protein, 11 aa, Artificial Sequence
  Synthetic polypeptide representing artificial human antibody CDR-L1 region
QSLLHSNGYNY

SEQ ID NO: 11745 - protein, 6 aa, Artificial Sequence
  Synthetic polypeptide representing artificial human antibody CDR-L1 region
KLGDKY

SEQ ID NO: 11746 - protein, 11 aa, Artificial Sequence
  Synthetic polypeptide representing artificial human antibody CDR-L1 region
QSLVHSDGNTY

SEQ ID NO: 11747 - protein, 6 aa, Artificial Sequence
  Synthetic polypeptide representing artificial human antibody CDR-L1 region
KLGDKY

SEQ ID NO: 11748 - protein, 6 aa, Artificial Sequence
  Synthetic polypeptide representing artificial human antibody CDR-L1 region
DTGSQS

SEQ ID NO: 11749 - protein, 6 aa, Artificial Sequence
  Synthetic polypeptide representing artificial human antibody CDR-L1 region
QSVNSN

SEQ ID NO: 11750 - protein, 7 aa, Artificial Sequence
  Synthetic polypeptide representing artificial human antibody CDR-L1 region
QSVSSSY

SEQ ID NO: 11751 - protein, 6 aa, Artificial Sequence
  Synthetic polypeptide representing artificial human antibody CDR-L1 region
QGISNY

SEQ ID NO: 11752 - protein, 6 aa, Artificial Sequence
  Synthetic polypeptide representing artificial human antibody CDR-L1 region
QSVSSN

SEQ ID NO: 11753 - protein, 6 aa, Artificial Sequence
  Synthetic polypeptide representing artificial human antibody CDR-L1 region
ALPKQY

SEQ ID NO: 11754 - protein, 6 aa, Artificial Sequence
  Synthetic polypeptide representing artificial human antibody CDR-L1 region
QSVSSN

SEQ ID NO: 11755 - protein, 6 aa, Artificial Sequence
  Synthetic polypeptide representing artificial human antibody CDR-L1 region
NIGSKS

SEQ ID NO: 11756 - protein, 6 aa, Artificial Sequence
  Synthetic polypeptide representing artificial human antibody CDR-L1 region
QSISSY

SEQ ID NO: 11757 - protein, 8 aa, Artificial Sequence
  Synthetic polypeptide representing artificial human antibody CDR-L1 region
SGSIASNY

SEQ ID NO: 11758 - protein, 6 aa, Artificial Sequence
  Synthetic polypeptide representing artificial human antibody CDR-L1 region
EDIGDH

SEQ ID NO: 11759 - protein, 6 aa, Artificial Sequence
  Synthetic polypeptide representing artificial human antibody CDR-L1 region
ALPKKY

SEQ ID NO: 11760 - protein, 6 aa, Artificial Sequence
  Synthetic polypeptide representing artificial human antibody CDR-L1 region
QSIRNW

SEQ ID NO: 11761 - protein, 9 aa, Artificial Sequence
  Synthetic polypeptide representing artificial human antibody CDR-L1 region
TDDIRDSNF

SEQ ID NO: 11762 - protein, 6 aa, Artificial Sequence
  Synthetic polypeptide representing artificial human antibody CDR-L1 region
QSVSSN

SEQ ID NO: 11763 - protein, 9 aa, Artificial Sequence
  Synthetic polypeptide representing artificial human antibody CDR-L1 region
SSDVGGYNY

SEQ ID NO: 11764 - protein, 6 aa, Artificial Sequence
  Synthetic polypeptide representing artificial human antibody CDR-L1 region
QGISSA

SEQ ID NO: 11765 - protein, 8 aa, Artificial Sequence
  Synthetic polypeptide representing artificial human antibody CDR-L1 region
SSNIGRNY

SEQ ID NO: 11766 - protein, 8 aa, Artificial Sequence
  Synthetic polypeptide representing artificial human antibody CDR-L1 region
SSNIGSNY

SEQ ID NO: 11767 - protein, 8 aa, Artificial Sequence
  Synthetic polypeptide representing artificial human antibody CDR-L1 region
SSNIGSNY

SEQ ID NO: 11768 - protein, 8 aa, Artificial Sequence
  Synthetic polypeptide representing artificial human antibody CDR-L1 region
SSNIGSNY

SEQ ID NO: 11769 - protein, 7 aa, Artificial Sequence
  Synthetic polypeptide representing artificial human antibody CDR-L1 region
QSVSSSY

SEQ ID NO: 11770 - protein, 6 aa, Artificial Sequence
  Synthetic polypeptide representing artificial human antibody CDR-L1 region
QGISSY

SEQ ID NO: 11771 - protein, 9 aa, Artificial Sequence
  Synthetic polypeptide representing artificial human antibody CDR-L1 region
SSDVGGYNY

SEQ ID NO: 11772 - protein, 6 aa, Artificial Sequence
  Synthetic polypeptide representing artificial human antibody CDR-L1 region
QGISNY

SEQ ID NO: 11773 - protein, 6 aa, Artificial Sequence
  Synthetic polypeptide representing artificial human antibody CDR-L1 region
QDISNY

SEQ ID NO: 11774 - protein, 6 aa, Artificial Sequence
  Synthetic polypeptide representing artificial human antibody CDR-L1 region
ALPKQY

SEQ ID NO: 11775 - protein, 11 aa, Artificial Sequence
  Synthetic polypeptide representing artificial human antibody CDR-L1 region
QSLLHSNGYNY

SEQ ID NO: 11776 - protein, 6 aa, Artificial Sequence
  Synthetic polypeptide representing artificial human antibody CDR-L1 region
NIGSKS

SEQ ID NO: 11777 - protein, 6 aa, Artificial Sequence
  Synthetic polypeptide representing artificial human antibody CDR-L1 region
QSVSSY

SEQ ID NO: 11778 - protein, 6 aa, Artificial Sequence
  Synthetic polypeptide representing artificial human antibody CDR-L1 region
QSISSW

SEQ ID NO: 11779 - protein, 6 aa, Artificial Sequence
  Synthetic polypeptide representing artificial human antibody CDR-L1 region
NIGSKS

SEQ ID NO: 11780 - protein, 6 aa, Artificial Sequence
  Synthetic polypeptide representing artificial human antibody CDR-L1 region
QYIRNY

SEQ ID NO: 11781 - protein, 6 aa, Artificial Sequence
  Synthetic polypeptide representing artificial human antibody CDR-L1 region
QSVSSY

SEQ ID NO: 11782 - protein, 11 aa, Artificial Sequence
  Synthetic polypeptide representing artificial human antibody CDR-L1 region
QSLVYSDGNTY

SEQ ID NO: 11783 - protein, 11 aa, Artificial Sequence
  Synthetic polypeptide representing artificial human antibody CDR-L1 region
QSLLHSNGYNY

SEQ ID NO: 11784 - protein, 6 aa, Artificial Sequence
  Synthetic polypeptide representing artificial human antibody CDR-L1 region
QSISSY

SEQ ID NO: 11785 - protein, 6 aa, Artificial Sequence
  Synthetic polypeptide representing artificial human antibody CDR-L1 region
KLGDKY

SEQ ID NO: 11786 - protein, 6 aa, Artificial Sequence
  Synthetic polypeptide representing artificial human antibody CDR-L1 region
NIGSKS

SEQ ID NO: 11787 - protein, 8 aa, Artificial Sequence
  Synthetic polypeptide representing artificial human antibody CDR-L1 region
SSNIGSNY

SEQ ID NO: 11788 - protein, 6 aa, Artificial Sequence
  Synthetic polypeptide representing artificial human antibody CDR-L1 region
QGISNY

SEQ ID NO: 11789 - protein, 6 aa, Artificial Sequence
  Synthetic polypeptide representing artificial human antibody CDR-L1 region
QDISNY

SEQ ID NO: 11790 - protein, 6 aa, Artificial Sequence
  Synthetic polypeptide representing artificial human antibody CDR-L1 region
QSVSSN

SEQ ID NO: 11791 - protein, 6 aa, Artificial Sequence
  Synthetic polypeptide representing artificial human antibody CDR-L1 region
QGISSW

SEQ ID NO: 11792 - protein, 7 aa, Artificial Sequence
  Synthetic polypeptide representing artificial human antibody CDR-L1 region
QSVSSSY

SEQ ID NO: 11793 - protein, 6 aa, Artificial Sequence
  Synthetic polypeptide representing artificial human antibody CDR-L1 region
ALPKQY

SEQ ID NO: 11794 - protein, 6 aa, Artificial Sequence
  Synthetic polypeptide representing artificial human antibody CDR-L1 region
QDISNY

SEQ ID NO: 11795 - protein, 9 aa, Artificial Sequence
  Synthetic polypeptide representing artificial human antibody CDR-L1 region
SSDVGSYNL

SEQ ID NO: 11796 - protein, 8 aa, Artificial Sequence
  Synthetic polypeptide representing artificial human antibody CDR-L1 region
SGSIASNY

SEQ ID NO: 11797 - protein, 6 aa, Artificial Sequence
  Synthetic polypeptide representing artificial human antibody CDR-L1 region
QDISNH

SEQ ID NO: 11798 - protein, 6 aa, Artificial Sequence
  Synthetic polypeptide representing artificial human antibody CDR-L1 region
QGIRND

SEQ ID NO: 11799 - protein, 11 aa, Artificial Sequence
  Synthetic polypeptide representing artificial human antibody CDR-L1 region
QSLLHSNGYNY

SEQ ID NO: 11800 - protein, 6 aa, Artificial Sequence
  Synthetic polypeptide representing artificial human antibody CDR-L1 region
QDIDNH

SEQ ID NO: 11801 - protein, 6 aa, Artificial Sequence
  Synthetic polypeptide representing artificial human antibody CDR-L1 region
QSISRS

SEQ ID NO: 11802 - protein, 7 aa, Artificial Sequence
  Synthetic polypeptide representing artificial human antibody CDR-L1 region
QSLTGNY

SEQ ID NO: 11803 - protein, 6 aa, Artificial Sequence
  Synthetic polypeptide representing artificial human antibody CDR-L1 region
NIGSKS

SEQ ID NO: 11804 - protein, 6 aa, Artificial Sequence
  Synthetic polypeptide representing artificial human antibody CDR-L1 region
KLGDKY

SEQ ID NO: 11805 - protein, 6 aa, Artificial Sequence
  Synthetic polypeptide representing artificial human antibody CDR-L1 region
QDIKNY

SEQ ID NO: 11806 - protein, 6 aa, Artificial Sequence
  Synthetic polypeptide representing artificial human antibody CDR-L1 region
SLRSYY

SEQ ID NO: 11807 - protein, 6 aa, Artificial Sequence
  Synthetic polypeptide representing artificial human antibody CDR-L1 region
QSVRSN

SEQ ID NO: 11808 - protein, 11 aa, Artificial Sequence
  Synthetic polypeptide representing artificial human antibody CDR-L1 region
QSLVYSDGNTY

SEQ ID NO: 11809 - protein, 6 aa, Artificial Sequence
  Synthetic polypeptide representing artificial human antibody CDR-L1 region
KLGDKY

SEQ ID NO: 11810 - protein, 8 aa, Artificial Sequence
  Synthetic polypeptide representing artificial human antibody CDR-L1 region
RSNIGNSF

SEQ ID NO: 11811 - protein, 7 aa, Artificial Sequence
  Synthetic polypeptide representing artificial human antibody CDR-L1 region
QSVPNND

SEQ ID NO: 11812 - protein, 6 aa, Artificial Sequence
  Synthetic polypeptide representing artificial human antibody CDR-L1 region
QGISTW

SEQ ID NO: 11813 - protein, 7 aa, Artificial Sequence
  Synthetic polypeptide representing artificial human antibody CDR-L1 region
QSVTTTY

SEQ ID NO: 11814 - protein, 7 aa, Artificial Sequence
  Synthetic polypeptide representing artificial human antibody CDR-L1 region
QSVSSSY

SEQ ID NO: 11815 - protein, 7 aa, Artificial Sequence
  Synthetic polypeptide representing artificial human antibody CDR-L1 region
QSVSSSY

SEQ ID NO: 11816 - protein, 6 aa, Artificial Sequence
  Synthetic polypeptide representing artificial human antibody CDR-L1 region
QSITTW

SEQ ID NO: 11817 - protein, 8 aa, Artificial Sequence
  Synthetic polypeptide representing artificial human antibody CDR-L1 region
SSNIGSGT

SEQ ID NO: 11818 - protein, 6 aa, Artificial Sequence
  Synthetic polypeptide representing artificial human antibody CDR-L1 region
QGISST

SEQ ID NO: 11819 - protein, 6 aa, Artificial Sequence
  Synthetic polypeptide representing artificial human antibody CDR-L1 region
QGIATH

SEQ ID NO: 11820 - protein, 6 aa, Artificial Sequence
  Synthetic polypeptide representing artificial human antibody CDR-L1 region
QSVGHY

SEQ ID NO: 11821 - protein, 6 aa, Artificial Sequence
  Synthetic polypeptide representing artificial human antibody CDR-L1 region
SLRSGY

SEQ ID NO: 11822 - protein, 11 aa, Artificial Sequence
  Synthetic polypeptide representing artificial human antibody CDR-L1 region
RSLVYSDGNTH

SEQ ID NO: 11823 - protein, 7 aa, Artificial Sequence
  Synthetic polypeptide representing artificial human antibody CDR-L1 region
QSVNIRF

SEQ ID NO: 11824 - protein, 6 aa, Artificial Sequence
  Synthetic polypeptide representing artificial human antibody CDR-L1 region
RTISNY

SEQ ID NO: 11825 - protein, 11 aa, Artificial Sequence
  Synthetic polypeptide representing artificial human antibody CDR-L1 region
QSLLHSDGKTY

SEQ ID NO: 11826 - protein, 6 aa, Artificial Sequence
  Synthetic polypeptide representing artificial human antibody CDR-L1 region
QGISKY

SEQ ID NO: 11827 - protein, 9 aa, Artificial Sequence
  Synthetic polypeptide representing artificial human antibody CDR-L1 region
RSDVGGYKY

SEQ ID NO: 11828 - protein, 6 aa, Artificial Sequence
  Synthetic polypeptide representing artificial human antibody CDR-L1 region
QDIRNY

SEQ ID NO: 11829 - protein, 6 aa, Artificial Sequence
  Synthetic polypeptide representing artificial human antibody CDR-L1 region
QSVNRH

SEQ ID NO: 11830 - protein, 11 aa, Artificial Sequence
  Synthetic polypeptide representing artificial human antibody CDR-L1 region
QSLLKSDGYHY

SEQ ID NO: 11831 - protein, 9 aa, Artificial Sequence
  Synthetic polypeptide representing artificial human antibody CDR-L1 region
TGGVTSGHI

SEQ ID NO: 11832 - protein, 6 aa, Artificial Sequence
  Synthetic polypeptide representing artificial human antibody CDR-L1 region
QSIANY

SEQ ID NO: 11833 - protein, 9 aa, Artificial Sequence
  Synthetic polypeptide representing artificial human antibody CDR-L1 region
SGSVSTNNF

SEQ ID NO: 11834 - protein, 9 aa, Artificial Sequence
  Synthetic polypeptide representing artificial human antibody CDR-L1 region
SSDVGGYNY

SEQ ID NO: 11835 - protein, 6 aa, Artificial Sequence
  Synthetic polypeptide representing artificial human antibody CDR-L1 region
QSISSY

SEQ ID NO: 11836 - protein, 11 aa, Artificial Sequence
  Synthetic polypeptide representing artificial human antibody CDR-L1 region
QSLLHSNGYNF

SEQ ID NO: 11837 - protein, 6 aa, Artificial Sequence
  Synthetic polypeptide representing artificial human antibody CDR-L1 region
ENVINN

SEQ ID NO: 11838 - protein, 6 aa, Artificial Sequence
  Synthetic polypeptide representing artificial human antibody CDR-L1 region
SLRSYY

SEQ ID NO: 11839 - protein, 6 aa, Artificial Sequence
  Synthetic polypeptide representing artificial human antibody CDR-L1 region
NIGRKS

SEQ ID NO: 11840 - protein, 11 aa, Artificial Sequence
  Synthetic polypeptide representing artificial human antibody CDR-L1 region
QSLVHSDGNTY

SEQ ID NO: 11841 - protein, 8 aa, Artificial Sequence
  Synthetic polypeptide representing artificial human antibody CDR-L1 region
SSNIGNNY

SEQ ID NO: 11842 - protein, 6 aa, Artificial Sequence
  Synthetic polypeptide representing artificial human antibody CDR-L1 region
QSINTD

SEQ ID NO: 11843 - protein, 6 aa, Artificial Sequence
  Synthetic polypeptide representing artificial human antibody CDR-L1 region
KLGDKY

SEQ ID NO: 11844 - protein, 7 aa, Artificial Sequence
  Synthetic polypeptide representing artificial human antibody CDR-L1 region
QSVSSSY

SEQ ID NO: 11845 - protein, 6 aa, Artificial Sequence
  Synthetic polypeptide representing artificial human antibody CDR-L1 region
QSVSSY

SEQ ID NO: 11846 - protein, 11 aa, Artificial Sequence
  Synthetic polypeptide representing artificial human antibody CDR-L1 region
QSLLHRNGYNY

SEQ ID NO: 11847 - protein, 6 aa, Artificial Sequence
  Synthetic polypeptide representing artificial human antibody CDR-L1 region
QSVSSN

SEQ ID NO: 11848 - protein, 6 aa, Artificial Sequence
  Synthetic polypeptide representing artificial human antibody CDR-L1 region
QSVSSN

SEQ ID NO: 11849 - protein, 8 aa, Artificial Sequence
  Synthetic polypeptide representing artificial human antibody CDR-L1 region
SSNIENHN

SEQ ID NO: 11850 - protein, 6 aa, Artificial Sequence
  Synthetic polypeptide representing artificial human antibody CDR-L1 region
ALSKQY

SEQ ID NO: 11851 - protein, 8 aa, Artificial Sequence
  Synthetic polypeptide representing artificial human antibody CDR-L1 region
SGSIASNY

SEQ ID NO: 11852 - protein, 9 aa, Artificial Sequence
  Synthetic polypeptide representing artificial human antibody CDR-L1 region
SSNIGAGYD

SEQ ID NO: 11853 - protein, 7 aa, Artificial Sequence
  Synthetic polypeptide representing artificial human antibody CDR-L1 region
SGRWNYA

SEQ ID NO: 11854 - protein, 11 aa, Artificial Sequence
  Synthetic polypeptide representing artificial human antibody CDR-L1 region
QSLVHSDGNTY

SEQ ID NO: 11855 - protein, 6 aa, Artificial Sequence
  Synthetic polypeptide representing artificial human antibody CDR-L1 region
QGIADS

SEQ ID NO: 11856 - protein, 6 aa, Artificial Sequence
  Synthetic polypeptide representing artificial human antibody CDR-L1 region
QGIGTD

SEQ ID NO: 11857 - protein, 7 aa, Artificial Sequence
  Synthetic polypeptide representing artificial human antibody CDR-L1 region
QTVRTSY

SEQ ID NO: 11858 - protein, 6 aa, Artificial Sequence
  Synthetic polypeptide representing artificial human antibody CDR-L1 region
QSISSY

SEQ ID NO: 11859 - protein, 7 aa, Artificial Sequence
  Synthetic polypeptide representing artificial human antibody CDR-L1 region
QSVGSSF

SEQ ID NO: 11860 - protein, 7 aa, Artificial Sequence
  Synthetic polypeptide representing artificial human antibody CDR-L1 region
QSVSSNY

SEQ ID NO: 11861 - protein, 6 aa, Artificial Sequence
  Synthetic polypeptide representing artificial human antibody CDR-L1 region
QSVSSN

SEQ ID NO: 11862 - protein, 6 aa, Artificial Sequence
  Synthetic polypeptide representing artificial human antibody CDR-L1 region
QSISYS

SEQ ID NO: 11863 - protein, 6 aa, Artificial Sequence
  Synthetic polypeptide representing artificial human antibody CDR-L1 region
QSISSW

SEQ ID NO: 11864 - protein, 6 aa, Artificial Sequence
  Synthetic polypeptide representing artificial human antibody CDR-L1 region
QSISKW

SEQ ID NO: 11865 - protein, 6 aa, Artificial Sequence
  Synthetic polypeptide representing artificial human antibody CDR-L1 region
QTINSY

SEQ ID NO: 11866 - protein, 6 aa, Artificial Sequence
  Synthetic polypeptide representing artificial human antibody CDR-L1 region
NIGSKS

SEQ ID NO: 11867 - protein, 9 aa, Artificial Sequence
  Synthetic polypeptide representing artificial human antibody CDR-L1 region
SSDVGGYNY

SEQ ID NO: 11868 - protein, 6 aa, Artificial Sequence
  Synthetic polypeptide representing artificial human antibody CDR-L1 region
KLGDKY

SEQ ID NO: 11869 - protein, 6 aa, Artificial Sequence
  Synthetic polypeptide representing artificial human antibody CDR-L1 region
TLRTSY

SEQ ID NO: 11870 - protein, 6 aa, Artificial Sequence
  Synthetic polypeptide representing artificial human antibody CDR-L1 region
ALPKQY

SEQ ID NO: 11871 - protein, 12 aa, Artificial Sequence
  Synthetic polypeptide representing artificial human antibody CDR-L1 region
QSILYSSNNKNY

SEQ ID NO: 11872 - protein, 8 aa, Artificial Sequence
  Synthetic polypeptide representing artificial human antibody CDR-L1 region
SSNIGNDY

SEQ ID NO: 11873 - protein, 9 aa, Artificial Sequence
  Synthetic polypeptide representing artificial human antibody CDR-L1 region
SGSVSTSYY

SEQ ID NO: 11874 - protein, 6 aa, Artificial Sequence
  Synthetic polypeptide representing artificial human antibody CDR-L1 region
KLGIKY

SEQ ID NO: 11875 - protein, 7 aa, Artificial Sequence
  Synthetic polypeptide representing artificial human antibody CDR-L1 region
SGYSNYK

SEQ ID NO: 11876 - protein, 6 aa, Artificial Sequence
  Synthetic polypeptide representing artificial human antibody CDR-L1 region
QSVGFW

SEQ ID NO: 11877 - protein, 9 aa, Artificial Sequence
  Synthetic polypeptide representing artificial human antibody CDR-L1 region
RSDVGAYNS

SEQ ID NO: 11878 - protein, 9 aa, Artificial Sequence
  Synthetic polypeptide representing artificial human antibody CDR-L1 region
SSNIGAPYD

SEQ ID NO: 11879 - protein, 9 aa, Artificial Sequence
  Synthetic polypeptide representing artificial human antibody CDR-L1 region
SFNIGAGYD

SEQ ID NO: 11880 - protein, 9 aa, Artificial Sequence
  Synthetic polypeptide representing artificial human antibody CDR-L1 region
TGPVTFGHY

SEQ ID NO: 11881 - protein, 11 aa, Artificial Sequence
  Synthetic polypeptide representing artificial human antibody CDR-L1 region
QSLVHSDGNTY

SEQ ID NO: 11882 - protein, 6 aa, Artificial Sequence
  Synthetic polypeptide representing artificial human antibody CDR-L1 region
QSVRSH

SEQ ID NO: 11883 - protein, 6 aa, Artificial Sequence
  Synthetic polypeptide representing artificial human antibody CDR-L1 region
KLATKY

SEQ ID NO: 11884 - protein, 6 aa, Artificial Sequence
  Synthetic polypeptide representing artificial human antibody CDR-L1 region
LSISSH

SEQ ID NO: 11885 - protein, 6 aa, Artificial Sequence
  Synthetic polypeptide representing artificial human antibody CDR-L1 region
SLRSYY

SEQ ID NO: 11886 - protein, 6 aa, Artificial Sequence
  Synthetic polypeptide representing artificial human antibody CDR-L1 region
SLRSYY

SEQ ID NO: 11887 - protein, 6 aa, Artificial Sequence
  Synthetic polypeptide representing artificial human antibody CDR-L1 region
QTISST

SEQ ID NO: 11888 - protein, 6 aa, Artificial Sequence
  Synthetic polypeptide representing artificial human antibody CDR-L1 region
QLGDKF

SEQ ID NO: 11889 - protein, 6 aa, Artificial Sequence
  Synthetic polypeptide representing artificial human antibody CDR-L1 region
QGIRNG

SEQ ID NO: 11890 - protein, 6 aa, Artificial Sequence
  Synthetic polypeptide representing artificial human antibody CDR-L1 region
QGIRNA

SEQ ID NO: 11891 - protein, 6 aa, Artificial Sequence
  Synthetic polypeptide representing artificial human antibody CDR-L1 region
NLGNRY

SEQ ID NO: 11892 - protein, 9 aa, Artificial Sequence
  Synthetic polypeptide representing artificial human antibody CDR-L1 region
SSDVGSYNL

SEQ ID NO: 11893 - protein, 7 aa, Artificial Sequence
  Synthetic polypeptide representing artificial human antibody CDR-L1 region
SRHFNYA

SEQ ID NO: 11894 - protein, 6 aa, Artificial Sequence
  Synthetic polypeptide representing artificial human antibody CDR-L1 region
QSVGDN

SEQ ID NO: 11895 - protein, 12 aa, Artificial Sequence
  Synthetic polypeptide representing artificial human antibody CDR-L1 region
QSVLYRSNNKNY

SEQ ID NO: 11896 - protein, 6 aa, Artificial Sequence
  Synthetic polypeptide representing artificial human antibody CDR-L1 region
QSISSY

SEQ ID NO: 11897 - protein, 6 aa, Artificial Sequence
  Synthetic polypeptide representing artificial human antibody CDR-L1 region
QSVSSN

SEQ ID NO: 11898 - protein, 9 aa, Artificial Sequence
  Synthetic polypeptide representing artificial human antibody CDR-L1 region
SSNIGAGYD

SEQ ID NO: 11899 - protein, 7 aa, Artificial Sequence
  Synthetic polypeptide representing artificial human antibody CDR-L1 region
QFVRGNY

SEQ ID NO: 11900 - protein, 8 aa, Artificial Sequence
  Synthetic polypeptide representing artificial human antibody CDR-L1 region
SFNIGNNY

SEQ ID NO: 11901 - protein, 9 aa, Artificial Sequence
  Synthetic polypeptide representing artificial human antibody CDR-L1 region
SSDVGVFDY

SEQ ID NO: 11902 - protein, 6 aa, Artificial Sequence
  Synthetic polypeptide representing artificial human antibody CDR-L1 region
QTISNF

SEQ ID NO: 11903 - protein, 12 aa, Artificial Sequence
  Synthetic polypeptide representing artificial human antibody CDR-L1 region
QSVFYSPNNKNF

SEQ ID NO: 11904 - protein, 12 aa, Artificial Sequence
  Synthetic polypeptide representing artificial human antibody CDR-L1 region
QSVLYSSNNKNY

SEQ ID NO: 11905 - protein, 7 aa, Artificial Sequence
  Synthetic polypeptide representing artificial human antibody CDR-L1 region
QNVGSSS

SEQ ID NO: 11906 - protein, 6 aa, Artificial Sequence
  Synthetic polypeptide representing artificial human antibody CDR-L1 region
NIGNTA

SEQ ID NO: 11907 - protein, 8 aa, Artificial Sequence
  Synthetic polypeptide representing artificial human antibody CDR-L1 region
SSNIGSHA

SEQ ID NO: 11908 - protein, 9 aa, Artificial Sequence
  Synthetic polypeptide representing artificial human antibody CDR-L1 region
SGSVSSRHY

SEQ ID NO: 11909 - protein, 6 aa, Artificial Sequence
  Synthetic polypeptide representing artificial human antibody CDR-L1 region
QDIGKY

SEQ ID NO: 11910 - protein, 6 aa, Artificial Sequence
  Synthetic polypeptide representing artificial human antibody CDR-L1 region
KLGDKY

SEQ ID NO: 11911 - protein, 6 aa, Artificial Sequence
  Synthetic polypeptide representing artificial human antibody CDR-L1 region
KLEDSY

SEQ ID NO: 11912 - protein, 9 aa, Artificial Sequence
  Synthetic polypeptide representing artificial human antibody CDR-L1 region
SSDVGDYKY

SEQ ID NO: 11913 - protein, 6 aa, Artificial Sequence
  Synthetic polypeptide representing artificial human antibody CDR-L1 region
QRINRN

SEQ ID NO: 11914 - protein, 6 aa, Artificial Sequence
  Synthetic polypeptide representing artificial human antibody CDR-L1 region
QNIETY

SEQ ID NO: 11915 - protein, 6 aa, Artificial Sequence
  Synthetic polypeptide representing artificial human antibody CDR-L1 region
EGLGNW

SEQ ID NO: 11916 - protein, 9 aa, Artificial Sequence
  Synthetic polypeptide representing artificial human antibody CDR-L1 region
SSDVGGYNY

SEQ ID NO: 11917 - protein, 12 aa, Artificial Sequence
  Synthetic polypeptide representing artificial human antibody CDR-L1 region
QSVLYSPNNKNY

SEQ ID NO: 11918 - protein, 6 aa, Artificial Sequence
  Synthetic polypeptide representing artificial human antibody CDR-L1 region
DFESQP

SEQ ID NO: 11919 - protein, 6 aa, Artificial Sequence
  Synthetic polypeptide representing artificial human antibody CDR-L1 region
QSISSW

SEQ ID NO: 11920 - protein, 6 aa, Artificial Sequence
  Synthetic polypeptide representing artificial human antibody CDR-L1 region
NIGTHS

SEQ ID NO: 11921 - protein, 8 aa, Artificial Sequence
  Synthetic polypeptide representing artificial human antibody CDR-L1 region
SDYIGNFY

SEQ ID NO: 11922 - protein, 6 aa, Artificial Sequence
  Synthetic polypeptide representing artificial human antibody CDR-L1 region
QSVTTN

SEQ ID NO: 11923 - protein, 6 aa, Artificial Sequence
  Synthetic polypeptide representing artificial human antibody CDR-L1 region
QSVTTE

SEQ ID NO: 11924 - protein, 9 aa, Artificial Sequence
  Synthetic polypeptide representing artificial human antibody CDR-L1 region
SSDVGGYNY

SEQ ID NO: 11925 - protein, 6 aa, Artificial Sequence
  Synthetic polypeptide representing artificial human antibody CDR-L1 region
QRVIGS

SEQ ID NO: 11926 - protein, 6 aa, Artificial Sequence
  Synthetic polypeptide representing artificial human antibody CDR-L1 region
ALPKKY

SEQ ID NO: 11927 - protein, 7 aa, Artificial Sequence
  Synthetic polypeptide representing artificial human antibody CDR-L1 region
SGHSVYS

SEQ ID NO: 11928 - protein, 7 aa, Artificial Sequence
  Synthetic polypeptide representing artificial human antibody CDR-L1 region
QSIASNW

SEQ ID NO: 11929 - protein, 9 aa, Artificial Sequence
  Synthetic polypeptide representing artificial human antibody CDR-L1 region
SSDVGNYDL

SEQ ID NO: 11930 - protein, 6 aa, Artificial Sequence
  Synthetic polypeptide representing artificial human antibody CDR-L1 region
QSISSW

SEQ ID NO: 11931 - protein, 6 aa, Artificial Sequence
  Synthetic polypeptide representing artificial human antibody CDR-L1 region
QSVGNY

SEQ ID NO: 11932 - protein, 6 aa, Artificial Sequence
  Synthetic polypeptide representing artificial human antibody CDR-L1 region
QSVSRN

SEQ ID NO: 11933 - protein, 11 aa, Artificial Sequence
  Synthetic polypeptide representing artificial human antibody CDR-L1 region
QSLLNTDGKTY

SEQ ID NO: 11934 - protein, 6 aa, Artificial Sequence
  Synthetic polypeptide representing artificial human antibody CDR-L1 region
EDIDDR

SEQ ID NO: 11935 - protein, 7 aa, Artificial Sequence
  Synthetic polypeptide representing artificial human antibody CDR-L1 region
QSVSSSY

SEQ ID NO: 11936 - protein, 6 aa, Artificial Sequence
  Synthetic polypeptide representing artificial human antibody CDR-L1 region
QSVSSY

SEQ ID NO: 11937 - protein, 6 aa, Artificial Sequence
  Synthetic polypeptide representing artificial human antibody CDR-L1 region
QSVSSN

SEQ ID NO: 11938 - protein, 6 aa, Artificial Sequence
  Synthetic polypeptide representing artificial human antibody CDR-L1 region
NIASKS

SEQ ID NO: 11939 - protein, 6 aa, Artificial Sequence
  Synthetic polypeptide representing artificial human antibody CDR-L1 region
HSVDNY

SEQ ID NO: 11940 - protein, 7 aa, Artificial Sequence
  Synthetic polypeptide representing artificial human antibody CDR-L1 region
QFVRGNY

SEQ ID NO: 11941 - protein, 6 aa, Artificial Sequence
  Synthetic polypeptide representing artificial human antibody CDR-L1 region
ENIFEL

SEQ ID NO: 11942 - protein, 8 aa, Artificial Sequence
  Synthetic polypeptide representing artificial human antibody CDR-L1 region
RSNIAINA

SEQ ID NO: 11943 - protein, 7 aa, Artificial Sequence
  Synthetic polypeptide representing artificial human antibody CDR-L1 region
QNISSRY

SEQ ID NO: 11944 - protein, 6 aa, Artificial Sequence
  Synthetic polypeptide representing artificial human antibody CDR-L1 region
QGISSY

SEQ ID NO: 11945 - protein, 7 aa, Artificial Sequence
  Synthetic polypeptide representing artificial human antibody CDR-L1 region
HSVYGNY

SEQ ID NO: 11946 - protein, 9 aa, Artificial Sequence
  Synthetic polypeptide representing artificial human antibody CDR-L1 region
SNDVGRSNF

SEQ ID NO: 11947 - protein, 6 aa, Artificial Sequence
  Synthetic polypeptide representing artificial human antibody CDR-L1 region
KLENKH

SEQ ID NO: 11948 - protein, 6 aa, Artificial Sequence
  Synthetic polypeptide representing artificial human antibody CDR-L1 region
NIGTHS

SEQ ID NO: 11949 - protein, 6 aa, Artificial Sequence
  Synthetic polypeptide representing artificial human antibody CDR-L1 region
ALPKQY

SEQ ID NO: 11950 - protein, 12 aa, Artificial Sequence
  Synthetic polypeptide representing artificial human antibody CDR-L1 region
QSVLYSSNNNNY

SEQ ID NO: 11951 - protein, 7 aa, Artificial Sequence
  Synthetic polypeptide representing artificial human antibody CDR-L1 region
QTVPSNY

SEQ ID NO: 11952 - protein, 8 aa, Artificial Sequence
  Synthetic polypeptide representing artificial human antibody CDR-L1 region
TSSIGSNT

SEQ ID NO: 11953 - protein, 6 aa, Artificial Sequence
  Synthetic polypeptide representing artificial human antibody CDR-L1 region
QGISSY

SEQ ID NO: 11954 - protein, 6 aa, Artificial Sequence
  Synthetic polypeptide representing artificial human antibody CDR-L1 region
QSVTNY

SEQ ID NO: 11955 - protein, 9 aa, Artificial Sequence
  Synthetic polypeptide representing artificial human antibody CDR-L1 region
TSNIGSGYG

SEQ ID NO: 11956 - protein, 9 aa, Artificial Sequence
  Synthetic polypeptide representing artificial human antibody CDR-L1 region
SSDVGGYNY

SEQ ID NO: 11957 - protein, 12 aa, Artificial Sequence
  Synthetic polypeptide representing artificial human antibody CDR-L1 region
QSVLYSSNNKNY

SEQ ID NO: 11958 - protein, 6 aa, Artificial Sequence
  Synthetic polypeptide representing artificial human antibody CDR-L1 region
QSVSSN

SEQ ID NO: 11959 - protein, 6 aa, Artificial Sequence
  Synthetic polypeptide representing artificial human antibody CDR-L1 region
QSVSSN

SEQ ID NO: 11960 - protein, 6 aa, Artificial Sequence
  Synthetic polypeptide representing artificial human antibody CDR-L1 region
QGISSY

SEQ ID NO: 11961 - protein, 6 aa, Artificial Sequence
  Synthetic polypeptide representing artificial human antibody CDR-L1 region
QGISNY

SEQ ID NO: 11962 - protein, 6 aa, Artificial Sequence
  Synthetic polypeptide representing artificial human antibody CDR-L1 region
QGISTY

SEQ ID NO: 11963 - protein, 6 aa, Artificial Sequence
  Synthetic polypeptide representing artificial human antibody CDR-L1 region
QGISNY

SEQ ID NO: 11964 - protein, 9 aa, Artificial Sequence
  Synthetic polypeptide representing artificial human antibody CDR-L1 region
SSDVGGYNY

SEQ ID NO: 11965 - protein, 9 aa, Artificial Sequence
  Synthetic polypeptide representing artificial human antibody CDR-L1 region
SSGFRGYNF

SEQ ID NO: 11966 - protein, 6 aa, Artificial Sequence
  Synthetic polypeptide representing artificial human antibody CDR-L1 region
ALPKQY

SEQ ID NO: 11967 - protein, 6 aa, Artificial Sequence
  Synthetic polypeptide representing artificial human antibody CDR-L1 region
QGIRND

SEQ ID NO: 11968 - protein, 6 aa, Artificial Sequence
  Synthetic polypeptide representing artificial human antibody CDR-L1 region
NIGSKV

SEQ ID NO: 11969 - protein, 7 aa, Artificial Sequence
  Synthetic polypeptide representing artificial human antibody CDR-L1 region
QSVSSSY

SEQ ID NO: 11970 - protein, 8 aa, Artificial Sequence
  Synthetic polypeptide representing artificial human antibody CDR-L1 region
SSNIGNNY

SEQ ID NO: 11971 - protein, 12 aa, Artificial Sequence
  Synthetic polypeptide representing artificial human antibody CDR-L1 region
LSVFYEFNNLNY

SEQ ID NO: 11972 - protein, 6 aa, Artificial Sequence
  Synthetic polypeptide representing artificial human antibody CDR-L1 region
QSISSY

SEQ ID NO: 11973 - protein, 6 aa, Artificial Sequence
  Synthetic polypeptide representing artificial human antibody CDR-L1 region
QGISNY

SEQ ID NO: 11974 - protein, 6 aa, Artificial Sequence
  Synthetic polypeptide representing artificial human antibody CDR-L1 region
QSVSRN

SEQ ID NO: 11975 - protein, 6 aa, Artificial Sequence
  Synthetic polypeptide representing artificial human antibody CDR-L1 region
QGISSY

SEQ ID NO: 11976 - protein, 6 aa, Artificial Sequence
  Synthetic polypeptide representing artificial human antibody CDR-L1 region
QGISHY

SEQ ID NO: 11977 - protein, 7 aa, Artificial Sequence
  Synthetic polypeptide representing artificial human antibody CDR-L1 region
QSVSSSY

SEQ ID NO: 11978 - protein, 11 aa, Artificial Sequence
  Synthetic polypeptide representing artificial human antibody CDR-L1 region
QSLLHSDGKTY

SEQ ID NO: 11979 - protein, 6 aa, Artificial Sequence
  Synthetic polypeptide representing artificial human antibody CDR-L1 region
ALPKQY

SEQ ID NO: 11980 - protein, 6 aa, Artificial Sequence
  Synthetic polypeptide representing artificial human antibody CDR-L1 region
KLGDKY

SEQ ID NO: 11981 - protein, 6 aa, Artificial Sequence
  Synthetic polypeptide representing artificial human antibody CDR-L1 region
QSISSY

SEQ ID NO: 11982 - protein, 6 aa, Artificial Sequence
  Synthetic polypeptide representing artificial human antibody CDR-L1 region
SLRNYY

SEQ ID NO: 11983 - protein, 9 aa, Artificial Sequence
  Synthetic polypeptide representing artificial human antibody CDR-L1 region
SSDVGSYNL

SEQ ID NO: 11984 - protein, 6 aa, Artificial Sequence
  Synthetic polypeptide representing artificial human antibody CDR-L1 region
QSVSSY

SEQ ID NO: 11985 - protein, 12 aa, Artificial Sequence
  Synthetic polypeptide representing artificial human antibody CDR-L1 region
QNLLYGYNNKNY

SEQ ID NO: 11986 - protein, 7 aa, Artificial Sequence
  Synthetic polypeptide representing artificial human antibody CDR-L1 region
SGYSNYK

SEQ ID NO: 11987 - protein, 6 aa, Artificial Sequence
  Synthetic polypeptide representing artificial human antibody CDR-L1 region
ALPNKY

SEQ ID NO: 11988 - protein, 6 aa, Artificial Sequence
  Synthetic polypeptide representing artificial human antibody CDR-L1 region
ALPKQY

SEQ ID NO: 11989 - protein, 6 aa, Artificial Sequence
  Synthetic polypeptide representing artificial human antibody CDR-L1 region
KLGDKY

SEQ ID NO: 11990 - protein, 9 aa, Artificial Sequence
  Synthetic polypeptide representing artificial human antibody CDR-L1 region
SSDVGGYNY

SEQ ID NO: 11991 - protein, 9 aa, Artificial Sequence
  Synthetic polypeptide representing artificial human antibody CDR-L1 region
SSDVGTYDL

SEQ ID NO: 11992 - protein, 9 aa, Artificial Sequence
  Synthetic polypeptide representing artificial human antibody CDR-L1 region
SSNIGAGYD

SEQ ID NO: 11993 - protein, 6 aa, Artificial Sequence
  Synthetic polypeptide representing artificial human antibody CDR-L1 region
QTLSGH

SEQ ID NO: 11994 - protein, 6 aa, Artificial Sequence
  Synthetic polypeptide representing artificial human antibody CDR-L1 region
QSISSY

SEQ ID NO: 11995 - protein, 6 aa, Artificial Sequence
  Synthetic polypeptide representing artificial human antibody CDR-L1 region
KLGDKY

SEQ ID NO: 11996 - protein, 8 aa, Artificial Sequence
  Synthetic polypeptide representing artificial human antibody CDR-L1 region
SSNIGSNY

SEQ ID NO: 11997 - protein, 11 aa, Artificial Sequence
  Synthetic polypeptide representing artificial human antibody CDR-L1 region
QSLLHSDGKTY

SEQ ID NO: 11998 - protein, 6 aa, Artificial Sequence
  Synthetic polypeptide representing artificial human antibody CDR-L1 region
QSIDTW

SEQ ID NO: 11999 - protein, 6 aa, Artificial Sequence
  Synthetic polypeptide representing artificial human antibody CDR-L1 region
KLGDKY

SEQ ID NO: 12000 - protein, 7 aa, Artificial Sequence
  Synthetic polypeptide representing artificial human antibody CDR-L1 region
SGYSNYK

SEQ ID NO: 12001 - protein, 9 aa, Artificial Sequence
  Synthetic polypeptide representing artificial human antibody CDR-L1 region
SSNIGAGYD

SEQ ID NO: 12002 - protein, 6 aa, Artificial Sequence
  Synthetic polypeptide representing artificial human antibody CDR-L1 region
QSISNL

SEQ ID NO: 12003 - protein, 6 aa, Artificial Sequence
  Synthetic polypeptide representing artificial human antibody CDR-L1 region
HSVSTS

SEQ ID NO: 12004 - protein, 6 aa, Artificial Sequence
  Synthetic polypeptide representing artificial human antibody CDR-L1 region
QDTSIY

SEQ ID NO: 12005 - protein, 6 aa, Artificial Sequence
  Synthetic polypeptide representing artificial human antibody CDR-L1 region
QSVSSN

SEQ ID NO: 12006 - protein, 6 aa, Artificial Sequence
  Synthetic polypeptide representing artificial human antibody CDR-L1 region
QSVSSY

SEQ ID NO: 12007 - protein, 6 aa, Artificial Sequence
  Synthetic polypeptide representing artificial human antibody CDR-L1 region
QGISSW

SEQ ID NO: 12008 - protein, 6 aa, Artificial Sequence
  Synthetic polypeptide representing artificial human antibody CDR-L1 region
KLGDKY

SEQ ID NO: 12009 - protein, 6 aa, Artificial Sequence
  Synthetic polypeptide representing artificial human antibody CDR-L1 region
ALPKQY

SEQ ID NO: 12010 - protein, 6 aa, Artificial Sequence
  Synthetic polypeptide representing artificial human antibody CDR-L1 region
QGISSW

SEQ ID NO: 12011 - protein, 6 aa, Artificial Sequence
  Synthetic polypeptide representing artificial human antibody CDR-L1 region
QGISSY

SEQ ID NO: 12012 - protein, 9 aa, Artificial Sequence
  Synthetic polypeptide representing artificial human antibody CDR-L1 region
SSDVGSYNL

SEQ ID NO: 12013 - protein, 9 aa, Artificial Sequence
  Synthetic polypeptide representing artificial human antibody CDR-L1 region
NSDVGGYDS

SEQ ID NO: 12014 - protein, 6 aa, Artificial Sequence
  Synthetic polypeptide representing artificial human antibody CDR-L1 region
ALPKQY

SEQ ID NO: 12015 - protein, 9 aa, Artificial Sequence
  Synthetic polypeptide representing artificial human antibody CDR-L1 region
SSDVGSYNL

SEQ ID NO: 12016 - protein, 9 aa, Artificial Sequence
  Synthetic polypeptide representing artificial human antibody CDR-L1 region
SSDVGGYNY

SEQ ID NO: 12017 - protein, 6 aa, Artificial Sequence
  Synthetic polypeptide representing artificial human antibody CDR-L1 region
ALPKQY

SEQ ID NO: 12018 - protein, 6 aa, Artificial Sequence
  Synthetic polypeptide representing artificial human antibody CDR-L1 region
ALPKQY

SEQ ID NO: 12019 - protein, 6 aa, Artificial Sequence
  Synthetic polypeptide representing artificial human antibody CDR-L1 region
QSISSY

SEQ ID NO: 12020 - protein, 7 aa, Artificial Sequence
  Synthetic polypeptide representing artificial human antibody CDR-L1 region
SGYSNYK

SEQ ID NO: 12021 - protein, 7 aa, Artificial Sequence
  Synthetic polypeptide representing artificial human antibody CDR-L1 region
QSVYRNF

SEQ ID NO: 12022 - protein, 11 aa, Artificial Sequence
  Synthetic polypeptide representing artificial human antibody CDR-L1 region
QSLVYSDGNTY

SEQ ID NO: 12023 - protein, 9 aa, Artificial Sequence
  Synthetic polypeptide representing artificial human antibody CDR-L1 region
TGVVTNGHF

SEQ ID NO: 12024 - protein, 6 aa, Artificial Sequence
  Synthetic polypeptide representing artificial human antibody CDR-L1 region
ALSKKY

SEQ ID NO: 12025 - protein, 12 aa, Artificial Sequence
  Synthetic polypeptide representing artificial human antibody CDR-L1 region
QSVLYSSNNKNY

SEQ ID NO: 12026 - protein, 9 aa, Artificial Sequence
  Synthetic polypeptide representing artificial human antibody CDR-L1 region
SSDVGGYNS

SEQ ID NO: 12027 - protein, 6 aa, Artificial Sequence
  Synthetic polypeptide representing artificial human antibody CDR-L1 region
QAISYS

SEQ ID NO: 12028 - protein, 6 aa, Artificial Sequence
  Synthetic polypeptide representing artificial human antibody CDR-L1 region
QGISSY

SEQ ID NO: 12029 - protein, 9 aa, Artificial Sequence
  Synthetic polypeptide representing artificial human antibody CDR-L1 region
SSDVGGYNY

SEQ ID NO: 12030 - protein, 6 aa, Artificial Sequence
  Synthetic polypeptide representing artificial human antibody CDR-L1 region
ALPKQY

SEQ ID NO: 12031 - protein, 8 aa, Artificial Sequence
  Synthetic polypeptide representing artificial human antibody CDR-L1 region
SSNIGSNT

SEQ ID NO: 12032 - protein, 9 aa, Artificial Sequence
  Synthetic polypeptide representing artificial human antibody CDR-L1 region
SSNIVAAYG

SEQ ID NO: 12033 - protein, 6 aa, Artificial Sequence
  Synthetic polypeptide representing artificial human antibody CDR-L1 region
TLPKQY

SEQ ID NO: 12034 - protein, 6 aa, Artificial Sequence
  Synthetic polypeptide representing artificial human antibody CDR-L1 region
QSVSSY

SEQ ID NO: 12035 - protein, 6 aa, Artificial Sequence
  Synthetic polypeptide representing artificial human antibody CDR-L1 region
QNVITS

SEQ ID NO: 12036 - protein, 6 aa, Artificial Sequence
  Synthetic polypeptide representing artificial human antibody CDR-L1 region
QGIRND

SEQ ID NO: 12037 - protein, 11 aa, Artificial Sequence
  Synthetic polypeptide representing artificial human antibody CDR-L1 region
QSLLYNAGNTY

SEQ ID NO: 12038 - protein, 8 aa, Artificial Sequence
  Synthetic polypeptide representing artificial human antibody CDR-L1 region
SSNIGSNY

SEQ ID NO: 12039 - protein, 8 aa, Artificial Sequence
  Synthetic polypeptide representing artificial human antibody CDR-L1 region
SGSIASNY

SEQ ID NO: 12040 - protein, 6 aa, Artificial Sequence
  Synthetic polypeptide representing artificial human antibody CDR-L1 region
QSISVY

SEQ ID NO: 12041 - protein, 8 aa, Artificial Sequence
  Synthetic polypeptide representing artificial human antibody CDR-L1 region
SSNIGNNY

SEQ ID NO: 12042 - protein, 6 aa, Artificial Sequence
  Synthetic polypeptide representing artificial human antibody CDR-L1 region
KLGDKY

SEQ ID NO: 12043 - protein, 8 aa, Artificial Sequence
  Synthetic polypeptide representing artificial human antibody CDR-L1 region
SSNIGSNY

SEQ ID NO: 12044 - protein, 8 aa, Artificial Sequence
  Synthetic polypeptide representing artificial human antibody CDR-L1 region
SSNIGSNT

SEQ ID NO: 12045 - protein, 12 aa, Artificial Sequence
  Synthetic polypeptide representing artificial human antibody CDR-L1 region
QSLFNRSNNKNC

SEQ ID NO: 12046 - protein, 7 aa, Artificial Sequence
  Synthetic polypeptide representing artificial human antibody CDR-L1 region
SGYSNYK

SEQ ID NO: 12047 - protein, 8 aa, Artificial Sequence
  Synthetic polypeptide representing artificial human antibody CDR-L1 region
SSNIGSNY

SEQ ID NO: 12048 - protein, 6 aa, Artificial Sequence
  Synthetic polypeptide representing artificial human antibody CDR-L1 region
TLPKQF

SEQ ID NO: 12049 - protein, 6 aa, Artificial Sequence
  Synthetic polypeptide representing artificial human antibody CDR-L1 region
QSIGHY

SEQ ID NO: 12050 - protein, 8 aa, Artificial Sequence
  Synthetic polypeptide representing artificial human antibody CDR-L1 region
SSNIGSNT

SEQ ID NO: 12051 - protein, 6 aa, Artificial Sequence
  Synthetic polypeptide representing artificial human antibody CDR-L1 region
QSISSY

SEQ ID NO: 12052 - protein, 6 aa, Artificial Sequence
  Synthetic polypeptide representing artificial human antibody CDR-L1 region
ALPKKY

SEQ ID NO: 12053 - protein, 6 aa, Artificial Sequence
  Synthetic polypeptide representing artificial human antibody CDR-L1 region
ALPKQY

SEQ ID NO: 12054 - protein, 9 aa, Artificial Sequence
  Synthetic polypeptide representing artificial human antibody CDR-L1 region
SSNIGAGYD

SEQ ID NO: 12055 - protein, 6 aa, Artificial Sequence
  Synthetic polypeptide representing artificial human antibody CDR-L1 region
ALPKQY

SEQ ID NO: 12056 - protein, 12 aa, Artificial Sequence
  Synthetic polypeptide representing artificial human antibody CDR-L1 region
RTLLYTSNNKNY

SEQ ID NO: 12057 - protein, 6 aa, Artificial Sequence
  Synthetic polypeptide representing artificial human antibody CDR-L1 region
SLRNYY

SEQ ID NO: 12058 - protein, 8 aa, Artificial Sequence
  Synthetic polypeptide representing artificial human antibody CDR-L1 region
SSNIGNNY

SEQ ID NO: 12059 - protein, 6 aa, Artificial Sequence
  Synthetic polypeptide representing artificial human antibody CDR-L1 region
KLGDKY

SEQ ID NO: 12060 - protein, 6 aa, Artificial Sequence
  Synthetic polypeptide representing artificial human antibody CDR-L1 region
ALPKQY

SEQ ID NO: 12061 - protein, 6 aa, Artificial Sequence
  Synthetic polypeptide representing artificial human antibody CDR-L1 region
QGIGSN

SEQ ID NO: 12062 - protein, 6 aa, Artificial Sequence
  Synthetic polypeptide representing artificial human antibody CDR-L1 region
KLGDKY

SEQ ID NO: 12063 - protein, 6 aa, Artificial Sequence
  Synthetic polypeptide representing artificial human antibody CDR-L1 region
KLGDKY

SEQ ID NO: 12064 - protein, 7 aa, Artificial Sequence
  Synthetic polypeptide representing artificial human antibody CDR-L1 region
QSVSSSY

SEQ ID NO: 12065 - protein, 6 aa, Artificial Sequence
  Synthetic polypeptide representing artificial human antibody CDR-L1 region
ALPKQY

SEQ ID NO: 12066 - protein, 12 aa, Artificial Sequence
  Synthetic polypeptide representing artificial human antibody CDR-L1 region
RTILYSSNNKNY

SEQ ID NO: 12067 - protein, 11 aa, Artificial Sequence
  Synthetic polypeptide representing artificial human antibody CDR-L1 region
QSLLHSDGKTY

SEQ ID NO: 12068 - protein, 6 aa, Artificial Sequence
  Synthetic polypeptide representing artificial human antibody CDR-L1 region
ESVSSS

SEQ ID NO: 12069 - protein, 6 aa, Artificial Sequence
  Synthetic polypeptide representing artificial human antibody CDR-L1 region
ALPKQY

SEQ ID NO: 12070 - protein, 6 aa, Artificial Sequence
  Synthetic polypeptide representing artificial human antibody CDR-L1 region
ALPKQY

SEQ ID NO: 12071 - protein, 9 aa, Artificial Sequence
  Synthetic polypeptide representing artificial human antibody CDR-L1 region
GSDFGDYNY

SEQ ID NO: 12072 - protein, 6 aa, Artificial Sequence
  Synthetic polypeptide representing artificial human antibody CDR-L1 region
NIGSKS

SEQ ID NO: 12073 - protein, 11 aa, Artificial Sequence
  Synthetic polypeptide representing artificial human antibody CDR-L1 region
QSLVHRDGNTY

SEQ ID NO: 12074 - protein, 9 aa, Artificial Sequence
  Synthetic polypeptide representing artificial human antibody CDR-L1 region
SGINVASHR

SEQ ID NO: 12075 - protein, 8 aa, Artificial Sequence
  Synthetic polypeptide representing artificial human antibody CDR-L1 region
SDNVGNQG

SEQ ID NO: 12076 - protein, 7 aa, Artificial Sequence
  Synthetic polypeptide representing artificial human antibody CDR-L1 region
QSVSSSY

SEQ ID NO: 12077 - protein, 6 aa, Artificial Sequence
  Synthetic polypeptide representing artificial human antibody CDR-L1 region
PGIGKW

SEQ ID NO: 12078 - protein, 8 aa, Artificial Sequence
  Synthetic polypeptide representing artificial human antibody CDR-L1 region
SSKIGNNY

SEQ ID NO: 12079 - protein, 6 aa, Artificial Sequence
  Synthetic polypeptide representing artificial human antibody CDR-L1 region
SLRSFY

SEQ ID NO: 12080 - protein, 6 aa, Artificial Sequence
  Synthetic polypeptide representing artificial human antibody CDR-L1 region
QDLTSS

SEQ ID NO: 12081 - protein, 9 aa, Artificial Sequence
  Synthetic polypeptide representing artificial human antibody CDR-L1 region
SGIDVGTYW

SEQ ID NO: 12082 - protein, 11 aa, Artificial Sequence
  Synthetic polypeptide representing artificial human antibody CDR-L1 region
KSLVHADGNTY

SEQ ID NO: 12083 - protein, 8 aa, Artificial Sequence
  Synthetic polypeptide representing artificial human antibody CDR-L1 region
SSNIGNNY

SEQ ID NO: 12084 - protein, 9 aa, Artificial Sequence
  Synthetic polypeptide representing artificial human antibody CDR-L1 region
SSDIGGYDF

SEQ ID NO: 12085 - protein, 6 aa, Artificial Sequence
  Synthetic polypeptide representing artificial human antibody CDR-L1 region
QSVSSN

SEQ ID NO: 12086 - protein, 9 aa, Artificial Sequence
  Synthetic polypeptide representing artificial human antibody CDR-L1 region
SGSVSDNYW

SEQ ID NO: 12087 - protein, 8 aa, Artificial Sequence
  Synthetic polypeptide representing artificial human antibody CDR-L1 region
SSNIGSNY

SEQ ID NO: 12088 - protein, 6 aa, Artificial Sequence
  Synthetic polypeptide representing artificial human antibody CDR-L1 region
QTVGNS

SEQ ID NO: 12089 - protein, 6 aa, Artificial Sequence
  Synthetic polypeptide representing artificial human antibody CDR-L1 region
QGISSY

SEQ ID NO: 12090 - protein, 6 aa, Artificial Sequence
  Synthetic polypeptide representing artificial human antibody CDR-L1 region
KFGIYT

SEQ ID NO: 12091 - protein, 6 aa, Artificial Sequence
  Synthetic polypeptide representing artificial human antibody CDR-L1 region
QSVGSQ

SEQ ID NO: 12092 - protein, 6 aa, Artificial Sequence
  Synthetic polypeptide representing artificial human antibody CDR-L1 region
QSVSTH

SEQ ID NO: 12093 - protein, 6 aa, Artificial Sequence
  Synthetic polypeptide representing artificial human antibody CDR-L1 region
QSVSNY

SEQ ID NO: 12094 - protein, 6 aa, Artificial Sequence
  Synthetic polypeptide representing artificial human antibody CDR-L1 region
QSISSY

SEQ ID NO: 12095 - protein, 6 aa, Artificial Sequence
  Synthetic polypeptide representing artificial human antibody CDR-L1 region
QSIDSW

SEQ ID NO: 12096 - protein, 8 aa, Artificial Sequence
  Synthetic polypeptide representing artificial human antibody CDR-L1 region
SNNVGYQG

SEQ ID NO: 12097 - protein, 6 aa, Artificial Sequence
  Synthetic polypeptide representing artificial human antibody CDR-L1 region
QGISNY

SEQ ID NO: 12098 - protein, 9 aa, Artificial Sequence
  Synthetic polypeptide representing artificial human antibody CDR-L1 region
SSDVGDYNY

SEQ ID NO: 12099 - protein, 6 aa, Artificial Sequence
  Synthetic polypeptide representing artificial human antibody CDR-L1 region
QGIAKS

SEQ ID NO: 12100 - protein, 8 aa, Artificial Sequence
  Synthetic polypeptide representing artificial human antibody CDR-L1 region
SSNIGNNY

SEQ ID NO: 12101 - protein, 6 aa, Artificial Sequence
  Synthetic polypeptide representing artificial human antibody CDR-L1 region
QSVGSA

SEQ ID NO: 12102 - protein, 9 aa, Artificial Sequence
  Synthetic polypeptide representing artificial human antibody CDR-L1 region
SSDVGNYNR

SEQ ID NO: 12103 - protein, 6 aa, Artificial Sequence
  Synthetic polypeptide representing artificial human antibody CDR-L1 region
SLRTFY

SEQ ID NO: 12104 - protein, 6 aa, Artificial Sequence
  Synthetic polypeptide representing artificial human antibody CDR-L1 region
QSVGNY

SEQ ID NO: 12105 - protein, 9 aa, Artificial Sequence
  Synthetic polypeptide representing artificial human antibody CDR-L1 region
SSDVGGYNF

SEQ ID NO: 12106 - protein, 6 aa, Artificial Sequence
  Synthetic polypeptide representing artificial human antibody CDR-L1 region
QSVDTN

SEQ ID NO: 12107 - protein, 9 aa, Artificial Sequence
  Synthetic polypeptide representing artificial human antibody CDR-L1 region
SSDVGGSTF

SEQ ID NO: 12108 - protein, 6 aa, Artificial Sequence
  Synthetic polypeptide representing artificial human antibody CDR-L1 region
ILRSYY

SEQ ID NO: 12109 - protein, 6 aa, Artificial Sequence
  Synthetic polypeptide representing artificial human antibody CDR-L1 region
ALPNLS

SEQ ID NO: 12110 - protein, 7 aa, Artificial Sequence
  Synthetic polypeptide representing artificial human antibody CDR-L1 region
QSVNSNY

SEQ ID NO: 12111 - protein, 12 aa, Artificial Sequence
  Synthetic polypeptide representing artificial human antibody CDR-L1 region
RSVLSRSNNQNY

SEQ ID NO: 12112 - protein, 6 aa, Artificial Sequence
  Synthetic polypeptide representing artificial human antibody CDR-L1 region
QSISSY

SEQ ID NO: 12113 - protein, 9 aa, Artificial Sequence
  Synthetic polypeptide representing artificial human antibody CDR-L1 region
SSDVGGYNY

SEQ ID NO: 12114 - protein, 6 aa, Artificial Sequence
  Synthetic polypeptide representing artificial human antibody CDR-L1 region
QGFGNR

SEQ ID NO: 12115 - protein, 11 aa, Artificial Sequence
  Synthetic polypeptide representing artificial human antibody CDR-L1 region
QSLLHSNGHNY

SEQ ID NO: 12116 - protein, 9 aa, Artificial Sequence
  Synthetic polypeptide representing artificial human antibody CDR-L1 region
TANLGIGYG

SEQ ID NO: 12117 - protein, 11 aa, Artificial Sequence
  Synthetic polypeptide representing artificial human antibody CDR-L1 region
QSLLYSNGYNY

SEQ ID NO: 12118 - protein, 6 aa, Artificial Sequence
  Synthetic polypeptide representing artificial human antibody CDR-L1 region
QSVSSK

SEQ ID NO: 12119 - protein, 9 aa, Artificial Sequence
  Synthetic polypeptide representing artificial human antibody CDR-L1 region
SSDVGGYNY

SEQ ID NO: 12120 - protein, 8 aa, Artificial Sequence
  Synthetic polypeptide representing artificial human antibody CDR-L1 region
SSNIGSNT

SEQ ID NO: 12121 - protein, 8 aa, Artificial Sequence
  Synthetic polypeptide representing artificial human antibody CDR-L1 region
SGSIGNNF

SEQ ID NO: 12122 - protein, 6 aa, Artificial Sequence
  Synthetic polypeptide representing artificial human antibody CDR-L1 region
QSVNTN

SEQ ID NO: 12123 - protein, 9 aa, Artificial Sequence
  Synthetic polypeptide representing artificial human antibody CDR-L1 region
SSDVGAYDY

SEQ ID NO: 12124 - protein, 9 aa, Artificial Sequence
  Synthetic polypeptide representing artificial human antibody CDR-L1 region
SSDIGGYDR

SEQ ID NO: 12125 - protein, 6 aa, Artificial Sequence
  Synthetic polypeptide representing artificial human antibody CDR-L1 region
RDISND

SEQ ID NO: 12126 - protein, 6 aa, Artificial Sequence
  Synthetic polypeptide representing artificial human antibody CDR-L1 region
QGITNF

SEQ ID NO: 12127 - protein, 6 aa, Artificial Sequence
  Synthetic polypeptide representing artificial human antibody CDR-L1 region
QSISSW

SEQ ID NO: 12128 - protein, 9 aa, Artificial Sequence
  Synthetic polypeptide representing artificial human antibody CDR-L1 region
SSDVGAYNL

SEQ ID NO: 12129 - protein, 6 aa, Artificial Sequence
  Synthetic polypeptide representing artificial human antibody CDR-L1 region
QNINYF

SEQ ID NO: 12130 - protein, 9 aa, Artificial Sequence
  Synthetic polypeptide representing artificial human antibody CDR-L1 region
TGAVTSGYY

SEQ ID NO: 12131 - protein, 6 aa, Artificial Sequence
  Synthetic polypeptide representing artificial human antibody CDR-L1 region
QGISSY

SEQ ID NO: 12132 - protein, 6 aa, Artificial Sequence
  Synthetic polypeptide representing artificial human antibody CDR-L1 region
NLRSYY

SEQ ID NO: 12133 - protein, 7 aa, Artificial Sequence
  Synthetic polypeptide representing artificial human antibody CDR-L1 region
QSVSSSY

SEQ ID NO: 12134 - protein, 6 aa, Artificial Sequence
  Synthetic polypeptide representing artificial human antibody CDR-L1 region
QSINTN

SEQ ID NO: 12135 - protein, 6 aa, Artificial Sequence
  Synthetic polypeptide representing artificial human antibody CDR-L1 region
QRISTY

SEQ ID NO: 12136 - protein, 8 aa, Artificial Sequence
  Synthetic polypeptide representing artificial human antibody CDR-L1 region
SSNIGSDA

SEQ ID NO: 12137 - protein, 6 aa, Artificial Sequence
  Synthetic polypeptide representing artificial human antibody CDR-L1 region
NIGGKG

SEQ ID NO: 12138 - protein, 6 aa, Artificial Sequence
  Synthetic polypeptide representing artificial human antibody CDR-L1 region
QVISGY

SEQ ID NO: 12139 - protein, 8 aa, Artificial Sequence
  Synthetic polypeptide representing artificial human antibody CDR-L1 region
TSNIGPNN

SEQ ID NO: 12140 - protein, 8 aa, Artificial Sequence
  Synthetic polypeptide representing artificial human antibody CDR-L1 region
SNNVGNEG

SEQ ID NO: 12141 - protein, 9 aa, Artificial Sequence
  Synthetic polypeptide representing artificial human antibody CDR-L1 region
SNDIGGYNL

SEQ ID NO: 12142 - protein, 12 aa, Artificial Sequence
  Synthetic polypeptide representing artificial human antibody CDR-L1 region
HSLLHSSNSKNY

SEQ ID NO: 12143 - protein, 11 aa, Artificial Sequence
  Synthetic polypeptide representing artificial human antibody CDR-L1 region
QSLLHHNGNTY

SEQ ID NO: 12144 - protein, 8 aa, Artificial Sequence
  Synthetic polypeptide representing artificial human antibody CDR-L1 region
SGSIGSNH

SEQ ID NO: 12145 - protein, 8 aa, Artificial Sequence
  Synthetic polypeptide representing artificial human antibody CDR-L1 region
SGSIANNF

SEQ ID NO: 12146 - protein, 6 aa, Artificial Sequence
  Synthetic polypeptide representing artificial human antibody CDR-L1 region
QSVSRA

SEQ ID NO: 12147 - protein, 7 aa, Artificial Sequence
  Synthetic polypeptide representing artificial human antibody CDR-L1 region
QSVSSSY

SEQ ID NO: 12148 - protein, 9 aa, Artificial Sequence
  Synthetic polypeptide representing artificial human antibody CDR-L1 region
GSNIGANFD

SEQ ID NO: 12149 - protein, 9 aa, Artificial Sequence
  Synthetic polypeptide representing artificial human antibody CDR-L1 region
SSDIGGYDS

SEQ ID NO: 12150 - protein, 8 aa, Artificial Sequence
  Synthetic polypeptide representing artificial human antibody CDR-L1 region
SSNIGSNY

SEQ ID NO: 12151 - protein, 11 aa, Artificial Sequence
  Synthetic polypeptide representing artificial human antibody CDR-L1 region
QSLVHSDGNTY

SEQ ID NO: 12152 - protein, 6 aa, Artificial Sequence
  Synthetic polypeptide representing artificial human antibody CDR-L1 region
RDIHNW

SEQ ID NO: 12153 - protein, 8 aa, Artificial Sequence
  Synthetic polypeptide representing artificial human antibody CDR-L1 region
ASNVAINY

SEQ ID NO: 12154 - protein, 6 aa, Artificial Sequence
  Synthetic polypeptide representing artificial human antibody CDR-L1 region
QSVSSN

SEQ ID NO: 12155 - protein, 8 aa, Artificial Sequence
  Synthetic polypeptide representing artificial human antibody CDR-L1 region
SSNIGRYA

SEQ ID NO: 12156 - protein, 7 aa, Artificial Sequence
  Synthetic polypeptide representing artificial human antibody CDR-L1 region
QSVRKNY

SEQ ID NO: 12157 - protein, 6 aa, Artificial Sequence
  Synthetic polypeptide representing artificial human antibody CDR-L1 region
QSISIW

SEQ ID NO: 12158 - protein, 11 aa, Artificial Sequence
  Synthetic polypeptide representing artificial human antibody CDR-L1 region
QSLLNFNGYTH

SEQ ID NO: 12159 - protein, 8 aa, Artificial Sequence
  Synthetic polypeptide representing artificial human antibody CDR-L1 region
WSNIATNY

SEQ ID NO: 12160 - protein, 8 aa, Artificial Sequence
  Synthetic polypeptide representing artificial human antibody CDR-L1 region
SSNIGTYT

SEQ ID NO: 12161 - protein, 7 aa, Artificial Sequence
  Synthetic polypeptide representing artificial human antibody CDR-L1 region
SGHSSYA

SEQ ID NO: 12162 - protein, 6 aa, Artificial Sequence
  Synthetic polypeptide representing artificial human antibody CDR-L1 region
QTVHNK

SEQ ID NO: 12163 - protein, 8 aa, Artificial Sequence
  Synthetic polypeptide representing artificial human antibody CDR-L1 region
SSNFGSNT

SEQ ID NO: 12164 - protein, 7 aa, Artificial Sequence
  Synthetic polypeptide representing artificial human antibody CDR-L1 region
QSVSSTY

SEQ ID NO: 12165 - protein, 8 aa, Artificial Sequence
  Synthetic polypeptide representing artificial human antibody CDR-L1 region
SSNIENNF

SEQ ID NO: 12166 - protein, 8 aa, Artificial Sequence
  Synthetic polypeptide representing artificial human antibody CDR-L1 region
FSNIGKNF

SEQ ID NO: 12167 - protein, 8 aa, Artificial Sequence
  Synthetic polypeptide representing artificial human antibody CDR-L1 region
SSNIGRYA

SEQ ID NO: 12168 - protein, 8 aa, Artificial Sequence
  Synthetic polypeptide representing artificial human antibody CDR-L1 region
TTNIGGTY

SEQ ID NO: 12169 - protein, 11 aa, Artificial Sequence
  Synthetic polypeptide representing artificial human antibody CDR-L1 region
QSLLHSNGYNY

SEQ ID NO: 12170 - protein, 8 aa, Artificial Sequence
  Synthetic polypeptide representing artificial human antibody CDR-L1 region
SSNIGTYT

SEQ ID NO: 12171 - protein, 8 aa, Artificial Sequence
  Synthetic polypeptide representing artificial human antibody CDR-L1 region
SSNIGSYT

SEQ ID NO: 12172 - protein, 9 aa, Artificial Sequence
  Synthetic polypeptide representing artificial human antibody CDR-L1 region
SSNIGADYN

SEQ ID NO: 12173 - protein, 11 aa, Artificial Sequence
  Synthetic polypeptide representing artificial human antibody CDR-L1 region
QSLVHSNGNTY

SEQ ID NO: 12174 - protein, 6 aa, Artificial Sequence
  Synthetic polypeptide representing artificial human antibody CDR-L1 region
QDVRNN

SEQ ID NO: 12175 - protein, 6 aa, Artificial Sequence
  Synthetic polypeptide representing artificial human antibody CDR-L1 region
QGIDSA

SEQ ID NO: 12176 - protein, 6 aa, Artificial Sequence
  Synthetic polypeptide representing artificial human antibody CDR-L1 region
QSISIW

SEQ ID NO: 12177 - protein, 6 aa, Artificial Sequence
  Synthetic polypeptide representing artificial human antibody CDR-L1 region
ALPKKY

SEQ ID NO: 12178 - protein, 9 aa, Artificial Sequence
  Synthetic polypeptide representing artificial human antibody CDR-L1 region
NSDVGGYNS

SEQ ID NO: 12179 - protein, 8 aa, Artificial Sequence
  Synthetic polypeptide representing artificial human antibody CDR-L1 region
SSNIGNNY

SEQ ID NO: 12180 - protein, 6 aa, Artificial Sequence
  Synthetic polypeptide representing artificial human antibody CDR-L1 region
QGISNY

SEQ ID NO: 12181 - protein, 6 aa, Artificial Sequence
  Synthetic polypeptide representing artificial human antibody CDR-L1 region
QGISTY

SEQ ID NO: 12182 - protein, 8 aa, Artificial Sequence
  Synthetic polypeptide representing artificial human antibody CDR-L1 region
SSNIGTYT

SEQ ID NO: 12183 - protein, 8 aa, Artificial Sequence
  Synthetic polypeptide representing artificial human antibody CDR-L1 region
SSNIGRYG

SEQ ID NO: 12184 - protein, 11 aa, Artificial Sequence
  Synthetic polypeptide representing artificial human antibody CDR-L1 region
QSLRHSDGNTY

SEQ ID NO: 12185 - protein, 6 aa, Artificial Sequence
  Synthetic polypeptide representing artificial human antibody CDR-L1 region
QNIRSY

SEQ ID NO: 12186 - protein, 9 aa, Artificial Sequence
  Synthetic polypeptide representing artificial human antibody CDR-L1 region
TRDVGNYNL

SEQ ID NO: 12187 - protein, 9 aa, Artificial Sequence
  Synthetic polypeptide representing artificial human antibody CDR-L1 region
SSDVGGYNY

SEQ ID NO: 12188 - protein, 6 aa, Artificial Sequence
  Synthetic polypeptide representing artificial human antibody CDR-L1 region
QSINIW

SEQ ID NO: 12189 - protein, 12 aa, Artificial Sequence
  Synthetic polypeptide representing artificial human antibody CDR-L1 region
QSVLYSSNNKNQ

SEQ ID NO: 12190 - protein, 8 aa, Artificial Sequence
  Synthetic polypeptide representing artificial human antibody CDR-L1 region
SSNIGSNT

SEQ ID NO: 12191 - protein, 6 aa, Artificial Sequence
  Synthetic polypeptide representing artificial human antibody CDR-L1 region
QSISSY

SEQ ID NO: 12192 - protein, 6 aa, Artificial Sequence
  Synthetic polypeptide representing artificial human antibody CDR-L1 region
QGISNY

SEQ ID NO: 12193 - protein, 9 aa, Artificial Sequence
  Synthetic polypeptide representing artificial human antibody CDR-L1 region
SNDVGYYNY

SEQ ID NO: 12194 - protein, 9 aa, Artificial Sequence
  Synthetic polypeptide representing artificial human antibody CDR-L1 region
SSNIGAGYA

SEQ ID NO: 12195 - protein, 6 aa, Artificial Sequence
  Synthetic polypeptide representing artificial human antibody CDR-L1 region
QSISTY

SEQ ID NO: 12196 - protein, 12 aa, Artificial Sequence
  Synthetic polypeptide representing artificial human antibody CDR-L1 region
QTVLHNSNDKDC

SEQ ID NO: 12197 - protein, 9 aa, Artificial Sequence
  Synthetic polypeptide representing artificial human antibody CDR-L1 region
SSDIYTYDL

SEQ ID NO: 12198 - protein, 8 aa, Artificial Sequence
  Synthetic polypeptide representing artificial human antibody CDR-L1 region
SSNIGNNF

SEQ ID NO: 12199 - protein, 9 aa, Artificial Sequence
  Synthetic polypeptide representing artificial human antibody CDR-L1 region
SSDVGAYNY

SEQ ID NO: 12200 - protein, 9 aa, Artificial Sequence
  Synthetic polypeptide representing artificial human antibody CDR-L1 region
SDDVGGYNY

SEQ ID NO: 12201 - protein, 8 aa, Artificial Sequence
  Synthetic polypeptide representing artificial human antibody CDR-L1 region
TSNIGTNT

SEQ ID NO: 12202 - protein, 6 aa, Artificial Sequence
  Synthetic polypeptide representing artificial human antibody CDR-L1 region
QTVSTF

SEQ ID NO: 12203 - protein, 8 aa, Artificial Sequence
  Synthetic polypeptide representing artificial human antibody CDR-L1 region
SSNIGRNN

SEQ ID NO: 12204 - protein, 9 aa, Artificial Sequence
  Synthetic polypeptide representing artificial human antibody CDR-L1 region
SNDVGGYDR

SEQ ID NO: 12205 - protein, 7 aa, Artificial Sequence
  Synthetic polypeptide representing artificial human antibody CDR-L1 region
QSVANSF

SEQ ID NO: 12206 - protein, 9 aa, Artificial Sequence
  Synthetic polypeptide representing artificial human antibody CDR-L1 region
SSDVGGYNY

SEQ ID NO: 12207 - protein, 11 aa, Artificial Sequence
  Synthetic polypeptide representing artificial human antibody CDR-L1 region
QSLVDSDRNTY

SEQ ID NO: 12208 - protein, 6 aa, Artificial Sequence
  Synthetic polypeptide representing artificial human antibody CDR-L1 region
QSISSW

SEQ ID NO: 12209 - protein, 9 aa, Artificial Sequence
  Synthetic polypeptide representing artificial human antibody CDR-L1 region
SSDVGGYNY

SEQ ID NO: 12210 - protein, 8 aa, Artificial Sequence
  Synthetic polypeptide representing artificial human antibody CDR-L1 region
TSNIGSNT

SEQ ID NO: 12211 - protein, 11 aa, Artificial Sequence
  Synthetic polypeptide representing artificial human antibody CDR-L1 region
QSLVHSDGNTY

SEQ ID NO: 12212 - protein, 9 aa, Artificial Sequence
  Synthetic polypeptide representing artificial human antibody CDR-L1 region
SGDVGGYKF

SEQ ID NO: 12213 - protein, 6 aa, Artificial Sequence
  Synthetic polypeptide representing artificial human antibody CDR-L1 region
QNIKNY

SEQ ID NO: 12214 - protein, 9 aa, Artificial Sequence
  Synthetic polypeptide representing artificial human antibody CDR-L1 region
SNDIGSHDR

SEQ ID NO: 12215 - protein, 7 aa, Artificial Sequence
  Synthetic polypeptide representing artificial human antibody CDR-L1 region
QSISSSY

SEQ ID NO: 12216 - protein, 7 aa, Artificial Sequence
  Synthetic polypeptide representing artificial human antibody CDR-L1 region
QSVTSSH

SEQ ID NO: 12217 - protein, 7 aa, Artificial Sequence
  Synthetic polypeptide representing artificial human antibody CDR-L1 region
QSLSGAY

SEQ ID NO: 12218 - protein, 9 aa, Artificial Sequence
  Synthetic polypeptide representing artificial human antibody CDR-L1 region
NSDVGAYNY

SEQ ID NO: 12219 - protein, 9 aa, Artificial Sequence
  Synthetic polypeptide representing artificial human antibody CDR-L1 region
SSDVGGYNY

SEQ ID NO: 12220 - protein, 6 aa, Artificial Sequence
  Synthetic polypeptide representing artificial human antibody CDR-L1 region
QSIGDW

SEQ ID NO: 12221 - protein, 6 aa, Artificial Sequence
  Synthetic polypeptide representing artificial human antibody CDR-L1 region
KLGDRY

SEQ ID NO: 12222 - protein, 6 aa, Artificial Sequence
  Synthetic polypeptide representing artificial human antibody CDR-L1 region
QGISSY

SEQ ID NO: 12223 - protein, 6 aa, Artificial Sequence
  Synthetic polypeptide representing artificial human antibody CDR-L1 region
QGISNY

SEQ ID NO: 12224 - protein, 9 aa, Artificial Sequence
  Synthetic polypeptide representing artificial human antibody CDR-L1 region
NSDIGTYDR

SEQ ID NO: 12225 - protein, 8 aa, Artificial Sequence
  Synthetic polypeptide representing artificial human antibody CDR-L1 region
SSNIGSHT

SEQ ID NO: 12226 - protein, 6 aa, Artificial Sequence
  Synthetic polypeptide representing artificial human antibody CDR-L1 region
QSISTS

SEQ ID NO: 12227 - protein, 11 aa, Artificial Sequence
  Synthetic polypeptide representing artificial human antibody CDR-L1 region
QSLVHSDGNTY

SEQ ID NO: 12228 - protein, 9 aa, Artificial Sequence
  Synthetic polypeptide representing artificial human antibody CDR-L1 region
SSNIGAGYP

SEQ ID NO: 12229 - protein, 12 aa, Artificial Sequence
  Synthetic polypeptide representing artificial human antibody CDR-L1 region
QSVLYSSNNKNY

SEQ ID NO: 12230 - protein, 8 aa, Artificial Sequence
  Synthetic polypeptide representing artificial human antibody CDR-L1 region
SFNIGRNN

SEQ ID NO: 12231 - protein, 6 aa, Artificial Sequence
  Synthetic polypeptide representing artificial human antibody CDR-L1 region
QSVSTY

SEQ ID NO: 12232 - protein, 12 aa, Artificial Sequence
  Synthetic polypeptide representing artificial human antibody CDR-L1 region
QSILHSGTNKNR

SEQ ID NO: 12233 - protein, 9 aa, Artificial Sequence
  Synthetic polypeptide representing artificial human antibody CDR-L1 region
SSDVGSYDL

SEQ ID NO: 12234 - protein, 6 aa, Artificial Sequence
  Synthetic polypeptide representing artificial human antibody CDR-L1 region
QSVSSY

SEQ ID NO: 12235 - protein, 6 aa, Artificial Sequence
  Synthetic polypeptide representing artificial human antibody CDR-L1 region
ALPKKY

SEQ ID NO: 12236 - protein, 7 aa, Artificial Sequence
  Synthetic polypeptide representing artificial human antibody CDR-L1 region
TEHSGNA

SEQ ID NO: 12237 - protein, 9 aa, Artificial Sequence
  Synthetic polypeptide representing artificial human antibody CDR-L1 region
SSDVGSYNR

SEQ ID NO: 12238 - protein, 9 aa, Artificial Sequence
  Synthetic polypeptide representing artificial human antibody CDR-L1 region
SRDIGTYNR

SEQ ID NO: 12239 - protein, 12 aa, Artificial Sequence
  Synthetic polypeptide representing artificial human antibody CDR-L1 region
QSILHSPTNKNR

SEQ ID NO: 12240 - protein, 6 aa, Artificial Sequence
  Synthetic polypeptide representing artificial human antibody CDR-L1 region
QSVGNS

SEQ ID NO: 12241 - protein, 9 aa, Artificial Sequence
  Synthetic polypeptide representing artificial human antibody CDR-L1 region
SSDVGGYNY

SEQ ID NO: 12242 - protein, 6 aa, Artificial Sequence
  Synthetic polypeptide representing artificial human antibody CDR-L1 region
QGIANF

SEQ ID NO: 12243 - protein, 6 aa, Artificial Sequence
  Synthetic polypeptide representing artificial human antibody CDR-L1 region
NLVDRF

SEQ ID NO: 12244 - protein, 9 aa, Artificial Sequence
  Synthetic polypeptide representing artificial human antibody CDR-L1 region
TGVVTSGHY

SEQ ID NO: 12245 - protein, 6 aa, Artificial Sequence
  Synthetic polypeptide representing artificial human antibody CDR-L1 region
QSVGSK

SEQ ID NO: 12246 - protein, 8 aa, Artificial Sequence
  Synthetic polypeptide representing artificial human antibody CDR-L1 region
SSNIGSNT

SEQ ID NO: 12247 - protein, 9 aa, Artificial Sequence
  Synthetic polypeptide representing artificial human antibody CDR-L1 region
SSDVGIYNR

SEQ ID NO: 12248 - protein, 12 aa, Artificial Sequence
  Synthetic polypeptide representing artificial human antibody CDR-L1 region
RSVLYNSNNKNY

SEQ ID NO: 12249 - protein, 7 aa, Artificial Sequence
  Synthetic polypeptide representing artificial human antibody CDR-L1 region
QSLSGGQ

SEQ ID NO: 12250 - protein, 9 aa, Artificial Sequence
  Synthetic polypeptide representing artificial human antibody CDR-L1 region
SSDVGAYNY

SEQ ID NO: 12251 - protein, 6 aa, Artificial Sequence
  Synthetic polypeptide representing artificial human antibody CDR-L1 region
RDIRTW

SEQ ID NO: 12252 - protein, 6 aa, Artificial Sequence
  Synthetic polypeptide representing artificial human antibody CDR-L1 region
QSVSSW

SEQ ID NO: 12253 - protein, 6 aa, Artificial Sequence
  Synthetic polypeptide representing artificial human antibody CDR-L1 region
QGINIW

SEQ ID NO: 12254 - protein, 9 aa, Artificial Sequence
  Synthetic polypeptide representing artificial human antibody CDR-L1 region
SNDVGGYDR

SEQ ID NO: 12255 - protein, 9 aa, Artificial Sequence
  Synthetic polypeptide representing artificial human antibody CDR-L1 region
SSNIGPGYG

SEQ ID NO: 12256 - protein, 6 aa, Artificial Sequence
  Synthetic polypeptide representing artificial human antibody CDR-L1 region
QGISSW

SEQ ID NO: 12257 - protein, 12 aa, Artificial Sequence
  Synthetic polypeptide representing artificial human antibody CDR-L1 region
QSVFQSTTNKNY

SEQ ID NO: 12258 - protein, 6 aa, Artificial Sequence
  Synthetic polypeptide representing artificial human antibody CDR-L1 region
QTFGNY

SEQ ID NO: 12259 - protein, 6 aa, Artificial Sequence
  Synthetic polypeptide representing artificial human antibody CDR-L1 region
QSVTTN

SEQ ID NO: 12260 - protein, 7 aa, Artificial Sequence
  Synthetic polypeptide representing artificial human antibody CDR-L1 region
QSVSSIY

SEQ ID NO: 12261 - protein, 6 aa, Artificial Sequence
  Synthetic polypeptide representing artificial human antibody CDR-L1 region
QSISSW

SEQ ID NO: 12262 - protein, 9 aa, Artificial Sequence
  Synthetic polypeptide representing artificial human antibody CDR-L1 region
TSNIGAGYD

SEQ ID NO: 12263 - protein, 6 aa, Artificial Sequence
  Synthetic polypeptide representing artificial human antibody CDR-L1 region
KLGDKY

SEQ ID NO: 12264 - protein, 6 aa, Artificial Sequence
  Synthetic polypeptide representing artificial human antibody CDR-L1 region
QTVGAS

SEQ ID NO: 12265 - protein, 6 aa, Artificial Sequence
  Synthetic polypeptide representing artificial human antibody CDR-L1 region
RGINIW

SEQ ID NO: 12266 - protein, 8 aa, Artificial Sequence
  Synthetic polypeptide representing artificial human antibody CDR-L1 region
TSNIGSNT

SEQ ID NO: 12267 - protein, 7 aa, Artificial Sequence
  Synthetic polypeptide representing artificial human antibody CDR-L1 region
QSVSNRY

SEQ ID NO: 12268 - protein, 6 aa, Artificial Sequence
  Synthetic polypeptide representing artificial human antibody CDR-L1 region
QSISSY

SEQ ID NO: 12269 - protein, 6 aa, Artificial Sequence
  Synthetic polypeptide representing artificial human antibody CDR-L1 region
VLAKKY

SEQ ID NO: 12270 - protein, 9 aa, Artificial Sequence
  Synthetic polypeptide representing artificial human antibody CDR-L1 region
SNDIGSHDR

SEQ ID NO: 12271 - protein, 6 aa, Artificial Sequence
  Synthetic polypeptide representing artificial human antibody CDR-L1 region
QGVSSL

SEQ ID NO: 12272 - protein, 12 aa, Artificial Sequence
  Synthetic polypeptide representing artificial human antibody CDR-L1 region
QNVLSSSNNKNY

SEQ ID NO: 12273 - protein, 6 aa, Artificial Sequence
  Synthetic polypeptide representing artificial human antibody CDR-L1 region
QSVVTW

SEQ ID NO: 12274 - protein, 12 aa, Artificial Sequence
  Synthetic polypeptide representing artificial human antibody CDR-L1 region
QSVLHSPTDKNR

SEQ ID NO: 12275 - protein, 8 aa, Artificial Sequence
  Synthetic polypeptide representing artificial human antibody CDR-L1 region
SSNIGSNP

SEQ ID NO: 12276 - protein, 6 aa, Artificial Sequence
  Synthetic polypeptide representing artificial human antibody CDR-L1 region
QSISDW

SEQ ID NO: 12277 - protein, 12 aa, Artificial Sequence
  Synthetic polypeptide representing artificial human antibody CDR-L1 region
HSVFYSSHNKSF

SEQ ID NO: 12278 - protein, 8 aa, Artificial Sequence
  Synthetic polypeptide representing artificial human antibody CDR-L1 region
SSNIGSNY

SEQ ID NO: 12279 - protein, 6 aa, Artificial Sequence
  Synthetic polypeptide representing artificial human antibody CDR-L1 region
QSVSTY

SEQ ID NO: 12280 - protein, 6 aa, Artificial Sequence
  Synthetic polypeptide representing artificial human antibody CDR-L1 region
QGIRND

SEQ ID NO: 12281 - protein, 12 aa, Artificial Sequence
  Synthetic polypeptide representing artificial human antibody CDR-L1 region
QSVLSTADNKNY

SEQ ID NO: 12282 - protein, 11 aa, Artificial Sequence
  Synthetic polypeptide representing artificial human antibody CDR-L1 region
QSLVHSDGNTY

SEQ ID NO: 12283 - protein, 9 aa, Artificial Sequence
  Synthetic polypeptide representing artificial human antibody CDR-L1 region
SSDVGGYNL

SEQ ID NO: 12284 - protein, 11 aa, Artificial Sequence
  Synthetic polypeptide representing artificial human antibody CDR-L1 region
QSLVHSDRNTY

SEQ ID NO: 12285 - protein, 9 aa, Artificial Sequence
  Synthetic polypeptide representing artificial human antibody CDR-L1 region
SSDIGGYNY

SEQ ID NO: 12286 - protein, 7 aa, Artificial Sequence
  Synthetic polypeptide representing artificial human antibody CDR-L1 region
QTVSSSY

SEQ ID NO: 12287 - protein, 6 aa, Artificial Sequence
  Synthetic polypeptide representing artificial human antibody CDR-L1 region
QSVGSN

SEQ ID NO: 12288 - protein, 6 aa, Artificial Sequence
  Synthetic polypeptide representing artificial human antibody CDR-L1 region
QPMGNY

SEQ ID NO: 12289 - protein, 6 aa, Artificial Sequence
  Synthetic polypeptide representing artificial human antibody CDR-L1 region
SLKTFY

SEQ ID NO: 12290 - protein, 6 aa, Artificial Sequence
  Synthetic polypeptide representing artificial human antibody CDR-L1 region
ALPRKF

SEQ ID NO: 12291 - protein, 8 aa, Artificial Sequence
  Synthetic polypeptide representing artificial human antibody CDR-L1 region
SSNIGRNL

SEQ ID NO: 12292 - protein, 8 aa, Artificial Sequence
  Synthetic polypeptide representing artificial human antibody CDR-L1 region
TSNIGSNT

SEQ ID NO: 12293 - protein, 6 aa, Artificial Sequence
  Synthetic polypeptide representing artificial human antibody CDR-L1 region
QSVSNS

SEQ ID NO: 12294 - protein, 7 aa, Artificial Sequence
  Synthetic polypeptide representing artificial human antibody CDR-L1 region
RAVTGNY

SEQ ID NO: 12295 - protein, 9 aa, Artificial Sequence
  Synthetic polypeptide representing artificial human antibody CDR-L1 region
SSDVGGYNY

SEQ ID NO: 12296 - protein, 6 aa, Artificial Sequence
  Synthetic polypeptide representing artificial human antibody CDR-L1 region
QTIDRW

SEQ ID NO: 12297 - protein, 6 aa, Artificial Sequence
  Synthetic polypeptide representing artificial human antibody CDR-L1 region
QGIGTY

SEQ ID NO: 12298 - protein, 12 aa, Artificial Sequence
  Synthetic polypeptide representing artificial human antibody CDR-L1 region
QSVLWTSNDKNY

SEQ ID NO: 12299 - protein, 9 aa, Artificial Sequence
  Synthetic polypeptide representing artificial human antibody CDR-L1 region
STDIGLSNH

SEQ ID NO: 12300 - protein, 12 aa, Artificial Sequence
  Synthetic polypeptide representing artificial human antibody CDR-L1 region
QSVLYSSNNKNY

SEQ ID NO: 12301 - protein, 7 aa, Artificial Sequence
  Synthetic polypeptide representing artificial human antibody CDR-L1 region
QSVSSSY

SEQ ID NO: 12302 - protein, 7 aa, Artificial Sequence
  Synthetic polypeptide representing artificial human antibody CDR-L1 region
SGQSRYP

SEQ ID NO: 12303 - protein, 6 aa, Artificial Sequence
  Synthetic polypeptide representing artificial human antibody CDR-L1 region
NLGDKY

SEQ ID NO: 12304 - protein, 9 aa, Artificial Sequence
  Synthetic polypeptide representing artificial human antibody CDR-L1 region
SSDVGGYNY

SEQ ID NO: 12305 - protein, 9 aa, Artificial Sequence
  Synthetic polypeptide representing artificial human antibody CDR-L1 region
SSDVGGYNY

SEQ ID NO: 12306 - protein, 7 aa, Artificial Sequence
  Synthetic polypeptide representing artificial human antibody CDR-L1 region
QSVSGNY

SEQ ID NO: 12307 - protein, 8 aa, Artificial Sequence
  Synthetic polypeptide representing artificial human antibody CDR-L1 region
GSNIGSSF

SEQ ID NO: 12308 - protein, 8 aa, Artificial Sequence
  Synthetic polypeptide representing artificial human antibody CDR-L1 region
ISNVRSNP

SEQ ID NO: 12309 - protein, 6 aa, Artificial Sequence
  Synthetic polypeptide representing artificial human antibody CDR-L1 region
QGISSW

SEQ ID NO: 12310 - protein, 7 aa, Artificial Sequence
  Synthetic polypeptide representing artificial human antibody CDR-L1 region
QSVSSSY

SEQ ID NO: 12311 - protein, 6 aa, Artificial Sequence
  Synthetic polypeptide representing artificial human antibody CDR-L1 region
QSIRIY

SEQ ID NO: 12312 - protein, 6 aa, Artificial Sequence
  Synthetic polypeptide representing artificial human antibody CDR-L1 region
QGVNRN

SEQ ID NO: 12313 - protein, 6 aa, Artificial Sequence
  Synthetic polypeptide representing artificial human antibody CDR-L1 region
QGISNY

SEQ ID NO: 12314 - protein, 11 aa, Artificial Sequence
  Synthetic polypeptide representing artificial human antibody CDR-L1 region
QSLVHSDGNTY

SEQ ID NO: 12315 - protein, 9 aa, Artificial Sequence
  Synthetic polypeptide representing artificial human antibody CDR-L1 region
SSDVGGYNY

SEQ ID NO: 12316 - protein, 8 aa, Artificial Sequence
  Synthetic polypeptide representing artificial human antibody CDR-L1 region
STNIGHNF

SEQ ID NO: 12317 - protein, 11 aa, Artificial Sequence
  Synthetic polypeptide representing artificial human antibody CDR-L1 region
QSLLHSNGYNY

SEQ ID NO: 12318 - protein, 6 aa, Artificial Sequence
  Synthetic polypeptide representing artificial human antibody CDR-L1 region
KLGDKY

SEQ ID NO: 12319 - protein, 8 aa, Artificial Sequence
  Synthetic polypeptide representing artificial human antibody CDR-L1 region
NSNIGSNY

SEQ ID NO: 12320 - protein, 6 aa, Artificial Sequence
  Synthetic polypeptide representing artificial human antibody CDR-L1 region
QSVSSY

SEQ ID NO: 12321 - protein, 12 aa, Artificial Sequence
  Synthetic polypeptide representing artificial human antibody CDR-L1 region
QTILYSSINKNC

SEQ ID NO: 12322 - protein, 8 aa, Artificial Sequence
  Synthetic polypeptide representing artificial human antibody CDR-L1 region
SSNIGSNY

SEQ ID NO: 12323 - protein, 6 aa, Artificial Sequence
  Synthetic polypeptide representing artificial human antibody CDR-L1 region
QDISDY

SEQ ID NO: 12324 - protein, 9 aa, Artificial Sequence
  Synthetic polypeptide representing artificial human antibody CDR-L1 region
SSDVGSYNL

SEQ ID NO: 12325 - protein, 8 aa, Artificial Sequence
  Synthetic polypeptide representing artificial human antibody CDR-L1 region
SSNIGSNT

SEQ ID NO: 12326 - protein, 8 aa, Artificial Sequence
  Synthetic polypeptide representing artificial human antibody CDR-L1 region
SSNIGSNT

SEQ ID NO: 12327 - protein, 7 aa, Artificial Sequence
  Synthetic polypeptide representing artificial human antibody CDR-L1 region
QQIIRAY

SEQ ID NO: 12328 - protein, 8 aa, Artificial Sequence
  Synthetic polypeptide representing artificial human antibody CDR-L1 region
SSNIGNNY

SEQ ID NO: 12329 - protein, 9 aa, Artificial Sequence
  Synthetic polypeptide representing artificial human antibody CDR-L1 region
SGSVSTTYY

SEQ ID NO: 12330 - protein, 11 aa, Artificial Sequence
  Synthetic polypeptide representing artificial human antibody CDR-L1 region
QSLVHSDGNTH

SEQ ID NO: 12331 - protein, 11 aa, Artificial Sequence
  Synthetic polypeptide representing artificial human antibody CDR-L1 region
QSLLHSNGYNY

SEQ ID NO: 12332 - protein, 9 aa, Artificial Sequence
  Synthetic polypeptide representing artificial human antibody CDR-L1 region
SSDVGGYNY

SEQ ID NO: 12333 - protein, 8 aa, Artificial Sequence
  Synthetic polypeptide representing artificial human antibody CDR-L1 region
SSNIGSNT

SEQ ID NO: 12334 - protein, 11 aa, Artificial Sequence
  Synthetic polypeptide representing artificial human antibody CDR-L1 region
QSLVHSDGNTY

SEQ ID NO: 12335 - protein, 8 aa, Artificial Sequence
  Synthetic polypeptide representing artificial human antibody CDR-L1 region
SSNIGSNT

SEQ ID NO: 12336 - protein, 6 aa, Artificial Sequence
  Synthetic polypeptide representing artificial human antibody CDR-L1 region
QSVDDW

SEQ ID NO: 12337 - protein, 9 aa, Artificial Sequence
  Synthetic polypeptide representing artificial human antibody CDR-L1 region
NSDIGAYNY

SEQ ID NO: 12338 - protein, 9 aa, Artificial Sequence
  Synthetic polypeptide representing artificial human antibody CDR-L1 region
SSDVGGYNY

SEQ ID NO: 12339 - protein, 7 aa, Artificial Sequence
  Synthetic polypeptide representing artificial human antibody CDR-L1 region
SGHSSYA

SEQ ID NO: 12340 - protein, 9 aa, Artificial Sequence
  Synthetic polypeptide representing artificial human antibody CDR-L1 region
SSNIGAGYD

SEQ ID NO: 12341 - protein, 6 aa, Artificial Sequence
  Synthetic polypeptide representing artificial human antibody CDR-L1 region
SLRSYY

SEQ ID NO: 12342 - protein, 9 aa, Artificial Sequence
  Synthetic polypeptide representing artificial human antibody CDR-L1 region
GSDVETYHL

SEQ ID NO: 12343 - protein, 7 aa, Artificial Sequence
  Synthetic polypeptide representing artificial human antibody CDR-L1 region
QSVRNNF

SEQ ID NO: 12344 - protein, 7 aa, Artificial Sequence
  Synthetic polypeptide representing artificial human antibody CDR-L1 region
QTVSGGS

SEQ ID NO: 12345 - protein, 11 aa, Artificial Sequence
  Synthetic polypeptide representing artificial human antibody CDR-L1 region
QSLVHSDGSTH

SEQ ID NO: 12346 - protein, 9 aa, Artificial Sequence
  Synthetic polypeptide representing artificial human antibody CDR-L1 region
SSDVGGYNY

SEQ ID NO: 12347 - protein, 9 aa, Artificial Sequence
  Synthetic polypeptide representing artificial human antibody CDR-L1 region
SSDVGGYDY

SEQ ID NO: 12348 - protein, 6 aa, Artificial Sequence
  Synthetic polypeptide representing artificial human antibody CDR-L1 region
VLAKKY

SEQ ID NO: 12349 - protein, 12 aa, Artificial Sequence
  Synthetic polypeptide representing artificial human antibody CDR-L1 region
QPILYSPNNQNS

SEQ ID NO: 12350 - protein, 8 aa, Artificial Sequence
  Synthetic polypeptide representing artificial human antibody CDR-L1 region
SSNIGSKI

SEQ ID NO: 12351 - protein, 6 aa, Artificial Sequence
  Synthetic polypeptide representing artificial human antibody CDR-L1 region
QGIRNN

SEQ ID NO: 12352 - protein, 6 aa, Artificial Sequence
  Synthetic polypeptide representing artificial human antibody CDR-L1 region
QGINIY

SEQ ID NO: 12353 - protein, 8 aa, Artificial Sequence
  Synthetic polypeptide representing artificial human antibody CDR-L1 region
SSNIGSTY

SEQ ID NO: 12354 - protein, 8 aa, Artificial Sequence
  Synthetic polypeptide representing artificial human antibody CDR-L1 region
SSNIGSHY

SEQ ID NO: 12355 - protein, 7 aa, Artificial Sequence
  Synthetic polypeptide representing artificial human antibody CDR-L1 region
SGHSNYA

SEQ ID NO: 12356 - protein, 6 aa, Artificial Sequence
  Synthetic polypeptide representing artificial human antibody CDR-L1 region
RDINTY

SEQ ID NO: 12357 - protein, 8 aa, Artificial Sequence
  Synthetic polypeptide representing artificial human antibody CDR-L1 region
SSNIGSNT

SEQ ID NO: 12358 - protein, 6 aa, Artificial Sequence
  Synthetic polypeptide representing artificial human antibody CDR-L1 region
QGISSW

SEQ ID NO: 12359 - protein, 6 aa, Artificial Sequence
  Synthetic polypeptide representing artificial human antibody CDR-L1 region
QSISSW

SEQ ID NO: 12360 - protein, 6 aa, Artificial Sequence
  Synthetic polypeptide representing artificial human antibody CDR-L1 region
QSVSSY

SEQ ID NO: 12361 - protein, 7 aa, Artificial Sequence
  Synthetic polypeptide representing artificial human antibody CDR-L1 region
SGHSSYA

SEQ ID NO: 12362 - protein, 7 aa, Artificial Sequence
  Synthetic polypeptide representing artificial human antibody CDR-L1 region
SGHSSYA

SEQ ID NO: 12363 - protein, 11 aa, Artificial Sequence
  Synthetic polypeptide representing artificial human antibody CDR-L1 region
QSLLHSNGKTF

SEQ ID NO: 12364 - protein, 6 aa, Artificial Sequence
  Synthetic polypeptide representing artificial human antibody CDR-L1 region
QSISSY

SEQ ID NO: 12365 - protein, 6 aa, Artificial Sequence
  Synthetic polypeptide representing artificial human antibody CDR-L1 region
QSIVTF

SEQ ID NO: 12366 - protein, 8 aa, Artificial Sequence
  Synthetic polypeptide representing artificial human antibody CDR-L1 region
SSNVGRNY

SEQ ID NO: 12367 - protein, 7 aa, Artificial Sequence
  Synthetic polypeptide representing artificial human antibody CDR-L1 region
QSVSTSQ

SEQ ID NO: 12368 - protein, 11 aa, Artificial Sequence
  Synthetic polypeptide representing artificial human antibody CDR-L1 region
QSLVHSDGNTY

SEQ ID NO: 12369 - protein, 11 aa, Artificial Sequence
  Synthetic polypeptide representing artificial human antibody CDR-L1 region
QSLLHRNGHTY

SEQ ID NO: 12370 - protein, 7 aa, Artificial Sequence
  Synthetic polypeptide representing artificial human antibody CDR-L1 region
SGHSNYA

SEQ ID NO: 12371 - protein, 6 aa, Artificial Sequence
  Synthetic polypeptide representing artificial human antibody CDR-L1 region
QNVGNW

SEQ ID NO: 12372 - protein, 8 aa, Artificial Sequence
  Synthetic polypeptide representing artificial human antibody CDR-L1 region
RSNIRYNA

SEQ ID NO: 12373 - protein, 9 aa, Artificial Sequence
  Synthetic polypeptide representing artificial human antibody CDR-L1 region
SSNIGAGYD

SEQ ID NO: 12374 - protein, 6 aa, Artificial Sequence
  Synthetic polypeptide representing artificial human antibody CDR-L1 region
QTISTY

SEQ ID NO: 12375 - protein, 9 aa, Artificial Sequence
  Synthetic polypeptide representing artificial human antibody CDR-L1 region
SSDVGGYNY

SEQ ID NO: 12376 - protein, 6 aa, Artificial Sequence
  Synthetic polypeptide representing artificial human antibody CDR-L1 region
QTISTN

SEQ ID NO: 12377 - protein, 6 aa, Artificial Sequence
  Synthetic polypeptide representing artificial human antibody CDR-L1 region
KSISNS

SEQ ID NO: 12378 - protein, 7 aa, Artificial Sequence
  Synthetic polypeptide representing artificial human antibody CDR-L1 region
QSVSSSY

SEQ ID NO: 12379 - protein, 6 aa, Artificial Sequence
  Synthetic polypeptide representing artificial human antibody CDR-L1 region
ERISGW

SEQ ID NO: 12380 - protein, 9 aa, Artificial Sequence
  Synthetic polypeptide representing artificial human antibody CDR-L1 region
SSDVGGYNY

SEQ ID NO: 12381 - protein, 9 aa, Artificial Sequence
  Synthetic polypeptide representing artificial human antibody CDR-L1 region
TSNLGAGHG

SEQ ID NO: 12382 - protein, 9 aa, Artificial Sequence
  Synthetic polypeptide representing artificial human antibody CDR-L1 region
SSNIGAGYV

SEQ ID NO: 12383 - protein, 9 aa, Artificial Sequence
  Synthetic polypeptide representing artificial human antibody CDR-L1 region
TSDVNFYKY

SEQ ID NO: 12384 - protein, 8 aa, Artificial Sequence
  Synthetic polypeptide representing artificial human antibody CDR-L1 region
SGSIADNY

SEQ ID NO: 12385 - protein, 6 aa, Artificial Sequence
  Synthetic polypeptide representing artificial human antibody CDR-L1 region
QSVARN

SEQ ID NO: 12386 - protein, 9 aa, Artificial Sequence
  Synthetic polypeptide representing artificial human antibody CDR-L1 region
SSDVGSYNL

SEQ ID NO: 12387 - protein, 6 aa, Artificial Sequence
  Synthetic polypeptide representing artificial human antibody CDR-L1 region
QSVSSN

SEQ ID NO: 12388 - protein, 6 aa, Artificial Sequence
  Synthetic polypeptide representing artificial human antibody CDR-L1 region
QYIAGS

SEQ ID NO: 12389 - protein, 6 aa, Artificial Sequence
  Synthetic polypeptide representing artificial human antibody CDR-L1 region
QSVISN

SEQ ID NO: 12390 - protein, 6 aa, Artificial Sequence
  Synthetic polypeptide representing artificial human antibody CDR-L1 region
QSFTSW

SEQ ID NO: 12391 - protein, 7 aa, Artificial Sequence
  Synthetic polypeptide representing artificial human antibody CDR-L1 region
QSVSSSY

SEQ ID NO: 12392 - protein, 7 aa, Artificial Sequence
  Synthetic polypeptide representing artificial human antibody CDR-L1 region
QSVSSSY

SEQ ID NO: 12393 - protein, 12 aa, Artificial Sequence
  Synthetic polypeptide representing artificial human antibody CDR-L1 region
QSILYSSNDKNY

SEQ ID NO: 12394 - protein, 6 aa, Artificial Sequence
  Synthetic polypeptide representing artificial human antibody CDR-L1 region
SLRSYY

SEQ ID NO: 12395 - protein, 8 aa, Artificial Sequence
  Synthetic polypeptide representing artificial human antibody CDR-L1 region
SSNIGDNF

SEQ ID NO: 12396 - protein, 11 aa, Artificial Sequence
  Synthetic polypeptide representing artificial human antibody CDR-L1 region
QSLVFSNGNTY

SEQ ID NO: 12397 - protein, 12 aa, Artificial Sequence
  Synthetic polypeptide representing artificial human antibody CDR-L1 region
QSLLSSYSNKNY

SEQ ID NO: 12398 - protein, 9 aa, Artificial Sequence
  Synthetic polypeptide representing artificial human antibody CDR-L1 region
SSDVGGYNY

SEQ ID NO: 12399 - protein, 6 aa, Artificial Sequence
  Synthetic polypeptide representing artificial human antibody CDR-L1 region
QNINID

SEQ ID NO: 12400 - protein, 6 aa, Artificial Sequence
  Synthetic polypeptide representing artificial human antibody CDR-L1 region
QSISTL

SEQ ID NO: 12401 - protein, 6 aa, Artificial Sequence
  Synthetic polypeptide representing artificial human antibody CDR-L1 region
QGISNY

SEQ ID NO: 12402 - protein, 6 aa, Artificial Sequence
  Synthetic polypeptide representing artificial human antibody CDR-L1 region
ESVGRY

SEQ ID NO: 12403 - protein, 9 aa, Artificial Sequence
  Synthetic polypeptide representing artificial human antibody CDR-L1 region
SSDVGGYKY

SEQ ID NO: 12404 - protein, 9 aa, Artificial Sequence
  Synthetic polypeptide representing artificial human antibody CDR-L1 region
SSDVGRYDR

SEQ ID NO: 12405 - protein, 6 aa, Artificial Sequence
  Synthetic polypeptide representing artificial human antibody CDR-L1 region
QDTDNR

SEQ ID NO: 12406 - protein, 9 aa, Artificial Sequence
  Synthetic polypeptide representing artificial human antibody CDR-L1 region
SSDFGGYNL

SEQ ID NO: 12407 - protein, 6 aa, Artificial Sequence
  Synthetic polypeptide representing artificial human antibody CDR-L1 region
QYIRND

SEQ ID NO: 12408 - protein, 9 aa, Artificial Sequence
  Synthetic polypeptide representing artificial human antibody CDR-L1 region
SSAVGGYKY

SEQ ID NO: 12409 - protein, 9 aa, Artificial Sequence
  Synthetic polypeptide representing artificial human antibody CDR-L1 region
SSNIGAGYD

SEQ ID NO: 12410 - protein, 8 aa, Artificial Sequence
  Synthetic polypeptide representing artificial human antibody CDR-L1 region
SGSIASNF

SEQ ID NO: 12411 - protein, 6 aa, Artificial Sequence
  Synthetic polypeptide representing artificial human antibody CDR-L1 region
QGIRNY

SEQ ID NO: 12412 - protein, 6 aa, Artificial Sequence
  Synthetic polypeptide representing artificial human antibody CDR-L1 region
QSVSNS

SEQ ID NO: 12413 - protein, 9 aa, Artificial Sequence
  Synthetic polypeptide representing artificial human antibody CDR-L1 region
SSDIGAGYD

SEQ ID NO: 12414 - protein, 6 aa, Artificial Sequence
  Synthetic polypeptide representing artificial human antibody CDR-L1 region
QSISNW

SEQ ID NO: 12415 - protein, 6 aa, Artificial Sequence
  Synthetic polypeptide representing artificial human antibody CDR-L1 region
QGISSW

SEQ ID NO: 12416 - protein, 7 aa, Artificial Sequence
  Synthetic polypeptide representing artificial human antibody CDR-L1 region
HSIRYTY

SEQ ID NO: 12417 - protein, 6 aa, Artificial Sequence
  Synthetic polypeptide representing artificial human antibody CDR-L1 region
QDISRW

SEQ ID NO: 12418 - protein, 6 aa, Artificial Sequence
  Synthetic polypeptide representing artificial human antibody CDR-L1 region
HSVGVY

SEQ ID NO: 12419 - protein, 6 aa, Artificial Sequence
  Synthetic polypeptide representing artificial human antibody CDR-L1 region
QSVGIN

SEQ ID NO: 12420 - protein, 7 aa, Artificial Sequence
  Synthetic polypeptide representing artificial human antibody CDR-L1 region
QSVSSSQ

SEQ ID NO: 12421 - protein, 9 aa, Artificial Sequence
  Synthetic polypeptide representing artificial human antibody CDR-L1 region
SSNIGAGYD

SEQ ID NO: 12422 - protein, 7 aa, Artificial Sequence
  Synthetic polypeptide representing artificial human antibody CDR-L1 region
YDHRAFI

SEQ ID NO: 12423 - protein, 6 aa, Artificial Sequence
  Synthetic polypeptide representing artificial human antibody CDR-L1 region
KLGDKY

SEQ ID NO: 12424 - protein, 9 aa, Artificial Sequence
  Synthetic polypeptide representing artificial human antibody CDR-L1 region
SGSVSSSHY

SEQ ID NO: 12425 - protein, 6 aa, Artificial Sequence
  Synthetic polypeptide representing artificial human antibody CDR-L1 region
KLGDKH

SEQ ID NO: 12426 - protein, 6 aa, Artificial Sequence
  Synthetic polypeptide representing artificial human antibody CDR-L1 region
QGISSY

SEQ ID NO: 12427 - protein, 7 aa, Artificial Sequence
  Synthetic polypeptide representing artificial human antibody CDR-L1 region
SGHSRYA

SEQ ID NO: 12428 - protein, 7 aa, Artificial Sequence
  Synthetic polypeptide representing artificial human antibody CDR-L1 region
SGHSRYA

SEQ ID NO: 12429 - protein, 6 aa, Artificial Sequence
  Synthetic polypeptide representing artificial human antibody CDR-L1 region
QSVSNW

SEQ ID NO: 12430 - protein, 6 aa, Artificial Sequence
  Synthetic polypeptide representing artificial human antibody CDR-L1 region
QSVDNY

SEQ ID NO: 12431 - protein, 6 aa, Artificial Sequence
  Synthetic polypeptide representing artificial human antibody CDR-L1 region
QGISTY

SEQ ID NO: 12432 - protein, 12 aa, Artificial Sequence
  Synthetic polypeptide representing artificial human antibody CDR-L1 region
QSILYSSNNKNY

SEQ ID NO: 12433 - protein, 6 aa, Artificial Sequence
  Synthetic polypeptide representing artificial human antibody CDR-L1 region
QSISSY

SEQ ID NO: 12434 - protein, 7 aa, Artificial Sequence
  Synthetic polypeptide representing artificial human antibody CDR-L1 region
NGHDFYA

SEQ ID NO: 12435 - protein, 6 aa, Artificial Sequence
  Synthetic polypeptide representing artificial human antibody CDR-L1 region
QDIRSD

SEQ ID NO: 12436 - protein, 7 aa, Artificial Sequence
  Synthetic polypeptide representing artificial human antibody CDR-L1 region
SGRTRYA

SEQ ID NO: 12437 - protein, 6 aa, Artificial Sequence
  Synthetic polypeptide representing artificial human antibody CDR-L1 region
QSVSSY

SEQ ID NO: 12438 - protein, 6 aa, Artificial Sequence
  Synthetic polypeptide representing artificial human antibody CDR-L1 region
QSVSSK

SEQ ID NO: 12439 - protein, 7 aa, Artificial Sequence
  Synthetic polypeptide representing artificial human antibody CDR-L1 region
SGHSGYD

SEQ ID NO: 12440 - protein, 6 aa, Artificial Sequence
  Synthetic polypeptide representing artificial human antibody CDR-L1 region
NIGNKD

SEQ ID NO: 12441 - protein, 8 aa, Artificial Sequence
  Synthetic polypeptide representing artificial human antibody CDR-L1 region
TSKIGRNH

SEQ ID NO: 12442 - protein, 12 aa, Artificial Sequence
  Synthetic polypeptide representing artificial human antibody CDR-L1 region
QSVLYSSNNKNY

SEQ ID NO: 12443 - protein, 6 aa, Artificial Sequence
  Synthetic polypeptide representing artificial human antibody CDR-L1 region
QSISST

SEQ ID NO: 12444 - protein, 11 aa, Artificial Sequence
  Synthetic polypeptide representing artificial human antibody CDR-L1 region
QSLVYRDGDTY

SEQ ID NO: 12445 - protein, 7 aa, Artificial Sequence
  Synthetic polypeptide representing artificial human antibody CDR-L1 region
QSVSSSY

SEQ ID NO: 12446 - protein, 7 aa, Artificial Sequence
  Synthetic polypeptide representing artificial human antibody CDR-L1 region
QSVSSNY

SEQ ID NO: 12447 - protein, 6 aa, Artificial Sequence
  Synthetic polypeptide representing artificial human antibody CDR-L1 region
QSISNN

SEQ ID NO: 12448 - protein, 9 aa, Artificial Sequence
  Synthetic polypeptide representing artificial human antibody CDR-L1 region
SSDVGGYNY

SEQ ID NO: 12449 - protein, 11 aa, Artificial Sequence
  Synthetic polypeptide representing artificial human antibody CDR-L1 region
QSLLHSNGYNY

SEQ ID NO: 12450 - protein, 6 aa, Artificial Sequence
  Synthetic polypeptide representing artificial human antibody CDR-L1 region
QSVNSN

SEQ ID NO: 12451 - protein, 12 aa, Artificial Sequence
  Synthetic polypeptide representing artificial human antibody CDR-L1 region
QNVFFQSNNKNY

SEQ ID NO: 12452 - protein, 8 aa, Artificial Sequence
  Synthetic polypeptide representing artificial human antibody CDR-L1 region
NNNVGNQG

SEQ ID NO: 12453 - protein, 8 aa, Artificial Sequence
  Synthetic polypeptide representing artificial human antibody CDR-L1 region
SSSIGNNY

SEQ ID NO: 12454 - protein, 6 aa, Artificial Sequence
  Synthetic polypeptide representing artificial human antibody CDR-L1 region
VLAKKY

SEQ ID NO: 12455 - protein, 6 aa, Artificial Sequence
  Synthetic polypeptide representing artificial human antibody CDR-L1 region
ALPKQY

SEQ ID NO: 12456 - protein, 6 aa, Artificial Sequence
  Synthetic polypeptide representing artificial human antibody CDR-L1 region
QSVRSN

SEQ ID NO: 12457 - protein, 12 aa, Artificial Sequence
  Synthetic polypeptide representing artificial human antibody CDR-L1 region
HSLFYTSENTNY

SEQ ID NO: 12458 - protein, 6 aa, Artificial Sequence
  Synthetic polypeptide representing artificial human antibody CDR-L1 region
NIGSKS

SEQ ID NO: 12459 - protein, 6 aa, Artificial Sequence
  Synthetic polypeptide representing artificial human antibody CDR-L1 region
QSISSW

SEQ ID NO: 12460 - protein, 6 aa, Artificial Sequence
  Synthetic polypeptide representing artificial human antibody CDR-L1 region
QDISSW

SEQ ID NO: 12461 - protein, 9 aa, Artificial Sequence
  Synthetic polypeptide representing artificial human antibody CDR-L1 region
SSNLGEGYD

SEQ ID NO: 12462 - protein, 9 aa, Artificial Sequence
  Synthetic polypeptide representing artificial human antibody CDR-L1 region
SSDVGGYNY

SEQ ID NO: 12463 - protein, 9 aa, Artificial Sequence
  Synthetic polypeptide representing artificial human antibody CDR-L1 region
TGDVTIGHY

SEQ ID NO: 12464 - protein, 9 aa, Artificial Sequence
  Synthetic polypeptide representing artificial human antibody CDR-L1 region
SSNIGAGYD

SEQ ID NO: 12465 - protein, 9 aa, Artificial Sequence
  Synthetic polypeptide representing artificial human antibody CDR-L1 region
SSNIGGGYD

SEQ ID NO: 12466 - protein, 9 aa, Artificial Sequence
  Synthetic polypeptide representing artificial human antibody CDR-L1 region
SGSVSTSYY

SEQ ID NO: 12467 - protein, 6 aa, Artificial Sequence
  Synthetic polypeptide representing artificial human antibody CDR-L1 region
KLEDKY

SEQ ID NO: 12468 - protein, 7 aa, Artificial Sequence
  Synthetic polypeptide representing artificial human antibody CDR-L1 region
SGHSRYA

SEQ ID NO: 12469 - protein, 6 aa, Artificial Sequence
  Synthetic polypeptide representing artificial human antibody CDR-L1 region
QNIAVY

SEQ ID NO: 12470 - protein, 6 aa, Artificial Sequence
  Synthetic polypeptide representing artificial human antibody CDR-L1 region
ALPKQY

SEQ ID NO: 12471 - protein, 7 aa, Artificial Sequence
  Synthetic polypeptide representing artificial human antibody CDR-L1 region
ETIDRGF

SEQ ID NO: 12472 - protein, 9 aa, Artificial Sequence
  Synthetic polypeptide representing artificial human antibody CDR-L1 region
TGSVTRWRY

SEQ ID NO: 12473 - protein, 7 aa, Artificial Sequence
  Synthetic polypeptide representing artificial human antibody CDR-L1 region
QSVSSSY

SEQ ID NO: 12474 - protein, 6 aa, Artificial Sequence
  Synthetic polypeptide representing artificial human antibody CDR-L1 region
QSISSW

SEQ ID NO: 12475 - protein, 12 aa, Artificial Sequence
  Synthetic polypeptide representing artificial human antibody CDR-L1 region
QSVLYSSNNKNY

SEQ ID NO: 12476 - protein, 8 aa, Artificial Sequence
  Synthetic polypeptide representing artificial human antibody CDR-L1 region
SSNIGSNY

SEQ ID NO: 12477 - protein, 6 aa, Artificial Sequence
  Synthetic polypeptide representing artificial human antibody CDR-L1 region
RNINSY

SEQ ID NO: 12478 - protein, 6 aa, Artificial Sequence
  Synthetic polypeptide representing artificial human antibody CDR-L1 region
GIGAKR

SEQ ID NO: 12479 - protein, 9 aa, Artificial Sequence
  Synthetic polypeptide representing artificial human antibody CDR-L1 region
SSNIGSNYD

SEQ ID NO: 12480 - protein, 6 aa, Artificial Sequence
  Synthetic polypeptide representing artificial human antibody CDR-L1 region
QGISSY

SEQ ID NO: 12481 - protein, 12 aa, Artificial Sequence
  Synthetic polypeptide representing artificial human antibody CDR-L1 region
QTILSPSYNKYY

SEQ ID NO: 12482 - protein, 9 aa, Artificial Sequence
  Synthetic polypeptide representing artificial human antibody CDR-L1 region
SGDVGTYNY

SEQ ID NO: 12483 - protein, 8 aa, Artificial Sequence
  Synthetic polypeptide representing artificial human antibody CDR-L1 region
TSNIGSNT

SEQ ID NO: 12484 - protein, 6 aa, Artificial Sequence
  Synthetic polypeptide representing artificial human antibody CDR-L1 region
QSVRSF

SEQ ID NO: 12485 - protein, 9 aa, Artificial Sequence
  Synthetic polypeptide representing artificial human antibody CDR-L1 region
SSNIGAPYD

SEQ ID NO: 12486 - protein, 9 aa, Artificial Sequence
  Synthetic polypeptide representing artificial human antibody CDR-L1 region
TGAVTSGHY

SEQ ID NO: 12487 - protein, 8 aa, Artificial Sequence
  Synthetic polypeptide representing artificial human antibody CDR-L1 region
SSNIGSNY

SEQ ID NO: 12488 - protein, 9 aa, Artificial Sequence
  Synthetic polypeptide representing artificial human antibody CDR-L1 region
SSDVGGYNY

SEQ ID NO: 12489 - protein, 6 aa, Artificial Sequence
  Synthetic polypeptide representing artificial human antibody CDR-L1 region
KLGDKY

SEQ ID NO: 12490 - protein, 6 aa, Artificial Sequence
  Synthetic polypeptide representing artificial human antibody CDR-L1 region
QSVSSN

SEQ ID NO: 12491 - protein, 8 aa, Artificial Sequence
  Synthetic polypeptide representing artificial human antibody CDR-L1 region
TSNIGDNW

SEQ ID NO: 12492 - protein, 8 aa, Artificial Sequence
  Synthetic polypeptide representing artificial human antibody CDR-L1 region
TSKIGRNH

SEQ ID NO: 12493 - protein, 7 aa, Artificial Sequence
  Synthetic polypeptide representing artificial human antibody CDR-L1 region
QTVYFRY

SEQ ID NO: 12494 - protein, 8 aa, Artificial Sequence
  Synthetic polypeptide representing artificial human antibody CDR-L1 region
GSNIGGHK

SEQ ID NO: 12495 - protein, 6 aa, Artificial Sequence
  Synthetic polypeptide representing artificial human antibody CDR-L1 region
DLSKNY

SEQ ID NO: 12496 - protein, 8 aa, Artificial Sequence
  Synthetic polypeptide representing artificial human antibody CDR-L1 region
SSNIGSNY

SEQ ID NO: 12497 - protein, 6 aa, Artificial Sequence
  Synthetic polypeptide representing artificial human antibody CDR-L1 region
QSVSSN

SEQ ID NO: 12498 - protein, 6 aa, Artificial Sequence
  Synthetic polypeptide representing artificial human antibody CDR-L1 region
QSISSW

SEQ ID NO: 12499 - protein, 6 aa, Artificial Sequence
  Synthetic polypeptide representing artificial human antibody CDR-L1 region
QSISSY

SEQ ID NO: 12500 - protein, 6 aa, Artificial Sequence
  Synthetic polypeptide representing artificial human antibody CDR-L1 region
QGISSY

SEQ ID NO: 12501 - protein, 8 aa, Artificial Sequence
  Synthetic polypeptide representing artificial human antibody CDR-H2 region
INTDGSAT

SEQ ID NO: 12502 - protein, 7 aa, Artificial Sequence
  Synthetic polypeptide representing artificial human antibody CDR-H2 region
IFSNDEK

SEQ ID NO: 12503 - protein, 7 aa, Artificial Sequence
  Synthetic polypeptide representing artificial human antibody CDR-H2 region
IFSNDEK

SEQ ID NO: 12504 - protein, 7 aa, Artificial Sequence
  Synthetic polypeptide representing artificial human antibody CDR-H2 region
IFSNDEK

SEQ ID NO: 12505 - protein, 7 aa, Artificial Sequence
  Synthetic polypeptide representing artificial human antibody CDR-H2 region
IFSNDEK

SEQ ID NO: 12506 - protein, 7 aa, Artificial Sequence
  Synthetic polypeptide representing artificial human antibody CDR-H2 region
IFSNDEK

SEQ ID NO: 12507 - protein, 7 aa, Artificial Sequence
  Synthetic polypeptide representing artificial human antibody CDR-H2 region
IFSNDEK

SEQ ID NO: 12508 - protein, 10 aa, Artificial Sequence
  Synthetic polypeptide representing artificial human antibody CDR-H2 region
IKRKSDGGTT

SEQ ID NO: 12509 - protein, 10 aa, Artificial Sequence
  Synthetic polypeptide representing artificial human antibody CDR-H2 region
IKRKSDGGTT

SEQ ID NO: 12510 - protein, 7 aa, Artificial Sequence
  Synthetic polypeptide representing artificial human antibody CDR-H2 region
IYYTGST

SEQ ID NO: 12511 - protein, 7 aa, Artificial Sequence
  Synthetic polypeptide representing artificial human antibody CDR-H2 region
IYSGGGT

SEQ ID NO: 12512 - protein, 8 aa, Artificial Sequence
  Synthetic polypeptide representing artificial human antibody CDR-H2 region
ISSSSSYI

SEQ ID NO: 12513 - protein, 8 aa, Artificial Sequence
  Synthetic polypeptide representing artificial human antibody CDR-H2 region
ISGSGGST

SEQ ID NO: 12514 - protein, 7 aa, Artificial Sequence
  Synthetic polypeptide representing artificial human antibody CDR-H2 region
INHSGST

SEQ ID NO: 12515 - protein, 7 aa, Artificial Sequence
  Synthetic polypeptide representing artificial human antibody CDR-H2 region
IYWDDDK

SEQ ID NO: 12516 - protein, 8 aa, Artificial Sequence
  Synthetic polypeptide representing artificial human antibody CDR-H2 region
IWHDGSQQ

SEQ ID NO: 12517 - protein, 8 aa, Artificial Sequence
  Synthetic polypeptide representing artificial human antibody CDR-H2 region
INPNSGGT

SEQ ID NO: 12518 - protein, 8 aa, Artificial Sequence
  Synthetic polypeptide representing artificial human antibody CDR-H2 region
INTNTGSP

SEQ ID NO: 12519 - protein, 8 aa, Artificial Sequence
  Synthetic polypeptide representing artificial human antibody CDR-H2 region
INPNSGGT

SEQ ID NO: 12520 - protein, 8 aa, Artificial Sequence
  Synthetic polypeptide representing artificial human antibody CDR-H2 region
ISYNSRSI

SEQ ID NO: 12521 - protein, 8 aa, Artificial Sequence
  Synthetic polypeptide representing artificial human antibody CDR-H2 region
IIPIFDTR

SEQ ID NO: 12522 - protein, 8 aa, Artificial Sequence
  Synthetic polypeptide representing artificial human antibody CDR-H2 region
IHHDENDK

SEQ ID NO: 12523 - protein, 8 aa, Artificial Sequence
  Synthetic polypeptide representing artificial human antibody CDR-H2 region
FDPEDGET

SEQ ID NO: 12524 - protein, 8 aa, Artificial Sequence
  Synthetic polypeptide representing artificial human antibody CDR-H2 region
INAGNGNT

SEQ ID NO: 12525 - protein, 8 aa, Artificial Sequence
  Synthetic polypeptide representing artificial human antibody CDR-H2 region
FDPEDGET

SEQ ID NO: 12526 - protein, 8 aa, Artificial Sequence
  Synthetic polypeptide representing artificial human antibody CDR-H2 region
LSYDGSFK

SEQ ID NO: 12527 - protein, 8 aa, Artificial Sequence
  Synthetic polypeptide representing artificial human antibody CDR-H2 region
IHGGGTTT

SEQ ID NO: 12528 - protein, 8 aa, Artificial Sequence
  Synthetic polypeptide representing artificial human antibody CDR-H2 region
ISYDGSNK

SEQ ID NO: 12529 - protein, 8 aa, Artificial Sequence
  Synthetic polypeptide representing artificial human antibody CDR-H2 region
IWYDGSNK

SEQ ID NO: 12530 - protein, 8 aa, Artificial Sequence
  Synthetic polypeptide representing artificial human antibody CDR-H2 region
VSYAGNTE

SEQ ID NO: 12531 - protein, 8 aa, Artificial Sequence
  Synthetic polypeptide representing artificial human antibody CDR-H2 region
MNPNSGNT

SEQ ID NO: 12532 - protein, 8 aa, Artificial Sequence
  Synthetic polypeptide representing artificial human antibody CDR-H2 region
ISAYNRNT

SEQ ID NO: 12533 - protein, 10 aa, Artificial Sequence
  Synthetic polypeptide representing artificial human antibody CDR-H2 region
IRSKVYGATT

SEQ ID NO: 12534 - protein, 7 aa, Artificial Sequence
  Synthetic polypeptide representing artificial human antibody CDR-H2 region
VHYSGST

SEQ ID NO: 12535 - protein, 8 aa, Artificial Sequence
  Synthetic polypeptide representing artificial human antibody CDR-H2 region
IDSGGEKT

SEQ ID NO: 12536 - protein, 8 aa, Artificial Sequence
  Synthetic polypeptide representing artificial human antibody CDR-H2 region
ISWNSDDI

SEQ ID NO: 12537 - protein, 8 aa, Artificial Sequence
  Synthetic polypeptide representing artificial human antibody CDR-H2 region
ISSNGGST

SEQ ID NO: 12538 - protein, 8 aa, Artificial Sequence
  Synthetic polypeptide representing artificial human antibody CDR-H2 region
IIPILGIA

SEQ ID NO: 12539 - protein, 8 aa, Artificial Sequence
  Synthetic polypeptide representing artificial human antibody CDR-H2 region
MNPNSGNT

SEQ ID NO: 12540 - protein, 8 aa, Artificial Sequence
  Synthetic polypeptide representing artificial human antibody CDR-H2 region
IYNDGIGT

SEQ ID NO: 12541 - protein, 8 aa, Artificial Sequence
  Synthetic polypeptide representing artificial human antibody CDR-H2 region
ISWNSGSI

SEQ ID NO: 12542 - protein, 8 aa, Artificial Sequence
  Synthetic polypeptide representing artificial human antibody CDR-H2 region
IKQDGREQ

SEQ ID NO: 12543 - protein, 8 aa, Artificial Sequence
  Synthetic polypeptide representing artificial human antibody CDR-H2 region
INAVNGNT

SEQ ID NO: 12544 - protein, 7 aa, Artificial Sequence
  Synthetic polypeptide representing artificial human antibody CDR-H2 region
IYYSGST

SEQ ID NO: 12545 - protein, 7 aa, Artificial Sequence
  Synthetic polypeptide representing artificial human antibody CDR-H2 region
IYYSGST

SEQ ID NO: 12546 - protein, 8 aa, Artificial Sequence
  Synthetic polypeptide representing artificial human antibody CDR-H2 region
ISYDGSNK

SEQ ID NO: 12547 - protein, 8 aa, Artificial Sequence
  Synthetic polypeptide representing artificial human antibody CDR-H2 region
FDPQDEEP

SEQ ID NO: 12548 - protein, 8 aa, Artificial Sequence
  Synthetic polypeptide representing artificial human antibody CDR-H2 region
ISGSGNGA

SEQ ID NO: 12549 - protein, 8 aa, Artificial Sequence
  Synthetic polypeptide representing artificial human antibody CDR-H2 region
ISFDGSIK

SEQ ID NO: 12550 - protein, 8 aa, Artificial Sequence
  Synthetic polypeptide representing artificial human antibody CDR-H2 region
IKHDGSEK

SEQ ID NO: 12551 - protein, 8 aa, Artificial Sequence
  Synthetic polypeptide representing artificial human antibody CDR-H2 region
INQGGNER

SEQ ID NO: 12552 - protein, 8 aa, Artificial Sequence
  Synthetic polypeptide representing artificial human antibody CDR-H2 region
IVVGSGNT

SEQ ID NO: 12553 - protein, 8 aa, Artificial Sequence
  Synthetic polypeptide representing artificial human antibody CDR-H2 region
ISAFNGFT

SEQ ID NO: 12554 - protein, 8 aa, Artificial Sequence
  Synthetic polypeptide representing artificial human antibody CDR-H2 region
ISSSSSYI

SEQ ID NO: 12555 - protein, 9 aa, Artificial Sequence
  Synthetic polypeptide representing artificial human antibody CDR-H2 region
TYYRSKWYN

SEQ ID NO: 12556 - protein, 7 aa, Artificial Sequence
  Synthetic polypeptide representing artificial human antibody CDR-H2 region
VYWDDDK

SEQ ID NO: 12557 - protein, 8 aa, Artificial Sequence
  Synthetic polypeptide representing artificial human antibody CDR-H2 region
ISSSSSYI

SEQ ID NO: 12558 - protein, 8 aa, Artificial Sequence
  Synthetic polypeptide representing artificial human antibody CDR-H2 region
INPNSGGT

SEQ ID NO: 12559 - protein, 8 aa, Artificial Sequence
  Synthetic polypeptide representing artificial human antibody CDR-H2 region
ISYDGSNK

SEQ ID NO: 12560 - protein, 7 aa, Artificial Sequence
  Synthetic polypeptide representing artificial human antibody CDR-H2 region
TYSGGDT

SEQ ID NO: 12561 - protein, 7 aa, Artificial Sequence
  Synthetic polypeptide representing artificial human antibody CDR-H2 region
IYWDDDK

SEQ ID NO: 12562 - protein, 8 aa, Artificial Sequence
  Synthetic polypeptide representing artificial human antibody CDR-H2 region
IWYDGSNK

SEQ ID NO: 12563 - protein, 8 aa, Artificial Sequence
  Synthetic polypeptide representing artificial human antibody CDR-H2 region
IWYDGSNK

SEQ ID NO: 12564 - protein, 8 aa, Artificial Sequence
  Synthetic polypeptide representing artificial human antibody CDR-H2 region
ISSSSSYI

SEQ ID NO: 12565 - protein, 7 aa, Artificial Sequence
  Synthetic polypeptide representing artificial human antibody CDR-H2 region
IYWDDDK

SEQ ID NO: 12566 - protein, 8 aa, Artificial Sequence
  Synthetic polypeptide representing artificial human antibody CDR-H2 region
VYTSGDNT

SEQ ID NO: 12567 - protein, 7 aa, Artificial Sequence
  Synthetic polypeptide representing artificial human antibody CDR-H2 region
IYYSGNT

SEQ ID NO: 12568 - protein, 8 aa, Artificial Sequence
  Synthetic polypeptide representing artificial human antibody CDR-H2 region
INSDNSRI

SEQ ID NO: 12569 - protein, 10 aa, Artificial Sequence
  Synthetic polypeptide representing artificial human antibody CDR-H2 region
IFGGGGPMTT

SEQ ID NO: 12570 - protein, 8 aa, Artificial Sequence
  Synthetic polypeptide representing artificial human antibody CDR-H2 region
ISGSGGST

SEQ ID NO: 12571 - protein, 10 aa, Artificial Sequence
  Synthetic polypeptide representing artificial human antibody CDR-H2 region
IRSKTNTYAT

SEQ ID NO: 12572 - protein, 7 aa, Artificial Sequence
  Synthetic polypeptide representing artificial human antibody CDR-H2 region
VSYRGET

SEQ ID NO: 12573 - protein, 8 aa, Artificial Sequence
  Synthetic polypeptide representing artificial human antibody CDR-H2 region
ISWNSGSI

SEQ ID NO: 12574 - protein, 8 aa, Artificial Sequence
  Synthetic polypeptide representing artificial human antibody CDR-H2 region
INTNTGNP

SEQ ID NO: 12575 - protein, 7 aa, Artificial Sequence
  Synthetic polypeptide representing artificial human antibody CDR-H2 region
IYDVGHT

SEQ ID NO: 12576 - protein, 8 aa, Artificial Sequence
  Synthetic polypeptide representing artificial human antibody CDR-H2 region
ISSSSSYI

SEQ ID NO: 12577 - protein, 8 aa, Artificial Sequence
  Synthetic polypeptide representing artificial human antibody CDR-H2 region
ISWNGDDI

SEQ ID NO: 12578 - protein, 8 aa, Artificial Sequence
  Synthetic polypeptide representing artificial human antibody CDR-H2 region
ISWNSGSI

SEQ ID NO: 12579 - protein, 8 aa, Artificial Sequence
  Synthetic polypeptide representing artificial human antibody CDR-H2 region
ISSSSSYI

SEQ ID NO: 12580 - protein, 8 aa, Artificial Sequence
  Synthetic polypeptide representing artificial human antibody CDR-H2 region
ISGSGGST

SEQ ID NO: 12581 - protein, 8 aa, Artificial Sequence
  Synthetic polypeptide representing artificial human antibody CDR-H2 region
INSDGSST

SEQ ID NO: 12582 - protein, 8 aa, Artificial Sequence
  Synthetic polypeptide representing artificial human antibody CDR-H2 region
MNPNSGNT

SEQ ID NO: 12583 - protein, 8 aa, Artificial Sequence
  Synthetic polypeptide representing artificial human antibody CDR-H2 region
ISYDGSNK

SEQ ID NO: 12584 - protein, 7 aa, Artificial Sequence
  Synthetic polypeptide representing artificial human antibody CDR-H2 region
IDWDDDK

SEQ ID NO: 12585 - protein, 8 aa, Artificial Sequence
  Synthetic polypeptide representing artificial human antibody CDR-H2 region
ISYDGSNK

SEQ ID NO: 12586 - protein, 8 aa, Artificial Sequence
  Synthetic polypeptide representing artificial human antibody CDR-H2 region
INPSGGST

SEQ ID NO: 12587 - protein, 8 aa, Artificial Sequence
  Synthetic polypeptide representing artificial human antibody CDR-H2 region
IKQDGREQ

SEQ ID NO: 12588 - protein, 8 aa, Artificial Sequence
  Synthetic polypeptide representing artificial human antibody CDR-H2 region
IIPILGIA

SEQ ID NO: 12589 - protein, 8 aa, Artificial Sequence
  Synthetic polypeptide representing artificial human antibody CDR-H2 region
ISWNSGSI

SEQ ID NO: 12590 - protein, 7 aa, Artificial Sequence
  Synthetic polypeptide representing artificial human antibody CDR-H2 region
IYSGGST

SEQ ID NO: 12591 - protein, 8 aa, Artificial Sequence
  Synthetic polypeptide representing artificial human antibody CDR-H2 region
ITGSGGTT

SEQ ID NO: 12592 - protein, 8 aa, Artificial Sequence
  Synthetic polypeptide representing artificial human antibody CDR-H2 region
IHPGNGRT

SEQ ID NO: 12593 - protein, 8 aa, Artificial Sequence
  Synthetic polypeptide representing artificial human antibody CDR-H2 region
IHAGNGKT

SEQ ID NO: 12594 - protein, 8 aa, Artificial Sequence
  Synthetic polypeptide representing artificial human antibody CDR-H2 region
ITPFNGNT

SEQ ID NO: 12595 - protein, 8 aa, Artificial Sequence
  Synthetic polypeptide representing artificial human antibody CDR-H2 region
INPSGGST

SEQ ID NO: 12596 - protein, 8 aa, Artificial Sequence
  Synthetic polypeptide representing artificial human antibody CDR-H2 region
ISNDANNH

SEQ ID NO: 12597 - protein, 8 aa, Artificial Sequence
  Synthetic polypeptide representing artificial human antibody CDR-H2 region
IIPILGIA

SEQ ID NO: 12598 - protein, 8 aa, Artificial Sequence
  Synthetic polypeptide representing artificial human antibody CDR-H2 region
ISYDGSNK

SEQ ID NO: 12599 - protein, 8 aa, Artificial Sequence
  Synthetic polypeptide representing artificial human antibody CDR-H2 region
INSDGSST

SEQ ID NO: 12600 - protein, 8 aa, Artificial Sequence
  Synthetic polypeptide representing artificial human antibody CDR-H2 region
IVGSGGTT

SEQ ID NO: 12601 - protein, 8 aa, Artificial Sequence
  Synthetic polypeptide representing artificial human antibody CDR-H2 region
MNPNSGNT

SEQ ID NO: 12602 - protein, 8 aa, Artificial Sequence
  Synthetic polypeptide representing artificial human antibody CDR-H2 region
ISYDGSNK

SEQ ID NO: 12603 - protein, 7 aa, Artificial Sequence
  Synthetic polypeptide representing artificial human antibody CDR-H2 region
VFYSGST

SEQ ID NO: 12604 - protein, 7 aa, Artificial Sequence
  Synthetic polypeptide representing artificial human antibody CDR-H2 region
IYYSESS

SEQ ID NO: 12605 - protein, 8 aa, Artificial Sequence
  Synthetic polypeptide representing artificial human antibody CDR-H2 region
IIPVLGKS

SEQ ID NO: 12606 - protein, 7 aa, Artificial Sequence
  Synthetic polypeptide representing artificial human antibody CDR-H2 region
IYYSGST

SEQ ID NO: 12607 - protein, 8 aa, Artificial Sequence
  Synthetic polypeptide representing artificial human antibody CDR-H2 region
ISYDGSNK

SEQ ID NO: 12608 - protein, 8 aa, Artificial Sequence
  Synthetic polypeptide representing artificial human antibody CDR-H2 region
ISWNSGSI

SEQ ID NO: 12609 - protein, 7 aa, Artificial Sequence
  Synthetic polypeptide representing artificial human antibody CDR-H2 region
IKYSGST

SEQ ID NO: 12610 - protein, 8 aa, Artificial Sequence
  Synthetic polypeptide representing artificial human antibody CDR-H2 region
IKQDGSEK

SEQ ID NO: 12611 - protein, 8 aa, Artificial Sequence
  Synthetic polypeptide representing artificial human antibody CDR-H2 region
ISYDGSNK

SEQ ID NO: 12612 - protein, 8 aa, Artificial Sequence
  Synthetic polypeptide representing artificial human antibody CDR-H2 region
INPSGGST

SEQ ID NO: 12613 - protein, 8 aa, Artificial Sequence
  Synthetic polypeptide representing artificial human antibody CDR-H2 region
ISYDGSNK

SEQ ID NO: 12614 - protein, 7 aa, Artificial Sequence
  Synthetic polypeptide representing artificial human antibody CDR-H2 region
IYTSGST

SEQ ID NO: 12615 - protein, 8 aa, Artificial Sequence
  Synthetic polypeptide representing artificial human antibody CDR-H2 region
INPKSGDT

SEQ ID NO: 12616 - protein, 8 aa, Artificial Sequence
  Synthetic polypeptide representing artificial human antibody CDR-H2 region
ISVYNGNT

SEQ ID NO: 12617 - protein, 8 aa, Artificial Sequence
  Synthetic polypeptide representing artificial human antibody CDR-H2 region
INPSNGAR

SEQ ID NO: 12618 - protein, 7 aa, Artificial Sequence
  Synthetic polypeptide representing artificial human antibody CDR-H2 region
INHTGTI

SEQ ID NO: 12619 - protein, 7 aa, Artificial Sequence
  Synthetic polypeptide representing artificial human antibody CDR-H2 region
MHHSGTT

SEQ ID NO: 12620 - protein, 8 aa, Artificial Sequence
  Synthetic polypeptide representing artificial human antibody CDR-H2 region
ISGNGASA

SEQ ID NO: 12621 - protein, 7 aa, Artificial Sequence
  Synthetic polypeptide representing artificial human antibody CDR-H2 region
INHTGTI

SEQ ID NO: 12622 - protein, 7 aa, Artificial Sequence
  Synthetic polypeptide representing artificial human antibody CDR-H2 region
INHSGST

SEQ ID NO: 12623 - protein, 8 aa, Artificial Sequence
  Synthetic polypeptide representing artificial human antibody CDR-H2 region
ISYDGSNK

SEQ ID NO: 12624 - protein, 7 aa, Artificial Sequence
  Synthetic polypeptide representing artificial human antibody CDR-H2 region
IFWDDDK

SEQ ID NO: 12625 - protein, 8 aa, Artificial Sequence
  Synthetic polypeptide representing artificial human antibody CDR-H2 region
IDPSDSYT

SEQ ID NO: 12626 - protein, 9 aa, Artificial Sequence
  Synthetic polypeptide representing artificial human antibody CDR-H2 region
TYYRSKWYN

SEQ ID NO: 12627 - protein, 8 aa, Artificial Sequence
  Synthetic polypeptide representing artificial human antibody CDR-H2 region
IDPSDSYT

SEQ ID NO: 12628 - protein, 7 aa, Artificial Sequence
  Synthetic polypeptide representing artificial human antibody CDR-H2 region
IYYSGNT

SEQ ID NO: 12629 - protein, 7 aa, Artificial Sequence
  Synthetic polypeptide representing artificial human antibody CDR-H2 region
INHSGST

SEQ ID NO: 12630 - protein, 8 aa, Artificial Sequence
  Synthetic polypeptide representing artificial human antibody CDR-H2 region
ITNDGGTA

SEQ ID NO: 12631 - protein, 8 aa, Artificial Sequence
  Synthetic polypeptide representing artificial human antibody CDR-H2 region
INPSGGST

SEQ ID NO: 12632 - protein, 8 aa, Artificial Sequence
  Synthetic polypeptide representing artificial human antibody CDR-H2 region
IDPSDSYT

SEQ ID NO: 12633 - protein, 7 aa, Artificial Sequence
  Synthetic polypeptide representing artificial human antibody CDR-H2 region
IDWDDDK

SEQ ID NO: 12634 - protein, 7 aa, Artificial Sequence
  Synthetic polypeptide representing artificial human antibody CDR-H2 region
ITHSGST

SEQ ID NO: 12635 - protein, 8 aa, Artificial Sequence
  Synthetic polypeptide representing artificial human antibody CDR-H2 region
ISYEGSIK

SEQ ID NO: 12636 - protein, 8 aa, Artificial Sequence
  Synthetic polypeptide representing artificial human antibody CDR-H2 region
FDPEDGET

SEQ ID NO: 12637 - protein, 8 aa, Artificial Sequence
  Synthetic polypeptide representing artificial human antibody CDR-H2 region
TNSDGTTT

SEQ ID NO: 12638 - protein, 7 aa, Artificial Sequence
  Synthetic polypeptide representing artificial human antibody CDR-H2 region
ITHSGST

SEQ ID NO: 12639 - protein, 7 aa, Artificial Sequence
  Synthetic polypeptide representing artificial human antibody CDR-H2 region
ISQGGST

SEQ ID NO: 12640 - protein, 8 aa, Artificial Sequence
  Synthetic polypeptide representing artificial human antibody CDR-H2 region
ISWNSGSI

SEQ ID NO: 12641 - protein, 7 aa, Artificial Sequence
  Synthetic polypeptide representing artificial human antibody CDR-H2 region
ITHSGSA

SEQ ID NO: 12642 - protein, 8 aa, Artificial Sequence
  Synthetic polypeptide representing artificial human antibody CDR-H2 region
IYPGDSDT

SEQ ID NO: 12643 - protein, 7 aa, Artificial Sequence
  Synthetic polypeptide representing artificial human antibody CDR-H2 region
IGTAGDT

SEQ ID NO: 12644 - protein, 8 aa, Artificial Sequence
  Synthetic polypeptide representing artificial human antibody CDR-H2 region
ISSSTHFI

SEQ ID NO: 12645 - protein, 7 aa, Artificial Sequence
  Synthetic polypeptide representing artificial human antibody CDR-H2 region
IYWDDNE

SEQ ID NO: 12646 - protein, 7 aa, Artificial Sequence
  Synthetic polypeptide representing artificial human antibody CDR-H2 region
IYNTGTT

SEQ ID NO: 12647 - protein, 8 aa, Artificial Sequence
  Synthetic polypeptide representing artificial human antibody CDR-H2 region
ISYDGSNI

SEQ ID NO: 12648 - protein, 8 aa, Artificial Sequence
  Synthetic polypeptide representing artificial human antibody CDR-H2 region
IKEDGSET

SEQ ID NO: 12649 - protein, 7 aa, Artificial Sequence
  Synthetic polypeptide representing artificial human antibody CDR-H2 region
IYQSGST

SEQ ID NO: 12650 - protein, 7 aa, Artificial Sequence
  Synthetic polypeptide representing artificial human antibody CDR-H2 region
ISHGGST

SEQ ID NO: 12651 - protein, 7 aa, Artificial Sequence
  Synthetic polypeptide representing artificial human antibody CDR-H2 region
IYYSGST

SEQ ID NO: 12652 - protein, 7 aa, Artificial Sequence
  Synthetic polypeptide representing artificial human antibody CDR-H2 region
ITHSGST

SEQ ID NO: 12653 - protein, 8 aa, Artificial Sequence
  Synthetic polypeptide representing artificial human antibody CDR-H2 region
ISYDGSNK

SEQ ID NO: 12654 - protein, 7 aa, Artificial Sequence
  Synthetic polypeptide representing artificial human antibody CDR-H2 region
ITHGGST

SEQ ID NO: 12655 - protein, 8 aa, Artificial Sequence
  Synthetic polypeptide representing artificial human antibody CDR-H2 region
IGGSGENK

SEQ ID NO: 12656 - protein, 8 aa, Artificial Sequence
  Synthetic polypeptide representing artificial human antibody CDR-H2 region
ISYDGRSK

SEQ ID NO: 12657 - protein, 8 aa, Artificial Sequence
  Synthetic polypeptide representing artificial human antibody CDR-H2 region
INAGNGNT

SEQ ID NO: 12658 - protein, 8 aa, Artificial Sequence
  Synthetic polypeptide representing artificial human antibody CDR-H2 region
ISSSSSTI

SEQ ID NO: 12659 - protein, 8 aa, Artificial Sequence
  Synthetic polypeptide representing artificial human antibody CDR-H2 region
ISAYNGKT

SEQ ID NO: 12660 - protein, 10 aa, Artificial Sequence
  Synthetic polypeptide representing artificial human antibody CDR-H2 region
IYSTGAGGRV

SEQ ID NO: 12661 - protein, 8 aa, Artificial Sequence
  Synthetic polypeptide representing artificial human antibody CDR-H2 region
FDPEDGET

SEQ ID NO: 12662 - protein, 8 aa, Artificial Sequence
  Synthetic polypeptide representing artificial human antibody CDR-H2 region
IKEDGSEK

SEQ ID NO: 12663 - protein, 8 aa, Artificial Sequence
  Synthetic polypeptide representing artificial human antibody CDR-H2 region
ISGSTSYR

SEQ ID NO: 12664 - protein, 7 aa, Artificial Sequence
  Synthetic polypeptide representing artificial human antibody CDR-H2 region
IYWDDDK

SEQ ID NO: 12665 - protein, 7 aa, Artificial Sequence
  Synthetic polypeptide representing artificial human antibody CDR-H2 region
ITHSGSA

SEQ ID NO: 12666 - protein, 7 aa, Artificial Sequence
  Synthetic polypeptide representing artificial human antibody CDR-H2 region
ISYSGST

SEQ ID NO: 12667 - protein, 7 aa, Artificial Sequence
  Synthetic polypeptide representing artificial human antibody CDR-H2 region
ISQTGST

SEQ ID NO: 12668 - protein, 7 aa, Artificial Sequence
  Synthetic polypeptide representing artificial human antibody CDR-H2 region
ITHSGST

SEQ ID NO: 12669 - protein, 7 aa, Artificial Sequence
  Synthetic polypeptide representing artificial human antibody CDR-H2 region
IHYSGNT

SEQ ID NO: 12670 - protein, 7 aa, Artificial Sequence
  Synthetic polypeptide representing artificial human antibody CDR-H2 region
ITHSGSA

SEQ ID NO: 12671 - protein, 8 aa, Artificial Sequence
  Synthetic polypeptide representing artificial human antibody CDR-H2 region
ISYDGSNK

SEQ ID NO: 12672 - protein, 8 aa, Artificial Sequence
  Synthetic polypeptide representing artificial human antibody CDR-H2 region
MSYDETEQ

SEQ ID NO: 12673 - protein, 8 aa, Artificial Sequence
  Synthetic polypeptide representing artificial human antibody CDR-H2 region
MDPNSGLT

SEQ ID NO: 12674 - protein, 8 aa, Artificial Sequence
  Synthetic polypeptide representing artificial human antibody CDR-H2 region
FDPEDGET

SEQ ID NO: 12675 - protein, 8 aa, Artificial Sequence
  Synthetic polypeptide representing artificial human antibody CDR-H2 region
ISWNSGSI

SEQ ID NO: 12676 - protein, 8 aa, Artificial Sequence
  Synthetic polypeptide representing artificial human antibody CDR-H2 region
ISYDGSNK

SEQ ID NO: 12677 - protein, 7 aa, Artificial Sequence
  Synthetic polypeptide representing artificial human antibody CDR-H2 region
ITHSGSA

SEQ ID NO: 12678 - protein, 8 aa, Artificial Sequence
  Synthetic polypeptide representing artificial human antibody CDR-H2 region
ISYEGSKK

SEQ ID NO: 12679 - protein, 8 aa, Artificial Sequence
  Synthetic polypeptide representing artificial human antibody CDR-H2 region
ISDDGSNK

SEQ ID NO: 12680 - protein, 8 aa, Artificial Sequence
  Synthetic polypeptide representing artificial human antibody CDR-H2 region
IYPGDSDT

SEQ ID NO: 12681 - protein, 8 aa, Artificial Sequence
  Synthetic polypeptide representing artificial human antibody CDR-H2 region
IKEDGSET

SEQ ID NO: 12682 - protein, 7 aa, Artificial Sequence
  Synthetic polypeptide representing artificial human antibody CDR-H2 region
IYWDDDK

SEQ ID NO: 12683 - protein, 8 aa, Artificial Sequence
  Synthetic polypeptide representing artificial human antibody CDR-H2 region
IDPSDSYT

SEQ ID NO: 12684 - protein, 8 aa, Artificial Sequence
  Synthetic polypeptide representing artificial human antibody CDR-H2 region
FDPEDGET

SEQ ID NO: 12685 - protein, 7 aa, Artificial Sequence
  Synthetic polypeptide representing artificial human antibody CDR-H2 region
IGTAGDT

SEQ ID NO: 12686 - protein, 8 aa, Artificial Sequence
  Synthetic polypeptide representing artificial human antibody CDR-H2 region
LSSGGSNK

SEQ ID NO: 12687 - protein, 8 aa, Artificial Sequence
  Synthetic polypeptide representing artificial human antibody CDR-H2 region
INWNGGST

SEQ ID NO: 12688 - protein, 8 aa, Artificial Sequence
  Synthetic polypeptide representing artificial human antibody CDR-H2 region
INWNGGST

SEQ ID NO: 12689 - protein, 8 aa, Artificial Sequence
  Synthetic polypeptide representing artificial human antibody CDR-H2 region
IYPGDSDT

SEQ ID NO: 12690 - protein, 8 aa, Artificial Sequence
  Synthetic polypeptide representing artificial human antibody CDR-H2 region
ISYDGSNK

SEQ ID NO: 12691 - protein, 8 aa, Artificial Sequence
  Synthetic polypeptide representing artificial human antibody CDR-H2 region
ISDDGSNK

SEQ ID NO: 12692 - protein, 8 aa, Artificial Sequence
  Synthetic polypeptide representing artificial human antibody CDR-H2 region
IYPGDSDT

SEQ ID NO: 12693 - protein, 7 aa, Artificial Sequence
  Synthetic polypeptide representing artificial human antibody CDR-H2 region
IYYSGNT

SEQ ID NO: 12694 - protein, 8 aa, Artificial Sequence
  Synthetic polypeptide representing artificial human antibody CDR-H2 region
INPSGGST

SEQ ID NO: 12695 - protein, 8 aa, Artificial Sequence
  Synthetic polypeptide representing artificial human antibody CDR-H2 region
ITGGGGTT

SEQ ID NO: 12696 - protein, 7 aa, Artificial Sequence
  Synthetic polypeptide representing artificial human antibody CDR-H2 region
INHSGST

SEQ ID NO: 12697 - protein, 8 aa, Artificial Sequence
  Synthetic polypeptide representing artificial human antibody CDR-H2 region
IGRGGDIT

SEQ ID NO: 12698 - protein, 8 aa, Artificial Sequence
  Synthetic polypeptide representing artificial human antibody CDR-H2 region
IDPSDSYT

SEQ ID NO: 12699 - protein, 8 aa, Artificial Sequence
  Synthetic polypeptide representing artificial human antibody CDR-H2 region
ISSGGGST

SEQ ID NO: 12700 - protein, 8 aa, Artificial Sequence
  Synthetic polypeptide representing artificial human antibody CDR-H2 region
IKSDGSSA

SEQ ID NO: 12701 - protein, 8 aa, Artificial Sequence
  Synthetic polypeptide representing artificial human antibody CDR-H2 region
IKQDGSEK

SEQ ID NO: 12702 - protein, 8 aa, Artificial Sequence
  Synthetic polypeptide representing artificial human antibody CDR-H2 region
ISDDGSNK

SEQ ID NO: 12703 - protein, 8 aa, Artificial Sequence
  Synthetic polypeptide representing artificial human antibody CDR-H2 region
IDFTSTYI

SEQ ID NO: 12704 - protein, 7 aa, Artificial Sequence
  Synthetic polypeptide representing artificial human antibody CDR-H2 region
ISHGGST

SEQ ID NO: 12705 - protein, 8 aa, Artificial Sequence
  Synthetic polypeptide representing artificial human antibody CDR-H2 region
ISWNSGSI

SEQ ID NO: 12706 - protein, 8 aa, Artificial Sequence
  Synthetic polypeptide representing artificial human antibody CDR-H2 region
ISGSSGDR

SEQ ID NO: 12707 - protein, 7 aa, Artificial Sequence
  Synthetic polypeptide representing artificial human antibody CDR-H2 region
IYYSGST

SEQ ID NO: 12708 - protein, 8 aa, Artificial Sequence
  Synthetic polypeptide representing artificial human antibody CDR-H2 region
ITWNGNYI

SEQ ID NO: 12709 - protein, 8 aa, Artificial Sequence
  Synthetic polypeptide representing artificial human antibody CDR-H2 region
INTNTGNP

SEQ ID NO: 12710 - protein, 8 aa, Artificial Sequence
  Synthetic polypeptide representing artificial human antibody CDR-H2 region
IIPIFGTA

SEQ ID NO: 12711 - protein, 8 aa, Artificial Sequence
  Synthetic polypeptide representing artificial human antibody CDR-H2 region
IIGSDGST

SEQ ID NO: 12712 - protein, 8 aa, Artificial Sequence
  Synthetic polypeptide representing artificial human antibody CDR-H2 region
FDPQDAEP

SEQ ID NO: 12713 - protein, 7 aa, Artificial Sequence
  Synthetic polypeptide representing artificial human antibody CDR-H2 region
VHDSGST

SEQ ID NO: 12714 - protein, 7 aa, Artificial Sequence
  Synthetic polypeptide representing artificial human antibody CDR-H2 region
IHYNANT

SEQ ID NO: 12715 - protein, 7 aa, Artificial Sequence
  Synthetic polypeptide representing artificial human antibody CDR-H2 region
IYYSGST

SEQ ID NO: 12716 - protein, 7 aa, Artificial Sequence
  Synthetic polypeptide representing artificial human antibody CDR-H2 region
IYYSGSA

SEQ ID NO: 12717 - protein, 8 aa, Artificial Sequence
  Synthetic polypeptide representing artificial human antibody CDR-H2 region
INAASGHT

SEQ ID NO: 12718 - protein, 8 aa, Artificial Sequence
  Synthetic polypeptide representing artificial human antibody CDR-H2 region
INLNGGST

SEQ ID NO: 12719 - protein, 8 aa, Artificial Sequence
  Synthetic polypeptide representing artificial human antibody CDR-H2 region
INPNSGGT

SEQ ID NO: 12720 - protein, 10 aa, Artificial Sequence
  Synthetic polypeptide representing artificial human antibody CDR-H2 region
IKSNYDGGAT

SEQ ID NO: 12721 - protein, 9 aa, Artificial Sequence
  Synthetic polypeptide representing artificial human antibody CDR-H2 region
TYYRSKWYN

SEQ ID NO: 12722 - protein, 8 aa, Artificial Sequence
  Synthetic polypeptide representing artificial human antibody CDR-H2 region
INYSGGSS

SEQ ID NO: 12723 - protein, 8 aa, Artificial Sequence
  Synthetic polypeptide representing artificial human antibody CDR-H2 region
IVPLVGRT

SEQ ID NO: 12724 - protein, 8 aa, Artificial Sequence
  Synthetic polypeptide representing artificial human antibody CDR-H2 region
ISAYNGNT

SEQ ID NO: 12725 - protein, 7 aa, Artificial Sequence
  Synthetic polypeptide representing artificial human antibody CDR-H2 region
INQSGNT

SEQ ID NO: 12726 - protein, 8 aa, Artificial Sequence
  Synthetic polypeptide representing artificial human antibody CDR-H2 region
MNPRSGGT

SEQ ID NO: 12727 - protein, 8 aa, Artificial Sequence
  Synthetic polypeptide representing artificial human antibody CDR-H2 region
IWYDGSNK

SEQ ID NO: 12728 - protein, 8 aa, Artificial Sequence
  Synthetic polypeptide representing artificial human antibody CDR-H2 region
IKEDGSEK

SEQ ID NO: 12729 - protein, 7 aa, Artificial Sequence
  Synthetic polypeptide representing artificial human antibody CDR-H2 region
MYISGSS

SEQ ID NO: 12730 - protein, 8 aa, Artificial Sequence
  Synthetic polypeptide representing artificial human antibody CDR-H2 region
INPNNGNT

SEQ ID NO: 12731 - protein, 8 aa, Artificial Sequence
  Synthetic polypeptide representing artificial human antibody CDR-H2 region
IIPILGIA

SEQ ID NO: 12732 - protein, 7 aa, Artificial Sequence
  Synthetic polypeptide representing artificial human antibody CDR-H2 region
INHSGNT

SEQ ID NO: 12733 - protein, 8 aa, Artificial Sequence
  Synthetic polypeptide representing artificial human antibody CDR-H2 region
ISGDGYNQ

SEQ ID NO: 12734 - protein, 8 aa, Artificial Sequence
  Synthetic polypeptide representing artificial human antibody CDR-H2 region
ISASGTST

SEQ ID NO: 12735 - protein, 8 aa, Artificial Sequence
  Synthetic polypeptide representing artificial human antibody CDR-H2 region
VSGSGGST

SEQ ID NO: 12736 - protein, 8 aa, Artificial Sequence
  Synthetic polypeptide representing artificial human antibody CDR-H2 region
IKRDGGEK

SEQ ID NO: 12737 - protein, 7 aa, Artificial Sequence
  Synthetic polypeptide representing artificial human antibody CDR-H2 region
IYTSGTT

SEQ ID NO: 12738 - protein, 8 aa, Artificial Sequence
  Synthetic polypeptide representing artificial human antibody CDR-H2 region
IKYDGSEK

SEQ ID NO: 12739 - protein, 8 aa, Artificial Sequence
  Synthetic polypeptide representing artificial human antibody CDR-H2 region
IDRSGPSI

SEQ ID NO: 12740 - protein, 7 aa, Artificial Sequence
  Synthetic polypeptide representing artificial human antibody CDR-H2 region
IYYSGST

SEQ ID NO: 12741 - protein, 8 aa, Artificial Sequence
  Synthetic polypeptide representing artificial human antibody CDR-H2 region
ISGSGGTI

SEQ ID NO: 12742 - protein, 7 aa, Artificial Sequence
  Synthetic polypeptide representing artificial human antibody CDR-H2 region
IYYSGST

SEQ ID NO: 12743 - protein, 8 aa, Artificial Sequence
  Synthetic polypeptide representing artificial human antibody CDR-H2 region
IGGSGSAT

SEQ ID NO: 12744 - protein, 8 aa, Artificial Sequence
  Synthetic polypeptide representing artificial human antibody CDR-H2 region
ISGTGSVT

SEQ ID NO: 12745 - protein, 8 aa, Artificial Sequence
  Synthetic polypeptide representing artificial human antibody CDR-H2 region
IKQDGSAK

SEQ ID NO: 12746 - protein, 8 aa, Artificial Sequence
  Synthetic polypeptide representing artificial human antibody CDR-H2 region
INPSGGST

SEQ ID NO: 12747 - protein, 8 aa, Artificial Sequence
  Synthetic polypeptide representing artificial human antibody CDR-H2 region
MSSTGSPI

SEQ ID NO: 12748 - protein, 8 aa, Artificial Sequence
  Synthetic polypeptide representing artificial human antibody CDR-H2 region
ISYEGSIK

SEQ ID NO: 12749 - protein, 8 aa, Artificial Sequence
  Synthetic polypeptide representing artificial human antibody CDR-H2 region
IWFDGSNR

SEQ ID NO: 12750 - protein, 7 aa, Artificial Sequence
  Synthetic polypeptide representing artificial human antibody CDR-H2 region
INHVGST

SEQ ID NO: 12751 - protein, 8 aa, Artificial Sequence
  Synthetic polypeptide representing artificial human antibody CDR-H2 region
ISYDGSNK

SEQ ID NO: 12752 - protein, 8 aa, Artificial Sequence
  Synthetic polypeptide representing artificial human antibody CDR-H2 region
INAGNGNT

SEQ ID NO: 12753 - protein, 8 aa, Artificial Sequence
  Synthetic polypeptide representing artificial human antibody CDR-H2 region
IKHDGSET

SEQ ID NO: 12754 - protein, 8 aa, Artificial Sequence
  Synthetic polypeptide representing artificial human antibody CDR-H2 region
ITWDSGVL

SEQ ID NO: 12755 - protein, 8 aa, Artificial Sequence
  Synthetic polypeptide representing artificial human antibody CDR-H2 region
ISYDGSDK

SEQ ID NO: 12756 - protein, 8 aa, Artificial Sequence
  Synthetic polypeptide representing artificial human antibody CDR-H2 region
ISSSGSTI

SEQ ID NO: 12757 - protein, 7 aa, Artificial Sequence
  Synthetic polypeptide representing artificial human antibody CDR-H2 region
IYHSGTT

SEQ ID NO: 12758 - protein, 8 aa, Artificial Sequence
  Synthetic polypeptide representing artificial human antibody CDR-H2 region
ISYDGSNK

SEQ ID NO: 12759 - protein, 8 aa, Artificial Sequence
  Synthetic polypeptide representing artificial human antibody CDR-H2 region
ISYDGSSK

SEQ ID NO: 12760 - protein, 9 aa, Artificial Sequence
  Synthetic polypeptide representing artificial human antibody CDR-H2 region
TYYRSKWYN

SEQ ID NO: 12761 - protein, 7 aa, Artificial Sequence
  Synthetic polypeptide representing artificial human antibody CDR-H2 region
IYYSGST

SEQ ID NO: 12762 - protein, 8 aa, Artificial Sequence
  Synthetic polypeptide representing artificial human antibody CDR-H2 region
IKVGDGDT

SEQ ID NO: 12763 - protein, 8 aa, Artificial Sequence
  Synthetic polypeptide representing artificial human antibody CDR-H2 region
ISWNSGSI

SEQ ID NO: 12764 - protein, 7 aa, Artificial Sequence
  Synthetic polypeptide representing artificial human antibody CDR-H2 region
FHSSGVS

SEQ ID NO: 12765 - protein, 7 aa, Artificial Sequence
  Synthetic polypeptide representing artificial human antibody CDR-H2 region
IYHTGIT

SEQ ID NO: 12766 - protein, 7 aa, Artificial Sequence
  Synthetic polypeptide representing artificial human antibody CDR-H2 region
IYSSGST

SEQ ID NO: 12767 - protein, 8 aa, Artificial Sequence
  Synthetic polypeptide representing artificial human antibody CDR-H2 region
ISYSGSTI

SEQ ID NO: 12768 - protein, 10 aa, Artificial Sequence
  Synthetic polypeptide representing artificial human antibody CDR-H2 region
IKSKTDGETT

SEQ ID NO: 12769 - protein, 7 aa, Artificial Sequence
  Synthetic polypeptide representing artificial human antibody CDR-H2 region
INHSGST

SEQ ID NO: 12770 - protein, 8 aa, Artificial Sequence
  Synthetic polypeptide representing artificial human antibody CDR-H2 region
IFPHDSDV

SEQ ID NO: 12771 - protein, 8 aa, Artificial Sequence
  Synthetic polypeptide representing artificial human antibody CDR-H2 region
ISASGTST

SEQ ID NO: 12772 - protein, 8 aa, Artificial Sequence
  Synthetic polypeptide representing artificial human antibody CDR-H2 region
ISTYTGNT

SEQ ID NO: 12773 - protein, 7 aa, Artificial Sequence
  Synthetic polypeptide representing artificial human antibody CDR-H2 region
IYYSGYT

SEQ ID NO: 12774 - protein, 8 aa, Artificial Sequence
  Synthetic polypeptide representing artificial human antibody CDR-H2 region
IYYDGSDQ

SEQ ID NO: 12775 - protein, 8 aa, Artificial Sequence
  Synthetic polypeptide representing artificial human antibody CDR-H2 region
ISWDGGST

SEQ ID NO: 12776 - protein, 8 aa, Artificial Sequence
  Synthetic polypeptide representing artificial human antibody CDR-H2 region
ISYDGSNK

SEQ ID NO: 12777 - protein, 8 aa, Artificial Sequence
  Synthetic polypeptide representing artificial human antibody CDR-H2 region
IYPGDSDT

SEQ ID NO: 12778 - protein, 7 aa, Artificial Sequence
  Synthetic polypeptide representing artificial human antibody CDR-H2 region
IYYSGST

SEQ ID NO: 12779 - protein, 8 aa, Artificial Sequence
  Synthetic polypeptide representing artificial human antibody CDR-H2 region
INVGNGYT

SEQ ID NO: 12780 - protein, 10 aa, Artificial Sequence
  Synthetic polypeptide representing artificial human antibody CDR-H2 region
ISNIIYGATT

SEQ ID NO: 12781 - protein, 8 aa, Artificial Sequence
  Synthetic polypeptide representing artificial human antibody CDR-H2 region
INTDTGDP

SEQ ID NO: 12782 - protein, 8 aa, Artificial Sequence
  Synthetic polypeptide representing artificial human antibody CDR-H2 region
VDWNGDNT

SEQ ID NO: 12783 - protein, 7 aa, Artificial Sequence
  Synthetic polypeptide representing artificial human antibody CDR-H2 region
ISWDDDK

SEQ ID NO: 12784 - protein, 8 aa, Artificial Sequence
  Synthetic polypeptide representing artificial human antibody CDR-H2 region
ISGSGGST

SEQ ID NO: 12785 - protein, 8 aa, Artificial Sequence
  Synthetic polypeptide representing artificial human antibody CDR-H2 region
ISWDGHQT

SEQ ID NO: 12786 - protein, 7 aa, Artificial Sequence
  Synthetic polypeptide representing artificial human antibody CDR-H2 region
IYYSGST

SEQ ID NO: 12787 - protein, 7 aa, Artificial Sequence
  Synthetic polypeptide representing artificial human antibody CDR-H2 region
IYYSGST

SEQ ID NO: 12788 - protein, 8 aa, Artificial Sequence
  Synthetic polypeptide representing artificial human antibody CDR-H2 region
IWYDGSNK

SEQ ID NO: 12789 - protein, 8 aa, Artificial Sequence
  Synthetic polypeptide representing artificial human antibody CDR-H2 region
FDPEDGET

SEQ ID NO: 12790 - protein, 7 aa, Artificial Sequence
  Synthetic polypeptide representing artificial human antibody CDR-H2 region
IYPSGST

SEQ ID NO: 12791 - protein, 8 aa, Artificial Sequence
  Synthetic polypeptide representing artificial human antibody CDR-H2 region
ISDTGVST

SEQ ID NO: 12792 - protein, 7 aa, Artificial Sequence
  Synthetic polypeptide representing artificial human antibody CDR-H2 region
IYYSGST

SEQ ID NO: 12793 - protein, 7 aa, Artificial Sequence
  Synthetic polypeptide representing artificial human antibody CDR-H2 region
IFPSGST

SEQ ID NO: 12794 - protein, 8 aa, Artificial Sequence
  Synthetic polypeptide representing artificial human antibody CDR-H2 region
INPNSGGT

SEQ ID NO: 12795 - protein, 7 aa, Artificial Sequence
  Synthetic polypeptide representing artificial human antibody CDR-H2 region
IYYSGST

SEQ ID NO: 12796 - protein, 8 aa, Artificial Sequence
  Synthetic polypeptide representing artificial human antibody CDR-H2 region
IWYDGSNK

SEQ ID NO: 12797 - protein, 10 aa, Artificial Sequence
  Synthetic polypeptide representing artificial human antibody CDR-H2 region
IRSKAYGGTT

SEQ ID NO: 12798 - protein, 8 aa, Artificial Sequence
  Synthetic polypeptide representing artificial human antibody CDR-H2 region
INPNSGGT

SEQ ID NO: 12799 - protein, 7 aa, Artificial Sequence
  Synthetic polypeptide representing artificial human antibody CDR-H2 region
IYYSGST

SEQ ID NO: 12800 - protein, 8 aa, Artificial Sequence
  Synthetic polypeptide representing artificial human antibody CDR-H2 region
IYGNTGNT

SEQ ID NO: 12801 - protein, 8 aa, Artificial Sequence
  Synthetic polypeptide representing artificial human antibody CDR-H2 region
FDPEDGET

SEQ ID NO: 12802 - protein, 7 aa, Artificial Sequence
  Synthetic polypeptide representing artificial human antibody CDR-H2 region
ISSGGRT

SEQ ID NO: 12803 - protein, 8 aa, Artificial Sequence
  Synthetic polypeptide representing artificial human antibody CDR-H2 region
FDPEDGET

SEQ ID NO: 12804 - protein, 7 aa, Artificial Sequence
  Synthetic polypeptide representing artificial human antibody CDR-H2 region
IYYSGST

SEQ ID NO: 12805 - protein, 7 aa, Artificial Sequence
  Synthetic polypeptide representing artificial human antibody CDR-H2 region
IYWDDDK

SEQ ID NO: 12806 - protein, 8 aa, Artificial Sequence
  Synthetic polypeptide representing artificial human antibody CDR-H2 region
INPNSGGT

SEQ ID NO: 12807 - protein, 8 aa, Artificial Sequence
  Synthetic polypeptide representing artificial human antibody CDR-H2 region
FDPTGGPT

SEQ ID NO: 12808 - protein, 7 aa, Artificial Sequence
  Synthetic polypeptide representing artificial human antibody CDR-H2 region
IYSSGST

SEQ ID NO: 12809 - protein, 8 aa, Artificial Sequence
  Synthetic polypeptide representing artificial human antibody CDR-H2 region
IYPGDSDT

SEQ ID NO: 12810 - protein, 8 aa, Artificial Sequence
  Synthetic polypeptide representing artificial human antibody CDR-H2 region
FDPEDGET

SEQ ID NO: 12811 - protein, 7 aa, Artificial Sequence
  Synthetic polypeptide representing artificial human antibody CDR-H2 region
IYSGGST

SEQ ID NO: 12812 - protein, 8 aa, Artificial Sequence
  Synthetic polypeptide representing artificial human antibody CDR-H2 region
IGLHGTTL

SEQ ID NO: 12813 - protein, 8 aa, Artificial Sequence
  Synthetic polypeptide representing artificial human antibody CDR-H2 region
FDPEDGET

SEQ ID NO: 12814 - protein, 8 aa, Artificial Sequence
  Synthetic polypeptide representing artificial human antibody CDR-H2 region
VKQDGSEK

SEQ ID NO: 12815 - protein, 8 aa, Artificial Sequence
  Synthetic polypeptide representing artificial human antibody CDR-H2 region
FDPEDGET

SEQ ID NO: 12816 - protein, 8 aa, Artificial Sequence
  Synthetic polypeptide representing artificial human antibody CDR-H2 region
ISGSGDRT

SEQ ID NO: 12817 - protein, 7 aa, Artificial Sequence
  Synthetic polypeptide representing artificial human antibody CDR-H2 region
ISYSGST

SEQ ID NO: 12818 - protein, 7 aa, Artificial Sequence
  Synthetic polypeptide representing artificial human antibody CDR-H2 region
IFSNDEK

SEQ ID NO: 12819 - protein, 8 aa, Artificial Sequence
  Synthetic polypeptide representing artificial human antibody CDR-H2 region
ISGSGRNT

SEQ ID NO: 12820 - protein, 7 aa, Artificial Sequence
  Synthetic polypeptide representing artificial human antibody CDR-H2 region
IYTSGST

SEQ ID NO: 12821 - protein, 8 aa, Artificial Sequence
  Synthetic polypeptide representing artificial human antibody CDR-H2 region
ITSDGSSA

SEQ ID NO: 12822 - protein, 8 aa, Artificial Sequence
  Synthetic polypeptide representing artificial human antibody CDR-H2 region
ISRSSRNI

SEQ ID NO: 12823 - protein, 8 aa, Artificial Sequence
  Synthetic polypeptide representing artificial human antibody CDR-H2 region
ISYDGSNK

SEQ ID NO: 12824 - protein, 8 aa, Artificial Sequence
  Synthetic polypeptide representing artificial human antibody CDR-H2 region
ISVSGDTP

SEQ ID NO: 12825 - protein, 8 aa, Artificial Sequence
  Synthetic polypeptide representing artificial human antibody CDR-H2 region
IYPGDSDT

SEQ ID NO: 12826 - protein, 8 aa, Artificial Sequence
  Synthetic polypeptide representing artificial human antibody CDR-H2 region
ISSSGSTI

SEQ ID NO: 12827 - protein, 8 aa, Artificial Sequence
  Synthetic polypeptide representing artificial human antibody CDR-H2 region
IIPILGIA

SEQ ID NO: 12828 - protein, 7 aa, Artificial Sequence
  Synthetic polypeptide representing artificial human antibody CDR-H2 region
INHSGST

SEQ ID NO: 12829 - protein, 7 aa, Artificial Sequence
  Synthetic polypeptide representing artificial human antibody CDR-H2 region
IYYSGST

SEQ ID NO: 12830 - protein, 10 aa, Artificial Sequence
  Synthetic polypeptide representing artificial human antibody CDR-H2 region
IKSKTDGGTT

SEQ ID NO: 12831 - protein, 8 aa, Artificial Sequence
  Synthetic polypeptide representing artificial human antibody CDR-H2 region
ISYDGSNK

SEQ ID NO: 12832 - protein, 8 aa, Artificial Sequence
  Synthetic polypeptide representing artificial human antibody CDR-H2 region
ISAYNGNT

SEQ ID NO: 12833 - protein, 10 aa, Artificial Sequence
  Synthetic polypeptide representing artificial human antibody CDR-H2 region
IRNKPNSYTM

SEQ ID NO: 12834 - protein, 8 aa, Artificial Sequence
  Synthetic polypeptide representing artificial human antibody CDR-H2 region
INPNSGGT

SEQ ID NO: 12835 - protein, 7 aa, Artificial Sequence
  Synthetic polypeptide representing artificial human antibody CDR-H2 region
IYWDDDK

SEQ ID NO: 12836 - protein, 7 aa, Artificial Sequence
  Synthetic polypeptide representing artificial human antibody CDR-H2 region
IHSSGDT

SEQ ID NO: 12837 - protein, 8 aa, Artificial Sequence
  Synthetic polypeptide representing artificial human antibody CDR-H2 region
IKQDGSEK

SEQ ID NO: 12838 - protein, 8 aa, Artificial Sequence
  Synthetic polypeptide representing artificial human antibody CDR-H2 region
ISGDGGST

SEQ ID NO: 12839 - protein, 7 aa, Artificial Sequence
  Synthetic polypeptide representing artificial human antibody CDR-H2 region
IFTRGST

SEQ ID NO: 12840 - protein, 8 aa, Artificial Sequence
  Synthetic polypeptide representing artificial human antibody CDR-H2 region
IKNDGSEE

SEQ ID NO: 12841 - protein, 7 aa, Artificial Sequence
  Synthetic polypeptide representing artificial human antibody CDR-H2 region
IYYSGST

SEQ ID NO: 12842 - protein, 8 aa, Artificial Sequence
  Synthetic polypeptide representing artificial human antibody CDR-H2 region
FDPEDGET

SEQ ID NO: 12843 - protein, 7 aa, Artificial Sequence
  Synthetic polypeptide representing artificial human antibody CDR-H2 region
IYWDDDK

SEQ ID NO: 12844 - protein, 8 aa, Artificial Sequence
  Synthetic polypeptide representing artificial human antibody CDR-H2 region
FDPEDGET

SEQ ID NO: 12845 - protein, 7 aa, Artificial Sequence
  Synthetic polypeptide representing artificial human antibody CDR-H2 region
IYYSGST

SEQ ID NO: 12846 - protein, 7 aa, Artificial Sequence
  Synthetic polypeptide representing artificial human antibody CDR-H2 region
INHSGST

SEQ ID NO: 12847 - protein, 7 aa, Artificial Sequence
  Synthetic polypeptide representing artificial human antibody CDR-H2 region
INHSGST

SEQ ID NO: 12848 - protein, 8 aa, Artificial Sequence
  Synthetic polypeptide representing artificial human antibody CDR-H2 region
INPNSGGT

SEQ ID NO: 12849 - protein, 9 aa, Artificial Sequence
  Synthetic polypeptide representing artificial human antibody CDR-H2 region
TYYRSKWYN

SEQ ID NO: 12850 - protein, 7 aa, Artificial Sequence
  Synthetic polypeptide representing artificial human antibody CDR-H2 region
IYYSGST

SEQ ID NO: 12851 - protein, 7 aa, Artificial Sequence
  Synthetic polypeptide representing artificial human antibody CDR-H2 region
IYTSGST

SEQ ID NO: 12852 - protein, 8 aa, Artificial Sequence
  Synthetic polypeptide representing artificial human antibody CDR-H2 region
ISGRGDDT

SEQ ID NO: 12853 - protein, 8 aa, Artificial Sequence
  Synthetic polypeptide representing artificial human antibody CDR-H2 region
IWYDGSNK

SEQ ID NO: 12854 - protein, 8 aa, Artificial Sequence
  Synthetic polypeptide representing artificial human antibody CDR-H2 region
ISYDGSNK

SEQ ID NO: 12855 - protein, 8 aa, Artificial Sequence
  Synthetic polypeptide representing artificial human antibody CDR-H2 region
IIPILGVI

SEQ ID NO: 12856 - protein, 8 aa, Artificial Sequence
  Synthetic polypeptide representing artificial human antibody CDR-H2 region
IWYDGSNK

SEQ ID NO: 12857 - protein, 7 aa, Artificial Sequence
  Synthetic polypeptide representing artificial human antibody CDR-H2 region
IYSGGST

SEQ ID NO: 12858 - protein, 9 aa, Artificial Sequence
  Synthetic polypeptide representing artificial human antibody CDR-H2 region
TYYRSKWYN

SEQ ID NO: 12859 - protein, 8 aa, Artificial Sequence
  Synthetic polypeptide representing artificial human antibody CDR-H2 region
FDPLDGES

SEQ ID NO: 12860 - protein, 8 aa, Artificial Sequence
  Synthetic polypeptide representing artificial human antibody CDR-H2 region
MNPKSGST

SEQ ID NO: 12861 - protein, 8 aa, Artificial Sequence
  Synthetic polypeptide representing artificial human antibody CDR-H2 region
IWYDGSIK

SEQ ID NO: 12862 - protein, 8 aa, Artificial Sequence
  Synthetic polypeptide representing artificial human antibody CDR-H2 region
INARGNSK

SEQ ID NO: 12863 - protein, 8 aa, Artificial Sequence
  Synthetic polypeptide representing artificial human antibody CDR-H2 region
ISGSGGST

SEQ ID NO: 12864 - protein, 7 aa, Artificial Sequence
  Synthetic polypeptide representing artificial human antibody CDR-H2 region
IYYSGST

SEQ ID NO: 12865 - protein, 7 aa, Artificial Sequence
  Synthetic polypeptide representing artificial human antibody CDR-H2 region
IYTSGST

SEQ ID NO: 12866 - protein, 8 aa, Artificial Sequence
  Synthetic polypeptide representing artificial human antibody CDR-H2 region
MNPNSGDT

SEQ ID NO: 12867 - protein, 8 aa, Artificial Sequence
  Synthetic polypeptide representing artificial human antibody CDR-H2 region
ISGDGKST

SEQ ID NO: 12868 - protein, 8 aa, Artificial Sequence
  Synthetic polypeptide representing artificial human antibody CDR-H2 region
IRSSRSAI

SEQ ID NO: 12869 - protein, 8 aa, Artificial Sequence
  Synthetic polypeptide representing artificial human antibody CDR-H2 region
ISYDGSNK

SEQ ID NO: 12870 - protein, 7 aa, Artificial Sequence
  Synthetic polypeptide representing artificial human antibody CDR-H2 region
IYSGGST

SEQ ID NO: 12871 - protein, 7 aa, Artificial Sequence
  Synthetic polypeptide representing artificial human antibody CDR-H2 region
IDWDDDK

SEQ ID NO: 12872 - protein, 7 aa, Artificial Sequence
  Synthetic polypeptide representing artificial human antibody CDR-H2 region
ISPSGDT

SEQ ID NO: 12873 - protein, 7 aa, Artificial Sequence
  Synthetic polypeptide representing artificial human antibody CDR-H2 region
IYYSGST

SEQ ID NO: 12874 - protein, 8 aa, Artificial Sequence
  Synthetic polypeptide representing artificial human antibody CDR-H2 region
IWYDGSNK

SEQ ID NO: 12875 - protein, 8 aa, Artificial Sequence
  Synthetic polypeptide representing artificial human antibody CDR-H2 region
ISSSGSAI

SEQ ID NO: 12876 - protein, 8 aa, Artificial Sequence
  Synthetic polypeptide representing artificial human antibody CDR-H2 region
INPSGGST

SEQ ID NO: 12877 - protein, 7 aa, Artificial Sequence
  Synthetic polypeptide representing artificial human antibody CDR-H2 region
IYWDGDK

SEQ ID NO: 12878 - protein, 8 aa, Artificial Sequence
  Synthetic polypeptide representing artificial human antibody CDR-H2 region
ISYDGSNK

SEQ ID NO: 12879 - protein, 8 aa, Artificial Sequence
  Synthetic polypeptide representing artificial human antibody CDR-H2 region
IYNDGSNK

SEQ ID NO: 12880 - protein, 7 aa, Artificial Sequence
  Synthetic polypeptide representing artificial human antibody CDR-H2 region
IFYSGST

SEQ ID NO: 12881 - protein, 8 aa, Artificial Sequence
  Synthetic polypeptide representing artificial human antibody CDR-H2 region
IWYDGSNK

SEQ ID NO: 12882 - protein, 8 aa, Artificial Sequence
  Synthetic polypeptide representing artificial human antibody CDR-H2 region
FDPEDGET

SEQ ID NO: 12883 - protein, 8 aa, Artificial Sequence
  Synthetic polypeptide representing artificial human antibody CDR-H2 region
ISSSGSTI

SEQ ID NO: 12884 - protein, 7 aa, Artificial Sequence
  Synthetic polypeptide representing artificial human antibody CDR-H2 region
IYYSGST

SEQ ID NO: 12885 - protein, 7 aa, Artificial Sequence
  Synthetic polypeptide representing artificial human antibody CDR-H2 region
IDWDDDK

SEQ ID NO: 12886 - protein, 7 aa, Artificial Sequence
  Synthetic polypeptide representing artificial human antibody CDR-H2 region
IYWDDDK

SEQ ID NO: 12887 - protein, 8 aa, Artificial Sequence
  Synthetic polypeptide representing artificial human antibody CDR-H2 region
ISYDGSNK

SEQ ID NO: 12888 - protein, 7 aa, Artificial Sequence
  Synthetic polypeptide representing artificial human antibody CDR-H2 region
IYTSGST

SEQ ID NO: 12889 - protein, 7 aa, Artificial Sequence
  Synthetic polypeptide representing artificial human antibody CDR-H2 region
IYHSGST

SEQ ID NO: 12890 - protein, 8 aa, Artificial Sequence
  Synthetic polypeptide representing artificial human antibody CDR-H2 region
INPSGGST

SEQ ID NO: 12891 - protein, 8 aa, Artificial Sequence
  Synthetic polypeptide representing artificial human antibody CDR-H2 region
FDPEDGET

SEQ ID NO: 12892 - protein, 10 aa, Artificial Sequence
  Synthetic polypeptide representing artificial human antibody CDR-H2 region
IRIKANAYAT

SEQ ID NO: 12893 - protein, 8 aa, Artificial Sequence
  Synthetic polypeptide representing artificial human antibody CDR-H2 region
ISSSGSTI

SEQ ID NO: 12894 - protein, 8 aa, Artificial Sequence
  Synthetic polypeptide representing artificial human antibody CDR-H2 region
IYPDDSDT

SEQ ID NO: 12895 - protein, 8 aa, Artificial Sequence
  Synthetic polypeptide representing artificial human antibody CDR-H2 region
INPNSGGT

SEQ ID NO: 12896 - protein, 8 aa, Artificial Sequence
  Synthetic polypeptide representing artificial human antibody CDR-H2 region
ISFDGSTR

SEQ ID NO: 12897 - protein, 8 aa, Artificial Sequence
  Synthetic polypeptide representing artificial human antibody CDR-H2 region
FDPEDGET

SEQ ID NO: 12898 - protein, 8 aa, Artificial Sequence
  Synthetic polypeptide representing artificial human antibody CDR-H2 region
ISYDGSNK

SEQ ID NO: 12899 - protein, 8 aa, Artificial Sequence
  Synthetic polypeptide representing artificial human antibody CDR-H2 region
ISYDGSNK

SEQ ID NO: 12900 - protein, 8 aa, Artificial Sequence
  Synthetic polypeptide representing artificial human antibody CDR-H2 region
IKQDGSEK

SEQ ID NO: 12901 - protein, 7 aa, Artificial Sequence
  Synthetic polypeptide representing artificial human antibody CDR-H2 region
IYYSGST

SEQ ID NO: 12902 - protein, 8 aa, Artificial Sequence
  Synthetic polypeptide representing artificial human antibody CDR-H2 region
ISSSGSTI

SEQ ID NO: 12903 - protein, 8 aa, Artificial Sequence
  Synthetic polypeptide representing artificial human antibody CDR-H2 region
FDPEDGET

SEQ ID NO: 12904 - protein, 7 aa, Artificial Sequence
  Synthetic polypeptide representing artificial human antibody CDR-H2 region
IYHSGST

SEQ ID NO: 12905 - protein, 7 aa, Artificial Sequence
  Synthetic polypeptide representing artificial human antibody CDR-H2 region
IYSGGST

SEQ ID NO: 12906 - protein, 7 aa, Artificial Sequence
  Synthetic polypeptide representing artificial human antibody CDR-H2 region
IYYSGST

SEQ ID NO: 12907 - protein, 8 aa, Artificial Sequence
  Synthetic polypeptide representing artificial human antibody CDR-H2 region
ISGSGGST

SEQ ID NO: 12908 - protein, 8 aa, Artificial Sequence
  Synthetic polypeptide representing artificial human antibody CDR-H2 region
FDPEDGET

SEQ ID NO: 12909 - protein, 7 aa, Artificial Sequence
  Synthetic polypeptide representing artificial human antibody CDR-H2 region
IFSNDEK

SEQ ID NO: 12910 - protein, 10 aa, Artificial Sequence
  Synthetic polypeptide representing artificial human antibody CDR-H2 region
IRSKAYGGTT

SEQ ID NO: 12911 - protein, 7 aa, Artificial Sequence
  Synthetic polypeptide representing artificial human antibody CDR-H2 region
IYWDDDK

SEQ ID NO: 12912 - protein, 7 aa, Artificial Sequence
  Synthetic polypeptide representing artificial human antibody CDR-H2 region
ISRSAST

SEQ ID NO: 12913 - protein, 8 aa, Artificial Sequence
  Synthetic polypeptide representing artificial human antibody CDR-H2 region
INSDGSST

SEQ ID NO: 12914 - protein, 7 aa, Artificial Sequence
  Synthetic polypeptide representing artificial human antibody CDR-H2 region
IYTSGST

SEQ ID NO: 12915 - protein, 7 aa, Artificial Sequence
  Synthetic polypeptide representing artificial human antibody CDR-H2 region
IYYSGST

SEQ ID NO: 12916 - protein, 7 aa, Artificial Sequence
  Synthetic polypeptide representing artificial human antibody CDR-H2 region
IYYSGST

SEQ ID NO: 12917 - protein, 7 aa, Artificial Sequence
  Synthetic polypeptide representing artificial human antibody CDR-H2 region
IYYSGST

SEQ ID NO: 12918 - protein, 8 aa, Artificial Sequence
  Synthetic polypeptide representing artificial human antibody CDR-H2 region
ISPSSTSK

SEQ ID NO: 12919 - protein, 8 aa, Artificial Sequence
  Synthetic polypeptide representing artificial human antibody CDR-H2 region
ISAYNGNT

SEQ ID NO: 12920 - protein, 8 aa, Artificial Sequence
  Synthetic polypeptide representing artificial human antibody CDR-H2 region
FDPEDGET

SEQ ID NO: 12921 - protein, 8 aa, Artificial Sequence
  Synthetic polypeptide representing artificial human antibody CDR-H2 region
FDPEDGET

SEQ ID NO: 12922 - protein, 8 aa, Artificial Sequence
  Synthetic polypeptide representing artificial human antibody CDR-H2 region
FDPEDGET

SEQ ID NO: 12923 - protein, 7 aa, Artificial Sequence
  Synthetic polypeptide representing artificial human antibody CDR-H2 region
IYYSGST

SEQ ID NO: 12924 - protein, 7 aa, Artificial Sequence
  Synthetic polypeptide representing artificial human antibody CDR-H2 region
IYTSGST

SEQ ID NO: 12925 - protein, 8 aa, Artificial Sequence
  Synthetic polypeptide representing artificial human antibody CDR-H2 region
ISDTGGKT

SEQ ID NO: 12926 - protein, 8 aa, Artificial Sequence
  Synthetic polypeptide representing artificial human antibody CDR-H2 region
ISGSGGST

SEQ ID NO: 12927 - protein, 8 aa, Artificial Sequence
  Synthetic polypeptide representing artificial human antibody CDR-H2 region
IWYDGSNK

SEQ ID NO: 12928 - protein, 7 aa, Artificial Sequence
  Synthetic polypeptide representing artificial human antibody CDR-H2 region
IYYSGST

SEQ ID NO: 12929 - protein, 7 aa, Artificial Sequence
  Synthetic polypeptide representing artificial human antibody CDR-H2 region
IYTSGST

SEQ ID NO: 12930 - protein, 8 aa, Artificial Sequence
  Synthetic polypeptide representing artificial human antibody CDR-H2 region
IIPILGGP

SEQ ID NO: 12931 - protein, 8 aa, Artificial Sequence
  Synthetic polypeptide representing artificial human antibody CDR-H2 region
ISGDGKST

SEQ ID NO: 12932 - protein, 7 aa, Artificial Sequence
  Synthetic polypeptide representing artificial human antibody CDR-H2 region
IFSNDEK

SEQ ID NO: 12933 - protein, 7 aa, Artificial Sequence
  Synthetic polypeptide representing artificial human antibody CDR-H2 region
IYWDDDK

SEQ ID NO: 12934 - protein, 8 aa, Artificial Sequence
  Synthetic polypeptide representing artificial human antibody CDR-H2 region
VSYDGSRR

SEQ ID NO: 12935 - protein, 8 aa, Artificial Sequence
  Synthetic polypeptide representing artificial human antibody CDR-H2 region
INSDGSTT

SEQ ID NO: 12936 - protein, 8 aa, Artificial Sequence
  Synthetic polypeptide representing artificial human antibody CDR-H2 region
INPNSGGT

SEQ ID NO: 12937 - protein, 7 aa, Artificial Sequence
  Synthetic polypeptide representing artificial human antibody CDR-H2 region
IDWDDDK

SEQ ID NO: 12938 - protein, 8 aa, Artificial Sequence
  Synthetic polypeptide representing artificial human antibody CDR-H2 region
FDPEDGET

SEQ ID NO: 12939 - protein, 8 aa, Artificial Sequence
  Synthetic polypeptide representing artificial human antibody CDR-H2 region
IKQDGSEK

SEQ ID NO: 12940 - protein, 8 aa, Artificial Sequence
  Synthetic polypeptide representing artificial human antibody CDR-H2 region
ISWNSGSI

SEQ ID NO: 12941 - protein, 8 aa, Artificial Sequence
  Synthetic polypeptide representing artificial human antibody CDR-H2 region
VIPILGIA

SEQ ID NO: 12942 - protein, 8 aa, Artificial Sequence
  Synthetic polypeptide representing artificial human antibody CDR-H2 region
ITSTSSYT

SEQ ID NO: 12943 - protein, 7 aa, Artificial Sequence
  Synthetic polypeptide representing artificial human antibody CDR-H2 region
IYYSGST

SEQ ID NO: 12944 - protein, 8 aa, Artificial Sequence
  Synthetic polypeptide representing artificial human antibody CDR-H2 region
MNPNSGNT

SEQ ID NO: 12945 - protein, 8 aa, Artificial Sequence
  Synthetic polypeptide representing artificial human antibody CDR-H2 region
ISSSSSYI

SEQ ID NO: 12946 - protein, 7 aa, Artificial Sequence
  Synthetic polypeptide representing artificial human antibody CDR-H2 region
INHSGST

SEQ ID NO: 12947 - protein, 8 aa, Artificial Sequence
  Synthetic polypeptide representing artificial human antibody CDR-H2 region
FDPEDGET

SEQ ID NO: 12948 - protein, 7 aa, Artificial Sequence
  Synthetic polypeptide representing artificial human antibody CDR-H2 region
IYYSGST

SEQ ID NO: 12949 - protein, 7 aa, Artificial Sequence
  Synthetic polypeptide representing artificial human antibody CDR-H2 region
IYTSGST

SEQ ID NO: 12950 - protein, 8 aa, Artificial Sequence
  Synthetic polypeptide representing artificial human antibody CDR-H2 region
ISAYNGNT

SEQ ID NO: 12951 - protein, 8 aa, Artificial Sequence
  Synthetic polypeptide representing artificial human antibody CDR-H2 region
ITGSSDNT

SEQ ID NO: 12952 - protein, 8 aa, Artificial Sequence
  Synthetic polypeptide representing artificial human antibody CDR-H2 region
FDPEDGET

SEQ ID NO: 12953 - protein, 8 aa, Artificial Sequence
  Synthetic polypeptide representing artificial human antibody CDR-H2 region
VTPNSGNT

SEQ ID NO: 12954 - protein, 7 aa, Artificial Sequence
  Synthetic polypeptide representing artificial human antibody CDR-H2 region
IYTSGST

SEQ ID NO: 12955 - protein, 7 aa, Artificial Sequence
  Synthetic polypeptide representing artificial human antibody CDR-H2 region
IFSNDEK

SEQ ID NO: 12956 - protein, 8 aa, Artificial Sequence
  Synthetic polypeptide representing artificial human antibody CDR-H2 region
ISPYNGQT

SEQ ID NO: 12957 - protein, 8 aa, Artificial Sequence
  Synthetic polypeptide representing artificial human antibody CDR-H2 region
ISWNSGSI

SEQ ID NO: 12958 - protein, 7 aa, Artificial Sequence
  Synthetic polypeptide representing artificial human antibody CDR-H2 region
IFSNDEK

SEQ ID NO: 12959 - protein, 7 aa, Artificial Sequence
  Synthetic polypeptide representing artificial human antibody CDR-H2 region
IYYSGST

SEQ ID NO: 12960 - protein, 7 aa, Artificial Sequence
  Synthetic polypeptide representing artificial human antibody CDR-H2 region
IYTSGST

SEQ ID NO: 12961 - protein, 8 aa, Artificial Sequence
  Synthetic polypeptide representing artificial human antibody CDR-H2 region
INPSGGST

SEQ ID NO: 12962 - protein, 9 aa, Artificial Sequence
  Synthetic polypeptide representing artificial human antibody CDR-H2 region
TYYRSKWYN

SEQ ID NO: 12963 - protein, 8 aa, Artificial Sequence
  Synthetic polypeptide representing artificial human antibody CDR-H2 region
INPNSGGT

SEQ ID NO: 12964 - protein, 8 aa, Artificial Sequence
  Synthetic polypeptide representing artificial human antibody CDR-H2 region
VSYDGRKE

SEQ ID NO: 12965 - protein, 8 aa, Artificial Sequence
  Synthetic polypeptide representing artificial human antibody CDR-H2 region
ISSDGGAT

SEQ ID NO: 12966 - protein, 7 aa, Artificial Sequence
  Synthetic polypeptide representing artificial human antibody CDR-H2 region
IYYSGST

SEQ ID NO: 12967 - protein, 8 aa, Artificial Sequence
  Synthetic polypeptide representing artificial human antibody CDR-H2 region
FDPEDGET

SEQ ID NO: 12968 - protein, 7 aa, Artificial Sequence
  Synthetic polypeptide representing artificial human antibody CDR-H2 region
IYTSGST

SEQ ID NO: 12969 - protein, 10 aa, Artificial Sequence
  Synthetic polypeptide representing artificial human antibody CDR-H2 region
IKSKTDGGTT

SEQ ID NO: 12970 - protein, 8 aa, Artificial Sequence
  Synthetic polypeptide representing artificial human antibody CDR-H2 region
ISAYTGIA

SEQ ID NO: 12971 - protein, 8 aa, Artificial Sequence
  Synthetic polypeptide representing artificial human antibody CDR-H2 region
VDPEDDEI

SEQ ID NO: 12972 - protein, 8 aa, Artificial Sequence
  Synthetic polypeptide representing artificial human antibody CDR-H2 region
FDPEDGET

SEQ ID NO: 12973 - protein, 8 aa, Artificial Sequence
  Synthetic polypeptide representing artificial human antibody CDR-H2 region
IWYDGSNK

SEQ ID NO: 12974 - protein, 7 aa, Artificial Sequence
  Synthetic polypeptide representing artificial human antibody CDR-H2 region
IYYSGST

SEQ ID NO: 12975 - protein, 8 aa, Artificial Sequence
  Synthetic polypeptide representing artificial human antibody CDR-H2 region
ISGSGGAT

SEQ ID NO: 12976 - protein, 8 aa, Artificial Sequence
  Synthetic polypeptide representing artificial human antibody CDR-H2 region
IWYDGSNK

SEQ ID NO: 12977 - protein, 7 aa, Artificial Sequence
  Synthetic polypeptide representing artificial human antibody CDR-H2 region
IYSGGST

SEQ ID NO: 12978 - protein, 8 aa, Artificial Sequence
  Synthetic polypeptide representing artificial human antibody CDR-H2 region
INPNSGGT

SEQ ID NO: 12979 - protein, 7 aa, Artificial Sequence
  Synthetic polypeptide representing artificial human antibody CDR-H2 region
IYSGGST

SEQ ID NO: 12980 - protein, 10 aa, Artificial Sequence
  Synthetic polypeptide representing artificial human antibody CDR-H2 region
IKSKTDGGTI

SEQ ID NO: 12981 - protein, 8 aa, Artificial Sequence
  Synthetic polypeptide representing artificial human antibody CDR-H2 region
ISSSSSYI

SEQ ID NO: 12982 - protein, 8 aa, Artificial Sequence
  Synthetic polypeptide representing artificial human antibody CDR-H2 region
ISGSGGST

SEQ ID NO: 12983 - protein, 8 aa, Artificial Sequence
  Synthetic polypeptide representing artificial human antibody CDR-H2 region
INPNSGGT

SEQ ID NO: 12984 - protein, 8 aa, Artificial Sequence
  Synthetic polypeptide representing artificial human antibody CDR-H2 region
ISAYNGNT

SEQ ID NO: 12985 - protein, 8 aa, Artificial Sequence
  Synthetic polypeptide representing artificial human antibody CDR-H2 region
ISYDGSNK

SEQ ID NO: 12986 - protein, 8 aa, Artificial Sequence
  Synthetic polypeptide representing artificial human antibody CDR-H2 region
ISYDGSNK

SEQ ID NO: 12987 - protein, 8 aa, Artificial Sequence
  Synthetic polypeptide representing artificial human antibody CDR-H2 region
FDPEDGET

SEQ ID NO: 12988 - protein, 8 aa, Artificial Sequence
  Synthetic polypeptide representing artificial human antibody CDR-H2 region
ISYDGSNK

SEQ ID NO: 12989 - protein, 7 aa, Artificial Sequence
  Synthetic polypeptide representing artificial human antibody CDR-H2 region
IDWDDDK

SEQ ID NO: 12990 - protein, 7 aa, Artificial Sequence
  Synthetic polypeptide representing artificial human antibody CDR-H2 region
IHHSGNT

SEQ ID NO: 12991 - protein, 8 aa, Artificial Sequence
  Synthetic polypeptide representing artificial human antibody CDR-H2 region
ISYDGSNK

SEQ ID NO: 12992 - protein, 8 aa, Artificial Sequence
  Synthetic polypeptide representing artificial human antibody CDR-H2 region
IDPSDSYT

SEQ ID NO: 12993 - protein, 7 aa, Artificial Sequence
  Synthetic polypeptide representing artificial human antibody CDR-H2 region
VYSTGTT

SEQ ID NO: 12994 - protein, 10 aa, Artificial Sequence
  Synthetic polypeptide representing artificial human antibody CDR-H2 region
IRSKAYGGTT

SEQ ID NO: 12995 - protein, 8 aa, Artificial Sequence
  Synthetic polypeptide representing artificial human antibody CDR-H2 region
IIPILGIA

SEQ ID NO: 12996 - protein, 8 aa, Artificial Sequence
  Synthetic polypeptide representing artificial human antibody CDR-H2 region
IWYDGSNK

SEQ ID NO: 12997 - protein, 8 aa, Artificial Sequence
  Synthetic polypeptide representing artificial human antibody CDR-H2 region
MNPNSGNT

SEQ ID NO: 12998 - protein, 8 aa, Artificial Sequence
  Synthetic polypeptide representing artificial human antibody CDR-H2 region
IIPIIGTG

SEQ ID NO: 12999 - protein, 8 aa, Artificial Sequence
  Synthetic polypeptide representing artificial human antibody CDR-H2 region
ISSTSNTI

SEQ ID NO: 13000 - protein, 8 aa, Artificial Sequence
  Synthetic polypeptide representing artificial human antibody CDR-H2 region
ISYDGSNK

SEQ ID NO: 13001 - protein, 8 aa, Artificial Sequence
  Synthetic polypeptide representing artificial human antibody CDR-H2 region
ISGSGGST

SEQ ID NO: 13002 - protein, 10 aa, Artificial Sequence
  Synthetic polypeptide representing artificial human antibody CDR-H2 region
IKSKTDGGTT

SEQ ID NO: 13003 - protein, 7 aa, Artificial Sequence
  Synthetic polypeptide representing artificial human antibody CDR-H2 region
IYYSGST

SEQ ID NO: 13004 - protein, 8 aa, Artificial Sequence
  Synthetic polypeptide representing artificial human antibody CDR-H2 region
ISYDGSNK

SEQ ID NO: 13005 - protein, 8 aa, Artificial Sequence
  Synthetic polypeptide representing artificial human antibody CDR-H2 region
ISYDGSNK

SEQ ID NO: 13006 - protein, 7 aa, Artificial Sequence
  Synthetic polypeptide representing artificial human antibody CDR-H2 region
IGTAGDT

SEQ ID NO: 13007 - protein, 8 aa, Artificial Sequence
  Synthetic polypeptide representing artificial human antibody CDR-H2 region
ISGSGGST

SEQ ID NO: 13008 - protein, 6 aa, Artificial Sequence
  Synthetic polypeptide representing artificial human antibody CDR-H2 region
IYPPAS

SEQ ID NO: 13009 - protein, 8 aa, Artificial Sequence
  Synthetic polypeptide representing artificial human antibody CDR-H2 region
ISSSSSYI

SEQ ID NO: 13010 - protein, 7 aa, Artificial Sequence
  Synthetic polypeptide representing artificial human antibody CDR-H2 region
FYSDGAT

SEQ ID NO: 13011 - protein, 8 aa, Artificial Sequence
  Synthetic polypeptide representing artificial human antibody CDR-H2 region
ISQSGSTL

SEQ ID NO: 13012 - protein, 8 aa, Artificial Sequence
  Synthetic polypeptide representing artificial human antibody CDR-H2 region
ISGDGGST

SEQ ID NO: 13013 - protein, 7 aa, Artificial Sequence
  Synthetic polypeptide representing artificial human antibody CDR-H2 region
IDWDDDK

SEQ ID NO: 13014 - protein, 8 aa, Artificial Sequence
  Synthetic polypeptide representing artificial human antibody CDR-H2 region
VYHGGART

SEQ ID NO: 13015 - protein, 9 aa, Artificial Sequence
  Synthetic polypeptide representing artificial human antibody CDR-H2 region
TYYNSKWFQ

SEQ ID NO: 13016 - protein, 8 aa, Artificial Sequence
  Synthetic polypeptide representing artificial human antibody CDR-H2 region
IWYDGSNK

SEQ ID NO: 13017 - protein, 7 aa, Artificial Sequence
  Synthetic polypeptide representing artificial human antibody CDR-H2 region
IDWDDDK

SEQ ID NO: 13018 - protein, 8 aa, Artificial Sequence
  Synthetic polypeptide representing artificial human antibody CDR-H2 region
ISAYNGNT

SEQ ID NO: 13019 - protein, 8 aa, Artificial Sequence
  Synthetic polypeptide representing artificial human antibody CDR-H2 region
ISYDGSNK

SEQ ID NO: 13020 - protein, 8 aa, Artificial Sequence
  Synthetic polypeptide representing artificial human antibody CDR-H2 region
ISYDGSNK

SEQ ID NO: 13021 - protein, 8 aa, Artificial Sequence
  Synthetic polypeptide representing artificial human antibody CDR-H2 region
IYPGDSDT

SEQ ID NO: 13022 - protein, 8 aa, Artificial Sequence
  Synthetic polypeptide representing artificial human antibody CDR-H2 region
ISYDGSNK

SEQ ID NO: 13023 - protein, 8 aa, Artificial Sequence
  Synthetic polypeptide representing artificial human antibody CDR-H2 region
IDPSDSYT

SEQ ID NO: 13024 - protein, 7 aa, Artificial Sequence
  Synthetic polypeptide representing artificial human antibody CDR-H2 region
IYYSGST

SEQ ID NO: 13025 - protein, 8 aa, Artificial Sequence
  Synthetic polypeptide representing artificial human antibody CDR-H2 region
ISSSSSYI

SEQ ID NO: 13026 - protein, 8 aa, Artificial Sequence
  Synthetic polypeptide representing artificial human antibody CDR-H2 region
FDPEDGET

SEQ ID NO: 13027 - protein, 8 aa, Artificial Sequence
  Synthetic polypeptide representing artificial human antibody CDR-H2 region
INEDGNVI

SEQ ID NO: 13028 - protein, 7 aa, Artificial Sequence
  Synthetic polypeptide representing artificial human antibody CDR-H2 region
IYYSGST

SEQ ID NO: 13029 - protein, 8 aa, Artificial Sequence
  Synthetic polypeptide representing artificial human antibody CDR-H2 region
FDPEDGET

SEQ ID NO: 13030 - protein, 8 aa, Artificial Sequence
  Synthetic polypeptide representing artificial human antibody CDR-H2 region
IYPGDSNP

SEQ ID NO: 13031 - protein, 8 aa, Artificial Sequence
  Synthetic polypeptide representing artificial human antibody CDR-H2 region
ISYDGSNK

SEQ ID NO: 13032 - protein, 7 aa, Artificial Sequence
  Synthetic polypeptide representing artificial human antibody CDR-H2 region
IYYSGST

SEQ ID NO: 13033 - protein, 8 aa, Artificial Sequence
  Synthetic polypeptide representing artificial human antibody CDR-H2 region
ISYDGSNK

SEQ ID NO: 13034 - protein, 8 aa, Artificial Sequence
  Synthetic polypeptide representing artificial human antibody CDR-H2 region
ISGSGGST

SEQ ID NO: 13035 - protein, 10 aa, Artificial Sequence
  Synthetic polypeptide representing artificial human antibody CDR-H2 region
IKSKTDGGTT

SEQ ID NO: 13036 - protein, 8 aa, Artificial Sequence
  Synthetic polypeptide representing artificial human antibody CDR-H2 region
FDPEDGET

SEQ ID NO: 13037 - protein, 8 aa, Artificial Sequence
  Synthetic polypeptide representing artificial human antibody CDR-H2 region
FDPEDGET

SEQ ID NO: 13038 - protein, 8 aa, Artificial Sequence
  Synthetic polypeptide representing artificial human antibody CDR-H2 region
ISAYNGNT

SEQ ID NO: 13039 - protein, 8 aa, Artificial Sequence
  Synthetic polypeptide representing artificial human antibody CDR-H2 region
ISGSGGGT

SEQ ID NO: 13040 - protein, 7 aa, Artificial Sequence
  Synthetic polypeptide representing artificial human antibody CDR-H2 region
IYYSGST

SEQ ID NO: 13041 - protein, 8 aa, Artificial Sequence
  Synthetic polypeptide representing artificial human antibody CDR-H2 region
INAGNGNT

SEQ ID NO: 13042 - protein, 8 aa, Artificial Sequence
  Synthetic polypeptide representing artificial human antibody CDR-H2 region
ISYDGSNK

SEQ ID NO: 13043 - protein, 8 aa, Artificial Sequence
  Synthetic polypeptide representing artificial human antibody CDR-H2 region
ISYDGSNK

SEQ ID NO: 13044 - protein, 8 aa, Artificial Sequence
  Synthetic polypeptide representing artificial human antibody CDR-H2 region
INPSGGST

SEQ ID NO: 13045 - protein, 8 aa, Artificial Sequence
  Synthetic polypeptide representing artificial human antibody CDR-H2 region
ISYDGSNK

SEQ ID NO: 13046 - protein, 8 aa, Artificial Sequence
  Synthetic polypeptide representing artificial human antibody CDR-H2 region
INPSGGST

SEQ ID NO: 13047 - protein, 7 aa, Artificial Sequence
  Synthetic polypeptide representing artificial human antibody CDR-H2 region
ISHSGNT

SEQ ID NO: 13048 - protein, 7 aa, Artificial Sequence
  Synthetic polypeptide representing artificial human antibody CDR-H2 region
IYYSGST

SEQ ID NO: 13049 - protein, 8 aa, Artificial Sequence
  Synthetic polypeptide representing artificial human antibody CDR-H2 region
IYPGDSDT

SEQ ID NO: 13050 - protein, 8 aa, Artificial Sequence
  Synthetic polypeptide representing artificial human antibody CDR-H2 region
ITDDGDIA

SEQ ID NO: 13051 - protein, 7 aa, Artificial Sequence
  Synthetic polypeptide representing artificial human antibody CDR-H2 region
IYNTGIT

SEQ ID NO: 13052 - protein, 7 aa, Artificial Sequence
  Synthetic polypeptide representing artificial human antibody CDR-H2 region
VSDNGRI

SEQ ID NO: 13053 - protein, 8 aa, Artificial Sequence
  Synthetic polypeptide representing artificial human antibody CDR-H2 region
ISGDGGST

SEQ ID NO: 13054 - protein, 7 aa, Artificial Sequence
  Synthetic polypeptide representing artificial human antibody CDR-H2 region
IYYSGST

SEQ ID NO: 13055 - protein, 7 aa, Artificial Sequence
  Synthetic polypeptide representing artificial human antibody CDR-H2 region
IYDSGIT

SEQ ID NO: 13056 - protein, 8 aa, Artificial Sequence
  Synthetic polypeptide representing artificial human antibody CDR-H2 region
ISYDGSNK

SEQ ID NO: 13057 - protein, 8 aa, Artificial Sequence
  Synthetic polypeptide representing artificial human antibody CDR-H2 region
ISGSGGST

SEQ ID NO: 13058 - protein, 7 aa, Artificial Sequence
  Synthetic polypeptide representing artificial human antibody CDR-H2 region
IYYSGST

SEQ ID NO: 13059 - protein, 7 aa, Artificial Sequence
  Synthetic polypeptide representing artificial human antibody CDR-H2 region
IYSGGST

SEQ ID NO: 13060 - protein, 10 aa, Artificial Sequence
  Synthetic polypeptide representing artificial human antibody CDR-H2 region
VMTKADGGTT

SEQ ID NO: 13061 - protein, 8 aa, Artificial Sequence
  Synthetic polypeptide representing artificial human antibody CDR-H2 region
ISGSGSSI

SEQ ID NO: 13062 - protein, 8 aa, Artificial Sequence
  Synthetic polypeptide representing artificial human antibody CDR-H2 region
IKQNGGEK

SEQ ID NO: 13063 - protein, 8 aa, Artificial Sequence
  Synthetic polypeptide representing artificial human antibody CDR-H2 region
IVVGSGNR

SEQ ID NO: 13064 - protein, 8 aa, Artificial Sequence
  Synthetic polypeptide representing artificial human antibody CDR-H2 region
IIPILGIA

SEQ ID NO: 13065 - protein, 7 aa, Artificial Sequence
  Synthetic polypeptide representing artificial human antibody CDR-H2 region
IYYSGST

SEQ ID NO: 13066 - protein, 8 aa, Artificial Sequence
  Synthetic polypeptide representing artificial human antibody CDR-H2 region
MNPNSGGS

SEQ ID NO: 13067 - protein, 9 aa, Artificial Sequence
  Synthetic polypeptide representing artificial human antibody CDR-H2 region
TYYRSNWYN

SEQ ID NO: 13068 - protein, 7 aa, Artificial Sequence
  Synthetic polypeptide representing artificial human antibody CDR-H2 region
IYPGGST

SEQ ID NO: 13069 - protein, 8 aa, Artificial Sequence
  Synthetic polypeptide representing artificial human antibody CDR-H2 region
VTGSGKGT

SEQ ID NO: 13070 - protein, 8 aa, Artificial Sequence
  Synthetic polypeptide representing artificial human antibody CDR-H2 region
LDPENGEK

SEQ ID NO: 13071 - protein, 10 aa, Artificial Sequence
  Synthetic polypeptide representing artificial human antibody CDR-H2 region
TRNRVEGFTT

SEQ ID NO: 13072 - protein, 8 aa, Artificial Sequence
  Synthetic polypeptide representing artificial human antibody CDR-H2 region
IRQDGAEK

SEQ ID NO: 13073 - protein, 7 aa, Artificial Sequence
  Synthetic polypeptide representing artificial human antibody CDR-H2 region
VHDSGDN

SEQ ID NO: 13074 - protein, 7 aa, Artificial Sequence
  Synthetic polypeptide representing artificial human antibody CDR-H2 region
IYRGGSI

SEQ ID NO: 13075 - protein, 8 aa, Artificial Sequence
  Synthetic polypeptide representing artificial human antibody CDR-H2 region
ISYDGSNK

SEQ ID NO: 13076 - protein, 8 aa, Artificial Sequence
  Synthetic polypeptide representing artificial human antibody CDR-H2 region
FSYDGGST

SEQ ID NO: 13077 - protein, 8 aa, Artificial Sequence
  Synthetic polypeptide representing artificial human antibody CDR-H2 region
IRSRSDYT

SEQ ID NO: 13078 - protein, 7 aa, Artificial Sequence
  Synthetic polypeptide representing artificial human antibody CDR-H2 region
VNRDGTT

SEQ ID NO: 13079 - protein, 7 aa, Artificial Sequence
  Synthetic polypeptide representing artificial human antibody CDR-H2 region
IYYTGST

SEQ ID NO: 13080 - protein, 8 aa, Artificial Sequence
  Synthetic polypeptide representing artificial human antibody CDR-H2 region
IKKDGSTY

SEQ ID NO: 13081 - protein, 8 aa, Artificial Sequence
  Synthetic polypeptide representing artificial human antibody CDR-H2 region
INEDGSHK

SEQ ID NO: 13082 - protein, 8 aa, Artificial Sequence
  Synthetic polypeptide representing artificial human antibody CDR-H2 region
ISYDGTIK

SEQ ID NO: 13083 - protein, 10 aa, Artificial Sequence
  Synthetic polypeptide representing artificial human antibody CDR-H2 region
SGNKGLNYRS

SEQ ID NO: 13084 - protein, 7 aa, Artificial Sequence
  Synthetic polypeptide representing artificial human antibody CDR-H2 region
VYTSGTT

SEQ ID NO: 13085 - protein, 8 aa, Artificial Sequence
  Synthetic polypeptide representing artificial human antibody CDR-H2 region
INTNTGNP

SEQ ID NO: 13086 - protein, 8 aa, Artificial Sequence
  Synthetic polypeptide representing artificial human antibody CDR-H2 region
IKKDGSTY

SEQ ID NO: 13087 - protein, 8 aa, Artificial Sequence
  Synthetic polypeptide representing artificial human antibody CDR-H2 region
IIPILNTP

SEQ ID NO: 13088 - protein, 8 aa, Artificial Sequence
  Synthetic polypeptide representing artificial human antibody CDR-H2 region
IYPGDSDT

SEQ ID NO: 13089 - protein, 8 aa, Artificial Sequence
  Synthetic polypeptide representing artificial human antibody CDR-H2 region
MWSEGSKK

SEQ ID NO: 13090 - protein, 8 aa, Artificial Sequence
  Synthetic polypeptide representing artificial human antibody CDR-H2 region
VSKTSVGT

SEQ ID NO: 13091 - protein, 7 aa, Artificial Sequence
  Synthetic polypeptide representing artificial human antibody CDR-H2 region
ISYGGSG

SEQ ID NO: 13092 - protein, 8 aa, Artificial Sequence
  Synthetic polypeptide representing artificial human antibody CDR-H2 region
INGISGAI

SEQ ID NO: 13093 - protein, 8 aa, Artificial Sequence
  Synthetic polypeptide representing artificial human antibody CDR-H2 region
IWYDGSNK

SEQ ID NO: 13094 - protein, 7 aa, Artificial Sequence
  Synthetic polypeptide representing artificial human antibody CDR-H2 region
IYYSGST

SEQ ID NO: 13095 - protein, 8 aa, Artificial Sequence
  Synthetic polypeptide representing artificial human antibody CDR-H2 region
INPSGGST

SEQ ID NO: 13096 - protein, 7 aa, Artificial Sequence
  Synthetic polypeptide representing artificial human antibody CDR-H2 region
IYINGDT

SEQ ID NO: 13097 - protein, 8 aa, Artificial Sequence
  Synthetic polypeptide representing artificial human antibody CDR-H2 region
ISSSGSTI

SEQ ID NO: 13098 - protein, 7 aa, Artificial Sequence
  Synthetic polypeptide representing artificial human antibody CDR-H2 region
IYYSGST

SEQ ID NO: 13099 - protein, 10 aa, Artificial Sequence
  Synthetic polypeptide representing artificial human antibody CDR-H2 region
SRNKAKRYST

SEQ ID NO: 13100 - protein, 8 aa, Artificial Sequence
  Synthetic polypeptide representing artificial human antibody CDR-H2 region
IYPGDSDT

SEQ ID NO: 13101 - protein, 8 aa, Artificial Sequence
  Synthetic polypeptide representing artificial human antibody CDR-H2 region
ISSSSSYT

SEQ ID NO: 13102 - protein, 7 aa, Artificial Sequence
  Synthetic polypeptide representing artificial human antibody CDR-H2 region
IDWDDDK

SEQ ID NO: 13103 - protein, 8 aa, Artificial Sequence
  Synthetic polypeptide representing artificial human antibody CDR-H2 region
ISYDGTTL

SEQ ID NO: 13104 - protein, 8 aa, Artificial Sequence
  Synthetic polypeptide representing artificial human antibody CDR-H2 region
ISYDGSNK

SEQ ID NO: 13105 - protein, 7 aa, Artificial Sequence
  Synthetic polypeptide representing artificial human antibody CDR-H2 region
FFYGGST

SEQ ID NO: 13106 - protein, 8 aa, Artificial Sequence
  Synthetic polypeptide representing artificial human antibody CDR-H2 region
INRTGSTL

SEQ ID NO: 13107 - protein, 8 aa, Artificial Sequence
  Synthetic polypeptide representing artificial human antibody CDR-H2 region
FVPEDGAT

SEQ ID NO: 13108 - protein, 7 aa, Artificial Sequence
  Synthetic polypeptide representing artificial human antibody CDR-H2 region
IYTSGST

SEQ ID NO: 13109 - protein, 8 aa, Artificial Sequence
  Synthetic polypeptide representing artificial human antibody CDR-H2 region
IIPVFVIP

SEQ ID NO: 13110 - protein, 8 aa, Artificial Sequence
  Synthetic polypeptide representing artificial human antibody CDR-H2 region
FDPQNGET

SEQ ID NO: 13111 - protein, 8 aa, Artificial Sequence
  Synthetic polypeptide representing artificial human antibody CDR-H2 region
ISWNSGSI

SEQ ID NO: 13112 - protein, 7 aa, Artificial Sequence
  Synthetic polypeptide representing artificial human antibody CDR-H2 region
IYYRGST

SEQ ID NO: 13113 - protein, 8 aa, Artificial Sequence
  Synthetic polypeptide representing artificial human antibody CDR-H2 region
ISYDGSNK

SEQ ID NO: 13114 - protein, 8 aa, Artificial Sequence
  Synthetic polypeptide representing artificial human antibody CDR-H2 region
IYPGDYDT

SEQ ID NO: 13115 - protein, 8 aa, Artificial Sequence
  Synthetic polypeptide representing artificial human antibody CDR-H2 region
INPGGGRP

SEQ ID NO: 13116 - protein, 8 aa, Artificial Sequence
  Synthetic polypeptide representing artificial human antibody CDR-H2 region
INPSGGST

SEQ ID NO: 13117 - protein, 8 aa, Artificial Sequence
  Synthetic polypeptide representing artificial human antibody CDR-H2 region
ISAYNGNT

SEQ ID NO: 13118 - protein, 8 aa, Artificial Sequence
  Synthetic polypeptide representing artificial human antibody CDR-H2 region
IKQDGSEK

SEQ ID NO: 13119 - protein, 10 aa, Artificial Sequence
  Synthetic polypeptide representing artificial human antibody CDR-H2 region
VKSRVDGGTT

SEQ ID NO: 13120 - protein, 8 aa, Artificial Sequence
  Synthetic polypeptide representing artificial human antibody CDR-H2 region
IWYDGSNK

SEQ ID NO: 13121 - protein, 7 aa, Artificial Sequence
  Synthetic polypeptide representing artificial human antibody CDR-H2 region
IFYSGST

SEQ ID NO: 13122 - protein, 7 aa, Artificial Sequence
  Synthetic polypeptide representing artificial human antibody CDR-H2 region
IDWDDDK

SEQ ID NO: 13123 - protein, 8 aa, Artificial Sequence
  Synthetic polypeptide representing artificial human antibody CDR-H2 region
ISAYNGNT

SEQ ID NO: 13124 - protein, 8 aa, Artificial Sequence
  Synthetic polypeptide representing artificial human antibody CDR-H2 region
IWYDGSDK

SEQ ID NO: 13125 - protein, 8 aa, Artificial Sequence
  Synthetic polypeptide representing artificial human antibody CDR-H2 region
IIPMLDIA

SEQ ID NO: 13126 - protein, 7 aa, Artificial Sequence
  Synthetic polypeptide representing artificial human antibody CDR-H2 region
IYWDDDE

SEQ ID NO: 13127 - protein, 8 aa, Artificial Sequence
  Synthetic polypeptide representing artificial human antibody CDR-H2 region
ISLSGGKT

SEQ ID NO: 13128 - protein, 7 aa, Artificial Sequence
  Synthetic polypeptide representing artificial human antibody CDR-H2 region
VYYSRNT

SEQ ID NO: 13129 - protein, 7 aa, Artificial Sequence
  Synthetic polypeptide representing artificial human antibody CDR-H2 region
IYPGEST

SEQ ID NO: 13130 - protein, 8 aa, Artificial Sequence
  Synthetic polypeptide representing artificial human antibody CDR-H2 region
IDPRDSET

SEQ ID NO: 13131 - protein, 7 aa, Artificial Sequence
  Synthetic polypeptide representing artificial human antibody CDR-H2 region
ISSGGTT

SEQ ID NO: 13132 - protein, 7 aa, Artificial Sequence
  Synthetic polypeptide representing artificial human antibody CDR-H2 region
FYYTREN

SEQ ID NO: 13133 - protein, 8 aa, Artificial Sequence
  Synthetic polypeptide representing artificial human antibody CDR-H2 region
ISSDGRDT

SEQ ID NO: 13134 - protein, 9 aa, Artificial Sequence
  Synthetic polypeptide representing artificial human antibody CDR-H2 region
TYYRSRWNF

SEQ ID NO: 13135 - protein, 8 aa, Artificial Sequence
  Synthetic polypeptide representing artificial human antibody CDR-H2 region
ISGHNGKT

SEQ ID NO: 13136 - protein, 8 aa, Artificial Sequence
  Synthetic polypeptide representing artificial human antibody CDR-H2 region
ISGHNGKT

SEQ ID NO: 13137 - protein, 8 aa, Artificial Sequence
  Synthetic polypeptide representing artificial human antibody CDR-H2 region
IHGWEDST

SEQ ID NO: 13138 - protein, 7 aa, Artificial Sequence
  Synthetic polypeptide representing artificial human antibody CDR-H2 region
IFWDDDK

SEQ ID NO: 13139 - protein, 8 aa, Artificial Sequence
  Synthetic polypeptide representing artificial human antibody CDR-H2 region
IIGHDGTT

SEQ ID NO: 13140 - protein, 8 aa, Artificial Sequence
  Synthetic polypeptide representing artificial human antibody CDR-H2 region
IIGHDGTT

SEQ ID NO: 13141 - protein, 7 aa, Artificial Sequence
  Synthetic polypeptide representing artificial human antibody CDR-H2 region
IYYSATT

SEQ ID NO: 13142 - protein, 7 aa, Artificial Sequence
  Synthetic polypeptide representing artificial human antibody CDR-H2 region
IYYSGTT

SEQ ID NO: 13143 - protein, 8 aa, Artificial Sequence
  Synthetic polypeptide representing artificial human antibody CDR-H2 region
ISYAGTTK

SEQ ID NO: 13144 - protein, 7 aa, Artificial Sequence
  Synthetic polypeptide representing artificial human antibody CDR-H2 region
IYTGGDT

SEQ ID NO: 13145 - protein, 7 aa, Artificial Sequence
  Synthetic polypeptide representing artificial human antibody CDR-H2 region
VYYSGST

SEQ ID NO: 13146 - protein, 8 aa, Artificial Sequence
  Synthetic polypeptide representing artificial human antibody CDR-H2 region
VDPEDGET

SEQ ID NO: 13147 - protein, 7 aa, Artificial Sequence
  Synthetic polypeptide representing artificial human antibody CDR-H2 region
IYYSGST

SEQ ID NO: 13148 - protein, 8 aa, Artificial Sequence
  Synthetic polypeptide representing artificial human antibody CDR-H2 region
ISGSGVST

SEQ ID NO: 13149 - protein, 7 aa, Artificial Sequence
  Synthetic polypeptide representing artificial human antibody CDR-H2 region
IHHDGGI

SEQ ID NO: 13150 - protein, 8 aa, Artificial Sequence
  Synthetic polypeptide representing artificial human antibody CDR-H2 region
IHQNGNEK

SEQ ID NO: 13151 - protein, 8 aa, Artificial Sequence
  Synthetic polypeptide representing artificial human antibody CDR-H2 region
IGGGGAGT

SEQ ID NO: 13152 - protein, 8 aa, Artificial Sequence
  Synthetic polypeptide representing artificial human antibody CDR-H2 region
ISASGTTT

SEQ ID NO: 13153 - protein, 8 aa, Artificial Sequence
  Synthetic polypeptide representing artificial human antibody CDR-H2 region
INPTSGST

SEQ ID NO: 13154 - protein, 8 aa, Artificial Sequence
  Synthetic polypeptide representing artificial human antibody CDR-H2 region
ISASGDNT

SEQ ID NO: 13155 - protein, 7 aa, Artificial Sequence
  Synthetic polypeptide representing artificial human antibody CDR-H2 region
IYNGGVT

SEQ ID NO: 13156 - protein, 8 aa, Artificial Sequence
  Synthetic polypeptide representing artificial human antibody CDR-H2 region
ISGSGSRV

SEQ ID NO: 13157 - protein, 7 aa, Artificial Sequence
  Synthetic polypeptide representing artificial human antibody CDR-H2 region
VSDSGRS

SEQ ID NO: 13158 - protein, 7 aa, Artificial Sequence
  Synthetic polypeptide representing artificial human antibody CDR-H2 region
IHSSGVT

SEQ ID NO: 13159 - protein, 10 aa, Artificial Sequence
  Synthetic polypeptide representing artificial human antibody CDR-H2 region
IRSLAYGGTT

SEQ ID NO: 13160 - protein, 8 aa, Artificial Sequence
  Synthetic polypeptide representing artificial human antibody CDR-H2 region
ISYDGSNK

SEQ ID NO: 13161 - protein, 8 aa, Artificial Sequence
  Synthetic polypeptide representing artificial human antibody CDR-H2 region
ISRTGRTI

SEQ ID NO: 13162 - protein, 8 aa, Artificial Sequence
  Synthetic polypeptide representing artificial human antibody CDR-H2 region
INKDGSTT

SEQ ID NO: 13163 - protein, 7 aa, Artificial Sequence
  Synthetic polypeptide representing artificial human antibody CDR-H2 region
ITERGRT

SEQ ID NO: 13164 - protein, 8 aa, Artificial Sequence
  Synthetic polypeptide representing artificial human antibody CDR-H2 region
IDSAGTTQ

SEQ ID NO: 13165 - protein, 8 aa, Artificial Sequence
  Synthetic polypeptide representing artificial human antibody CDR-H2 region
IRGSGGGT

SEQ ID NO: 13166 - protein, 8 aa, Artificial Sequence
  Synthetic polypeptide representing artificial human antibody CDR-H2 region
INPTGGGA

SEQ ID NO: 13167 - protein, 8 aa, Artificial Sequence
  Synthetic polypeptide representing artificial human antibody CDR-H2 region
ISKDGRNE

SEQ ID NO: 13168 - protein, 7 aa, Artificial Sequence
  Synthetic polypeptide representing artificial human antibody CDR-H2 region
ISDSENT

SEQ ID NO: 13169 - protein, 8 aa, Artificial Sequence
  Synthetic polypeptide representing artificial human antibody CDR-H2 region
IDPSDSYT

SEQ ID NO: 13170 - protein, 9 aa, Artificial Sequence
  Synthetic polypeptide representing artificial human antibody CDR-H2 region
ISWMNGDAS

SEQ ID NO: 13171 - protein, 10 aa, Artificial Sequence
  Synthetic polypeptide representing artificial human antibody CDR-H2 region
IRDKTNTYAT

SEQ ID NO: 13172 - protein, 8 aa, Artificial Sequence
  Synthetic polypeptide representing artificial human antibody CDR-H2 region
ISSDGTNE

SEQ ID NO: 13173 - protein, 10 aa, Artificial Sequence
  Synthetic polypeptide representing artificial human antibody CDR-H2 region
IYYTGFTEST

SEQ ID NO: 13174 - protein, 7 aa, Artificial Sequence
  Synthetic polypeptide representing artificial human antibody CDR-H2 region
IYYSGST

SEQ ID NO: 13175 - protein, 7 aa, Artificial Sequence
  Synthetic polypeptide representing artificial human antibody CDR-H2 region
IYSADRT

SEQ ID NO: 13176 - protein, 8 aa, Artificial Sequence
  Synthetic polypeptide representing artificial human antibody CDR-H2 region
IWYDGSNK

SEQ ID NO: 13177 - protein, 8 aa, Artificial Sequence
  Synthetic polypeptide representing artificial human antibody CDR-H2 region
ISSRSTYK

SEQ ID NO: 13178 - protein, 8 aa, Artificial Sequence
  Synthetic polypeptide representing artificial human antibody CDR-H2 region
INIANGHT

SEQ ID NO: 13179 - protein, 8 aa, Artificial Sequence
  Synthetic polypeptide representing artificial human antibody CDR-H2 region
LWSDGRNH

SEQ ID NO: 13180 - protein, 8 aa, Artificial Sequence
  Synthetic polypeptide representing artificial human antibody CDR-H2 region
MKPYSGNT

SEQ ID NO: 13181 - protein, 8 aa, Artificial Sequence
  Synthetic polypeptide representing artificial human antibody CDR-H2 region
IGGTGSST

SEQ ID NO: 13182 - protein, 7 aa, Artificial Sequence
  Synthetic polypeptide representing artificial human antibody CDR-H2 region
IYYSGST

SEQ ID NO: 13183 - protein, 8 aa, Artificial Sequence
  Synthetic polypeptide representing artificial human antibody CDR-H2 region
IWYDGRNK

SEQ ID NO: 13184 - protein, 8 aa, Artificial Sequence
  Synthetic polypeptide representing artificial human antibody CDR-H2 region
MNSNSGGI

SEQ ID NO: 13185 - protein, 7 aa, Artificial Sequence
  Synthetic polypeptide representing artificial human antibody CDR-H2 region
INHSGST

SEQ ID NO: 13186 - protein, 7 aa, Artificial Sequence
  Synthetic polypeptide representing artificial human antibody CDR-H2 region
VDTAGDT

SEQ ID NO: 13187 - protein, 7 aa, Artificial Sequence
  Synthetic polypeptide representing artificial human antibody CDR-H2 region
IYYSGST

SEQ ID NO: 13188 - protein, 8 aa, Artificial Sequence
  Synthetic polypeptide representing artificial human antibody CDR-H2 region
IYPGDSDT

SEQ ID NO: 13189 - protein, 7 aa, Artificial Sequence
  Synthetic polypeptide representing artificial human antibody CDR-H2 region
IAYSGAT

SEQ ID NO: 13190 - protein, 7 aa, Artificial Sequence
  Synthetic polypeptide representing artificial human antibody CDR-H2 region
IHHDGGI

SEQ ID NO: 13191 - protein, 8 aa, Artificial Sequence
  Synthetic polypeptide representing artificial human antibody CDR-H2 region
INADGTSF

SEQ ID NO: 13192 - protein, 7 aa, Artificial Sequence
  Synthetic polypeptide representing artificial human antibody CDR-H2 region
IYHTGTS

SEQ ID NO: 13193 - protein, 8 aa, Artificial Sequence
  Synthetic polypeptide representing artificial human antibody CDR-H2 region
INSNSGET

SEQ ID NO: 13194 - protein, 8 aa, Artificial Sequence
  Synthetic polypeptide representing artificial human antibody CDR-H2 region
INPNSGGT

SEQ ID NO: 13195 - protein, 7 aa, Artificial Sequence
  Synthetic polypeptide representing artificial human antibody CDR-H2 region
IHYEGRV

SEQ ID NO: 13196 - protein, 8 aa, Artificial Sequence
  Synthetic polypeptide representing artificial human antibody CDR-H2 region
ISDSGYYI

SEQ ID NO: 13197 - protein, 7 aa, Artificial Sequence
  Synthetic polypeptide representing artificial human antibody CDR-H2 region
IYYSGTT

SEQ ID NO: 13198 - protein, 9 aa, Artificial Sequence
  Synthetic polypeptide representing artificial human antibody CDR-H2 region
ISWINGDAA

SEQ ID NO: 13199 - protein, 7 aa, Artificial Sequence
  Synthetic polypeptide representing artificial human antibody CDR-H2 region
IFSNDEK

SEQ ID NO: 13200 - protein, 8 aa, Artificial Sequence
  Synthetic polypeptide representing artificial human antibody CDR-H2 region
IKTDGSEE

SEQ ID NO: 13201 - protein, 8 aa, Artificial Sequence
  Synthetic polypeptide representing artificial human antibody CDR-H2 region
IAPRNGWT

SEQ ID NO: 13202 - protein, 8 aa, Artificial Sequence
  Synthetic polypeptide representing artificial human antibody CDR-H2 region
ISGGGDAT

SEQ ID NO: 13203 - protein, 8 aa, Artificial Sequence
  Synthetic polypeptide representing artificial human antibody CDR-H2 region
ISSSGSTI

SEQ ID NO: 13204 - protein, 8 aa, Artificial Sequence
  Synthetic polypeptide representing artificial human antibody CDR-H2 region
ISSSSDNI

SEQ ID NO: 13205 - protein, 7 aa, Artificial Sequence
  Synthetic polypeptide representing artificial human antibody CDR-H2 region
VNQNGNT

SEQ ID NO: 13206 - protein, 7 aa, Artificial Sequence
  Synthetic polypeptide representing artificial human antibody CDR-H2 region
IYYSGST

SEQ ID NO: 13207 - protein, 7 aa, Artificial Sequence
  Synthetic polypeptide representing artificial human antibody CDR-H2 region
IYYSGST

SEQ ID NO: 13208 - protein, 7 aa, Artificial Sequence
  Synthetic polypeptide representing artificial human antibody CDR-H2 region
IYYSGST

SEQ ID NO: 13209 - protein, 7 aa, Artificial Sequence
  Synthetic polypeptide representing artificial human antibody CDR-H2 region
IYYSGST

SEQ ID NO: 13210 - protein, 8 aa, Artificial Sequence
  Synthetic polypeptide representing artificial human antibody CDR-H2 region
ISYDGSNK

SEQ ID NO: 13211 - protein, 10 aa, Artificial Sequence
  Synthetic polypeptide representing artificial human antibody CDR-H2 region
IKSKTDGGTT

SEQ ID NO: 13212 - protein, 7 aa, Artificial Sequence
  Synthetic polypeptide representing artificial human antibody CDR-H2 region
INHSGYT

SEQ ID NO: 13213 - protein, 7 aa, Artificial Sequence
  Synthetic polypeptide representing artificial human antibody CDR-H2 region
IYSGGST

SEQ ID NO: 13214 - protein, 8 aa, Artificial Sequence
  Synthetic polypeptide representing artificial human antibody CDR-H2 region
IIPIFGTA

SEQ ID NO: 13215 - protein, 8 aa, Artificial Sequence
  Synthetic polypeptide representing artificial human antibody CDR-H2 region
ITGRSTFM

SEQ ID NO: 13216 - protein, 8 aa, Artificial Sequence
  Synthetic polypeptide representing artificial human antibody CDR-H2 region
ISAYNGNT

SEQ ID NO: 13217 - protein, 7 aa, Artificial Sequence
  Synthetic polypeptide representing artificial human antibody CDR-H2 region
IYYSGST

SEQ ID NO: 13218 - protein, 7 aa, Artificial Sequence
  Synthetic polypeptide representing artificial human antibody CDR-H2 region
IFSNDEK

SEQ ID NO: 13219 - protein, 8 aa, Artificial Sequence
  Synthetic polypeptide representing artificial human antibody CDR-H2 region
IYPGDSDT

SEQ ID NO: 13220 - protein, 7 aa, Artificial Sequence
  Synthetic polypeptide representing artificial human antibody CDR-H2 region
IYYSGST

SEQ ID NO: 13221 - protein, 7 aa, Artificial Sequence
  Synthetic polypeptide representing artificial human antibody CDR-H2 region
IAYSGRS

SEQ ID NO: 13222 - protein, 7 aa, Artificial Sequence
  Synthetic polypeptide representing artificial human antibody CDR-H2 region
IYWDDDK

SEQ ID NO: 13223 - protein, 8 aa, Artificial Sequence
  Synthetic polypeptide representing artificial human antibody CDR-H2 region
ISFDGDKR

SEQ ID NO: 13224 - protein, 11 aa, Artificial Sequence
  Synthetic polypeptide representing artificial human antibody CDR-H2 region
ISGTSGTRGRT

SEQ ID NO: 13225 - protein, 8 aa, Artificial Sequence
  Synthetic polypeptide representing artificial human antibody CDR-H2 region
ISYDGSNK

SEQ ID NO: 13226 - protein, 7 aa, Artificial Sequence
  Synthetic polypeptide representing artificial human antibody CDR-H2 region
INHSGGT

SEQ ID NO: 13227 - protein, 7 aa, Artificial Sequence
  Synthetic polypeptide representing artificial human antibody CDR-H2 region
IYYSGST

SEQ ID NO: 13228 - protein, 8 aa, Artificial Sequence
  Synthetic polypeptide representing artificial human antibody CDR-H2 region
ISYDGSNK

SEQ ID NO: 13229 - protein, 8 aa, Artificial Sequence
  Synthetic polypeptide representing artificial human antibody CDR-H2 region
ISSSSSYI

SEQ ID NO: 13230 - protein, 8 aa, Artificial Sequence
  Synthetic polypeptide representing artificial human antibody CDR-H2 region
IYPGDSDT

SEQ ID NO: 13231 - protein, 8 aa, Artificial Sequence
  Synthetic polypeptide representing artificial human antibody CDR-H2 region
IIPIFGTA

SEQ ID NO: 13232 - protein, 8 aa, Artificial Sequence
  Synthetic polypeptide representing artificial human antibody CDR-H2 region
SMPMYGAT

SEQ ID NO: 13233 - protein, 8 aa, Artificial Sequence
  Synthetic polypeptide representing artificial human antibody CDR-H2 region
IIPIFGTA

SEQ ID NO: 13234 - protein, 8 aa, Artificial Sequence
  Synthetic polypeptide representing artificial human antibody CDR-H2 region
IIPIFGTA

SEQ ID NO: 13235 - protein, 8 aa, Artificial Sequence
  Synthetic polypeptide representing artificial human antibody CDR-H2 region
IYYDGSRE

SEQ ID NO: 13236 - protein, 8 aa, Artificial Sequence
  Synthetic polypeptide representing artificial human antibody CDR-H2 region
IYPGDSDT

SEQ ID NO: 13237 - protein, 8 aa, Artificial Sequence
  Synthetic polypeptide representing artificial human antibody CDR-H2 region
ISGRGENT

SEQ ID NO: 13238 - protein, 7 aa, Artificial Sequence
  Synthetic polypeptide representing artificial human antibody CDR-H2 region
IYYSGST

SEQ ID NO: 13239 - protein, 8 aa, Artificial Sequence
  Synthetic polypeptide representing artificial human antibody CDR-H2 region
ISGSGGST

SEQ ID NO: 13240 - protein, 8 aa, Artificial Sequence
  Synthetic polypeptide representing artificial human antibody CDR-H2 region
INTNTGNP

SEQ ID NO: 13241 - protein, 6 aa, Artificial Sequence
  Synthetic polypeptide representing artificial human antibody CDR-H2 region
SDGSKR

SEQ ID NO: 13242 - protein, 8 aa, Artificial Sequence
  Synthetic polypeptide representing artificial human antibody CDR-H2 region
FDPEDGET

SEQ ID NO: 13243 - protein, 7 aa, Artificial Sequence
  Synthetic polypeptide representing artificial human antibody CDR-H2 region
IYDTGNT

SEQ ID NO: 13244 - protein, 7 aa, Artificial Sequence
  Synthetic polypeptide representing artificial human antibody CDR-H2 region
IYSGGST

SEQ ID NO: 13245 - protein, 7 aa, Artificial Sequence
  Synthetic polypeptide representing artificial human antibody CDR-H2 region
IYWDDDK

SEQ ID NO: 13246 - protein, 7 aa, Artificial Sequence
  Synthetic polypeptide representing artificial human antibody CDR-H2 region
IDWDDDK

SEQ ID NO: 13247 - protein, 8 aa, Artificial Sequence
  Synthetic polypeptide representing artificial human antibody CDR-H2 region
IIPLFGKP

SEQ ID NO: 13248 - protein, 7 aa, Artificial Sequence
  Synthetic polypeptide representing artificial human antibody CDR-H2 region
INHGGAT

SEQ ID NO: 13249 - protein, 8 aa, Artificial Sequence
  Synthetic polypeptide representing artificial human antibody CDR-H2 region
ISGSGGST

SEQ ID NO: 13250 - protein, 8 aa, Artificial Sequence
  Synthetic polypeptide representing artificial human antibody CDR-H2 region
IWYDGSNK

SEQ ID NO: 13251 - protein, 8 aa, Artificial Sequence
  Synthetic polypeptide representing artificial human antibody CDR-H2 region
INTNTGNP

SEQ ID NO: 13252 - protein, 8 aa, Artificial Sequence
  Synthetic polypeptide representing artificial human antibody CDR-H2 region
INSISTNI

SEQ ID NO: 13253 - protein, 8 aa, Artificial Sequence
  Synthetic polypeptide representing artificial human antibody CDR-H2 region
SSRRDDTR

SEQ ID NO: 13254 - protein, 8 aa, Artificial Sequence
  Synthetic polypeptide representing artificial human antibody CDR-H2 region
ISSRDSTT

SEQ ID NO: 13255 - protein, 8 aa, Artificial Sequence
  Synthetic polypeptide representing artificial human antibody CDR-H2 region
ISSSSSTI

SEQ ID NO: 13256 - protein, 8 aa, Artificial Sequence
  Synthetic polypeptide representing artificial human antibody CDR-H2 region
INPSGGST

SEQ ID NO: 13257 - protein, 8 aa, Artificial Sequence
  Synthetic polypeptide representing artificial human antibody CDR-H2 region
ISWNSGSI

SEQ ID NO: 13258 - protein, 8 aa, Artificial Sequence
  Synthetic polypeptide representing artificial human antibody CDR-H2 region
ISGSGGST

SEQ ID NO: 13259 - protein, 8 aa, Artificial Sequence
  Synthetic polypeptide representing artificial human antibody CDR-H2 region
ISGSGGST

SEQ ID NO: 13260 - protein, 8 aa, Artificial Sequence
  Synthetic polypeptide representing artificial human antibody CDR-H2 region
ISSSSSTI

SEQ ID NO: 13261 - protein, 8 aa, Artificial Sequence
  Synthetic polypeptide representing artificial human antibody CDR-H2 region
INPNSGGT

SEQ ID NO: 13262 - protein, 8 aa, Artificial Sequence
  Synthetic polypeptide representing artificial human antibody CDR-H2 region
IWYDGSNK

SEQ ID NO: 13263 - protein, 8 aa, Artificial Sequence
  Synthetic polypeptide representing artificial human antibody CDR-H2 region
THPNSRGA

SEQ ID NO: 13264 - protein, 8 aa, Artificial Sequence
  Synthetic polypeptide representing artificial human antibody CDR-H2 region
ISGSGGST

SEQ ID NO: 13265 - protein, 8 aa, Artificial Sequence
  Synthetic polypeptide representing artificial human antibody CDR-H2 region
ISSSSSYI

SEQ ID NO: 13266 - protein, 7 aa, Artificial Sequence
  Synthetic polypeptide representing artificial human antibody CDR-H2 region
IYYSGST

SEQ ID NO: 13267 - protein, 7 aa, Artificial Sequence
  Synthetic polypeptide representing artificial human antibody CDR-H2 region
VYYSGST

SEQ ID NO: 13268 - protein, 7 aa, Artificial Sequence
  Synthetic polypeptide representing artificial human antibody CDR-H2 region
IYYSGST

SEQ ID NO: 13269 - protein, 8 aa, Artificial Sequence
  Synthetic polypeptide representing artificial human antibody CDR-H2 region
ISYDGSNK

SEQ ID NO: 13270 - protein, 8 aa, Artificial Sequence
  Synthetic polypeptide representing artificial human antibody CDR-H2 region
ISYDGSNK

SEQ ID NO: 13271 - protein, 8 aa, Artificial Sequence
  Synthetic polypeptide representing artificial human antibody CDR-H2 region
ISDSSNFI

SEQ ID NO: 13272 - protein, 8 aa, Artificial Sequence
  Synthetic polypeptide representing artificial human antibody CDR-H2 region
ISYEGSTK

SEQ ID NO: 13273 - protein, 8 aa, Artificial Sequence
  Synthetic polypeptide representing artificial human antibody CDR-H2 region
ISSTGDNT

SEQ ID NO: 13274 - protein, 10 aa, Artificial Sequence
  Synthetic polypeptide representing artificial human antibody CDR-H2 region
IETEADGGTT

SEQ ID NO: 13275 - protein, 8 aa, Artificial Sequence
  Synthetic polypeptide representing artificial human antibody CDR-H2 region
IIPIFGTA

SEQ ID NO: 13276 - protein, 8 aa, Artificial Sequence
  Synthetic polypeptide representing artificial human antibody CDR-H2 region
THPNSGGA

SEQ ID NO: 13277 - protein, 8 aa, Artificial Sequence
  Synthetic polypeptide representing artificial human antibody CDR-H2 region
ISSGGGST

SEQ ID NO: 13278 - protein, 8 aa, Artificial Sequence
  Synthetic polypeptide representing artificial human antibody CDR-H2 region
ISSSSSYI

SEQ ID NO: 13279 - protein, 7 aa, Artificial Sequence
  Synthetic polypeptide representing artificial human antibody CDR-H2 region
IYYSGST

SEQ ID NO: 13280 - protein, 8 aa, Artificial Sequence
  Synthetic polypeptide representing artificial human antibody CDR-H2 region
ISSSSSTI

SEQ ID NO: 13281 - protein, 7 aa, Artificial Sequence
  Synthetic polypeptide representing artificial human antibody CDR-H2 region
ISNSGST

SEQ ID NO: 13282 - protein, 8 aa, Artificial Sequence
  Synthetic polypeptide representing artificial human antibody CDR-H2 region
ISPYSGVT

SEQ ID NO: 13283 - protein, 7 aa, Artificial Sequence
  Synthetic polypeptide representing artificial human antibody CDR-H2 region
IYYSGST

SEQ ID NO: 13284 - protein, 7 aa, Artificial Sequence
  Synthetic polypeptide representing artificial human antibody CDR-H2 region
IYYSGST

SEQ ID NO: 13285 - protein, 8 aa, Artificial Sequence
  Synthetic polypeptide representing artificial human antibody CDR-H2 region
ITWNGGST

SEQ ID NO: 13286 - protein, 7 aa, Artificial Sequence
  Synthetic polypeptide representing artificial human antibody CDR-H2 region
IYYSGST

SEQ ID NO: 13287 - protein, 8 aa, Artificial Sequence
  Synthetic polypeptide representing artificial human antibody CDR-H2 region
ISGSGSHV

SEQ ID NO: 13288 - protein, 8 aa, Artificial Sequence
  Synthetic polypeptide representing artificial human antibody CDR-H2 region
INPSGGST

SEQ ID NO: 13289 - protein, 10 aa, Artificial Sequence
  Synthetic polypeptide representing artificial human antibody CDR-H2 region
IKSKTDGGTT

SEQ ID NO: 13290 - protein, 7 aa, Artificial Sequence
  Synthetic polypeptide representing artificial human antibody CDR-H2 region
SHYSGSS

SEQ ID NO: 13291 - protein, 8 aa, Artificial Sequence
  Synthetic polypeptide representing artificial human antibody CDR-H2 region
ISYDGSNK

SEQ ID NO: 13292 - protein, 8 aa, Artificial Sequence
  Synthetic polypeptide representing artificial human antibody CDR-H2 region
ISYDGSNK

SEQ ID NO: 13293 - protein, 8 aa, Artificial Sequence
  Synthetic polypeptide representing artificial human antibody CDR-H2 region
ISYDGSNK

SEQ ID NO: 13294 - protein, 8 aa, Artificial Sequence
  Synthetic polypeptide representing artificial human antibody CDR-H2 region
INTNSGNP

SEQ ID NO: 13295 - protein, 8 aa, Artificial Sequence
  Synthetic polypeptide representing artificial human antibody CDR-H2 region
ISFDGKKI

SEQ ID NO: 13296 - protein, 8 aa, Artificial Sequence
  Synthetic polypeptide representing artificial human antibody CDR-H2 region
ISYDGSNK

SEQ ID NO: 13297 - protein, 7 aa, Artificial Sequence
  Synthetic polypeptide representing artificial human antibody CDR-H2 region
INHSGST

SEQ ID NO: 13298 - protein, 7 aa, Artificial Sequence
  Synthetic polypeptide representing artificial human antibody CDR-H2 region
ISYSGST

SEQ ID NO: 13299 - protein, 8 aa, Artificial Sequence
  Synthetic polypeptide representing artificial human antibody CDR-H2 region
ISSDGRST

SEQ ID NO: 13300 - protein, 8 aa, Artificial Sequence
  Synthetic polypeptide representing artificial human antibody CDR-H2 region
IIPIFGTA

SEQ ID NO: 13301 - protein, 8 aa, Artificial Sequence
  Synthetic polypeptide representing artificial human antibody CDR-H2 region
INTNTGNP

SEQ ID NO: 13302 - protein, 8 aa, Artificial Sequence
  Synthetic polypeptide representing artificial human antibody CDR-H2 region
IWYDGSNK

SEQ ID NO: 13303 - protein, 7 aa, Artificial Sequence
  Synthetic polypeptide representing artificial human antibody CDR-H2 region
VYYSGST

SEQ ID NO: 13304 - protein, 8 aa, Artificial Sequence
  Synthetic polypeptide representing artificial human antibody CDR-H2 region
ILYDGRNK

SEQ ID NO: 13305 - protein, 8 aa, Artificial Sequence
  Synthetic polypeptide representing artificial human antibody CDR-H2 region
INTNTGNP

SEQ ID NO: 13306 - protein, 8 aa, Artificial Sequence
  Synthetic polypeptide representing artificial human antibody CDR-H2 region
IWFDGTNR

SEQ ID NO: 13307 - protein, 8 aa, Artificial Sequence
  Synthetic polypeptide representing artificial human antibody CDR-H2 region
IIPIVHIT

SEQ ID NO: 13308 - protein, 8 aa, Artificial Sequence
  Synthetic polypeptide representing artificial human antibody CDR-H2 region
ISAYNGNT

SEQ ID NO: 13309 - protein, 7 aa, Artificial Sequence
  Synthetic polypeptide representing artificial human antibody CDR-H2 region
IYYSGST

SEQ ID NO: 13310 - protein, 7 aa, Artificial Sequence
  Synthetic polypeptide representing artificial human antibody CDR-H2 region
VYYSGST

SEQ ID NO: 13311 - protein, 8 aa, Artificial Sequence
  Synthetic polypeptide representing artificial human antibody CDR-H2 region
IIPMFGTP

SEQ ID NO: 13312 - protein, 10 aa, Artificial Sequence
  Synthetic polypeptide representing artificial human antibody CDR-H2 region
IKSKTDGGTT

SEQ ID NO: 13313 - protein, 8 aa, Artificial Sequence
  Synthetic polypeptide representing artificial human antibody CDR-H2 region
ISYDGSNK

SEQ ID NO: 13314 - protein, 8 aa, Artificial Sequence
  Synthetic polypeptide representing artificial human antibody CDR-H2 region
ISYDGSNK

SEQ ID NO: 13315 - protein, 8 aa, Artificial Sequence
  Synthetic polypeptide representing artificial human antibody CDR-H2 region
IYPGDSDT

SEQ ID NO: 13316 - protein, 8 aa, Artificial Sequence
  Synthetic polypeptide representing artificial human antibody CDR-H2 region
IWYDGSHE

SEQ ID NO: 13317 - protein, 8 aa, Artificial Sequence
  Synthetic polypeptide representing artificial human antibody CDR-H2 region
IRDSGGST

SEQ ID NO: 13318 - protein, 8 aa, Artificial Sequence
  Synthetic polypeptide representing artificial human antibody CDR-H2 region
IDQHGTEM

SEQ ID NO: 13319 - protein, 8 aa, Artificial Sequence
  Synthetic polypeptide representing artificial human antibody CDR-H2 region
ISSSSSYI

SEQ ID NO: 13320 - protein, 8 aa, Artificial Sequence
  Synthetic polypeptide representing artificial human antibody CDR-H2 region
INPNSGGT

SEQ ID NO: 13321 - protein, 8 aa, Artificial Sequence
  Synthetic polypeptide representing artificial human antibody CDR-H2 region
ISYEGSKK

SEQ ID NO: 13322 - protein, 8 aa, Artificial Sequence
  Synthetic polypeptide representing artificial human antibody CDR-H2 region
ISSSSSYI

SEQ ID NO: 13323 - protein, 8 aa, Artificial Sequence
  Synthetic polypeptide representing artificial human antibody CDR-H2 region
IDKDVSRT

SEQ ID NO: 13324 - protein, 8 aa, Artificial Sequence
  Synthetic polypeptide representing artificial human antibody CDR-H2 region
INDDGSSP

SEQ ID NO: 13325 - protein, 8 aa, Artificial Sequence
  Synthetic polypeptide representing artificial human antibody CDR-H2 region
ISGSSKNI

SEQ ID NO: 13326 - protein, 7 aa, Artificial Sequence
  Synthetic polypeptide representing artificial human antibody CDR-H2 region
ISSFYST

SEQ ID NO: 13327 - protein, 8 aa, Artificial Sequence
  Synthetic polypeptide representing artificial human antibody CDR-H2 region
LSDISTTI

SEQ ID NO: 13328 - protein, 10 aa, Artificial Sequence
  Synthetic polypeptide representing artificial human antibody CDR-H2 region
IKSKASGGTI

SEQ ID NO: 13329 - protein, 8 aa, Artificial Sequence
  Synthetic polypeptide representing artificial human antibody CDR-H2 region
ISWNSVNV

SEQ ID NO: 13330 - protein, 8 aa, Artificial Sequence
  Synthetic polypeptide representing artificial human antibody CDR-H2 region
INADGAGT

SEQ ID NO: 13331 - protein, 8 aa, Artificial Sequence
  Synthetic polypeptide representing artificial human antibody CDR-H2 region
INDDGTGP

SEQ ID NO: 13332 - protein, 8 aa, Artificial Sequence
  Synthetic polypeptide representing artificial human antibody CDR-H2 region
VSASGALT

SEQ ID NO: 13333 - protein, 8 aa, Artificial Sequence
  Synthetic polypeptide representing artificial human antibody CDR-H2 region
IYTSPVSI

SEQ ID NO: 13334 - protein, 8 aa, Artificial Sequence
  Synthetic polypeptide representing artificial human antibody CDR-H2 region
IKESGSEK

SEQ ID NO: 13335 - protein, 8 aa, Artificial Sequence
  Synthetic polypeptide representing artificial human antibody CDR-H2 region
IYPDDSDT

SEQ ID NO: 13336 - protein, 8 aa, Artificial Sequence
  Synthetic polypeptide representing artificial human antibody CDR-H2 region
INGDGSEE

SEQ ID NO: 13337 - protein, 8 aa, Artificial Sequence
  Synthetic polypeptide representing artificial human antibody CDR-H2 region
MNPNSGNT

SEQ ID NO: 13338 - protein, 10 aa, Artificial Sequence
  Synthetic polypeptide representing artificial human antibody CDR-H2 region
IRAKTFGSTT

SEQ ID NO: 13339 - protein, 7 aa, Artificial Sequence
  Synthetic polypeptide representing artificial human antibody CDR-H2 region
IYYSGST

SEQ ID NO: 13340 - protein, 7 aa, Artificial Sequence
  Synthetic polypeptide representing artificial human antibody CDR-H2 region
IYYSGST

SEQ ID NO: 13341 - protein, 8 aa, Artificial Sequence
  Synthetic polypeptide representing artificial human antibody CDR-H2 region
ITGSGTAT

SEQ ID NO: 13342 - protein, 7 aa, Artificial Sequence
  Synthetic polypeptide representing artificial human antibody CDR-H2 region
IFYRGTT

SEQ ID NO: 13343 - protein, 7 aa, Artificial Sequence
  Synthetic polypeptide representing artificial human antibody CDR-H2 region
VYYSGST

SEQ ID NO: 13344 - protein, 8 aa, Artificial Sequence
  Synthetic polypeptide representing artificial human antibody CDR-H2 region
ISYDGSNK

SEQ ID NO: 13345 - protein, 10 aa, Artificial Sequence
  Synthetic polypeptide representing artificial human antibody CDR-H2 region
IKRKSDGGTS

SEQ ID NO: 13346 - protein, 8 aa, Artificial Sequence
  Synthetic polypeptide representing artificial human antibody CDR-H2 region
LSGSAIST

SEQ ID NO: 13347 - protein, 8 aa, Artificial Sequence
  Synthetic polypeptide representing artificial human antibody CDR-H2 region
INPNTGAT

SEQ ID NO: 13348 - protein, 7 aa, Artificial Sequence
  Synthetic polypeptide representing artificial human antibody CDR-H2 region
IYWDDDK

SEQ ID NO: 13349 - protein, 8 aa, Artificial Sequence
  Synthetic polypeptide representing artificial human antibody CDR-H2 region
ISGSGGST

SEQ ID NO: 13350 - protein, 8 aa, Artificial Sequence
  Synthetic polypeptide representing artificial human antibody CDR-H2 region
IFTSGVSV

SEQ ID NO: 13351 - protein, 8 aa, Artificial Sequence
  Synthetic polypeptide representing artificial human antibody CDR-H2 region
ITGNGDGT

SEQ ID NO: 13352 - protein, 8 aa, Artificial Sequence
  Synthetic polypeptide representing artificial human antibody CDR-H2 region
IYSATDSI

SEQ ID NO: 13353 - protein, 8 aa, Artificial Sequence
  Synthetic polypeptide representing artificial human antibody CDR-H2 region
ISGGRGTT

SEQ ID NO: 13354 - protein, 8 aa, Artificial Sequence
  Synthetic polypeptide representing artificial human antibody CDR-H2 region
ISSRSRST

SEQ ID NO: 13355 - protein, 8 aa, Artificial Sequence
  Synthetic polypeptide representing artificial human antibody CDR-H2 region
ISRSSSYI

SEQ ID NO: 13356 - protein, 8 aa, Artificial Sequence
  Synthetic polypeptide representing artificial human antibody CDR-H2 region
ISGNGFTT

SEQ ID NO: 13357 - protein, 8 aa, Artificial Sequence
  Synthetic polypeptide representing artificial human antibody CDR-H2 region
INVDNGNT

SEQ ID NO: 13358 - protein, 7 aa, Artificial Sequence
  Synthetic polypeptide representing artificial human antibody CDR-H2 region
ISKTGRT

SEQ ID NO: 13359 - protein, 8 aa, Artificial Sequence
  Synthetic polypeptide representing artificial human antibody CDR-H2 region
ISGSGGRT

SEQ ID NO: 13360 - protein, 8 aa, Artificial Sequence
  Synthetic polypeptide representing artificial human antibody CDR-H2 region
ITTTGRTT

SEQ ID NO: 13361 - protein, 10 aa, Artificial Sequence
  Synthetic polypeptide representing artificial human antibody CDR-H2 region
TRNKFSSDTT

SEQ ID NO: 13362 - protein, 8 aa, Artificial Sequence
  Synthetic polypeptide representing artificial human antibody CDR-H2 region
ISSSSSTI

SEQ ID NO: 13363 - protein, 7 aa, Artificial Sequence
  Synthetic polypeptide representing artificial human antibody CDR-H2 region
VHHTGAT

SEQ ID NO: 13364 - protein, 10 aa, Artificial Sequence
  Synthetic polypeptide representing artificial human antibody CDR-H2 region
IKSERDGATA

SEQ ID NO: 13365 - protein, 8 aa, Artificial Sequence
  Synthetic polypeptide representing artificial human antibody CDR-H2 region
IIPALGTT

SEQ ID NO: 13366 - protein, 7 aa, Artificial Sequence
  Synthetic polypeptide representing artificial human antibody CDR-H2 region
INRRSEF

SEQ ID NO: 13367 - protein, 8 aa, Artificial Sequence
  Synthetic polypeptide representing artificial human antibody CDR-H2 region
IYPGDSKT

SEQ ID NO: 13368 - protein, 8 aa, Artificial Sequence
  Synthetic polypeptide representing artificial human antibody CDR-H2 region
IWYDGSEK

SEQ ID NO: 13369 - protein, 7 aa, Artificial Sequence
  Synthetic polypeptide representing artificial human antibody CDR-H2 region
IYYSGST

SEQ ID NO: 13370 - protein, 8 aa, Artificial Sequence
  Synthetic polypeptide representing artificial human antibody CDR-H2 region
IKQDGSEK

SEQ ID NO: 13371 - protein, 8 aa, Artificial Sequence
  Synthetic polypeptide representing artificial human antibody CDR-H2 region
ISWNSGTI

SEQ ID NO: 13372 - protein, 8 aa, Artificial Sequence
  Synthetic polypeptide representing artificial human antibody CDR-H2 region
ISGSGLTT

SEQ ID NO: 13373 - protein, 10 aa, Artificial Sequence
  Synthetic polypeptide representing artificial human antibody CDR-H2 region
TTNQIDTYTT

SEQ ID NO: 13374 - protein, 7 aa, Artificial Sequence
  Synthetic polypeptide representing artificial human antibody CDR-H2 region
ISHPGRA

SEQ ID NO: 13375 - protein, 10 aa, Artificial Sequence
  Synthetic polypeptide representing artificial human antibody CDR-H2 region
IRHKVHSYTT

SEQ ID NO: 13376 - protein, 8 aa, Artificial Sequence
  Synthetic polypeptide representing artificial human antibody CDR-H2 region
INTNTGKS

SEQ ID NO: 13377 - protein, 8 aa, Artificial Sequence
  Synthetic polypeptide representing artificial human antibody CDR-H2 region
ISYDGSNK

SEQ ID NO: 13378 - protein, 8 aa, Artificial Sequence
  Synthetic polypeptide representing artificial human antibody CDR-H2 region
IYPHKSDT

SEQ ID NO: 13379 - protein, 8 aa, Artificial Sequence
  Synthetic polypeptide representing artificial human antibody CDR-H2 region
IYPKGGST

SEQ ID NO: 13380 - protein, 8 aa, Artificial Sequence
  Synthetic polypeptide representing artificial human antibody CDR-H2 region
IDSDGSTT

SEQ ID NO: 13381 - protein, 8 aa, Artificial Sequence
  Synthetic polypeptide representing artificial human antibody CDR-H2 region
IWYDGSNK

SEQ ID NO: 13382 - protein, 8 aa, Artificial Sequence
  Synthetic polypeptide representing artificial human antibody CDR-H2 region
ISYTGTIT

SEQ ID NO: 13383 - protein, 7 aa, Artificial Sequence
  Synthetic polypeptide representing artificial human antibody CDR-H2 region
IYYSGST

SEQ ID NO: 13384 - protein, 8 aa, Artificial Sequence
  Synthetic polypeptide representing artificial human antibody CDR-H2 region
ISASGFNT

SEQ ID NO: 13385 - protein, 7 aa, Artificial Sequence
  Synthetic polypeptide representing artificial human antibody CDR-H2 region
MYYSGST

SEQ ID NO: 13386 - protein, 7 aa, Artificial Sequence
  Synthetic polypeptide representing artificial human antibody CDR-H2 region
MYNTGRT

SEQ ID NO: 13387 - protein, 8 aa, Artificial Sequence
  Synthetic polypeptide representing artificial human antibody CDR-H2 region
INPSDSYI

SEQ ID NO: 13388 - protein, 10 aa, Artificial Sequence
  Synthetic polypeptide representing artificial human antibody CDR-H2 region
VRMKAFNYAT

SEQ ID NO: 13389 - protein, 7 aa, Artificial Sequence
  Synthetic polypeptide representing artificial human antibody CDR-H2 region
VFHGGIA

SEQ ID NO: 13390 - protein, 8 aa, Artificial Sequence
  Synthetic polypeptide representing artificial human antibody CDR-H2 region
ISGSGKNI

SEQ ID NO: 13391 - protein, 8 aa, Artificial Sequence
  Synthetic polypeptide representing artificial human antibody CDR-H2 region
ISYEGRNK

SEQ ID NO: 13392 - protein, 8 aa, Artificial Sequence
  Synthetic polypeptide representing artificial human antibody CDR-H2 region
IVVGSGNT

SEQ ID NO: 13393 - protein, 8 aa, Artificial Sequence
  Synthetic polypeptide representing artificial human antibody CDR-H2 region
LIENGVDR

SEQ ID NO: 13394 - protein, 8 aa, Artificial Sequence
  Synthetic polypeptide representing artificial human antibody CDR-H2 region
ISWNSGTK

SEQ ID NO: 13395 - protein, 8 aa, Artificial Sequence
  Synthetic polypeptide representing artificial human antibody CDR-H2 region
IRWNNGPI

SEQ ID NO: 13396 - protein, 8 aa, Artificial Sequence
  Synthetic polypeptide representing artificial human antibody CDR-H2 region
ITGDGIGT

SEQ ID NO: 13397 - protein, 7 aa, Artificial Sequence
  Synthetic polypeptide representing artificial human antibody CDR-H2 region
INHSGST

SEQ ID NO: 13398 - protein, 8 aa, Artificial Sequence
  Synthetic polypeptide representing artificial human antibody CDR-H2 region
ISGSGTTI

SEQ ID NO: 13399 - protein, 8 aa, Artificial Sequence
  Synthetic polypeptide representing artificial human antibody CDR-H2 region
ISIYNGNT

SEQ ID NO: 13400 - protein, 7 aa, Artificial Sequence
  Synthetic polypeptide representing artificial human antibody CDR-H2 region
IYYSGST

SEQ ID NO: 13401 - protein, 8 aa, Artificial Sequence
  Synthetic polypeptide representing artificial human antibody CDR-H2 region
IDGPTTNT

SEQ ID NO: 13402 - protein, 8 aa, Artificial Sequence
  Synthetic polypeptide representing artificial human antibody CDR-H2 region
ITSNSKYI

SEQ ID NO: 13403 - protein, 11 aa, Artificial Sequence
  Synthetic polypeptide representing artificial human antibody CDR-H2 region
ISYAGSGGSDE

SEQ ID NO: 13404 - protein, 8 aa, Artificial Sequence
  Synthetic polypeptide representing artificial human antibody CDR-H2 region
ISSSGSTI

SEQ ID NO: 13405 - protein, 8 aa, Artificial Sequence
  Synthetic polypeptide representing artificial human antibody CDR-H2 region
IYSGGGGT

SEQ ID NO: 13406 - protein, 8 aa, Artificial Sequence
  Synthetic polypeptide representing artificial human antibody CDR-H2 region
INSGADKI

SEQ ID NO: 13407 - protein, 8 aa, Artificial Sequence
  Synthetic polypeptide representing artificial human antibody CDR-H2 region
MSHDGFSK

SEQ ID NO: 13408 - protein, 7 aa, Artificial Sequence
  Synthetic polypeptide representing artificial human antibody CDR-H2 region
INHSGST

SEQ ID NO: 13409 - protein, 8 aa, Artificial Sequence
  Synthetic polypeptide representing artificial human antibody CDR-H2 region
AGFSNDDR

SEQ ID NO: 13410 - protein, 8 aa, Artificial Sequence
  Synthetic polypeptide representing artificial human antibody CDR-H2 region
IYSSDGST

SEQ ID NO: 13411 - protein, 8 aa, Artificial Sequence
  Synthetic polypeptide representing artificial human antibody CDR-H2 region
ISSSSSYI

SEQ ID NO: 13412 - protein, 8 aa, Artificial Sequence
  Synthetic polypeptide representing artificial human antibody CDR-H2 region
IFYDGTDG

SEQ ID NO: 13413 - protein, 8 aa, Artificial Sequence
  Synthetic polypeptide representing artificial human antibody CDR-H2 region
VSSNGDTI

SEQ ID NO: 13414 - protein, 8 aa, Artificial Sequence
  Synthetic polypeptide representing artificial human antibody CDR-H2 region
INPGDGRT

SEQ ID NO: 13415 - protein, 8 aa, Artificial Sequence
  Synthetic polypeptide representing artificial human antibody CDR-H2 region
ISASSTYV

SEQ ID NO: 13416 - protein, 8 aa, Artificial Sequence
  Synthetic polypeptide representing artificial human antibody CDR-H2 region
VSPSGVTK

SEQ ID NO: 13417 - protein, 8 aa, Artificial Sequence
  Synthetic polypeptide representing artificial human antibody CDR-H2 region
IYSGGGGT

SEQ ID NO: 13418 - protein, 10 aa, Artificial Sequence
  Synthetic polypeptide representing artificial human antibody CDR-H2 region
VKRRTDGGTI

SEQ ID NO: 13419 - protein, 8 aa, Artificial Sequence
  Synthetic polypeptide representing artificial human antibody CDR-H2 region
ISSSGSII

SEQ ID NO: 13420 - protein, 8 aa, Artificial Sequence
  Synthetic polypeptide representing artificial human antibody CDR-H2 region
LYSDDSST

SEQ ID NO: 13421 - protein, 8 aa, Artificial Sequence
  Synthetic polypeptide representing artificial human antibody CDR-H2 region
IYSGDSST

SEQ ID NO: 13422 - protein, 7 aa, Artificial Sequence
  Synthetic polypeptide representing artificial human antibody CDR-H2 region
IDWDDDK

SEQ ID NO: 13423 - protein, 8 aa, Artificial Sequence
  Synthetic polypeptide representing artificial human antibody CDR-H2 region
TSSYTGNP

SEQ ID NO: 13424 - protein, 7 aa, Artificial Sequence
  Synthetic polypeptide representing artificial human antibody CDR-H2 region
FYNSGST

SEQ ID NO: 13425 - protein, 8 aa, Artificial Sequence
  Synthetic polypeptide representing artificial human antibody CDR-H2 region
ISGSGYTS

SEQ ID NO: 13426 - protein, 7 aa, Artificial Sequence
  Synthetic polypeptide representing artificial human antibody CDR-H2 region
ISHDDSK

SEQ ID NO: 13427 - protein, 8 aa, Artificial Sequence
  Synthetic polypeptide representing artificial human antibody CDR-H2 region
ISYDGSNK

SEQ ID NO: 13428 - protein, 8 aa, Artificial Sequence
  Synthetic polypeptide representing artificial human antibody CDR-H2 region
ITPYNGNT

SEQ ID NO: 13429 - protein, 7 aa, Artificial Sequence
  Synthetic polypeptide representing artificial human antibody CDR-H2 region
IYYSGST

SEQ ID NO: 13430 - protein, 10 aa, Artificial Sequence
  Synthetic polypeptide representing artificial human antibody CDR-H2 region
SRNKGRSYTT

SEQ ID NO: 13431 - protein, 8 aa, Artificial Sequence
  Synthetic polypeptide representing artificial human antibody CDR-H2 region
ISWNSNII

SEQ ID NO: 13432 - protein, 8 aa, Artificial Sequence
  Synthetic polypeptide representing artificial human antibody CDR-H2 region
IYSGDSST

SEQ ID NO: 13433 - protein, 8 aa, Artificial Sequence
  Synthetic polypeptide representing artificial human antibody CDR-H2 region
LYSDDGAT

SEQ ID NO: 13434 - protein, 10 aa, Artificial Sequence
  Synthetic polypeptide representing artificial human antibody CDR-H2 region
IRSKAFDWTT

SEQ ID NO: 13435 - protein, 7 aa, Artificial Sequence
  Synthetic polypeptide representing artificial human antibody CDR-H2 region
IYYSGST

SEQ ID NO: 13436 - protein, 8 aa, Artificial Sequence
  Synthetic polypeptide representing artificial human antibody CDR-H2 region
ITWNSGNI

SEQ ID NO: 13437 - protein, 7 aa, Artificial Sequence
  Synthetic polypeptide representing artificial human antibody CDR-H2 region
IYYSGST

SEQ ID NO: 13438 - protein, 8 aa, Artificial Sequence
  Synthetic polypeptide representing artificial human antibody CDR-H2 region
MSHDGISK

SEQ ID NO: 13439 - protein, 7 aa, Artificial Sequence
  Synthetic polypeptide representing artificial human antibody CDR-H2 region
IYYSGTT

SEQ ID NO: 13440 - protein, 8 aa, Artificial Sequence
  Synthetic polypeptide representing artificial human antibody CDR-H2 region
INPNGGDT

SEQ ID NO: 13441 - protein, 8 aa, Artificial Sequence
  Synthetic polypeptide representing artificial human antibody CDR-H2 region
ISYDGSNK

SEQ ID NO: 13442 - protein, 8 aa, Artificial Sequence
  Synthetic polypeptide representing artificial human antibody CDR-H2 region
LSLSSGTP

SEQ ID NO: 13443 - protein, 7 aa, Artificial Sequence
  Synthetic polypeptide representing artificial human antibody CDR-H2 region
FDYTGSP

SEQ ID NO: 13444 - protein, 7 aa, Artificial Sequence
  Synthetic polypeptide representing artificial human antibody CDR-H2 region
IYSGGST

SEQ ID NO: 13445 - protein, 7 aa, Artificial Sequence
  Synthetic polypeptide representing artificial human antibody CDR-H2 region
ISGGGVT

SEQ ID NO: 13446 - protein, 8 aa, Artificial Sequence
  Synthetic polypeptide representing artificial human antibody CDR-H2 region
IMPIFGTT

SEQ ID NO: 13447 - protein, 8 aa, Artificial Sequence
  Synthetic polypeptide representing artificial human antibody CDR-H2 region
IDATSTYT

SEQ ID NO: 13448 - protein, 8 aa, Artificial Sequence
  Synthetic polypeptide representing artificial human antibody CDR-H2 region
ISYDGSKK

SEQ ID NO: 13449 - protein, 8 aa, Artificial Sequence
  Synthetic polypeptide representing artificial human antibody CDR-H2 region
IITDSGNT

SEQ ID NO: 13450 - protein, 8 aa, Artificial Sequence
  Synthetic polypeptide representing artificial human antibody CDR-H2 region
IAHDGHQI

SEQ ID NO: 13451 - protein, 8 aa, Artificial Sequence
  Synthetic polypeptide representing artificial human antibody CDR-H2 region
INPDTGYA

SEQ ID NO: 13452 - protein, 7 aa, Artificial Sequence
  Synthetic polypeptide representing artificial human antibody CDR-H2 region
ISGSGVT

SEQ ID NO: 13453 - protein, 7 aa, Artificial Sequence
  Synthetic polypeptide representing artificial human antibody CDR-H2 region
IYSSGPT

SEQ ID NO: 13454 - protein, 8 aa, Artificial Sequence
  Synthetic polypeptide representing artificial human antibody CDR-H2 region
INAGDGHT

SEQ ID NO: 13455 - protein, 8 aa, Artificial Sequence
  Synthetic polypeptide representing artificial human antibody CDR-H2 region
INPRDGDT

SEQ ID NO: 13456 - protein, 8 aa, Artificial Sequence
  Synthetic polypeptide representing artificial human antibody CDR-H2 region
IITGNGET

SEQ ID NO: 13457 - protein, 10 aa, Artificial Sequence
  Synthetic polypeptide representing artificial human antibody CDR-H2 region
IRSKSDGEKV

SEQ ID NO: 13458 - protein, 7 aa, Artificial Sequence
  Synthetic polypeptide representing artificial human antibody CDR-H2 region
IYSGGTT

SEQ ID NO: 13459 - protein, 7 aa, Artificial Sequence
  Synthetic polypeptide representing artificial human antibody CDR-H2 region
IYWDDDK

SEQ ID NO: 13460 - protein, 8 aa, Artificial Sequence
  Synthetic polypeptide representing artificial human antibody CDR-H2 region
INPDTGYT

SEQ ID NO: 13461 - protein, 8 aa, Artificial Sequence
  Synthetic polypeptide representing artificial human antibody CDR-H2 region
ITASSAYI

SEQ ID NO: 13462 - protein, 8 aa, Artificial Sequence
  Synthetic polypeptide representing artificial human antibody CDR-H2 region
IHGGDSDT

SEQ ID NO: 13463 - protein, 8 aa, Artificial Sequence
  Synthetic polypeptide representing artificial human antibody CDR-H2 region
IDPSGGST

SEQ ID NO: 13464 - protein, 6 aa, Artificial Sequence
  Synthetic polypeptide representing artificial human antibody CDR-H2 region
SDGSRT

SEQ ID NO: 13465 - protein, 8 aa, Artificial Sequence
  Synthetic polypeptide representing artificial human antibody CDR-H2 region
ITNSGDLT

SEQ ID NO: 13466 - protein, 11 aa, Artificial Sequence
  Synthetic polypeptide representing artificial human antibody CDR-H2 region
IRIVSPIGGST

SEQ ID NO: 13467 - protein, 8 aa, Artificial Sequence
  Synthetic polypeptide representing artificial human antibody CDR-H2 region
ISDSGVGT

SEQ ID NO: 13468 - protein, 8 aa, Artificial Sequence
  Synthetic polypeptide representing artificial human antibody CDR-H2 region
IIIDSGET

SEQ ID NO: 13469 - protein, 8 aa, Artificial Sequence
  Synthetic polypeptide representing artificial human antibody CDR-H2 region
IKQDGSEK

SEQ ID NO: 13470 - protein, 8 aa, Artificial Sequence
  Synthetic polypeptide representing artificial human antibody CDR-H2 region
ISGSGLMT

SEQ ID NO: 13471 - protein, 8 aa, Artificial Sequence
  Synthetic polypeptide representing artificial human antibody CDR-H2 region
INSDGTTT

SEQ ID NO: 13472 - protein, 8 aa, Artificial Sequence
  Synthetic polypeptide representing artificial human antibody CDR-H2 region
ISSSSSYI

SEQ ID NO: 13473 - protein, 8 aa, Artificial Sequence
  Synthetic polypeptide representing artificial human antibody CDR-H2 region
FSGSGGNT

SEQ ID NO: 13474 - protein, 8 aa, Artificial Sequence
  Synthetic polypeptide representing artificial human antibody CDR-H2 region
INRGGTRI

SEQ ID NO: 13475 - protein, 8 aa, Artificial Sequence
  Synthetic polypeptide representing artificial human antibody CDR-H2 region
ISAYNGKT

SEQ ID NO: 13476 - protein, 8 aa, Artificial Sequence
  Synthetic polypeptide representing artificial human antibody CDR-H2 region
ISPIGDYI

SEQ ID NO: 13477 - protein, 10 aa, Artificial Sequence
  Synthetic polypeptide representing artificial human antibody CDR-H2 region
IKITPHSGDT

SEQ ID NO: 13478 - protein, 8 aa, Artificial Sequence
  Synthetic polypeptide representing artificial human antibody CDR-H2 region
ISSTGSTT

SEQ ID NO: 13479 - protein, 8 aa, Artificial Sequence
  Synthetic polypeptide representing artificial human antibody CDR-H2 region
IVGSGDIT

SEQ ID NO: 13480 - protein, 10 aa, Artificial Sequence
  Synthetic polypeptide representing artificial human antibody CDR-H2 region
IKRKSDGETT

SEQ ID NO: 13481 - protein, 7 aa, Artificial Sequence
  Synthetic polypeptide representing artificial human antibody CDR-H2 region
ISGGGVT

SEQ ID NO: 13482 - protein, 8 aa, Artificial Sequence
  Synthetic polypeptide representing artificial human antibody CDR-H2 region
VNAGDGAT

SEQ ID NO: 13483 - protein, 8 aa, Artificial Sequence
  Synthetic polypeptide representing artificial human antibody CDR-H2 region
ITQSSSFT

SEQ ID NO: 13484 - protein, 7 aa, Artificial Sequence
  Synthetic polypeptide representing artificial human antibody CDR-H2 region
IYWDDDK

SEQ ID NO: 13485 - protein, 8 aa, Artificial Sequence
  Synthetic polypeptide representing artificial human antibody CDR-H2 region
IWYDGSNK

SEQ ID NO: 13486 - protein, 8 aa, Artificial Sequence
  Synthetic polypeptide representing artificial human antibody CDR-H2 region
INTNTGNP

SEQ ID NO: 13487 - protein, 8 aa, Artificial Sequence
  Synthetic polypeptide representing artificial human antibody CDR-H2 region
IRSDVGIT

SEQ ID NO: 13488 - protein, 8 aa, Artificial Sequence
  Synthetic polypeptide representing artificial human antibody CDR-H2 region
VTPSGENS

SEQ ID NO: 13489 - protein, 8 aa, Artificial Sequence
  Synthetic polypeptide representing artificial human antibody CDR-H2 region
INPGAGDI

SEQ ID NO: 13490 - protein, 8 aa, Artificial Sequence
  Synthetic polypeptide representing artificial human antibody CDR-H2 region
IFGSGSGT

SEQ ID NO: 13491 - protein, 8 aa, Artificial Sequence
  Synthetic polypeptide representing artificial human antibody CDR-H2 region
IITGNGET

SEQ ID NO: 13492 - protein, 10 aa, Artificial Sequence
  Synthetic polypeptide representing artificial human antibody CDR-H2 region
IKSKSDGGTT

SEQ ID NO: 13493 - protein, 8 aa, Artificial Sequence
  Synthetic polypeptide representing artificial human antibody CDR-H2 region
IWFDGSNT

SEQ ID NO: 13494 - protein, 8 aa, Artificial Sequence
  Synthetic polypeptide representing artificial human antibody CDR-H2 region
INAANGNT

SEQ ID NO: 13495 - protein, 6 aa, Artificial Sequence
  Synthetic polypeptide representing artificial human antibody CDR-H2 region
IWYRGI

SEQ ID NO: 13496 - protein, 8 aa, Artificial Sequence
  Synthetic polypeptide representing artificial human antibody CDR-H2 region
IFAYDSDT

SEQ ID NO: 13497 - protein, 10 aa, Artificial Sequence
  Synthetic polypeptide representing artificial human antibody CDR-H2 region
IDGDGDGSRT

SEQ ID NO: 13498 - protein, 7 aa, Artificial Sequence
  Synthetic polypeptide representing artificial human antibody CDR-H2 region
INQSGTT

SEQ ID NO: 13499 - protein, 8 aa, Artificial Sequence
  Synthetic polypeptide representing artificial human antibody CDR-H2 region
ISPTGGST

SEQ ID NO: 13500 - protein, 8 aa, Artificial Sequence
  Synthetic polypeptide representing artificial human antibody CDR-H2 region
IITDSGRT

SEQ ID NO: 13501 - protein, 8 aa, Artificial Sequence
  Synthetic polypeptide representing artificial human antibody CDR-H2 region
INDDATDT

SEQ ID NO: 13502 - protein, 7 aa, Artificial Sequence
  Synthetic polypeptide representing artificial human antibody CDR-H2 region
IWYSGST

SEQ ID NO: 13503 - protein, 5 aa, Artificial Sequence
  Synthetic polypeptide representing artificial human antibody CDR-H2 region
IGGPT

SEQ ID NO: 13504 - protein, 8 aa, Artificial Sequence
  Synthetic polypeptide representing artificial human antibody CDR-H2 region
MTSDVSRA

SEQ ID NO: 13505 - protein, 7 aa, Artificial Sequence
  Synthetic polypeptide representing artificial human antibody CDR-H2 region
IYYSGST

SEQ ID NO: 13506 - protein, 7 aa, Artificial Sequence
  Synthetic polypeptide representing artificial human antibody CDR-H2 region
IYYSGST

SEQ ID NO: 13507 - protein, 10 aa, Artificial Sequence
  Synthetic polypeptide representing artificial human antibody CDR-H2 region
IKTKPEGGTL

SEQ ID NO: 13508 - protein, 8 aa, Artificial Sequence
  Synthetic polypeptide representing artificial human antibody CDR-H2 region
ISDRGFDT

SEQ ID NO: 13509 - protein, 8 aa, Artificial Sequence
  Synthetic polypeptide representing artificial human antibody CDR-H2 region
ISGSGTST

SEQ ID NO: 13510 - protein, 8 aa, Artificial Sequence
  Synthetic polypeptide representing artificial human antibody CDR-H2 region
FSGSGGNT

SEQ ID NO: 13511 - protein, 8 aa, Artificial Sequence
  Synthetic polypeptide representing artificial human antibody CDR-H2 region
INAGNGNT

SEQ ID NO: 13512 - protein, 7 aa, Artificial Sequence
  Synthetic polypeptide representing artificial human antibody CDR-H2 region
VYYSGRT

SEQ ID NO: 13513 - protein, 8 aa, Artificial Sequence
  Synthetic polypeptide representing artificial human antibody CDR-H2 region
INPNSGGT

SEQ ID NO: 13514 - protein, 7 aa, Artificial Sequence
  Synthetic polypeptide representing artificial human antibody CDR-H2 region
LYFNGGT

SEQ ID NO: 13515 - protein, 5 aa, Artificial Sequence
  Synthetic polypeptide representing artificial human antibody CDR-H2 region
IGGAE

SEQ ID NO: 13516 - protein, 8 aa, Artificial Sequence
  Synthetic polypeptide representing artificial human antibody CDR-H2 region
INPDTGYA

SEQ ID NO: 13517 - protein, 8 aa, Artificial Sequence
  Synthetic polypeptide representing artificial human antibody CDR-H2 region
IAQSNINI

SEQ ID NO: 13518 - protein, 8 aa, Artificial Sequence
  Synthetic polypeptide representing artificial human antibody CDR-H2 region
ISSSSIYI

SEQ ID NO: 13519 - protein, 7 aa, Artificial Sequence
  Synthetic polypeptide representing artificial human antibody CDR-H2 region
INHSGST

SEQ ID NO: 13520 - protein, 6 aa, Artificial Sequence
  Synthetic polypeptide representing artificial human antibody CDR-H2 region
SDGSRT

SEQ ID NO: 13521 - protein, 8 aa, Artificial Sequence
  Synthetic polypeptide representing artificial human antibody CDR-H2 region
ISANTKNT

SEQ ID NO: 13522 - protein, 8 aa, Artificial Sequence
  Synthetic polypeptide representing artificial human antibody CDR-H2 region
ISNDGNTK

SEQ ID NO: 13523 - protein, 11 aa, Artificial Sequence
  Synthetic polypeptide representing artificial human antibody CDR-H2 region
ISGSGDSTFST

SEQ ID NO: 13524 - protein, 8 aa, Artificial Sequence
  Synthetic polypeptide representing artificial human antibody CDR-H2 region
INAGDGHT

SEQ ID NO: 13525 - protein, 7 aa, Artificial Sequence
  Synthetic polypeptide representing artificial human antibody CDR-H2 region
FHSSGTT

SEQ ID NO: 13526 - protein, 7 aa, Artificial Sequence
  Synthetic polypeptide representing artificial human antibody CDR-H2 region
LAPSGGT

SEQ ID NO: 13527 - protein, 10 aa, Artificial Sequence
  Synthetic polypeptide representing artificial human antibody CDR-H2 region
IKSNSEGGTT

SEQ ID NO: 13528 - protein, 7 aa, Artificial Sequence
  Synthetic polypeptide representing artificial human antibody CDR-H2 region
IYHSGST

SEQ ID NO: 13529 - protein, 7 aa, Artificial Sequence
  Synthetic polypeptide representing artificial human antibody CDR-H2 region
ISGGGVT

SEQ ID NO: 13530 - protein, 8 aa, Artificial Sequence
  Synthetic polypeptide representing artificial human antibody CDR-H2 region
ISYDGSKK

SEQ ID NO: 13531 - protein, 8 aa, Artificial Sequence
  Synthetic polypeptide representing artificial human antibody CDR-H2 region
IAYDGNTI

SEQ ID NO: 13532 - protein, 8 aa, Artificial Sequence
  Synthetic polypeptide representing artificial human antibody CDR-H2 region
ISGSGGST

SEQ ID NO: 13533 - protein, 7 aa, Artificial Sequence
  Synthetic polypeptide representing artificial human antibody CDR-H2 region
VYYSGIT

SEQ ID NO: 13534 - protein, 10 aa, Artificial Sequence
  Synthetic polypeptide representing artificial human antibody CDR-H2 region
IRSESDGEKV

SEQ ID NO: 13535 - protein, 7 aa, Artificial Sequence
  Synthetic polypeptide representing artificial human antibody CDR-H2 region
SRYNGNT

SEQ ID NO: 13536 - protein, 7 aa, Artificial Sequence
  Synthetic polypeptide representing artificial human antibody CDR-H2 region
IYYSGNT

SEQ ID NO: 13537 - protein, 10 aa, Artificial Sequence
  Synthetic polypeptide representing artificial human antibody CDR-H2 region
VKSIADTGAR

SEQ ID NO: 13538 - protein, 8 aa, Artificial Sequence
  Synthetic polypeptide representing artificial human antibody CDR-H2 region
INPYSGGT

SEQ ID NO: 13539 - protein, 8 aa, Artificial Sequence
  Synthetic polypeptide representing artificial human antibody CDR-H2 region
LNPLNGKA

SEQ ID NO: 13540 - protein, 10 aa, Artificial Sequence
  Synthetic polypeptide representing artificial human antibody CDR-H2 region
IKSKSEGETI

SEQ ID NO: 13541 - protein, 8 aa, Artificial Sequence
  Synthetic polypeptide representing artificial human antibody CDR-H2 region
IWYDGKNE

SEQ ID NO: 13542 - protein, 10 aa, Artificial Sequence
  Synthetic polypeptide representing artificial human antibody CDR-H2 region
IKSDINGGTT

SEQ ID NO: 13543 - protein, 8 aa, Artificial Sequence
  Synthetic polypeptide representing artificial human antibody CDR-H2 region
ITGNSKTI

SEQ ID NO: 13544 - protein, 7 aa, Artificial Sequence
  Synthetic polypeptide representing artificial human antibody CDR-H2 region
LYSDGRA

SEQ ID NO: 13545 - protein, 8 aa, Artificial Sequence
  Synthetic polypeptide representing artificial human antibody CDR-H2 region
INPNSGGT

SEQ ID NO: 13546 - protein, 8 aa, Artificial Sequence
  Synthetic polypeptide representing artificial human antibody CDR-H2 region
ISGGGDNT

SEQ ID NO: 13547 - protein, 8 aa, Artificial Sequence
  Synthetic polypeptide representing artificial human antibody CDR-H2 region
VNPRGDRT

SEQ ID NO: 13548 - protein, 8 aa, Artificial Sequence
  Synthetic polypeptide representing artificial human antibody CDR-H2 region
ISYDGENK

SEQ ID NO: 13549 - protein, 7 aa, Artificial Sequence
  Synthetic polypeptide representing artificial human antibody CDR-H2 region
MHSGENI

SEQ ID NO: 13550 - protein, 8 aa, Artificial Sequence
  Synthetic polypeptide representing artificial human antibody CDR-H2 region
INPNSGGT

SEQ ID NO: 13551 - protein, 7 aa, Artificial Sequence
  Synthetic polypeptide representing artificial human antibody CDR-H2 region
INHSGST

SEQ ID NO: 13552 - protein, 7 aa, Artificial Sequence
  Synthetic polypeptide representing artificial human antibody CDR-H2 region
SYYDDAT

SEQ ID NO: 13553 - protein, 8 aa, Artificial Sequence
  Synthetic polypeptide representing artificial human antibody CDR-H2 region
ISAHNGDT

SEQ ID NO: 13554 - protein, 7 aa, Artificial Sequence
  Synthetic polypeptide representing artificial human antibody CDR-H2 region
INHSGST

SEQ ID NO: 13555 - protein, 8 aa, Artificial Sequence
  Synthetic polypeptide representing artificial human antibody CDR-H2 region
IIPIFDTA

SEQ ID NO: 13556 - protein, 8 aa, Artificial Sequence
  Synthetic polypeptide representing artificial human antibody CDR-H2 region
ISVRGGDI

SEQ ID NO: 13557 - protein, 8 aa, Artificial Sequence
  Synthetic polypeptide representing artificial human antibody CDR-H2 region
ICSTGDCT

SEQ ID NO: 13558 - protein, 8 aa, Artificial Sequence
  Synthetic polypeptide representing artificial human antibody CDR-H2 region
ITSRGEYT

SEQ ID NO: 13559 - protein, 7 aa, Artificial Sequence
  Synthetic polypeptide representing artificial human antibody CDR-H2 region
IYSGGST

SEQ ID NO: 13560 - protein, 8 aa, Artificial Sequence
  Synthetic polypeptide representing artificial human antibody CDR-H2 region
ISAYNGNT

SEQ ID NO: 13561 - protein, 8 aa, Artificial Sequence
  Synthetic polypeptide representing artificial human antibody CDR-H2 region
IGPSSTPI

SEQ ID NO: 13562 - protein, 10 aa, Artificial Sequence
  Synthetic polypeptide representing artificial human antibody CDR-H2 region
IRSQPYGETT

SEQ ID NO: 13563 - protein, 8 aa, Artificial Sequence
  Synthetic polypeptide representing artificial human antibody CDR-H2 region
ISGNNGGP

SEQ ID NO: 13564 - protein, 8 aa, Artificial Sequence
  Synthetic polypeptide representing artificial human antibody CDR-H2 region
ISAYNGNT

SEQ ID NO: 13565 - protein, 7 aa, Artificial Sequence
  Synthetic polypeptide representing artificial human antibody CDR-H2 region
IYTSGRT

SEQ ID NO: 13566 - protein, 8 aa, Artificial Sequence
  Synthetic polypeptide representing artificial human antibody CDR-H2 region
INSDGTVV

SEQ ID NO: 13567 - protein, 8 aa, Artificial Sequence
  Synthetic polypeptide representing artificial human antibody CDR-H2 region
IIPIFGTT

SEQ ID NO: 13568 - protein, 8 aa, Artificial Sequence
  Synthetic polypeptide representing artificial human antibody CDR-H2 region
ISSSSSYI

SEQ ID NO: 13569 - protein, 7 aa, Artificial Sequence
  Synthetic polypeptide representing artificial human antibody CDR-H2 region
IDWDDDK

SEQ ID NO: 13570 - protein, 8 aa, Artificial Sequence
  Synthetic polypeptide representing artificial human antibody CDR-H2 region
ISYDGSNK

SEQ ID NO: 13571 - protein, 8 aa, Artificial Sequence
  Synthetic polypeptide representing artificial human antibody CDR-H2 region
ISGDKGNT

SEQ ID NO: 13572 - protein, 8 aa, Artificial Sequence
  Synthetic polypeptide representing artificial human antibody CDR-H2 region
ISSSFNYI

SEQ ID NO: 13573 - protein, 8 aa, Artificial Sequence
  Synthetic polypeptide representing artificial human antibody CDR-H2 region
VSGSGGGK

SEQ ID NO: 13574 - protein, 7 aa, Artificial Sequence
  Synthetic polypeptide representing artificial human antibody CDR-H2 region
INHSGST

SEQ ID NO: 13575 - protein, 8 aa, Artificial Sequence
  Synthetic polypeptide representing artificial human antibody CDR-H2 region
MNPNSGNT

SEQ ID NO: 13576 - protein, 7 aa, Artificial Sequence
  Synthetic polypeptide representing artificial human antibody CDR-H2 region
IFYSGST

SEQ ID NO: 13577 - protein, 8 aa, Artificial Sequence
  Synthetic polypeptide representing artificial human antibody CDR-H2 region
ISGNGGNI

SEQ ID NO: 13578 - protein, 8 aa, Artificial Sequence
  Synthetic polypeptide representing artificial human antibody CDR-H2 region
ISYEGSIK

SEQ ID NO: 13579 - protein, 8 aa, Artificial Sequence
  Synthetic polypeptide representing artificial human antibody CDR-H2 region
IYYSSGGT

SEQ ID NO: 13580 - protein, 8 aa, Artificial Sequence
  Synthetic polypeptide representing artificial human antibody CDR-H2 region
VKTDGSDK

SEQ ID NO: 13581 - protein, 7 aa, Artificial Sequence
  Synthetic polypeptide representing artificial human antibody CDR-H2 region
IYYSGST

SEQ ID NO: 13582 - protein, 8 aa, Artificial Sequence
  Synthetic polypeptide representing artificial human antibody CDR-H2 region
ISYDGSNK

SEQ ID NO: 13583 - protein, 8 aa, Artificial Sequence
  Synthetic polypeptide representing artificial human antibody CDR-H2 region
INPNSGGT

SEQ ID NO: 13584 - protein, 8 aa, Artificial Sequence
  Synthetic polypeptide representing artificial human antibody CDR-H2 region
ISYDGSNK

SEQ ID NO: 13585 - protein, 8 aa, Artificial Sequence
  Synthetic polypeptide representing artificial human antibody CDR-H2 region
ISSRSSYI

SEQ ID NO: 13586 - protein, 8 aa, Artificial Sequence
  Synthetic polypeptide representing artificial human antibody CDR-H2 region
IGSASRHI

SEQ ID NO: 13587 - protein, 8 aa, Artificial Sequence
  Synthetic polypeptide representing artificial human antibody CDR-H2 region
ISYDGSYE

SEQ ID NO: 13588 - protein, 7 aa, Artificial Sequence
  Synthetic polypeptide representing artificial human antibody CDR-H2 region
IYYSGDT

SEQ ID NO: 13589 - protein, 10 aa, Artificial Sequence
  Synthetic polypeptide representing artificial human antibody CDR-H2 region
IKRKVDGGST

SEQ ID NO: 13590 - protein, 7 aa, Artificial Sequence
  Synthetic polypeptide representing artificial human antibody CDR-H2 region
INHSGST

SEQ ID NO: 13591 - protein, 7 aa, Artificial Sequence
  Synthetic polypeptide representing artificial human antibody CDR-H2 region
INHSGST

SEQ ID NO: 13592 - protein, 7 aa, Artificial Sequence
  Synthetic polypeptide representing artificial human antibody CDR-H2 region
IHTSGPT

SEQ ID NO: 13593 - protein, 8 aa, Artificial Sequence
  Synthetic polypeptide representing artificial human antibody CDR-H2 region
FHPEDGER

SEQ ID NO: 13594 - protein, 7 aa, Artificial Sequence
  Synthetic polypeptide representing artificial human antibody CDR-H2 region
MYFTGTA

SEQ ID NO: 13595 - protein, 8 aa, Artificial Sequence
  Synthetic polypeptide representing artificial human antibody CDR-H2 region
MKPDGSEK

SEQ ID NO: 13596 - protein, 8 aa, Artificial Sequence
  Synthetic polypeptide representing artificial human antibody CDR-H2 region
ISGGGGST

SEQ ID NO: 13597 - protein, 8 aa, Artificial Sequence
  Synthetic polypeptide representing artificial human antibody CDR-H2 region
IWFDGSHQ

SEQ ID NO: 13598 - protein, 8 aa, Artificial Sequence
  Synthetic polypeptide representing artificial human antibody CDR-H2 region
ISSSSSYI

SEQ ID NO: 13599 - protein, 7 aa, Artificial Sequence
  Synthetic polypeptide representing artificial human antibody CDR-H2 region
IYYSGST

SEQ ID NO: 13600 - protein, 8 aa, Artificial Sequence
  Synthetic polypeptide representing artificial human antibody CDR-H2 region
INPGVGST

SEQ ID NO: 13601 - protein, 7 aa, Artificial Sequence
  Synthetic polypeptide representing artificial human antibody CDR-H2 region
INHSGST

SEQ ID NO: 13602 - protein, 6 aa, Artificial Sequence
  Synthetic polypeptide representing artificial human antibody CDR-H2 region
ISGSIT

SEQ ID NO: 13603 - protein, 7 aa, Artificial Sequence
  Synthetic polypeptide representing artificial human antibody CDR-H2 region
IYWDDDK

SEQ ID NO: 13604 - protein, 8 aa, Artificial Sequence
  Synthetic polypeptide representing artificial human antibody CDR-H2 region
INPNSGAT

SEQ ID NO: 13605 - protein, 8 aa, Artificial Sequence
  Synthetic polypeptide representing artificial human antibody CDR-H2 region
ISYDGSKK

SEQ ID NO: 13606 - protein, 8 aa, Artificial Sequence
  Synthetic polypeptide representing artificial human antibody CDR-H2 region
VSSFGSYT

SEQ ID NO: 13607 - protein, 7 aa, Artificial Sequence
  Synthetic polypeptide representing artificial human antibody CDR-H2 region
ISYSGST

SEQ ID NO: 13608 - protein, 7 aa, Artificial Sequence
  Synthetic polypeptide representing artificial human antibody CDR-H2 region
IYYSGST

SEQ ID NO: 13609 - protein, 8 aa, Artificial Sequence
  Synthetic polypeptide representing artificial human antibody CDR-H2 region
MNPNSGNT

SEQ ID NO: 13610 - protein, 8 aa, Artificial Sequence
  Synthetic polypeptide representing artificial human antibody CDR-H2 region
ISGDGGST

SEQ ID NO: 13611 - protein, 8 aa, Artificial Sequence
  Synthetic polypeptide representing artificial human antibody CDR-H2 region
MWSDVNNK

SEQ ID NO: 13612 - protein, 8 aa, Artificial Sequence
  Synthetic polypeptide representing artificial human antibody CDR-H2 region
ISYDGSNK

SEQ ID NO: 13613 - protein, 7 aa, Artificial Sequence
  Synthetic polypeptide representing artificial human antibody CDR-H2 region
TYTTGST

SEQ ID NO: 13614 - protein, 8 aa, Artificial Sequence
  Synthetic polypeptide representing artificial human antibody CDR-H2 region
ISSSGGST

SEQ ID NO: 13615 - protein, 8 aa, Artificial Sequence
  Synthetic polypeptide representing artificial human antibody CDR-H2 region
IRPDGAVQ

SEQ ID NO: 13616 - protein, 8 aa, Artificial Sequence
  Synthetic polypeptide representing artificial human antibody CDR-H2 region
IVPIVGLA

SEQ ID NO: 13617 - protein, 8 aa, Artificial Sequence
  Synthetic polypeptide representing artificial human antibody CDR-H2 region
ITHDGGVQ

SEQ ID NO: 13618 - protein, 8 aa, Artificial Sequence
  Synthetic polypeptide representing artificial human antibody CDR-H2 region
MNQDGSVR

SEQ ID NO: 13619 - protein, 8 aa, Artificial Sequence
  Synthetic polypeptide representing artificial human antibody CDR-H2 region
MNPNNGGT

SEQ ID NO: 13620 - protein, 8 aa, Artificial Sequence
  Synthetic polypeptide representing artificial human antibody CDR-H2 region
VSRGGDYT

SEQ ID NO: 13621 - protein, 8 aa, Artificial Sequence
  Synthetic polypeptide representing artificial human antibody CDR-H2 region
ISYDGSRT

SEQ ID NO: 13622 - protein, 7 aa, Artificial Sequence
  Synthetic polypeptide representing artificial human antibody CDR-H2 region
RTYTGNI

SEQ ID NO: 13623 - protein, 7 aa, Artificial Sequence
  Synthetic polypeptide representing artificial human antibody CDR-H2 region
IYYRGGT

SEQ ID NO: 13624 - protein, 7 aa, Artificial Sequence
  Synthetic polypeptide representing artificial human antibody CDR-H2 region
IYQSGRT

SEQ ID NO: 13625 - protein, 8 aa, Artificial Sequence
  Synthetic polypeptide representing artificial human antibody CDR-H2 region
INSDGRTT

SEQ ID NO: 13626 - protein, 7 aa, Artificial Sequence
  Synthetic polypeptide representing artificial human antibody CDR-H2 region
IFHNGNT

SEQ ID NO: 13627 - protein, 8 aa, Artificial Sequence
  Synthetic polypeptide representing artificial human antibody CDR-H2 region
ISGSGGST

SEQ ID NO: 13628 - protein, 7 aa, Artificial Sequence
  Synthetic polypeptide representing artificial human antibody CDR-H2 region
IYYSGST

SEQ ID NO: 13629 - protein, 8 aa, Artificial Sequence
  Synthetic polypeptide representing artificial human antibody CDR-H2 region
LDRTGSLT

SEQ ID NO: 13630 - protein, 8 aa, Artificial Sequence
  Synthetic polypeptide representing artificial human antibody CDR-H2 region
LKSDGSST

SEQ ID NO: 13631 - protein, 7 aa, Artificial Sequence
  Synthetic polypeptide representing artificial human antibody CDR-H2 region
VYYTGST

SEQ ID NO: 13632 - protein, 8 aa, Artificial Sequence
  Synthetic polypeptide representing artificial human antibody CDR-H2 region
INVGTGET

SEQ ID NO: 13633 - protein, 8 aa, Artificial Sequence
  Synthetic polypeptide representing artificial human antibody CDR-H2 region
ISSISDTS

SEQ ID NO: 13634 - protein, 8 aa, Artificial Sequence
  Synthetic polypeptide representing artificial human antibody CDR-H2 region
ISAFNGNT

SEQ ID NO: 13635 - protein, 8 aa, Artificial Sequence
  Synthetic polypeptide representing artificial human antibody CDR-H2 region
ISGSGGDS

SEQ ID NO: 13636 - protein, 7 aa, Artificial Sequence
  Synthetic polypeptide representing artificial human antibody CDR-H2 region
MYYRGST

SEQ ID NO: 13637 - protein, 8 aa, Artificial Sequence
  Synthetic polypeptide representing artificial human antibody CDR-H2 region
ISGSSGST

SEQ ID NO: 13638 - protein, 8 aa, Artificial Sequence
  Synthetic polypeptide representing artificial human antibody CDR-H2 region
IHPSDSET

SEQ ID NO: 13639 - protein, 8 aa, Artificial Sequence
  Synthetic polypeptide representing artificial human antibody CDR-H2 region
ISGSGGDT

SEQ ID NO: 13640 - protein, 8 aa, Artificial Sequence
  Synthetic polypeptide representing artificial human antibody CDR-H2 region
ITSGSTYL

SEQ ID NO: 13641 - protein, 8 aa, Artificial Sequence
  Synthetic polypeptide representing artificial human antibody CDR-H2 region
ISGSGGST

SEQ ID NO: 13642 - protein, 7 aa, Artificial Sequence
  Synthetic polypeptide representing artificial human antibody CDR-H2 region
IYGGGST

SEQ ID NO: 13643 - protein, 8 aa, Artificial Sequence
  Synthetic polypeptide representing artificial human antibody CDR-H2 region
MNPSSGNR

SEQ ID NO: 13644 - protein, 8 aa, Artificial Sequence
  Synthetic polypeptide representing artificial human antibody CDR-H2 region
IDPSDSYT

SEQ ID NO: 13645 - protein, 7 aa, Artificial Sequence
  Synthetic polypeptide representing artificial human antibody CDR-H2 region
VTNTGST

SEQ ID NO: 13646 - protein, 8 aa, Artificial Sequence
  Synthetic polypeptide representing artificial human antibody CDR-H2 region
IKEDGSDK

SEQ ID NO: 13647 - protein, 8 aa, Artificial Sequence
  Synthetic polypeptide representing artificial human antibody CDR-H2 region
IRNDGSDN

SEQ ID NO: 13648 - protein, 8 aa, Artificial Sequence
  Synthetic polypeptide representing artificial human antibody CDR-H2 region
IWISSSTT

SEQ ID NO: 13649 - protein, 7 aa, Artificial Sequence
  Synthetic polypeptide representing artificial human antibody CDR-H2 region
IYNDGGT

SEQ ID NO: 13650 - protein, 8 aa, Artificial Sequence
  Synthetic polypeptide representing artificial human antibody CDR-H2 region
VSGSGGST

SEQ ID NO: 13651 - protein, 10 aa, Artificial Sequence
  Synthetic polypeptide representing artificial human antibody CDR-H2 region
IRSKANSYAT

SEQ ID NO: 13652 - protein, 7 aa, Artificial Sequence
  Synthetic polypeptide representing artificial human antibody CDR-H2 region
TFYTGNT

SEQ ID NO: 13653 - protein, 7 aa, Artificial Sequence
  Synthetic polypeptide representing artificial human antibody CDR-H2 region
ISYTAGT

SEQ ID NO: 13654 - protein, 9 aa, Artificial Sequence
  Synthetic polypeptide representing artificial human antibody CDR-H2 region
IRTTRESGT

SEQ ID NO: 13655 - protein, 10 aa, Artificial Sequence
  Synthetic polypeptide representing artificial human antibody CDR-H2 region
IKKKSDGSTI

SEQ ID NO: 13656 - protein, 7 aa, Artificial Sequence
  Synthetic polypeptide representing artificial human antibody CDR-H2 region
IFHSGTT

SEQ ID NO: 13657 - protein, 8 aa, Artificial Sequence
  Synthetic polypeptide representing artificial human antibody CDR-H2 region
IKYDGSVQ

SEQ ID NO: 13658 - protein, 8 aa, Artificial Sequence
  Synthetic polypeptide representing artificial human antibody CDR-H2 region
IYPSDSDT

SEQ ID NO: 13659 - protein, 8 aa, Artificial Sequence
  Synthetic polypeptide representing artificial human antibody CDR-H2 region
IDPRSDAT

SEQ ID NO: 13660 - protein, 8 aa, Artificial Sequence
  Synthetic polypeptide representing artificial human antibody CDR-H2 region
ISAYNGNT

SEQ ID NO: 13661 - protein, 8 aa, Artificial Sequence
  Synthetic polypeptide representing artificial human antibody CDR-H2 region
ISYSSNQI

SEQ ID NO: 13662 - protein, 8 aa, Artificial Sequence
  Synthetic polypeptide representing artificial human antibody CDR-H2 region
ISSSGGTT

SEQ ID NO: 13663 - protein, 7 aa, Artificial Sequence
  Synthetic polypeptide representing artificial human antibody CDR-H2 region
IYHSGST

SEQ ID NO: 13664 - protein, 8 aa, Artificial Sequence
  Synthetic polypeptide representing artificial human antibody CDR-H2 region
TSYDGTIK

SEQ ID NO: 13665 - protein, 8 aa, Artificial Sequence
  Synthetic polypeptide representing artificial human antibody CDR-H2 region
ISPSAVST

SEQ ID NO: 13666 - protein, 8 aa, Artificial Sequence
  Synthetic polypeptide representing artificial human antibody CDR-H2 region
IDPNDSKT

SEQ ID NO: 13667 - protein, 7 aa, Artificial Sequence
  Synthetic polypeptide representing artificial human antibody CDR-H2 region
IYNSGNT

SEQ ID NO: 13668 - protein, 10 aa, Artificial Sequence
  Synthetic polypeptide representing artificial human antibody CDR-H2 region
IKREDDGGTI

SEQ ID NO: 13669 - protein, 8 aa, Artificial Sequence
  Synthetic polypeptide representing artificial human antibody CDR-H2 region
NIPMYGTG

SEQ ID NO: 13670 - protein, 7 aa, Artificial Sequence
  Synthetic polypeptide representing artificial human antibody CDR-H2 region
IYYSGST

SEQ ID NO: 13671 - protein, 7 aa, Artificial Sequence
  Synthetic polypeptide representing artificial human antibody CDR-H2 region
FSRDGTV

SEQ ID NO: 13672 - protein, 7 aa, Artificial Sequence
  Synthetic polypeptide representing artificial human antibody CDR-H2 region
IDWDNEK

SEQ ID NO: 13673 - protein, 8 aa, Artificial Sequence
  Synthetic polypeptide representing artificial human antibody CDR-H2 region
IIPIFGTA

SEQ ID NO: 13674 - protein, 8 aa, Artificial Sequence
  Synthetic polypeptide representing artificial human antibody CDR-H2 region
IWYDGSNK

SEQ ID NO: 13675 - protein, 8 aa, Artificial Sequence
  Synthetic polypeptide representing artificial human antibody CDR-H2 region
IGGGGDDK

SEQ ID NO: 13676 - protein, 10 aa, Artificial Sequence
  Synthetic polypeptide representing artificial human antibody CDR-H2 region
IRSKAYGGTT

SEQ ID NO: 13677 - protein, 7 aa, Artificial Sequence
  Synthetic polypeptide representing artificial human antibody CDR-H2 region
LYSDGST

SEQ ID NO: 13678 - protein, 7 aa, Artificial Sequence
  Synthetic polypeptide representing artificial human antibody CDR-H2 region
IYSDGST

SEQ ID NO: 13679 - protein, 8 aa, Artificial Sequence
  Synthetic polypeptide representing artificial human antibody CDR-H2 region
ICPGTSDP

SEQ ID NO: 13680 - protein, 8 aa, Artificial Sequence
  Synthetic polypeptide representing artificial human antibody CDR-H2 region
IDGVTGHL

SEQ ID NO: 13681 - protein, 8 aa, Artificial Sequence
  Synthetic polypeptide representing artificial human antibody CDR-H2 region
VSGNGDNT

SEQ ID NO: 13682 - protein, 8 aa, Artificial Sequence
  Synthetic polypeptide representing artificial human antibody CDR-H2 region
ISSTSIYI

SEQ ID NO: 13683 - protein, 7 aa, Artificial Sequence
  Synthetic polypeptide representing artificial human antibody CDR-H2 region
IYYSGST

SEQ ID NO: 13684 - protein, 9 aa, Artificial Sequence
  Synthetic polypeptide representing artificial human antibody CDR-H2 region
FTGSSAGTT

SEQ ID NO: 13685 - protein, 8 aa, Artificial Sequence
  Synthetic polypeptide representing artificial human antibody CDR-H2 region
IKGDGSDS

SEQ ID NO: 13686 - protein, 7 aa, Artificial Sequence
  Synthetic polypeptide representing artificial human antibody CDR-H2 region
MYSDGST

SEQ ID NO: 13687 - protein, 8 aa, Artificial Sequence
  Synthetic polypeptide representing artificial human antibody CDR-H2 region
ISGGGDRT

SEQ ID NO: 13688 - protein, 8 aa, Artificial Sequence
  Synthetic polypeptide representing artificial human antibody CDR-H2 region
ISHTGHET

SEQ ID NO: 13689 - protein, 7 aa, Artificial Sequence
  Synthetic polypeptide representing artificial human antibody CDR-H2 region
MYYTGST

SEQ ID NO: 13690 - protein, 8 aa, Artificial Sequence
  Synthetic polypeptide representing artificial human antibody CDR-H2 region
VNPNNGDT

SEQ ID NO: 13691 - protein, 7 aa, Artificial Sequence
  Synthetic polypeptide representing artificial human antibody CDR-H2 region
IYHSGTT

SEQ ID NO: 13692 - protein, 7 aa, Artificial Sequence
  Synthetic polypeptide representing artificial human antibody CDR-H2 region
IGTAGDT

SEQ ID NO: 13693 - protein, 8 aa, Artificial Sequence
  Synthetic polypeptide representing artificial human antibody CDR-H2 region
ISDDGIIT

SEQ ID NO: 13694 - protein, 7 aa, Artificial Sequence
  Synthetic polypeptide representing artificial human antibody CDR-H2 region
MYIDGRT

SEQ ID NO: 13695 - protein, 7 aa, Artificial Sequence
  Synthetic polypeptide representing artificial human antibody CDR-H2 region
IYYSGST

SEQ ID NO: 13696 - protein, 8 aa, Artificial Sequence
  Synthetic polypeptide representing artificial human antibody CDR-H2 region
ISGYNGNT

SEQ ID NO: 13697 - protein, 7 aa, Artificial Sequence
  Synthetic polypeptide representing artificial human antibody CDR-H2 region
IYYSGKT

SEQ ID NO: 13698 - protein, 7 aa, Artificial Sequence
  Synthetic polypeptide representing artificial human antibody CDR-H2 region
IYYSGST

SEQ ID NO: 13699 - protein, 8 aa, Artificial Sequence
  Synthetic polypeptide representing artificial human antibody CDR-H2 region
IIPSAHTE

SEQ ID NO: 13700 - protein, 8 aa, Artificial Sequence
  Synthetic polypeptide representing artificial human antibody CDR-H2 region
ISDSGYNT

SEQ ID NO: 13701 - protein, 8 aa, Artificial Sequence
  Synthetic polypeptide representing artificial human antibody CDR-H2 region
LSYDGINK

SEQ ID NO: 13702 - protein, 8 aa, Artificial Sequence
  Synthetic polypeptide representing artificial human antibody CDR-H2 region
ISSDGSNK

SEQ ID NO: 13703 - protein, 8 aa, Artificial Sequence
  Synthetic polypeptide representing artificial human antibody CDR-H2 region
INPKSGGA

SEQ ID NO: 13704 - protein, 8 aa, Artificial Sequence
  Synthetic polypeptide representing artificial human antibody CDR-H2 region
INSDGSST

SEQ ID NO: 13705 - protein, 8 aa, Artificial Sequence
  Synthetic polypeptide representing artificial human antibody CDR-H2 region
INTNTGNP

SEQ ID NO: 13706 - protein, 8 aa, Artificial Sequence
  Synthetic polypeptide representing artificial human antibody CDR-H2 region
FDLEEGVT

SEQ ID NO: 13707 - protein, 8 aa, Artificial Sequence
  Synthetic polypeptide representing artificial human antibody CDR-H2 region
VRPTTGDT

SEQ ID NO: 13708 - protein, 8 aa, Artificial Sequence
  Synthetic polypeptide representing artificial human antibody CDR-H2 region
ISYDGSNK

SEQ ID NO: 13709 - protein, 10 aa, Artificial Sequence
  Synthetic polypeptide representing artificial human antibody CDR-H2 region
IKSKTDGGTT

SEQ ID NO: 13710 - protein, 8 aa, Artificial Sequence
  Synthetic polypeptide representing artificial human antibody CDR-H2 region
IDSVGRRT

SEQ ID NO: 13711 - protein, 7 aa, Artificial Sequence
  Synthetic polypeptide representing artificial human antibody CDR-H2 region
IHYGGAT

SEQ ID NO: 13712 - protein, 8 aa, Artificial Sequence
  Synthetic polypeptide representing artificial human antibody CDR-H2 region
INPGVGST

SEQ ID NO: 13713 - protein, 10 aa, Artificial Sequence
  Synthetic polypeptide representing artificial human antibody CDR-H2 region
LKRKVDGGTT

SEQ ID NO: 13714 - protein, 7 aa, Artificial Sequence
  Synthetic polypeptide representing artificial human antibody CDR-H2 region
IYYTGST

SEQ ID NO: 13715 - protein, 8 aa, Artificial Sequence
  Synthetic polypeptide representing artificial human antibody CDR-H2 region
ISQDGSHE

SEQ ID NO: 13716 - protein, 8 aa, Artificial Sequence
  Synthetic polypeptide representing artificial human antibody CDR-H2 region
MSYDGSNK

SEQ ID NO: 13717 - protein, 10 aa, Artificial Sequence
  Synthetic polypeptide representing artificial human antibody CDR-H2 region
IRSKANTYAT

SEQ ID NO: 13718 - protein, 7 aa, Artificial Sequence
  Synthetic polypeptide representing artificial human antibody CDR-H2 region
IYSDGST

SEQ ID NO: 13719 - protein, 8 aa, Artificial Sequence
  Synthetic polypeptide representing artificial human antibody CDR-H2 region
INPSTGIP

SEQ ID NO: 13720 - protein, 7 aa, Artificial Sequence
  Synthetic polypeptide representing artificial human antibody CDR-H2 region
IDWDDDK

SEQ ID NO: 13721 - protein, 8 aa, Artificial Sequence
  Synthetic polypeptide representing artificial human antibody CDR-H2 region
ISKNGDNT

SEQ ID NO: 13722 - protein, 8 aa, Artificial Sequence
  Synthetic polypeptide representing artificial human antibody CDR-H2 region
IQPGGDDT

SEQ ID NO: 13723 - protein, 7 aa, Artificial Sequence
  Synthetic polypeptide representing artificial human antibody CDR-H2 region
IYYSGRT

SEQ ID NO: 13724 - protein, 8 aa, Artificial Sequence
  Synthetic polypeptide representing artificial human antibody CDR-H2 region
ISGSGGST

SEQ ID NO: 13725 - protein, 8 aa, Artificial Sequence
  Synthetic polypeptide representing artificial human antibody CDR-H2 region
ISYDGSNK

SEQ ID NO: 13726 - protein, 7 aa, Artificial Sequence
  Synthetic polypeptide representing artificial human antibody CDR-H2 region
IYYSGST

SEQ ID NO: 13727 - protein, 8 aa, Artificial Sequence
  Synthetic polypeptide representing artificial human antibody CDR-H2 region
ITSSGSGT

SEQ ID NO: 13728 - protein, 8 aa, Artificial Sequence
  Synthetic polypeptide representing artificial human antibody CDR-H2 region
INPSGGST

SEQ ID NO: 13729 - protein, 8 aa, Artificial Sequence
  Synthetic polypeptide representing artificial human antibody CDR-H2 region
ISWDSGSI

SEQ ID NO: 13730 - protein, 8 aa, Artificial Sequence
  Synthetic polypeptide representing artificial human antibody CDR-H2 region
ISGSGGRT

SEQ ID NO: 13731 - protein, 8 aa, Artificial Sequence
  Synthetic polypeptide representing artificial human antibody CDR-H2 region
ISSNSLNI

SEQ ID NO: 13732 - protein, 7 aa, Artificial Sequence
  Synthetic polypeptide representing artificial human antibody CDR-H2 region
MYYSGST

SEQ ID NO: 13733 - protein, 8 aa, Artificial Sequence
  Synthetic polypeptide representing artificial human antibody CDR-H2 region
IWYDGVTK

SEQ ID NO: 13734 - protein, 8 aa, Artificial Sequence
  Synthetic polypeptide representing artificial human antibody CDR-H2 region
IGSSSSDT

SEQ ID NO: 13735 - protein, 8 aa, Artificial Sequence
  Synthetic polypeptide representing artificial human antibody CDR-H2 region
FNTGGTVT

SEQ ID NO: 13736 - protein, 8 aa, Artificial Sequence
  Synthetic polypeptide representing artificial human antibody CDR-H2 region
ISPSAGAS

SEQ ID NO: 13737 - protein, 7 aa, Artificial Sequence
  Synthetic polypeptide representing artificial human antibody CDR-H2 region
IDWDDDK

SEQ ID NO: 13738 - protein, 8 aa, Artificial Sequence
  Synthetic polypeptide representing artificial human antibody CDR-H2 region
ISSSSSYI

SEQ ID NO: 13739 - protein, 8 aa, Artificial Sequence
  Synthetic polypeptide representing artificial human antibody CDR-H2 region
INPNSGGT

SEQ ID NO: 13740 - protein, 8 aa, Artificial Sequence
  Synthetic polypeptide representing artificial human antibody CDR-H2 region
ISGSGGST

SEQ ID NO: 13741 - protein, 7 aa, Artificial Sequence
  Synthetic polypeptide representing artificial human antibody CDR-H2 region
IFYTGSA

SEQ ID NO: 13742 - protein, 7 aa, Artificial Sequence
  Synthetic polypeptide representing artificial human antibody CDR-H2 region
IYHSGTT

SEQ ID NO: 13743 - protein, 7 aa, Artificial Sequence
  Synthetic polypeptide representing artificial human antibody CDR-H2 region
IVYSGNT

SEQ ID NO: 13744 - protein, 8 aa, Artificial Sequence
  Synthetic polypeptide representing artificial human antibody CDR-H2 region
ISHDGVQT

SEQ ID NO: 13745 - protein, 8 aa, Artificial Sequence
  Synthetic polypeptide representing artificial human antibody CDR-H2 region
IQPSAGKT

SEQ ID NO: 13746 - protein, 8 aa, Artificial Sequence
  Synthetic polypeptide representing artificial human antibody CDR-H2 region
IIPIFGTA

SEQ ID NO: 13747 - protein, 8 aa, Artificial Sequence
  Synthetic polypeptide representing artificial human antibody CDR-H2 region
IDRDGSTT

SEQ ID NO: 13748 - protein, 8 aa, Artificial Sequence
  Synthetic polypeptide representing artificial human antibody CDR-H2 region
ISSSGSTI

SEQ ID NO: 13749 - protein, 8 aa, Artificial Sequence
  Synthetic polypeptide representing artificial human antibody CDR-H2 region
ISYDGSNK

SEQ ID NO: 13750 - protein, 10 aa, Artificial Sequence
  Synthetic polypeptide representing artificial human antibody CDR-H2 region
IRSKAYGGTT

SEQ ID NO: 13751 - protein, 3 aa, Artificial Sequence
  Synthetic polypeptide representing artificial human antibody CDR-L2 region
SNN

SEQ ID NO: 13752 - protein, 3 aa, Artificial Sequence
  Synthetic polypeptide representing artificial human antibody CDR-L2 region
GAS

SEQ ID NO: 13753 - protein, 3 aa, Artificial Sequence
  Synthetic polypeptide representing artificial human antibody CDR-L2 region
DAS

SEQ ID NO: 13754 - protein, 3 aa, Artificial Sequence
  Synthetic polypeptide representing artificial human antibody CDR-L2 region
TAS

SEQ ID NO: 13755 - protein, 3 aa, Artificial Sequence
  Synthetic polypeptide representing artificial human antibody CDR-L2 region
DAS

SEQ ID NO: 13756 - protein, 3 aa, Artificial Sequence
  Synthetic polypeptide representing artificial human antibody CDR-L2 region
TAS

SEQ ID NO: 13757 - protein, 3 aa, Artificial Sequence
  Synthetic polypeptide representing artificial human antibody CDR-L2 region
DAS

SEQ ID NO: 13758 - protein, 3 aa, Artificial Sequence
  Synthetic polypeptide representing artificial human antibody CDR-L2 region
SNN

SEQ ID NO: 13759 - protein, 3 aa, Artificial Sequence
  Synthetic polypeptide representing artificial human antibody CDR-L2 region
DAS

SEQ ID NO: 13760 - protein, 3 aa, Artificial Sequence
  Synthetic polypeptide representing artificial human antibody CDR-L2 region
DAS

SEQ ID NO: 13761 - protein, 3 aa, Artificial Sequence
  Synthetic polypeptide representing artificial human antibody CDR-L2 region
DVT

SEQ ID NO: 13762 - protein, 3 aa, Artificial Sequence
  Synthetic polypeptide representing artificial human antibody CDR-L2 region
DVT

SEQ ID NO: 13763 - protein, 3 aa, Artificial Sequence
  Synthetic polypeptide representing artificial human antibody CDR-L2 region
LGS

SEQ ID NO: 13764 - protein, 3 aa, Artificial Sequence
  Synthetic polypeptide representing artificial human antibody CDR-L2 region
KVS

SEQ ID NO: 13765 - protein, 3 aa, Artificial Sequence
  Synthetic polypeptide representing artificial human antibody CDR-L2 region
AAS

SEQ ID NO: 13766 - protein, 3 aa, Artificial Sequence
  Synthetic polypeptide representing artificial human antibody CDR-L2 region
DAS

SEQ ID NO: 13767 - protein, 3 aa, Artificial Sequence
  Synthetic polypeptide representing artificial human antibody CDR-L2 region
DVT

SEQ ID NO: 13768 - protein, 7 aa, Artificial Sequence
  Synthetic polypeptide representing artificial human antibody CDR-L2 region
LEGSGTY

SEQ ID NO: 13769 - protein, 3 aa, Artificial Sequence
  Synthetic polypeptide representing artificial human antibody CDR-L2 region
EDS

SEQ ID NO: 13770 - protein, 3 aa, Artificial Sequence
  Synthetic polypeptide representing artificial human antibody CDR-L2 region
DDS

SEQ ID NO: 13771 - protein, 3 aa, Artificial Sequence
  Synthetic polypeptide representing artificial human antibody CDR-L2 region
DVN

SEQ ID NO: 13772 - protein, 3 aa, Artificial Sequence
  Synthetic polypeptide representing artificial human antibody CDR-L2 region
DVS

SEQ ID NO: 13773 - protein, 3 aa, Artificial Sequence
  Synthetic polypeptide representing artificial human antibody CDR-L2 region
GAS

SEQ ID NO: 13774 - protein, 3 aa, Artificial Sequence
  Synthetic polypeptide representing artificial human antibody CDR-L2 region
DVS

SEQ ID NO: 13775 - protein, 3 aa, Artificial Sequence
  Synthetic polypeptide representing artificial human antibody CDR-L2 region
EVS

SEQ ID NO: 13776 - protein, 3 aa, Artificial Sequence
  Synthetic polypeptide representing artificial human antibody CDR-L2 region
GAS

SEQ ID NO: 13777 - protein, 3 aa, Artificial Sequence
  Synthetic polypeptide representing artificial human antibody CDR-L2 region
PPS

SEQ ID NO: 13778 - protein, 8 aa, Artificial Sequence
  Synthetic polypeptide representing artificial human antibody CDR-L2 region
VGTGGIVG

SEQ ID NO: 13779 - protein, 3 aa, Artificial Sequence
  Synthetic polypeptide representing artificial human antibody CDR-L2 region
AAS

SEQ ID NO: 13780 - protein, 7 aa, Artificial Sequence
  Synthetic polypeptide representing artificial human antibody CDR-L2 region
VNSDGSH

SEQ ID NO: 13781 - protein, 3 aa, Artificial Sequence
  Synthetic polypeptide representing artificial human antibody CDR-L2 region
GAS

SEQ ID NO: 13782 - protein, 3 aa, Artificial Sequence
  Synthetic polypeptide representing artificial human antibody CDR-L2 region
GAS

SEQ ID NO: 13783 - protein, 3 aa, Artificial Sequence
  Synthetic polypeptide representing artificial human antibody CDR-L2 region
DAS

SEQ ID NO: 13784 - protein, 3 aa, Artificial Sequence
  Synthetic polypeptide representing artificial human antibody CDR-L2 region
ADI

SEQ ID NO: 13785 - protein, 3 aa, Artificial Sequence
  Synthetic polypeptide representing artificial human antibody CDR-L2 region
AAS

SEQ ID NO: 13786 - protein, 3 aa, Artificial Sequence
  Synthetic polypeptide representing artificial human antibody CDR-L2 region
DVS

SEQ ID NO: 13787 - protein, 3 aa, Artificial Sequence
  Synthetic polypeptide representing artificial human antibody CDR-L2 region
GAS

SEQ ID NO: 13788 - protein, 3 aa, Artificial Sequence
  Synthetic polypeptide representing artificial human antibody CDR-L2 region
AAS

SEQ ID NO: 13789 - protein, 3 aa, Artificial Sequence
  Synthetic polypeptide representing artificial human antibody CDR-L2 region
YDS

SEQ ID NO: 13790 - protein, 3 aa, Artificial Sequence
  Synthetic polypeptide representing artificial human antibody CDR-L2 region
WAS

SEQ ID NO: 13791 - protein, 3 aa, Artificial Sequence
  Synthetic polypeptide representing artificial human antibody CDR-L2 region
DVS

SEQ ID NO: 13792 - protein, 3 aa, Artificial Sequence
  Synthetic polypeptide representing artificial human antibody CDR-L2 region
DVS

SEQ ID NO: 13793 - protein, 3 aa, Artificial Sequence
  Synthetic polypeptide representing artificial human antibody CDR-L2 region
EVT

SEQ ID NO: 13794 - protein, 3 aa, Artificial Sequence
  Synthetic polypeptide representing artificial human antibody CDR-L2 region
GAS

SEQ ID NO: 13795 - protein, 3 aa, Artificial Sequence
  Synthetic polypeptide representing artificial human antibody CDR-L2 region
GKN

SEQ ID NO: 13796 - protein, 3 aa, Artificial Sequence
  Synthetic polypeptide representing artificial human antibody CDR-L2 region
EVS

SEQ ID NO: 13797 - protein, 3 aa, Artificial Sequence
  Synthetic polypeptide representing artificial human antibody CDR-L2 region
GAS

SEQ ID NO: 13798 - protein, 3 aa, Artificial Sequence
  Synthetic polypeptide representing artificial human antibody CDR-L2 region
GVS

SEQ ID NO: 13799 - protein, 3 aa, Artificial Sequence
  Synthetic polypeptide representing artificial human antibody CDR-L2 region
RNN

SEQ ID NO: 13800 - protein, 3 aa, Artificial Sequence
  Synthetic polypeptide representing artificial human antibody CDR-L2 region
WAS

SEQ ID NO: 13801 - protein, 3 aa, Artificial Sequence
  Synthetic polypeptide representing artificial human antibody CDR-L2 region
EVT

SEQ ID NO: 13802 - protein, 3 aa, Artificial Sequence
  Synthetic polypeptide representing artificial human antibody CDR-L2 region
RNN

SEQ ID NO: 13803 - protein, 3 aa, Artificial Sequence
  Synthetic polypeptide representing artificial human antibody CDR-L2 region
SNN

SEQ ID NO: 13804 - protein, 3 aa, Artificial Sequence
  Synthetic polypeptide representing artificial human antibody CDR-L2 region
DNN

SEQ ID NO: 13805 - protein, 3 aa, Artificial Sequence
  Synthetic polypeptide representing artificial human antibody CDR-L2 region
GKN

SEQ ID NO: 13806 - protein, 3 aa, Artificial Sequence
  Synthetic polypeptide representing artificial human antibody CDR-L2 region
GTS

SEQ ID NO: 13807 - protein, 3 aa, Artificial Sequence
  Synthetic polypeptide representing artificial human antibody CDR-L2 region
AAS

SEQ ID NO: 13808 - protein, 3 aa, Artificial Sequence
  Synthetic polypeptide representing artificial human antibody CDR-L2 region
KDS

SEQ ID NO: 13809 - protein, 3 aa, Artificial Sequence
  Synthetic polypeptide representing artificial human antibody CDR-L2 region
EVS

SEQ ID NO: 13810 - protein, 3 aa, Artificial Sequence
  Synthetic polypeptide representing artificial human antibody CDR-L2 region
AAS

SEQ ID NO: 13811 - protein, 3 aa, Artificial Sequence
  Synthetic polypeptide representing artificial human antibody CDR-L2 region
QDS

SEQ ID NO: 13812 - protein, 3 aa, Artificial Sequence
  Synthetic polypeptide representing artificial human antibody CDR-L2 region
EDS

SEQ ID NO: 13813 - protein, 3 aa, Artificial Sequence
  Synthetic polypeptide representing artificial human antibody CDR-L2 region
LGS

SEQ ID NO: 13814 - protein, 3 aa, Artificial Sequence
  Synthetic polypeptide representing artificial human antibody CDR-L2 region
TLS

SEQ ID NO: 13815 - protein, 3 aa, Artificial Sequence
  Synthetic polypeptide representing artificial human antibody CDR-L2 region
LGS

SEQ ID NO: 13816 - protein, 3 aa, Artificial Sequence
  Synthetic polypeptide representing artificial human antibody CDR-L2 region
DVN

SEQ ID NO: 13817 - protein, 3 aa, Artificial Sequence
  Synthetic polypeptide representing artificial human antibody CDR-L2 region
GAS

SEQ ID NO: 13818 - protein, 3 aa, Artificial Sequence
  Synthetic polypeptide representing artificial human antibody CDR-L2 region
RNH

SEQ ID NO: 13819 - protein, 3 aa, Artificial Sequence
  Synthetic polypeptide representing artificial human antibody CDR-L2 region
WAS

SEQ ID NO: 13820 - protein, 3 aa, Artificial Sequence
  Synthetic polypeptide representing artificial human antibody CDR-L2 region
GAS

SEQ ID NO: 13821 - protein, 3 aa, Artificial Sequence
  Synthetic polypeptide representing artificial human antibody CDR-L2 region
SDN

SEQ ID NO: 13822 - protein, 3 aa, Artificial Sequence
  Synthetic polypeptide representing artificial human antibody CDR-L2 region
GAS

SEQ ID NO: 13823 - protein, 3 aa, Artificial Sequence
  Synthetic polypeptide representing artificial human antibody CDR-L2 region
EVS

SEQ ID NO: 13824 - protein, 3 aa, Artificial Sequence
  Synthetic polypeptide representing artificial human antibody CDR-L2 region
RNN

SEQ ID NO: 13825 - protein, 3 aa, Artificial Sequence
  Synthetic polypeptide representing artificial human antibody CDR-L2 region
DAS

SEQ ID NO: 13826 - protein, 3 aa, Artificial Sequence
  Synthetic polypeptide representing artificial human antibody CDR-L2 region
DTS

SEQ ID NO: 13827 - protein, 3 aa, Artificial Sequence
  Synthetic polypeptide representing artificial human antibody CDR-L2 region
DVS

SEQ ID NO: 13828 - protein, 3 aa, Artificial Sequence
  Synthetic polypeptide representing artificial human antibody CDR-L2 region
LGS

SEQ ID NO: 13829 - protein, 7 aa, Artificial Sequence
  Synthetic polypeptide representing artificial human antibody CDR-L2 region
LNSDGSH

SEQ ID NO: 13830 - protein, 3 aa, Artificial Sequence
  Synthetic polypeptide representing artificial human antibody CDR-L2 region
AAS

SEQ ID NO: 13831 - protein, 3 aa, Artificial Sequence
  Synthetic polypeptide representing artificial human antibody CDR-L2 region
LGS

SEQ ID NO: 13832 - protein, 3 aa, Artificial Sequence
  Synthetic polypeptide representing artificial human antibody CDR-L2 region
AAS

SEQ ID NO: 13833 - protein, 3 aa, Artificial Sequence
  Synthetic polypeptide representing artificial human antibody CDR-L2 region
KAS

SEQ ID NO: 13834 - protein, 3 aa, Artificial Sequence
  Synthetic polypeptide representing artificial human antibody CDR-L2 region
AAS

SEQ ID NO: 13835 - protein, 3 aa, Artificial Sequence
  Synthetic polypeptide representing artificial human antibody CDR-L2 region
LGS

SEQ ID NO: 13836 - protein, 3 aa, Artificial Sequence
  Synthetic polypeptide representing artificial human antibody CDR-L2 region
DAS

SEQ ID NO: 13837 - protein, 3 aa, Artificial Sequence
  Synthetic polypeptide representing artificial human antibody CDR-L2 region
DVS

SEQ ID NO: 13838 - protein, 3 aa, Artificial Sequence
  Synthetic polypeptide representing artificial human antibody CDR-L2 region
KDS

SEQ ID NO: 13839 - protein, 3 aa, Artificial Sequence
  Synthetic polypeptide representing artificial human antibody CDR-L2 region
KVS

SEQ ID NO: 13840 - protein, 3 aa, Artificial Sequence
  Synthetic polypeptide representing artificial human antibody CDR-L2 region
YDS

SEQ ID NO: 13841 - protein, 3 aa, Artificial Sequence
  Synthetic polypeptide representing artificial human antibody CDR-L2 region
AAS

SEQ ID NO: 13842 - protein, 3 aa, Artificial Sequence
  Synthetic polypeptide representing artificial human antibody CDR-L2 region
EVS

SEQ ID NO: 13843 - protein, 3 aa, Artificial Sequence
  Synthetic polypeptide representing artificial human antibody CDR-L2 region
KIS

SEQ ID NO: 13844 - protein, 3 aa, Artificial Sequence
  Synthetic polypeptide representing artificial human antibody CDR-L2 region
AAS

SEQ ID NO: 13845 - protein, 3 aa, Artificial Sequence
  Synthetic polypeptide representing artificial human antibody CDR-L2 region
AAS

SEQ ID NO: 13846 - protein, 3 aa, Artificial Sequence
  Synthetic polypeptide representing artificial human antibody CDR-L2 region
WAS

SEQ ID NO: 13847 - protein, 3 aa, Artificial Sequence
  Synthetic polypeptide representing artificial human antibody CDR-L2 region
DAS

SEQ ID NO: 13848 - protein, 3 aa, Artificial Sequence
  Synthetic polypeptide representing artificial human antibody CDR-L2 region
GAS

SEQ ID NO: 13849 - protein, 3 aa, Artificial Sequence
  Synthetic polypeptide representing artificial human antibody CDR-L2 region
GAS

SEQ ID NO: 13850 - protein, 3 aa, Artificial Sequence
  Synthetic polypeptide representing artificial human antibody CDR-L2 region
LGS

SEQ ID NO: 13851 - protein, 3 aa, Artificial Sequence
  Synthetic polypeptide representing artificial human antibody CDR-L2 region
RNN

SEQ ID NO: 13852 - protein, 3 aa, Artificial Sequence
  Synthetic polypeptide representing artificial human antibody CDR-L2 region
DVS

SEQ ID NO: 13853 - protein, 3 aa, Artificial Sequence
  Synthetic polypeptide representing artificial human antibody CDR-L2 region
ATS

SEQ ID NO: 13854 - protein, 3 aa, Artificial Sequence
  Synthetic polypeptide representing artificial human antibody CDR-L2 region
AAS

SEQ ID NO: 13855 - protein, 3 aa, Artificial Sequence
  Synthetic polypeptide representing artificial human antibody CDR-L2 region
GAT

SEQ ID NO: 13856 - protein, 3 aa, Artificial Sequence
  Synthetic polypeptide representing artificial human antibody CDR-L2 region
DVS

SEQ ID NO: 13857 - protein, 3 aa, Artificial Sequence
  Synthetic polypeptide representing artificial human antibody CDR-L2 region
DAS

SEQ ID NO: 13858 - protein, 3 aa, Artificial Sequence
  Synthetic polypeptide representing artificial human antibody CDR-L2 region
AAS

SEQ ID NO: 13859 - protein, 3 aa, Artificial Sequence
  Synthetic polypeptide representing artificial human antibody CDR-L2 region
DAS

SEQ ID NO: 13860 - protein, 3 aa, Artificial Sequence
  Synthetic polypeptide representing artificial human antibody CDR-L2 region
KVS

SEQ ID NO: 13861 - protein, 3 aa, Artificial Sequence
  Synthetic polypeptide representing artificial human antibody CDR-L2 region
GKN

SEQ ID NO: 13862 - protein, 3 aa, Artificial Sequence
  Synthetic polypeptide representing artificial human antibody CDR-L2 region
DVS

SEQ ID NO: 13863 - protein, 3 aa, Artificial Sequence
  Synthetic polypeptide representing artificial human antibody CDR-L2 region
KVS

SEQ ID NO: 13864 - protein, 3 aa, Artificial Sequence
  Synthetic polypeptide representing artificial human antibody CDR-L2 region
DVN

SEQ ID NO: 13865 - protein, 3 aa, Artificial Sequence
  Synthetic polypeptide representing artificial human antibody CDR-L2 region
GNN

SEQ ID NO: 13866 - protein, 3 aa, Artificial Sequence
  Synthetic polypeptide representing artificial human antibody CDR-L2 region
AAS

SEQ ID NO: 13867 - protein, 3 aa, Artificial Sequence
  Synthetic polypeptide representing artificial human antibody CDR-L2 region
DNY

SEQ ID NO: 13868 - protein, 3 aa, Artificial Sequence
  Synthetic polypeptide representing artificial human antibody CDR-L2 region
EVT

SEQ ID NO: 13869 - protein, 3 aa, Artificial Sequence
  Synthetic polypeptide representing artificial human antibody CDR-L2 region
KAS

SEQ ID NO: 13870 - protein, 3 aa, Artificial Sequence
  Synthetic polypeptide representing artificial human antibody CDR-L2 region
DTS

SEQ ID NO: 13871 - protein, 3 aa, Artificial Sequence
  Synthetic polypeptide representing artificial human antibody CDR-L2 region
EVT

SEQ ID NO: 13872 - protein, 3 aa, Artificial Sequence
  Synthetic polypeptide representing artificial human antibody CDR-L2 region
KAS

SEQ ID NO: 13873 - protein, 3 aa, Artificial Sequence
  Synthetic polypeptide representing artificial human antibody CDR-L2 region
DVS

SEQ ID NO: 13874 - protein, 3 aa, Artificial Sequence
  Synthetic polypeptide representing artificial human antibody CDR-L2 region
YTD

SEQ ID NO: 13875 - protein, 3 aa, Artificial Sequence
  Synthetic polypeptide representing artificial human antibody CDR-L2 region
GNS

SEQ ID NO: 13876 - protein, 3 aa, Artificial Sequence
  Synthetic polypeptide representing artificial human antibody CDR-L2 region
WAS

SEQ ID NO: 13877 - protein, 3 aa, Artificial Sequence
  Synthetic polypeptide representing artificial human antibody CDR-L2 region
SNN

SEQ ID NO: 13878 - protein, 3 aa, Artificial Sequence
  Synthetic polypeptide representing artificial human antibody CDR-L2 region
EAS

SEQ ID NO: 13879 - protein, 3 aa, Artificial Sequence
  Synthetic polypeptide representing artificial human antibody CDR-L2 region
GKN

SEQ ID NO: 13880 - protein, 3 aa, Artificial Sequence
  Synthetic polypeptide representing artificial human antibody CDR-L2 region
TSS

SEQ ID NO: 13881 - protein, 3 aa, Artificial Sequence
  Synthetic polypeptide representing artificial human antibody CDR-L2 region
KDS

SEQ ID NO: 13882 - protein, 3 aa, Artificial Sequence
  Synthetic polypeptide representing artificial human antibody CDR-L2 region
QDS

SEQ ID NO: 13883 - protein, 3 aa, Artificial Sequence
  Synthetic polypeptide representing artificial human antibody CDR-L2 region
DNN

SEQ ID NO: 13884 - protein, 3 aa, Artificial Sequence
  Synthetic polypeptide representing artificial human antibody CDR-L2 region
GKN

SEQ ID NO: 13885 - protein, 3 aa, Artificial Sequence
  Synthetic polypeptide representing artificial human antibody CDR-L2 region
AAS

SEQ ID NO: 13886 - protein, 3 aa, Artificial Sequence
  Synthetic polypeptide representing artificial human antibody CDR-L2 region
RNN

SEQ ID NO: 13887 - protein, 3 aa, Artificial Sequence
  Synthetic polypeptide representing artificial human antibody CDR-L2 region
DVT

SEQ ID NO: 13888 - protein, 3 aa, Artificial Sequence
  Synthetic polypeptide representing artificial human antibody CDR-L2 region
KDS

SEQ ID NO: 13889 - protein, 3 aa, Artificial Sequence
  Synthetic polypeptide representing artificial human antibody CDR-L2 region
GKN

SEQ ID NO: 13890 - protein, 3 aa, Artificial Sequence
  Synthetic polypeptide representing artificial human antibody CDR-L2 region
DAS

SEQ ID NO: 13891 - protein, 3 aa, Artificial Sequence
  Synthetic polypeptide representing artificial human antibody CDR-L2 region
GKN

SEQ ID NO: 13892 - protein, 3 aa, Artificial Sequence
  Synthetic polypeptide representing artificial human antibody CDR-L2 region
KDS

SEQ ID NO: 13893 - protein, 3 aa, Artificial Sequence
  Synthetic polypeptide representing artificial human antibody CDR-L2 region
WAS

SEQ ID NO: 13894 - protein, 3 aa, Artificial Sequence
  Synthetic polypeptide representing artificial human antibody CDR-L2 region
RDT

SEQ ID NO: 13895 - protein, 3 aa, Artificial Sequence
  Synthetic polypeptide representing artificial human antibody CDR-L2 region
SAS

SEQ ID NO: 13896 - protein, 3 aa, Artificial Sequence
  Synthetic polypeptide representing artificial human antibody CDR-L2 region
HNT

SEQ ID NO: 13897 - protein, 3 aa, Artificial Sequence
  Synthetic polypeptide representing artificial human antibody CDR-L2 region
DAS

SEQ ID NO: 13898 - protein, 3 aa, Artificial Sequence
  Synthetic polypeptide representing artificial human antibody CDR-L2 region
EAS

SEQ ID NO: 13899 - protein, 3 aa, Artificial Sequence
  Synthetic polypeptide representing artificial human antibody CDR-L2 region
GAS

SEQ ID NO: 13900 - protein, 3 aa, Artificial Sequence
  Synthetic polypeptide representing artificial human antibody CDR-L2 region
GKN

SEQ ID NO: 13901 - protein, 3 aa, Artificial Sequence
  Synthetic polypeptide representing artificial human antibody CDR-L2 region
GKN

SEQ ID NO: 13902 - protein, 3 aa, Artificial Sequence
  Synthetic polypeptide representing artificial human antibody CDR-L2 region
GKN

SEQ ID NO: 13903 - protein, 3 aa, Artificial Sequence
  Synthetic polypeptide representing artificial human antibody CDR-L2 region
STN

SEQ ID NO: 13904 - protein, 3 aa, Artificial Sequence
  Synthetic polypeptide representing artificial human antibody CDR-L2 region
GKN

SEQ ID NO: 13905 - protein, 3 aa, Artificial Sequence
  Synthetic polypeptide representing artificial human antibody CDR-L2 region
WAS

SEQ ID NO: 13906 - protein, 3 aa, Artificial Sequence
  Synthetic polypeptide representing artificial human antibody CDR-L2 region
DVS

SEQ ID NO: 13907 - protein, 3 aa, Artificial Sequence
  Synthetic polypeptide representing artificial human antibody CDR-L2 region
GNS

SEQ ID NO: 13908 - protein, 3 aa, Artificial Sequence
  Synthetic polypeptide representing artificial human antibody CDR-L2 region
KDS

SEQ ID NO: 13909 - protein, 3 aa, Artificial Sequence
  Synthetic polypeptide representing artificial human antibody CDR-L2 region
GNT

SEQ ID NO: 13910 - protein, 3 aa, Artificial Sequence
  Synthetic polypeptide representing artificial human antibody CDR-L2 region
DVS

SEQ ID NO: 13911 - protein, 3 aa, Artificial Sequence
  Synthetic polypeptide representing artificial human antibody CDR-L2 region
DVS

SEQ ID NO: 13912 - protein, 3 aa, Artificial Sequence
  Synthetic polypeptide representing artificial human antibody CDR-L2 region
EAS

SEQ ID NO: 13913 - protein, 3 aa, Artificial Sequence
  Synthetic polypeptide representing artificial human antibody CDR-L2 region
DAS

SEQ ID NO: 13914 - protein, 3 aa, Artificial Sequence
  Synthetic polypeptide representing artificial human antibody CDR-L2 region
LGS

SEQ ID NO: 13915 - protein, 3 aa, Artificial Sequence
  Synthetic polypeptide representing artificial human antibody CDR-L2 region
GKN

SEQ ID NO: 13916 - protein, 3 aa, Artificial Sequence
  Synthetic polypeptide representing artificial human antibody CDR-L2 region
QDT

SEQ ID NO: 13917 - protein, 3 aa, Artificial Sequence
  Synthetic polypeptide representing artificial human antibody CDR-L2 region
GKN

SEQ ID NO: 13918 - protein, 3 aa, Artificial Sequence
  Synthetic polypeptide representing artificial human antibody CDR-L2 region
GKN

SEQ ID NO: 13919 - protein, 3 aa, Artificial Sequence
  Synthetic polypeptide representing artificial human antibody CDR-L2 region
AAS

SEQ ID NO: 13920 - protein, 3 aa, Artificial Sequence
  Synthetic polypeptide representing artificial human antibody CDR-L2 region
GKN

SEQ ID NO: 13921 - protein, 3 aa, Artificial Sequence
  Synthetic polypeptide representing artificial human antibody CDR-L2 region
EVS

SEQ ID NO: 13922 - protein, 3 aa, Artificial Sequence
  Synthetic polypeptide representing artificial human antibody CDR-L2 region
EDS

SEQ ID NO: 13923 - protein, 3 aa, Artificial Sequence
  Synthetic polypeptide representing artificial human antibody CDR-L2 region
QDT

SEQ ID NO: 13924 - protein, 3 aa, Artificial Sequence
  Synthetic polypeptide representing artificial human antibody CDR-L2 region
DNN

SEQ ID NO: 13925 - protein, 3 aa, Artificial Sequence
  Synthetic polypeptide representing artificial human antibody CDR-L2 region
EVS

SEQ ID NO: 13926 - protein, 3 aa, Artificial Sequence
  Synthetic polypeptide representing artificial human antibody CDR-L2 region
GAS

SEQ ID NO: 13927 - protein, 3 aa, Artificial Sequence
  Synthetic polypeptide representing artificial human antibody CDR-L2 region
GKN

SEQ ID NO: 13928 - protein, 3 aa, Artificial Sequence
  Synthetic polypeptide representing artificial human antibody CDR-L2 region
AAS

SEQ ID NO: 13929 - protein, 3 aa, Artificial Sequence
  Synthetic polypeptide representing artificial human antibody CDR-L2 region
WAS

SEQ ID NO: 13930 - protein, 3 aa, Artificial Sequence
  Synthetic polypeptide representing artificial human antibody CDR-L2 region
DAS

SEQ ID NO: 13931 - protein, 3 aa, Artificial Sequence
  Synthetic polypeptide representing artificial human antibody CDR-L2 region
EAS

SEQ ID NO: 13932 - protein, 3 aa, Artificial Sequence
  Synthetic polypeptide representing artificial human antibody CDR-L2 region
QDN

SEQ ID NO: 13933 - protein, 3 aa, Artificial Sequence
  Synthetic polypeptide representing artificial human antibody CDR-L2 region
EDN

SEQ ID NO: 13934 - protein, 3 aa, Artificial Sequence
  Synthetic polypeptide representing artificial human antibody CDR-L2 region
DNN

SEQ ID NO: 13935 - protein, 3 aa, Artificial Sequence
  Synthetic polypeptide representing artificial human antibody CDR-L2 region
DVS

SEQ ID NO: 13936 - protein, 3 aa, Artificial Sequence
  Synthetic polypeptide representing artificial human antibody CDR-L2 region
ANS

SEQ ID NO: 13937 - protein, 3 aa, Artificial Sequence
  Synthetic polypeptide representing artificial human antibody CDR-L2 region
DVS

SEQ ID NO: 13938 - protein, 3 aa, Artificial Sequence
  Synthetic polypeptide representing artificial human antibody CDR-L2 region
GAS

SEQ ID NO: 13939 - protein, 3 aa, Artificial Sequence
  Synthetic polypeptide representing artificial human antibody CDR-L2 region
RNN

SEQ ID NO: 13940 - protein, 3 aa, Artificial Sequence
  Synthetic polypeptide representing artificial human antibody CDR-L2 region
GAS

SEQ ID NO: 13941 - protein, 3 aa, Artificial Sequence
  Synthetic polypeptide representing artificial human antibody CDR-L2 region
WAS

SEQ ID NO: 13942 - protein, 3 aa, Artificial Sequence
  Synthetic polypeptide representing artificial human antibody CDR-L2 region
AAS

SEQ ID NO: 13943 - protein, 3 aa, Artificial Sequence
  Synthetic polypeptide representing artificial human antibody CDR-L2 region
DNN

SEQ ID NO: 13944 - protein, 3 aa, Artificial Sequence
  Synthetic polypeptide representing artificial human antibody CDR-L2 region
DAS

SEQ ID NO: 13945 - protein, 3 aa, Artificial Sequence
  Synthetic polypeptide representing artificial human antibody CDR-L2 region
AAS

SEQ ID NO: 13946 - protein, 3 aa, Artificial Sequence
  Synthetic polypeptide representing artificial human antibody CDR-L2 region
DNN

SEQ ID NO: 13947 - protein, 3 aa, Artificial Sequence
  Synthetic polypeptide representing artificial human antibody CDR-L2 region
WAS

SEQ ID NO: 13948 - protein, 3 aa, Artificial Sequence
  Synthetic polypeptide representing artificial human antibody CDR-L2 region
SNN

SEQ ID NO: 13949 - protein, 3 aa, Artificial Sequence
  Synthetic polypeptide representing artificial human antibody CDR-L2 region
TVD

SEQ ID NO: 13950 - protein, 3 aa, Artificial Sequence
  Synthetic polypeptide representing artificial human antibody CDR-L2 region
QDT

SEQ ID NO: 13951 - protein, 3 aa, Artificial Sequence
  Synthetic polypeptide representing artificial human antibody CDR-L2 region
KDS

SEQ ID NO: 13952 - protein, 3 aa, Artificial Sequence
  Synthetic polypeptide representing artificial human antibody CDR-L2 region
WAS

SEQ ID NO: 13953 - protein, 3 aa, Artificial Sequence
  Synthetic polypeptide representing artificial human antibody CDR-L2 region
MAS

SEQ ID NO: 13954 - protein, 3 aa, Artificial Sequence
  Synthetic polypeptide representing artificial human antibody CDR-L2 region
GKN

SEQ ID NO: 13955 - protein, 3 aa, Artificial Sequence
  Synthetic polypeptide representing artificial human antibody CDR-L2 region
DVS

SEQ ID NO: 13956 - protein, 3 aa, Artificial Sequence
  Synthetic polypeptide representing artificial human antibody CDR-L2 region
KVS

SEQ ID NO: 13957 - protein, 3 aa, Artificial Sequence
  Synthetic polypeptide representing artificial human antibody CDR-L2 region
YDS

SEQ ID NO: 13958 - protein, 3 aa, Artificial Sequence
  Synthetic polypeptide representing artificial human antibody CDR-L2 region
ETS

SEQ ID NO: 13959 - protein, 3 aa, Artificial Sequence
  Synthetic polypeptide representing artificial human antibody CDR-L2 region
GKN

SEQ ID NO: 13960 - protein, 3 aa, Artificial Sequence
  Synthetic polypeptide representing artificial human antibody CDR-L2 region
LGS

SEQ ID NO: 13961 - protein, 3 aa, Artificial Sequence
  Synthetic polypeptide representing artificial human antibody CDR-L2 region
LGS

SEQ ID NO: 13962 - protein, 3 aa, Artificial Sequence
  Synthetic polypeptide representing artificial human antibody CDR-L2 region
GAS

SEQ ID NO: 13963 - protein, 3 aa, Artificial Sequence
  Synthetic polypeptide representing artificial human antibody CDR-L2 region
NNN

SEQ ID NO: 13964 - protein, 3 aa, Artificial Sequence
  Synthetic polypeptide representing artificial human antibody CDR-L2 region
GAS

SEQ ID NO: 13965 - protein, 3 aa, Artificial Sequence
  Synthetic polypeptide representing artificial human antibody CDR-L2 region
STN

SEQ ID NO: 13966 - protein, 3 aa, Artificial Sequence
  Synthetic polypeptide representing artificial human antibody CDR-L2 region
RNN

SEQ ID NO: 13967 - protein, 3 aa, Artificial Sequence
  Synthetic polypeptide representing artificial human antibody CDR-L2 region
EDK

SEQ ID NO: 13968 - protein, 3 aa, Artificial Sequence
  Synthetic polypeptide representing artificial human antibody CDR-L2 region
DVN

SEQ ID NO: 13969 - protein, 3 aa, Artificial Sequence
  Synthetic polypeptide representing artificial human antibody CDR-L2 region
RNN

SEQ ID NO: 13970 - protein, 3 aa, Artificial Sequence
  Synthetic polypeptide representing artificial human antibody CDR-L2 region
AAS

SEQ ID NO: 13971 - protein, 3 aa, Artificial Sequence
  Synthetic polypeptide representing artificial human antibody CDR-L2 region
GKN

SEQ ID NO: 13972 - protein, 3 aa, Artificial Sequence
  Synthetic polypeptide representing artificial human antibody CDR-L2 region
DVN

SEQ ID NO: 13973 - protein, 3 aa, Artificial Sequence
  Synthetic polypeptide representing artificial human antibody CDR-L2 region
PAS

SEQ ID NO: 13974 - protein, 3 aa, Artificial Sequence
  Synthetic polypeptide representing artificial human antibody CDR-L2 region
SNN

SEQ ID NO: 13975 - protein, 3 aa, Artificial Sequence
  Synthetic polypeptide representing artificial human antibody CDR-L2 region
GNN

SEQ ID NO: 13976 - protein, 3 aa, Artificial Sequence
  Synthetic polypeptide representing artificial human antibody CDR-L2 region
DVS

SEQ ID NO: 13977 - protein, 3 aa, Artificial Sequence
  Synthetic polypeptide representing artificial human antibody CDR-L2 region
DAS

SEQ ID NO: 13978 - protein, 3 aa, Artificial Sequence
  Synthetic polypeptide representing artificial human antibody CDR-L2 region
AAS

SEQ ID NO: 13979 - protein, 3 aa, Artificial Sequence
  Synthetic polypeptide representing artificial human antibody CDR-L2 region
SNS

SEQ ID NO: 13980 - protein, 3 aa, Artificial Sequence
  Synthetic polypeptide representing artificial human antibody CDR-L2 region
KIS

SEQ ID NO: 13981 - protein, 3 aa, Artificial Sequence
  Synthetic polypeptide representing artificial human antibody CDR-L2 region
QDS

SEQ ID NO: 13982 - protein, 3 aa, Artificial Sequence
  Synthetic polypeptide representing artificial human antibody CDR-L2 region
GKN

SEQ ID NO: 13983 - protein, 3 aa, Artificial Sequence
  Synthetic polypeptide representing artificial human antibody CDR-L2 region
EVS

SEQ ID NO: 13984 - protein, 3 aa, Artificial Sequence
  Synthetic polypeptide representing artificial human antibody CDR-L2 region
AAS

SEQ ID NO: 13985 - protein, 3 aa, Artificial Sequence
  Synthetic polypeptide representing artificial human antibody CDR-L2 region
KIS

SEQ ID NO: 13986 - protein, 3 aa, Artificial Sequence
  Synthetic polypeptide representing artificial human antibody CDR-L2 region
QDN

SEQ ID NO: 13987 - protein, 3 aa, Artificial Sequence
  Synthetic polypeptide representing artificial human antibody CDR-L2 region
GAS

SEQ ID NO: 13988 - protein, 3 aa, Artificial Sequence
  Synthetic polypeptide representing artificial human antibody CDR-L2 region
KVS

SEQ ID NO: 13989 - protein, 3 aa, Artificial Sequence
  Synthetic polypeptide representing artificial human antibody CDR-L2 region
GTN

SEQ ID NO: 13990 - protein, 3 aa, Artificial Sequence
  Synthetic polypeptide representing artificial human antibody CDR-L2 region
AAS

SEQ ID NO: 13991 - protein, 3 aa, Artificial Sequence
  Synthetic polypeptide representing artificial human antibody CDR-L2 region
LGS

SEQ ID NO: 13992 - protein, 3 aa, Artificial Sequence
  Synthetic polypeptide representing artificial human antibody CDR-L2 region
RNN

SEQ ID NO: 13993 - protein, 3 aa, Artificial Sequence
  Synthetic polypeptide representing artificial human antibody CDR-L2 region
DNN

SEQ ID NO: 13994 - protein, 3 aa, Artificial Sequence
  Synthetic polypeptide representing artificial human antibody CDR-L2 region
GNS

SEQ ID NO: 13995 - protein, 3 aa, Artificial Sequence
  Synthetic polypeptide representing artificial human antibody CDR-L2 region
KVS

SEQ ID NO: 13996 - protein, 3 aa, Artificial Sequence
  Synthetic polypeptide representing artificial human antibody CDR-L2 region
KDS

SEQ ID NO: 13997 - protein, 3 aa, Artificial Sequence
  Synthetic polypeptide representing artificial human antibody CDR-L2 region
SND

SEQ ID NO: 13998 - protein, 3 aa, Artificial Sequence
  Synthetic polypeptide representing artificial human antibody CDR-L2 region
QDY

SEQ ID NO: 13999 - protein, 3 aa, Artificial Sequence
  Synthetic polypeptide representing artificial human antibody CDR-L2 region
WAS

SEQ ID NO: 14000 - protein, 3 aa, Artificial Sequence
  Synthetic polypeptide representing artificial human antibody CDR-L2 region
AAS

SEQ ID NO: 14001 - protein, 3 aa, Artificial Sequence
  Synthetic polypeptide representing artificial human antibody CDR-L2 region
AAS

SEQ ID NO: 14002 - protein, 3 aa, Artificial Sequence
  Synthetic polypeptide representing artificial human antibody CDR-L2 region
KAS

SEQ ID NO: 14003 - protein, 3 aa, Artificial Sequence
  Synthetic polypeptide representing artificial human antibody CDR-L2 region
EVS

SEQ ID NO: 14004 - protein, 3 aa, Artificial Sequence
  Synthetic polypeptide representing artificial human antibody CDR-L2 region
GAS

SEQ ID NO: 14005 - protein, 3 aa, Artificial Sequence
  Synthetic polypeptide representing artificial human antibody CDR-L2 region
AAS

SEQ ID NO: 14006 - protein, 3 aa, Artificial Sequence
  Synthetic polypeptide representing artificial human antibody CDR-L2 region
SNN

SEQ ID NO: 14007 - protein, 3 aa, Artificial Sequence
  Synthetic polypeptide representing artificial human antibody CDR-L2 region
KDT

SEQ ID NO: 14008 - protein, 3 aa, Artificial Sequence
  Synthetic polypeptide representing artificial human antibody CDR-L2 region
TAS

SEQ ID NO: 14009 - protein, 3 aa, Artificial Sequence
  Synthetic polypeptide representing artificial human antibody CDR-L2 region
KDS

SEQ ID NO: 14010 - protein, 3 aa, Artificial Sequence
  Synthetic polypeptide representing artificial human antibody CDR-L2 region
VTN

SEQ ID NO: 14011 - protein, 3 aa, Artificial Sequence
  Synthetic polypeptide representing artificial human antibody CDR-L2 region
GAS

SEQ ID NO: 14012 - protein, 3 aa, Artificial Sequence
  Synthetic polypeptide representing artificial human antibody CDR-L2 region
YDS

SEQ ID NO: 14013 - protein, 3 aa, Artificial Sequence
  Synthetic polypeptide representing artificial human antibody CDR-L2 region
AAS

SEQ ID NO: 14014 - protein, 3 aa, Artificial Sequence
  Synthetic polypeptide representing artificial human antibody CDR-L2 region
DVS

SEQ ID NO: 14015 - protein, 3 aa, Artificial Sequence
  Synthetic polypeptide representing artificial human antibody CDR-L2 region
GGS

SEQ ID NO: 14016 - protein, 3 aa, Artificial Sequence
  Synthetic polypeptide representing artificial human antibody CDR-L2 region
KIS

SEQ ID NO: 14017 - protein, 3 aa, Artificial Sequence
  Synthetic polypeptide representing artificial human antibody CDR-L2 region
STD

SEQ ID NO: 14018 - protein, 3 aa, Artificial Sequence
  Synthetic polypeptide representing artificial human antibody CDR-L2 region
EDN

SEQ ID NO: 14019 - protein, 3 aa, Artificial Sequence
  Synthetic polypeptide representing artificial human antibody CDR-L2 region
GAS

SEQ ID NO: 14020 - protein, 3 aa, Artificial Sequence
  Synthetic polypeptide representing artificial human antibody CDR-L2 region
RDI

SEQ ID NO: 14021 - protein, 3 aa, Artificial Sequence
  Synthetic polypeptide representing artificial human antibody CDR-L2 region
AAS

SEQ ID NO: 14022 - protein, 3 aa, Artificial Sequence
  Synthetic polypeptide representing artificial human antibody CDR-L2 region
DVS

SEQ ID NO: 14023 - protein, 3 aa, Artificial Sequence
  Synthetic polypeptide representing artificial human antibody CDR-L2 region
DTN

SEQ ID NO: 14024 - protein, 3 aa, Artificial Sequence
  Synthetic polypeptide representing artificial human antibody CDR-L2 region
TTN

SEQ ID NO: 14025 - protein, 3 aa, Artificial Sequence
  Synthetic polypeptide representing artificial human antibody CDR-L2 region
LGS

SEQ ID NO: 14026 - protein, 3 aa, Artificial Sequence
  Synthetic polypeptide representing artificial human antibody CDR-L2 region
GKN

SEQ ID NO: 14027 - protein, 3 aa, Artificial Sequence
  Synthetic polypeptide representing artificial human antibody CDR-L2 region
EGS

SEQ ID NO: 14028 - protein, 3 aa, Artificial Sequence
  Synthetic polypeptide representing artificial human antibody CDR-L2 region
DAS

SEQ ID NO: 14029 - protein, 3 aa, Artificial Sequence
  Synthetic polypeptide representing artificial human antibody CDR-L2 region
AAS

SEQ ID NO: 14030 - protein, 3 aa, Artificial Sequence
  Synthetic polypeptide representing artificial human antibody CDR-L2 region
DVS

SEQ ID NO: 14031 - protein, 3 aa, Artificial Sequence
  Synthetic polypeptide representing artificial human antibody CDR-L2 region
QNT

SEQ ID NO: 14032 - protein, 3 aa, Artificial Sequence
  Synthetic polypeptide representing artificial human antibody CDR-L2 region
VAS

SEQ ID NO: 14033 - protein, 3 aa, Artificial Sequence
  Synthetic polypeptide representing artificial human antibody CDR-L2 region
QAS

SEQ ID NO: 14034 - protein, 3 aa, Artificial Sequence
  Synthetic polypeptide representing artificial human antibody CDR-L2 region
GAS

SEQ ID NO: 14035 - protein, 3 aa, Artificial Sequence
  Synthetic polypeptide representing artificial human antibody CDR-L2 region
EVT

SEQ ID NO: 14036 - protein, 3 aa, Artificial Sequence
  Synthetic polypeptide representing artificial human antibody CDR-L2 region
RNN

SEQ ID NO: 14037 - protein, 3 aa, Artificial Sequence
  Synthetic polypeptide representing artificial human antibody CDR-L2 region
GAS

SEQ ID NO: 14038 - protein, 3 aa, Artificial Sequence
  Synthetic polypeptide representing artificial human antibody CDR-L2 region
GNS

SEQ ID NO: 14039 - protein, 3 aa, Artificial Sequence
  Synthetic polypeptide representing artificial human antibody CDR-L2 region
EGS

SEQ ID NO: 14040 - protein, 3 aa, Artificial Sequence
  Synthetic polypeptide representing artificial human antibody CDR-L2 region
NTQ

SEQ ID NO: 14041 - protein, 3 aa, Artificial Sequence
  Synthetic polypeptide representing artificial human antibody CDR-L2 region
DAS

SEQ ID NO: 14042 - protein, 3 aa, Artificial Sequence
  Synthetic polypeptide representing artificial human antibody CDR-L2 region
DNN

SEQ ID NO: 14043 - protein, 3 aa, Artificial Sequence
  Synthetic polypeptide representing artificial human antibody CDR-L2 region
LAS

SEQ ID NO: 14044 - protein, 3 aa, Artificial Sequence
  Synthetic polypeptide representing artificial human antibody CDR-L2 region
EVS

SEQ ID NO: 14045 - protein, 3 aa, Artificial Sequence
  Synthetic polypeptide representing artificial human antibody CDR-L2 region
KAS

SEQ ID NO: 14046 - protein, 3 aa, Artificial Sequence
  Synthetic polypeptide representing artificial human antibody CDR-L2 region
DDS

SEQ ID NO: 14047 - protein, 3 aa, Artificial Sequence
  Synthetic polypeptide representing artificial human antibody CDR-L2 region
KAS

SEQ ID NO: 14048 - protein, 3 aa, Artificial Sequence
  Synthetic polypeptide representing artificial human antibody CDR-L2 region
DAS

SEQ ID NO: 14049 - protein, 3 aa, Artificial Sequence
  Synthetic polypeptide representing artificial human antibody CDR-L2 region
AAS

SEQ ID NO: 14050 - protein, 3 aa, Artificial Sequence
  Synthetic polypeptide representing artificial human antibody CDR-L2 region
DTN

SEQ ID NO: 14051 - protein, 3 aa, Artificial Sequence
  Synthetic polypeptide representing artificial human antibody CDR-L2 region
KIS

SEQ ID NO: 14052 - protein, 3 aa, Artificial Sequence
  Synthetic polypeptide representing artificial human antibody CDR-L2 region
DVS

SEQ ID NO: 14053 - protein, 3 aa, Artificial Sequence
  Synthetic polypeptide representing artificial human antibody CDR-L2 region
EVS

SEQ ID NO: 14054 - protein, 3 aa, Artificial Sequence
  Synthetic polypeptide representing artificial human antibody CDR-L2 region
DVS

SEQ ID NO: 14055 - protein, 3 aa, Artificial Sequence
  Synthetic polypeptide representing artificial human antibody CDR-L2 region
QDS

SEQ ID NO: 14056 - protein, 3 aa, Artificial Sequence
  Synthetic polypeptide representing artificial human antibody CDR-L2 region
EVS

SEQ ID NO: 14057 - protein, 3 aa, Artificial Sequence
  Synthetic polypeptide representing artificial human antibody CDR-L2 region
ATS

SEQ ID NO: 14058 - protein, 3 aa, Artificial Sequence
  Synthetic polypeptide representing artificial human antibody CDR-L2 region
DVS

SEQ ID NO: 14059 - protein, 3 aa, Artificial Sequence
  Synthetic polypeptide representing artificial human antibody CDR-L2 region
WAS

SEQ ID NO: 14060 - protein, 3 aa, Artificial Sequence
  Synthetic polypeptide representing artificial human antibody CDR-L2 region
DNN

SEQ ID NO: 14061 - protein, 3 aa, Artificial Sequence
  Synthetic polypeptide representing artificial human antibody CDR-L2 region
DVS

SEQ ID NO: 14062 - protein, 3 aa, Artificial Sequence
  Synthetic polypeptide representing artificial human antibody CDR-L2 region
GAG

SEQ ID NO: 14063 - protein, 3 aa, Artificial Sequence
  Synthetic polypeptide representing artificial human antibody CDR-L2 region
EVS

SEQ ID NO: 14064 - protein, 3 aa, Artificial Sequence
  Synthetic polypeptide representing artificial human antibody CDR-L2 region
DVN

SEQ ID NO: 14065 - protein, 3 aa, Artificial Sequence
  Synthetic polypeptide representing artificial human antibody CDR-L2 region
KAS

SEQ ID NO: 14066 - protein, 3 aa, Artificial Sequence
  Synthetic polypeptide representing artificial human antibody CDR-L2 region
QTS

SEQ ID NO: 14067 - protein, 3 aa, Artificial Sequence
  Synthetic polypeptide representing artificial human antibody CDR-L2 region
AAS

SEQ ID NO: 14068 - protein, 3 aa, Artificial Sequence
  Synthetic polypeptide representing artificial human antibody CDR-L2 region
KAS

SEQ ID NO: 14069 - protein, 3 aa, Artificial Sequence
  Synthetic polypeptide representing artificial human antibody CDR-L2 region
WAS

SEQ ID NO: 14070 - protein, 3 aa, Artificial Sequence
  Synthetic polypeptide representing artificial human antibody CDR-L2 region
GAS

SEQ ID NO: 14071 - protein, 3 aa, Artificial Sequence
  Synthetic polypeptide representing artificial human antibody CDR-L2 region
DAS

SEQ ID NO: 14072 - protein, 3 aa, Artificial Sequence
  Synthetic polypeptide representing artificial human antibody CDR-L2 region
GAS

SEQ ID NO: 14073 - protein, 3 aa, Artificial Sequence
  Synthetic polypeptide representing artificial human antibody CDR-L2 region
WAS

SEQ ID NO: 14074 - protein, 3 aa, Artificial Sequence
  Synthetic polypeptide representing artificial human antibody CDR-L2 region
DVS

SEQ ID NO: 14075 - protein, 3 aa, Artificial Sequence
  Synthetic polypeptide representing artificial human antibody CDR-L2 region
DTN

SEQ ID NO: 14076 - protein, 3 aa, Artificial Sequence
  Synthetic polypeptide representing artificial human antibody CDR-L2 region
EDS

SEQ ID NO: 14077 - protein, 3 aa, Artificial Sequence
  Synthetic polypeptide representing artificial human antibody CDR-L2 region
DAS

SEQ ID NO: 14078 - protein, 3 aa, Artificial Sequence
  Synthetic polypeptide representing artificial human antibody CDR-L2 region
GAS

SEQ ID NO: 14079 - protein, 3 aa, Artificial Sequence
  Synthetic polypeptide representing artificial human antibody CDR-L2 region
WAS

SEQ ID NO: 14080 - protein, 3 aa, Artificial Sequence
  Synthetic polypeptide representing artificial human antibody CDR-L2 region
GVS

SEQ ID NO: 14081 - protein, 3 aa, Artificial Sequence
  Synthetic polypeptide representing artificial human antibody CDR-L2 region
KIS

SEQ ID NO: 14082 - protein, 3 aa, Artificial Sequence
  Synthetic polypeptide representing artificial human antibody CDR-L2 region
GKN

SEQ ID NO: 14083 - protein, 3 aa, Artificial Sequence
  Synthetic polypeptide representing artificial human antibody CDR-L2 region
LAS

SEQ ID NO: 14084 - protein, 3 aa, Artificial Sequence
  Synthetic polypeptide representing artificial human antibody CDR-L2 region
EDT

SEQ ID NO: 14085 - protein, 3 aa, Artificial Sequence
  Synthetic polypeptide representing artificial human antibody CDR-L2 region
DAS

SEQ ID NO: 14086 - protein, 3 aa, Artificial Sequence
  Synthetic polypeptide representing artificial human antibody CDR-L2 region
DVS

SEQ ID NO: 14087 - protein, 3 aa, Artificial Sequence
  Synthetic polypeptide representing artificial human antibody CDR-L2 region
KAS

SEQ ID NO: 14088 - protein, 3 aa, Artificial Sequence
  Synthetic polypeptide representing artificial human antibody CDR-L2 region
DAS

SEQ ID NO: 14089 - protein, 3 aa, Artificial Sequence
  Synthetic polypeptide representing artificial human antibody CDR-L2 region
GNN

SEQ ID NO: 14090 - protein, 3 aa, Artificial Sequence
  Synthetic polypeptide representing artificial human antibody CDR-L2 region
WAS

SEQ ID NO: 14091 - protein, 3 aa, Artificial Sequence
  Synthetic polypeptide representing artificial human antibody CDR-L2 region
DVT

SEQ ID NO: 14092 - protein, 3 aa, Artificial Sequence
  Synthetic polypeptide representing artificial human antibody CDR-L2 region
KIS

SEQ ID NO: 14093 - protein, 3 aa, Artificial Sequence
  Synthetic polypeptide representing artificial human antibody CDR-L2 region
DDS

SEQ ID NO: 14094 - protein, 3 aa, Artificial Sequence
  Synthetic polypeptide representing artificial human antibody CDR-L2 region
GAS

SEQ ID NO: 14095 - protein, 3 aa, Artificial Sequence
  Synthetic polypeptide representing artificial human antibody CDR-L2 region
AAS

SEQ ID NO: 14096 - protein, 3 aa, Artificial Sequence
  Synthetic polypeptide representing artificial human antibody CDR-L2 region
KAS

SEQ ID NO: 14097 - protein, 3 aa, Artificial Sequence
  Synthetic polypeptide representing artificial human antibody CDR-L2 region
GKN

SEQ ID NO: 14098 - protein, 3 aa, Artificial Sequence
  Synthetic polypeptide representing artificial human antibody CDR-L2 region
GAS

SEQ ID NO: 14099 - protein, 3 aa, Artificial Sequence
  Synthetic polypeptide representing artificial human antibody CDR-L2 region
DAS

SEQ ID NO: 14100 - protein, 3 aa, Artificial Sequence
  Synthetic polypeptide representing artificial human antibody CDR-L2 region
EDN

SEQ ID NO: 14101 - protein, 3 aa, Artificial Sequence
  Synthetic polypeptide representing artificial human antibody CDR-L2 region
AAS

SEQ ID NO: 14102 - protein, 3 aa, Artificial Sequence
  Synthetic polypeptide representing artificial human antibody CDR-L2 region
KVS

SEQ ID NO: 14103 - protein, 3 aa, Artificial Sequence
  Synthetic polypeptide representing artificial human antibody CDR-L2 region
DAS

SEQ ID NO: 14104 - protein, 3 aa, Artificial Sequence
  Synthetic polypeptide representing artificial human antibody CDR-L2 region
GKN

SEQ ID NO: 14105 - protein, 3 aa, Artificial Sequence
  Synthetic polypeptide representing artificial human antibody CDR-L2 region
DIN

SEQ ID NO: 14106 - protein, 3 aa, Artificial Sequence
  Synthetic polypeptide representing artificial human antibody CDR-L2 region
SNN

SEQ ID NO: 14107 - protein, 3 aa, Artificial Sequence
  Synthetic polypeptide representing artificial human antibody CDR-L2 region
DNN

SEQ ID NO: 14108 - protein, 3 aa, Artificial Sequence
  Synthetic polypeptide representing artificial human antibody CDR-L2 region
GAS

SEQ ID NO: 14109 - protein, 3 aa, Artificial Sequence
  Synthetic polypeptide representing artificial human antibody CDR-L2 region
GAS

SEQ ID NO: 14110 - protein, 3 aa, Artificial Sequence
  Synthetic polypeptide representing artificial human antibody CDR-L2 region
GTF

SEQ ID NO: 14111 - protein, 3 aa, Artificial Sequence
  Synthetic polypeptide representing artificial human antibody CDR-L2 region
AAS

SEQ ID NO: 14112 - protein, 3 aa, Artificial Sequence
  Synthetic polypeptide representing artificial human antibody CDR-L2 region
AAS

SEQ ID NO: 14113 - protein, 3 aa, Artificial Sequence
  Synthetic polypeptide representing artificial human antibody CDR-L2 region
DVS

SEQ ID NO: 14114 - protein, 3 aa, Artificial Sequence
  Synthetic polypeptide representing artificial human antibody CDR-L2 region
QDS

SEQ ID NO: 14115 - protein, 3 aa, Artificial Sequence
  Synthetic polypeptide representing artificial human antibody CDR-L2 region
GNS

SEQ ID NO: 14116 - protein, 3 aa, Artificial Sequence
  Synthetic polypeptide representing artificial human antibody CDR-L2 region
GAS

SEQ ID NO: 14117 - protein, 3 aa, Artificial Sequence
  Synthetic polypeptide representing artificial human antibody CDR-L2 region
QIS

SEQ ID NO: 14118 - protein, 3 aa, Artificial Sequence
  Synthetic polypeptide representing artificial human antibody CDR-L2 region
AAS

SEQ ID NO: 14119 - protein, 3 aa, Artificial Sequence
  Synthetic polypeptide representing artificial human antibody CDR-L2 region
STS

SEQ ID NO: 14120 - protein, 3 aa, Artificial Sequence
  Synthetic polypeptide representing artificial human antibody CDR-L2 region
GAS

SEQ ID NO: 14121 - protein, 3 aa, Artificial Sequence
  Synthetic polypeptide representing artificial human antibody CDR-L2 region
WAS

SEQ ID NO: 14122 - protein, 3 aa, Artificial Sequence
  Synthetic polypeptide representing artificial human antibody CDR-L2 region
QAS

SEQ ID NO: 14123 - protein, 3 aa, Artificial Sequence
  Synthetic polypeptide representing artificial human antibody CDR-L2 region
GAS

SEQ ID NO: 14124 - protein, 3 aa, Artificial Sequence
  Synthetic polypeptide representing artificial human antibody CDR-L2 region
EDS

SEQ ID NO: 14125 - protein, 3 aa, Artificial Sequence
  Synthetic polypeptide representing artificial human antibody CDR-L2 region
EDT

SEQ ID NO: 14126 - protein, 3 aa, Artificial Sequence
  Synthetic polypeptide representing artificial human antibody CDR-L2 region
KDS

SEQ ID NO: 14127 - protein, 3 aa, Artificial Sequence
  Synthetic polypeptide representing artificial human antibody CDR-L2 region
EVR

SEQ ID NO: 14128 - protein, 3 aa, Artificial Sequence
  Synthetic polypeptide representing artificial human antibody CDR-L2 region
GAS

SEQ ID NO: 14129 - protein, 3 aa, Artificial Sequence
  Synthetic polypeptide representing artificial human antibody CDR-L2 region
DAS

SEQ ID NO: 14130 - protein, 3 aa, Artificial Sequence
  Synthetic polypeptide representing artificial human antibody CDR-L2 region
YEN

SEQ ID NO: 14131 - protein, 3 aa, Artificial Sequence
  Synthetic polypeptide representing artificial human antibody CDR-L2 region
LGS

SEQ ID NO: 14132 - protein, 3 aa, Artificial Sequence
  Synthetic polypeptide representing artificial human antibody CDR-L2 region
DNN

SEQ ID NO: 14133 - protein, 3 aa, Artificial Sequence
  Synthetic polypeptide representing artificial human antibody CDR-L2 region
EDN

SEQ ID NO: 14134 - protein, 3 aa, Artificial Sequence
  Synthetic polypeptide representing artificial human antibody CDR-L2 region
QDS

SEQ ID NO: 14135 - protein, 3 aa, Artificial Sequence
  Synthetic polypeptide representing artificial human antibody CDR-L2 region
SNN

SEQ ID NO: 14136 - protein, 3 aa, Artificial Sequence
  Synthetic polypeptide representing artificial human antibody CDR-L2 region
EDN

SEQ ID NO: 14137 - protein, 3 aa, Artificial Sequence
  Synthetic polypeptide representing artificial human antibody CDR-L2 region
KDS

SEQ ID NO: 14138 - protein, 3 aa, Artificial Sequence
  Synthetic polypeptide representing artificial human antibody CDR-L2 region
GKN

SEQ ID NO: 14139 - protein, 3 aa, Artificial Sequence
  Synthetic polypeptide representing artificial human antibody CDR-L2 region
QDS

SEQ ID NO: 14140 - protein, 3 aa, Artificial Sequence
  Synthetic polypeptide representing artificial human antibody CDR-L2 region
AAS

SEQ ID NO: 14141 - protein, 3 aa, Artificial Sequence
  Synthetic polypeptide representing artificial human antibody CDR-L2 region
DNN

SEQ ID NO: 14142 - protein, 3 aa, Artificial Sequence
  Synthetic polypeptide representing artificial human antibody CDR-L2 region
EDN

SEQ ID NO: 14143 - protein, 3 aa, Artificial Sequence
  Synthetic polypeptide representing artificial human antibody CDR-L2 region
LGS

SEQ ID NO: 14144 - protein, 3 aa, Artificial Sequence
  Synthetic polypeptide representing artificial human antibody CDR-L2 region
GAS

SEQ ID NO: 14145 - protein, 3 aa, Artificial Sequence
  Synthetic polypeptide representing artificial human antibody CDR-L2 region
DVS

SEQ ID NO: 14146 - protein, 3 aa, Artificial Sequence
  Synthetic polypeptide representing artificial human antibody CDR-L2 region
AAS

SEQ ID NO: 14147 - protein, 3 aa, Artificial Sequence
  Synthetic polypeptide representing artificial human antibody CDR-L2 region
DNN

SEQ ID NO: 14148 - protein, 3 aa, Artificial Sequence
  Synthetic polypeptide representing artificial human antibody CDR-L2 region
GKN

SEQ ID NO: 14149 - protein, 3 aa, Artificial Sequence
  Synthetic polypeptide representing artificial human antibody CDR-L2 region
KDS

SEQ ID NO: 14150 - protein, 3 aa, Artificial Sequence
  Synthetic polypeptide representing artificial human antibody CDR-L2 region
AAS

SEQ ID NO: 14151 - protein, 3 aa, Artificial Sequence
  Synthetic polypeptide representing artificial human antibody CDR-L2 region
KAS

SEQ ID NO: 14152 - protein, 3 aa, Artificial Sequence
  Synthetic polypeptide representing artificial human antibody CDR-L2 region
GNS

SEQ ID NO: 14153 - protein, 3 aa, Artificial Sequence
  Synthetic polypeptide representing artificial human antibody CDR-L2 region
KIS

SEQ ID NO: 14154 - protein, 3 aa, Artificial Sequence
  Synthetic polypeptide representing artificial human antibody CDR-L2 region
DVS

SEQ ID NO: 14155 - protein, 3 aa, Artificial Sequence
  Synthetic polypeptide representing artificial human antibody CDR-L2 region
GAS

SEQ ID NO: 14156 - protein, 3 aa, Artificial Sequence
  Synthetic polypeptide representing artificial human antibody CDR-L2 region
GAS

SEQ ID NO: 14157 - protein, 3 aa, Artificial Sequence
  Synthetic polypeptide representing artificial human antibody CDR-L2 region
DAS

SEQ ID NO: 14158 - protein, 3 aa, Artificial Sequence
  Synthetic polypeptide representing artificial human antibody CDR-L2 region
DNN

SEQ ID NO: 14159 - protein, 3 aa, Artificial Sequence
  Synthetic polypeptide representing artificial human antibody CDR-L2 region
KAS

SEQ ID NO: 14160 - protein, 3 aa, Artificial Sequence
  Synthetic polypeptide representing artificial human antibody CDR-L2 region
DTS

SEQ ID NO: 14161 - protein, 3 aa, Artificial Sequence
  Synthetic polypeptide representing artificial human antibody CDR-L2 region
LGS

SEQ ID NO: 14162 - protein, 3 aa, Artificial Sequence
  Synthetic polypeptide representing artificial human antibody CDR-L2 region
GAS

SEQ ID NO: 14163 - protein, 3 aa, Artificial Sequence
  Synthetic polypeptide representing artificial human antibody CDR-L2 region
WAS

SEQ ID NO: 14164 - protein, 3 aa, Artificial Sequence
  Synthetic polypeptide representing artificial human antibody CDR-L2 region
WAS

SEQ ID NO: 14165 - protein, 7 aa, Artificial Sequence
  Synthetic polypeptide representing artificial human antibody CDR-L2 region
LNSDGSH

SEQ ID NO: 14166 - protein, 3 aa, Artificial Sequence
  Synthetic polypeptide representing artificial human antibody CDR-L2 region
DVS

SEQ ID NO: 14167 - protein, 3 aa, Artificial Sequence
  Synthetic polypeptide representing artificial human antibody CDR-L2 region
KDS

SEQ ID NO: 14168 - protein, 3 aa, Artificial Sequence
  Synthetic polypeptide representing artificial human antibody CDR-L2 region
DAS

SEQ ID NO: 14169 - protein, 3 aa, Artificial Sequence
  Synthetic polypeptide representing artificial human antibody CDR-L2 region
DDS

SEQ ID NO: 14170 - protein, 3 aa, Artificial Sequence
  Synthetic polypeptide representing artificial human antibody CDR-L2 region
DVS

SEQ ID NO: 14171 - protein, 3 aa, Artificial Sequence
  Synthetic polypeptide representing artificial human antibody CDR-L2 region
KIS

SEQ ID NO: 14172 - protein, 3 aa, Artificial Sequence
  Synthetic polypeptide representing artificial human antibody CDR-L2 region
DNN

SEQ ID NO: 14173 - protein, 3 aa, Artificial Sequence
  Synthetic polypeptide representing artificial human antibody CDR-L2 region
GAS

SEQ ID NO: 14174 - protein, 3 aa, Artificial Sequence
  Synthetic polypeptide representing artificial human antibody CDR-L2 region
AAS

SEQ ID NO: 14175 - protein, 3 aa, Artificial Sequence
  Synthetic polypeptide representing artificial human antibody CDR-L2 region
RDS

SEQ ID NO: 14176 - protein, 3 aa, Artificial Sequence
  Synthetic polypeptide representing artificial human antibody CDR-L2 region
AAS

SEQ ID NO: 14177 - protein, 3 aa, Artificial Sequence
  Synthetic polypeptide representing artificial human antibody CDR-L2 region
KDS

SEQ ID NO: 14178 - protein, 3 aa, Artificial Sequence
  Synthetic polypeptide representing artificial human antibody CDR-L2 region
SNN

SEQ ID NO: 14179 - protein, 3 aa, Artificial Sequence
  Synthetic polypeptide representing artificial human antibody CDR-L2 region
GAS

SEQ ID NO: 14180 - protein, 3 aa, Artificial Sequence
  Synthetic polypeptide representing artificial human antibody CDR-L2 region
KVS

SEQ ID NO: 14181 - protein, 3 aa, Artificial Sequence
  Synthetic polypeptide representing artificial human antibody CDR-L2 region
QIS

SEQ ID NO: 14182 - protein, 3 aa, Artificial Sequence
  Synthetic polypeptide representing artificial human antibody CDR-L2 region
AAS

SEQ ID NO: 14183 - protein, 3 aa, Artificial Sequence
  Synthetic polypeptide representing artificial human antibody CDR-L2 region
LGS

SEQ ID NO: 14184 - protein, 3 aa, Artificial Sequence
  Synthetic polypeptide representing artificial human antibody CDR-L2 region
ANN

SEQ ID NO: 14185 - protein, 3 aa, Artificial Sequence
  Synthetic polypeptide representing artificial human antibody CDR-L2 region
SNN

SEQ ID NO: 14186 - protein, 3 aa, Artificial Sequence
  Synthetic polypeptide representing artificial human antibody CDR-L2 region
QDS

SEQ ID NO: 14187 - protein, 3 aa, Artificial Sequence
  Synthetic polypeptide representing artificial human antibody CDR-L2 region
RNN

SEQ ID NO: 14188 - protein, 3 aa, Artificial Sequence
  Synthetic polypeptide representing artificial human antibody CDR-L2 region
DNN

SEQ ID NO: 14189 - protein, 3 aa, Artificial Sequence
  Synthetic polypeptide representing artificial human antibody CDR-L2 region
KAS

SEQ ID NO: 14190 - protein, 3 aa, Artificial Sequence
  Synthetic polypeptide representing artificial human antibody CDR-L2 region
SNN

SEQ ID NO: 14191 - protein, 3 aa, Artificial Sequence
  Synthetic polypeptide representing artificial human antibody CDR-L2 region
AAS

SEQ ID NO: 14192 - protein, 3 aa, Artificial Sequence
  Synthetic polypeptide representing artificial human antibody CDR-L2 region
GAS

SEQ ID NO: 14193 - protein, 3 aa, Artificial Sequence
  Synthetic polypeptide representing artificial human antibody CDR-L2 region
GAS

SEQ ID NO: 14194 - protein, 3 aa, Artificial Sequence
  Synthetic polypeptide representing artificial human antibody CDR-L2 region
DNN

SEQ ID NO: 14195 - protein, 3 aa, Artificial Sequence
  Synthetic polypeptide representing artificial human antibody CDR-L2 region
SNN

SEQ ID NO: 14196 - protein, 3 aa, Artificial Sequence
  Synthetic polypeptide representing artificial human antibody CDR-L2 region
WAS

SEQ ID NO: 14197 - protein, 3 aa, Artificial Sequence
  Synthetic polypeptide representing artificial human antibody CDR-L2 region
DNN

SEQ ID NO: 14198 - protein, 3 aa, Artificial Sequence
  Synthetic polypeptide representing artificial human antibody CDR-L2 region
EVS

SEQ ID NO: 14199 - protein, 3 aa, Artificial Sequence
  Synthetic polypeptide representing artificial human antibody CDR-L2 region
AAS

SEQ ID NO: 14200 - protein, 3 aa, Artificial Sequence
  Synthetic polypeptide representing artificial human antibody CDR-L2 region
SNN

SEQ ID NO: 14201 - protein, 3 aa, Artificial Sequence
  Synthetic polypeptide representing artificial human antibody CDR-L2 region
DVS

SEQ ID NO: 14202 - protein, 3 aa, Artificial Sequence
  Synthetic polypeptide representing artificial human antibody CDR-L2 region
DVS

SEQ ID NO: 14203 - protein, 3 aa, Artificial Sequence
  Synthetic polypeptide representing artificial human antibody CDR-L2 region
SNN

SEQ ID NO: 14204 - protein, 3 aa, Artificial Sequence
  Synthetic polypeptide representing artificial human antibody CDR-L2 region
DVS

SEQ ID NO: 14205 - protein, 3 aa, Artificial Sequence
  Synthetic polypeptide representing artificial human antibody CDR-L2 region
KAS

SEQ ID NO: 14206 - protein, 3 aa, Artificial Sequence
  Synthetic polypeptide representing artificial human antibody CDR-L2 region
KNN

SEQ ID NO: 14207 - protein, 3 aa, Artificial Sequence
  Synthetic polypeptide representing artificial human antibody CDR-L2 region
DAS

SEQ ID NO: 14208 - protein, 3 aa, Artificial Sequence
  Synthetic polypeptide representing artificial human antibody CDR-L2 region
DVS

SEQ ID NO: 14209 - protein, 3 aa, Artificial Sequence
  Synthetic polypeptide representing artificial human antibody CDR-L2 region
GKN

SEQ ID NO: 14210 - protein, 3 aa, Artificial Sequence
  Synthetic polypeptide representing artificial human antibody CDR-L2 region
DVS

SEQ ID NO: 14211 - protein, 3 aa, Artificial Sequence
  Synthetic polypeptide representing artificial human antibody CDR-L2 region
DDS

SEQ ID NO: 14212 - protein, 3 aa, Artificial Sequence
  Synthetic polypeptide representing artificial human antibody CDR-L2 region
GAS

SEQ ID NO: 14213 - protein, 3 aa, Artificial Sequence
  Synthetic polypeptide representing artificial human antibody CDR-L2 region
QDS

SEQ ID NO: 14214 - protein, 3 aa, Artificial Sequence
  Synthetic polypeptide representing artificial human antibody CDR-L2 region
GQN

SEQ ID NO: 14215 - protein, 3 aa, Artificial Sequence
  Synthetic polypeptide representing artificial human antibody CDR-L2 region
ATS

SEQ ID NO: 14216 - protein, 3 aa, Artificial Sequence
  Synthetic polypeptide representing artificial human antibody CDR-L2 region
GAS

SEQ ID NO: 14217 - protein, 3 aa, Artificial Sequence
  Synthetic polypeptide representing artificial human antibody CDR-L2 region
DDS

SEQ ID NO: 14218 - protein, 3 aa, Artificial Sequence
  Synthetic polypeptide representing artificial human antibody CDR-L2 region
GNS

SEQ ID NO: 14219 - protein, 3 aa, Artificial Sequence
  Synthetic polypeptide representing artificial human antibody CDR-L2 region
RND

SEQ ID NO: 14220 - protein, 3 aa, Artificial Sequence
  Synthetic polypeptide representing artificial human antibody CDR-L2 region
DNN

SEQ ID NO: 14221 - protein, 3 aa, Artificial Sequence
  Synthetic polypeptide representing artificial human antibody CDR-L2 region
KDT

SEQ ID NO: 14222 - protein, 3 aa, Artificial Sequence
  Synthetic polypeptide representing artificial human antibody CDR-L2 region
SNN

SEQ ID NO: 14223 - protein, 3 aa, Artificial Sequence
  Synthetic polypeptide representing artificial human antibody CDR-L2 region
KDS

SEQ ID NO: 14224 - protein, 3 aa, Artificial Sequence
  Synthetic polypeptide representing artificial human antibody CDR-L2 region
GAS

SEQ ID NO: 14225 - protein, 3 aa, Artificial Sequence
  Synthetic polypeptide representing artificial human antibody CDR-L2 region
WAS

SEQ ID NO: 14226 - protein, 3 aa, Artificial Sequence
  Synthetic polypeptide representing artificial human antibody CDR-L2 region
DNN

SEQ ID NO: 14227 - protein, 3 aa, Artificial Sequence
  Synthetic polypeptide representing artificial human antibody CDR-L2 region
GAS

SEQ ID NO: 14228 - protein, 3 aa, Artificial Sequence
  Synthetic polypeptide representing artificial human antibody CDR-L2 region
AAS

SEQ ID NO: 14229 - protein, 3 aa, Artificial Sequence
  Synthetic polypeptide representing artificial human antibody CDR-L2 region
DDS

SEQ ID NO: 14230 - protein, 3 aa, Artificial Sequence
  Synthetic polypeptide representing artificial human antibody CDR-L2 region
DTS

SEQ ID NO: 14231 - protein, 3 aa, Artificial Sequence
  Synthetic polypeptide representing artificial human antibody CDR-L2 region
GAS

SEQ ID NO: 14232 - protein, 3 aa, Artificial Sequence
  Synthetic polypeptide representing artificial human antibody CDR-L2 region
GAS

SEQ ID NO: 14233 - protein, 3 aa, Artificial Sequence
  Synthetic polypeptide representing artificial human antibody CDR-L2 region
AAS

SEQ ID NO: 14234 - protein, 3 aa, Artificial Sequence
  Synthetic polypeptide representing artificial human antibody CDR-L2 region
KAS

SEQ ID NO: 14235 - protein, 3 aa, Artificial Sequence
  Synthetic polypeptide representing artificial human antibody CDR-L2 region
EVS

SEQ ID NO: 14236 - protein, 3 aa, Artificial Sequence
  Synthetic polypeptide representing artificial human antibody CDR-L2 region
DDS

SEQ ID NO: 14237 - protein, 3 aa, Artificial Sequence
  Synthetic polypeptide representing artificial human antibody CDR-L2 region
AAS

SEQ ID NO: 14238 - protein, 3 aa, Artificial Sequence
  Synthetic polypeptide representing artificial human antibody CDR-L2 region
DVS

SEQ ID NO: 14239 - protein, 3 aa, Artificial Sequence
  Synthetic polypeptide representing artificial human antibody CDR-L2 region
DAS

SEQ ID NO: 14240 - protein, 3 aa, Artificial Sequence
  Synthetic polypeptide representing artificial human antibody CDR-L2 region
GAS

SEQ ID NO: 14241 - protein, 3 aa, Artificial Sequence
  Synthetic polypeptide representing artificial human antibody CDR-L2 region
LGS

SEQ ID NO: 14242 - protein, 3 aa, Artificial Sequence
  Synthetic polypeptide representing artificial human antibody CDR-L2 region
EDN

SEQ ID NO: 14243 - protein, 3 aa, Artificial Sequence
  Synthetic polypeptide representing artificial human antibody CDR-L2 region
GAS

SEQ ID NO: 14244 - protein, 3 aa, Artificial Sequence
  Synthetic polypeptide representing artificial human antibody CDR-L2 region
LGS

SEQ ID NO: 14245 - protein, 3 aa, Artificial Sequence
  Synthetic polypeptide representing artificial human antibody CDR-L2 region
QDS

SEQ ID NO: 14246 - protein, 3 aa, Artificial Sequence
  Synthetic polypeptide representing artificial human antibody CDR-L2 region
KVS

SEQ ID NO: 14247 - protein, 3 aa, Artificial Sequence
  Synthetic polypeptide representing artificial human antibody CDR-L2 region
QDS

SEQ ID NO: 14248 - protein, 3 aa, Artificial Sequence
  Synthetic polypeptide representing artificial human antibody CDR-L2 region
DNS

SEQ ID NO: 14249 - protein, 3 aa, Artificial Sequence
  Synthetic polypeptide representing artificial human antibody CDR-L2 region
GAS

SEQ ID NO: 14250 - protein, 3 aa, Artificial Sequence
  Synthetic polypeptide representing artificial human antibody CDR-L2 region
GAS

SEQ ID NO: 14251 - protein, 3 aa, Artificial Sequence
  Synthetic polypeptide representing artificial human antibody CDR-L2 region
AAS

SEQ ID NO: 14252 - protein, 3 aa, Artificial Sequence
  Synthetic polypeptide representing artificial human antibody CDR-L2 region
GAS

SEQ ID NO: 14253 - protein, 3 aa, Artificial Sequence
  Synthetic polypeptide representing artificial human antibody CDR-L2 region
KDS

SEQ ID NO: 14254 - protein, 3 aa, Artificial Sequence
  Synthetic polypeptide representing artificial human antibody CDR-L2 region
GAS

SEQ ID NO: 14255 - protein, 3 aa, Artificial Sequence
  Synthetic polypeptide representing artificial human antibody CDR-L2 region
DDS

SEQ ID NO: 14256 - protein, 3 aa, Artificial Sequence
  Synthetic polypeptide representing artificial human antibody CDR-L2 region
AAS

SEQ ID NO: 14257 - protein, 3 aa, Artificial Sequence
  Synthetic polypeptide representing artificial human antibody CDR-L2 region
EDN

SEQ ID NO: 14258 - protein, 3 aa, Artificial Sequence
  Synthetic polypeptide representing artificial human antibody CDR-L2 region
DRS

SEQ ID NO: 14259 - protein, 3 aa, Artificial Sequence
  Synthetic polypeptide representing artificial human antibody CDR-L2 region
EDS

SEQ ID NO: 14260 - protein, 3 aa, Artificial Sequence
  Synthetic polypeptide representing artificial human antibody CDR-L2 region
KAS

SEQ ID NO: 14261 - protein, 3 aa, Artificial Sequence
  Synthetic polypeptide representing artificial human antibody CDR-L2 region
DVR

SEQ ID NO: 14262 - protein, 3 aa, Artificial Sequence
  Synthetic polypeptide representing artificial human antibody CDR-L2 region
GAS

SEQ ID NO: 14263 - protein, 3 aa, Artificial Sequence
  Synthetic polypeptide representing artificial human antibody CDR-L2 region
DVS

SEQ ID NO: 14264 - protein, 3 aa, Artificial Sequence
  Synthetic polypeptide representing artificial human antibody CDR-L2 region
DAS

SEQ ID NO: 14265 - protein, 3 aa, Artificial Sequence
  Synthetic polypeptide representing artificial human antibody CDR-L2 region
RNY

SEQ ID NO: 14266 - protein, 3 aa, Artificial Sequence
  Synthetic polypeptide representing artificial human antibody CDR-L2 region
RNN

SEQ ID NO: 14267 - protein, 3 aa, Artificial Sequence
  Synthetic polypeptide representing artificial human antibody CDR-L2 region
RNN

SEQ ID NO: 14268 - protein, 3 aa, Artificial Sequence
  Synthetic polypeptide representing artificial human antibody CDR-L2 region
RNN

SEQ ID NO: 14269 - protein, 3 aa, Artificial Sequence
  Synthetic polypeptide representing artificial human antibody CDR-L2 region
GAS

SEQ ID NO: 14270 - protein, 3 aa, Artificial Sequence
  Synthetic polypeptide representing artificial human antibody CDR-L2 region
AAS

SEQ ID NO: 14271 - protein, 3 aa, Artificial Sequence
  Synthetic polypeptide representing artificial human antibody CDR-L2 region
DVS

SEQ ID NO: 14272 - protein, 3 aa, Artificial Sequence
  Synthetic polypeptide representing artificial human antibody CDR-L2 region
AAS

SEQ ID NO: 14273 - protein, 3 aa, Artificial Sequence
  Synthetic polypeptide representing artificial human antibody CDR-L2 region
DAS

SEQ ID NO: 14274 - protein, 3 aa, Artificial Sequence
  Synthetic polypeptide representing artificial human antibody CDR-L2 region
KDS

SEQ ID NO: 14275 - protein, 3 aa, Artificial Sequence
  Synthetic polypeptide representing artificial human antibody CDR-L2 region
LGS

SEQ ID NO: 14276 - protein, 3 aa, Artificial Sequence
  Synthetic polypeptide representing artificial human antibody CDR-L2 region
YDS

SEQ ID NO: 14277 - protein, 3 aa, Artificial Sequence
  Synthetic polypeptide representing artificial human antibody CDR-L2 region
DAS

SEQ ID NO: 14278 - protein, 3 aa, Artificial Sequence
  Synthetic polypeptide representing artificial human antibody CDR-L2 region
KAS

SEQ ID NO: 14279 - protein, 3 aa, Artificial Sequence
  Synthetic polypeptide representing artificial human antibody CDR-L2 region
YDS

SEQ ID NO: 14280 - protein, 3 aa, Artificial Sequence
  Synthetic polypeptide representing artificial human antibody CDR-L2 region
NAS

SEQ ID NO: 14281 - protein, 3 aa, Artificial Sequence
  Synthetic polypeptide representing artificial human antibody CDR-L2 region
DAS

SEQ ID NO: 14282 - protein, 3 aa, Artificial Sequence
  Synthetic polypeptide representing artificial human antibody CDR-L2 region
KVS

SEQ ID NO: 14283 - protein, 3 aa, Artificial Sequence
  Synthetic polypeptide representing artificial human antibody CDR-L2 region
LGS

SEQ ID NO: 14284 - protein, 3 aa, Artificial Sequence
  Synthetic polypeptide representing artificial human antibody CDR-L2 region
AAS

SEQ ID NO: 14285 - protein, 3 aa, Artificial Sequence
  Synthetic polypeptide representing artificial human antibody CDR-L2 region
QDS

SEQ ID NO: 14286 - protein, 3 aa, Artificial Sequence
  Synthetic polypeptide representing artificial human antibody CDR-L2 region
DDS

SEQ ID NO: 14287 - protein, 3 aa, Artificial Sequence
  Synthetic polypeptide representing artificial human antibody CDR-L2 region
RNN

SEQ ID NO: 14288 - protein, 3 aa, Artificial Sequence
  Synthetic polypeptide representing artificial human antibody CDR-L2 region
AAS

SEQ ID NO: 14289 - protein, 3 aa, Artificial Sequence
  Synthetic polypeptide representing artificial human antibody CDR-L2 region
DAS

SEQ ID NO: 14290 - protein, 3 aa, Artificial Sequence
  Synthetic polypeptide representing artificial human antibody CDR-L2 region
GAS

SEQ ID NO: 14291 - protein, 3 aa, Artificial Sequence
  Synthetic polypeptide representing artificial human antibody CDR-L2 region
AAS

SEQ ID NO: 14292 - protein, 3 aa, Artificial Sequence
  Synthetic polypeptide representing artificial human antibody CDR-L2 region
GAS

SEQ ID NO: 14293 - protein, 3 aa, Artificial Sequence
  Synthetic polypeptide representing artificial human antibody CDR-L2 region
KDS

SEQ ID NO: 14294 - protein, 3 aa, Artificial Sequence
  Synthetic polypeptide representing artificial human antibody CDR-L2 region
DAS

SEQ ID NO: 14295 - protein, 3 aa, Artificial Sequence
  Synthetic polypeptide representing artificial human antibody CDR-L2 region
EVS

SEQ ID NO: 14296 - protein, 3 aa, Artificial Sequence
  Synthetic polypeptide representing artificial human antibody CDR-L2 region
EDN

SEQ ID NO: 14297 - protein, 3 aa, Artificial Sequence
  Synthetic polypeptide representing artificial human antibody CDR-L2 region
DVS

SEQ ID NO: 14298 - protein, 3 aa, Artificial Sequence
  Synthetic polypeptide representing artificial human antibody CDR-L2 region
AAS

SEQ ID NO: 14299 - protein, 3 aa, Artificial Sequence
  Synthetic polypeptide representing artificial human antibody CDR-L2 region
LGS

SEQ ID NO: 14300 - protein, 3 aa, Artificial Sequence
  Synthetic polypeptide representing artificial human antibody CDR-L2 region
DAS

SEQ ID NO: 14301 - protein, 3 aa, Artificial Sequence
  Synthetic polypeptide representing artificial human antibody CDR-L2 region
TAS

SEQ ID NO: 14302 - protein, 3 aa, Artificial Sequence
  Synthetic polypeptide representing artificial human antibody CDR-L2 region
GAS

SEQ ID NO: 14303 - protein, 3 aa, Artificial Sequence
  Synthetic polypeptide representing artificial human antibody CDR-L2 region
DDS

SEQ ID NO: 14304 - protein, 3 aa, Artificial Sequence
  Synthetic polypeptide representing artificial human antibody CDR-L2 region
QDS

SEQ ID NO: 14305 - protein, 3 aa, Artificial Sequence
  Synthetic polypeptide representing artificial human antibody CDR-L2 region
DAT

SEQ ID NO: 14306 - protein, 3 aa, Artificial Sequence
  Synthetic polypeptide representing artificial human antibody CDR-L2 region
GKN

SEQ ID NO: 14307 - protein, 3 aa, Artificial Sequence
  Synthetic polypeptide representing artificial human antibody CDR-L2 region
GAS

SEQ ID NO: 14308 - protein, 3 aa, Artificial Sequence
  Synthetic polypeptide representing artificial human antibody CDR-L2 region
KVS

SEQ ID NO: 14309 - protein, 3 aa, Artificial Sequence
  Synthetic polypeptide representing artificial human antibody CDR-L2 region
QDS

SEQ ID NO: 14310 - protein, 3 aa, Artificial Sequence
  Synthetic polypeptide representing artificial human antibody CDR-L2 region
SNT

SEQ ID NO: 14311 - protein, 3 aa, Artificial Sequence
  Synthetic polypeptide representing artificial human antibody CDR-L2 region
GAS

SEQ ID NO: 14312 - protein, 3 aa, Artificial Sequence
  Synthetic polypeptide representing artificial human antibody CDR-L2 region
AAS

SEQ ID NO: 14313 - protein, 3 aa, Artificial Sequence
  Synthetic polypeptide representing artificial human antibody CDR-L2 region
GAS

SEQ ID NO: 14314 - protein, 3 aa, Artificial Sequence
  Synthetic polypeptide representing artificial human antibody CDR-L2 region
GAS

SEQ ID NO: 14315 - protein, 3 aa, Artificial Sequence
  Synthetic polypeptide representing artificial human antibody CDR-L2 region
GAS

SEQ ID NO: 14316 - protein, 3 aa, Artificial Sequence
  Synthetic polypeptide representing artificial human antibody CDR-L2 region
RAS

SEQ ID NO: 14317 - protein, 3 aa, Artificial Sequence
  Synthetic polypeptide representing artificial human antibody CDR-L2 region
SNN

SEQ ID NO: 14318 - protein, 3 aa, Artificial Sequence
  Synthetic polypeptide representing artificial human antibody CDR-L2 region
DAS

SEQ ID NO: 14319 - protein, 3 aa, Artificial Sequence
  Synthetic polypeptide representing artificial human antibody CDR-L2 region
DAS

SEQ ID NO: 14320 - protein, 3 aa, Artificial Sequence
  Synthetic polypeptide representing artificial human antibody CDR-L2 region
DAS

SEQ ID NO: 14321 - protein, 3 aa, Artificial Sequence
  Synthetic polypeptide representing artificial human antibody CDR-L2 region
GKN

SEQ ID NO: 14322 - protein, 3 aa, Artificial Sequence
  Synthetic polypeptide representing artificial human antibody CDR-L2 region
RVS

SEQ ID NO: 14323 - protein, 3 aa, Artificial Sequence
  Synthetic polypeptide representing artificial human antibody CDR-L2 region
STS

SEQ ID NO: 14324 - protein, 3 aa, Artificial Sequence
  Synthetic polypeptide representing artificial human antibody CDR-L2 region
GAS

SEQ ID NO: 14325 - protein, 3 aa, Artificial Sequence
  Synthetic polypeptide representing artificial human antibody CDR-L2 region
EVS

SEQ ID NO: 14326 - protein, 3 aa, Artificial Sequence
  Synthetic polypeptide representing artificial human antibody CDR-L2 region
AAS

SEQ ID NO: 14327 - protein, 3 aa, Artificial Sequence
  Synthetic polypeptide representing artificial human antibody CDR-L2 region
EVT

SEQ ID NO: 14328 - protein, 3 aa, Artificial Sequence
  Synthetic polypeptide representing artificial human antibody CDR-L2 region
GAS

SEQ ID NO: 14329 - protein, 3 aa, Artificial Sequence
  Synthetic polypeptide representing artificial human antibody CDR-L2 region
DAS

SEQ ID NO: 14330 - protein, 3 aa, Artificial Sequence
  Synthetic polypeptide representing artificial human antibody CDR-L2 region
KGF

SEQ ID NO: 14331 - protein, 3 aa, Artificial Sequence
  Synthetic polypeptide representing artificial human antibody CDR-L2 region
DTS

SEQ ID NO: 14332 - protein, 3 aa, Artificial Sequence
  Synthetic polypeptide representing artificial human antibody CDR-L2 region
AAS

SEQ ID NO: 14333 - protein, 3 aa, Artificial Sequence
  Synthetic polypeptide representing artificial human antibody CDR-L2 region
KTE

SEQ ID NO: 14334 - protein, 3 aa, Artificial Sequence
  Synthetic polypeptide representing artificial human antibody CDR-L2 region
DVS

SEQ ID NO: 14335 - protein, 3 aa, Artificial Sequence
  Synthetic polypeptide representing artificial human antibody CDR-L2 region
AAS

SEQ ID NO: 14336 - protein, 3 aa, Artificial Sequence
  Synthetic polypeptide representing artificial human antibody CDR-L2 region
KGF

SEQ ID NO: 14337 - protein, 3 aa, Artificial Sequence
  Synthetic polypeptide representing artificial human antibody CDR-L2 region
GVS

SEQ ID NO: 14338 - protein, 3 aa, Artificial Sequence
  Synthetic polypeptide representing artificial human antibody CDR-L2 region
GKN

SEQ ID NO: 14339 - protein, 3 aa, Artificial Sequence
  Synthetic polypeptide representing artificial human antibody CDR-L2 region
EDN

SEQ ID NO: 14340 - protein, 3 aa, Artificial Sequence
  Synthetic polypeptide representing artificial human antibody CDR-L2 region
KIS

SEQ ID NO: 14341 - protein, 3 aa, Artificial Sequence
  Synthetic polypeptide representing artificial human antibody CDR-L2 region
DNF

SEQ ID NO: 14342 - protein, 3 aa, Artificial Sequence
  Synthetic polypeptide representing artificial human antibody CDR-L2 region
DAS

SEQ ID NO: 14343 - protein, 3 aa, Artificial Sequence
  Synthetic polypeptide representing artificial human antibody CDR-L2 region
QDS

SEQ ID NO: 14344 - protein, 3 aa, Artificial Sequence
  Synthetic polypeptide representing artificial human antibody CDR-L2 region
GAS

SEQ ID NO: 14345 - protein, 3 aa, Artificial Sequence
  Synthetic polypeptide representing artificial human antibody CDR-L2 region
DAS

SEQ ID NO: 14346 - protein, 3 aa, Artificial Sequence
  Synthetic polypeptide representing artificial human antibody CDR-L2 region
WGS

SEQ ID NO: 14347 - protein, 3 aa, Artificial Sequence
  Synthetic polypeptide representing artificial human antibody CDR-L2 region
GAS

SEQ ID NO: 14348 - protein, 3 aa, Artificial Sequence
  Synthetic polypeptide representing artificial human antibody CDR-L2 region
GAS

SEQ ID NO: 14349 - protein, 3 aa, Artificial Sequence
  Synthetic polypeptide representing artificial human antibody CDR-L2 region
RNN

SEQ ID NO: 14350 - protein, 3 aa, Artificial Sequence
  Synthetic polypeptide representing artificial human antibody CDR-L2 region
KDT

SEQ ID NO: 14351 - protein, 3 aa, Artificial Sequence
  Synthetic polypeptide representing artificial human antibody CDR-L2 region
EDN

SEQ ID NO: 14352 - protein, 3 aa, Artificial Sequence
  Synthetic polypeptide representing artificial human antibody CDR-L2 region
GNS

SEQ ID NO: 14353 - protein, 7 aa, Artificial Sequence
  Synthetic polypeptide representing artificial human antibody CDR-L2 region
INSDGSH

SEQ ID NO: 14354 - protein, 3 aa, Artificial Sequence
  Synthetic polypeptide representing artificial human antibody CDR-L2 region
KVS

SEQ ID NO: 14355 - protein, 3 aa, Artificial Sequence
  Synthetic polypeptide representing artificial human antibody CDR-L2 region
AAS

SEQ ID NO: 14356 - protein, 3 aa, Artificial Sequence
  Synthetic polypeptide representing artificial human antibody CDR-L2 region
TTS

SEQ ID NO: 14357 - protein, 3 aa, Artificial Sequence
  Synthetic polypeptide representing artificial human antibody CDR-L2 region
GAA

SEQ ID NO: 14358 - protein, 3 aa, Artificial Sequence
  Synthetic polypeptide representing artificial human antibody CDR-L2 region
AAS

SEQ ID NO: 14359 - protein, 3 aa, Artificial Sequence
  Synthetic polypeptide representing artificial human antibody CDR-L2 region
GTS

SEQ ID NO: 14360 - protein, 3 aa, Artificial Sequence
  Synthetic polypeptide representing artificial human antibody CDR-L2 region
GAS

SEQ ID NO: 14361 - protein, 3 aa, Artificial Sequence
  Synthetic polypeptide representing artificial human antibody CDR-L2 region
GAS

SEQ ID NO: 14362 - protein, 3 aa, Artificial Sequence
  Synthetic polypeptide representing artificial human antibody CDR-L2 region
AAS

SEQ ID NO: 14363 - protein, 3 aa, Artificial Sequence
  Synthetic polypeptide representing artificial human antibody CDR-L2 region
KAS

SEQ ID NO: 14364 - protein, 3 aa, Artificial Sequence
  Synthetic polypeptide representing artificial human antibody CDR-L2 region
EAS

SEQ ID NO: 14365 - protein, 3 aa, Artificial Sequence
  Synthetic polypeptide representing artificial human antibody CDR-L2 region
AAS

SEQ ID NO: 14366 - protein, 3 aa, Artificial Sequence
  Synthetic polypeptide representing artificial human antibody CDR-L2 region
YDS

SEQ ID NO: 14367 - protein, 3 aa, Artificial Sequence
  Synthetic polypeptide representing artificial human antibody CDR-L2 region
DVS

SEQ ID NO: 14368 - protein, 3 aa, Artificial Sequence
  Synthetic polypeptide representing artificial human antibody CDR-L2 region
QDS

SEQ ID NO: 14369 - protein, 3 aa, Artificial Sequence
  Synthetic polypeptide representing artificial human antibody CDR-L2 region
GED

SEQ ID NO: 14370 - protein, 3 aa, Artificial Sequence
  Synthetic polypeptide representing artificial human antibody CDR-L2 region
KDS

SEQ ID NO: 14371 - protein, 3 aa, Artificial Sequence
  Synthetic polypeptide representing artificial human antibody CDR-L2 region
WAS

SEQ ID NO: 14372 - protein, 3 aa, Artificial Sequence
  Synthetic polypeptide representing artificial human antibody CDR-L2 region
DVD

SEQ ID NO: 14373 - protein, 3 aa, Artificial Sequence
  Synthetic polypeptide representing artificial human antibody CDR-L2 region
STN

SEQ ID NO: 14374 - protein, 3 aa, Artificial Sequence
  Synthetic polypeptide representing artificial human antibody CDR-L2 region
QDR

SEQ ID NO: 14375 - protein, 8 aa, Artificial Sequence
  Synthetic polypeptide representing artificial human antibody CDR-L2 region
VGTGGIVG

SEQ ID NO: 14376 - protein, 3 aa, Artificial Sequence
  Synthetic polypeptide representing artificial human antibody CDR-L2 region
KAS

SEQ ID NO: 14377 - protein, 3 aa, Artificial Sequence
  Synthetic polypeptide representing artificial human antibody CDR-L2 region
NVT

SEQ ID NO: 14378 - protein, 3 aa, Artificial Sequence
  Synthetic polypeptide representing artificial human antibody CDR-L2 region
SNN

SEQ ID NO: 14379 - protein, 3 aa, Artificial Sequence
  Synthetic polypeptide representing artificial human antibody CDR-L2 region
GDN

SEQ ID NO: 14380 - protein, 3 aa, Artificial Sequence
  Synthetic polypeptide representing artificial human antibody CDR-L2 region
DTY

SEQ ID NO: 14381 - protein, 3 aa, Artificial Sequence
  Synthetic polypeptide representing artificial human antibody CDR-L2 region
KVS

SEQ ID NO: 14382 - protein, 3 aa, Artificial Sequence
  Synthetic polypeptide representing artificial human antibody CDR-L2 region
EAS

SEQ ID NO: 14383 - protein, 3 aa, Artificial Sequence
  Synthetic polypeptide representing artificial human antibody CDR-L2 region
RDK

SEQ ID NO: 14384 - protein, 3 aa, Artificial Sequence
  Synthetic polypeptide representing artificial human antibody CDR-L2 region
LAS

SEQ ID NO: 14385 - protein, 3 aa, Artificial Sequence
  Synthetic polypeptide representing artificial human antibody CDR-L2 region
GKN

SEQ ID NO: 14386 - protein, 3 aa, Artificial Sequence
  Synthetic polypeptide representing artificial human antibody CDR-L2 region
GKN

SEQ ID NO: 14387 - protein, 3 aa, Artificial Sequence
  Synthetic polypeptide representing artificial human antibody CDR-L2 region
AAS

SEQ ID NO: 14388 - protein, 3 aa, Artificial Sequence
  Synthetic polypeptide representing artificial human antibody CDR-L2 region
QDA

SEQ ID NO: 14389 - protein, 3 aa, Artificial Sequence
  Synthetic polypeptide representing artificial human antibody CDR-L2 region
SAS

SEQ ID NO: 14390 - protein, 3 aa, Artificial Sequence
  Synthetic polypeptide representing artificial human antibody CDR-L2 region
SAS

SEQ ID NO: 14391 - protein, 3 aa, Artificial Sequence
  Synthetic polypeptide representing artificial human antibody CDR-L2 region
QDA

SEQ ID NO: 14392 - protein, 3 aa, Artificial Sequence
  Synthetic polypeptide representing artificial human antibody CDR-L2 region
DVS

SEQ ID NO: 14393 - protein, 7 aa, Artificial Sequence
  Synthetic polypeptide representing artificial human antibody CDR-L2 region
VNSDGSH

SEQ ID NO: 14394 - protein, 3 aa, Artificial Sequence
  Synthetic polypeptide representing artificial human antibody CDR-L2 region
GAS

SEQ ID NO: 14395 - protein, 3 aa, Artificial Sequence
  Synthetic polypeptide representing artificial human antibody CDR-L2 region
WAS

SEQ ID NO: 14396 - protein, 3 aa, Artificial Sequence
  Synthetic polypeptide representing artificial human antibody CDR-L2 region
AAS

SEQ ID NO: 14397 - protein, 3 aa, Artificial Sequence
  Synthetic polypeptide representing artificial human antibody CDR-L2 region
GAS

SEQ ID NO: 14398 - protein, 3 aa, Artificial Sequence
  Synthetic polypeptide representing artificial human antibody CDR-L2 region
GNS

SEQ ID NO: 14399 - protein, 3 aa, Artificial Sequence
  Synthetic polypeptide representing artificial human antibody CDR-L2 region
DAS

SEQ ID NO: 14400 - protein, 3 aa, Artificial Sequence
  Synthetic polypeptide representing artificial human antibody CDR-L2 region
DTD

SEQ ID NO: 14401 - protein, 3 aa, Artificial Sequence
  Synthetic polypeptide representing artificial human antibody CDR-L2 region
EVV

SEQ ID NO: 14402 - protein, 3 aa, Artificial Sequence
  Synthetic polypeptide representing artificial human antibody CDR-L2 region
GAS

SEQ ID NO: 14403 - protein, 3 aa, Artificial Sequence
  Synthetic polypeptide representing artificial human antibody CDR-L2 region
WAS

SEQ ID NO: 14404 - protein, 3 aa, Artificial Sequence
  Synthetic polypeptide representing artificial human antibody CDR-L2 region
WAS

SEQ ID NO: 14405 - protein, 3 aa, Artificial Sequence
  Synthetic polypeptide representing artificial human antibody CDR-L2 region
GGS

SEQ ID NO: 14406 - protein, 3 aa, Artificial Sequence
  Synthetic polypeptide representing artificial human antibody CDR-L2 region
DDS

SEQ ID NO: 14407 - protein, 3 aa, Artificial Sequence
  Synthetic polypeptide representing artificial human antibody CDR-L2 region
GLS

SEQ ID NO: 14408 - protein, 3 aa, Artificial Sequence
  Synthetic polypeptide representing artificial human antibody CDR-L2 region
NTN

SEQ ID NO: 14409 - protein, 3 aa, Artificial Sequence
  Synthetic polypeptide representing artificial human antibody CDR-L2 region
DVS

SEQ ID NO: 14410 - protein, 3 aa, Artificial Sequence
  Synthetic polypeptide representing artificial human antibody CDR-L2 region
QDS

SEQ ID NO: 14411 - protein, 3 aa, Artificial Sequence
  Synthetic polypeptide representing artificial human antibody CDR-L2 region
QDN

SEQ ID NO: 14412 - protein, 3 aa, Artificial Sequence
  Synthetic polypeptide representing artificial human antibody CDR-L2 region
DVT

SEQ ID NO: 14413 - protein, 3 aa, Artificial Sequence
  Synthetic polypeptide representing artificial human antibody CDR-L2 region
ATF

SEQ ID NO: 14414 - protein, 3 aa, Artificial Sequence
  Synthetic polypeptide representing artificial human antibody CDR-L2 region
AAS

SEQ ID NO: 14415 - protein, 3 aa, Artificial Sequence
  Synthetic polypeptide representing artificial human antibody CDR-L2 region
GAS

SEQ ID NO: 14416 - protein, 3 aa, Artificial Sequence
  Synthetic polypeptide representing artificial human antibody CDR-L2 region
EVS

SEQ ID NO: 14417 - protein, 3 aa, Artificial Sequence
  Synthetic polypeptide representing artificial human antibody CDR-L2 region
WAS

SEQ ID NO: 14418 - protein, 3 aa, Artificial Sequence
  Synthetic polypeptide representing artificial human antibody CDR-L2 region
DGG

SEQ ID NO: 14419 - protein, 3 aa, Artificial Sequence
  Synthetic polypeptide representing artificial human antibody CDR-L2 region
KAS

SEQ ID NO: 14420 - protein, 3 aa, Artificial Sequence
  Synthetic polypeptide representing artificial human antibody CDR-L2 region
DDS

SEQ ID NO: 14421 - protein, 3 aa, Artificial Sequence
  Synthetic polypeptide representing artificial human antibody CDR-L2 region
EDS

SEQ ID NO: 14422 - protein, 3 aa, Artificial Sequence
  Synthetic polypeptide representing artificial human antibody CDR-L2 region
GAS

SEQ ID NO: 14423 - protein, 3 aa, Artificial Sequence
  Synthetic polypeptide representing artificial human antibody CDR-L2 region
DVS

SEQ ID NO: 14424 - protein, 3 aa, Artificial Sequence
  Synthetic polypeptide representing artificial human antibody CDR-L2 region
EVT

SEQ ID NO: 14425 - protein, 3 aa, Artificial Sequence
  Synthetic polypeptide representing artificial human antibody CDR-L2 region
FTS

SEQ ID NO: 14426 - protein, 3 aa, Artificial Sequence
  Synthetic polypeptide representing artificial human antibody CDR-L2 region
EDS

SEQ ID NO: 14427 - protein, 7 aa, Artificial Sequence
  Synthetic polypeptide representing artificial human antibody CDR-L2 region
LESTGTY

SEQ ID NO: 14428 - protein, 3 aa, Artificial Sequence
  Synthetic polypeptide representing artificial human antibody CDR-L2 region
GAS

SEQ ID NO: 14429 - protein, 3 aa, Artificial Sequence
  Synthetic polypeptide representing artificial human antibody CDR-L2 region
EGD

SEQ ID NO: 14430 - protein, 3 aa, Artificial Sequence
  Synthetic polypeptide representing artificial human antibody CDR-L2 region
KAS

SEQ ID NO: 14431 - protein, 3 aa, Artificial Sequence
  Synthetic polypeptide representing artificial human antibody CDR-L2 region
GAS

SEQ ID NO: 14432 - protein, 3 aa, Artificial Sequence
  Synthetic polypeptide representing artificial human antibody CDR-L2 region
GAS

SEQ ID NO: 14433 - protein, 3 aa, Artificial Sequence
  Synthetic polypeptide representing artificial human antibody CDR-L2 region
EVS

SEQ ID NO: 14434 - protein, 3 aa, Artificial Sequence
  Synthetic polypeptide representing artificial human antibody CDR-L2 region
AAS

SEQ ID NO: 14435 - protein, 3 aa, Artificial Sequence
  Synthetic polypeptide representing artificial human antibody CDR-L2 region
GAS

SEQ ID NO: 14436 - protein, 3 aa, Artificial Sequence
  Synthetic polypeptide representing artificial human antibody CDR-L2 region
GAS

SEQ ID NO: 14437 - protein, 3 aa, Artificial Sequence
  Synthetic polypeptide representing artificial human antibody CDR-L2 region
GAS

SEQ ID NO: 14438 - protein, 3 aa, Artificial Sequence
  Synthetic polypeptide representing artificial human antibody CDR-L2 region
EDS

SEQ ID NO: 14439 - protein, 3 aa, Artificial Sequence
  Synthetic polypeptide representing artificial human antibody CDR-L2 region
GAS

SEQ ID NO: 14440 - protein, 3 aa, Artificial Sequence
  Synthetic polypeptide representing artificial human antibody CDR-L2 region
GAS

SEQ ID NO: 14441 - protein, 3 aa, Artificial Sequence
  Synthetic polypeptide representing artificial human antibody CDR-L2 region
GAS

SEQ ID NO: 14442 - protein, 3 aa, Artificial Sequence
  Synthetic polypeptide representing artificial human antibody CDR-L2 region
NTD

SEQ ID NO: 14443 - protein, 3 aa, Artificial Sequence
  Synthetic polypeptide representing artificial human antibody CDR-L2 region
STS

SEQ ID NO: 14444 - protein, 3 aa, Artificial Sequence
  Synthetic polypeptide representing artificial human antibody CDR-L2 region
AAS

SEQ ID NO: 14445 - protein, 3 aa, Artificial Sequence
  Synthetic polypeptide representing artificial human antibody CDR-L2 region
EVS

SEQ ID NO: 14446 - protein, 3 aa, Artificial Sequence
  Synthetic polypeptide representing artificial human antibody CDR-L2 region
ELH

SEQ ID NO: 14447 - protein, 3 aa, Artificial Sequence
  Synthetic polypeptide representing artificial human antibody CDR-L2 region
QDD

SEQ ID NO: 14448 - protein, 3 aa, Artificial Sequence
  Synthetic polypeptide representing artificial human antibody CDR-L2 region
DDS

SEQ ID NO: 14449 - protein, 3 aa, Artificial Sequence
  Synthetic polypeptide representing artificial human antibody CDR-L2 region
KDS

SEQ ID NO: 14450 - protein, 3 aa, Artificial Sequence
  Synthetic polypeptide representing artificial human antibody CDR-L2 region
WAS

SEQ ID NO: 14451 - protein, 3 aa, Artificial Sequence
  Synthetic polypeptide representing artificial human antibody CDR-L2 region
GAS

SEQ ID NO: 14452 - protein, 3 aa, Artificial Sequence
  Synthetic polypeptide representing artificial human antibody CDR-L2 region
NSN

SEQ ID NO: 14453 - protein, 3 aa, Artificial Sequence
  Synthetic polypeptide representing artificial human antibody CDR-L2 region
AAS

SEQ ID NO: 14454 - protein, 3 aa, Artificial Sequence
  Synthetic polypeptide representing artificial human antibody CDR-L2 region
GAF

SEQ ID NO: 14455 - protein, 3 aa, Artificial Sequence
  Synthetic polypeptide representing artificial human antibody CDR-L2 region
ADS

SEQ ID NO: 14456 - protein, 3 aa, Artificial Sequence
  Synthetic polypeptide representing artificial human antibody CDR-L2 region
DVS

SEQ ID NO: 14457 - protein, 3 aa, Artificial Sequence
  Synthetic polypeptide representing artificial human antibody CDR-L2 region
WAS

SEQ ID NO: 14458 - protein, 3 aa, Artificial Sequence
  Synthetic polypeptide representing artificial human antibody CDR-L2 region
GAS

SEQ ID NO: 14459 - protein, 3 aa, Artificial Sequence
  Synthetic polypeptide representing artificial human antibody CDR-L2 region
GAS

SEQ ID NO: 14460 - protein, 3 aa, Artificial Sequence
  Synthetic polypeptide representing artificial human antibody CDR-L2 region
AAS

SEQ ID NO: 14461 - protein, 3 aa, Artificial Sequence
  Synthetic polypeptide representing artificial human antibody CDR-L2 region
AAS

SEQ ID NO: 14462 - protein, 3 aa, Artificial Sequence
  Synthetic polypeptide representing artificial human antibody CDR-L2 region
SAS

SEQ ID NO: 14463 - protein, 3 aa, Artificial Sequence
  Synthetic polypeptide representing artificial human antibody CDR-L2 region
AAS

SEQ ID NO: 14464 - protein, 3 aa, Artificial Sequence
  Synthetic polypeptide representing artificial human antibody CDR-L2 region
DVS

SEQ ID NO: 14465 - protein, 3 aa, Artificial Sequence
  Synthetic polypeptide representing artificial human antibody CDR-L2 region
DVN

SEQ ID NO: 14466 - protein, 3 aa, Artificial Sequence
  Synthetic polypeptide representing artificial human antibody CDR-L2 region
KDS

SEQ ID NO: 14467 - protein, 3 aa, Artificial Sequence
  Synthetic polypeptide representing artificial human antibody CDR-L2 region
AAS

SEQ ID NO: 14468 - protein, 3 aa, Artificial Sequence
  Synthetic polypeptide representing artificial human antibody CDR-L2 region
YNT

SEQ ID NO: 14469 - protein, 3 aa, Artificial Sequence
  Synthetic polypeptide representing artificial human antibody CDR-L2 region
GAS

SEQ ID NO: 14470 - protein, 3 aa, Artificial Sequence
  Synthetic polypeptide representing artificial human antibody CDR-L2 region
DNN

SEQ ID NO: 14471 - protein, 3 aa, Artificial Sequence
  Synthetic polypeptide representing artificial human antibody CDR-L2 region
WAS

SEQ ID NO: 14472 - protein, 3 aa, Artificial Sequence
  Synthetic polypeptide representing artificial human antibody CDR-L2 region
AAS

SEQ ID NO: 14473 - protein, 3 aa, Artificial Sequence
  Synthetic polypeptide representing artificial human antibody CDR-L2 region
AAS

SEQ ID NO: 14474 - protein, 3 aa, Artificial Sequence
  Synthetic polypeptide representing artificial human antibody CDR-L2 region
AAS

SEQ ID NO: 14475 - protein, 3 aa, Artificial Sequence
  Synthetic polypeptide representing artificial human antibody CDR-L2 region
AAS

SEQ ID NO: 14476 - protein, 3 aa, Artificial Sequence
  Synthetic polypeptide representing artificial human antibody CDR-L2 region
GAS

SEQ ID NO: 14477 - protein, 3 aa, Artificial Sequence
  Synthetic polypeptide representing artificial human antibody CDR-L2 region
GAS

SEQ ID NO: 14478 - protein, 3 aa, Artificial Sequence
  Synthetic polypeptide representing artificial human antibody CDR-L2 region
EVS

SEQ ID NO: 14479 - protein, 3 aa, Artificial Sequence
  Synthetic polypeptide representing artificial human antibody CDR-L2 region
KDS

SEQ ID NO: 14480 - protein, 3 aa, Artificial Sequence
  Synthetic polypeptide representing artificial human antibody CDR-L2 region
QDS

SEQ ID NO: 14481 - protein, 3 aa, Artificial Sequence
  Synthetic polypeptide representing artificial human antibody CDR-L2 region
AAS

SEQ ID NO: 14482 - protein, 3 aa, Artificial Sequence
  Synthetic polypeptide representing artificial human antibody CDR-L2 region
GKN

SEQ ID NO: 14483 - protein, 3 aa, Artificial Sequence
  Synthetic polypeptide representing artificial human antibody CDR-L2 region
EVS

SEQ ID NO: 14484 - protein, 3 aa, Artificial Sequence
  Synthetic polypeptide representing artificial human antibody CDR-L2 region
DAS

SEQ ID NO: 14485 - protein, 3 aa, Artificial Sequence
  Synthetic polypeptide representing artificial human antibody CDR-L2 region
WAS

SEQ ID NO: 14486 - protein, 8 aa, Artificial Sequence
  Synthetic polypeptide representing artificial human antibody CDR-L2 region
VGTGGIVG

SEQ ID NO: 14487 - protein, 3 aa, Artificial Sequence
  Synthetic polypeptide representing artificial human antibody CDR-L2 region
EDN

SEQ ID NO: 14488 - protein, 3 aa, Artificial Sequence
  Synthetic polypeptide representing artificial human antibody CDR-L2 region
KDS

SEQ ID NO: 14489 - protein, 3 aa, Artificial Sequence
  Synthetic polypeptide representing artificial human antibody CDR-L2 region
QDS

SEQ ID NO: 14490 - protein, 3 aa, Artificial Sequence
  Synthetic polypeptide representing artificial human antibody CDR-L2 region
DVS

SEQ ID NO: 14491 - protein, 3 aa, Artificial Sequence
  Synthetic polypeptide representing artificial human antibody CDR-L2 region
EVT

SEQ ID NO: 14492 - protein, 3 aa, Artificial Sequence
  Synthetic polypeptide representing artificial human antibody CDR-L2 region
GNS

SEQ ID NO: 14493 - protein, 3 aa, Artificial Sequence
  Synthetic polypeptide representing artificial human antibody CDR-L2 region
GAS

SEQ ID NO: 14494 - protein, 3 aa, Artificial Sequence
  Synthetic polypeptide representing artificial human antibody CDR-L2 region
AAS

SEQ ID NO: 14495 - protein, 3 aa, Artificial Sequence
  Synthetic polypeptide representing artificial human antibody CDR-L2 region
QDS

SEQ ID NO: 14496 - protein, 3 aa, Artificial Sequence
  Synthetic polypeptide representing artificial human antibody CDR-L2 region
RNN

SEQ ID NO: 14497 - protein, 3 aa, Artificial Sequence
  Synthetic polypeptide representing artificial human antibody CDR-L2 region
EVS

SEQ ID NO: 14498 - protein, 3 aa, Artificial Sequence
  Synthetic polypeptide representing artificial human antibody CDR-L2 region
KAS

SEQ ID NO: 14499 - protein, 3 aa, Artificial Sequence
  Synthetic polypeptide representing artificial human antibody CDR-L2 region
QDS

SEQ ID NO: 14500 - protein, 8 aa, Artificial Sequence
  Synthetic polypeptide representing artificial human antibody CDR-L2 region
VGTGGIVG

SEQ ID NO: 14501 - protein, 3 aa, Artificial Sequence
  Synthetic polypeptide representing artificial human antibody CDR-L2 region
GNS

SEQ ID NO: 14502 - protein, 3 aa, Artificial Sequence
  Synthetic polypeptide representing artificial human antibody CDR-L2 region
KAS

SEQ ID NO: 14503 - protein, 3 aa, Artificial Sequence
  Synthetic polypeptide representing artificial human antibody CDR-L2 region
DAS

SEQ ID NO: 14504 - protein, 3 aa, Artificial Sequence
  Synthetic polypeptide representing artificial human antibody CDR-L2 region
DAS

SEQ ID NO: 14505 - protein, 3 aa, Artificial Sequence
  Synthetic polypeptide representing artificial human antibody CDR-L2 region
GAS

SEQ ID NO: 14506 - protein, 3 aa, Artificial Sequence
  Synthetic polypeptide representing artificial human antibody CDR-L2 region
DAS

SEQ ID NO: 14507 - protein, 3 aa, Artificial Sequence
  Synthetic polypeptide representing artificial human antibody CDR-L2 region
AAS

SEQ ID NO: 14508 - protein, 3 aa, Artificial Sequence
  Synthetic polypeptide representing artificial human antibody CDR-L2 region
QDS

SEQ ID NO: 14509 - protein, 3 aa, Artificial Sequence
  Synthetic polypeptide representing artificial human antibody CDR-L2 region
KDS

SEQ ID NO: 14510 - protein, 3 aa, Artificial Sequence
  Synthetic polypeptide representing artificial human antibody CDR-L2 region
AAS

SEQ ID NO: 14511 - protein, 3 aa, Artificial Sequence
  Synthetic polypeptide representing artificial human antibody CDR-L2 region
AAS

SEQ ID NO: 14512 - protein, 3 aa, Artificial Sequence
  Synthetic polypeptide representing artificial human antibody CDR-L2 region
EVS

SEQ ID NO: 14513 - protein, 3 aa, Artificial Sequence
  Synthetic polypeptide representing artificial human antibody CDR-L2 region
EVN

SEQ ID NO: 14514 - protein, 3 aa, Artificial Sequence
  Synthetic polypeptide representing artificial human antibody CDR-L2 region
KDS

SEQ ID NO: 14515 - protein, 3 aa, Artificial Sequence
  Synthetic polypeptide representing artificial human antibody CDR-L2 region
EVS

SEQ ID NO: 14516 - protein, 3 aa, Artificial Sequence
  Synthetic polypeptide representing artificial human antibody CDR-L2 region
DVS

SEQ ID NO: 14517 - protein, 3 aa, Artificial Sequence
  Synthetic polypeptide representing artificial human antibody CDR-L2 region
KDS

SEQ ID NO: 14518 - protein, 3 aa, Artificial Sequence
  Synthetic polypeptide representing artificial human antibody CDR-L2 region
KDS

SEQ ID NO: 14519 - protein, 3 aa, Artificial Sequence
  Synthetic polypeptide representing artificial human antibody CDR-L2 region
AAS

SEQ ID NO: 14520 - protein, 8 aa, Artificial Sequence
  Synthetic polypeptide representing artificial human antibody CDR-L2 region
VGTGGIVG

SEQ ID NO: 14521 - protein, 3 aa, Artificial Sequence
  Synthetic polypeptide representing artificial human antibody CDR-L2 region
DAS

SEQ ID NO: 14522 - protein, 3 aa, Artificial Sequence
  Synthetic polypeptide representing artificial human antibody CDR-L2 region
KVS

SEQ ID NO: 14523 - protein, 3 aa, Artificial Sequence
  Synthetic polypeptide representing artificial human antibody CDR-L2 region
DTS

SEQ ID NO: 14524 - protein, 3 aa, Artificial Sequence
  Synthetic polypeptide representing artificial human antibody CDR-L2 region
EDT

SEQ ID NO: 14525 - protein, 3 aa, Artificial Sequence
  Synthetic polypeptide representing artificial human antibody CDR-L2 region
WAS

SEQ ID NO: 14526 - protein, 3 aa, Artificial Sequence
  Synthetic polypeptide representing artificial human antibody CDR-L2 region
EVS

SEQ ID NO: 14527 - protein, 3 aa, Artificial Sequence
  Synthetic polypeptide representing artificial human antibody CDR-L2 region
SAS

SEQ ID NO: 14528 - protein, 3 aa, Artificial Sequence
  Synthetic polypeptide representing artificial human antibody CDR-L2 region
AAS

SEQ ID NO: 14529 - protein, 3 aa, Artificial Sequence
  Synthetic polypeptide representing artificial human antibody CDR-L2 region
DVS

SEQ ID NO: 14530 - protein, 3 aa, Artificial Sequence
  Synthetic polypeptide representing artificial human antibody CDR-L2 region
KDS

SEQ ID NO: 14531 - protein, 3 aa, Artificial Sequence
  Synthetic polypeptide representing artificial human antibody CDR-L2 region
NNN

SEQ ID NO: 14532 - protein, 3 aa, Artificial Sequence
  Synthetic polypeptide representing artificial human antibody CDR-L2 region
SNT

SEQ ID NO: 14533 - protein, 3 aa, Artificial Sequence
  Synthetic polypeptide representing artificial human antibody CDR-L2 region
KDS

SEQ ID NO: 14534 - protein, 3 aa, Artificial Sequence
  Synthetic polypeptide representing artificial human antibody CDR-L2 region
DAS

SEQ ID NO: 14535 - protein, 3 aa, Artificial Sequence
  Synthetic polypeptide representing artificial human antibody CDR-L2 region
SGS

SEQ ID NO: 14536 - protein, 3 aa, Artificial Sequence
  Synthetic polypeptide representing artificial human antibody CDR-L2 region
AAS

SEQ ID NO: 14537 - protein, 3 aa, Artificial Sequence
  Synthetic polypeptide representing artificial human antibody CDR-L2 region
RVS

SEQ ID NO: 14538 - protein, 3 aa, Artificial Sequence
  Synthetic polypeptide representing artificial human antibody CDR-L2 region
RNN

SEQ ID NO: 14539 - protein, 3 aa, Artificial Sequence
  Synthetic polypeptide representing artificial human antibody CDR-L2 region
EDN

SEQ ID NO: 14540 - protein, 3 aa, Artificial Sequence
  Synthetic polypeptide representing artificial human antibody CDR-L2 region
AAS

SEQ ID NO: 14541 - protein, 3 aa, Artificial Sequence
  Synthetic polypeptide representing artificial human antibody CDR-L2 region
DNN

SEQ ID NO: 14542 - protein, 3 aa, Artificial Sequence
  Synthetic polypeptide representing artificial human antibody CDR-L2 region
QDS

SEQ ID NO: 14543 - protein, 3 aa, Artificial Sequence
  Synthetic polypeptide representing artificial human antibody CDR-L2 region
RNN

SEQ ID NO: 14544 - protein, 3 aa, Artificial Sequence
  Synthetic polypeptide representing artificial human antibody CDR-L2 region
SNN

SEQ ID NO: 14545 - protein, 3 aa, Artificial Sequence
  Synthetic polypeptide representing artificial human antibody CDR-L2 region
WAS

SEQ ID NO: 14546 - protein, 8 aa, Artificial Sequence
  Synthetic polypeptide representing artificial human antibody CDR-L2 region
VGTGGIVG

SEQ ID NO: 14547 - protein, 3 aa, Artificial Sequence
  Synthetic polypeptide representing artificial human antibody CDR-L2 region
RNN

SEQ ID NO: 14548 - protein, 3 aa, Artificial Sequence
  Synthetic polypeptide representing artificial human antibody CDR-L2 region
KDS

SEQ ID NO: 14549 - protein, 3 aa, Artificial Sequence
  Synthetic polypeptide representing artificial human antibody CDR-L2 region
AAT

SEQ ID NO: 14550 - protein, 3 aa, Artificial Sequence
  Synthetic polypeptide representing artificial human antibody CDR-L2 region
SNN

SEQ ID NO: 14551 - protein, 3 aa, Artificial Sequence
  Synthetic polypeptide representing artificial human antibody CDR-L2 region
AAS

SEQ ID NO: 14552 - protein, 3 aa, Artificial Sequence
  Synthetic polypeptide representing artificial human antibody CDR-L2 region
EDS

SEQ ID NO: 14553 - protein, 3 aa, Artificial Sequence
  Synthetic polypeptide representing artificial human antibody CDR-L2 region
RDS

SEQ ID NO: 14554 - protein, 3 aa, Artificial Sequence
  Synthetic polypeptide representing artificial human antibody CDR-L2 region
GNN

SEQ ID NO: 14555 - protein, 3 aa, Artificial Sequence
  Synthetic polypeptide representing artificial human antibody CDR-L2 region
KDS

SEQ ID NO: 14556 - protein, 3 aa, Artificial Sequence
  Synthetic polypeptide representing artificial human antibody CDR-L2 region
WSS

SEQ ID NO: 14557 - protein, 3 aa, Artificial Sequence
  Synthetic polypeptide representing artificial human antibody CDR-L2 region
GGD

SEQ ID NO: 14558 - protein, 3 aa, Artificial Sequence
  Synthetic polypeptide representing artificial human antibody CDR-L2 region
DNN

SEQ ID NO: 14559 - protein, 3 aa, Artificial Sequence
  Synthetic polypeptide representing artificial human antibody CDR-L2 region
QDS

SEQ ID NO: 14560 - protein, 3 aa, Artificial Sequence
  Synthetic polypeptide representing artificial human antibody CDR-L2 region
KDS

SEQ ID NO: 14561 - protein, 3 aa, Artificial Sequence
  Synthetic polypeptide representing artificial human antibody CDR-L2 region
GAS

SEQ ID NO: 14562 - protein, 3 aa, Artificial Sequence
  Synthetic polypeptide representing artificial human antibody CDR-L2 region
QDS

SEQ ID NO: 14563 - protein, 3 aa, Artificial Sequence
  Synthetic polypeptide representing artificial human antibody CDR-L2 region
QDS

SEQ ID NO: 14564 - protein, 3 aa, Artificial Sequence
  Synthetic polypeptide representing artificial human antibody CDR-L2 region
GAS

SEQ ID NO: 14565 - protein, 3 aa, Artificial Sequence
  Synthetic polypeptide representing artificial human antibody CDR-L2 region
KDS

SEQ ID NO: 14566 - protein, 3 aa, Artificial Sequence
  Synthetic polypeptide representing artificial human antibody CDR-L2 region
WAS

SEQ ID NO: 14567 - protein, 3 aa, Artificial Sequence
  Synthetic polypeptide representing artificial human antibody CDR-L2 region
EVS

SEQ ID NO: 14568 - protein, 3 aa, Artificial Sequence
  Synthetic polypeptide representing artificial human antibody CDR-L2 region
GAS

SEQ ID NO: 14569 - protein, 3 aa, Artificial Sequence
  Synthetic polypeptide representing artificial human antibody CDR-L2 region
KDS

SEQ ID NO: 14570 - protein, 3 aa, Artificial Sequence
  Synthetic polypeptide representing artificial human antibody CDR-L2 region
KDS

SEQ ID NO: 14571 - protein, 3 aa, Artificial Sequence
  Synthetic polypeptide representing artificial human antibody CDR-L2 region
EVT

SEQ ID NO: 14572 - protein, 3 aa, Artificial Sequence
  Synthetic polypeptide representing artificial human antibody CDR-L2 region
DDS

SEQ ID NO: 14573 - protein, 3 aa, Artificial Sequence
  Synthetic polypeptide representing artificial human antibody CDR-L2 region
KIS

SEQ ID NO: 14574 - protein, 7 aa, Artificial Sequence
  Synthetic polypeptide representing artificial human antibody CDR-L2 region
YTSDSDK

SEQ ID NO: 14575 - protein, 3 aa, Artificial Sequence
  Synthetic polypeptide representing artificial human antibody CDR-L2 region
KNN

SEQ ID NO: 14576 - protein, 3 aa, Artificial Sequence
  Synthetic polypeptide representing artificial human antibody CDR-L2 region
GAS

SEQ ID NO: 14577 - protein, 3 aa, Artificial Sequence
  Synthetic polypeptide representing artificial human antibody CDR-L2 region
AAS

SEQ ID NO: 14578 - protein, 3 aa, Artificial Sequence
  Synthetic polypeptide representing artificial human antibody CDR-L2 region
DNN

SEQ ID NO: 14579 - protein, 3 aa, Artificial Sequence
  Synthetic polypeptide representing artificial human antibody CDR-L2 region
SFN

SEQ ID NO: 14580 - protein, 3 aa, Artificial Sequence
  Synthetic polypeptide representing artificial human antibody CDR-L2 region
GVS

SEQ ID NO: 14581 - protein, 4 aa, Artificial Sequence
  Synthetic polypeptide representing artificial human antibody CDR-L2 region
YKDD

SEQ ID NO: 14582 - protein, 3 aa, Artificial Sequence
  Synthetic polypeptide representing artificial human antibody CDR-L2 region
KIS

SEQ ID NO: 14583 - protein, 3 aa, Artificial Sequence
  Synthetic polypeptide representing artificial human antibody CDR-L2 region
DNN

SEQ ID NO: 14584 - protein, 3 aa, Artificial Sequence
  Synthetic polypeptide representing artificial human antibody CDR-L2 region
QVT

SEQ ID NO: 14585 - protein, 3 aa, Artificial Sequence
  Synthetic polypeptide representing artificial human antibody CDR-L2 region
GAS

SEQ ID NO: 14586 - protein, 3 aa, Artificial Sequence
  Synthetic polypeptide representing artificial human antibody CDR-L2 region
NTN

SEQ ID NO: 14587 - protein, 3 aa, Artificial Sequence
  Synthetic polypeptide representing artificial human antibody CDR-L2 region
SNN

SEQ ID NO: 14588 - protein, 3 aa, Artificial Sequence
  Synthetic polypeptide representing artificial human antibody CDR-L2 region
GTS

SEQ ID NO: 14589 - protein, 3 aa, Artificial Sequence
  Synthetic polypeptide representing artificial human antibody CDR-L2 region
AAS

SEQ ID NO: 14590 - protein, 3 aa, Artificial Sequence
  Synthetic polypeptide representing artificial human antibody CDR-L2 region
SDS

SEQ ID NO: 14591 - protein, 3 aa, Artificial Sequence
  Synthetic polypeptide representing artificial human antibody CDR-L2 region
GSF

SEQ ID NO: 14592 - protein, 3 aa, Artificial Sequence
  Synthetic polypeptide representing artificial human antibody CDR-L2 region
GAS

SEQ ID NO: 14593 - protein, 3 aa, Artificial Sequence
  Synthetic polypeptide representing artificial human antibody CDR-L2 region
GAS

SEQ ID NO: 14594 - protein, 3 aa, Artificial Sequence
  Synthetic polypeptide representing artificial human antibody CDR-L2 region
AAS

SEQ ID NO: 14595 - protein, 3 aa, Artificial Sequence
  Synthetic polypeptide representing artificial human antibody CDR-L2 region
KAS

SEQ ID NO: 14596 - protein, 3 aa, Artificial Sequence
  Synthetic polypeptide representing artificial human antibody CDR-L2 region
RSN

SEQ ID NO: 14597 - protein, 3 aa, Artificial Sequence
  Synthetic polypeptide representing artificial human antibody CDR-L2 region
GAS

SEQ ID NO: 14598 - protein, 3 aa, Artificial Sequence
  Synthetic polypeptide representing artificial human antibody CDR-L2 region
DVS

SEQ ID NO: 14599 - protein, 3 aa, Artificial Sequence
  Synthetic polypeptide representing artificial human antibody CDR-L2 region
DAS

SEQ ID NO: 14600 - protein, 3 aa, Artificial Sequence
  Synthetic polypeptide representing artificial human antibody CDR-L2 region
DNN

SEQ ID NO: 14601 - protein, 3 aa, Artificial Sequence
  Synthetic polypeptide representing artificial human antibody CDR-L2 region
GAS

SEQ ID NO: 14602 - protein, 3 aa, Artificial Sequence
  Synthetic polypeptide representing artificial human antibody CDR-L2 region
EDT

SEQ ID NO: 14603 - protein, 3 aa, Artificial Sequence
  Synthetic polypeptide representing artificial human antibody CDR-L2 region
GKN

SEQ ID NO: 14604 - protein, 3 aa, Artificial Sequence
  Synthetic polypeptide representing artificial human antibody CDR-L2 region
DAS

SEQ ID NO: 14605 - protein, 3 aa, Artificial Sequence
  Synthetic polypeptide representing artificial human antibody CDR-L2 region
DVS

SEQ ID NO: 14606 - protein, 3 aa, Artificial Sequence
  Synthetic polypeptide representing artificial human antibody CDR-L2 region
GSS

SEQ ID NO: 14607 - protein, 3 aa, Artificial Sequence
  Synthetic polypeptide representing artificial human antibody CDR-L2 region
DVF

SEQ ID NO: 14608 - protein, 3 aa, Artificial Sequence
  Synthetic polypeptide representing artificial human antibody CDR-L2 region
GNN

SEQ ID NO: 14609 - protein, 3 aa, Artificial Sequence
  Synthetic polypeptide representing artificial human antibody CDR-L2 region
KDT

SEQ ID NO: 14610 - protein, 3 aa, Artificial Sequence
  Synthetic polypeptide representing artificial human antibody CDR-L2 region
GAS

SEQ ID NO: 14611 - protein, 3 aa, Artificial Sequence
  Synthetic polypeptide representing artificial human antibody CDR-L2 region
WAS

SEQ ID NO: 14612 - protein, 3 aa, Artificial Sequence
  Synthetic polypeptide representing artificial human antibody CDR-L2 region
AAS

SEQ ID NO: 14613 - protein, 3 aa, Artificial Sequence
  Synthetic polypeptide representing artificial human antibody CDR-L2 region
DVG

SEQ ID NO: 14614 - protein, 3 aa, Artificial Sequence
  Synthetic polypeptide representing artificial human antibody CDR-L2 region
ATS

SEQ ID NO: 14615 - protein, 3 aa, Artificial Sequence
  Synthetic polypeptide representing artificial human antibody CDR-L2 region
LGS

SEQ ID NO: 14616 - protein, 3 aa, Artificial Sequence
  Synthetic polypeptide representing artificial human antibody CDR-L2 region
SNT

SEQ ID NO: 14617 - protein, 3 aa, Artificial Sequence
  Synthetic polypeptide representing artificial human antibody CDR-L2 region
MAS

SEQ ID NO: 14618 - protein, 3 aa, Artificial Sequence
  Synthetic polypeptide representing artificial human antibody CDR-L2 region
GTS

SEQ ID NO: 14619 - protein, 3 aa, Artificial Sequence
  Synthetic polypeptide representing artificial human antibody CDR-L2 region
DVS

SEQ ID NO: 14620 - protein, 3 aa, Artificial Sequence
  Synthetic polypeptide representing artificial human antibody CDR-L2 region
STN

SEQ ID NO: 14621 - protein, 3 aa, Artificial Sequence
  Synthetic polypeptide representing artificial human antibody CDR-L2 region
DHA

SEQ ID NO: 14622 - protein, 3 aa, Artificial Sequence
  Synthetic polypeptide representing artificial human antibody CDR-L2 region
GSS

SEQ ID NO: 14623 - protein, 3 aa, Artificial Sequence
  Synthetic polypeptide representing artificial human antibody CDR-L2 region
ETT

SEQ ID NO: 14624 - protein, 3 aa, Artificial Sequence
  Synthetic polypeptide representing artificial human antibody CDR-L2 region
EVS

SEQ ID NO: 14625 - protein, 3 aa, Artificial Sequence
  Synthetic polypeptide representing artificial human antibody CDR-L2 region
DAS

SEQ ID NO: 14626 - protein, 3 aa, Artificial Sequence
  Synthetic polypeptide representing artificial human antibody CDR-L2 region
AAS

SEQ ID NO: 14627 - protein, 3 aa, Artificial Sequence
  Synthetic polypeptide representing artificial human antibody CDR-L2 region
KAS

SEQ ID NO: 14628 - protein, 3 aa, Artificial Sequence
  Synthetic polypeptide representing artificial human antibody CDR-L2 region
EVN

SEQ ID NO: 14629 - protein, 3 aa, Artificial Sequence
  Synthetic polypeptide representing artificial human antibody CDR-L2 region
TAS

SEQ ID NO: 14630 - protein, 3 aa, Artificial Sequence
  Synthetic polypeptide representing artificial human antibody CDR-L2 region
STI

SEQ ID NO: 14631 - protein, 3 aa, Artificial Sequence
  Synthetic polypeptide representing artificial human antibody CDR-L2 region
AAS

SEQ ID NO: 14632 - protein, 3 aa, Artificial Sequence
  Synthetic polypeptide representing artificial human antibody CDR-L2 region
GNN

SEQ ID NO: 14633 - protein, 3 aa, Artificial Sequence
  Synthetic polypeptide representing artificial human antibody CDR-L2 region
GAS

SEQ ID NO: 14634 - protein, 3 aa, Artificial Sequence
  Synthetic polypeptide representing artificial human antibody CDR-L2 region
GSS

SEQ ID NO: 14635 - protein, 3 aa, Artificial Sequence
  Synthetic polypeptide representing artificial human antibody CDR-L2 region
AAS

SEQ ID NO: 14636 - protein, 3 aa, Artificial Sequence
  Synthetic polypeptide representing artificial human antibody CDR-L2 region
NNN

SEQ ID NO: 14637 - protein, 3 aa, Artificial Sequence
  Synthetic polypeptide representing artificial human antibody CDR-L2 region
DDS

SEQ ID NO: 14638 - protein, 3 aa, Artificial Sequence
  Synthetic polypeptide representing artificial human antibody CDR-L2 region
AAS

SEQ ID NO: 14639 - protein, 3 aa, Artificial Sequence
  Synthetic polypeptide representing artificial human antibody CDR-L2 region
TYN

SEQ ID NO: 14640 - protein, 3 aa, Artificial Sequence
  Synthetic polypeptide representing artificial human antibody CDR-L2 region
KNN

SEQ ID NO: 14641 - protein, 3 aa, Artificial Sequence
  Synthetic polypeptide representing artificial human antibody CDR-L2 region
DVT

SEQ ID NO: 14642 - protein, 3 aa, Artificial Sequence
  Synthetic polypeptide representing artificial human antibody CDR-L2 region
WAS

SEQ ID NO: 14643 - protein, 3 aa, Artificial Sequence
  Synthetic polypeptide representing artificial human antibody CDR-L2 region
KIS

SEQ ID NO: 14644 - protein, 3 aa, Artificial Sequence
  Synthetic polypeptide representing artificial human antibody CDR-L2 region
DHK

SEQ ID NO: 14645 - protein, 3 aa, Artificial Sequence
  Synthetic polypeptide representing artificial human antibody CDR-L2 region
END

SEQ ID NO: 14646 - protein, 3 aa, Artificial Sequence
  Synthetic polypeptide representing artificial human antibody CDR-L2 region
GAS

SEQ ID NO: 14647 - protein, 3 aa, Artificial Sequence
  Synthetic polypeptide representing artificial human antibody CDR-L2 region
GAS

SEQ ID NO: 14648 - protein, 3 aa, Artificial Sequence
  Synthetic polypeptide representing artificial human antibody CDR-L2 region
GYS

SEQ ID NO: 14649 - protein, 3 aa, Artificial Sequence
  Synthetic polypeptide representing artificial human antibody CDR-L2 region
DVS

SEQ ID NO: 14650 - protein, 3 aa, Artificial Sequence
  Synthetic polypeptide representing artificial human antibody CDR-L2 region
SNN

SEQ ID NO: 14651 - protein, 3 aa, Artificial Sequence
  Synthetic polypeptide representing artificial human antibody CDR-L2 region
KIS

SEQ ID NO: 14652 - protein, 3 aa, Artificial Sequence
  Synthetic polypeptide representing artificial human antibody CDR-L2 region
KAN

SEQ ID NO: 14653 - protein, 3 aa, Artificial Sequence
  Synthetic polypeptide representing artificial human antibody CDR-L2 region
DND

SEQ ID NO: 14654 - protein, 3 aa, Artificial Sequence
  Synthetic polypeptide representing artificial human antibody CDR-L2 region
GAS

SEQ ID NO: 14655 - protein, 3 aa, Artificial Sequence
  Synthetic polypeptide representing artificial human antibody CDR-L2 region
GNS

SEQ ID NO: 14656 - protein, 3 aa, Artificial Sequence
  Synthetic polypeptide representing artificial human antibody CDR-L2 region
GAS

SEQ ID NO: 14657 - protein, 3 aa, Artificial Sequence
  Synthetic polypeptide representing artificial human antibody CDR-L2 region
KAS

SEQ ID NO: 14658 - protein, 3 aa, Artificial Sequence
  Synthetic polypeptide representing artificial human antibody CDR-L2 region
LGS

SEQ ID NO: 14659 - protein, 3 aa, Artificial Sequence
  Synthetic polypeptide representing artificial human antibody CDR-L2 region
NNN

SEQ ID NO: 14660 - protein, 3 aa, Artificial Sequence
  Synthetic polypeptide representing artificial human antibody CDR-L2 region
SND

SEQ ID NO: 14661 - protein, 7 aa, Artificial Sequence
  Synthetic polypeptide representing artificial human antibody CDR-L2 region
LNSDGSH

SEQ ID NO: 14662 - protein, 3 aa, Artificial Sequence
  Synthetic polypeptide representing artificial human antibody CDR-L2 region
DAS

SEQ ID NO: 14663 - protein, 3 aa, Artificial Sequence
  Synthetic polypeptide representing artificial human antibody CDR-L2 region
SSN

SEQ ID NO: 14664 - protein, 3 aa, Artificial Sequence
  Synthetic polypeptide representing artificial human antibody CDR-L2 region
GAS

SEQ ID NO: 14665 - protein, 3 aa, Artificial Sequence
  Synthetic polypeptide representing artificial human antibody CDR-L2 region
DNN

SEQ ID NO: 14666 - protein, 3 aa, Artificial Sequence
  Synthetic polypeptide representing artificial human antibody CDR-L2 region
DDD

SEQ ID NO: 14667 - protein, 3 aa, Artificial Sequence
  Synthetic polypeptide representing artificial human antibody CDR-L2 region
GNS

SEQ ID NO: 14668 - protein, 3 aa, Artificial Sequence
  Synthetic polypeptide representing artificial human antibody CDR-L2 region
SND

SEQ ID NO: 14669 - protein, 3 aa, Artificial Sequence
  Synthetic polypeptide representing artificial human antibody CDR-L2 region
LGS

SEQ ID NO: 14670 - protein, 3 aa, Artificial Sequence
  Synthetic polypeptide representing artificial human antibody CDR-L2 region
SND

SEQ ID NO: 14671 - protein, 3 aa, Artificial Sequence
  Synthetic polypeptide representing artificial human antibody CDR-L2 region
SND

SEQ ID NO: 14672 - protein, 3 aa, Artificial Sequence
  Synthetic polypeptide representing artificial human antibody CDR-L2 region
GNN

SEQ ID NO: 14673 - protein, 3 aa, Artificial Sequence
  Synthetic polypeptide representing artificial human antibody CDR-L2 region
QVS

SEQ ID NO: 14674 - protein, 3 aa, Artificial Sequence
  Synthetic polypeptide representing artificial human antibody CDR-L2 region
DAS

SEQ ID NO: 14675 - protein, 3 aa, Artificial Sequence
  Synthetic polypeptide representing artificial human antibody CDR-L2 region
DAS

SEQ ID NO: 14676 - protein, 3 aa, Artificial Sequence
  Synthetic polypeptide representing artificial human antibody CDR-L2 region
KAS

SEQ ID NO: 14677 - protein, 3 aa, Artificial Sequence
  Synthetic polypeptide representing artificial human antibody CDR-L2 region
EDS

SEQ ID NO: 14678 - protein, 3 aa, Artificial Sequence
  Synthetic polypeptide representing artificial human antibody CDR-L2 region
DVN

SEQ ID NO: 14679 - protein, 3 aa, Artificial Sequence
  Synthetic polypeptide representing artificial human antibody CDR-L2 region
DNN

SEQ ID NO: 14680 - protein, 3 aa, Artificial Sequence
  Synthetic polypeptide representing artificial human antibody CDR-L2 region
GAS

SEQ ID NO: 14681 - protein, 3 aa, Artificial Sequence
  Synthetic polypeptide representing artificial human antibody CDR-L2 region
AAS

SEQ ID NO: 14682 - protein, 3 aa, Artificial Sequence
  Synthetic polypeptide representing artificial human antibody CDR-L2 region
SND

SEQ ID NO: 14683 - protein, 3 aa, Artificial Sequence
  Synthetic polypeptide representing artificial human antibody CDR-L2 region
SSD

SEQ ID NO: 14684 - protein, 3 aa, Artificial Sequence
  Synthetic polypeptide representing artificial human antibody CDR-L2 region
YIF

SEQ ID NO: 14685 - protein, 3 aa, Artificial Sequence
  Synthetic polypeptide representing artificial human antibody CDR-L2 region
AAS

SEQ ID NO: 14686 - protein, 3 aa, Artificial Sequence
  Synthetic polypeptide representing artificial human antibody CDR-L2 region
EVS

SEQ ID NO: 14687 - protein, 3 aa, Artificial Sequence
  Synthetic polypeptide representing artificial human antibody CDR-L2 region
EVS

SEQ ID NO: 14688 - protein, 3 aa, Artificial Sequence
  Synthetic polypeptide representing artificial human antibody CDR-L2 region
KAS

SEQ ID NO: 14689 - protein, 3 aa, Artificial Sequence
  Synthetic polypeptide representing artificial human antibody CDR-L2 region
WAS

SEQ ID NO: 14690 - protein, 3 aa, Artificial Sequence
  Synthetic polypeptide representing artificial human antibody CDR-L2 region
VNN

SEQ ID NO: 14691 - protein, 3 aa, Artificial Sequence
  Synthetic polypeptide representing artificial human antibody CDR-L2 region
AAS

SEQ ID NO: 14692 - protein, 3 aa, Artificial Sequence
  Synthetic polypeptide representing artificial human antibody CDR-L2 region
AAS

SEQ ID NO: 14693 - protein, 3 aa, Artificial Sequence
  Synthetic polypeptide representing artificial human antibody CDR-L2 region
EVV

SEQ ID NO: 14694 - protein, 3 aa, Artificial Sequence
  Synthetic polypeptide representing artificial human antibody CDR-L2 region
GNN

SEQ ID NO: 14695 - protein, 3 aa, Artificial Sequence
  Synthetic polypeptide representing artificial human antibody CDR-L2 region
DAS

SEQ ID NO: 14696 - protein, 3 aa, Artificial Sequence
  Synthetic polypeptide representing artificial human antibody CDR-L2 region
WAS

SEQ ID NO: 14697 - protein, 3 aa, Artificial Sequence
  Synthetic polypeptide representing artificial human antibody CDR-L2 region
QVT

SEQ ID NO: 14698 - protein, 3 aa, Artificial Sequence
  Synthetic polypeptide representing artificial human antibody CDR-L2 region
DNN

SEQ ID NO: 14699 - protein, 3 aa, Artificial Sequence
  Synthetic polypeptide representing artificial human antibody CDR-L2 region
DLT

SEQ ID NO: 14700 - protein, 3 aa, Artificial Sequence
  Synthetic polypeptide representing artificial human antibody CDR-L2 region
DVS

SEQ ID NO: 14701 - protein, 3 aa, Artificial Sequence
  Synthetic polypeptide representing artificial human antibody CDR-L2 region
NNN

SEQ ID NO: 14702 - protein, 3 aa, Artificial Sequence
  Synthetic polypeptide representing artificial human antibody CDR-L2 region
DTY

SEQ ID NO: 14703 - protein, 3 aa, Artificial Sequence
  Synthetic polypeptide representing artificial human antibody CDR-L2 region
NND

SEQ ID NO: 14704 - protein, 3 aa, Artificial Sequence
  Synthetic polypeptide representing artificial human antibody CDR-L2 region
EVT

SEQ ID NO: 14705 - protein, 3 aa, Artificial Sequence
  Synthetic polypeptide representing artificial human antibody CDR-L2 region
GTS

SEQ ID NO: 14706 - protein, 3 aa, Artificial Sequence
  Synthetic polypeptide representing artificial human antibody CDR-L2 region
DVS

SEQ ID NO: 14707 - protein, 3 aa, Artificial Sequence
  Synthetic polypeptide representing artificial human antibody CDR-L2 region
KVS

SEQ ID NO: 14708 - protein, 3 aa, Artificial Sequence
  Synthetic polypeptide representing artificial human antibody CDR-L2 region
KAS

SEQ ID NO: 14709 - protein, 3 aa, Artificial Sequence
  Synthetic polypeptide representing artificial human antibody CDR-L2 region
DVY

SEQ ID NO: 14710 - protein, 3 aa, Artificial Sequence
  Synthetic polypeptide representing artificial human antibody CDR-L2 region
NNN

SEQ ID NO: 14711 - protein, 3 aa, Artificial Sequence
  Synthetic polypeptide representing artificial human antibody CDR-L2 region
KVS

SEQ ID NO: 14712 - protein, 3 aa, Artificial Sequence
  Synthetic polypeptide representing artificial human antibody CDR-L2 region
EVS

SEQ ID NO: 14713 - protein, 3 aa, Artificial Sequence
  Synthetic polypeptide representing artificial human antibody CDR-L2 region
EAS

SEQ ID NO: 14714 - protein, 3 aa, Artificial Sequence
  Synthetic polypeptide representing artificial human antibody CDR-L2 region
EVS

SEQ ID NO: 14715 - protein, 3 aa, Artificial Sequence
  Synthetic polypeptide representing artificial human antibody CDR-L2 region
GGS

SEQ ID NO: 14716 - protein, 3 aa, Artificial Sequence
  Synthetic polypeptide representing artificial human antibody CDR-L2 region
VAS

SEQ ID NO: 14717 - protein, 3 aa, Artificial Sequence
  Synthetic polypeptide representing artificial human antibody CDR-L2 region
GAS

SEQ ID NO: 14718 - protein, 3 aa, Artificial Sequence
  Synthetic polypeptide representing artificial human antibody CDR-L2 region
DLT

SEQ ID NO: 14719 - protein, 3 aa, Artificial Sequence
  Synthetic polypeptide representing artificial human antibody CDR-L2 region
EVN

SEQ ID NO: 14720 - protein, 3 aa, Artificial Sequence
  Synthetic polypeptide representing artificial human antibody CDR-L2 region
KAS

SEQ ID NO: 14721 - protein, 3 aa, Artificial Sequence
  Synthetic polypeptide representing artificial human antibody CDR-L2 region
EDD

SEQ ID NO: 14722 - protein, 3 aa, Artificial Sequence
  Synthetic polypeptide representing artificial human antibody CDR-L2 region
AAS

SEQ ID NO: 14723 - protein, 3 aa, Artificial Sequence
  Synthetic polypeptide representing artificial human antibody CDR-L2 region
TAS

SEQ ID NO: 14724 - protein, 3 aa, Artificial Sequence
  Synthetic polypeptide representing artificial human antibody CDR-L2 region
EVT

SEQ ID NO: 14725 - protein, 3 aa, Artificial Sequence
  Synthetic polypeptide representing artificial human antibody CDR-L2 region
NHS

SEQ ID NO: 14726 - protein, 3 aa, Artificial Sequence
  Synthetic polypeptide representing artificial human antibody CDR-L2 region
KAS

SEQ ID NO: 14727 - protein, 3 aa, Artificial Sequence
  Synthetic polypeptide representing artificial human antibody CDR-L2 region
KVS

SEQ ID NO: 14728 - protein, 3 aa, Artificial Sequence
  Synthetic polypeptide representing artificial human antibody CDR-L2 region
ENM

SEQ ID NO: 14729 - protein, 3 aa, Artificial Sequence
  Synthetic polypeptide representing artificial human antibody CDR-L2 region
WAS

SEQ ID NO: 14730 - protein, 3 aa, Artificial Sequence
  Synthetic polypeptide representing artificial human antibody CDR-L2 region
KND

SEQ ID NO: 14731 - protein, 3 aa, Artificial Sequence
  Synthetic polypeptide representing artificial human antibody CDR-L2 region
DAS

SEQ ID NO: 14732 - protein, 3 aa, Artificial Sequence
  Synthetic polypeptide representing artificial human antibody CDR-L2 region
WAS

SEQ ID NO: 14733 - protein, 3 aa, Artificial Sequence
  Synthetic polypeptide representing artificial human antibody CDR-L2 region
QVN

SEQ ID NO: 14734 - protein, 3 aa, Artificial Sequence
  Synthetic polypeptide representing artificial human antibody CDR-L2 region
DAS

SEQ ID NO: 14735 - protein, 3 aa, Artificial Sequence
  Synthetic polypeptide representing artificial human antibody CDR-L2 region
EDS

SEQ ID NO: 14736 - protein, 7 aa, Artificial Sequence
  Synthetic polypeptide representing artificial human antibody CDR-L2 region
LNSDGSH

SEQ ID NO: 14737 - protein, 3 aa, Artificial Sequence
  Synthetic polypeptide representing artificial human antibody CDR-L2 region
EVS

SEQ ID NO: 14738 - protein, 3 aa, Artificial Sequence
  Synthetic polypeptide representing artificial human antibody CDR-L2 region
EAT

SEQ ID NO: 14739 - protein, 3 aa, Artificial Sequence
  Synthetic polypeptide representing artificial human antibody CDR-L2 region
WAS

SEQ ID NO: 14740 - protein, 3 aa, Artificial Sequence
  Synthetic polypeptide representing artificial human antibody CDR-L2 region
DAS

SEQ ID NO: 14741 - protein, 3 aa, Artificial Sequence
  Synthetic polypeptide representing artificial human antibody CDR-L2 region
DVT

SEQ ID NO: 14742 - protein, 3 aa, Artificial Sequence
  Synthetic polypeptide representing artificial human antibody CDR-L2 region
PAS

SEQ ID NO: 14743 - protein, 3 aa, Artificial Sequence
  Synthetic polypeptide representing artificial human antibody CDR-L2 region
QDN

SEQ ID NO: 14744 - protein, 3 aa, Artificial Sequence
  Synthetic polypeptide representing artificial human antibody CDR-L2 region
DTS

SEQ ID NO: 14745 - protein, 3 aa, Artificial Sequence
  Synthetic polypeptide representing artificial human antibody CDR-L2 region
GVS

SEQ ID NO: 14746 - protein, 3 aa, Artificial Sequence
  Synthetic polypeptide representing artificial human antibody CDR-L2 region
SNN

SEQ ID NO: 14747 - protein, 3 aa, Artificial Sequence
  Synthetic polypeptide representing artificial human antibody CDR-L2 region
EVS

SEQ ID NO: 14748 - protein, 3 aa, Artificial Sequence
  Synthetic polypeptide representing artificial human antibody CDR-L2 region
LAS

SEQ ID NO: 14749 - protein, 3 aa, Artificial Sequence
  Synthetic polypeptide representing artificial human antibody CDR-L2 region
GAS

SEQ ID NO: 14750 - protein, 3 aa, Artificial Sequence
  Synthetic polypeptide representing artificial human antibody CDR-L2 region
DLS

SEQ ID NO: 14751 - protein, 3 aa, Artificial Sequence
  Synthetic polypeptide representing artificial human antibody CDR-L2 region
AAS

SEQ ID NO: 14752 - protein, 3 aa, Artificial Sequence
  Synthetic polypeptide representing artificial human antibody CDR-L2 region
KAS

SEQ ID NO: 14753 - protein, 3 aa, Artificial Sequence
  Synthetic polypeptide representing artificial human antibody CDR-L2 region
EGT

SEQ ID NO: 14754 - protein, 3 aa, Artificial Sequence
  Synthetic polypeptide representing artificial human antibody CDR-L2 region
EVT

SEQ ID NO: 14755 - protein, 3 aa, Artificial Sequence
  Synthetic polypeptide representing artificial human antibody CDR-L2 region
GNS

SEQ ID NO: 14756 - protein, 3 aa, Artificial Sequence
  Synthetic polypeptide representing artificial human antibody CDR-L2 region
AAS

SEQ ID NO: 14757 - protein, 3 aa, Artificial Sequence
  Synthetic polypeptide representing artificial human antibody CDR-L2 region
WAS

SEQ ID NO: 14758 - protein, 3 aa, Artificial Sequence
  Synthetic polypeptide representing artificial human antibody CDR-L2 region
DVS

SEQ ID NO: 14759 - protein, 3 aa, Artificial Sequence
  Synthetic polypeptide representing artificial human antibody CDR-L2 region
DSS

SEQ ID NO: 14760 - protein, 3 aa, Artificial Sequence
  Synthetic polypeptide representing artificial human antibody CDR-L2 region
GAS

SEQ ID NO: 14761 - protein, 3 aa, Artificial Sequence
  Synthetic polypeptide representing artificial human antibody CDR-L2 region
KAS

SEQ ID NO: 14762 - protein, 3 aa, Artificial Sequence
  Synthetic polypeptide representing artificial human antibody CDR-L2 region
GNT

SEQ ID NO: 14763 - protein, 3 aa, Artificial Sequence
  Synthetic polypeptide representing artificial human antibody CDR-L2 region
QDS

SEQ ID NO: 14764 - protein, 3 aa, Artificial Sequence
  Synthetic polypeptide representing artificial human antibody CDR-L2 region
RAS

SEQ ID NO: 14765 - protein, 3 aa, Artificial Sequence
  Synthetic polypeptide representing artificial human antibody CDR-L2 region
EAN

SEQ ID NO: 14766 - protein, 3 aa, Artificial Sequence
  Synthetic polypeptide representing artificial human antibody CDR-L2 region
NNN

SEQ ID NO: 14767 - protein, 3 aa, Artificial Sequence
  Synthetic polypeptide representing artificial human antibody CDR-L2 region
GAS

SEQ ID NO: 14768 - protein, 3 aa, Artificial Sequence
  Synthetic polypeptide representing artificial human antibody CDR-L2 region
AAS

SEQ ID NO: 14769 - protein, 3 aa, Artificial Sequence
  Synthetic polypeptide representing artificial human antibody CDR-L2 region
KDS

SEQ ID NO: 14770 - protein, 3 aa, Artificial Sequence
  Synthetic polypeptide representing artificial human antibody CDR-L2 region
EVS

SEQ ID NO: 14771 - protein, 3 aa, Artificial Sequence
  Synthetic polypeptide representing artificial human antibody CDR-L2 region
GAS

SEQ ID NO: 14772 - protein, 3 aa, Artificial Sequence
  Synthetic polypeptide representing artificial human antibody CDR-L2 region
WAS

SEQ ID NO: 14773 - protein, 3 aa, Artificial Sequence
  Synthetic polypeptide representing artificial human antibody CDR-L2 region
KAS

SEQ ID NO: 14774 - protein, 3 aa, Artificial Sequence
  Synthetic polypeptide representing artificial human antibody CDR-L2 region
WAS

SEQ ID NO: 14775 - protein, 3 aa, Artificial Sequence
  Synthetic polypeptide representing artificial human antibody CDR-L2 region
NTN

SEQ ID NO: 14776 - protein, 3 aa, Artificial Sequence
  Synthetic polypeptide representing artificial human antibody CDR-L2 region
KAS

SEQ ID NO: 14777 - protein, 3 aa, Artificial Sequence
  Synthetic polypeptide representing artificial human antibody CDR-L2 region
WAS

SEQ ID NO: 14778 - protein, 3 aa, Artificial Sequence
  Synthetic polypeptide representing artificial human antibody CDR-L2 region
RNN

SEQ ID NO: 14779 - protein, 3 aa, Artificial Sequence
  Synthetic polypeptide representing artificial human antibody CDR-L2 region
DAS

SEQ ID NO: 14780 - protein, 3 aa, Artificial Sequence
  Synthetic polypeptide representing artificial human antibody CDR-L2 region
GAS

SEQ ID NO: 14781 - protein, 3 aa, Artificial Sequence
  Synthetic polypeptide representing artificial human antibody CDR-L2 region
WAS

SEQ ID NO: 14782 - protein, 3 aa, Artificial Sequence
  Synthetic polypeptide representing artificial human antibody CDR-L2 region
KVS

SEQ ID NO: 14783 - protein, 3 aa, Artificial Sequence
  Synthetic polypeptide representing artificial human antibody CDR-L2 region
EVT

SEQ ID NO: 14784 - protein, 3 aa, Artificial Sequence
  Synthetic polypeptide representing artificial human antibody CDR-L2 region
KVS

SEQ ID NO: 14785 - protein, 3 aa, Artificial Sequence
  Synthetic polypeptide representing artificial human antibody CDR-L2 region
EVN

SEQ ID NO: 14786 - protein, 3 aa, Artificial Sequence
  Synthetic polypeptide representing artificial human antibody CDR-L2 region
DAS

SEQ ID NO: 14787 - protein, 3 aa, Artificial Sequence
  Synthetic polypeptide representing artificial human antibody CDR-L2 region
GAF

SEQ ID NO: 14788 - protein, 3 aa, Artificial Sequence
  Synthetic polypeptide representing artificial human antibody CDR-L2 region
AAS

SEQ ID NO: 14789 - protein, 3 aa, Artificial Sequence
  Synthetic polypeptide representing artificial human antibody CDR-L2 region
GKN

SEQ ID NO: 14790 - protein, 3 aa, Artificial Sequence
  Synthetic polypeptide representing artificial human antibody CDR-L2 region
EDS

SEQ ID NO: 14791 - protein, 3 aa, Artificial Sequence
  Synthetic polypeptide representing artificial human antibody CDR-L2 region
SNN

SEQ ID NO: 14792 - protein, 3 aa, Artificial Sequence
  Synthetic polypeptide representing artificial human antibody CDR-L2 region
NHD

SEQ ID NO: 14793 - protein, 3 aa, Artificial Sequence
  Synthetic polypeptide representing artificial human antibody CDR-L2 region
EAS

SEQ ID NO: 14794 - protein, 3 aa, Artificial Sequence
  Synthetic polypeptide representing artificial human antibody CDR-L2 region
GAS

SEQ ID NO: 14795 - protein, 3 aa, Artificial Sequence
  Synthetic polypeptide representing artificial human antibody CDR-L2 region
DVS

SEQ ID NO: 14796 - protein, 3 aa, Artificial Sequence
  Synthetic polypeptide representing artificial human antibody CDR-L2 region
ETS

SEQ ID NO: 14797 - protein, 3 aa, Artificial Sequence
  Synthetic polypeptide representing artificial human antibody CDR-L2 region
DAS

SEQ ID NO: 14798 - protein, 3 aa, Artificial Sequence
  Synthetic polypeptide representing artificial human antibody CDR-L2 region
WAS

SEQ ID NO: 14799 - protein, 3 aa, Artificial Sequence
  Synthetic polypeptide representing artificial human antibody CDR-L2 region
GVS

SEQ ID NO: 14800 - protein, 3 aa, Artificial Sequence
  Synthetic polypeptide representing artificial human antibody CDR-L2 region
WAS

SEQ ID NO: 14801 - protein, 3 aa, Artificial Sequence
  Synthetic polypeptide representing artificial human antibody CDR-L2 region
GAS

SEQ ID NO: 14802 - protein, 7 aa, Artificial Sequence
  Synthetic polypeptide representing artificial human antibody CDR-L2 region
VNNDGSH

SEQ ID NO: 14803 - protein, 3 aa, Artificial Sequence
  Synthetic polypeptide representing artificial human antibody CDR-L2 region
QNN

SEQ ID NO: 14804 - protein, 3 aa, Artificial Sequence
  Synthetic polypeptide representing artificial human antibody CDR-L2 region
DVS

SEQ ID NO: 14805 - protein, 3 aa, Artificial Sequence
  Synthetic polypeptide representing artificial human antibody CDR-L2 region
DVS

SEQ ID NO: 14806 - protein, 3 aa, Artificial Sequence
  Synthetic polypeptide representing artificial human antibody CDR-L2 region
GAS

SEQ ID NO: 14807 - protein, 3 aa, Artificial Sequence
  Synthetic polypeptide representing artificial human antibody CDR-L2 region
DND

SEQ ID NO: 14808 - protein, 3 aa, Artificial Sequence
  Synthetic polypeptide representing artificial human antibody CDR-L2 region
SDF

SEQ ID NO: 14809 - protein, 3 aa, Artificial Sequence
  Synthetic polypeptide representing artificial human antibody CDR-L2 region
AAS

SEQ ID NO: 14810 - protein, 3 aa, Artificial Sequence
  Synthetic polypeptide representing artificial human antibody CDR-L2 region
GAS

SEQ ID NO: 14811 - protein, 3 aa, Artificial Sequence
  Synthetic polypeptide representing artificial human antibody CDR-L2 region
AAS

SEQ ID NO: 14812 - protein, 3 aa, Artificial Sequence
  Synthetic polypeptide representing artificial human antibody CDR-L2 region
NGS

SEQ ID NO: 14813 - protein, 3 aa, Artificial Sequence
  Synthetic polypeptide representing artificial human antibody CDR-L2 region
SAS

SEQ ID NO: 14814 - protein, 3 aa, Artificial Sequence
  Synthetic polypeptide representing artificial human antibody CDR-L2 region
KVS

SEQ ID NO: 14815 - protein, 3 aa, Artificial Sequence
  Synthetic polypeptide representing artificial human antibody CDR-L2 region
DVS

SEQ ID NO: 14816 - protein, 3 aa, Artificial Sequence
  Synthetic polypeptide representing artificial human antibody CDR-L2 region
DTS

SEQ ID NO: 14817 - protein, 3 aa, Artificial Sequence
  Synthetic polypeptide representing artificial human antibody CDR-L2 region
LGS

SEQ ID NO: 14818 - protein, 3 aa, Artificial Sequence
  Synthetic polypeptide representing artificial human antibody CDR-L2 region
QDS

SEQ ID NO: 14819 - protein, 3 aa, Artificial Sequence
  Synthetic polypeptide representing artificial human antibody CDR-L2 region
RNN

SEQ ID NO: 14820 - protein, 3 aa, Artificial Sequence
  Synthetic polypeptide representing artificial human antibody CDR-L2 region
DAS

SEQ ID NO: 14821 - protein, 3 aa, Artificial Sequence
  Synthetic polypeptide representing artificial human antibody CDR-L2 region
WAS

SEQ ID NO: 14822 - protein, 3 aa, Artificial Sequence
  Synthetic polypeptide representing artificial human antibody CDR-L2 region
RNN

SEQ ID NO: 14823 - protein, 3 aa, Artificial Sequence
  Synthetic polypeptide representing artificial human antibody CDR-L2 region
ATS

SEQ ID NO: 14824 - protein, 3 aa, Artificial Sequence
  Synthetic polypeptide representing artificial human antibody CDR-L2 region
EGS

SEQ ID NO: 14825 - protein, 3 aa, Artificial Sequence
  Synthetic polypeptide representing artificial human antibody CDR-L2 region
SDN

SEQ ID NO: 14826 - protein, 3 aa, Artificial Sequence
  Synthetic polypeptide representing artificial human antibody CDR-L2 region
SNN

SEQ ID NO: 14827 - protein, 3 aa, Artificial Sequence
  Synthetic polypeptide representing artificial human antibody CDR-L2 region
GTS

SEQ ID NO: 14828 - protein, 3 aa, Artificial Sequence
  Synthetic polypeptide representing artificial human antibody CDR-L2 region
DND

SEQ ID NO: 14829 - protein, 3 aa, Artificial Sequence
  Synthetic polypeptide representing artificial human antibody CDR-L2 region
STN

SEQ ID NO: 14830 - protein, 3 aa, Artificial Sequence
  Synthetic polypeptide representing artificial human antibody CDR-L2 region
KVS

SEQ ID NO: 14831 - protein, 3 aa, Artificial Sequence
  Synthetic polypeptide representing artificial human antibody CDR-L2 region
LGS

SEQ ID NO: 14832 - protein, 3 aa, Artificial Sequence
  Synthetic polypeptide representing artificial human antibody CDR-L2 region
DVS

SEQ ID NO: 14833 - protein, 3 aa, Artificial Sequence
  Synthetic polypeptide representing artificial human antibody CDR-L2 region
SNG

SEQ ID NO: 14834 - protein, 3 aa, Artificial Sequence
  Synthetic polypeptide representing artificial human antibody CDR-L2 region
KIS

SEQ ID NO: 14835 - protein, 3 aa, Artificial Sequence
  Synthetic polypeptide representing artificial human antibody CDR-L2 region
SNN

SEQ ID NO: 14836 - protein, 3 aa, Artificial Sequence
  Synthetic polypeptide representing artificial human antibody CDR-L2 region
KAS

SEQ ID NO: 14837 - protein, 3 aa, Artificial Sequence
  Synthetic polypeptide representing artificial human antibody CDR-L2 region
EVS

SEQ ID NO: 14838 - protein, 3 aa, Artificial Sequence
  Synthetic polypeptide representing artificial human antibody CDR-L2 region
EVT

SEQ ID NO: 14839 - protein, 7 aa, Artificial Sequence
  Synthetic polypeptide representing artificial human antibody CDR-L2 region
VTSDGSH

SEQ ID NO: 14840 - protein, 3 aa, Artificial Sequence
  Synthetic polypeptide representing artificial human antibody CDR-L2 region
GNS

SEQ ID NO: 14841 - protein, 3 aa, Artificial Sequence
  Synthetic polypeptide representing artificial human antibody CDR-L2 region
GKN

SEQ ID NO: 14842 - protein, 3 aa, Artificial Sequence
  Synthetic polypeptide representing artificial human antibody CDR-L2 region
GDN

SEQ ID NO: 14843 - protein, 3 aa, Artificial Sequence
  Synthetic polypeptide representing artificial human antibody CDR-L2 region
YAS

SEQ ID NO: 14844 - protein, 3 aa, Artificial Sequence
  Synthetic polypeptide representing artificial human antibody CDR-L2 region
SPS

SEQ ID NO: 14845 - protein, 3 aa, Artificial Sequence
  Synthetic polypeptide representing artificial human antibody CDR-L2 region
MAS

SEQ ID NO: 14846 - protein, 3 aa, Artificial Sequence
  Synthetic polypeptide representing artificial human antibody CDR-L2 region
EVS

SEQ ID NO: 14847 - protein, 3 aa, Artificial Sequence
  Synthetic polypeptide representing artificial human antibody CDR-L2 region
GVS

SEQ ID NO: 14848 - protein, 3 aa, Artificial Sequence
  Synthetic polypeptide representing artificial human antibody CDR-L2 region
KDT

SEQ ID NO: 14849 - protein, 3 aa, Artificial Sequence
  Synthetic polypeptide representing artificial human antibody CDR-L2 region
WAS

SEQ ID NO: 14850 - protein, 3 aa, Artificial Sequence
  Synthetic polypeptide representing artificial human antibody CDR-L2 region
SNN

SEQ ID NO: 14851 - protein, 3 aa, Artificial Sequence
  Synthetic polypeptide representing artificial human antibody CDR-L2 region
AAS

SEQ ID NO: 14852 - protein, 3 aa, Artificial Sequence
  Synthetic polypeptide representing artificial human antibody CDR-L2 region
AAS

SEQ ID NO: 14853 - protein, 3 aa, Artificial Sequence
  Synthetic polypeptide representing artificial human antibody CDR-L2 region
ETK

SEQ ID NO: 14854 - protein, 3 aa, Artificial Sequence
  Synthetic polypeptide representing artificial human antibody CDR-L2 region
RNN

SEQ ID NO: 14855 - protein, 7 aa, Artificial Sequence
  Synthetic polypeptide representing artificial human antibody CDR-L2 region
LNNDGSH

SEQ ID NO: 14856 - protein, 3 aa, Artificial Sequence
  Synthetic polypeptide representing artificial human antibody CDR-L2 region
AAS

SEQ ID NO: 14857 - protein, 3 aa, Artificial Sequence
  Synthetic polypeptide representing artificial human antibody CDR-L2 region
SNN

SEQ ID NO: 14858 - protein, 3 aa, Artificial Sequence
  Synthetic polypeptide representing artificial human antibody CDR-L2 region
AAS

SEQ ID NO: 14859 - protein, 3 aa, Artificial Sequence
  Synthetic polypeptide representing artificial human antibody CDR-L2 region
KAS

SEQ ID NO: 14860 - protein, 3 aa, Artificial Sequence
  Synthetic polypeptide representing artificial human antibody CDR-L2 region
DAS

SEQ ID NO: 14861 - protein, 7 aa, Artificial Sequence
  Synthetic polypeptide representing artificial human antibody CDR-L2 region
LNSDGSH

SEQ ID NO: 14862 - protein, 7 aa, Artificial Sequence
  Synthetic polypeptide representing artificial human antibody CDR-L2 region
LNSDGSH

SEQ ID NO: 14863 - protein, 3 aa, Artificial Sequence
  Synthetic polypeptide representing artificial human antibody CDR-L2 region
ELY

SEQ ID NO: 14864 - protein, 3 aa, Artificial Sequence
  Synthetic polypeptide representing artificial human antibody CDR-L2 region
AAS

SEQ ID NO: 14865 - protein, 3 aa, Artificial Sequence
  Synthetic polypeptide representing artificial human antibody CDR-L2 region
GAS

SEQ ID NO: 14866 - protein, 3 aa, Artificial Sequence
  Synthetic polypeptide representing artificial human antibody CDR-L2 region
MNN

SEQ ID NO: 14867 - protein, 3 aa, Artificial Sequence
  Synthetic polypeptide representing artificial human antibody CDR-L2 region
DAS

SEQ ID NO: 14868 - protein, 3 aa, Artificial Sequence
  Synthetic polypeptide representing artificial human antibody CDR-L2 region
AVS

SEQ ID NO: 14869 - protein, 3 aa, Artificial Sequence
  Synthetic polypeptide representing artificial human antibody CDR-L2 region
LSS

SEQ ID NO: 14870 - protein, 7 aa, Artificial Sequence
  Synthetic polypeptide representing artificial human antibody CDR-L2 region
VEFDGRH

SEQ ID NO: 14871 - protein, 3 aa, Artificial Sequence
  Synthetic polypeptide representing artificial human antibody CDR-L2 region
DVS

SEQ ID NO: 14872 - protein, 3 aa, Artificial Sequence
  Synthetic polypeptide representing artificial human antibody CDR-L2 region
TNN

SEQ ID NO: 14873 - protein, 3 aa, Artificial Sequence
  Synthetic polypeptide representing artificial human antibody CDR-L2 region
DNT

SEQ ID NO: 14874 - protein, 3 aa, Artificial Sequence
  Synthetic polypeptide representing artificial human antibody CDR-L2 region
VAS

SEQ ID NO: 14875 - protein, 3 aa, Artificial Sequence
  Synthetic polypeptide representing artificial human antibody CDR-L2 region
DVS

SEQ ID NO: 14876 - protein, 3 aa, Artificial Sequence
  Synthetic polypeptide representing artificial human antibody CDR-L2 region
GSS

SEQ ID NO: 14877 - protein, 3 aa, Artificial Sequence
  Synthetic polypeptide representing artificial human antibody CDR-L2 region
KAS

SEQ ID NO: 14878 - protein, 3 aa, Artificial Sequence
  Synthetic polypeptide representing artificial human antibody CDR-L2 region
GAS

SEQ ID NO: 14879 - protein, 3 aa, Artificial Sequence
  Synthetic polypeptide representing artificial human antibody CDR-L2 region
KAS

SEQ ID NO: 14880 - protein, 3 aa, Artificial Sequence
  Synthetic polypeptide representing artificial human antibody CDR-L2 region
DVT

SEQ ID NO: 14881 - protein, 3 aa, Artificial Sequence
  Synthetic polypeptide representing artificial human antibody CDR-L2 region
ADN

SEQ ID NO: 14882 - protein, 3 aa, Artificial Sequence
  Synthetic polypeptide representing artificial human antibody CDR-L2 region
DTI

SEQ ID NO: 14883 - protein, 3 aa, Artificial Sequence
  Synthetic polypeptide representing artificial human antibody CDR-L2 region
DVG

SEQ ID NO: 14884 - protein, 3 aa, Artificial Sequence
  Synthetic polypeptide representing artificial human antibody CDR-L2 region
EDK

SEQ ID NO: 14885 - protein, 3 aa, Artificial Sequence
  Synthetic polypeptide representing artificial human antibody CDR-L2 region
DTS

SEQ ID NO: 14886 - protein, 3 aa, Artificial Sequence
  Synthetic polypeptide representing artificial human antibody CDR-L2 region
EGT

SEQ ID NO: 14887 - protein, 3 aa, Artificial Sequence
  Synthetic polypeptide representing artificial human antibody CDR-L2 region
DAS

SEQ ID NO: 14888 - protein, 3 aa, Artificial Sequence
  Synthetic polypeptide representing artificial human antibody CDR-L2 region
GAS

SEQ ID NO: 14889 - protein, 3 aa, Artificial Sequence
  Synthetic polypeptide representing artificial human antibody CDR-L2 region
GAS

SEQ ID NO: 14890 - protein, 3 aa, Artificial Sequence
  Synthetic polypeptide representing artificial human antibody CDR-L2 region
KAS

SEQ ID NO: 14891 - protein, 3 aa, Artificial Sequence
  Synthetic polypeptide representing artificial human antibody CDR-L2 region
GAS

SEQ ID NO: 14892 - protein, 3 aa, Artificial Sequence
  Synthetic polypeptide representing artificial human antibody CDR-L2 region
GAS

SEQ ID NO: 14893 - protein, 3 aa, Artificial Sequence
  Synthetic polypeptide representing artificial human antibody CDR-L2 region
WAS

SEQ ID NO: 14894 - protein, 3 aa, Artificial Sequence
  Synthetic polypeptide representing artificial human antibody CDR-L2 region
GKN

SEQ ID NO: 14895 - protein, 3 aa, Artificial Sequence
  Synthetic polypeptide representing artificial human antibody CDR-L2 region
RNI

SEQ ID NO: 14896 - protein, 3 aa, Artificial Sequence
  Synthetic polypeptide representing artificial human antibody CDR-L2 region
EVS

SEQ ID NO: 14897 - protein, 3 aa, Artificial Sequence
  Synthetic polypeptide representing artificial human antibody CDR-L2 region
WAS

SEQ ID NO: 14898 - protein, 3 aa, Artificial Sequence
  Synthetic polypeptide representing artificial human antibody CDR-L2 region
EVT

SEQ ID NO: 14899 - protein, 3 aa, Artificial Sequence
  Synthetic polypeptide representing artificial human antibody CDR-L2 region
YAS

SEQ ID NO: 14900 - protein, 3 aa, Artificial Sequence
  Synthetic polypeptide representing artificial human antibody CDR-L2 region
KAS

SEQ ID NO: 14901 - protein, 3 aa, Artificial Sequence
  Synthetic polypeptide representing artificial human antibody CDR-L2 region
AAS

SEQ ID NO: 14902 - protein, 3 aa, Artificial Sequence
  Synthetic polypeptide representing artificial human antibody CDR-L2 region
DAS

SEQ ID NO: 14903 - protein, 3 aa, Artificial Sequence
  Synthetic polypeptide representing artificial human antibody CDR-L2 region
DVN

SEQ ID NO: 14904 - protein, 3 aa, Artificial Sequence
  Synthetic polypeptide representing artificial human antibody CDR-L2 region
EVN

SEQ ID NO: 14905 - protein, 3 aa, Artificial Sequence
  Synthetic polypeptide representing artificial human antibody CDR-L2 region
KVS

SEQ ID NO: 14906 - protein, 3 aa, Artificial Sequence
  Synthetic polypeptide representing artificial human antibody CDR-L2 region
EVS

SEQ ID NO: 14907 - protein, 3 aa, Artificial Sequence
  Synthetic polypeptide representing artificial human antibody CDR-L2 region
AAS

SEQ ID NO: 14908 - protein, 3 aa, Artificial Sequence
  Synthetic polypeptide representing artificial human antibody CDR-L2 region
DVN

SEQ ID NO: 14909 - protein, 3 aa, Artificial Sequence
  Synthetic polypeptide representing artificial human antibody CDR-L2 region
VNN

SEQ ID NO: 14910 - protein, 3 aa, Artificial Sequence
  Synthetic polypeptide representing artificial human antibody CDR-L2 region
EDN

SEQ ID NO: 14911 - protein, 3 aa, Artificial Sequence
  Synthetic polypeptide representing artificial human antibody CDR-L2 region
AAS

SEQ ID NO: 14912 - protein, 3 aa, Artificial Sequence
  Synthetic polypeptide representing artificial human antibody CDR-L2 region
DAS

SEQ ID NO: 14913 - protein, 3 aa, Artificial Sequence
  Synthetic polypeptide representing artificial human antibody CDR-L2 region
DNS

SEQ ID NO: 14914 - protein, 3 aa, Artificial Sequence
  Synthetic polypeptide representing artificial human antibody CDR-L2 region
KAS

SEQ ID NO: 14915 - protein, 3 aa, Artificial Sequence
  Synthetic polypeptide representing artificial human antibody CDR-L2 region
AAS

SEQ ID NO: 14916 - protein, 3 aa, Artificial Sequence
  Synthetic polypeptide representing artificial human antibody CDR-L2 region
GAS

SEQ ID NO: 14917 - protein, 3 aa, Artificial Sequence
  Synthetic polypeptide representing artificial human antibody CDR-L2 region
AAS

SEQ ID NO: 14918 - protein, 3 aa, Artificial Sequence
  Synthetic polypeptide representing artificial human antibody CDR-L2 region
DST

SEQ ID NO: 14919 - protein, 3 aa, Artificial Sequence
  Synthetic polypeptide representing artificial human antibody CDR-L2 region
GAS

SEQ ID NO: 14920 - protein, 3 aa, Artificial Sequence
  Synthetic polypeptide representing artificial human antibody CDR-L2 region
GAS

SEQ ID NO: 14921 - protein, 3 aa, Artificial Sequence
  Synthetic polypeptide representing artificial human antibody CDR-L2 region
AND

SEQ ID NO: 14922 - protein, 7 aa, Artificial Sequence
  Synthetic polypeptide representing artificial human antibody CDR-L2 region
LDGRGVY

SEQ ID NO: 14923 - protein, 3 aa, Artificial Sequence
  Synthetic polypeptide representing artificial human antibody CDR-L2 region
QDS

SEQ ID NO: 14924 - protein, 3 aa, Artificial Sequence
  Synthetic polypeptide representing artificial human antibody CDR-L2 region
STN

SEQ ID NO: 14925 - protein, 3 aa, Artificial Sequence
  Synthetic polypeptide representing artificial human antibody CDR-L2 region
QDA

SEQ ID NO: 14926 - protein, 3 aa, Artificial Sequence
  Synthetic polypeptide representing artificial human antibody CDR-L2 region
AAS

SEQ ID NO: 14927 - protein, 7 aa, Artificial Sequence
  Synthetic polypeptide representing artificial human antibody CDR-L2 region
LNNDGHH

SEQ ID NO: 14928 - protein, 7 aa, Artificial Sequence
  Synthetic polypeptide representing artificial human antibody CDR-L2 region
LNNDGHH

SEQ ID NO: 14929 - protein, 3 aa, Artificial Sequence
  Synthetic polypeptide representing artificial human antibody CDR-L2 region
KAS

SEQ ID NO: 14930 - protein, 3 aa, Artificial Sequence
  Synthetic polypeptide representing artificial human antibody CDR-L2 region
GAT

SEQ ID NO: 14931 - protein, 3 aa, Artificial Sequence
  Synthetic polypeptide representing artificial human antibody CDR-L2 region
VAS

SEQ ID NO: 14932 - protein, 3 aa, Artificial Sequence
  Synthetic polypeptide representing artificial human antibody CDR-L2 region
WAS

SEQ ID NO: 14933 - protein, 3 aa, Artificial Sequence
  Synthetic polypeptide representing artificial human antibody CDR-L2 region
AAS

SEQ ID NO: 14934 - protein, 7 aa, Artificial Sequence
  Synthetic polypeptide representing artificial human antibody CDR-L2 region
INTDGSH

SEQ ID NO: 14935 - protein, 3 aa, Artificial Sequence
  Synthetic polypeptide representing artificial human antibody CDR-L2 region
AAS

SEQ ID NO: 14936 - protein, 7 aa, Artificial Sequence
  Synthetic polypeptide representing artificial human antibody CDR-L2 region
LNNDGHH

SEQ ID NO: 14937 - protein, 3 aa, Artificial Sequence
  Synthetic polypeptide representing artificial human antibody CDR-L2 region
DAS

SEQ ID NO: 14938 - protein, 3 aa, Artificial Sequence
  Synthetic polypeptide representing artificial human antibody CDR-L2 region
GAS

SEQ ID NO: 14939 - protein, 7 aa, Artificial Sequence
  Synthetic polypeptide representing artificial human antibody CDR-L2 region
VTHYNTH

SEQ ID NO: 14940 - protein, 3 aa, Artificial Sequence
  Synthetic polypeptide representing artificial human antibody CDR-L2 region
YDG

SEQ ID NO: 14941 - protein, 3 aa, Artificial Sequence
  Synthetic polypeptide representing artificial human antibody CDR-L2 region
KTI

SEQ ID NO: 14942 - protein, 3 aa, Artificial Sequence
  Synthetic polypeptide representing artificial human antibody CDR-L2 region
WAS

SEQ ID NO: 14943 - protein, 3 aa, Artificial Sequence
  Synthetic polypeptide representing artificial human antibody CDR-L2 region
GAS

SEQ ID NO: 14944 - protein, 3 aa, Artificial Sequence
  Synthetic polypeptide representing artificial human antibody CDR-L2 region
KVS

SEQ ID NO: 14945 - protein, 3 aa, Artificial Sequence
  Synthetic polypeptide representing artificial human antibody CDR-L2 region
GAS

SEQ ID NO: 14946 - protein, 3 aa, Artificial Sequence
  Synthetic polypeptide representing artificial human antibody CDR-L2 region
GAS

SEQ ID NO: 14947 - protein, 3 aa, Artificial Sequence
  Synthetic polypeptide representing artificial human antibody CDR-L2 region
AAS

SEQ ID NO: 14948 - protein, 3 aa, Artificial Sequence
  Synthetic polypeptide representing artificial human antibody CDR-L2 region
DVS

SEQ ID NO: 14949 - protein, 3 aa, Artificial Sequence
  Synthetic polypeptide representing artificial human antibody CDR-L2 region
LGS

SEQ ID NO: 14950 - protein, 3 aa, Artificial Sequence
  Synthetic polypeptide representing artificial human antibody CDR-L2 region
GAS

SEQ ID NO: 14951 - protein, 3 aa, Artificial Sequence
  Synthetic polypeptide representing artificial human antibody CDR-L2 region
SAS

SEQ ID NO: 14952 - protein, 3 aa, Artificial Sequence
  Synthetic polypeptide representing artificial human antibody CDR-L2 region
RNN

SEQ ID NO: 14953 - protein, 3 aa, Artificial Sequence
  Synthetic polypeptide representing artificial human antibody CDR-L2 region
DND

SEQ ID NO: 14954 - protein, 3 aa, Artificial Sequence
  Synthetic polypeptide representing artificial human antibody CDR-L2 region
KDS

SEQ ID NO: 14955 - protein, 3 aa, Artificial Sequence
  Synthetic polypeptide representing artificial human antibody CDR-L2 region
KDS

SEQ ID NO: 14956 - protein, 3 aa, Artificial Sequence
  Synthetic polypeptide representing artificial human antibody CDR-L2 region
DAS

SEQ ID NO: 14957 - protein, 3 aa, Artificial Sequence
  Synthetic polypeptide representing artificial human antibody CDR-L2 region
WAS

SEQ ID NO: 14958 - protein, 3 aa, Artificial Sequence
  Synthetic polypeptide representing artificial human antibody CDR-L2 region
DDS

SEQ ID NO: 14959 - protein, 3 aa, Artificial Sequence
  Synthetic polypeptide representing artificial human antibody CDR-L2 region
KAS

SEQ ID NO: 14960 - protein, 3 aa, Artificial Sequence
  Synthetic polypeptide representing artificial human antibody CDR-L2 region
GAF

SEQ ID NO: 14961 - protein, 3 aa, Artificial Sequence
  Synthetic polypeptide representing artificial human antibody CDR-L2 region
ASR

SEQ ID NO: 14962 - protein, 3 aa, Artificial Sequence
  Synthetic polypeptide representing artificial human antibody CDR-L2 region
DVS

SEQ ID NO: 14963 - protein, 3 aa, Artificial Sequence
  Synthetic polypeptide representing artificial human antibody CDR-L2 region
DTN

SEQ ID NO: 14964 - protein, 3 aa, Artificial Sequence
  Synthetic polypeptide representing artificial human antibody CDR-L2 region
GDT

SEQ ID NO: 14965 - protein, 3 aa, Artificial Sequence
  Synthetic polypeptide representing artificial human antibody CDR-L2 region
GNS

SEQ ID NO: 14966 - protein, 3 aa, Artificial Sequence
  Synthetic polypeptide representing artificial human antibody CDR-L2 region
STN

SEQ ID NO: 14967 - protein, 3 aa, Artificial Sequence
  Synthetic polypeptide representing artificial human antibody CDR-L2 region
EDK

SEQ ID NO: 14968 - protein, 7 aa, Artificial Sequence
  Synthetic polypeptide representing artificial human antibody CDR-L2 region
LNNDGHH

SEQ ID NO: 14969 - protein, 3 aa, Artificial Sequence
  Synthetic polypeptide representing artificial human antibody CDR-L2 region
AAS

SEQ ID NO: 14970 - protein, 3 aa, Artificial Sequence
  Synthetic polypeptide representing artificial human antibody CDR-L2 region
KDT

SEQ ID NO: 14971 - protein, 3 aa, Artificial Sequence
  Synthetic polypeptide representing artificial human antibody CDR-L2 region
DAT

SEQ ID NO: 14972 - protein, 3 aa, Artificial Sequence
  Synthetic polypeptide representing artificial human antibody CDR-L2 region
DTD

SEQ ID NO: 14973 - protein, 3 aa, Artificial Sequence
  Synthetic polypeptide representing artificial human antibody CDR-L2 region
GAS

SEQ ID NO: 14974 - protein, 3 aa, Artificial Sequence
  Synthetic polypeptide representing artificial human antibody CDR-L2 region
KAS

SEQ ID NO: 14975 - protein, 3 aa, Artificial Sequence
  Synthetic polypeptide representing artificial human antibody CDR-L2 region
WAS

SEQ ID NO: 14976 - protein, 3 aa, Artificial Sequence
  Synthetic polypeptide representing artificial human antibody CDR-L2 region
SNN

SEQ ID NO: 14977 - protein, 3 aa, Artificial Sequence
  Synthetic polypeptide representing artificial human antibody CDR-L2 region
AGS

SEQ ID NO: 14978 - protein, 3 aa, Artificial Sequence
  Synthetic polypeptide representing artificial human antibody CDR-L2 region
DDS

SEQ ID NO: 14979 - protein, 3 aa, Artificial Sequence
  Synthetic polypeptide representing artificial human antibody CDR-L2 region
RDV

SEQ ID NO: 14980 - protein, 3 aa, Artificial Sequence
  Synthetic polypeptide representing artificial human antibody CDR-L2 region
AAS

SEQ ID NO: 14981 - protein, 3 aa, Artificial Sequence
  Synthetic polypeptide representing artificial human antibody CDR-L2 region
WAS

SEQ ID NO: 14982 - protein, 3 aa, Artificial Sequence
  Synthetic polypeptide representing artificial human antibody CDR-L2 region
EVS

SEQ ID NO: 14983 - protein, 3 aa, Artificial Sequence
  Synthetic polypeptide representing artificial human antibody CDR-L2 region
SDD

SEQ ID NO: 14984 - protein, 3 aa, Artificial Sequence
  Synthetic polypeptide representing artificial human antibody CDR-L2 region
DAS

SEQ ID NO: 14985 - protein, 3 aa, Artificial Sequence
  Synthetic polypeptide representing artificial human antibody CDR-L2 region
DNY

SEQ ID NO: 14986 - protein, 3 aa, Artificial Sequence
  Synthetic polypeptide representing artificial human antibody CDR-L2 region
ETS

SEQ ID NO: 14987 - protein, 3 aa, Artificial Sequence
  Synthetic polypeptide representing artificial human antibody CDR-L2 region
RNN

SEQ ID NO: 14988 - protein, 3 aa, Artificial Sequence
  Synthetic polypeptide representing artificial human antibody CDR-L2 region
DVS

SEQ ID NO: 14989 - protein, 3 aa, Artificial Sequence
  Synthetic polypeptide representing artificial human antibody CDR-L2 region
QDS

SEQ ID NO: 14990 - protein, 3 aa, Artificial Sequence
  Synthetic polypeptide representing artificial human antibody CDR-L2 region
GAS

SEQ ID NO: 14991 - protein, 3 aa, Artificial Sequence
  Synthetic polypeptide representing artificial human antibody CDR-L2 region
DDS

SEQ ID NO: 14992 - protein, 3 aa, Artificial Sequence
  Synthetic polypeptide representing artificial human antibody CDR-L2 region
KTI

SEQ ID NO: 14993 - protein, 3 aa, Artificial Sequence
  Synthetic polypeptide representing artificial human antibody CDR-L2 region
GGS

SEQ ID NO: 14994 - protein, 3 aa, Artificial Sequence
  Synthetic polypeptide representing artificial human antibody CDR-L2 region
DDS

SEQ ID NO: 14995 - protein, 3 aa, Artificial Sequence
  Synthetic polypeptide representing artificial human antibody CDR-L2 region
KDS

SEQ ID NO: 14996 - protein, 3 aa, Artificial Sequence
  Synthetic polypeptide representing artificial human antibody CDR-L2 region
SNN

SEQ ID NO: 14997 - protein, 3 aa, Artificial Sequence
  Synthetic polypeptide representing artificial human antibody CDR-L2 region
GAS

SEQ ID NO: 14998 - protein, 3 aa, Artificial Sequence
  Synthetic polypeptide representing artificial human antibody CDR-L2 region
KAS

SEQ ID NO: 14999 - protein, 3 aa, Artificial Sequence
  Synthetic polypeptide representing artificial human antibody CDR-L2 region
AAS

SEQ ID NO: 15000 - protein, 3 aa, Artificial Sequence
  Synthetic polypeptide representing artificial human antibody CDR-L2 region
AAS

SEQ ID NO: 15001 - protein, 21 aa, Artificial Sequence
  Synthetic polypeptide representing artificial human antibody CDR-H3 region
ARDTARGGQCEPGHKPPCRGA

SEQ ID NO: 15002 - protein, 18 aa, Artificial Sequence
  Synthetic polypeptide representing artificial human antibody CDR-H3 region
VRIGTEMILWYFYYYMDV

SEQ ID NO: 15003 - protein, 18 aa, Artificial Sequence
  Synthetic polypeptide representing artificial human antibody CDR-H3 region
VRIGTEMILWYFYYYMDV

SEQ ID NO: 15004 - protein, 18 aa, Artificial Sequence
  Synthetic polypeptide representing artificial human antibody CDR-H3 region
VRIGTEMILWYFYYYMDV

SEQ ID NO: 15005 - protein, 18 aa, Artificial Sequence
  Synthetic polypeptide representing artificial human antibody CDR-H3 region
VRIGTEMILWYFYYYMDV

SEQ ID NO: 15006 - protein, 18 aa, Artificial Sequence
  Synthetic polypeptide representing artificial human antibody CDR-H3 region
VRIGTEMILWYFYYYMDV

SEQ ID NO: 15007 - protein, 18 aa, Artificial Sequence
  Synthetic polypeptide representing artificial human antibody CDR-H3 region
VRIGTEMILWYFYYYMDV

SEQ ID NO: 15008 - protein, 12 aa, Artificial Sequence
  Synthetic polypeptide representing artificial human antibody CDR-H3 region
TTDLHDYGDSDY

SEQ ID NO: 15009 - protein, 12 aa, Artificial Sequence
  Synthetic polypeptide representing artificial human antibody CDR-H3 region
TTDLHDYGDSDY

SEQ ID NO: 15010 - protein, 14 aa, Artificial Sequence
  Synthetic polypeptide representing artificial human antibody CDR-H3 region
AASPLYDSSDFYYS

SEQ ID NO: 15011 - protein, 17 aa, Artificial Sequence
  Synthetic polypeptide representing artificial human antibody CDR-H3 region
AGQSPSVYSSGWYVFDY

SEQ ID NO: 15012 - protein, 17 aa, Artificial Sequence
  Synthetic polypeptide representing artificial human antibody CDR-H3 region
ARDAFFSLKYGAYGMDV

SEQ ID NO: 15013 - protein, 17 aa, Artificial Sequence
  Synthetic polypeptide representing artificial human antibody CDR-H3 region
AKDPAMYSSSWLSPSDV

SEQ ID NO: 15014 - protein, 24 aa, Artificial Sequence
  Synthetic polypeptide representing artificial human antibody CDR-H3 region
ARVVHRRSSYYDSRNYYYYYYMDV

SEQ ID NO: 15015 - protein, 23 aa, Artificial Sequence
  Synthetic polypeptide representing artificial human antibody CDR-H3 region
AHIPPESRMVLFGVVIQNYYFDY

SEQ ID NO: 15016 - protein, 21 aa, Artificial Sequence
  Synthetic polypeptide representing artificial human antibody CDR-H3 region
AREAAGILRFLEWSTKGYFDY

SEQ ID NO: 15017 - protein, 13 aa, Artificial Sequence
  Synthetic polypeptide representing artificial human antibody CDR-H3 region
ARGPRTTVPNLDY

SEQ ID NO: 15018 - protein, 13 aa, Artificial Sequence
  Synthetic polypeptide representing artificial human antibody CDR-H3 region
ARDHGDWYLSVDY

SEQ ID NO: 15019 - protein, 16 aa, Artificial Sequence
  Synthetic polypeptide representing artificial human antibody CDR-H3 region
VRDFIGVYSLHEAFDL

SEQ ID NO: 15020 - protein, 17 aa, Artificial Sequence
  Synthetic polypeptide representing artificial human antibody CDR-H3 region
ARDKSRSYYASGSYPDY

SEQ ID NO: 15021 - protein, 18 aa, Artificial Sequence
  Synthetic polypeptide representing artificial human antibody CDR-H3 region
ARGRDIVVEPAPLDAFDV

SEQ ID NO: 15022 - protein, 12 aa, Artificial Sequence
  Synthetic polypeptide representing artificial human antibody CDR-H3 region
ARDFTSGSSGDC

SEQ ID NO: 15023 - protein, 15 aa, Artificial Sequence
  Synthetic polypeptide representing artificial human antibody CDR-H3 region
ATGSGSYYSMGWFDP

SEQ ID NO: 15024 - protein, 24 aa, Artificial Sequence
  Synthetic polypeptide representing artificial human antibody CDR-H3 region
AIRGADCSGGSCYFVSAFGWIMDV

SEQ ID NO: 15025 - protein, 22 aa, Artificial Sequence
  Synthetic polypeptide representing artificial human antibody CDR-H3 region
ATAGPQYYYGSGSYAPYNWFDP

SEQ ID NO: 15026 - protein, 19 aa, Artificial Sequence
  Synthetic polypeptide representing artificial human antibody CDR-H3 region
ARDSVLLFFGYLPHGAFDM

SEQ ID NO: 15027 - protein, 15 aa, Artificial Sequence
  Synthetic polypeptide representing artificial human antibody CDR-H3 region
AKASTGSSYGFALDT

SEQ ID NO: 15028 - protein, 28 aa, Artificial Sequence
  Synthetic polypeptide representing artificial human antibody CDR-H3 region
ARDGGSPGEYYDSSGYYGFGYYYYGMDV

SEQ ID NO: 15029 - protein, 18 aa, Artificial Sequence
  Synthetic polypeptide representing artificial human antibody CDR-H3 region
ARDGGVRGVIIYYYGMDV

SEQ ID NO: 15030 - protein, 14 aa, Artificial Sequence
  Synthetic polypeptide representing artificial human antibody CDR-H3 region
AREWEDYDSSVFDY

SEQ ID NO: 15031 - protein, 15 aa, Artificial Sequence
  Synthetic polypeptide representing artificial human antibody CDR-H3 region
ARDYGDDEAYYGMDV

SEQ ID NO: 15032 - protein, 18 aa, Artificial Sequence
  Synthetic polypeptide representing artificial human antibody CDR-H3 region
ARDGSDRSGYDSFYDMDV

SEQ ID NO: 15033 - protein, 15 aa, Artificial Sequence
  Synthetic polypeptide representing artificial human antibody CDR-H3 region
IRCRRSSGPYYYFDY

SEQ ID NO: 15034 - protein, 15 aa, Artificial Sequence
  Synthetic polypeptide representing artificial human antibody CDR-H3 region
ARGQYEMLTGYFVDY

SEQ ID NO: 15035 - protein, 6 aa, Artificial Sequence
  Synthetic polypeptide representing artificial human antibody CDR-H3 region
APVGLL

SEQ ID NO: 15036 - protein, 15 aa, Artificial Sequence
  Synthetic polypeptide representing artificial human antibody CDR-H3 region
TKGSFHNSGRGIFDS

SEQ ID NO: 15037 - protein, 20 aa, Artificial Sequence
  Synthetic polypeptide representing artificial human antibody CDR-H3 region
ARDRERLRYFDWVYYYGMDV

SEQ ID NO: 15038 - protein, 12 aa, Artificial Sequence
  Synthetic polypeptide representing artificial human antibody CDR-H3 region
ARDGGAAAGFDY

SEQ ID NO: 15039 - protein, 18 aa, Artificial Sequence
  Synthetic polypeptide representing artificial human antibody CDR-H3 region
ARVAHSLRYFDWPLAFDI

SEQ ID NO: 15040 - protein, 16 aa, Artificial Sequence
  Synthetic polypeptide representing artificial human antibody CDR-H3 region
AKLLGNSGELLFPFDS

SEQ ID NO: 15041 - protein, 22 aa, Artificial Sequence
  Synthetic polypeptide representing artificial human antibody CDR-H3 region
AKDMSPLLWFGELLGYYYGMDV

SEQ ID NO: 15042 - protein, 17 aa, Artificial Sequence
  Synthetic polypeptide representing artificial human antibody CDR-H3 region
AREFTGRWDDMGYYGDL

SEQ ID NO: 15043 - protein, 15 aa, Artificial Sequence
  Synthetic polypeptide representing artificial human antibody CDR-H3 region
TRVGYYYDGSVVFDY

SEQ ID NO: 15044 - protein, 21 aa, Artificial Sequence
  Synthetic polypeptide representing artificial human antibody CDR-H3 region
AGEGLATLYGSGSYRVGYFDH

SEQ ID NO: 15045 - protein, 17 aa, Artificial Sequence
  Synthetic polypeptide representing artificial human antibody CDR-H3 region
ARHSPIWLTQVSPYFDY

SEQ ID NO: 15046 - protein, 22 aa, Artificial Sequence
  Synthetic polypeptide representing artificial human antibody CDR-H3 region
AKDSAPPYHSSGWYYYYYGMDV

SEQ ID NO: 15047 - protein, 11 aa, Artificial Sequence
  Synthetic polypeptide representing artificial human antibody CDR-H3 region
ATSPWDVTLEY

SEQ ID NO: 15048 - protein, 17 aa, Artificial Sequence
  Synthetic polypeptide representing artificial human antibody CDR-H3 region
AKVNYDDDRVELAYFEH

SEQ ID NO: 15049 - protein, 14 aa, Artificial Sequence
  Synthetic polypeptide representing artificial human antibody CDR-H3 region
AKGTHDSRDYKFDF

SEQ ID NO: 15050 - protein, 20 aa, Artificial Sequence
  Synthetic polypeptide representing artificial human antibody CDR-H3 region
AREACASCSCAPGCAYGLDV

SEQ ID NO: 15051 - protein, 11 aa, Artificial Sequence
  Synthetic polypeptide representing artificial human antibody CDR-H3 region
ARDGVWYASDS

SEQ ID NO: 15052 - protein, 20 aa, Artificial Sequence
  Synthetic polypeptide representing artificial human antibody CDR-H3 region
AAAGGEGWLRQYYYYYGMDV

SEQ ID NO: 15053 - protein, 14 aa, Artificial Sequence
  Synthetic polypeptide representing artificial human antibody CDR-H3 region
ARRDGDYGWSYFDY

SEQ ID NO: 15054 - protein, 21 aa, Artificial Sequence
  Synthetic polypeptide representing artificial human antibody CDR-H3 region
ARVLRSSWYFPVKPMNDAFDI

SEQ ID NO: 15055 - protein, 14 aa, Artificial Sequence
  Synthetic polypeptide representing artificial human antibody CDR-H3 region
ARDRTGGYYGYFDY

SEQ ID NO: 15056 - protein, 14 aa, Artificial Sequence
  Synthetic polypeptide representing artificial human antibody CDR-H3 region
AHSGYYGSGLAFNI

SEQ ID NO: 15057 - protein, 15 aa, Artificial Sequence
  Synthetic polypeptide representing artificial human antibody CDR-H3 region
ARDPHYDILTGYYDY

SEQ ID NO: 15058 - protein, 18 aa, Artificial Sequence
  Synthetic polypeptide representing artificial human antibody CDR-H3 region
ARGIAAAGTRYYYYGMDV

SEQ ID NO: 15059 - protein, 21 aa, Artificial Sequence
  Synthetic polypeptide representing artificial human antibody CDR-H3 region
AKDIGLRSSWGFNYYYYGMDV

SEQ ID NO: 15060 - protein, 7 aa, Artificial Sequence
  Synthetic polypeptide representing artificial human antibody CDR-H3 region
ARETFDL

SEQ ID NO: 15061 - protein, 12 aa, Artificial Sequence
  Synthetic polypeptide representing artificial human antibody CDR-H3 region
AHTTGTTPLFDY

SEQ ID NO: 15062 - protein, 13 aa, Artificial Sequence
  Synthetic polypeptide representing artificial human antibody CDR-H3 region
ARDHGVDGSPGGY

SEQ ID NO: 15063 - protein, 20 aa, Artificial Sequence
  Synthetic polypeptide representing artificial human antibody CDR-H3 region
ARDENTGSSWPFSYYYGMDV

SEQ ID NO: 15064 - protein, 14 aa, Artificial Sequence
  Synthetic polypeptide representing artificial human antibody CDR-H3 region
ARYNSYYYYYGMDV

SEQ ID NO: 15065 - protein, 11 aa, Artificial Sequence
  Synthetic polypeptide representing artificial human antibody CDR-H3 region
AHRLTINGMDV

SEQ ID NO: 15066 - protein, 14 aa, Artificial Sequence
  Synthetic polypeptide representing artificial human antibody CDR-H3 region
AKARAGSGWHVFDD

SEQ ID NO: 15067 - protein, 10 aa, Artificial Sequence
  Synthetic polypeptide representing artificial human antibody CDR-H3 region
ARVGAGSFDY

SEQ ID NO: 15068 - protein, 19 aa, Artificial Sequence
  Synthetic polypeptide representing artificial human antibody CDR-H3 region
VRDWTRTATTDFYYYGMDV

SEQ ID NO: 15069 - protein, 16 aa, Artificial Sequence
  Synthetic polypeptide representing artificial human antibody CDR-H3 region
AKAKMEGPGSPLGLDV

SEQ ID NO: 15070 - protein, 24 aa, Artificial Sequence
  Synthetic polypeptide representing artificial human antibody CDR-H3 region
AKLDNTMVRGVTLLGHYYYYGMDV

SEQ ID NO: 15071 - protein, 18 aa, Artificial Sequence
  Synthetic polypeptide representing artificial human antibody CDR-H3 region
TRHVEGTMRLVDPYFFDY

SEQ ID NO: 15072 - protein, 15 aa, Artificial Sequence
  Synthetic polypeptide representing artificial human antibody CDR-H3 region
ATHFSTYRSAYQFDY

SEQ ID NO: 15073 - protein, 15 aa, Artificial Sequence
  Synthetic polypeptide representing artificial human antibody CDR-H3 region
AKDLSSGWSPRGMDV

SEQ ID NO: 15074 - protein, 19 aa, Artificial Sequence
  Synthetic polypeptide representing artificial human antibody CDR-H3 region
ARALVVPAAIDYYYYGMDV

SEQ ID NO: 15075 - protein, 15 aa, Artificial Sequence
  Synthetic polypeptide representing artificial human antibody CDR-H3 region
YSAYRSKGNDDGMDV

SEQ ID NO: 15076 - protein, 19 aa, Artificial Sequence
  Synthetic polypeptide representing artificial human antibody CDR-H3 region
ARTRQWELLYYYYYYGMDV

SEQ ID NO: 15077 - protein, 15 aa, Artificial Sequence
  Synthetic polypeptide representing artificial human antibody CDR-H3 region
TKGNFHNSGRGIFDS

SEQ ID NO: 15078 - protein, 13 aa, Artificial Sequence
  Synthetic polypeptide representing artificial human antibody CDR-H3 region
AKVDHYDSSGVDY

SEQ ID NO: 15079 - protein, 20 aa, Artificial Sequence
  Synthetic polypeptide representing artificial human antibody CDR-H3 region
ARAPVDVLLWFGEDFYYFDY

SEQ ID NO: 15080 - protein, 17 aa, Artificial Sequence
  Synthetic polypeptide representing artificial human antibody CDR-H3 region
AKDHLWFGELFKNWFDP

SEQ ID NO: 15081 - protein, 20 aa, Artificial Sequence
  Synthetic polypeptide representing artificial human antibody CDR-H3 region
ARDLSGYYDILTGYSYYFDY

SEQ ID NO: 15082 - protein, 12 aa, Artificial Sequence
  Synthetic polypeptide representing artificial human antibody CDR-H3 region
ARGGQRWLQLGY

SEQ ID NO: 15083 - protein, 13 aa, Artificial Sequence
  Synthetic polypeptide representing artificial human antibody CDR-H3 region
ARPSSGSYYGAIF

SEQ ID NO: 15084 - protein, 12 aa, Artificial Sequence
  Synthetic polypeptide representing artificial human antibody CDR-H3 region
ARSLAVAALMDV

SEQ ID NO: 15085 - protein, 22 aa, Artificial Sequence
  Synthetic polypeptide representing artificial human antibody CDR-H3 region
AKDSYYGSGSNRGYYYYYGMDV

SEQ ID NO: 15086 - protein, 26 aa, Artificial Sequence
  Synthetic polypeptide representing artificial human antibody CDR-H3 region
ARDQTPPNAYDYVWGSYRYIGGEFDY

SEQ ID NO: 15087 - protein, 17 aa, Artificial Sequence
  Synthetic polypeptide representing artificial human antibody CDR-H3 region
TREFTGRYDDMGYYGDL

SEQ ID NO: 15088 - protein, 17 aa, Artificial Sequence
  Synthetic polypeptide representing artificial human antibody CDR-H3 region
ARDFPLYNWNDVGYFDY

SEQ ID NO: 15089 - protein, 15 aa, Artificial Sequence
  Synthetic polypeptide representing artificial human antibody CDR-H3 region
ATLAATPYYYYGMDV

SEQ ID NO: 15090 - protein, 16 aa, Artificial Sequence
  Synthetic polypeptide representing artificial human antibody CDR-H3 region
AILWFGEGRLAEYFQH

SEQ ID NO: 15091 - protein, 12 aa, Artificial Sequence
  Synthetic polypeptide representing artificial human antibody CDR-H3 region
VRGSGSYFPFEE

SEQ ID NO: 15092 - protein, 15 aa, Artificial Sequence
  Synthetic polypeptide representing artificial human antibody CDR-H3 region
ARDLGFTTSWRGPDY

SEQ ID NO: 15093 - protein, 12 aa, Artificial Sequence
  Synthetic polypeptide representing artificial human antibody CDR-H3 region
ATEVWGSGYCDY

SEQ ID NO: 15094 - protein, 18 aa, Artificial Sequence
  Synthetic polypeptide representing artificial human antibody CDR-H3 region
ARSDIAAAGTGYYYGMDV

SEQ ID NO: 15095 - protein, 19 aa, Artificial Sequence
  Synthetic polypeptide representing artificial human antibody CDR-H3 region
ARDLLSYSSGWYAGNWFDP

SEQ ID NO: 15096 - protein, 19 aa, Artificial Sequence
  Synthetic polypeptide representing artificial human antibody CDR-H3 region
ARGGKGSMLATDIFWYFDL

SEQ ID NO: 15097 - protein, 18 aa, Artificial Sequence
  Synthetic polypeptide representing artificial human antibody CDR-H3 region
ARKYCSSTSCYLFDYFDY

SEQ ID NO: 15098 - protein, 14 aa, Artificial Sequence
  Synthetic polypeptide representing artificial human antibody CDR-H3 region
ARARSGSYYNPFDP

SEQ ID NO: 15099 - protein, 19 aa, Artificial Sequence
  Synthetic polypeptide representing artificial human antibody CDR-H3 region
ARGEVNYRGIYYYYYGMDV

SEQ ID NO: 15100 - protein, 18 aa, Artificial Sequence
  Synthetic polypeptide representing artificial human antibody CDR-H3 region
ARLTPTSSWYRFLYGMDV

SEQ ID NO: 15101 - protein, 14 aa, Artificial Sequence
  Synthetic polypeptide representing artificial human antibody CDR-H3 region
ARRGSGWLNYGMDV

SEQ ID NO: 15102 - protein, 16 aa, Artificial Sequence
  Synthetic polypeptide representing artificial human antibody CDR-H3 region
ARDPEFDILTGYHFDY

SEQ ID NO: 15103 - protein, 15 aa, Artificial Sequence
  Synthetic polypeptide representing artificial human antibody CDR-H3 region
ARLKNFYPSGSYPDY

SEQ ID NO: 15104 - protein, 14 aa, Artificial Sequence
  Synthetic polypeptide representing artificial human antibody CDR-H3 region
ARGRYTYGTTTFDY

SEQ ID NO: 15105 - protein, 12 aa, Artificial Sequence
  Synthetic polypeptide representing artificial human antibody CDR-H3 region
ASDAIAVAQFDS

SEQ ID NO: 15106 - protein, 16 aa, Artificial Sequence
  Synthetic polypeptide representing artificial human antibody CDR-H3 region
ASRRFYSGSYLDPFDI

SEQ ID NO: 15107 - protein, 14 aa, Artificial Sequence
  Synthetic polypeptide representing artificial human antibody CDR-H3 region
ARTGSGSYLDAFDI

SEQ ID NO: 15108 - protein, 15 aa, Artificial Sequence
  Synthetic polypeptide representing artificial human antibody CDR-H3 region
AKATGYSSNWYPFDY

SEQ ID NO: 15109 - protein, 12 aa, Artificial Sequence
  Synthetic polypeptide representing artificial human antibody CDR-H3 region
ARHGGAPAGLSA

SEQ ID NO: 15110 - protein, 22 aa, Artificial Sequence
  Synthetic polypeptide representing artificial human antibody CDR-H3 region
ARDRPGGERYFDWLLSLDAFDI

SEQ ID NO: 15111 - protein, 22 aa, Artificial Sequence
  Synthetic polypeptide representing artificial human antibody CDR-H3 region
ARDLTTMIVVVITPYYYYGMDV

SEQ ID NO: 15112 - protein, 19 aa, Artificial Sequence
  Synthetic polypeptide representing artificial human antibody CDR-H3 region
AREDYYDSSGSRYYYGMDV

SEQ ID NO: 15113 - protein, 15 aa, Artificial Sequence
  Synthetic polypeptide representing artificial human antibody CDR-H3 region
ARGDSSSRYYYGMDV

SEQ ID NO: 15114 - protein, 18 aa, Artificial Sequence
  Synthetic polypeptide representing artificial human antibody CDR-H3 region
ARENRNYCIGNNCYYFDS

SEQ ID NO: 15115 - protein, 16 aa, Artificial Sequence
  Synthetic polypeptide representing artificial human antibody CDR-H3 region
ARDGGEDDILTGPRDY

SEQ ID NO: 15116 - protein, 14 aa, Artificial Sequence
  Synthetic polypeptide representing artificial human antibody CDR-H3 region
VRAVAGTPYYGMDV

SEQ ID NO: 15117 - protein, 14 aa, Artificial Sequence
  Synthetic polypeptide representing artificial human antibody CDR-H3 region
AARGCGDCHPYFDY

SEQ ID NO: 15118 - protein, 20 aa, Artificial Sequence
  Synthetic polypeptide representing artificial human antibody CDR-H3 region
ARGRPANPLWIGPRGYYFDN

SEQ ID NO: 15119 - protein, 11 aa, Artificial Sequence
  Synthetic polypeptide representing artificial human antibody CDR-H3 region
ARQDSHYAFGD

SEQ ID NO: 15120 - protein, 14 aa, Artificial Sequence
  Synthetic polypeptide representing artificial human antibody CDR-H3 region
ARGTTQKLPPHFDY

SEQ ID NO: 15121 - protein, 20 aa, Artificial Sequence
  Synthetic polypeptide representing artificial human antibody CDR-H3 region
ARGRPANPLWIGPRGYYFDY

SEQ ID NO: 15122 - protein, 15 aa, Artificial Sequence
  Synthetic polypeptide representing artificial human antibody CDR-H3 region
ARYPRESAAGKAFDY

SEQ ID NO: 15123 - protein, 13 aa, Artificial Sequence
  Synthetic polypeptide representing artificial human antibody CDR-H3 region
ARDFSGGYVRVGY

SEQ ID NO: 15124 - protein, 10 aa, Artificial Sequence
  Synthetic polypeptide representing artificial human antibody CDR-H3 region
ALRGEWQFAS

SEQ ID NO: 15125 - protein, 22 aa, Artificial Sequence
  Synthetic polypeptide representing artificial human antibody CDR-H3 region
ARHFAGYCSSTSCYTPLNWFDP

SEQ ID NO: 15126 - protein, 20 aa, Artificial Sequence
  Synthetic polypeptide representing artificial human antibody CDR-H3 region
AREASGVRYFDWLLNYYFDY

SEQ ID NO: 15127 - protein, 14 aa, Artificial Sequence
  Synthetic polypeptide representing artificial human antibody CDR-H3 region
ARQEGYFYYYYMDV

SEQ ID NO: 15128 - protein, 16 aa, Artificial Sequence
  Synthetic polypeptide representing artificial human antibody CDR-H3 region
ARNGLNSGWSMYYFDQ

SEQ ID NO: 15129 - protein, 26 aa, Artificial Sequence
  Synthetic polypeptide representing artificial human antibody CDR-H3 region
ARGQNGVVPAPVLGIGPFYTYSYMDV

SEQ ID NO: 15130 - protein, 14 aa, Artificial Sequence
  Synthetic polypeptide representing artificial human antibody CDR-H3 region
ARDRQELGNNWLDS

SEQ ID NO: 15131 - protein, 21 aa, Artificial Sequence
  Synthetic polypeptide representing artificial human antibody CDR-H3 region
ARDPTMTTVTTSYYYYYYMDV

SEQ ID NO: 15132 - protein, 18 aa, Artificial Sequence
  Synthetic polypeptide representing artificial human antibody CDR-H3 region
ARYEMYCSSTSCYGAFDI

SEQ ID NO: 15133 - protein, 14 aa, Artificial Sequence
  Synthetic polypeptide representing artificial human antibody CDR-H3 region
ARFLVGGTKNWFDP

SEQ ID NO: 15134 - protein, 23 aa, Artificial Sequence
  Synthetic polypeptide representing artificial human antibody CDR-H3 region
ARGRSEETMIVMVVTGIDFYFDS

SEQ ID NO: 15135 - protein, 19 aa, Artificial Sequence
  Synthetic polypeptide representing artificial human antibody CDR-H3 region
AKDSRFFHLGYTYGPIFDY

SEQ ID NO: 15136 - protein, 16 aa, Artificial Sequence
  Synthetic polypeptide representing artificial human antibody CDR-H3 region
ATGPPVGATNRHWFDP

SEQ ID NO: 15137 - protein, 13 aa, Artificial Sequence
  Synthetic polypeptide representing artificial human antibody CDR-H3 region
ARVNGGLSYSFDI

SEQ ID NO: 15138 - protein, 23 aa, Artificial Sequence
  Synthetic polypeptide representing artificial human antibody CDR-H3 region
ARGRSEETMIVMVVTGIDFYFDS

SEQ ID NO: 15139 - protein, 23 aa, Artificial Sequence
  Synthetic polypeptide representing artificial human antibody CDR-H3 region
ARGLKGLTMMVVVFTGAYDAFDM

SEQ ID NO: 15140 - protein, 9 aa, Artificial Sequence
  Synthetic polypeptide representing artificial human antibody CDR-H3 region
VCGDGLIDY

SEQ ID NO: 15141 - protein, 23 aa, Artificial Sequence
  Synthetic polypeptide representing artificial human antibody CDR-H3 region
ARGRSEETMIVVVVTGIDYYFDS

SEQ ID NO: 15142 - protein, 14 aa, Artificial Sequence
  Synthetic polypeptide representing artificial human antibody CDR-H3 region
ANRNTDRTGDAFDI

SEQ ID NO: 15143 - protein, 19 aa, Artificial Sequence
  Synthetic polypeptide representing artificial human antibody CDR-H3 region
ARGLYCGGDCYSILDAFDI

SEQ ID NO: 15144 - protein, 14 aa, Artificial Sequence
  Synthetic polypeptide representing artificial human antibody CDR-H3 region
VRDGVGNTIGYFDY

SEQ ID NO: 15145 - protein, 16 aa, Artificial Sequence
  Synthetic polypeptide representing artificial human antibody CDR-H3 region
ARLGSYGYDITEVLDY

SEQ ID NO: 15146 - protein, 13 aa, Artificial Sequence
  Synthetic polypeptide representing artificial human antibody CDR-H3 region
ARGGVFGVGVFDI

SEQ ID NO: 15147 - protein, 14 aa, Artificial Sequence
  Synthetic polypeptide representing artificial human antibody CDR-H3 region
TRVTGGGYNNPFDY

SEQ ID NO: 15148 - protein, 26 aa, Artificial Sequence
  Synthetic polypeptide representing artificial human antibody CDR-H3 region
ARDQYRISRGRGIYITNTFYYYGMDV

SEQ ID NO: 15149 - protein, 15 aa, Artificial Sequence
  Synthetic polypeptide representing artificial human antibody CDR-H3 region
ARYSPYGSGHGALDY

SEQ ID NO: 15150 - protein, 23 aa, Artificial Sequence
  Synthetic polypeptide representing artificial human antibody CDR-H3 region
ARGLKGLTMMVVVFTGAYDSFDS

SEQ ID NO: 15151 - protein, 16 aa, Artificial Sequence
  Synthetic polypeptide representing artificial human antibody CDR-H3 region
ARHSWGWLQLGGAFDI

SEQ ID NO: 15152 - protein, 23 aa, Artificial Sequence
  Synthetic polypeptide representing artificial human antibody CDR-H3 region
ARGRSEETMIVMVVTGIDNYFDS

SEQ ID NO: 15153 - protein, 18 aa, Artificial Sequence
  Synthetic polypeptide representing artificial human antibody CDR-H3 region
AKDFPQYSSGWYEGGFDY

SEQ ID NO: 15154 - protein, 23 aa, Artificial Sequence
  Synthetic polypeptide representing artificial human antibody CDR-H3 region
ARGRYEETMIVMVVTGIDYYFDS

SEQ ID NO: 15155 - protein, 14 aa, Artificial Sequence
  Synthetic polypeptide representing artificial human antibody CDR-H3 region
ARPQEVRGGPYLAY

SEQ ID NO: 15156 - protein, 16 aa, Artificial Sequence
  Synthetic polypeptide representing artificial human antibody CDR-H3 region
ARGYYYGSGRYYNLWF

SEQ ID NO: 15157 - protein, 17 aa, Artificial Sequence
  Synthetic polypeptide representing artificial human antibody CDR-H3 region
ARGVIWFGEFPRYYFDY

SEQ ID NO: 15158 - protein, 8 aa, Artificial Sequence
  Synthetic polypeptide representing artificial human antibody CDR-H3 region
ATLYDIFL

SEQ ID NO: 15159 - protein, 14 aa, Artificial Sequence
  Synthetic polypeptide representing artificial human antibody CDR-H3 region
ARGATVMVNVWFHP

SEQ ID NO: 15160 - protein, 13 aa, Artificial Sequence
  Synthetic polypeptide representing artificial human antibody CDR-H3 region
ARGVTLGNYGLDV

SEQ ID NO: 15161 - protein, 21 aa, Artificial Sequence
  Synthetic polypeptide representing artificial human antibody CDR-H3 region
ATGPAVAGTIGDSYYYYGMDV

SEQ ID NO: 15162 - protein, 26 aa, Artificial Sequence
  Synthetic polypeptide representing artificial human antibody CDR-H3 region
ARDQYRISRGRGIFITKTFFYYGMDV

SEQ ID NO: 15163 - protein, 16 aa, Artificial Sequence
  Synthetic polypeptide representing artificial human antibody CDR-H3 region
ARDRGVAPIMYWHFDL

SEQ ID NO: 15164 - protein, 14 aa, Artificial Sequence
  Synthetic polypeptide representing artificial human antibody CDR-H3 region
AHRLAGFVRNWFDP

SEQ ID NO: 15165 - protein, 23 aa, Artificial Sequence
  Synthetic polypeptide representing artificial human antibody CDR-H3 region
ARGRSEETMIVLVVTGIDYYFDS

SEQ ID NO: 15166 - protein, 15 aa, Artificial Sequence
  Synthetic polypeptide representing artificial human antibody CDR-H3 region
ARSENDYGGNWAFDY

SEQ ID NO: 15167 - protein, 23 aa, Artificial Sequence
  Synthetic polypeptide representing artificial human antibody CDR-H3 region
ARGRSEETMIVLVVTGIDFYFDA

SEQ ID NO: 15168 - protein, 23 aa, Artificial Sequence
  Synthetic polypeptide representing artificial human antibody CDR-H3 region
ARGRSEETMIVVVITAMDYYFDY

SEQ ID NO: 15169 - protein, 24 aa, Artificial Sequence
  Synthetic polypeptide representing artificial human antibody CDR-H3 region
ARMVGKNHTSGLFRGYYYFYGLDV

SEQ ID NO: 15170 - protein, 23 aa, Artificial Sequence
  Synthetic polypeptide representing artificial human antibody CDR-H3 region
ARGRSEETMIVVVVTGIDYFFDS

SEQ ID NO: 15171 - protein, 14 aa, Artificial Sequence
  Synthetic polypeptide representing artificial human antibody CDR-H3 region
ARANGGNYYYGMDV

SEQ ID NO: 15172 - protein, 22 aa, Artificial Sequence
  Synthetic polypeptide representing artificial human antibody CDR-H3 region
AKDSENCSGGSCDDYYYYGMDV

SEQ ID NO: 15173 - protein, 13 aa, Artificial Sequence
  Synthetic polypeptide representing artificial human antibody CDR-H3 region
ARGLHSNGFTFDY

SEQ ID NO: 15174 - protein, 14 aa, Artificial Sequence
  Synthetic polypeptide representing artificial human antibody CDR-H3 region
ATAAAAGQPNWFDP

SEQ ID NO: 15175 - protein, 17 aa, Artificial Sequence
  Synthetic polypeptide representing artificial human antibody CDR-H3 region
ATLGGELSYYYYYGMDV

SEQ ID NO: 15176 - protein, 18 aa, Artificial Sequence
  Synthetic polypeptide representing artificial human antibody CDR-H3 region
ASTYDILTGYYHLYGMDV

SEQ ID NO: 15177 - protein, 23 aa, Artificial Sequence
  Synthetic polypeptide representing artificial human antibody CDR-H3 region
ARGRSEETMIVVVVTGIDYYFDS

SEQ ID NO: 15178 - protein, 18 aa, Artificial Sequence
  Synthetic polypeptide representing artificial human antibody CDR-H3 region
AKAGPIFWFGEGKNYFDD

SEQ ID NO: 15179 - protein, 13 aa, Artificial Sequence
  Synthetic polypeptide representing artificial human antibody CDR-H3 region
SRGGWELLEAFDI

SEQ ID NO: 15180 - protein, 12 aa, Artificial Sequence
  Synthetic polypeptide representing artificial human antibody CDR-H3 region
ARQLPAAGILDY

SEQ ID NO: 15181 - protein, 26 aa, Artificial Sequence
  Synthetic polypeptide representing artificial human antibody CDR-H3 region
ARDQYRISRGRGIYITNTFYYYGMDV

SEQ ID NO: 15182 - protein, 11 aa, Artificial Sequence
  Synthetic polypeptide representing artificial human antibody CDR-H3 region
AHRRAIVGLDY

SEQ ID NO: 15183 - protein, 15 aa, Artificial Sequence
  Synthetic polypeptide representing artificial human antibody CDR-H3 region
ARQWFGAYYYYGMDV

SEQ ID NO: 15184 - protein, 20 aa, Artificial Sequence
  Synthetic polypeptide representing artificial human antibody CDR-H3 region
ATGPATYYYGSGSPPGWFDP

SEQ ID NO: 15185 - protein, 17 aa, Artificial Sequence
  Synthetic polypeptide representing artificial human antibody CDR-H3 region
ARADYGGNFYYYYGMDV

SEQ ID NO: 15186 - protein, 15 aa, Artificial Sequence
  Synthetic polypeptide representing artificial human antibody CDR-H3 region
ARHKGDLLRGGYFDP

SEQ ID NO: 15187 - protein, 15 aa, Artificial Sequence
  Synthetic polypeptide representing artificial human antibody CDR-H3 region
ARGVIAVAAPYYFDY

SEQ ID NO: 15188 - protein, 14 aa, Artificial Sequence
  Synthetic polypeptide representing artificial human antibody CDR-H3 region
AGGAVADTLGAFAI

SEQ ID NO: 15189 - protein, 21 aa, Artificial Sequence
  Synthetic polypeptide representing artificial human antibody CDR-H3 region
ARYPQPGVGASEIYYYYGMDV

SEQ ID NO: 15190 - protein, 14 aa, Artificial Sequence
  Synthetic polypeptide representing artificial human antibody CDR-H3 region
AKPHSGSYYDAFDI

SEQ ID NO: 15191 - protein, 13 aa, Artificial Sequence
  Synthetic polypeptide representing artificial human antibody CDR-H3 region
ARGGWELLEAFDI

SEQ ID NO: 15192 - protein, 17 aa, Artificial Sequence
  Synthetic polypeptide representing artificial human antibody CDR-H3 region
ARQTPTLWFGESPWFDP

SEQ ID NO: 15193 - protein, 19 aa, Artificial Sequence
  Synthetic polypeptide representing artificial human antibody CDR-H3 region
ARGTTVTTLTWDSTPFFDY

SEQ ID NO: 15194 - protein, 35 aa, Artificial Sequence
  Synthetic polypeptide representing artificial human antibody CDR-H3 region
AREGRTSRTRAGYSSGWYVLTGEDPDYYYYYGMDV

SEQ ID NO: 15195 - protein, 19 aa, Artificial Sequence
  Synthetic polypeptide representing artificial human antibody CDR-H3 region
GKVRYGPGTYNNEGAYFDY

SEQ ID NO: 15196 - protein, 14 aa, Artificial Sequence
  Synthetic polypeptide representing artificial human antibody CDR-H3 region
ARGDGSTISYYFDY

SEQ ID NO: 15197 - protein, 16 aa, Artificial Sequence
  Synthetic polypeptide representing artificial human antibody CDR-H3 region
ASFRPNMIRGVGPFFC

SEQ ID NO: 15198 - protein, 16 aa, Artificial Sequence
  Synthetic polypeptide representing artificial human antibody CDR-H3 region
ARWIQLSLLDYYGMDV

SEQ ID NO: 15199 - protein, 15 aa, Artificial Sequence
  Synthetic polypeptide representing artificial human antibody CDR-H3 region
AKFNGPNSYYYGLDV

SEQ ID NO: 15200 - protein, 15 aa, Artificial Sequence
  Synthetic polypeptide representing artificial human antibody CDR-H3 region
VRDQWIEKKRYGMDV

SEQ ID NO: 15201 - protein, 19 aa, Artificial Sequence
  Synthetic polypeptide representing artificial human antibody CDR-H3 region
ARDSAAAGTVHYYYYGMDV

SEQ ID NO: 15202 - protein, 15 aa, Artificial Sequence
  Synthetic polypeptide representing artificial human antibody CDR-H3 region
ARGGNGGDLLRYFDY

SEQ ID NO: 15203 - protein, 14 aa, Artificial Sequence
  Synthetic polypeptide representing artificial human antibody CDR-H3 region
ARVRGSGTFYAMDV

SEQ ID NO: 15204 - protein, 23 aa, Artificial Sequence
  Synthetic polypeptide representing artificial human antibody CDR-H3 region
ARGLKGLTMMVVVFTGAYDAFDI

SEQ ID NO: 15205 - protein, 13 aa, Artificial Sequence
  Synthetic polypeptide representing artificial human antibody CDR-H3 region
ACPIGGWYANFDY

SEQ ID NO: 15206 - protein, 9 aa, Artificial Sequence
  Synthetic polypeptide representing artificial human antibody CDR-H3 region
ALNARIPGY

SEQ ID NO: 15207 - protein, 15 aa, Artificial Sequence
  Synthetic polypeptide representing artificial human antibody CDR-H3 region
ARETGSMVQGYYFDY

SEQ ID NO: 15208 - protein, 10 aa, Artificial Sequence
  Synthetic polypeptide representing artificial human antibody CDR-H3 region
AKDFELDGGN

SEQ ID NO: 15209 - protein, 21 aa, Artificial Sequence
  Synthetic polypeptide representing artificial human antibody CDR-H3 region
ARDLLRYFDWSIFYYYYGMDV

SEQ ID NO: 15210 - protein, 25 aa, Artificial Sequence
  Synthetic polypeptide representing artificial human antibody CDR-H3 region
ARMGWKKGGIAAADWGDYYYYGMDV

SEQ ID NO: 15211 - protein, 14 aa, Artificial Sequence
  Synthetic polypeptide representing artificial human antibody CDR-H3 region
AKDFRPDGRWTIDY

SEQ ID NO: 15212 - protein, 11 aa, Artificial Sequence
  Synthetic polypeptide representing artificial human antibody CDR-H3 region
ATSPWDVTLEY

SEQ ID NO: 15213 - protein, 18 aa, Artificial Sequence
  Synthetic polypeptide representing artificial human antibody CDR-H3 region
AREMPRIQLWLRGGYFDY

SEQ ID NO: 15214 - protein, 14 aa, Artificial Sequence
  Synthetic polypeptide representing artificial human antibody CDR-H3 region
ARSGGGWLQFYFDY

SEQ ID NO: 15215 - protein, 16 aa, Artificial Sequence
  Synthetic polypeptide representing artificial human antibody CDR-H3 region
ARVEMATIPNRYYFDY

SEQ ID NO: 15216 - protein, 19 aa, Artificial Sequence
  Synthetic polypeptide representing artificial human antibody CDR-H3 region
ARGVFCSGNSCYSSPWFDP

SEQ ID NO: 15217 - protein, 23 aa, Artificial Sequence
  Synthetic polypeptide representing artificial human antibody CDR-H3 region
ARDSGVRPSGYGVPNDYYFGMDV

SEQ ID NO: 15218 - protein, 13 aa, Artificial Sequence
  Synthetic polypeptide representing artificial human antibody CDR-H3 region
ARDFFHGDPVLDY

SEQ ID NO: 15219 - protein, 19 aa, Artificial Sequence
  Synthetic polypeptide representing artificial human antibody CDR-H3 region
ARVVWYCSSTSCFHDAFDI

SEQ ID NO: 15220 - protein, 13 aa, Artificial Sequence
  Synthetic polypeptide representing artificial human antibody CDR-H3 region
TTDPPIRRYAMDV

SEQ ID NO: 15221 - protein, 22 aa, Artificial Sequence
  Synthetic polypeptide representing artificial human antibody CDR-H3 region
ARGVSDFTMIVVVITGFSYFDY

SEQ ID NO: 15222 - protein, 13 aa, Artificial Sequence
  Synthetic polypeptide representing artificial human antibody CDR-H3 region
ARDFFHGDPVFDF

SEQ ID NO: 15223 - protein, 12 aa, Artificial Sequence
  Synthetic polypeptide representing artificial human antibody CDR-H3 region
AKSPSVNYVFEI

SEQ ID NO: 15224 - protein, 23 aa, Artificial Sequence
  Synthetic polypeptide representing artificial human antibody CDR-H3 region
ARVGRLGPLYSSSWYGDGNWFDP

SEQ ID NO: 15225 - protein, 23 aa, Artificial Sequence
  Synthetic polypeptide representing artificial human antibody CDR-H3 region
ARGRGDITMFLVAITSATYYFDY

SEQ ID NO: 15226 - protein, 19 aa, Artificial Sequence
  Synthetic polypeptide representing artificial human antibody CDR-H3 region
ARVPIAGTTWSVRGSQFDF

SEQ ID NO: 15227 - protein, 15 aa, Artificial Sequence
  Synthetic polypeptide representing artificial human antibody CDR-H3 region
ASARNYYDSSGVFDY

SEQ ID NO: 15228 - protein, 9 aa, Artificial Sequence
  Synthetic polypeptide representing artificial human antibody CDR-H3 region
ATATLYLQH

SEQ ID NO: 15229 - protein, 15 aa, Artificial Sequence
  Synthetic polypeptide representing artificial human antibody CDR-H3 region
ARGSDIEYSSALYAY

SEQ ID NO: 15230 - protein, 6 aa, Artificial Sequence
  Synthetic polypeptide representing artificial human antibody CDR-H3 region
ARNHDY

SEQ ID NO: 15231 - protein, 17 aa, Artificial Sequence
  Synthetic polypeptide representing artificial human antibody CDR-H3 region
AATTLSDSSGYSLPCDY

SEQ ID NO: 15232 - protein, 26 aa, Artificial Sequence
  Synthetic polypeptide representing artificial human antibody CDR-H3 region
ARVRAVVVPAPVLGLGPYYYSYYMDV

SEQ ID NO: 15233 - protein, 5 aa, Artificial Sequence
  Synthetic polypeptide representing artificial human antibody CDR-H3 region
TRLDY

SEQ ID NO: 15234 - protein, 22 aa, Artificial Sequence
  Synthetic polypeptide representing artificial human antibody CDR-H3 region
VNPPWADYDYIFRTDLYTGFQH

SEQ ID NO: 15235 - protein, 7 aa, Artificial Sequence
  Synthetic polypeptide representing artificial human antibody CDR-H3 region
AKRDTTG

SEQ ID NO: 15236 - protein, 15 aa, Artificial Sequence
  Synthetic polypeptide representing artificial human antibody CDR-H3 region
AREGIIAEAGFYFDS

SEQ ID NO: 15237 - protein, 14 aa, Artificial Sequence
  Synthetic polypeptide representing artificial human antibody CDR-H3 region
ARDLGWEQANWFDP

SEQ ID NO: 15238 - protein, 13 aa, Artificial Sequence
  Synthetic polypeptide representing artificial human antibody CDR-H3 region
AKGDRGDGGYDSR

SEQ ID NO: 15239 - protein, 17 aa, Artificial Sequence
  Synthetic polypeptide representing artificial human antibody CDR-H3 region
TRENRDPPGSGPYYFDY

SEQ ID NO: 15240 - protein, 17 aa, Artificial Sequence
  Synthetic polypeptide representing artificial human antibody CDR-H3 region
ARLDYYDSSGHCYYFDY

SEQ ID NO: 15241 - protein, 13 aa, Artificial Sequence
  Synthetic polypeptide representing artificial human antibody CDR-H3 region
ARGNNGYNYRFDI

SEQ ID NO: 15242 - protein, 18 aa, Artificial Sequence
  Synthetic polypeptide representing artificial human antibody CDR-H3 region
ARSRKDYVWGSYRYLFDP

SEQ ID NO: 15243 - protein, 22 aa, Artificial Sequence
  Synthetic polypeptide representing artificial human antibody CDR-H3 region
AKDGDPDYVWGKYRYQTYYFDY

SEQ ID NO: 15244 - protein, 13 aa, Artificial Sequence
  Synthetic polypeptide representing artificial human antibody CDR-H3 region
ATSVLGDYSRFDY

SEQ ID NO: 15245 - protein, 10 aa, Artificial Sequence
  Synthetic polypeptide representing artificial human antibody CDR-H3 region
ATSYGDYDDY

SEQ ID NO: 15246 - protein, 22 aa, Artificial Sequence
  Synthetic polypeptide representing artificial human antibody CDR-H3 region
ARDFNWFGELHTTYYYYYYMDV

SEQ ID NO: 15247 - protein, 17 aa, Artificial Sequence
  Synthetic polypeptide representing artificial human antibody CDR-H3 region
ARDLYYYGSGSYCAFDL

SEQ ID NO: 15248 - protein, 18 aa, Artificial Sequence
  Synthetic polypeptide representing artificial human antibody CDR-H3 region
ARRRELLWLGEPHCGMDV

SEQ ID NO: 15249 - protein, 18 aa, Artificial Sequence
  Synthetic polypeptide representing artificial human antibody CDR-H3 region
ARDKKPYFDILTGSYFDS

SEQ ID NO: 15250 - protein, 23 aa, Artificial Sequence
  Synthetic polypeptide representing artificial human antibody CDR-H3 region
AREDTMLRRIGWFASEKINRFDP

SEQ ID NO: 15251 - protein, 10 aa, Artificial Sequence
  Synthetic polypeptide representing artificial human antibody CDR-H3 region
ARFSGRAFDI

SEQ ID NO: 15252 - protein, 19 aa, Artificial Sequence
  Synthetic polypeptide representing artificial human antibody CDR-H3 region
ARGGSSGLYCSGGSCYFDY

SEQ ID NO: 15253 - protein, 13 aa, Artificial Sequence
  Synthetic polypeptide representing artificial human antibody CDR-H3 region
AKDGGVGGHPLDS

SEQ ID NO: 15254 - protein, 12 aa, Artificial Sequence
  Synthetic polypeptide representing artificial human antibody CDR-H3 region
AKEGYRLGYLVY

SEQ ID NO: 15255 - protein, 14 aa, Artificial Sequence
  Synthetic polypeptide representing artificial human antibody CDR-H3 region
AKSTNLYRSGGFDY

SEQ ID NO: 15256 - protein, 14 aa, Artificial Sequence
  Synthetic polypeptide representing artificial human antibody CDR-H3 region
ARDRGWLQPWYFDL

SEQ ID NO: 15257 - protein, 11 aa, Artificial Sequence
  Synthetic polypeptide representing artificial human antibody CDR-H3 region
ASGMISDAFDV

SEQ ID NO: 15258 - protein, 15 aa, Artificial Sequence
  Synthetic polypeptide representing artificial human antibody CDR-H3 region
AREWGGRYTGPFFNY

SEQ ID NO: 15259 - protein, 15 aa, Artificial Sequence
  Synthetic polypeptide representing artificial human antibody CDR-H3 region
AREGQWELLGRAFDI

SEQ ID NO: 15260 - protein, 15 aa, Artificial Sequence
  Synthetic polypeptide representing artificial human antibody CDR-H3 region
VRDSPRGGYGAYFDY

SEQ ID NO: 15261 - protein, 19 aa, Artificial Sequence
  Synthetic polypeptide representing artificial human antibody CDR-H3 region
ARVFGSTIFGVVIIQAFDI

SEQ ID NO: 15262 - protein, 15 aa, Artificial Sequence
  Synthetic polypeptide representing artificial human antibody CDR-H3 region
ARVALTGYYTGVLDF

SEQ ID NO: 15263 - protein, 18 aa, Artificial Sequence
  Synthetic polypeptide representing artificial human antibody CDR-H3 region
AKDSHYDSSGYYQNAFDI

SEQ ID NO: 15264 - protein, 13 aa, Artificial Sequence
  Synthetic polypeptide representing artificial human antibody CDR-H3 region
SRGGSYMHWHLEV

SEQ ID NO: 15265 - protein, 14 aa, Artificial Sequence
  Synthetic polypeptide representing artificial human antibody CDR-H3 region
ARGTALPGLYYFDH

SEQ ID NO: 15266 - protein, 16 aa, Artificial Sequence
  Synthetic polypeptide representing artificial human antibody CDR-H3 region
AREWAKFYFPSPGPIN

SEQ ID NO: 15267 - protein, 11 aa, Artificial Sequence
  Synthetic polypeptide representing artificial human antibody CDR-H3 region
ARGWVRYNFDF

SEQ ID NO: 15268 - protein, 18 aa, Artificial Sequence
  Synthetic polypeptide representing artificial human antibody CDR-H3 region
TTGLGNITSGGFIALFDY

SEQ ID NO: 15269 - protein, 24 aa, Artificial Sequence
  Synthetic polypeptide representing artificial human antibody CDR-H3 region
AREAPAWAFVVLVGVPYHYYSMDV

SEQ ID NO: 15270 - protein, 11 aa, Artificial Sequence
  Synthetic polypeptide representing artificial human antibody CDR-H3 region
ARVNGAIDLDL

SEQ ID NO: 15271 - protein, 22 aa, Artificial Sequence
  Synthetic polypeptide representing artificial human antibody CDR-H3 region
VNPLWADYDYIFRTDLYTGFQH

SEQ ID NO: 15272 - protein, 9 aa, Artificial Sequence
  Synthetic polypeptide representing artificial human antibody CDR-H3 region
ARGLTGNDY

SEQ ID NO: 15273 - protein, 12 aa, Artificial Sequence
  Synthetic polypeptide representing artificial human antibody CDR-H3 region
ALLASPAYYMAA

SEQ ID NO: 15274 - protein, 18 aa, Artificial Sequence
  Synthetic polypeptide representing artificial human antibody CDR-H3 region
ARGTRDSWERKLNMAVDY

SEQ ID NO: 15275 - protein, 11 aa, Artificial Sequence
  Synthetic polypeptide representing artificial human antibody CDR-H3 region
ATGTTDDAFDY

SEQ ID NO: 15276 - protein, 25 aa, Artificial Sequence
  Synthetic polypeptide representing artificial human antibody CDR-H3 region
ARGLDYDFWFSGPMTNYYYYYGMDV

SEQ ID NO: 15277 - protein, 19 aa, Artificial Sequence
  Synthetic polypeptide representing artificial human antibody CDR-H3 region
ARQSYRYSSGWYYYYGMDV

SEQ ID NO: 15278 - protein, 17 aa, Artificial Sequence
  Synthetic polypeptide representing artificial human antibody CDR-H3 region
ARHGDFWSGYYPGAFDI

SEQ ID NO: 15279 - protein, 16 aa, Artificial Sequence
  Synthetic polypeptide representing artificial human antibody CDR-H3 region
ARSPPIAVAGTTWFDP

SEQ ID NO: 15280 - protein, 16 aa, Artificial Sequence
  Synthetic polypeptide representing artificial human antibody CDR-H3 region
TRGDRRGYLSRHYMGV

SEQ ID NO: 15281 - protein, 21 aa, Artificial Sequence
  Synthetic polypeptide representing artificial human antibody CDR-H3 region
ARVPADRLVLLPSAVQTYFDY

SEQ ID NO: 15282 - protein, 11 aa, Artificial Sequence
  Synthetic polypeptide representing artificial human antibody CDR-H3 region
ARDSGGRPFDY

SEQ ID NO: 15283 - protein, 19 aa, Artificial Sequence
  Synthetic polypeptide representing artificial human antibody CDR-H3 region
AHSLRRATWSEASYYYMDV

SEQ ID NO: 15284 - protein, 15 aa, Artificial Sequence
  Synthetic polypeptide representing artificial human antibody CDR-H3 region
AKGDDSGTYYYYMDV

SEQ ID NO: 15285 - protein, 21 aa, Artificial Sequence
  Synthetic polypeptide representing artificial human antibody CDR-H3 region
AKDVEDRYYDFSSGSTRLPGS

SEQ ID NO: 15286 - protein, 15 aa, Artificial Sequence
  Synthetic polypeptide representing artificial human antibody CDR-H3 region
ARGSYYDFRDYYMDV

SEQ ID NO: 15287 - protein, 16 aa, Artificial Sequence
  Synthetic polypeptide representing artificial human antibody CDR-H3 region
ARPYYDSSGYHDAFDI

SEQ ID NO: 15288 - protein, 20 aa, Artificial Sequence
  Synthetic polypeptide representing artificial human antibody CDR-H3 region
ARGPDILTGYYNYYYYGMDV

SEQ ID NO: 15289 - protein, 14 aa, Artificial Sequence
  Synthetic polypeptide representing artificial human antibody CDR-H3 region
ATFWAVAALYYFDY

SEQ ID NO: 15290 - protein, 18 aa, Artificial Sequence
  Synthetic polypeptide representing artificial human antibody CDR-H3 region
ATGAAFSDGGSPMATFDL

SEQ ID NO: 15291 - protein, 19 aa, Artificial Sequence
  Synthetic polypeptide representing artificial human antibody CDR-H3 region
ARTSFRSDWYFKPPNWFGP

SEQ ID NO: 15292 - protein, 20 aa, Artificial Sequence
  Synthetic polypeptide representing artificial human antibody CDR-H3 region
ARQRGVATIFGGYYYYGMDV

SEQ ID NO: 15293 - protein, 21 aa, Artificial Sequence
  Synthetic polypeptide representing artificial human antibody CDR-H3 region
ARVGTDYQGSGIFYNYYGMDA

SEQ ID NO: 15294 - protein, 16 aa, Artificial Sequence
  Synthetic polypeptide representing artificial human antibody CDR-H3 region
ARSLLYGSGSYNHFDY

SEQ ID NO: 15295 - protein, 17 aa, Artificial Sequence
  Synthetic polypeptide representing artificial human antibody CDR-H3 region
ARHTRRWLQLRPSYFDY

SEQ ID NO: 15296 - protein, 15 aa, Artificial Sequence
  Synthetic polypeptide representing artificial human antibody CDR-H3 region
ARDLSSSWQSSTLDP

SEQ ID NO: 15297 - protein, 22 aa, Artificial Sequence
  Synthetic polypeptide representing artificial human antibody CDR-H3 region
TRDIAIAAAGTLRWYYYYYMDV

SEQ ID NO: 15298 - protein, 17 aa, Artificial Sequence
  Synthetic polypeptide representing artificial human antibody CDR-H3 region
ARDLGQWLVRGIRGFDY

SEQ ID NO: 15299 - protein, 19 aa, Artificial Sequence
  Synthetic polypeptide representing artificial human antibody CDR-H3 region
ARCTRDILTGYYLGNWFDP

SEQ ID NO: 15300 - protein, 8 aa, Artificial Sequence
  Synthetic polypeptide representing artificial human antibody CDR-H3 region
FGHGSSSY

SEQ ID NO: 15301 - protein, 22 aa, Artificial Sequence
  Synthetic polypeptide representing artificial human antibody CDR-H3 region
ATGPAHYYDSSGYYYYYYGMDV

SEQ ID NO: 15302 - protein, 17 aa, Artificial Sequence
  Synthetic polypeptide representing artificial human antibody CDR-H3 region
AKQMSSGWYGGQFAFDI

SEQ ID NO: 15303 - protein, 19 aa, Artificial Sequence
  Synthetic polypeptide representing artificial human antibody CDR-H3 region
ATSPAYYYGSGNILHWFDP

SEQ ID NO: 15304 - protein, 18 aa, Artificial Sequence
  Synthetic polypeptide representing artificial human antibody CDR-H3 region
ARHGGGKYNWNDEGWFDP

SEQ ID NO: 15305 - protein, 16 aa, Artificial Sequence
  Synthetic polypeptide representing artificial human antibody CDR-H3 region
AHKTTMIVVVGDAFDI

SEQ ID NO: 15306 - protein, 20 aa, Artificial Sequence
  Synthetic polypeptide representing artificial human antibody CDR-H3 region
ARGSSRHIVVVTAHYWYFDL

SEQ ID NO: 15307 - protein, 10 aa, Artificial Sequence
  Synthetic polypeptide representing artificial human antibody CDR-H3 region
ARDGFGDLEF

SEQ ID NO: 15308 - protein, 18 aa, Artificial Sequence
  Synthetic polypeptide representing artificial human antibody CDR-H3 region
ARGSTQWFGTSMGNWFDP

SEQ ID NO: 15309 - protein, 22 aa, Artificial Sequence
  Synthetic polypeptide representing artificial human antibody CDR-H3 region
ARHGADCTNGVCYSSDYYYMDV

SEQ ID NO: 15310 - protein, 23 aa, Artificial Sequence
  Synthetic polypeptide representing artificial human antibody CDR-H3 region
ATTTPGGYYYDSSGYPLTSWFDP

SEQ ID NO: 15311 - protein, 17 aa, Artificial Sequence
  Synthetic polypeptide representing artificial human antibody CDR-H3 region
ARTDPNTIFGVVTHFDY

SEQ ID NO: 15312 - protein, 11 aa, Artificial Sequence
  Synthetic polypeptide representing artificial human antibody CDR-H3 region
ASGLSRGLFDF

SEQ ID NO: 15313 - protein, 14 aa, Artificial Sequence
  Synthetic polypeptide representing artificial human antibody CDR-H3 region
ATASIVGATGWFDP

SEQ ID NO: 15314 - protein, 16 aa, Artificial Sequence
  Synthetic polypeptide representing artificial human antibody CDR-H3 region
ARDDSRGWNPRGRMDY

SEQ ID NO: 15315 - protein, 16 aa, Artificial Sequence
  Synthetic polypeptide representing artificial human antibody CDR-H3 region
ATVKRTEWELLDAFDI

SEQ ID NO: 15316 - protein, 11 aa, Artificial Sequence
  Synthetic polypeptide representing artificial human antibody CDR-H3 region
ASASRTGDFDH

SEQ ID NO: 15317 - protein, 19 aa, Artificial Sequence
  Synthetic polypeptide representing artificial human antibody CDR-H3 region
ARDLAVGDCSGASCFGLDS

SEQ ID NO: 15318 - protein, 16 aa, Artificial Sequence
  Synthetic polypeptide representing artificial human antibody CDR-H3 region
ARILRDWLSYYYYINV

SEQ ID NO: 15319 - protein, 18 aa, Artificial Sequence
  Synthetic polypeptide representing artificial human antibody CDR-H3 region
AKDTGNYDTSGCRGLFGY

SEQ ID NO: 15320 - protein, 22 aa, Artificial Sequence
  Synthetic polypeptide representing artificial human antibody CDR-H3 region
AATSVYYDILTGYYRLHDAFDI

SEQ ID NO: 15321 - protein, 14 aa, Artificial Sequence
  Synthetic polypeptide representing artificial human antibody CDR-H3 region
AREAVAGTRNWFDP

SEQ ID NO: 15322 - protein, 14 aa, Artificial Sequence
  Synthetic polypeptide representing artificial human antibody CDR-H3 region
ARAIDGYIGDYFEY

SEQ ID NO: 15323 - protein, 14 aa, Artificial Sequence
  Synthetic polypeptide representing artificial human antibody CDR-H3 region
ARPGGGNYLASFDY

SEQ ID NO: 15324 - protein, 14 aa, Artificial Sequence
  Synthetic polypeptide representing artificial human antibody CDR-H3 region
AKGSGWHYYYGVDV

SEQ ID NO: 15325 - protein, 17 aa, Artificial Sequence
  Synthetic polypeptide representing artificial human antibody CDR-H3 region
ARHNILFRRIYYFYMDV

SEQ ID NO: 15326 - protein, 15 aa, Artificial Sequence
  Synthetic polypeptide representing artificial human antibody CDR-H3 region
AREGSPSATLERENY

SEQ ID NO: 15327 - protein, 17 aa, Artificial Sequence
  Synthetic polypeptide representing artificial human antibody CDR-H3 region
ARDTSPYYDSSGPYFDY

SEQ ID NO: 15328 - protein, 20 aa, Artificial Sequence
  Synthetic polypeptide representing artificial human antibody CDR-H3 region
ARANVLRYFDWSYYYYGMDV

SEQ ID NO: 15329 - protein, 15 aa, Artificial Sequence
  Synthetic polypeptide representing artificial human antibody CDR-H3 region
ARHRVAASVRYHFDY

SEQ ID NO: 15330 - protein, 15 aa, Artificial Sequence
  Synthetic polypeptide representing artificial human antibody CDR-H3 region
STYLLVKWDAMRGAY

SEQ ID NO: 15331 - protein, 21 aa, Artificial Sequence
  Synthetic polypeptide representing artificial human antibody CDR-H3 region
AKDLGKRGSSGWYYYYYGMDV

SEQ ID NO: 15332 - protein, 22 aa, Artificial Sequence
  Synthetic polypeptide representing artificial human antibody CDR-H3 region
AREREFVSYGSGSYYKYNWFDP

SEQ ID NO: 15333 - protein, 14 aa, Artificial Sequence
  Synthetic polypeptide representing artificial human antibody CDR-H3 region
GDIAIRREGSVFGF

SEQ ID NO: 15334 - protein, 15 aa, Artificial Sequence
  Synthetic polypeptide representing artificial human antibody CDR-H3 region
ARDPRVRGVILIFDY

SEQ ID NO: 15335 - protein, 12 aa, Artificial Sequence
  Synthetic polypeptide representing artificial human antibody CDR-H3 region
AHVLYSGSYYEG

SEQ ID NO: 15336 - protein, 18 aa, Artificial Sequence
  Synthetic polypeptide representing artificial human antibody CDR-H3 region
ARGATHWFGDLLGNWFDP

SEQ ID NO: 15337 - protein, 22 aa, Artificial Sequence
  Synthetic polypeptide representing artificial human antibody CDR-H3 region
ARNVAEAVYSSGWYYYYYYMDV

SEQ ID NO: 15338 - protein, 16 aa, Artificial Sequence
  Synthetic polypeptide representing artificial human antibody CDR-H3 region
ATNYYDSSGAPGVFDY

SEQ ID NO: 15339 - protein, 19 aa, Artificial Sequence
  Synthetic polypeptide representing artificial human antibody CDR-H3 region
ARTPFSYDSSGFYYGFFDS

SEQ ID NO: 15340 - protein, 15 aa, Artificial Sequence
  Synthetic polypeptide representing artificial human antibody CDR-H3 region
ARDGLWETGRGGFDY

SEQ ID NO: 15341 - protein, 20 aa, Artificial Sequence
  Synthetic polypeptide representing artificial human antibody CDR-H3 region
ARVPFTIFGGVNYFYSYMDV

SEQ ID NO: 15342 - protein, 25 aa, Artificial Sequence
  Synthetic polypeptide representing artificial human antibody CDR-H3 region
ATHPSVVVPAASFPENYYYYYGMDV

SEQ ID NO: 15343 - protein, 23 aa, Artificial Sequence
  Synthetic polypeptide representing artificial human antibody CDR-H3 region
AHRPTVGYYDILTGYRSHNWFDP

SEQ ID NO: 15344 - protein, 15 aa, Artificial Sequence
  Synthetic polypeptide representing artificial human antibody CDR-H3 region
ATVPPGPGGELSLDY

SEQ ID NO: 15345 - protein, 15 aa, Artificial Sequence
  Synthetic polypeptide representing artificial human antibody CDR-H3 region
ARFATWFGELFGFDY

SEQ ID NO: 15346 - protein, 14 aa, Artificial Sequence
  Synthetic polypeptide representing artificial human antibody CDR-H3 region
ARGRSILWWWPLDY

SEQ ID NO: 15347 - protein, 23 aa, Artificial Sequence
  Synthetic polypeptide representing artificial human antibody CDR-H3 region
ARGHRTGRITMIVVVITSYWFDP

SEQ ID NO: 15348 - protein, 14 aa, Artificial Sequence
  Synthetic polypeptide representing artificial human antibody CDR-H3 region
ARNSYYGSGHPFDP

SEQ ID NO: 15349 - protein, 16 aa, Artificial Sequence
  Synthetic polypeptide representing artificial human antibody CDR-H3 region
ARETTVTYYYYYYMDV

SEQ ID NO: 15350 - protein, 21 aa, Artificial Sequence
  Synthetic polypeptide representing artificial human antibody CDR-H3 region
ARSGYLIGELLSYYYYYGMDV

SEQ ID NO: 15351 - protein, 14 aa, Artificial Sequence
  Synthetic polypeptide representing artificial human antibody CDR-H3 region
ARGGAGYYYYYMDV

SEQ ID NO: 15352 - protein, 13 aa, Artificial Sequence
  Synthetic polypeptide representing artificial human antibody CDR-H3 region
AKGSPRIREGPDY

SEQ ID NO: 15353 - protein, 25 aa, Artificial Sequence
  Synthetic polypeptide representing artificial human antibody CDR-H3 region
ARDGPYYYDSSGYYYPRPWNYYMDV

SEQ ID NO: 15354 - protein, 16 aa, Artificial Sequence
  Synthetic polypeptide representing artificial human antibody CDR-H3 region
AKDESLLWFGELHFDY

SEQ ID NO: 15355 - protein, 16 aa, Artificial Sequence
  Synthetic polypeptide representing artificial human antibody CDR-H3 region
ASPSPRDGYGDYVYDY

SEQ ID NO: 15356 - protein, 25 aa, Artificial Sequence
  Synthetic polypeptide representing artificial human antibody CDR-H3 region
ARALYYYDSSGYYSPPLYYYYGMDV

SEQ ID NO: 15357 - protein, 12 aa, Artificial Sequence
  Synthetic polypeptide representing artificial human antibody CDR-H3 region
ARVLPYGDYYDY

SEQ ID NO: 15358 - protein, 18 aa, Artificial Sequence
  Synthetic polypeptide representing artificial human antibody CDR-H3 region
ARTPRQWLVLYYYYYMDV

SEQ ID NO: 15359 - protein, 13 aa, Artificial Sequence
  Synthetic polypeptide representing artificial human antibody CDR-H3 region
AIDLSRLGDLSRT

SEQ ID NO: 15360 - protein, 18 aa, Artificial Sequence
  Synthetic polypeptide representing artificial human antibody CDR-H3 region
ARFRSVPGVRPASYYCDF

SEQ ID NO: 15361 - protein, 11 aa, Artificial Sequence
  Synthetic polypeptide representing artificial human antibody CDR-H3 region
ARSSAATAFDI

SEQ ID NO: 15362 - protein, 13 aa, Artificial Sequence
  Synthetic polypeptide representing artificial human antibody CDR-H3 region
AREVKVTPDAFDI

SEQ ID NO: 15363 - protein, 14 aa, Artificial Sequence
  Synthetic polypeptide representing artificial human antibody CDR-H3 region
AKAQTIVLMVYAID

SEQ ID NO: 15364 - protein, 16 aa, Artificial Sequence
  Synthetic polypeptide representing artificial human antibody CDR-H3 region
ARKEAVAVAGLYYFDY

SEQ ID NO: 15365 - protein, 21 aa, Artificial Sequence
  Synthetic polypeptide representing artificial human antibody CDR-H3 region
ARERGQRWLQLKDYYYYYMDV

SEQ ID NO: 15366 - protein, 14 aa, Artificial Sequence
  Synthetic polypeptide representing artificial human antibody CDR-H3 region
ARETRGYSSGWSDY

SEQ ID NO: 15367 - protein, 12 aa, Artificial Sequence
  Synthetic polypeptide representing artificial human antibody CDR-H3 region
ATDAGTSWPFFY

SEQ ID NO: 15368 - protein, 13 aa, Artificial Sequence
  Synthetic polypeptide representing artificial human antibody CDR-H3 region
AREITVTPDAFDI

SEQ ID NO: 15369 - protein, 13 aa, Artificial Sequence
  Synthetic polypeptide representing artificial human antibody CDR-H3 region
AKDDDYYDKVMDV

SEQ ID NO: 15370 - protein, 17 aa, Artificial Sequence
  Synthetic polypeptide representing artificial human antibody CDR-H3 region
ARDPITSSGNYWGSFDY

SEQ ID NO: 15371 - protein, 11 aa, Artificial Sequence
  Synthetic polypeptide representing artificial human antibody CDR-H3 region
ARIYGSGIPDY

SEQ ID NO: 15372 - protein, 23 aa, Artificial Sequence
  Synthetic polypeptide representing artificial human antibody CDR-H3 region
ARGARQLYRSGWFEYYYYYYMDV

SEQ ID NO: 15373 - protein, 19 aa, Artificial Sequence
  Synthetic polypeptide representing artificial human antibody CDR-H3 region
ARMKFITMIVVVTREGFDP

SEQ ID NO: 15374 - protein, 15 aa, Artificial Sequence
  Synthetic polypeptide representing artificial human antibody CDR-H3 region
ASDLGSYGGFEYFDL

SEQ ID NO: 15375 - protein, 19 aa, Artificial Sequence
  Synthetic polypeptide representing artificial human antibody CDR-H3 region
ARDARFFYDSSGYSNAFDI

SEQ ID NO: 15376 - protein, 19 aa, Artificial Sequence
  Synthetic polypeptide representing artificial human antibody CDR-H3 region
ARRDYYDSSGYYPGYGMDV

SEQ ID NO: 15377 - protein, 10 aa, Artificial Sequence
  Synthetic polypeptide representing artificial human antibody CDR-H3 region
AHLTNRDIDY

SEQ ID NO: 15378 - protein, 14 aa, Artificial Sequence
  Synthetic polypeptide representing artificial human antibody CDR-H3 region
ARSYSGSYRGAFDI

SEQ ID NO: 15379 - protein, 14 aa, Artificial Sequence
  Synthetic polypeptide representing artificial human antibody CDR-H3 region
AKDERARGGWAFDH

SEQ ID NO: 15380 - protein, 15 aa, Artificial Sequence
  Synthetic polypeptide representing artificial human antibody CDR-H3 region
ARSTSGWTSEIYIDY

SEQ ID NO: 15381 - protein, 17 aa, Artificial Sequence
  Synthetic polypeptide representing artificial human antibody CDR-H3 region
ARREAEDRAMAPSHFDY

SEQ ID NO: 15382 - protein, 14 aa, Artificial Sequence
  Synthetic polypeptide representing artificial human antibody CDR-H3 region
ATTAVAGRVNWFDP

SEQ ID NO: 15383 - protein, 13 aa, Artificial Sequence
  Synthetic polypeptide representing artificial human antibody CDR-H3 region
ARFGGSYYGGFDY

SEQ ID NO: 15384 - protein, 16 aa, Artificial Sequence
  Synthetic polypeptide representing artificial human antibody CDR-H3 region
ARTYYDILTGNFWFDP

SEQ ID NO: 15385 - protein, 16 aa, Artificial Sequence
  Synthetic polypeptide representing artificial human antibody CDR-H3 region
ARMYYDILTGYFQEDY

SEQ ID NO: 15386 - protein, 17 aa, Artificial Sequence
  Synthetic polypeptide representing artificial human antibody CDR-H3 region
AHSCSGGSCYYSPGFDP

SEQ ID NO: 15387 - protein, 15 aa, Artificial Sequence
  Synthetic polypeptide representing artificial human antibody CDR-H3 region
AKDAEYSYGNPGMDV

SEQ ID NO: 15388 - protein, 16 aa, Artificial Sequence
  Synthetic polypeptide representing artificial human antibody CDR-H3 region
ARDLGQWLGYYWYFDL

SEQ ID NO: 15389 - protein, 16 aa, Artificial Sequence
  Synthetic polypeptide representing artificial human antibody CDR-H3 region
ARAYTAMVTGAYYMDV

SEQ ID NO: 15390 - protein, 20 aa, Artificial Sequence
  Synthetic polypeptide representing artificial human antibody CDR-H3 region
ARDWEGRLGLAIVDAGYFDY

SEQ ID NO: 15391 - protein, 15 aa, Artificial Sequence
  Synthetic polypeptide representing artificial human antibody CDR-H3 region
ATGPVITGTMDWFDP

SEQ ID NO: 15392 - protein, 15 aa, Artificial Sequence
  Synthetic polypeptide representing artificial human antibody CDR-H3 region
TRRPEEYCGGDCYIP

SEQ ID NO: 15393 - protein, 21 aa, Artificial Sequence
  Synthetic polypeptide representing artificial human antibody CDR-H3 region
ARDKTTKQWLVLVDYYYGMDV

SEQ ID NO: 15394 - protein, 20 aa, Artificial Sequence
  Synthetic polypeptide representing artificial human antibody CDR-H3 region
ARSLDSGGWGGTYNYYGMDV

SEQ ID NO: 15395 - protein, 22 aa, Artificial Sequence
  Synthetic polypeptide representing artificial human antibody CDR-H3 region
ARDPPLYYYGSGSYQYYYGMDV

SEQ ID NO: 15396 - protein, 11 aa, Artificial Sequence
  Synthetic polypeptide representing artificial human antibody CDR-H3 region
VRAALDDALDV

SEQ ID NO: 15397 - protein, 14 aa, Artificial Sequence
  Synthetic polypeptide representing artificial human antibody CDR-H3 region
ATSPGYSTENWFDP

SEQ ID NO: 15398 - protein, 19 aa, Artificial Sequence
  Synthetic polypeptide representing artificial human antibody CDR-H3 region
AREDVLRYFDWYPWSWFDP

SEQ ID NO: 15399 - protein, 21 aa, Artificial Sequence
  Synthetic polypeptide representing artificial human antibody CDR-H3 region
AKVAGHYYDSSGYYYEGGMDV

SEQ ID NO: 15400 - protein, 20 aa, Artificial Sequence
  Synthetic polypeptide representing artificial human antibody CDR-H3 region
ARDCSTSCIQANYYYYGMDV

SEQ ID NO: 15401 - protein, 17 aa, Artificial Sequence
  Synthetic polypeptide representing artificial human antibody CDR-H3 region
ARHRRQWLVRTPDAFDI

SEQ ID NO: 15402 - protein, 22 aa, Artificial Sequence
  Synthetic polypeptide representing artificial human antibody CDR-H3 region
ARELKTYYDILTGYRRLYGMDV

SEQ ID NO: 15403 - protein, 26 aa, Artificial Sequence
  Synthetic polypeptide representing artificial human antibody CDR-H3 region
ATAPPVAPLKDYDILTGYLYYYGMDV

SEQ ID NO: 15404 - protein, 14 aa, Artificial Sequence
  Synthetic polypeptide representing artificial human antibody CDR-H3 region
ARLGGHGVGAPFDY

SEQ ID NO: 15405 - protein, 11 aa, Artificial Sequence
  Synthetic polypeptide representing artificial human antibody CDR-H3 region
ARDYGDYYFDY

SEQ ID NO: 15406 - protein, 19 aa, Artificial Sequence
  Synthetic polypeptide representing artificial human antibody CDR-H3 region
ARHYGTMIVVVITPYYFDY

SEQ ID NO: 15407 - protein, 15 aa, Artificial Sequence
  Synthetic polypeptide representing artificial human antibody CDR-H3 region
ATPREAIVVVTAFDY

SEQ ID NO: 15408 - protein, 17 aa, Artificial Sequence
  Synthetic polypeptide representing artificial human antibody CDR-H3 region
ATTSPFRGVPNLNWFDP

SEQ ID NO: 15409 - protein, 18 aa, Artificial Sequence
  Synthetic polypeptide representing artificial human antibody CDR-H3 region
ARMGRRWLQLRPSHYFDY

SEQ ID NO: 15410 - protein, 19 aa, Artificial Sequence
  Synthetic polypeptide representing artificial human antibody CDR-H3 region
TREDGCTNGVCYISNVFDY

SEQ ID NO: 15411 - protein, 14 aa, Artificial Sequence
  Synthetic polypeptide representing artificial human antibody CDR-H3 region
AHRRGLWFGEFFDY

SEQ ID NO: 15412 - protein, 13 aa, Artificial Sequence
  Synthetic polypeptide representing artificial human antibody CDR-H3 region
AGQLYRGYEYFDY

SEQ ID NO: 15413 - protein, 7 aa, Artificial Sequence
  Synthetic polypeptide representing artificial human antibody CDR-H3 region
ASMGFDI

SEQ ID NO: 15414 - protein, 21 aa, Artificial Sequence
  Synthetic polypeptide representing artificial human antibody CDR-H3 region
ARERWAPYCSDGRCQADVFDV

SEQ ID NO: 15415 - protein, 17 aa, Artificial Sequence
  Synthetic polypeptide representing artificial human antibody CDR-H3 region
ARHVPRERWLAWAYFDL

SEQ ID NO: 15416 - protein, 12 aa, Artificial Sequence
  Synthetic polypeptide representing artificial human antibody CDR-H3 region
AREAKDYWYFDL

SEQ ID NO: 15417 - protein, 16 aa, Artificial Sequence
  Synthetic polypeptide representing artificial human antibody CDR-H3 region
ARLYYDSSGYYGYFDY

SEQ ID NO: 15418 - protein, 11 aa, Artificial Sequence
  Synthetic polypeptide representing artificial human antibody CDR-H3 region
ARGTDQFTGGS

SEQ ID NO: 15419 - protein, 18 aa, Artificial Sequence
  Synthetic polypeptide representing artificial human antibody CDR-H3 region
ARDRYYYDSSGYSEPFDY

SEQ ID NO: 15420 - protein, 15 aa, Artificial Sequence
  Synthetic polypeptide representing artificial human antibody CDR-H3 region
ATMYALNYDVYYFDY

SEQ ID NO: 15421 - protein, 22 aa, Artificial Sequence
  Synthetic polypeptide representing artificial human antibody CDR-H3 region
ATAPSVAGRPPFDYYYYYGMDV

SEQ ID NO: 15422 - protein, 14 aa, Artificial Sequence
  Synthetic polypeptide representing artificial human antibody CDR-H3 region
ATGAAAGTVGWFDP

SEQ ID NO: 15423 - protein, 21 aa, Artificial Sequence
  Synthetic polypeptide representing artificial human antibody CDR-H3 region
ARQGGRITMIVVVSGPYYFDY

SEQ ID NO: 15424 - protein, 16 aa, Artificial Sequence
  Synthetic polypeptide representing artificial human antibody CDR-H3 region
AREWRRWLQYRGYFDY

SEQ ID NO: 15425 - protein, 17 aa, Artificial Sequence
  Synthetic polypeptide representing artificial human antibody CDR-H3 region
AKSMVRGVNYFYYGMDV

SEQ ID NO: 15426 - protein, 25 aa, Artificial Sequence
  Synthetic polypeptide representing artificial human antibody CDR-H3 region
AKDLNGGGLGITIFGVVMGHDAFDI

SEQ ID NO: 15427 - protein, 12 aa, Artificial Sequence
  Synthetic polypeptide representing artificial human antibody CDR-H3 region
ARSVLEDWYFDL

SEQ ID NO: 15428 - protein, 14 aa, Artificial Sequence
  Synthetic polypeptide representing artificial human antibody CDR-H3 region
ARLGWLFEPYGMDV

SEQ ID NO: 15429 - protein, 21 aa, Artificial Sequence
  Synthetic polypeptide representing artificial human antibody CDR-H3 region
ARGGGVLLWFGELSGYYYMDV

SEQ ID NO: 15430 - protein, 13 aa, Artificial Sequence
  Synthetic polypeptide representing artificial human antibody CDR-H3 region
ASGIAAATYYLDY

SEQ ID NO: 15431 - protein, 12 aa, Artificial Sequence
  Synthetic polypeptide representing artificial human antibody CDR-H3 region
ATDAGTSWHFFY

SEQ ID NO: 15432 - protein, 16 aa, Artificial Sequence
  Synthetic polypeptide representing artificial human antibody CDR-H3 region
ARSTRGWLSALWWFDP

SEQ ID NO: 15433 - protein, 12 aa, Artificial Sequence
  Synthetic polypeptide representing artificial human antibody CDR-H3 region
AHRRAFYGYFDY

SEQ ID NO: 15434 - protein, 22 aa, Artificial Sequence
  Synthetic polypeptide representing artificial human antibody CDR-H3 region
AKDPRIFMITYGRPLADTHLDL

SEQ ID NO: 15435 - protein, 15 aa, Artificial Sequence
  Synthetic polypeptide representing artificial human antibody CDR-H3 region
ARDRDRYSGNDGPVY

SEQ ID NO: 15436 - protein, 23 aa, Artificial Sequence
  Synthetic polypeptide representing artificial human antibody CDR-H3 region
AREMITDIVVVVAATVGYYGMDV

SEQ ID NO: 15437 - protein, 17 aa, Artificial Sequence
  Synthetic polypeptide representing artificial human antibody CDR-H3 region
ARTYYDILTGYYYGMDV

SEQ ID NO: 15438 - protein, 14 aa, Artificial Sequence
  Synthetic polypeptide representing artificial human antibody CDR-H3 region
ATGVVRGVTNWFDP

SEQ ID NO: 15439 - protein, 22 aa, Artificial Sequence
  Synthetic polypeptide representing artificial human antibody CDR-H3 region
ARVPGIAVAGTLYYYYYYYMDV

SEQ ID NO: 15440 - protein, 17 aa, Artificial Sequence
  Synthetic polypeptide representing artificial human antibody CDR-H3 region
AKAQGTYSSYYYYGMDV

SEQ ID NO: 15441 - protein, 17 aa, Artificial Sequence
  Synthetic polypeptide representing artificial human antibody CDR-H3 region
GNSRDGHKWGNYYGLDV

SEQ ID NO: 15442 - protein, 14 aa, Artificial Sequence
  Synthetic polypeptide representing artificial human antibody CDR-H3 region
ARDSQSSGAHDFDY

SEQ ID NO: 15443 - protein, 16 aa, Artificial Sequence
  Synthetic polypeptide representing artificial human antibody CDR-H3 region
ARGRTIFGVVIEPFDY

SEQ ID NO: 15444 - protein, 14 aa, Artificial Sequence
  Synthetic polypeptide representing artificial human antibody CDR-H3 region
ARRRSGWSRYGMDV

SEQ ID NO: 15445 - protein, 22 aa, Artificial Sequence
  Synthetic polypeptide representing artificial human antibody CDR-H3 region
ARDYYDYDSSGYLGYYYYYMDV

SEQ ID NO: 15446 - protein, 21 aa, Artificial Sequence
  Synthetic polypeptide representing artificial human antibody CDR-H3 region
ARGRWRDTMIVVVIRDHAFDI

SEQ ID NO: 15447 - protein, 19 aa, Artificial Sequence
  Synthetic polypeptide representing artificial human antibody CDR-H3 region
ATGPVYCSSTSCKQNWFDP

SEQ ID NO: 15448 - protein, 12 aa, Artificial Sequence
  Synthetic polypeptide representing artificial human antibody CDR-H3 region
ARRQRSPRAFDI

SEQ ID NO: 15449 - protein, 14 aa, Artificial Sequence
  Synthetic polypeptide representing artificial human antibody CDR-H3 region
ARGNAGYYYYYMDV

SEQ ID NO: 15450 - protein, 17 aa, Artificial Sequence
  Synthetic polypeptide representing artificial human antibody CDR-H3 region
ARDAYYDILTGYYPFDY

SEQ ID NO: 15451 - protein, 17 aa, Artificial Sequence
  Synthetic polypeptide representing artificial human antibody CDR-H3 region
VRRSILPSSSVWGAFDC

SEQ ID NO: 15452 - protein, 14 aa, Artificial Sequence
  Synthetic polypeptide representing artificial human antibody CDR-H3 region
ASGPVVVTTSWFDP

SEQ ID NO: 15453 - protein, 14 aa, Artificial Sequence
  Synthetic polypeptide representing artificial human antibody CDR-H3 region
ARAANQHGYGDLDY

SEQ ID NO: 15454 - protein, 19 aa, Artificial Sequence
  Synthetic polypeptide representing artificial human antibody CDR-H3 region
ARAKKRWLQLGTEGDAFDI

SEQ ID NO: 15455 - protein, 16 aa, Artificial Sequence
  Synthetic polypeptide representing artificial human antibody CDR-H3 region
ARILRDWLSYYYYMDV

SEQ ID NO: 15456 - protein, 10 aa, Artificial Sequence
  Synthetic polypeptide representing artificial human antibody CDR-H3 region
ARQDGRDVDY

SEQ ID NO: 15457 - protein, 16 aa, Artificial Sequence
  Synthetic polypeptide representing artificial human antibody CDR-H3 region
AKTIFPWAHYYYGMDV

SEQ ID NO: 15458 - protein, 17 aa, Artificial Sequence
  Synthetic polypeptide representing artificial human antibody CDR-H3 region
ARTGRGWLQLIPSWFDP

SEQ ID NO: 15459 - protein, 16 aa, Artificial Sequence
  Synthetic polypeptide representing artificial human antibody CDR-H3 region
ARHAWNTLGRTNWFDP

SEQ ID NO: 15460 - protein, 20 aa, Artificial Sequence
  Synthetic polypeptide representing artificial human antibody CDR-H3 region
ARGTHCSSTSCYAPYYYMDV

SEQ ID NO: 15461 - protein, 18 aa, Artificial Sequence
  Synthetic polypeptide representing artificial human antibody CDR-H3 region
ARGSIYSNPAGEGSFFDY

SEQ ID NO: 15462 - protein, 13 aa, Artificial Sequence
  Synthetic polypeptide representing artificial human antibody CDR-H3 region
AGHSSASHYYFDR

SEQ ID NO: 15463 - protein, 18 aa, Artificial Sequence
  Synthetic polypeptide representing artificial human antibody CDR-H3 region
ARMFSDDSSVSYYYGMDV

SEQ ID NO: 15464 - protein, 22 aa, Artificial Sequence
  Synthetic polypeptide representing artificial human antibody CDR-H3 region
AKDGVSYDFWSGYSGKYYYLDV

SEQ ID NO: 15465 - protein, 25 aa, Artificial Sequence
  Synthetic polypeptide representing artificial human antibody CDR-H3 region
ARGLRDAGRRKEIVGTPHHNYYIDI

SEQ ID NO: 15466 - protein, 21 aa, Artificial Sequence
  Synthetic polypeptide representing artificial human antibody CDR-H3 region
ARAPPSSITIFGVVKSWYMDV

SEQ ID NO: 15467 - protein, 14 aa, Artificial Sequence
  Synthetic polypeptide representing artificial human antibody CDR-H3 region
ATGSPMVRGSWFDP

SEQ ID NO: 15468 - protein, 20 aa, Artificial Sequence
  Synthetic polypeptide representing artificial human antibody CDR-H3 region
ARERGQRWLQLKDYYYYMDV

SEQ ID NO: 15469 - protein, 10 aa, Artificial Sequence
  Synthetic polypeptide representing artificial human antibody CDR-H3 region
TTLSATYSHY

SEQ ID NO: 15470 - protein, 15 aa, Artificial Sequence
  Synthetic polypeptide representing artificial human antibody CDR-H3 region
ARGVILGVVINYMDV

SEQ ID NO: 15471 - protein, 18 aa, Artificial Sequence
  Synthetic polypeptide representing artificial human antibody CDR-H3 region
LTDSDYYDGSGYIDGFDI

SEQ ID NO: 15472 - protein, 15 aa, Artificial Sequence
  Synthetic polypeptide representing artificial human antibody CDR-H3 region
ATSSPILTRTNWFDP

SEQ ID NO: 15473 - protein, 11 aa, Artificial Sequence
  Synthetic polypeptide representing artificial human antibody CDR-H3 region
ATLSSPPYFDY

SEQ ID NO: 15474 - protein, 6 aa, Artificial Sequence
  Synthetic polypeptide representing artificial human antibody CDR-H3 region
ARGFDY

SEQ ID NO: 15475 - protein, 12 aa, Artificial Sequence
  Synthetic polypeptide representing artificial human antibody CDR-H3 region
AKEALFPTGLDH

SEQ ID NO: 15476 - protein, 28 aa, Artificial Sequence
  Synthetic polypeptide representing artificial human antibody CDR-H3 region
AREHLYYDILTGYISPSRYYYYYYGMDV

SEQ ID NO: 15477 - protein, 12 aa, Artificial Sequence
  Synthetic polypeptide representing artificial human antibody CDR-H3 region
ARDLEVVGGMDV

SEQ ID NO: 15478 - protein, 17 aa, Artificial Sequence
  Synthetic polypeptide representing artificial human antibody CDR-H3 region
ARGRKIVVPNGLYGMDV

SEQ ID NO: 15479 - protein, 13 aa, Artificial Sequence
  Synthetic polypeptide representing artificial human antibody CDR-H3 region
AREHSSGRGGFDY

SEQ ID NO: 15480 - protein, 9 aa, Artificial Sequence
  Synthetic polypeptide representing artificial human antibody CDR-H3 region
TTGGGYLTY

SEQ ID NO: 15481 - protein, 22 aa, Artificial Sequence
  Synthetic polypeptide representing artificial human antibody CDR-H3 region
ARGGYSYGHDTDLLYYYYGMDV

SEQ ID NO: 15482 - protein, 22 aa, Artificial Sequence
  Synthetic polypeptide representing artificial human antibody CDR-H3 region
AKEGRPINGYYDILTDPYYFEY

SEQ ID NO: 15483 - protein, 24 aa, Artificial Sequence
  Synthetic polypeptide representing artificial human antibody CDR-H3 region
ARGELLRYFDWLSHEPDYYYGMDV

SEQ ID NO: 15484 - protein, 13 aa, Artificial Sequence
  Synthetic polypeptide representing artificial human antibody CDR-H3 region
ARTTMGIAEYFDY

SEQ ID NO: 15485 - protein, 20 aa, Artificial Sequence
  Synthetic polypeptide representing artificial human antibody CDR-H3 region
AKDPEGYSSGWIYYYYGMDV

SEQ ID NO: 15486 - protein, 11 aa, Artificial Sequence
  Synthetic polypeptide representing artificial human antibody CDR-H3 region
ARNGGTNWFDP

SEQ ID NO: 15487 - protein, 21 aa, Artificial Sequence
  Synthetic polypeptide representing artificial human antibody CDR-H3 region
ATGIAVAGTPTRYYYYYGMDV

SEQ ID NO: 15488 - protein, 20 aa, Artificial Sequence
  Synthetic polypeptide representing artificial human antibody CDR-H3 region
AKSEYFDWLLYSDYYYGMDV

SEQ ID NO: 15489 - protein, 11 aa, Artificial Sequence
  Synthetic polypeptide representing artificial human antibody CDR-H3 region
ARGDFDWLLDY

SEQ ID NO: 15490 - protein, 13 aa, Artificial Sequence
  Synthetic polypeptide representing artificial human antibody CDR-H3 region
AREKWTSFRFLEN

SEQ ID NO: 15491 - protein, 18 aa, Artificial Sequence
  Synthetic polypeptide representing artificial human antibody CDR-H3 region
ATTVTTPHDYYYYYGMDV

SEQ ID NO: 15492 - protein, 11 aa, Artificial Sequence
  Synthetic polypeptide representing artificial human antibody CDR-H3 region
ARSAVPYYFDY

SEQ ID NO: 15493 - protein, 19 aa, Artificial Sequence
  Synthetic polypeptide representing artificial human antibody CDR-H3 region
ARGVAETYSGDYWLVLFDY

SEQ ID NO: 15494 - protein, 21 aa, Artificial Sequence
  Synthetic polypeptide representing artificial human antibody CDR-H3 region
TRVREQGEYSSSPGLEGWFDP

SEQ ID NO: 15495 - protein, 14 aa, Artificial Sequence
  Synthetic polypeptide representing artificial human antibody CDR-H3 region
ARRYCSGGSCYKDY

SEQ ID NO: 15496 - protein, 15 aa, Artificial Sequence
  Synthetic polypeptide representing artificial human antibody CDR-H3 region
ARGDYYGSGSNDFDY

SEQ ID NO: 15497 - protein, 20 aa, Artificial Sequence
  Synthetic polypeptide representing artificial human antibody CDR-H3 region
ARGLRRAGSIVVVSLYYFDY

SEQ ID NO: 15498 - protein, 18 aa, Artificial Sequence
  Synthetic polypeptide representing artificial human antibody CDR-H3 region
ARDGGPEAGSDYYHGLED

SEQ ID NO: 15499 - protein, 24 aa, Artificial Sequence
  Synthetic polypeptide representing artificial human antibody CDR-H3 region
ARDPGRAQTVWWHTVATITGYFDY

SEQ ID NO: 15500 - protein, 14 aa, Artificial Sequence
  Synthetic polypeptide representing artificial human antibody CDR-H3 region
ARAYSGSYYYGMDV

SEQ ID NO: 15501 - protein, 19 aa, Artificial Sequence
  Synthetic polypeptide representing artificial human antibody CDR-H3 region
AKDHNVLLWFGELTAGVDV

SEQ ID NO: 15502 - protein, 14 aa, Artificial Sequence
  Synthetic polypeptide representing artificial human antibody CDR-H3 region
TTRRWFRELLKNDY

SEQ ID NO: 15503 - protein, 16 aa, Artificial Sequence
  Synthetic polypeptide representing artificial human antibody CDR-H3 region
AREPVVSQLYSYGMDV

SEQ ID NO: 15504 - protein, 11 aa, Artificial Sequence
  Synthetic polypeptide representing artificial human antibody CDR-H3 region
ASISSGWYSDY

SEQ ID NO: 15505 - protein, 11 aa, Artificial Sequence
  Synthetic polypeptide representing artificial human antibody CDR-H3 region
ARNGDSNYFDY

SEQ ID NO: 15506 - protein, 28 aa, Artificial Sequence
  Synthetic polypeptide representing artificial human antibody CDR-H3 region
ARAQTTWAGSYDYVWGSYRQTKGDAFDI

SEQ ID NO: 15507 - protein, 9 aa, Artificial Sequence
  Synthetic polypeptide representing artificial human antibody CDR-H3 region
ASRWLQLGY

SEQ ID NO: 15508 - protein, 17 aa, Artificial Sequence
  Synthetic polypeptide representing artificial human antibody CDR-H3 region
AVGGGYCHGGTCGWFAP

SEQ ID NO: 15509 - protein, 12 aa, Artificial Sequence
  Synthetic polypeptide representing artificial human antibody CDR-H3 region
ARDWSRGYGMDV

SEQ ID NO: 15510 - protein, 8 aa, Artificial Sequence
  Synthetic polypeptide representing artificial human antibody CDR-H3 region
ARDLHFDI

SEQ ID NO: 15511 - protein, 26 aa, Artificial Sequence
  Synthetic polypeptide representing artificial human antibody CDR-H3 region
VRALLGGTRDYDISTGHYNEGYYFDY

SEQ ID NO: 15512 - protein, 17 aa, Artificial Sequence
  Synthetic polypeptide representing artificial human antibody CDR-H3 region
AKDIGADVLLWFGAWDY

SEQ ID NO: 15513 - protein, 18 aa, Artificial Sequence
  Synthetic polypeptide representing artificial human antibody CDR-H3 region
ARIWYSSGWYEPKYYFDY

SEQ ID NO: 15514 - protein, 14 aa, Artificial Sequence
  Synthetic polypeptide representing artificial human antibody CDR-H3 region
AKDRDEYGDYAFDC

SEQ ID NO: 15515 - protein, 14 aa, Artificial Sequence
  Synthetic polypeptide representing artificial human antibody CDR-H3 region
AREPQYDIMGGFAQ

SEQ ID NO: 15516 - protein, 25 aa, Artificial Sequence
  Synthetic polypeptide representing artificial human antibody CDR-H3 region
ARSTYYYDSSGYYYPYYYYYYGMDV

SEQ ID NO: 15517 - protein, 18 aa, Artificial Sequence
  Synthetic polypeptide representing artificial human antibody CDR-H3 region
ARDTYDILTGYGPLLMDV

SEQ ID NO: 15518 - protein, 22 aa, Artificial Sequence
  Synthetic polypeptide representing artificial human antibody CDR-H3 region
ARNPPYYDILTGYSLDYYGMDV

SEQ ID NO: 15519 - protein, 14 aa, Artificial Sequence
  Synthetic polypeptide representing artificial human antibody CDR-H3 region
ARTYSGSYKGYFDY

SEQ ID NO: 15520 - protein, 28 aa, Artificial Sequence
  Synthetic polypeptide representing artificial human antibody CDR-H3 region
ARDTKYYDFWSGYLGRETTYYYYYGMDV

SEQ ID NO: 15521 - protein, 17 aa, Artificial Sequence
  Synthetic polypeptide representing artificial human antibody CDR-H3 region
ARSWDSSSWWLTNWFDP

SEQ ID NO: 15522 - protein, 18 aa, Artificial Sequence
  Synthetic polypeptide representing artificial human antibody CDR-H3 region
VRDYDDYGDYGESYYFDY

SEQ ID NO: 15523 - protein, 14 aa, Artificial Sequence
  Synthetic polypeptide representing artificial human antibody CDR-H3 region
ARHQGGSPFGGMDV

SEQ ID NO: 15524 - protein, 19 aa, Artificial Sequence
  Synthetic polypeptide representing artificial human antibody CDR-H3 region
ARYDILTGYYMGSGRWFDP

SEQ ID NO: 15525 - protein, 17 aa, Artificial Sequence
  Synthetic polypeptide representing artificial human antibody CDR-H3 region
ARGSMGGFTMIVVALSH

SEQ ID NO: 15526 - protein, 15 aa, Artificial Sequence
  Synthetic polypeptide representing artificial human antibody CDR-H3 region
ATDRDLYGGNHCFDI

SEQ ID NO: 15527 - protein, 12 aa, Artificial Sequence
  Synthetic polypeptide representing artificial human antibody CDR-H3 region
TSVFGAYDVCDY

SEQ ID NO: 15528 - protein, 16 aa, Artificial Sequence
  Synthetic polypeptide representing artificial human antibody CDR-H3 region
ARAGFDGAVAPEGFDP

SEQ ID NO: 15529 - protein, 12 aa, Artificial Sequence
  Synthetic polypeptide representing artificial human antibody CDR-H3 region
ATFSSYVGRADY

SEQ ID NO: 15530 - protein, 17 aa, Artificial Sequence
  Synthetic polypeptide representing artificial human antibody CDR-H3 region
ARVRKRFGDIVGDAFDI

SEQ ID NO: 15531 - protein, 10 aa, Artificial Sequence
  Synthetic polypeptide representing artificial human antibody CDR-H3 region
AKGVEYYSDY

SEQ ID NO: 15532 - protein, 14 aa, Artificial Sequence
  Synthetic polypeptide representing artificial human antibody CDR-H3 region
ARRGYYYGSVGFDP

SEQ ID NO: 15533 - protein, 21 aa, Artificial Sequence
  Synthetic polypeptide representing artificial human antibody CDR-H3 region
AKPSFGLSGWFDFYYYYGMDV

SEQ ID NO: 15534 - protein, 15 aa, Artificial Sequence
  Synthetic polypeptide representing artificial human antibody CDR-H3 region
AKVVGEPKGANWFDP

SEQ ID NO: 15535 - protein, 14 aa, Artificial Sequence
  Synthetic polypeptide representing artificial human antibody CDR-H3 region
TTDSASIGYYGMDV

SEQ ID NO: 15536 - protein, 14 aa, Artificial Sequence
  Synthetic polypeptide representing artificial human antibody CDR-H3 region
ATGPPYGDRNWFDP

SEQ ID NO: 15537 - protein, 23 aa, Artificial Sequence
  Synthetic polypeptide representing artificial human antibody CDR-H3 region
ATGVSAYYDSRDGTYYYYYGMDV

SEQ ID NO: 15538 - protein, 23 aa, Artificial Sequence
  Synthetic polypeptide representing artificial human antibody CDR-H3 region
ARGCGGDCYSPWGFYYYYYGMDV

SEQ ID NO: 15539 - protein, 19 aa, Artificial Sequence
  Synthetic polypeptide representing artificial human antibody CDR-H3 region
AKGVGYYDFWSGQGDGMDV

SEQ ID NO: 15540 - protein, 19 aa, Artificial Sequence
  Synthetic polypeptide representing artificial human antibody CDR-H3 region
AREPLRITMIVVERGGLDP

SEQ ID NO: 15541 - protein, 22 aa, Artificial Sequence
  Synthetic polypeptide representing artificial human antibody CDR-H3 region
ARRRITIFGVVIIDNRGDWFDP

SEQ ID NO: 15542 - protein, 17 aa, Artificial Sequence
  Synthetic polypeptide representing artificial human antibody CDR-H3 region
AIPPLAAQNYYYYGMDV

SEQ ID NO: 15543 - protein, 20 aa, Artificial Sequence
  Synthetic polypeptide representing artificial human antibody CDR-H3 region
AKDRPYCSGGSCQAYGWFDP

SEQ ID NO: 15544 - protein, 18 aa, Artificial Sequence
  Synthetic polypeptide representing artificial human antibody CDR-H3 region
AREESYGDYPWSTRGMDV

SEQ ID NO: 15545 - protein, 26 aa, Artificial Sequence
  Synthetic polypeptide representing artificial human antibody CDR-H3 region
ARDVVATGEGITMIWGVYYYYYGMDV

SEQ ID NO: 15546 - protein, 15 aa, Artificial Sequence
  Synthetic polypeptide representing artificial human antibody CDR-H3 region
ARESDSSGYHGWFDP

SEQ ID NO: 15547 - protein, 13 aa, Artificial Sequence
  Synthetic polypeptide representing artificial human antibody CDR-H3 region
ARVSNWNYGPLDY

SEQ ID NO: 15548 - protein, 15 aa, Artificial Sequence
  Synthetic polypeptide representing artificial human antibody CDR-H3 region
ARHQTYYGDYGGVDY

SEQ ID NO: 15549 - protein, 11 aa, Artificial Sequence
  Synthetic polypeptide representing artificial human antibody CDR-H3 region
AIHDYGDYVGY

SEQ ID NO: 15550 - protein, 16 aa, Artificial Sequence
  Synthetic polypeptide representing artificial human antibody CDR-H3 region
VRDRHGGSYYWEYFQF

SEQ ID NO: 15551 - protein, 15 aa, Artificial Sequence
  Synthetic polypeptide representing artificial human antibody CDR-H3 region
ARGNGNSPSSYPYSP

SEQ ID NO: 15552 - protein, 12 aa, Artificial Sequence
  Synthetic polypeptide representing artificial human antibody CDR-H3 region
ARPNWGDFAFDI

SEQ ID NO: 15553 - protein, 22 aa, Artificial Sequence
  Synthetic polypeptide representing artificial human antibody CDR-H3 region
AKDKRGPLYGDYGVYYYYGMDV

SEQ ID NO: 15554 - protein, 24 aa, Artificial Sequence
  Synthetic polypeptide representing artificial human antibody CDR-H3 region
ARNGGGGGPQMITFGGVIGPFFDY

SEQ ID NO: 15555 - protein, 15 aa, Artificial Sequence
  Synthetic polypeptide representing artificial human antibody CDR-H3 region
ARVDYHSSGPVARDI

SEQ ID NO: 15556 - protein, 24 aa, Artificial Sequence
  Synthetic polypeptide representing artificial human antibody CDR-H3 region
ARDLSYGDYVWETLGGYYYYGMDV

SEQ ID NO: 15557 - protein, 22 aa, Artificial Sequence
  Synthetic polypeptide representing artificial human antibody CDR-H3 region
AKEGRPINGYYDILTDPYYFDY

SEQ ID NO: 15558 - protein, 14 aa, Artificial Sequence
  Synthetic polypeptide representing artificial human antibody CDR-H3 region
ARRGYYYGSVGFDP

SEQ ID NO: 15559 - protein, 13 aa, Artificial Sequence
  Synthetic polypeptide representing artificial human antibody CDR-H3 region
ARGDWGIAVAGTK

SEQ ID NO: 15560 - protein, 7 aa, Artificial Sequence
  Synthetic polypeptide representing artificial human antibody CDR-H3 region
TAGFGDA

SEQ ID NO: 15561 - protein, 17 aa, Artificial Sequence
  Synthetic polypeptide representing artificial human antibody CDR-H3 region
ARGDVWGGTIPQDAFDM

SEQ ID NO: 15562 - protein, 15 aa, Artificial Sequence
  Synthetic polypeptide representing artificial human antibody CDR-H3 region
ARGLIVVLADDVFDI

SEQ ID NO: 15563 - protein, 22 aa, Artificial Sequence
  Synthetic polypeptide representing artificial human antibody CDR-H3 region
ATDPWVGYTGYDYGDYYYGMDV

SEQ ID NO: 15564 - protein, 24 aa, Artificial Sequence
  Synthetic polypeptide representing artificial human antibody CDR-H3 region
ARGPEVATVVTRGEDYYYYYGMDV

SEQ ID NO: 15565 - protein, 17 aa, Artificial Sequence
  Synthetic polypeptide representing artificial human antibody CDR-H3 region
ARDPRGWLAAPPGYFDY

SEQ ID NO: 15566 - protein, 13 aa, Artificial Sequence
  Synthetic polypeptide representing artificial human antibody CDR-H3 region
ARDGGSSASSWDY

SEQ ID NO: 15567 - protein, 15 aa, Artificial Sequence
  Synthetic polypeptide representing artificial human antibody CDR-H3 region
AKTYYAKSGDWYFDL

SEQ ID NO: 15568 - protein, 18 aa, Artificial Sequence
  Synthetic polypeptide representing artificial human antibody CDR-H3 region
ARGRWGRPVWRQSYYFDR

SEQ ID NO: 15569 - protein, 20 aa, Artificial Sequence
  Synthetic polypeptide representing artificial human antibody CDR-H3 region
AKDMQFVLFEALISPSYFDH

SEQ ID NO: 15570 - protein, 14 aa, Artificial Sequence
  Synthetic polypeptide representing artificial human antibody CDR-H3 region
VTDLSNNWYRYFDI

SEQ ID NO: 15571 - protein, 10 aa, Artificial Sequence
  Synthetic polypeptide representing artificial human antibody CDR-H3 region
SRSNWWDLDY

SEQ ID NO: 15572 - protein, 11 aa, Artificial Sequence
  Synthetic polypeptide representing artificial human antibody CDR-H3 region
ARDSGVVRFDH

SEQ ID NO: 15573 - protein, 10 aa, Artificial Sequence
  Synthetic polypeptide representing artificial human antibody CDR-H3 region
ARGSTGQFDP

SEQ ID NO: 15574 - protein, 25 aa, Artificial Sequence
  Synthetic polypeptide representing artificial human antibody CDR-H3 region
ARALDGCDPSSGYRGSACYFYGLDV

SEQ ID NO: 15575 - protein, 24 aa, Artificial Sequence
  Synthetic polypeptide representing artificial human antibody CDR-H3 region
ARDQAYCGGDCYWGWTYYYYGMDV

SEQ ID NO: 15576 - protein, 14 aa, Artificial Sequence
  Synthetic polypeptide representing artificial human antibody CDR-H3 region
AKRQWERDWGAFDV

SEQ ID NO: 15577 - protein, 14 aa, Artificial Sequence
  Synthetic polypeptide representing artificial human antibody CDR-H3 region
AREKGLGATTHFDY

SEQ ID NO: 15578 - protein, 15 aa, Artificial Sequence
  Synthetic polypeptide representing artificial human antibody CDR-H3 region
AREGRTWYGQYYLEH

SEQ ID NO: 15579 - protein, 16 aa, Artificial Sequence
  Synthetic polypeptide representing artificial human antibody CDR-H3 region
ARAPPSSTWAGDYFDY

SEQ ID NO: 15580 - protein, 10 aa, Artificial Sequence
  Synthetic polypeptide representing artificial human antibody CDR-H3 region
ARHGDYAFDD

SEQ ID NO: 15581 - protein, 8 aa, Artificial Sequence
  Synthetic polypeptide representing artificial human antibody CDR-H3 region
ASEYTSGL

SEQ ID NO: 15582 - protein, 20 aa, Artificial Sequence
  Synthetic polypeptide representing artificial human antibody CDR-H3 region
AKGGYSSSWQTDFYYYGMDV

SEQ ID NO: 15583 - protein, 10 aa, Artificial Sequence
  Synthetic polypeptide representing artificial human antibody CDR-H3 region
TRENSGGNRD

SEQ ID NO: 15584 - protein, 15 aa, Artificial Sequence
  Synthetic polypeptide representing artificial human antibody CDR-H3 region
VRDRRYLERDWSFDL

SEQ ID NO: 15585 - protein, 15 aa, Artificial Sequence
  Synthetic polypeptide representing artificial human antibody CDR-H3 region
ARASRVSPWFREFDY

SEQ ID NO: 15586 - protein, 10 aa, Artificial Sequence
  Synthetic polypeptide representing artificial human antibody CDR-H3 region
ARHGDYAFDA

SEQ ID NO: 15587 - protein, 7 aa, Artificial Sequence
  Synthetic polypeptide representing artificial human antibody CDR-H3 region
ATDGGTY

SEQ ID NO: 15588 - protein, 25 aa, Artificial Sequence
  Synthetic polypeptide representing artificial human antibody CDR-H3 region
ARQNSLATGDSSSWNHYYYYYYMDV

SEQ ID NO: 15589 - protein, 13 aa, Artificial Sequence
  Synthetic polypeptide representing artificial human antibody CDR-H3 region
ARESPDGWLYFDH

SEQ ID NO: 15590 - protein, 13 aa, Artificial Sequence
  Synthetic polypeptide representing artificial human antibody CDR-H3 region
TNGGGPFLVSGSY

SEQ ID NO: 15591 - protein, 23 aa, Artificial Sequence
  Synthetic polypeptide representing artificial human antibody CDR-H3 region
AQIYIMKDLDWSRKVFWHYHMEV

SEQ ID NO: 15592 - protein, 17 aa, Artificial Sequence
  Synthetic polypeptide representing artificial human antibody CDR-H3 region
ARDAKAAYSGYNYFFDY

SEQ ID NO: 15593 - protein, 18 aa, Artificial Sequence
  Synthetic polypeptide representing artificial human antibody CDR-H3 region
ARDHCSGGSCYLDWYFDL

SEQ ID NO: 15594 - protein, 20 aa, Artificial Sequence
  Synthetic polypeptide representing artificial human antibody CDR-H3 region
ARAGTRRRIFGVVIVEAFDI

SEQ ID NO: 15595 - protein, 21 aa, Artificial Sequence
  Synthetic polypeptide representing artificial human antibody CDR-H3 region
AREKSTTVTTGLPSEYYYMDV

SEQ ID NO: 15596 - protein, 13 aa, Artificial Sequence
  Synthetic polypeptide representing artificial human antibody CDR-H3 region
VKSGYSGYGRLES

SEQ ID NO: 15597 - protein, 21 aa, Artificial Sequence
  Synthetic polypeptide representing artificial human antibody CDR-H3 region
ARDHSNLITIFGVVISHYFDY

SEQ ID NO: 15598 - protein, 20 aa, Artificial Sequence
  Synthetic polypeptide representing artificial human antibody CDR-H3 region
AREAFSITIFGVVTRWGFDP

SEQ ID NO: 15599 - protein, 12 aa, Artificial Sequence
  Synthetic polypeptide representing artificial human antibody CDR-H3 region
VSPSTSGSEFDS

SEQ ID NO: 15600 - protein, 14 aa, Artificial Sequence
  Synthetic polypeptide representing artificial human antibody CDR-H3 region
ARLGGSDVGNWFDF

SEQ ID NO: 15601 - protein, 12 aa, Artificial Sequence
  Synthetic polypeptide representing artificial human antibody CDR-H3 region
ARDCSGGSCLGY

SEQ ID NO: 15602 - protein, 18 aa, Artificial Sequence
  Synthetic polypeptide representing artificial human antibody CDR-H3 region
ARMWIQLWPRNYYYGMDV

SEQ ID NO: 15603 - protein, 14 aa, Artificial Sequence
  Synthetic polypeptide representing artificial human antibody CDR-H3 region
AKETEDHTSSYFDS

SEQ ID NO: 15604 - protein, 16 aa, Artificial Sequence
  Synthetic polypeptide representing artificial human antibody CDR-H3 region
ARDPDSGYDLDDAFDI

SEQ ID NO: 15605 - protein, 12 aa, Artificial Sequence
  Synthetic polypeptide representing artificial human antibody CDR-H3 region
ARHASSAAGIDF

SEQ ID NO: 15606 - protein, 14 aa, Artificial Sequence
  Synthetic polypeptide representing artificial human antibody CDR-H3 region
ARDRCDDVDCYSDY

SEQ ID NO: 15607 - protein, 13 aa, Artificial Sequence
  Synthetic polypeptide representing artificial human antibody CDR-H3 region
ATAFQYQELPISS

SEQ ID NO: 15608 - protein, 14 aa, Artificial Sequence
  Synthetic polypeptide representing artificial human antibody CDR-H3 region
ARGPAASYYYGMDV

SEQ ID NO: 15609 - protein, 23 aa, Artificial Sequence
  Synthetic polypeptide representing artificial human antibody CDR-H3 region
ARRRTGSSHGFIPSLAIGDGFDI

SEQ ID NO: 15610 - protein, 15 aa, Artificial Sequence
  Synthetic polypeptide representing artificial human antibody CDR-H3 region
ATEGVVPVVIYAFDV

SEQ ID NO: 15611 - protein, 22 aa, Artificial Sequence
  Synthetic polypeptide representing artificial human antibody CDR-H3 region
AKAHYYYDSSGYYRGYYYGMDV

SEQ ID NO: 15612 - protein, 18 aa, Artificial Sequence
  Synthetic polypeptide representing artificial human antibody CDR-H3 region
ARDRRGYCSAGPCYRIDS

SEQ ID NO: 15613 - protein, 13 aa, Artificial Sequence
  Synthetic polypeptide representing artificial human antibody CDR-H3 region
ARGYSSGWWYFDL

SEQ ID NO: 15614 - protein, 15 aa, Artificial Sequence
  Synthetic polypeptide representing artificial human antibody CDR-H3 region
ARATTGTSNPYNFDY

SEQ ID NO: 15615 - protein, 17 aa, Artificial Sequence
  Synthetic polypeptide representing artificial human antibody CDR-H3 region
ARGDYVWGSDRYDDMDV

SEQ ID NO: 15616 - protein, 17 aa, Artificial Sequence
  Synthetic polypeptide representing artificial human antibody CDR-H3 region
ARDPNVDSYGYVSWFDP

SEQ ID NO: 15617 - protein, 9 aa, Artificial Sequence
  Synthetic polypeptide representing artificial human antibody CDR-H3 region
ARGGDGYNP

SEQ ID NO: 15618 - protein, 15 aa, Artificial Sequence
  Synthetic polypeptide representing artificial human antibody CDR-H3 region
ARVCDGGSSWDAFDI

SEQ ID NO: 15619 - protein, 19 aa, Artificial Sequence
  Synthetic polypeptide representing artificial human antibody CDR-H3 region
TTLLTDYFDASGARHYFDY

SEQ ID NO: 15620 - protein, 22 aa, Artificial Sequence
  Synthetic polypeptide representing artificial human antibody CDR-H3 region
ARGGYIAVAGTGLYYYYYGMDV

SEQ ID NO: 15621 - protein, 15 aa, Artificial Sequence
  Synthetic polypeptide representing artificial human antibody CDR-H3 region
ARHFLRGKNPDYFDY

SEQ ID NO: 15622 - protein, 14 aa, Artificial Sequence
  Synthetic polypeptide representing artificial human antibody CDR-H3 region
ARTSRVQTSYDFDY

SEQ ID NO: 15623 - protein, 25 aa, Artificial Sequence
  Synthetic polypeptide representing artificial human antibody CDR-H3 region
ARLGHLSSWYENLGGPSYYYYGMDV

SEQ ID NO: 15624 - protein, 21 aa, Artificial Sequence
  Synthetic polypeptide representing artificial human antibody CDR-H3 region
AREGPTQGFYGSGSYNNGLDY

SEQ ID NO: 15625 - protein, 14 aa, Artificial Sequence
  Synthetic polypeptide representing artificial human antibody CDR-H3 region
AGGDYYGSGSWHDY

SEQ ID NO: 15626 - protein, 10 aa, Artificial Sequence
  Synthetic polypeptide representing artificial human antibody CDR-H3 region
ARSLTRYFDY

SEQ ID NO: 15627 - protein, 14 aa, Artificial Sequence
  Synthetic polypeptide representing artificial human antibody CDR-H3 region
ARGGVTWIELWSDF

SEQ ID NO: 15628 - protein, 18 aa, Artificial Sequence
  Synthetic polypeptide representing artificial human antibody CDR-H3 region
ARHGASSYYEGPQMYFDN

SEQ ID NO: 15629 - protein, 14 aa, Artificial Sequence
  Synthetic polypeptide representing artificial human antibody CDR-H3 region
ARALQWGLPLTWVS

SEQ ID NO: 15630 - protein, 9 aa, Artificial Sequence
  Synthetic polypeptide representing artificial human antibody CDR-H3 region
TRAASGWPN

SEQ ID NO: 15631 - protein, 10 aa, Artificial Sequence
  Synthetic polypeptide representing artificial human antibody CDR-H3 region
VKLGRQSNDY

SEQ ID NO: 15632 - protein, 13 aa, Artificial Sequence
  Synthetic polypeptide representing artificial human antibody CDR-H3 region
AGPFMRLEHIWGH

SEQ ID NO: 15633 - protein, 14 aa, Artificial Sequence
  Synthetic polypeptide representing artificial human antibody CDR-H3 region
ASDRYWYDSSGYDY

SEQ ID NO: 15634 - protein, 15 aa, Artificial Sequence
  Synthetic polypeptide representing artificial human antibody CDR-H3 region
ARGRWLQSNYFAMDV

SEQ ID NO: 15635 - protein, 24 aa, Artificial Sequence
  Synthetic polypeptide representing artificial human antibody CDR-H3 region
ARDNPELQYFDWLRSGYSHTGVDV

SEQ ID NO: 15636 - protein, 24 aa, Artificial Sequence
  Synthetic polypeptide representing artificial human antibody CDR-H3 region
ARDNPELQYFDWLRSDYSHTGVDV

SEQ ID NO: 15637 - protein, 13 aa, Artificial Sequence
  Synthetic polypeptide representing artificial human antibody CDR-H3 region
AKGLTPQMNFFDS

SEQ ID NO: 15638 - protein, 11 aa, Artificial Sequence
  Synthetic polypeptide representing artificial human antibody CDR-H3 region
AHRPGLRPFDY

SEQ ID NO: 15639 - protein, 8 aa, Artificial Sequence
  Synthetic polypeptide representing artificial human antibody CDR-H3 region
VKGAWCDF

SEQ ID NO: 15640 - protein, 8 aa, Artificial Sequence
  Synthetic polypeptide representing artificial human antibody CDR-H3 region
VKGAWCDY

SEQ ID NO: 15641 - protein, 14 aa, Artificial Sequence
  Synthetic polypeptide representing artificial human antibody CDR-H3 region
ARGLTAGATSGFDP

SEQ ID NO: 15642 - protein, 11 aa, Artificial Sequence
  Synthetic polypeptide representing artificial human antibody CDR-H3 region
ASRAVARNLEY

SEQ ID NO: 15643 - protein, 14 aa, Artificial Sequence
  Synthetic polypeptide representing artificial human antibody CDR-H3 region
AKETSDHTSSYFDS

SEQ ID NO: 15644 - protein, 16 aa, Artificial Sequence
  Synthetic polypeptide representing artificial human antibody CDR-H3 region
ARGGDHVLHDGWFFDL

SEQ ID NO: 15645 - protein, 20 aa, Artificial Sequence
  Synthetic polypeptide representing artificial human antibody CDR-H3 region
ARHLRGFCSSGSCYLYYFDQ

SEQ ID NO: 15646 - protein, 17 aa, Artificial Sequence
  Synthetic polypeptide representing artificial human antibody CDR-H3 region
ATVKGTVTTLGYYGMDV

SEQ ID NO: 15647 - protein, 22 aa, Artificial Sequence
  Synthetic polypeptide representing artificial human antibody CDR-H3 region
ARHGMGEWELLSRFRSRGYFDY

SEQ ID NO: 15648 - protein, 16 aa, Artificial Sequence
  Synthetic polypeptide representing artificial human antibody CDR-H3 region
ARDLLLWFGETPGKDY

SEQ ID NO: 15649 - protein, 13 aa, Artificial Sequence
  Synthetic polypeptide representing artificial human antibody CDR-H3 region
SRGQHEEWPVGDY

SEQ ID NO: 15650 - protein, 16 aa, Artificial Sequence
  Synthetic polypeptide representing artificial human antibody CDR-H3 region
ARFTGWTSTIKDCLDL

SEQ ID NO: 15651 - protein, 23 aa, Artificial Sequence
  Synthetic polypeptide representing artificial human antibody CDR-H3 region
ARGGGGFCTTTTCYELRFNYYDY

SEQ ID NO: 15652 - protein, 21 aa, Artificial Sequence
  Synthetic polypeptide representing artificial human antibody CDR-H3 region
VTDREVPGTVMITPANSAFDI

SEQ ID NO: 15653 - protein, 10 aa, Artificial Sequence
  Synthetic polypeptide representing artificial human antibody CDR-H3 region
ARGPHGYFDF

SEQ ID NO: 15654 - protein, 17 aa, Artificial Sequence
  Synthetic polypeptide representing artificial human antibody CDR-H3 region
AKDLGYGGNYGTGAFDI

SEQ ID NO: 15655 - protein, 26 aa, Artificial Sequence
  Synthetic polypeptide representing artificial human antibody CDR-H3 region
ARDHGRERIPMVRGEPDIDFYYGMDV

SEQ ID NO: 15656 - protein, 18 aa, Artificial Sequence
  Synthetic polypeptide representing artificial human antibody CDR-H3 region
ARGGIAVTGTRYYYSMDV

SEQ ID NO: 15657 - protein, 18 aa, Artificial Sequence
  Synthetic polypeptide representing artificial human antibody CDR-H3 region
ARGNYFEAASPMAGYFDP

SEQ ID NO: 15658 - protein, 15 aa, Artificial Sequence
  Synthetic polypeptide representing artificial human antibody CDR-H3 region
ARYHCPADICDGFDL

SEQ ID NO: 15659 - protein, 26 aa, Artificial Sequence
  Synthetic polypeptide representing artificial human antibody CDR-H3 region
TRDQTYLKGRHHAVKCSGGTCGVPGH

SEQ ID NO: 15660 - protein, 19 aa, Artificial Sequence
  Synthetic polypeptide representing artificial human antibody CDR-H3 region
AKDQYVGNPRASYYYGMDV

SEQ ID NO: 15661 - protein, 11 aa, Artificial Sequence
  Synthetic polypeptide representing artificial human antibody CDR-H3 region
ARGGSGDGMNV

SEQ ID NO: 15662 - protein, 13 aa, Artificial Sequence
  Synthetic polypeptide representing artificial human antibody CDR-H3 region
ARDVPETGYGMDV

SEQ ID NO: 15663 - protein, 17 aa, Artificial Sequence
  Synthetic polypeptide representing artificial human antibody CDR-H3 region
ARGPSAVGKDYYFYMDL

SEQ ID NO: 15664 - protein, 14 aa, Artificial Sequence
  Synthetic polypeptide representing artificial human antibody CDR-H3 region
ARVGGILVWGSFDF

SEQ ID NO: 15665 - protein, 15 aa, Artificial Sequence
  Synthetic polypeptide representing artificial human antibody CDR-H3 region
AKYWSGGSRPDAFGI

SEQ ID NO: 15666 - protein, 16 aa, Artificial Sequence
  Synthetic polypeptide representing artificial human antibody CDR-H3 region
ARDVVEVTAAWFYFDY

SEQ ID NO: 15667 - protein, 10 aa, Artificial Sequence
  Synthetic polypeptide representing artificial human antibody CDR-H3 region
ATDSQGYFDN

SEQ ID NO: 15668 - protein, 14 aa, Artificial Sequence
  Synthetic polypeptide representing artificial human antibody CDR-H3 region
GRPQSVAHRDRFGI

SEQ ID NO: 15669 - protein, 11 aa, Artificial Sequence
  Synthetic polypeptide representing artificial human antibody CDR-H3 region
ARHDGSYHFDY

SEQ ID NO: 15670 - protein, 19 aa, Artificial Sequence
  Synthetic polypeptide representing artificial human antibody CDR-H3 region
TRETYPPVGGTHHFYGLDV

SEQ ID NO: 15671 - protein, 16 aa, Artificial Sequence
  Synthetic polypeptide representing artificial human antibody CDR-H3 region
ASKETLRDFSYYYMDV

SEQ ID NO: 15672 - protein, 16 aa, Artificial Sequence
  Synthetic polypeptide representing artificial human antibody CDR-H3 region
TTAYCGGDCYPPFFDY

SEQ ID NO: 15673 - protein, 18 aa, Artificial Sequence
  Synthetic polypeptide representing artificial human antibody CDR-H3 region
ARRVRSDPVISSDNWLGP

SEQ ID NO: 15674 - protein, 11 aa, Artificial Sequence
  Synthetic polypeptide representing artificial human antibody CDR-H3 region
VRQKGAVAPDF

SEQ ID NO: 15675 - protein, 15 aa, Artificial Sequence
  Synthetic polypeptide representing artificial human antibody CDR-H3 region
ASPGGQCNGGTCYPY

SEQ ID NO: 15676 - protein, 14 aa, Artificial Sequence
  Synthetic polypeptide representing artificial human antibody CDR-H3 region
AREGIVGATTGFDP

SEQ ID NO: 15677 - protein, 18 aa, Artificial Sequence
  Synthetic polypeptide representing artificial human antibody CDR-H3 region
ARNHDYYDSSGYFLLVDY

SEQ ID NO: 15678 - protein, 7 aa, Artificial Sequence
  Synthetic polypeptide representing artificial human antibody CDR-H3 region
ARGTLGH

SEQ ID NO: 15679 - protein, 14 aa, Artificial Sequence
  Synthetic polypeptide representing artificial human antibody CDR-H3 region
ARAMGFLAHDWFDP

SEQ ID NO: 15680 - protein, 12 aa, Artificial Sequence
  Synthetic polypeptide representing artificial human antibody CDR-H3 region
AREMSSITTTGH

SEQ ID NO: 15681 - protein, 17 aa, Artificial Sequence
  Synthetic polypeptide representing artificial human antibody CDR-H3 region
SGYCRGGSCAGHGSFDF

SEQ ID NO: 15682 - protein, 15 aa, Artificial Sequence
  Synthetic polypeptide representing artificial human antibody CDR-H3 region
ARHGLRFGAFDPFDI

SEQ ID NO: 15683 - protein, 19 aa, Artificial Sequence
  Synthetic polypeptide representing artificial human antibody CDR-H3 region
ARAEGYSGHNYVYYYGMDV

SEQ ID NO: 15684 - protein, 11 aa, Artificial Sequence
  Synthetic polypeptide representing artificial human antibody CDR-H3 region
TSGPGSFQIDY

SEQ ID NO: 15685 - protein, 22 aa, Artificial Sequence
  Synthetic polypeptide representing artificial human antibody CDR-H3 region
ARGKRGAVAGILLPYYYYGMDV

SEQ ID NO: 15686 - protein, 15 aa, Artificial Sequence
  Synthetic polypeptide representing artificial human antibody CDR-H3 region
VRGTVRGIITYSFHY

SEQ ID NO: 15687 - protein, 21 aa, Artificial Sequence
  Synthetic polypeptide representing artificial human antibody CDR-H3 region
ARRQANHIVLVIAILGGWFDP

SEQ ID NO: 15688 - protein, 19 aa, Artificial Sequence
  Synthetic polypeptide representing artificial human antibody CDR-H3 region
ARRARESSQQKLYWYYMDV

SEQ ID NO: 15689 - protein, 15 aa, Artificial Sequence
  Synthetic polypeptide representing artificial human antibody CDR-H3 region
MYYCALQHSSGYWTH

SEQ ID NO: 15690 - protein, 13 aa, Artificial Sequence
  Synthetic polypeptide representing artificial human antibody CDR-H3 region
ARGQHQEWPVGDY

SEQ ID NO: 15691 - protein, 8 aa, Artificial Sequence
  Synthetic polypeptide representing artificial human antibody CDR-H3 region
AQLTTVTT

SEQ ID NO: 15692 - protein, 19 aa, Artificial Sequence
  Synthetic polypeptide representing artificial human antibody CDR-H3 region
AKTYYNSLTDYYNVYLMDV

SEQ ID NO: 15693 - protein, 12 aa, Artificial Sequence
  Synthetic polypeptide representing artificial human antibody CDR-H3 region
AREGGLNTIADY

SEQ ID NO: 15694 - protein, 20 aa, Artificial Sequence
  Synthetic polypeptide representing artificial human antibody CDR-H3 region
ARDALRYFDGFGWVEGWFDP

SEQ ID NO: 15695 - protein, 13 aa, Artificial Sequence
  Synthetic polypeptide representing artificial human antibody CDR-H3 region
ARGQYQTWPVGDY

SEQ ID NO: 15696 - protein, 12 aa, Artificial Sequence
  Synthetic polypeptide representing artificial human antibody CDR-H3 region
ARARGNSCYNDY

SEQ ID NO: 15697 - protein, 18 aa, Artificial Sequence
  Synthetic polypeptide representing artificial human antibody CDR-H3 region
ARPGGYCRGNNCHDAFDT

SEQ ID NO: 15698 - protein, 19 aa, Artificial Sequence
  Synthetic polypeptide representing artificial human antibody CDR-H3 region
TRETRPPVGGTHHFYGLDV

SEQ ID NO: 15699 - protein, 20 aa, Artificial Sequence
  Synthetic polypeptide representing artificial human antibody CDR-H3 region
ARILFESEWLVQYNYYGMDV

SEQ ID NO: 15700 - protein, 11 aa, Artificial Sequence
  Synthetic polypeptide representing artificial human antibody CDR-H3 region
ARQVGWGRFDF

SEQ ID NO: 15701 - protein, 18 aa, Artificial Sequence
  Synthetic polypeptide representing artificial human antibody CDR-H3 region
ATDIGSRSGGYLSRETDY

SEQ ID NO: 15702 - protein, 17 aa, Artificial Sequence
  Synthetic polypeptide representing artificial human antibody CDR-H3 region
AKDWENFQSCGSDCLQS

SEQ ID NO: 15703 - protein, 19 aa, Artificial Sequence
  Synthetic polypeptide representing artificial human antibody CDR-H3 region
ARGVIYGSGSYLAPSWFDS

SEQ ID NO: 15704 - protein, 12 aa, Artificial Sequence
  Synthetic polypeptide representing artificial human antibody CDR-H3 region
ARGGDFGDYGNY

SEQ ID NO: 15705 - protein, 14 aa, Artificial Sequence
  Synthetic polypeptide representing artificial human antibody CDR-H3 region
ARGTVRAPGAPFDE

SEQ ID NO: 15706 - protein, 11 aa, Artificial Sequence
  Synthetic polypeptide representing artificial human antibody CDR-H3 region
AEGGSGSYFDY

SEQ ID NO: 15707 - protein, 20 aa, Artificial Sequence
  Synthetic polypeptide representing artificial human antibody CDR-H3 region
AREHLGYCSSTSCYTGAFDI

SEQ ID NO: 15708 - protein, 19 aa, Artificial Sequence
  Synthetic polypeptide representing artificial human antibody CDR-H3 region
ARANYWVVVPAAIHNWFDP

SEQ ID NO: 15709 - protein, 22 aa, Artificial Sequence
  Synthetic polypeptide representing artificial human antibody CDR-H3 region
ARAPMPSITIFGVVITHWYFDL

SEQ ID NO: 15710 - protein, 14 aa, Artificial Sequence
  Synthetic polypeptide representing artificial human antibody CDR-H3 region
ARSSSGSYLSAFDI

SEQ ID NO: 15711 - protein, 18 aa, Artificial Sequence
  Synthetic polypeptide representing artificial human antibody CDR-H3 region
TTDRVYDYVWGSYRPSDY

SEQ ID NO: 15712 - protein, 27 aa, Artificial Sequence
  Synthetic polypeptide representing artificial human antibody CDR-H3 region
VRGSGGHDFWTGFIQNRPYYHYYYMDA

SEQ ID NO: 15713 - protein, 17 aa, Artificial Sequence
  Synthetic polypeptide representing artificial human antibody CDR-H3 region
ARDTRGYSYGLRGGMDV

SEQ ID NO: 15714 - protein, 16 aa, Artificial Sequence
  Synthetic polypeptide representing artificial human antibody CDR-H3 region
ASYSGYDYGPPYGMDV

SEQ ID NO: 15715 - protein, 16 aa, Artificial Sequence
  Synthetic polypeptide representing artificial human antibody CDR-H3 region
ASGDYGSGNYEYYFDL

SEQ ID NO: 15716 - protein, 21 aa, Artificial Sequence
  Synthetic polypeptide representing artificial human antibody CDR-H3 region
ARFSELLWFGELTSPYYGMDV

SEQ ID NO: 15717 - protein, 14 aa, Artificial Sequence
  Synthetic polypeptide representing artificial human antibody CDR-H3 region
ARHVRGYSYGSLDY

SEQ ID NO: 15718 - protein, 23 aa, Artificial Sequence
  Synthetic polypeptide representing artificial human antibody CDR-H3 region
ARIVFDPLPYSSNWYRDYYGLDV

SEQ ID NO: 15719 - protein, 19 aa, Artificial Sequence
  Synthetic polypeptide representing artificial human antibody CDR-H3 region
ARLSIGYSSGWYYYYGMDV

SEQ ID NO: 15720 - protein, 17 aa, Artificial Sequence
  Synthetic polypeptide representing artificial human antibody CDR-H3 region
ARQGEMWELPPSDWFDP

SEQ ID NO: 15721 - protein, 12 aa, Artificial Sequence
  Synthetic polypeptide representing artificial human antibody CDR-H3 region
ARGGDSSKFFDY

SEQ ID NO: 15722 - protein, 19 aa, Artificial Sequence
  Synthetic polypeptide representing artificial human antibody CDR-H3 region
AHRHYYDSSGYYYLEAFDI

SEQ ID NO: 15723 - protein, 15 aa, Artificial Sequence
  Synthetic polypeptide representing artificial human antibody CDR-H3 region
ALGGDYTSASRYFDY

SEQ ID NO: 15724 - protein, 16 aa, Artificial Sequence
  Synthetic polypeptide representing artificial human antibody CDR-H3 region
ATLGNCGDTWCHTFDY

SEQ ID NO: 15725 - protein, 14 aa, Artificial Sequence
  Synthetic polypeptide representing artificial human antibody CDR-H3 region
AKTYSGSYFDAFDI

SEQ ID NO: 15726 - protein, 27 aa, Artificial Sequence
  Synthetic polypeptide representing artificial human antibody CDR-H3 region
ARGSGGHDFWTGFIQNRPYYHYYYLDV

SEQ ID NO: 15727 - protein, 12 aa, Artificial Sequence
  Synthetic polypeptide representing artificial human antibody CDR-H3 region
ARESRVWGYFDY

SEQ ID NO: 15728 - protein, 21 aa, Artificial Sequence
  Synthetic polypeptide representing artificial human antibody CDR-H3 region
AKEGAKGYSSGWIYYYYGMDV

SEQ ID NO: 15729 - protein, 13 aa, Artificial Sequence
  Synthetic polypeptide representing artificial human antibody CDR-H3 region
ARDDMTTYDAFDI

SEQ ID NO: 15730 - protein, 14 aa, Artificial Sequence
  Synthetic polypeptide representing artificial human antibody CDR-H3 region
ASALTYSSSWGFDY

SEQ ID NO: 15731 - protein, 21 aa, Artificial Sequence
  Synthetic polypeptide representing artificial human antibody CDR-H3 region
ARGRYDILTGYYSYYYYGMDV

SEQ ID NO: 15732 - protein, 16 aa, Artificial Sequence
  Synthetic polypeptide representing artificial human antibody CDR-H3 region
AEGNLFYSGWYNWLDP

SEQ ID NO: 15733 - protein, 17 aa, Artificial Sequence
  Synthetic polypeptide representing artificial human antibody CDR-H3 region
AREQVGATNQGDFYFDY

SEQ ID NO: 15734 - protein, 21 aa, Artificial Sequence
  Synthetic polypeptide representing artificial human antibody CDR-H3 region
ARVTSGLYGSGSYSPVNWFDP

SEQ ID NO: 15735 - protein, 11 aa, Artificial Sequence
  Synthetic polypeptide representing artificial human antibody CDR-H3 region
VRVALDGHLDL

SEQ ID NO: 15736 - protein, 13 aa, Artificial Sequence
  Synthetic polypeptide representing artificial human antibody CDR-H3 region
ARHFEHDSSVLQH

SEQ ID NO: 15737 - protein, 15 aa, Artificial Sequence
  Synthetic polypeptide representing artificial human antibody CDR-H3 region
AKGDCTGDCYYYFDF

SEQ ID NO: 15738 - protein, 19 aa, Artificial Sequence
  Synthetic polypeptide representing artificial human antibody CDR-H3 region
ARLPVEGSSSIYYYYGMDV

SEQ ID NO: 15739 - protein, 17 aa, Artificial Sequence
  Synthetic polypeptide representing artificial human antibody CDR-H3 region
AKAMSGTLTYYYYGMDV

SEQ ID NO: 15740 - protein, 14 aa, Artificial Sequence
  Synthetic polypeptide representing artificial human antibody CDR-H3 region
ALLTGTHYYYGMDV

SEQ ID NO: 15741 - protein, 15 aa, Artificial Sequence
  Synthetic polypeptide representing artificial human antibody CDR-H3 region
ARDRGAGGHDWGFDY

SEQ ID NO: 15742 - protein, 15 aa, Artificial Sequence
  Synthetic polypeptide representing artificial human antibody CDR-H3 region
ASNYAYNWNHKHFDY

SEQ ID NO: 15743 - protein, 13 aa, Artificial Sequence
  Synthetic polypeptide representing artificial human antibody CDR-H3 region
ARGSNIVDWYFDL

SEQ ID NO: 15744 - protein, 14 aa, Artificial Sequence
  Synthetic polypeptide representing artificial human antibody CDR-H3 region
ARYDSSGYFNWFDP

SEQ ID NO: 15745 - protein, 13 aa, Artificial Sequence
  Synthetic polypeptide representing artificial human antibody CDR-H3 region
AHRPAAILGWFDP

SEQ ID NO: 15746 - protein, 23 aa, Artificial Sequence
  Synthetic polypeptide representing artificial human antibody CDR-H3 region
ARNPVRGFGELNPDGYYYYGMDV

SEQ ID NO: 15747 - protein, 14 aa, Artificial Sequence
  Synthetic polypeptide representing artificial human antibody CDR-H3 region
ARINWNEGYNYIDV

SEQ ID NO: 15748 - protein, 27 aa, Artificial Sequence
  Synthetic polypeptide representing artificial human antibody CDR-H3 region
VRARRSRSTSSWFQLSPPNYYYYYMDV

SEQ ID NO: 15749 - protein, 12 aa, Artificial Sequence
  Synthetic polypeptide representing artificial human antibody CDR-H3 region
AKASGNSADFDY

SEQ ID NO: 15750 - protein, 28 aa, Artificial Sequence
  Synthetic polypeptide representing artificial human antibody CDR-H3 region
ARDSLAGDIVVVPAAIGISPLPHYGMDV

SEQ ID NO: 15751 - protein, 20 aa, Artificial Sequence
  Synthetic polypeptide representing artificial human antibody CDR-H3 region
ARGYDILTGYYNVYYYGMDV

SEQ ID NO: 15752 - protein, 23 aa, Artificial Sequence
  Synthetic polypeptide representing artificial human antibody CDR-H3 region
ARDFARGSSWYGGSEDYYYGLDV

SEQ ID NO: 15753 - protein, 12 aa, Artificial Sequence
  Synthetic polypeptide representing artificial human antibody CDR-H3 region
ARALSGYNFFDF

SEQ ID NO: 15754 - protein, 14 aa, Artificial Sequence
  Synthetic polypeptide representing artificial human antibody CDR-H3 region
AKCTSFCQYKWFEA

SEQ ID NO: 15755 - protein, 11 aa, Artificial Sequence
  Synthetic polypeptide representing artificial human antibody CDR-H3 region
ARAGSYYPFDY

SEQ ID NO: 15756 - protein, 27 aa, Artificial Sequence
  Synthetic polypeptide representing artificial human antibody CDR-H3 region
ARDLEAPVSYDFWSVMEGGYYYYYMDV

SEQ ID NO: 15757 - protein, 18 aa, Artificial Sequence
  Synthetic polypeptide representing artificial human antibody CDR-H3 region
AKVYSSSWWGVAVAGYDY

SEQ ID NO: 15758 - protein, 13 aa, Artificial Sequence
  Synthetic polypeptide representing artificial human antibody CDR-H3 region
AKVEGATSTGFDY

SEQ ID NO: 15759 - protein, 20 aa, Artificial Sequence
  Synthetic polypeptide representing artificial human antibody CDR-H3 region
AKVNDFWSGYPYYYYYYMDV

SEQ ID NO: 15760 - protein, 24 aa, Artificial Sequence
  Synthetic polypeptide representing artificial human antibody CDR-H3 region
AREPPRGYCSSTSWARLCYYGMDV

SEQ ID NO: 15761 - protein, 13 aa, Artificial Sequence
  Synthetic polypeptide representing artificial human antibody CDR-H3 region
ATASTSWRHWFDP

SEQ ID NO: 15762 - protein, 20 aa, Artificial Sequence
  Synthetic polypeptide representing artificial human antibody CDR-H3 region
ARDQRGDYDILTSYYYGMDV

SEQ ID NO: 15763 - protein, 13 aa, Artificial Sequence
  Synthetic polypeptide representing artificial human antibody CDR-H3 region
AREEFHANKAFDY

SEQ ID NO: 15764 - protein, 14 aa, Artificial Sequence
  Synthetic polypeptide representing artificial human antibody CDR-H3 region
AKDLGGYYGSGRDY

SEQ ID NO: 15765 - protein, 17 aa, Artificial Sequence
  Synthetic polypeptide representing artificial human antibody CDR-H3 region
AREPHSSSWYIKYYFDY

SEQ ID NO: 15766 - protein, 22 aa, Artificial Sequence
  Synthetic polypeptide representing artificial human antibody CDR-H3 region
ARDSAGRYDILTGYIKDNWFDP

SEQ ID NO: 15767 - protein, 21 aa, Artificial Sequence
  Synthetic polypeptide representing artificial human antibody CDR-H3 region
ARQRDTYYHGSQTYFLDYFDF

SEQ ID NO: 15768 - protein, 17 aa, Artificial Sequence
  Synthetic polypeptide representing artificial human antibody CDR-H3 region
ARNYYDSSGYYFYGMDV

SEQ ID NO: 15769 - protein, 21 aa, Artificial Sequence
  Synthetic polypeptide representing artificial human antibody CDR-H3 region
ARDNFQPLGYCSSTSCYGLDY

SEQ ID NO: 15770 - protein, 24 aa, Artificial Sequence
  Synthetic polypeptide representing artificial human antibody CDR-H3 region
ARDGGGRYCSGGSCYVYYYYGMDV

SEQ ID NO: 15771 - protein, 14 aa, Artificial Sequence
  Synthetic polypeptide representing artificial human antibody CDR-H3 region
ARDRGGYPLYVFDL

SEQ ID NO: 15772 - protein, 13 aa, Artificial Sequence
  Synthetic polypeptide representing artificial human antibody CDR-H3 region
ARGASNSNNAFDT

SEQ ID NO: 15773 - protein, 11 aa, Artificial Sequence
  Synthetic polypeptide representing artificial human antibody CDR-H3 region
MKGGWGTVIDH

SEQ ID NO: 15774 - protein, 21 aa, Artificial Sequence
  Synthetic polypeptide representing artificial human antibody CDR-H3 region
TTDGLTLATFCSGENCPWNIY

SEQ ID NO: 15775 - protein, 18 aa, Artificial Sequence
  Synthetic polypeptide representing artificial human antibody CDR-H3 region
ARDGMGVLGITPSNWFDP

SEQ ID NO: 15776 - protein, 13 aa, Artificial Sequence
  Synthetic polypeptide representing artificial human antibody CDR-H3 region
AREVVIANKAFDY

SEQ ID NO: 15777 - protein, 16 aa, Artificial Sequence
  Synthetic polypeptide representing artificial human antibody CDR-H3 region
VKNRYSGGDSRDYFDS

SEQ ID NO: 15778 - protein, 15 aa, Artificial Sequence
  Synthetic polypeptide representing artificial human antibody CDR-H3 region
ARDEYYDILTGYYSY

SEQ ID NO: 15779 - protein, 13 aa, Artificial Sequence
  Synthetic polypeptide representing artificial human antibody CDR-H3 region
ARSIVGATWYFDY

SEQ ID NO: 15780 - protein, 10 aa, Artificial Sequence
  Synthetic polypeptide representing artificial human antibody CDR-H3 region
ARDIGGYFDY

SEQ ID NO: 15781 - protein, 26 aa, Artificial Sequence
  Synthetic polypeptide representing artificial human antibody CDR-H3 region
ARMMAGGGTNMVRGRLIDFYYHYVDV

SEQ ID NO: 15782 - protein, 21 aa, Artificial Sequence
  Synthetic polypeptide representing artificial human antibody CDR-H3 region
ARDRSGGSGNYLDLSTYYFDF

SEQ ID NO: 15783 - protein, 21 aa, Artificial Sequence
  Synthetic polypeptide representing artificial human antibody CDR-H3 region
ARQRDTYYYGSQNYFLDYFDH

SEQ ID NO: 15784 - protein, 14 aa, Artificial Sequence
  Synthetic polypeptide representing artificial human antibody CDR-H3 region
ASPPYCSGGSCRDY

SEQ ID NO: 15785 - protein, 16 aa, Artificial Sequence
  Synthetic polypeptide representing artificial human antibody CDR-H3 region
VKEARDAYYAVDYFDY

SEQ ID NO: 15786 - protein, 15 aa, Artificial Sequence
  Synthetic polypeptide representing artificial human antibody CDR-H3 region
ARSYSGYDSDDAFDI

SEQ ID NO: 15787 - protein, 14 aa, Artificial Sequence
  Synthetic polypeptide representing artificial human antibody CDR-H3 region
APSFGVGSGFDMDV

SEQ ID NO: 15788 - protein, 17 aa, Artificial Sequence
  Synthetic polypeptide representing artificial human antibody CDR-H3 region
ARDTSDCSGGSCYWFDY

SEQ ID NO: 15789 - protein, 19 aa, Artificial Sequence
  Synthetic polypeptide representing artificial human antibody CDR-H3 region
TTDPQKVYCSSTSCYIWDY

SEQ ID NO: 15790 - protein, 14 aa, Artificial Sequence
  Synthetic polypeptide representing artificial human antibody CDR-H3 region
ARGGYTAGPNAFDI

SEQ ID NO: 15791 - protein, 26 aa, Artificial Sequence
  Synthetic polypeptide representing artificial human antibody CDR-H3 region
ARDITYYDILTGYFQPAYYYYYGMDV

SEQ ID NO: 15792 - protein, 9 aa, Artificial Sequence
  Synthetic polypeptide representing artificial human antibody CDR-H3 region
ARGGPWFDP

SEQ ID NO: 15793 - protein, 15 aa, Artificial Sequence
  Synthetic polypeptide representing artificial human antibody CDR-H3 region
AKGELPAAMTVGFDY

SEQ ID NO: 15794 - protein, 14 aa, Artificial Sequence
  Synthetic polypeptide representing artificial human antibody CDR-H3 region
ARGGGRIAATVVGY

SEQ ID NO: 15795 - protein, 20 aa, Artificial Sequence
  Synthetic polypeptide representing artificial human antibody CDR-H3 region
AKDGIKSVRGAVYYNYGLNV

SEQ ID NO: 15796 - protein, 30 aa, Artificial Sequence
  Synthetic polypeptide representing artificial human antibody CDR-H3 region
ARSSTRAPSTIDCSGGSCYPKPLYYYGMDV

SEQ ID NO: 15797 - protein, 18 aa, Artificial Sequence
  Synthetic polypeptide representing artificial human antibody CDR-H3 region
ARFPYSSSSDPYYYYMDV

SEQ ID NO: 15798 - protein, 21 aa, Artificial Sequence
  Synthetic polypeptide representing artificial human antibody CDR-H3 region
ARQRGTYYYGSGTSYLDYFDY

SEQ ID NO: 15799 - protein, 17 aa, Artificial Sequence
  Synthetic polypeptide representing artificial human antibody CDR-H3 region
ARGSGRQLYYYFSYMDV

SEQ ID NO: 15800 - protein, 16 aa, Artificial Sequence
  Synthetic polypeptide representing artificial human antibody CDR-H3 region
ARGGWTRNYYYYYMDV

SEQ ID NO: 15801 - protein, 13 aa, Artificial Sequence
  Synthetic polypeptide representing artificial human antibody CDR-H3 region
ARSGYSSSWHFDY

SEQ ID NO: 15802 - protein, 17 aa, Artificial Sequence
  Synthetic polypeptide representing artificial human antibody CDR-H3 region
ARDLPVVGATASDAFDI

SEQ ID NO: 15803 - protein, 21 aa, Artificial Sequence
  Synthetic polypeptide representing artificial human antibody CDR-H3 region
ARQRDTYYHGSQRYFLDYFDY

SEQ ID NO: 15804 - protein, 18 aa, Artificial Sequence
  Synthetic polypeptide representing artificial human antibody CDR-H3 region
AKDRLGYCSSTSCHRLDP

SEQ ID NO: 15805 - protein, 23 aa, Artificial Sequence
  Synthetic polypeptide representing artificial human antibody CDR-H3 region
ATPLYCSGGSCYRYGEYYYGMDV

SEQ ID NO: 15806 - protein, 16 aa, Artificial Sequence
  Synthetic polypeptide representing artificial human antibody CDR-H3 region
GKASPSVDIAAAGIDY

SEQ ID NO: 15807 - protein, 14 aa, Artificial Sequence
  Synthetic polypeptide representing artificial human antibody CDR-H3 region
ATSGYFQDISGDDF

SEQ ID NO: 15808 - protein, 20 aa, Artificial Sequence
  Synthetic polypeptide representing artificial human antibody CDR-H3 region
ARQVDGDYVGDWDYYYGMDV

SEQ ID NO: 15809 - protein, 22 aa, Artificial Sequence
  Synthetic polypeptide representing artificial human antibody CDR-H3 region
ARETYYYGSGSYPQYYYYGMDV

SEQ ID NO: 15810 - protein, 21 aa, Artificial Sequence
  Synthetic polypeptide representing artificial human antibody CDR-H3 region
ARQRDTYYHGSQKYFLDFFDY

SEQ ID NO: 15811 - protein, 23 aa, Artificial Sequence
  Synthetic polypeptide representing artificial human antibody CDR-H3 region
ARTTYFSDDNGHSRYYYYYYMDV

SEQ ID NO: 15812 - protein, 22 aa, Artificial Sequence
  Synthetic polypeptide representing artificial human antibody CDR-H3 region
TTGRGSGNFFGGEYYYYYGMDV

SEQ ID NO: 15813 - protein, 10 aa, Artificial Sequence
  Synthetic polypeptide representing artificial human antibody CDR-H3 region
ARWEGGGMDV

SEQ ID NO: 15814 - protein, 18 aa, Artificial Sequence
  Synthetic polypeptide representing artificial human antibody CDR-H3 region
AGDYDILTGYYWVYAFDI

SEQ ID NO: 15815 - protein, 15 aa, Artificial Sequence
  Synthetic polypeptide representing artificial human antibody CDR-H3 region
ARHGRGYSYDLPFDP

SEQ ID NO: 15816 - protein, 16 aa, Artificial Sequence
  Synthetic polypeptide representing artificial human antibody CDR-H3 region
GKASPSVDIAAAGIDY

SEQ ID NO: 15817 - protein, 18 aa, Artificial Sequence
  Synthetic polypeptide representing artificial human antibody CDR-H3 region
AMPPHGYVSNWYTYWFDF

SEQ ID NO: 15818 - protein, 22 aa, Artificial Sequence
  Synthetic polypeptide representing artificial human antibody CDR-H3 region
ARDGPHYDALTASWTYVGIFDV

SEQ ID NO: 15819 - protein, 7 aa, Artificial Sequence
  Synthetic polypeptide representing artificial human antibody CDR-H3 region
TLLQEHL

SEQ ID NO: 15820 - protein, 15 aa, Artificial Sequence
  Synthetic polypeptide representing artificial human antibody CDR-H3 region
AREGEMATRNDAFDI

SEQ ID NO: 15821 - protein, 18 aa, Artificial Sequence
  Synthetic polypeptide representing artificial human antibody CDR-H3 region
AKRDVIFWLGESQGAFDI

SEQ ID NO: 15822 - protein, 19 aa, Artificial Sequence
  Synthetic polypeptide representing artificial human antibody CDR-H3 region
ARLYCSSTSCYNYYYYMDV

SEQ ID NO: 15823 - protein, 10 aa, Artificial Sequence
  Synthetic polypeptide representing artificial human antibody CDR-H3 region
ATWISAHFDN

SEQ ID NO: 15824 - protein, 11 aa, Artificial Sequence
  Synthetic polypeptide representing artificial human antibody CDR-H3 region
ARDRDWEIFDF

SEQ ID NO: 15825 - protein, 8 aa, Artificial Sequence
  Synthetic polypeptide representing artificial human antibody CDR-H3 region
VRGLDIDY

SEQ ID NO: 15826 - protein, 14 aa, Artificial Sequence
  Synthetic polypeptide representing artificial human antibody CDR-H3 region
ATKGGENGYYYWTY

SEQ ID NO: 15827 - protein, 13 aa, Artificial Sequence
  Synthetic polypeptide representing artificial human antibody CDR-H3 region
ARSRVGRWELPDY

SEQ ID NO: 15828 - protein, 17 aa, Artificial Sequence
  Synthetic polypeptide representing artificial human antibody CDR-H3 region
AHIVSSTVTDPDLYFKT

SEQ ID NO: 15829 - protein, 19 aa, Artificial Sequence
  Synthetic polypeptide representing artificial human antibody CDR-H3 region
ARDMVAVSDSSVGEGWFDN

SEQ ID NO: 15830 - protein, 15 aa, Artificial Sequence
  Synthetic polypeptide representing artificial human antibody CDR-H3 region
AKDPNGDYPLGSSDY

SEQ ID NO: 15831 - protein, 11 aa, Artificial Sequence
  Synthetic polypeptide representing artificial human antibody CDR-H3 region
ARDRAWQIYDY

SEQ ID NO: 15832 - protein, 8 aa, Artificial Sequence
  Synthetic polypeptide representing artificial human antibody CDR-H3 region
VTVHDSPS

SEQ ID NO: 15833 - protein, 15 aa, Artificial Sequence
  Synthetic polypeptide representing artificial human antibody CDR-H3 region
ARERIYSYSSRSFDC

SEQ ID NO: 15834 - protein, 10 aa, Artificial Sequence
  Synthetic polypeptide representing artificial human antibody CDR-H3 region
SAVSWLAFDY

SEQ ID NO: 15835 - protein, 21 aa, Artificial Sequence
  Synthetic polypeptide representing artificial human antibody CDR-H3 region
ARTGLYIVGPTWDYYYYGMDV

SEQ ID NO: 15836 - protein, 14 aa, Artificial Sequence
  Synthetic polypeptide representing artificial human antibody CDR-H3 region
ARGWCSPHCYGMGV

SEQ ID NO: 15837 - protein, 13 aa, Artificial Sequence
  Synthetic polypeptide representing artificial human antibody CDR-H3 region
ARVRGRYSYGMDV

SEQ ID NO: 15838 - protein, 14 aa, Artificial Sequence
  Synthetic polypeptide representing artificial human antibody CDR-H3 region
TRGDSDSYYDFSAY

SEQ ID NO: 15839 - protein, 21 aa, Artificial Sequence
  Synthetic polypeptide representing artificial human antibody CDR-H3 region
ARDPVASITIFGVVTRYGMDV

SEQ ID NO: 15840 - protein, 13 aa, Artificial Sequence
  Synthetic polypeptide representing artificial human antibody CDR-H3 region
ARQAITWYNYFDM

SEQ ID NO: 15841 - protein, 15 aa, Artificial Sequence
  Synthetic polypeptide representing artificial human antibody CDR-H3 region
AKDPNGDYVLGSSDS

SEQ ID NO: 15842 - protein, 18 aa, Artificial Sequence
  Synthetic polypeptide representing artificial human antibody CDR-H3 region
ARQRDYTASSGGGWYFDL

SEQ ID NO: 15843 - protein, 23 aa, Artificial Sequence
  Synthetic polypeptide representing artificial human antibody CDR-H3 region
ATEGTTYDDFWGGQPRLNNWFDP

SEQ ID NO: 15844 - protein, 14 aa, Artificial Sequence
  Synthetic polypeptide representing artificial human antibody CDR-H3 region
ARGLRGNYYYGMDV

SEQ ID NO: 15845 - protein, 16 aa, Artificial Sequence
  Synthetic polypeptide representing artificial human antibody CDR-H3 region
VTGQPRISGWWGAYDM

SEQ ID NO: 15846 - protein, 8 aa, Artificial Sequence
  Synthetic polypeptide representing artificial human antibody CDR-H3 region
AKSMDLDY

SEQ ID NO: 15847 - protein, 16 aa, Artificial Sequence
  Synthetic polypeptide representing artificial human antibody CDR-H3 region
ARGRPPFFTSPDVFDL

SEQ ID NO: 15848 - protein, 11 aa, Artificial Sequence
  Synthetic polypeptide representing artificial human antibody CDR-H3 region
AHHTITTVFDY

SEQ ID NO: 15849 - protein, 20 aa, Artificial Sequence
  Synthetic polypeptide representing artificial human antibody CDR-H3 region
AKRAEDGRYGKFGYHGAWGS

SEQ ID NO: 15850 - protein, 15 aa, Artificial Sequence
  Synthetic polypeptide representing artificial human antibody CDR-H3 region
ARDRRLTYSSRYFDY

SEQ ID NO: 15851 - protein, 15 aa, Artificial Sequence
  Synthetic polypeptide representing artificial human antibody CDR-H3 region
GKDPNGNYVLGSSDY

SEQ ID NO: 15852 - protein, 10 aa, Artificial Sequence
  Synthetic polypeptide representing artificial human antibody CDR-H3 region
ARDLDWAFDY

SEQ ID NO: 15853 - protein, 16 aa, Artificial Sequence
  Synthetic polypeptide representing artificial human antibody CDR-H3 region
AKDSGGDPRMAYWFDP

SEQ ID NO: 15854 - protein, 13 aa, Artificial Sequence
  Synthetic polypeptide representing artificial human antibody CDR-H3 region
ARGVVGAEDAFDL

SEQ ID NO: 15855 - protein, 14 aa, Artificial Sequence
  Synthetic polypeptide representing artificial human antibody CDR-H3 region
ARQYSSSSGRHFDY

SEQ ID NO: 15856 - protein, 22 aa, Artificial Sequence
  Synthetic polypeptide representing artificial human antibody CDR-H3 region
AKDAFYFGYCSGGVCPNDALDV

SEQ ID NO: 15857 - protein, 11 aa, Artificial Sequence
  Synthetic polypeptide representing artificial human antibody CDR-H3 region
ARGSGLRGIDP

SEQ ID NO: 15858 - protein, 13 aa, Artificial Sequence
  Synthetic polypeptide representing artificial human antibody CDR-H3 region
ARESGYSYGVFDY

SEQ ID NO: 15859 - protein, 16 aa, Artificial Sequence
  Synthetic polypeptide representing artificial human antibody CDR-H3 region
AKDYMAHTSRPWAFDV

SEQ ID NO: 15860 - protein, 14 aa, Artificial Sequence
  Synthetic polypeptide representing artificial human antibody CDR-H3 region
ARDFPGGGWSYFDY

SEQ ID NO: 15861 - protein, 12 aa, Artificial Sequence
  Synthetic polypeptide representing artificial human antibody CDR-H3 region
ARGGPIDGYNPY

SEQ ID NO: 15862 - protein, 22 aa, Artificial Sequence
  Synthetic polypeptide representing artificial human antibody CDR-H3 region
ARKYTIAAAGILLPSYYYVMDV

SEQ ID NO: 15863 - protein, 10 aa, Artificial Sequence
  Synthetic polypeptide representing artificial human antibody CDR-H3 region
ARGSGFTWNI

SEQ ID NO: 15864 - protein, 12 aa, Artificial Sequence
  Synthetic polypeptide representing artificial human antibody CDR-H3 region
TTGVSAAAHDGY

SEQ ID NO: 15865 - protein, 23 aa, Artificial Sequence
  Synthetic polypeptide representing artificial human antibody CDR-H3 region
ARPGYCSGGSCYIGYYTYYGLDV

SEQ ID NO: 15866 - protein, 15 aa, Artificial Sequence
  Synthetic polypeptide representing artificial human antibody CDR-H3 region
ARGVVSGVVLHYLDL

SEQ ID NO: 15867 - protein, 22 aa, Artificial Sequence
  Synthetic polypeptide representing artificial human antibody CDR-H3 region
ARRAYCGGSCTRNHYQYFGMDV

SEQ ID NO: 15868 - protein, 20 aa, Artificial Sequence
  Synthetic polypeptide representing artificial human antibody CDR-H3 region
ARDPRLDDYWSGYIPGYSDS

SEQ ID NO: 15869 - protein, 21 aa, Artificial Sequence
  Synthetic polypeptide representing artificial human antibody CDR-H3 region
ARTTIAKITIFGVVPRYYFDY

SEQ ID NO: 15870 - protein, 12 aa, Artificial Sequence
  Synthetic polypeptide representing artificial human antibody CDR-H3 region
ARDGGRSTDFEY

SEQ ID NO: 15871 - protein, 12 aa, Artificial Sequence
  Synthetic polypeptide representing artificial human antibody CDR-H3 region
VKDNSGWYYFDS

SEQ ID NO: 15872 - protein, 22 aa, Artificial Sequence
  Synthetic polypeptide representing artificial human antibody CDR-H3 region
AKDSFFFGYCRNGVCPNDAFDV

SEQ ID NO: 15873 - protein, 10 aa, Artificial Sequence
  Synthetic polypeptide representing artificial human antibody CDR-H3 region
GRDTAASVDV

SEQ ID NO: 15874 - protein, 20 aa, Artificial Sequence
  Synthetic polypeptide representing artificial human antibody CDR-H3 region
ARGPYRRILVVVSPMYYFDY

SEQ ID NO: 15875 - protein, 20 aa, Artificial Sequence
  Synthetic polypeptide representing artificial human antibody CDR-H3 region
VRHVSHYYEGRGWHGHAFDS

SEQ ID NO: 15876 - protein, 17 aa, Artificial Sequence
  Synthetic polypeptide representing artificial human antibody CDR-H3 region
ARDAFEWELPARGPADY

SEQ ID NO: 15877 - protein, 14 aa, Artificial Sequence
  Synthetic polypeptide representing artificial human antibody CDR-H3 region
ARGVHGGWYSLFDY

SEQ ID NO: 15878 - protein, 16 aa, Artificial Sequence
  Synthetic polypeptide representing artificial human antibody CDR-H3 region
ARRADCSTTTCQHYDF

SEQ ID NO: 15879 - protein, 12 aa, Artificial Sequence
  Synthetic polypeptide representing artificial human antibody CDR-H3 region
ARSIAATGRADY

SEQ ID NO: 15880 - protein, 13 aa, Artificial Sequence
  Synthetic polypeptide representing artificial human antibody CDR-H3 region
ARGYIGAPGHGDY

SEQ ID NO: 15881 - protein, 10 aa, Artificial Sequence
  Synthetic polypeptide representing artificial human antibody CDR-H3 region
AKDFRDAFDI

SEQ ID NO: 15882 - protein, 13 aa, Artificial Sequence
  Synthetic polypeptide representing artificial human antibody CDR-H3 region
AKCGGSFAWPFEY

SEQ ID NO: 15883 - protein, 17 aa, Artificial Sequence
  Synthetic polypeptide representing artificial human antibody CDR-H3 region
ARAGRITIFGVVNHFDY

SEQ ID NO: 15884 - protein, 22 aa, Artificial Sequence
  Synthetic polypeptide representing artificial human antibody CDR-H3 region
AKDAVHFGYCPNGICPNDAFDI

SEQ ID NO: 15885 - protein, 19 aa, Artificial Sequence
  Synthetic polypeptide representing artificial human antibody CDR-H3 region
ARLLFFGSRKTAPTHAFDI

SEQ ID NO: 15886 - protein, 12 aa, Artificial Sequence
  Synthetic polypeptide representing artificial human antibody CDR-H3 region
AGDTASPSRSDF

SEQ ID NO: 15887 - protein, 14 aa, Artificial Sequence
  Synthetic polypeptide representing artificial human antibody CDR-H3 region
ARRWGYYETSGYYY

SEQ ID NO: 15888 - protein, 16 aa, Artificial Sequence
  Synthetic polypeptide representing artificial human antibody CDR-H3 region
SISYGGPGLPAGGLGY

SEQ ID NO: 15889 - protein, 21 aa, Artificial Sequence
  Synthetic polypeptide representing artificial human antibody CDR-H3 region
ARVFKLSFSEWPQIFDFGFDY

SEQ ID NO: 15890 - protein, 8 aa, Artificial Sequence
  Synthetic polypeptide representing artificial human antibody CDR-H3 region
VRGLDIDY

SEQ ID NO: 15891 - protein, 12 aa, Artificial Sequence
  Synthetic polypeptide representing artificial human antibody CDR-H3 region
VRGETFWSGLDY

SEQ ID NO: 15892 - protein, 12 aa, Artificial Sequence
  Synthetic polypeptide representing artificial human antibody CDR-H3 region
VAGMLVETTFDY

SEQ ID NO: 15893 - protein, 16 aa, Artificial Sequence
  Synthetic polypeptide representing artificial human antibody CDR-H3 region
VKDYTVKTLAEPMFEF

SEQ ID NO: 15894 - protein, 12 aa, Artificial Sequence
  Synthetic polypeptide representing artificial human antibody CDR-H3 region
VKDNSGWYYFDN

SEQ ID NO: 15895 - protein, 14 aa, Artificial Sequence
  Synthetic polypeptide representing artificial human antibody CDR-H3 region
AKAFYSGAGVGMDV

SEQ ID NO: 15896 - protein, 15 aa, Artificial Sequence
  Synthetic polypeptide representing artificial human antibody CDR-H3 region
GKDPNGDYVLGSSDY

SEQ ID NO: 15897 - protein, 22 aa, Artificial Sequence
  Synthetic polypeptide representing artificial human antibody CDR-H3 region
ARGVRRAAAGFLLPVYYYGMDV

SEQ ID NO: 15898 - protein, 17 aa, Artificial Sequence
  Synthetic polypeptide representing artificial human antibody CDR-H3 region
ATVFGSSGWVWRYYFDY

SEQ ID NO: 15899 - protein, 20 aa, Artificial Sequence
  Synthetic polypeptide representing artificial human antibody CDR-H3 region
STSDPSRNFDWFSYDFGMHV

SEQ ID NO: 15900 - protein, 20 aa, Artificial Sequence
  Synthetic polypeptide representing artificial human antibody CDR-H3 region
ARAGDYYDILTGYYKAYFDY

SEQ ID NO: 15901 - protein, 10 aa, Artificial Sequence
  Synthetic polypeptide representing artificial human antibody CDR-H3 region
STWLVSHFDY

SEQ ID NO: 15902 - protein, 12 aa, Artificial Sequence
  Synthetic polypeptide representing artificial human antibody CDR-H3 region
VRVFQKQSLPAF

SEQ ID NO: 15903 - protein, 13 aa, Artificial Sequence
  Synthetic polypeptide representing artificial human antibody CDR-H3 region
VRDRGSTWWFFDS

SEQ ID NO: 15904 - protein, 19 aa, Artificial Sequence
  Synthetic polypeptide representing artificial human antibody CDR-H3 region
ARDFSYVALVVIRHYGMDV

SEQ ID NO: 15905 - protein, 19 aa, Artificial Sequence
  Synthetic polypeptide representing artificial human antibody CDR-H3 region
ASDDRTTYSENSGHSNFDY

SEQ ID NO: 15906 - protein, 14 aa, Artificial Sequence
  Synthetic polypeptide representing artificial human antibody CDR-H3 region
ASRPPQSEVIVFDY

SEQ ID NO: 15907 - protein, 15 aa, Artificial Sequence
  Synthetic polypeptide representing artificial human antibody CDR-H3 region
AREGGTSGKCGYFDY

SEQ ID NO: 15908 - protein, 16 aa, Artificial Sequence
  Synthetic polypeptide representing artificial human antibody CDR-H3 region
TRGPFSSVTEFAWFDP

SEQ ID NO: 15909 - protein, 13 aa, Artificial Sequence
  Synthetic polypeptide representing artificial human antibody CDR-H3 region
ASSMIPPHTRMDV

SEQ ID NO: 15910 - protein, 19 aa, Artificial Sequence
  Synthetic polypeptide representing artificial human antibody CDR-H3 region
ASDDRTNYFVNSGYSNFDY

SEQ ID NO: 15911 - protein, 13 aa, Artificial Sequence
  Synthetic polypeptide representing artificial human antibody CDR-H3 region
ARGRDSSGYYYCY

SEQ ID NO: 15912 - protein, 19 aa, Artificial Sequence
  Synthetic polypeptide representing artificial human antibody CDR-H3 region
AKDSSPTRGGVIVPTPFDS

SEQ ID NO: 15913 - protein, 15 aa, Artificial Sequence
  Synthetic polypeptide representing artificial human antibody CDR-H3 region
ARDYKFADFFYGMDV

SEQ ID NO: 15914 - protein, 17 aa, Artificial Sequence
  Synthetic polypeptide representing artificial human antibody CDR-H3 region
ARGPRANFRGVMFAFDI

SEQ ID NO: 15915 - protein, 26 aa, Artificial Sequence
  Synthetic polypeptide representing artificial human antibody CDR-H3 region
ARGGPIGSESYHMKSNGGLYYYNVDV

SEQ ID NO: 15916 - protein, 18 aa, Artificial Sequence
  Synthetic polypeptide representing artificial human antibody CDR-H3 region
AREFRTGGPWVRQLALDH

(The sequence listing continues in the following parts.)
